United States Patent Application Publication US 2025/0074962 A1 - sequence listing, part 10

SEQ ID NO: 16114 - DNA, 1977 bp, synthetic construct
  misc_feature 1..1977: note = Description of Artificial Sequence: Synthetic coding sequence
  source 1..1977: mol_type = other DNA
atggcctttgaggccctggcttcaatatcccacgtcgcccatgttaccattacaaccaagaccgctgacgggaagtgcgcttatcgcgcatcatactctgatggcaagctcaaggcccccccgaaaccctgcgcaggtaaccaggggacccaaatcactgtagaagatctgttttataacattgccacccgccggaaggctcttaagaatccttcagaggagtatggcaaaatacttgaagttgtcggcagatatagcgtccacaatgcaggaataagctttagcgtgaagaagcaaggagagacagtagccgatgtccggaccctgccaaacgctagcaccgtggacaatataagatctattttcgggaatgccgtctcacgcgagctgatcgagattgggtgcgaagataaaactttagccttcaagatgaatggatatataagtaacgctaactacagtgttaaaaaatgcatcttcctcctctttatcaaccacagactcgtagagagcacatcgctgaggaaagcgattgagaccgtatatgctgcttacttgccaaaaaatacgcatccctttctatatctctccctagaaatctctcctcagaacgttgacgtgaacgttcaccccaccaagcacgaggtccactttcttcatgaagagagtattctcgagagggtgcagcaacacatcgagtccaaactactgggctccaattctagtaggatgtatttcacccaaacccttctccctggcctggccggcccatccggggagatggtgaaatcgactacatctctgactagtagtagcactagcggaagcagcgacaaggtgtacgcccaccagatggtcagaacagactcacgcgagcagaagcttgatgcctttctgcagccattgtccaaacctctctccagccagccacaggccatagtgacagaggataaaaccgacatcagcagcgggagagcccggcagcaagacgaagaaatgcttgaattgcccgcgcctgctgaggttgcggccaaaaaccaatcactggagggtgacaccacaaagggaacctccgagatgtctgagaagaggggccctacatccagcaatccacggaagcggcatcgtgaggacagcgatgtggaaatggtggaggacgattcacgaaaggagatgaccgccgcatgtacgccaaggaggcgcatcattaatttaacctccgttctatctctccaggaggaaatcaatgagcaaggccatgaagtgctgcgagaaatgttacataatcatagctttgtgggatgcgtgaacccacaatgggccctggctcaacaccagactaaactgtacctgttgaatacaaccaagttgtcagaagaactattttaccaaatcttgatctacgatttcgccaattttggtgtcctgcggctctctgaacctgcacccttgttcgacctcgcaatgctcgctctggattccccagagagcggctggactgaagaggacggacctaaggagggcctggcagagtatattgtggagtttctcaaaaagaaagccgaaatgttagcagattatttctctctagagatcgatgaggaagggaacctgatcggcctgcccctcctcattgacaactacgtcccacccttagaaggcctccccatatttatcttgcgcttggcgaccgaggtgaattgggatgaggaaaaggagtgttttgaatctctttctaaggaatgcgcaatgttctattctattcgcaagcaatacatcagcgaggaaagtacgctctcagggcagcaatccgaggttcctggctctattcccaatagctggaaatggaccgtcgaacacatagtttacaaagcccttcgttcacacattctgccacctaagcattttaccgaggacggcaacatcctccagctggcaaacttaccggacctgtacaaagtgttcgagagatgttag

SEQ ID NO: 16115 - DNA, 960 bp, synthetic construct
  misc_feature 1..960: note = Description of Artificial Sequence: Synthetic coding sequence
  source 1..960: mol_type = other DNA
atgattgagaactgccttgacgccaagtctacctccattcaggtgatcgttaaggaaggtggactgaagttaattcaaattcaggacaatggcacgggaattaggaaagaggacctagacatcgtttgtgaacggtttaccacctccaagttgcagagcttcgaagatctggctagcatctccacctatggtttccgcggagaagctctagcgagtatttcccacgtagcgcacgtgactattactactaagaccgcagatggcaagtgcgcatatcgggccagctactccgacggcaagctcaaggctccaccgaaaccctgcgccggaaatcaaggaacacaaattaccgtggaggatctgttctacaatattgcaacacgcaggaaagccctgaaaaacccttcagaggagtacggtaagattctggaagtagttggcagatattctgtccataatgctggtattagtttctctgtgaagaaacagggagaaactgttgccgacgtgcgtacgctcccgaacgcgtccactgtcgataacatacgatctattttcggcaacgcggttagtagggaactgatcgaaattgggtgcgaagacaagaccctggcgtttaaaatgaacggctacatcagtaacgctaattacagtgtgaagaaatgcatattccttctatttataaatcaccgccttgtggaatcaacctcccttcggaaggctatcgagactgtctacgctgcctacttgcctaaaaacacccaccctttcctgtatctgtccctggagataagccctcagaacgtggacgtaaacgtacatcctactaaacacgaggttcatttccttcacgaggagtcaattttggaacgcgtccaacagcacatcgagtcaaagttactgggttcgaatagctcccgaatgtacttcacacaaaaggaaacctctgggcgcttttag

SEQ ID NO: 16116 - DNA, 1548 bp, synthetic construct
  misc_feature 1..1548: note = Description of Artificial Sequence: Synthetic coding sequence
  source 1..1548: mol_type = other DNA
atgaatggttacatcagtaacgctaactattctgtcaagaagtgcatcttcctcttattcatcaatcatcgacttgtggaatccacatcactaagaaaggcgattgaaacggtgtatgctgcttaccttcctaagaatacccatccgtttttgtacctttctctcgagatatcaccccagaacgtggatgttaatgttcatccaactaagcacgaggtccattttctgcacgaggagagcatcttagaacgcgtgcaacaacacattgagagcaagctgctgggatctaatagctcaagaatgtacttcacgcagacgttactcccagggctggccggcccatccggcgagatggtgaaaagcactacttcacttacaagtagcagcacctcagggagctccgacaaagtctacgcccaccagatggtgaggactgactcaagggagcaaaaactcgatgcattcctgcagcccttgtcaaagccattatcctcacagccacaggctattgtgactgaggacaaaaccgacattagctcaggccgggcccgccagcaagacgaggaaatgctagagttgcccgcgccagcggaggtggcagctaagaatcagtcactggagggagatactactaaagggacctccgagatgagtgagaaaaggggacccacaagctcgaatccccgcaaaagacaccgagaggatagcgacgtggaaatggtggaagatgactctaggaaggagatgacagccgcatgcaccccccggagaaggatcattaacttaacatctgtattatctctgcaggaggagattaatgagcagggacatgaggttctgcgagaaatgctgcacaaccattcatttgtaggctgcgtcaaccctcagtgggccctggctcaacaccaaacaaagctgtacctgctgaacacgacaaaactgtctgaggaactgttttatcaaatcctgatttacgatttcgccaattttggggtgctgcgattgagcgagcccgcaccgctctttgatctagctatgctcgcactggacagccccgagagtgggtggaccgaggaagacgggcccaaggagggactcgccgagtatatcgtagagttcttgaaaaagaaagctgaaatgcttgctgactatttcagcttggagattgacgaagagggtaatcttatcggtctacctctgcttatcgacaactacgtgccgcctctcgaaggtttacccattttcattcttcggctggccacggaggtgaactgggacgaggagaaggaatgctttgaaagcttatccaaagaatgcgccatgttttacagcatccggaagcagtatatatcagaagagtccacactcagcgggcagcaatccgaggtacctggatccatccccaactcctggaagtggactgtagagcacatagtatataaggctttgaggagtcatatcctcccacccaaacatttcaccgaggatggcaacattttacagctggccaacctcccagacctgtataaggtcttcgagcgctgctag

SEQ ID NO: 16117 - DNA, 2040 bp, synthetic construct
  misc_feature 1..2040: note = Description of Artificial Sequence: Synthetic coding sequence
  source 1..2040: mol_type = other DNA
tgaaggctggacgaaacagtcgttaatagaatcgccgcgggcgaagtgatacagcgtccggcaaatgcaattaaagagatgattgaaaactgtttagacgcaaaaagtacctctatccaggtaattgtgaaggagggcggactgaagctgatccagatccaggacaatgggacgggaattcgcaaagaagacctggatatcgtgtgcgaacggttcacgactagtaagttgcagtcctttgaagacctcgcttcgatttcaacatacggcttcaggggcgaggcgttggcctccattagccatgtggcacatgtcactatcactacaaagactgccgatggcaaatgtgcgtacagagcatcttacagcgatggaaagctgaaggctccccccaagccgtgtgcaggaaatcagggtacacagataaccgtagaagacctgttctacaacattgcaacaagaaggaaggctctcaaaaacccctccgaagaatatggcaagattctggaggtcgtaggaaggtacagtgtgcacaatgctggcatctccttctccgtgaagaaacaaggcgagactgtggcagatgttagaaccctgcccaacgcttctactgtagacaatatccgttccattttcggaaatgctgttagtagggagttgattgagattggctgtgaggacaaaacactagcattcaagatgaacgggtatatatccaatgcaaattactcagtgaaaaagtgtatctttctgctgtttattaaccatcgactggtcgagtctacctcgctgcggaaggccatcgagacagtgtacgctgcttacctgcccaagaacacgcacccattcctgtatctgagtctcgagatttccccacaaaatgttgacgtcaacgtgcaccccaccaagcacgaagtgcacttcttacacgaagagagcattctggagcgggttcagcagcatatcgagagtaagctcctgggttctaactcctcacgtatgtattttacacaaaccctcctccctgggctcgcaggccctagcggagaaatggttaagtcaaccaccagtctcacctcatctagtacgagcggctcaagcgataaagtttacgcacatcaaatggtccgcacggacagtagggagcagaagttggatgccttcctccagcccttgagtaagccactgtcatcacagccacaggccattgtaacagaggacaagaccgatatatcttccggccgggcccgtcagcaagatgaggaaatgttggaactgcctgcccctgctgaagtggcagcaaagaatcagagccttgaaggcgacacaactaagggaaccagcgagatgtctgaaaaaaggggcccaaccagcagcaacccgagaaaaagacaccgagaggattctgacgtggaaatggtagaggatgactctagaaaagagatgaccgcagcatgcacacctcggcgaaggataattaacctcacttccgtcttgtctctgcaagaagagatcaatgagcaaggacacgaagtccttcgggagatgctgcacaaccattccttcgtgggctgcgtcaacccgcagtgggcactggctcagcaccagacaaagttgtatctgctgaatacgactaaattgtccgaagaactgttttaccagatcctgatctacgatttcgcaaattttggagtgctgcgactgtccgaacctgctcctctttttgacctggcaatgctcgccctggactccccggagagcggctggacggaagaagacggcccaaaagaaggcctggcagaatacatcgtggaatttctgaaaaagaaagctgagatgctcgccgattattttagtttagagattgatgaaagcgaagtcccaggttcaatacccaattcctggaagtggactgtcgagcacatagtgtacaaagcccttaggtctcatattctgcctccaaaacactttactgaagatgggaacattctacagctggctaaccttcctgacttgtataaggttttcgaaaggtgctag

SEQ ID NO: 16118 - DNA, 1548 bp, synthetic construct
  misc_feature 1..1548: note = Description of Artificial Sequence: Synthetic coding sequence
  source 1..1548: mol_type = other DNA
atgaatggctacataagtaatgctaactattcagtaaagaagtgtatctttttgctgttcatcaatcatagacttgtggaaagcacctcccttagaaaggccatcgagaccgtgtatgccgcttatctgcccaagaatacacatccttttctgtacctgagtctggaaataagccctcagaatgtcgatgttaacgtgcatccgaccaagcacgaagttcacttcctgcacgaagagtctatcctggagcgcgtacagcagcacatcgaaagtaaactgcttggcagtaattcttctagaatgtattttacccagacattgttgcccggcctggccggacctagcggggaaatggtgaaatcaactacctctttgacgtcatcatcaacaagcgggtccagtgacaaagtgtatgcacatcaaatggtcagaactgacagccgcgagcagaagttggacgcctttttgcaaccattgtctaaaccactcagcagccagccacaggcaatcgtgactgaagataaaaccgacatttcttcgggacgagcccgccagcaggacgaggagatgctggaattgcctgccccagcagaagttgcggcgaaaaaccagtctttggaaggtgatactacaaaaggaactagcgagatgtccgaaaagcgaggacccacaagcagcaatccacgcaagaggcaccgcgaggatagcgatgtggagatggttgaggacgactcccgcaaagagatgacagccgcctgtacccctcgtcgaaggatcataaacttaacaagcgtgttgtccctccaggaggaaattaacgagcaggggcacgaggtgctgagggagatgctgcataaccatagcttcgtgggctgcgtgaatccccagtgggcccttgcacagcaccaaaccaagctgtacctgctcaatacgactaagctaagtgaggaactgttctaccagattctaatttacgacttcgccaattttggtgtacttaggctgtctgagccagcacccctgtttgatctggctatgctggcgctcgactcccctgagtctggatggaccgaagaagacggaccaaaagaaggactggccgagtacattgtcgagtttctgaagaagaaagccgagatgttagcggactacttttcgctggagattgacgaggagggaaatctcatcgggcttcccctgctgatcgataactatgttcccccacttgagggcctgccgatcttcattctacgcctggcaaccgaggtgaattgggacgaggaaaaggagtgtttcgagtcactgtctaaggagtgtgcgatgttctactcgatcaggaaacagtatatctctgaagagtccacattatcggggcagcagagcgaggtgccggggtctatccccaatagctggaagtggaccgtggagcacattgtgtacaaagccctccgcagccacatactccctcccaagcacttcacagaagacggcaacatccttcaactcgcaaacctcccagatttgtacaaagtcttcgaaagatgctag

SEQ ID NO: 16119 - DNA, 1383 bp, synthetic construct
  misc_feature 1..1383: note = Description of Artificial Sequence: Synthetic coding sequence
  source 1..1383: mol_type = other DNA
atgaatggttatatcagcaacgcaaactactccgtcaagaagtgcatatttcttctttttattaaccatcgcctggttgagtcgactagcctgcggaaagccatcgagacagtttatgcggcctacttgcccaagaacacgcaccctttcttatacctgtcattggagatctcgccgcagaacgtggacgttaatgttcatcccaccaagcacgaggtgcacttcctccatgaagagtcaatcctggaaagagtccaacagcacatagagtccaaactgctgggatccaattcctcccggatgtacttcacacagacattgctgccgggcctcgcaggaccatcaggcgaaatggtgaagtctaccacatctctgacttctagcagcactagtgggtccagtgataaagtctatgcccatcaaatggtgcgaaccgactccagagagcagaagctggacgctttcctgcagcctcttagtaaaccacttagctctcagccccaggctatcgtgaccgaggataaaaccgatatctccagcggccgtgcgcgacagcaggacgaggagatgctcgagttgcccgcccctgccgaagtagcagcaaagaaccagtcactggaaggagataccacgaaaggtacgtccgaaatgagcgagaaacgagggcctacctcaagtaatccaaggaagcgacaccgagaagatagcgacgtggaaatggtggaggacgactccagaaaggaaatgaccgcggcatgcacgccaagacgccgaatcatcaacctgacatcagtgcttagcctgcaggaagaaatcaacgaacaggggcatgaggtgctgagagaaatgctccacaaccacagttttgtaggatgcgtcaacccgcaatgggcattggcacagcaccagacaaagctgtatctgctgaataccactaagctgtccgaagaacttttctaccagatcttgatatatgactttgcaaattttggcgtgctgaggctcagtgaacccgctccattatttgacctggcgatgctggcattagactcccctgaatccggctggacagaggaagacgggccgaaggaggggttagcagagtacattgtggaatttcttaaaaaaaaagccgaaatgctggccgactattttagccttgagattgacgaggagggcaaccttatcggcctccccctactgattgataactacgtgccgccacttgaaggcctgccaattttcattctccgcctggccacagaggttaattgggatgaagaaaaggagtgtttcgaatccctgtccaaagaatgtgccatgttttacagtatccgcaagcagtatatctccgaagagtccactttaagcgggcagcagtag

SEQ ID NO: 16120 - DNA, 843 bp, synthetic construct
  misc_feature 1..843: note = Description of Artificial Sequence: Synthetic coding sequence
  source 1..843: mol_type = other DNA
atgattgagaattgcttggacgcgaagagcaccagtattcaggtgattgtgaaggaaggtggcttaaaactcattcagatacaagataacggcacaggcatacgaaaggaagaccttgacatcgtgtgtgagcgcttcacaaccagcaagttgcagagttttgaggacctggcctcaatatccacttatggctttcgcggcgaagctttggcaagtatttctcacgtcgcccacgtcaccataactacaaagacagcggatggaaaatgcgcgtacagagctagttatagcgacggcaagctgaaggcaccaccgaaaccttgtgcaggaaatcaagggacacaaattaccgtcgaggacctgttctacaacattgctactcggcggaaggcactcaagaacccatccgaggaatatggaaaaattcttgaagtagtgggccgctactctgtgcacaacgcagggatcagctttagtgtcaaaaagcagggagagaccgtcgccgatgtccgcacgcttccaaacgcttcaacagtggataacatcaggtcaatcttcgggaatgccgtatctagagagctaattgagattggctgtgaagataaaactcttgcctttaaaatgaatggttatataagtaacgctaactactccgtgaagaagtgcatttttttgctgttcatcaatcaccgtctggtcgagtccactagcctgagaaaggccattgagaccgtgtacgctgcatacttgcccaaaaacacacacccattcctgtacctgcgactctgttaccaggatctgctagcacccctgggcagatggttgaatccgcagcaggtttag

SEQ ID NO: 16121 - DNA, 1548 bp, synthetic construct
  misc_feature 1..1548: note = Description of Artificial Sequence: Synthetic coding sequence
  source 1..1548: mol_type = other DNA
atgaatggctacatcagcaacgccaactattccgtcaaaaaatgcatcttccttctatttattaatcatagacttgtggagtcaacatcactccgaaaggcgatcgaaaccgtgtatgctgcgtacctcccgaagaatacccatccctttctgtacctctccctagagatttctccacagaatgtcgacgtgaatgtgcatccgactaaacacgaggtgcatttcttgcatgaagaatctatcttagagcgggtccagcagcatattgagagtaaactcttgggaagtaattcctcccgcatgtatttcacccaaactctgctgcctggtctcgcaggacctagcggggagatggtgaaaagcacgacatccctgaccagcagctctaccagcggaagctcagacaaggtctatgcccatcagatggtgcgcacggacagccgggagcagaagctggatgcattcttacagcccctgagcaaaccactctccagccaaccccaggcaatagttacagaggacaagacggacatctctagcggccgcgcaaggcagcaagacgaggaaatgctcgagctccctgcgcccgcagaagttgccgctaagaaccaatcgctggagggggatactacaaagggaacatctgagatgtcagagaaacgcggtcccacctccagcaacccccgaaaaaggcatcgcgaagacagtgacgtcgaaatggtagaggatgactcgagaaaagaaatgacagctgcttgtaccccccgccggcgtatcatcaacttgaccagcgtactgagccttcaggaagagatcaacgagcaggggcatgaggtccttagggaaatgctgcacaatcactcttttgtggggtgtgtgaatcctcagtgggccctagcccagcatcagaccaaactatatctgcttaataccaccaaactgtccgaagagctgttttatcagatattgatatatgacttcgcaaacttcggggtgctgaggctgagcgaaccggcaccgctgtttgatctcgccatgctagctttggactctcctgagagtggatggacggaagaggatggtccaaaagaaggactggcagaatacatcgtcgagtttctgaagaaaaaggccgagatgctggcggattacttctcattggagatcgatgaagagggtaacctgattggactcccactcctaatagacaattacgttcccccactggagggcctgcctatctttattctgcggctggcaactgaagttaattgggacgaggaaaaagagtgcttcgaatctctgtcaaaagagtgcgctatgttctattccattcggaagcagtacatctcagaagaaagtacactgtccggtcagcaatcggaggtacccggaagtatcccaaactcctggaaatggaccgttgagcacatcgtttacaaggcactgaggagtcacatcctaccgcctaagcacttcacagaggatgggaatatcctgcagcttgctaacctgcccgacctgtataaagttttcgaacgttgctag

SEQ ID NO: 16122 - DNA, 4290 bp, synthetic construct
  misc_feature 1..4290: note = Description of Artificial Sequence: Synthetic coding sequence
  source 1..4290: mol_type = other DNA
atgatcaaatgtctgagtgtggaggttcaggccaagttgagaagcggcctagccataagctcattgggacagtgtgtggaggagttggccctcaactctatcgatgccgaagccaaatgcgtagctgtccgggtaaatatggaaacttttcaggtccaggtaatcgacaatggattcggaatgggttcagacgacgtggaaaaagtcggcaacagatactttacctctaagtgccattcagtgcaggacctcgaaaacccccggttttacggatttcgcggagaggccctcgctaatatcgccgatatggcaagtgccgtagaaatctcatcaaagaagaatcgaactatgaagacattcgtgaagttgtttcaaagtggcaaagccctcaaggcatgcgaggcggatgtgactcgggcttccgccgggaccacggtgaccgtttacaatcttttttatcagctacccgttcggagaaagtgtatggacccacggctggagttcgaaaaggtcaggcaacgtattgaggccttaagcttgatgcaccctagtataagtttcagcctgcggaatgacgtctctgggagcatggtgctccagcttccgaagacaaaggacgtttgttctagattctgtcagatctatggccttggcaagtctcagaagctcagggaaatcagttttaaatacaaggaattcgagctctcaggatatatttcttctgaagctcattacaataagaacatgcagttcttgtttgtgaacaaaagacttgtattacgaaccaagctccacaagctgatcgacttcctgctccgaaaagaatccatcatctgtaaaccgaaaaacgggccaacttctaggcagatgaacagttccttaaggcatcgctccaccccagagctttatggaatatatgtgatcaacgtgcagtgtcagttttgtgaatacgatgtgtgcatggagcccgctaagaccctgattgaattccagaactgggatacgttgttgttttgcattcaagagggagtcaaaatgttcctgaagcaagaaaagctgtttgttgaactgagcggggaggacataaaagagttttctgaggacaacggtttctcactgttcgatgctacgttgcagaaacgagtgacaagcgacgaacgttcgaatttccaggaggcctgcaacaatattttagactcttacgaaatgtttaaccttcaatctaaagccgttaaacggaagacgacagctgagaatgttaacactcaatcttccagggacagcgaagccacacgaaaaaacacaaatgacgcgtttctgtacatttacgaaagtggaggcccaggtcatagcaagatgacagaaccatctctgcagaacaaggacagctcctgtagtgagtcaaagatgttggagcaggaaaccatcgtggcatcggaggctggtgagaacgagaagcacaagaaaagctttttagaacactcctccctggagaatccctgcggaacctcgctggagatgttcctgagcccgttccagaccccatgccacttcgaagaatctgggcaggatctggagatctggaaagagtccaccacggtgaacgggatggccgccaacattctgaagaacaatagaatccagaatcaacccaaaagattcaaggatgccacagaagtgggctgccagcccctacctttcgccaccaccctatggggggtccattccgctcaaactgagaaggaaaaaaagaaagaaagcagcaactgtggccgcagaaacgtgtttagctacgggcgggtaaagctgtgcagcaccggatttattacacacgtcgtgcaaaacgagaaaacaaagtcaaccgagacggaacattcattcaaaaactatgttcgccccggcccaacaagggcccaggaaactttcggtaataggacgcgacactctgtcgagactcccgacatcaaggatctggcaagcacattgtcaaaggagagcggccagctcccaaataagaagaactgtagaactaatatttcctatgggcttgagaacgaaccaaccgctacctatacaatgttttctgcattccaggaagggtctaagaaatcccaaacggactgtattttgagtgatacttccccaagttttccatggtacaggcacgtaagcaatgatagtcgtaaaacggataagctgatcggattcagtaagccaattgtgaggaagaaactgagcttgtcaagccagctgggaagcctggagaagttcaaacggcaatatggaaaagtcgagaaccctctggacaccgaagtagaggagagcaacggagtgacaacgaacctttctctgcaagtggaacccgatatcctattgaaggacaaaaatcgactcgaaaactccgacgtgtgtaagatcacaacaatggaacattcagacagcgactccagttgtcagcccgcatctcacatcctgaattcagaaaagttcccattctctaaagatgaggattgcctcgagcaacaaatgcctagtcttagggaatcccctatgaccctcaaggagctgtccctgttcaatcgtaagccactggatctggagaaaagcagcgaatctctcgcatccaagctatctaggcttaagggctctgagagggagacccagacaatgggcatgatgagtaggttcaacgaattaccaaacagtgacagttctagaaaggacagtaaattgtgctctgtcctcacccaggacttttgtatgctgttcaacaataaacatgaaaaaaccgaaaacggcgtcattccaacctcggacagcgctacgcaggataatagtttcaacaaaaactcaaagactcattctaattctaacactaccgagaattgcgtaatctccgagacccccctcgtgctaccatataataattcaaaagtaaccggtaaggatagtgacgtcctcattcgcgctagcgaacagcaaattggctctctggactccccttctggtatgctgatgaatcccgtggaagatgcaacaggtgatcagaatggcatctgctttcaatcagaggaaagtaaggctcgcgcctgtagtgagactgaggagagcaatacatgctgctctgattggcagcgccattttgacgtggcattgggccgcatggtgtacgtgaataagatgaccggtctgtccacttttatcgcacccaccgaagatattcaagccgcctgcaccaaagatctgacaactgtcgccgtcgacgtcgtgctggagaacggatcacaataccgatgccagcctttcagatcagaccttgtgcttccgtttctgccaagagcccgagccgagcgcacggtcatgaggcaggataacagggacactgtggatgacaccgtttcctccgagtcccttcaatcacttttctcagaatgggacaacccagtgtttgctcgttaccctgaggtggcggtggacgtgagcagcggccaggcggaatctctggccgtaaaaattcacaacatcctgtatccctaccgcttcacgaaaggtatgatccatagcatgcaagtgttgcagcaagtcgataataaattcattgcttgcttaatgtcaaccaaaaccgaagagaacggtgaggcagactcatacgaaaagcagcaggctcagggcagcggaaggaagaagttgctgagctccaccctgattccaccactcgaaatcaccgtgaccgaggaacagcggcgcctgctctggtgttatcataaaaacctggaagatcttgggctcgagtttgtgttccctgataccagtgactccctagtgttagtgggcaaggtgccactctgctttgtggagcgggaagctaacgagctgcgcagaggtagatccacagttactaagagcattgtcgaggagttcatacgggagcagcttgaacttttgcagactactggcgggatccagggtaccctaccactgacagtccaaaaagtactggcctcccaagcctgccatggggccatcaaatttaacgacgggctttctctgcaggaaagttgccggttgattgaggcactgagttcttgtcaactgccgtttcagtgcgcacacggacggccgtcaatgctgcctctggccgacatcgaccacttagaacaggaaaaacagattaagcctaacctgaccaagttaagaaagatggcccaggcatggaggctcttcggcaaggctgaatgcgacacacggcaatcattgcagcagtctatgcccccatgcgagcctccttag

SEQ ID NO: 16123 - DNA, 4362 bp, synthetic construct
  misc_feature 1..4362: note = Description of Artificial Sequence: Synthetic coding sequence
  source 1..4362: mol_type = other DNA
atgattaaatgcctctccgtggaggtccaagcaaagttgcggtccggcctggcaatatccagcctaggtcagtgtgtggaggagttggctctcaacagtatcgacgccgaagccaaatgcgtggcggttcgggtgaatatggaaacgttccaggttcaggtgatcgacaatgggttcggtatgggttcagatgatgtagagaaagtggggaataggtatttcactagtaaatgccactctgtgcaagacttggaaaaccctcggttttatggcttcagaggcgaagccttagcgaatatagctgacatggctagcgccgtcgagatcagctctaagaaaaatcgcactatgaagacatttgtgaagctcttccaatctggaaaggccttgaaggcctgcgaggccgatgttactcgcgccagcgccgggactaccgtgacagtatataacctattttaccagctgcccgtcagacggaagtgtatggatccccgactggagttcgagaaggtgagacagcggattgaggcacttagcctcatgcacccaagcataagcttttccttgagaaatgacgttagcgggagtatggtgctgcagctgccaaaaacgaaggatgtatgctcccgcttttgccagatctatggcttaggtaaatctcagaaactcagagaaattagttttaagtataaagaattcgaactgtccggatacattagttcagaggcacactataataaaaacatgcaattcctgttcgtaaataaacggcttgttctccggacaaaactgcataagcttattgattttctgctgcgaaaagagagcattatttgcaagcccaagaacggccctactagcagacaaatgaactcttcactcagacaccggagtactccagagctttacgggatctatgtgatcaatgtgcagtgtcaattctgcgagtacgatgtctgtatggagcccgccaagactctgattgaatttcagaattgggacacgctgctattttgtatccaggaaggggtgaaaatgtttcttaagcaggagaaactgtttgtggagctctcaggagaagatatcaaagaattctctgaagataacggtttttctctgttcgatgcgacattgcagaagcgagtcacttccgacgagcgctcaaattttcaggaagcgtgtaataatatcctggactcttatgaaatgttcaacctccagagtaaggccgtcaagcgtaagaccacagcagagaacgtgaatactcagtcgtctcgcgattctgaggccacccgcaagaatacaaatgacgctttcctgtacatttacgaaagcggaggccctggacactctaagatgacagaaccaagtttacagaataaggactcttcttgcagtgaaagtaaaatgctcgagcaggaaactatcgtagcctcagaggccggagagaacgaaaagcacaagaaatcctttctagagcattcttcacttgaaaatccatgtgggacttctttagagatgttcctgtcgcctttccaaactccgtgccactttgaggaaagtgggcaagatttggaaatctggaaggaatccacaaccgtgaatggcatggctgccaacattctgaaaaataataggatccaaaatcagcctaaaaggtttaaggatgctacagaggttggctgccagccattacccttcgcaacaacactttggggggtgcattcagctcagaccgagaaagagaaaaaaaaagagtcctctaattgtggccgacgaaacgtattcagttacggacgcgtgaaattatgctccacagggtttatcacacacgtcgttcagaatgagaagaccaagtccaccgagactgaacactccttcaaaaactacgtcagaccaggaccgactcgcgctcaggaaacatttggcaacagaacaagacattccgtagagacaccagatattaaggacctggcttccactctttccaaagaatccggacaactgcctaataagaagaactgtcgtacaaacatttcgtatggactggagaacgagcccactgctacctacacaatgttctctgccttccaggaagggagcaagaaatcacagactgactgcatcctttcagatactagtccaagttttccatggtaccgccatgtctccaatgatagccggaagaccgacaaactgatcggattttcaaaacctatcgtgcggaaaaaactcagcctgagttcccaactgggttctttagaaaaatttaaaaggcaatacggcaaggtcgagaaccctttggataccgaggtggaggagtctaatggagttaccaccaacctgagcctgcaggttgagcctgacatactgctgaaggacaaaaatcgcctggagaattccgatgtgtgtaagattactacaatggagcactccgactccgatagctcttgccaacctgcttcgcacattctgaattcggaaaagtttccattttcaaaagacgaagattgtcttgagcagcaaatgcccagcctgcgcgaaagtcccatgaccctgaaagagttgtcgctttttaatcgtaaaccactggatctggagaagagtagcgaatctctggcttctaagttatctcgtctgaaggggagtgagcgggagacgcagacaatgggtatgatgtcacgttttaacgagctccctaattctgatagttccaggaaggattctaaactttgttctgttctgacccaagatttctgcatgttgtttaataataagcacgagaaaacagaaaatggggttatcccaactagtgatagtgccacccaggataactcttttaataagaattctaaaacacatagcaatagtaatacaaccgagaactgcgtgatatcggagactcccctcgttctcccttacaataattccaaggttactggtaaagactccgatgtgctgattcgcgcgagcgaacagcagatcggttctctggactcccctagcgggatgttgatgaatccagtggaagatgcaaccggcgatcaaaatggcatttgtttccaatccgaggaatccaaagcacgagcctgctctgaaacagaggaatctaacacctgctgtagtgattggcagcggcactttgatgtggcactgggtcgaatggtgtacgtcaataaaatgaccggtttgtctaccttcattgcccccactgaggacatccaggcagcatgcactaaggacctgacaactgtggcagtggatgtcgtgttagaaaatggtagccaataccggtgtcaaccttttcgatctgatctggtactccccttccttcctagggcacgggcagaacgcaccgtgatgagacaggacaatcgggacacagtggatgatactgtatcctctgagagtctgcaatccctgttctccgaatgggacaacccggtgttcgcccggtatccggaggtcgctgtagatgtaagtagcggtcaagctgagtctctcgccgtcaagattcacaatattttatacccttaccgtttcactaaagggatgattcacagcatgcaagtgttgcagcaggttgataataagtttatcgcatgtttgatgagtacaaagactgaggagaacggggaggctgggggcaacctgctggtgctcgtcgatcagcacgccgcccacgagagaattcggttggagcagctcatcatcgattcgtatgaaaagcaacaggcccagggatccgggcgaaagaaactgctcagtagtaccctcatcccaccactagagataacagtgacagaggaacagagaaggctcctatggtgttaccacaaaaatctcgaggatctgggcctggagttcgtattccctgatacatccgattcactggtgcttgtaggcaaggttcctctgtgctttgtcgagcgcgaggccaatgagctgagaagggggcgctcaactgtcacgaaaagcatcgtggaggaatttatcagagagcagctggagctgttgcagaccactggggggatccaggggacactacccctgactgtacagaaggtgcttgcctctcaggcctgccacggtgcaattaaattcaatgacggactgtctttgcaggaatcgtgtaggttaatcgaggctctctctagttgtcagctgccattccagtgcgcccacggtagaccatctatgctgcccttggctgacatagatcacttggagcaggagaagcaaataaaacccaacctaacgaaactaagaaagatggcccaggcatggcgcctctttgggaaggctgagtgcgacactcgccagagtctacaacagtcaatgcccccatgcgaacccccatag

SEQ ID NO: 16124 - DNA, 1176 bp, synthetic construct
  misc_feature 1..1176: note = Description of Artificial Sequence: Synthetic coding sequence
  source 1..1176: mol_type = other DNA
atggtatacgtaaataagatgacaggtctgtccacatttatcgcccccacagaagatatccaggctgcctgcaccaaggacctgaccactgtggcggtcgatgtggtcctagaaaatggatcgcagtaccgctgtcagcccttccggtctgatctggtgctcccatttctgccacgggcccgggcagagcgcacagtgatgcggcaggataatcgcgatactgtggacgataccgtatccagcgaatcgctccaatccctcttctccgagtgggacaatcctgtctttgccagatacccggaggtagcagtcgacgtcagctccggccaggcagagagcctggcagtgaagatccacaatattttgtacccctacaggttcaccaagggtatgattcattccatgcaggtgctgcagcaggttgacaataagtttatcgcctgtctaatgagcaccaagaccgaagagaacggagaggccggcggcaacctattagtactagtggaccagcatgccgctcacgagcgaattaggctggaacagctcattatagattcttatgaaaagcagcaggcacaaggcagcggacgtaagaagctcctttccagtaccctgatcccgccacttgagatcacggtaactgaggagcagcggaggctcttgtggtgttatcataagaatctcgaagatctgggtttggagttcgtgttcccggatacttctgatagcctggtgctggtcgggaaggtcccgctgtgctttgtcgagcgcgaggcgaatgaattgcgccgggggaggtccacagttacaaagagtatcgtcgaactactccagaccacaggtgggattcagggcaccttgcctctgacggtacagaaggtcttggcaagtcaggcttgccatggagctatcaaattcaacgacggtttgtccctgcaggagtcttgtcggctgatagaggccctctcttcctgtcagctgcctttccagtgcgctcatggccggccgagcatgctgcctttggccgatatcgatcatctcgaacaggagaagcaaataaaaccaaaccttaccaagctgaggaaaatggcccaggcctggcgattgtttggcaaagctgagtgcgatacacgacagtcactgcagcagtccatgcccccttgtgagccaccatag

SEQ ID NO: 16125 - DNA, 597 bp, synthetic construct
  misc_feature 1..597: note = Description of Artificial Sequence: Synthetic coding sequence
  source 1..597: mol_type = other DNA
atgaaccctgtggaagatgcaactggcgatcagaatgggatttgtttccagagcgaggagtctaaggcccgcgcatgtagtgagaccgaggagagcaacacttgctgttctgactggcaaagacactttgacgtagctctcggacggatggtctacgtgaacaagatgactggcctcagcaccttcatcgcacccaccgaagacatccaggccgcatgcaccaaggatctgacgacagttgcggtggatgtagtcctggagaatggttcacaataccgatgtcagccctttcgaagcgatctagtgctgccatttttgcctagggctcgggccgagcgcacagtcatgcgccaggacaatagggacacggttgatgataccgtctcttccgagtcactacagagtctattctcagagtgggacaaccctgttttcgcccggtatccagaggtgcttcagcaggttgacaataagtttattgcctgtctgatgtcaaccaaaaccgaggaaaacggagaggcagccgaactcatgatgttgcaggatccatgctgccggcagagcagagaagacgagaaccacgagttctcactgtag

SEQ ID NO: 16126 - DNA, 489 bp, synthetic construct
  misc_feature 1..489: note = Description of Artificial Sequence: Synthetic coding sequence
  source 1..489: mol_type = other DNA
atgatcaagtgtcttagcgtggaagtccaggcaaagcttcgctccggccttgcaatcagttccctgggtcaatgtgtggaggaactcgctctaaatagtatcgacgctgaggccaaatgtgtggccgttagagtaaatatggagaccttccaagtgcaggtgatcgataatgggttcggtatggggagcgacgatgtcgagaaagtcgggaataggtactttaccagtaagtgccactctgtgcaagatctggagaatccccggttttacgggttcaggggcgaagctcttgcaaacattgcagacatggcttcagcagtggagatttcaagtaaaaagaaccgcaccatgaagacatttgtgaagctgttccaaagcggtaaggcgctgaaggcttgtgaggctgatgttaccagggcaagtgcaggaaccaccgtgactgtctacaatctcttctatcagctcccagtgaggcggaagtgtatgtag

SEQ ID NO: 16127 - DNA, 4362 bp, synthetic construct
  misc_feature 1..4362: note = Description of Artificial Sequence: Synthetic coding sequence
  source 1..4362: mol_type = other DNA
atgatcaaatgcctgagcgtggaggtgcaggccaagctgcgctctgggctagccatcagttctttaggtcaatgcgtagaagagctggcgttaaactccatagacgcagaagcaaagtgtgtcgccgttagagttaacatggaaaccttccaggtccaggtcatcgataatggctttggtatggggtctgatgatgtggagaaggtgggaaaccgttattttacgtccaagtgccactcagtacaggatctggaaaatccaaggttttacggattcaggggtgaggcactagcaaacattgcagacatggccagtgcagtggaaatctcatccaagaagaatagaaccatgaaaacattcgtaaaactgttccaaagcggcaaagctcttaaagcctgcgaagccgacgtgactcgcgcctctgcagggaccacagtgactgtgtataacctgttctaccagctgccagttcgacgtaaatgcatggaccctagactcgagtttgaaaaggtcaggcagcgtattgaggctttgagcctcatgcaccccagcatttccttctcattgagaaacgatgtcagcggctcgatggtgttgcagttgcctaagactaaggacgtgtgttcacgcttttgccagatttatggcctggggaaaagtcagaagcttcgggagattagttttaaatataaagaatttgaattaagcggatatatcagtagcgaggcacactataacaaaaacatgcagttcttgttcgttaacaagagactagtgttgcgcactaaattgcacaagctcatagattttctgctgcgtaaggaatccataatctgcaagccaaaaaacggcccaacaagcaggcagatgaactcttccctccgccacagaagcactccggagctgtacgggatctacgtaattaacgtgcaatgccaattttgtgagtatgacgtgtgtatggagcctgccaagacattaattgaatttcaaaactgggatactctgctgttttgtattcaggagggcgtgaagatgtttctgaaacaagagaagctcttcgtggaactctcgggagaggacatcaaggaattctccgaggataacgggttctccttgttcgacgcgactctgcaaaaaagagtgacaagcgatgaaaggagtaacttccaggaggcctgtaataacattctggactcttacgagatgtttaacctgcagagcaaggcagtaaagcgtaaaaccacggccgagaatgtgaacacccagagtagtcgggacagcgaggccacgcgcaagaacacgaacgacgcttttttgtacatttatgaaagtggcgggcctggacactccaaaatgactgagccatcactgcagaacaaggattccagctgtagtgagagtaaaatgcttgagcaggaaaccattgtggcttccgaggctggtgaaaacgaaaagcacaagaagagctttcttgagcactcatctctggagaatccttgcggaacctctctggagatgttcttaagccccttccagacgccctgccattttgaagagagtggtcaggacctggagatctggaaagagtcgacaaccgtcaacgggatggcggccaatattttgaagaacaacagaattcagaaccaacccaagaggttcaaggacgctacagaggtcggttgccagcccctccctttcgctaccaccctgtggggggtccatagcgcccaaacagaaaaagaaaagaaaaaggagtcctctaactgcggaaggagaaacgtcttctcctacggccgggtgaaactttgctccacaggattcatcacacacgttgtccagaacgagaaaaccaagtccactgagacggagcattcttttaagaattatgttaggccgggtccaactcgcgcccaggaaacatttggaaaccggactcggcacagcgtggagacacccgatataaaggatctcgcctccacgctttctaaagagtctggccagctgccaaacaagaaaaactgccgcacaaacataagctacgggctcgagaacgagcccaccgcaacgtacaccatgttctcagccttccaggaagggtcaaagaaatcacaaacggactgcattctgtcagatacatccccctcgtttccatggtatcgccacgtgtccaacgattcccgaaaaaccgacaagctgatcggatttagcaagccaatcgtccggaagaaactgagcctctcaagtcagctgggctcactcgagaaattcaaaagacaatacggcaaggtggagaacccactggacactgaggtcgaggaatcgaacggggttactactaatctatccctccaggtagagcccgacattctcctcaaagacaaaaatcggctggagaacagtgatgtatgcaaaataacaacgatggagcattctgactcagattcttcgtgccaacccgcttcacacatcttgaattcggaaaaatttccattctcaaaggacgaggactgcctggagcagcaaatgccatcccttcgtgagtcgccgatgacgcttaaggagctttctctctttaacagaaaacctcttgacctagagaagtccagcgaaagtcttgcttcgaagctctctcgcctgaaggggagcgaaagagagacccagaccatggggatgatgtcacgattcaacgaactaccgaatagcgattcaagtcggaaagacagcaaattgtgctcagtacttactcaggatttttgcatgctattcaataataaacacgaaaagacagaaaatggggtcattccaaccagcgactcagctacccaggacaattcatttaacaagaactccaagacacatagcaactccaataccaccgaaaattgcgtcatcagtgaaacgccgttagtattgccctataataattctaaggtcacgggcaaggacagtgacgtattgatcagagctagtgagcaacagatcgggtccctggactcacccagcgggatgttgatgaaccctgtagaagatgcgacaggagaccagaacggcatttgcttccaaagcgaggagagtaaggccagagcctgctctgagaccgaagaaagtaacacttgttgttctgactggcaacgccacttcgacgtagctctcggcaggatggtctacgtcaataaaatgactggattgagcacttttattgctcctaccgaagatattcaggccgcctgcactaaggatctcactacggtcgcggtggatgtggttttggaaaatggttcccagtaccgctgtcagccattccgcagcgacctggtgctgccttttctcccacgagcgcgagcagagagaacagtaatgagacaggacaaccgagacaccgtggacgacacagtatcctccgaatcgttacagtcattattttcagagtgggataaccccgtcttcgcacggtacccggaagttgctgttgatgtgtcctccggccaggctgagagccttgcggttaagatccataacattctgtatccttataggttcaccaaagggatgatacactctatgcaggtgctccaacaggtggacaataagttcatagcatgcctaatgtcgactaagacagaagaaaacggcgaggcggggggcaacctgttggtgctggtggaccagcatgcagcccacgaacggattagattagaacagctgatcatcgactcctatgaaaagcagcaggcacagggcagtggcaggaaaaagctcctgtctagcactctgataccccctctggaaatcaccgtgactgaagagcaacgacgtttgctgtggtgctaccacaagaacctggaagacctgggattggagtttgtctttcccgacactagtgactcactggttttggttggcaaggtccctctttgttttgtggagcgggaggcaaatgaactgcgacggggacgaagcacagtgactaagagtatcgtagaagaatttatcagggagcagctggaactgttacaaacaacgggagggatccagggcacactccccctgaccgtgcagaaggttctggcttcacaagcttgtcacggagctatcaagttcaatgacggcctctccctccaggagtcctgcagactgattgaagctctgtctagctgccagctgccctttcagtgtgctcacggtaggccttccatgctgccactcgccgacattgatcatctggagcaggagaagcagatcaaaccgaatctgaccaaactccgaaagatggcacaggcatggcgtctcttcggcaaggcagagtgcgacacgcgccagtccctccaacaatcaatgcctccttgtgaaccgccttag

SEQ ID NO: 16128 - DNA, 321 bp, synthetic construct
  misc_feature 1..321: note = Description of Artificial Sequence: Synthetic coding sequence
  source 1..321: mol_type = other DNA
atgatcaagtgtctcagcgtggaggtgcaggctaaactgagatcaggtctcgcgatttcatcattaggccaatgtgtggaagagctggcgttgaactctatcgacgcagaggccaaatgtgtggccgttcgcgtaaacatggaaaccttccaggtgcaggtgattgataacgggtttggcatgggcagcgacgatgtcgaaaaagtggggaacaggtacttcacttccaaatgtcacagcgtccaggatctggaaaaccctcgcttctacgggttccgtggggaagcactggcaaacatcgctgacatggcaagcgcctag

SEQ ID NO: 16129 - DNA, 135 bp, synthetic construct
  misc_feature 1..135: note = Description of Artificial Sequence: Synthetic coding sequence
  source 1..135: mol_type = other DNA
atggccgacaaaccagacatgggagagatcgccagcttcgataaagctaagcttaagaagactgagacacaagagaaaaacacgctcccaacaaaggagacaatcgagcaggagaagcggtcagaaatcagctag

SEQ ID NO: 16130 - DNA, 1026 bp, synthetic construct
  misc_feature 1..1026: note = Description of Artificial Sequence: Synthetic coding sequence
  source 1..1026: mol_type = other DNA
atggccgtgcagcccaaagagactttacaactcgaaagcgccgctgaagtaggattcgtcagattcttccagggaatgccagagaagcccaccaccaccgtccgcctgttcgaccgcggagacttttataccgcgcacggggaagacgcattgctggctgcccgagaagtttttaagacccaaggtgtgataaaatatatggggccagccggcgctaaaaatttacagtctgtggttttaagcaaaatgaacttcgaatcattcgtaaaggaccttcttttagttcgacagtatagggtggaagtgtataaaaacagggccggtaataaggcttctaaagagaatgattggtatttggcttacaaagcatccccgggcaacctgtcccagttcgaggatattctgttcggcaataatgatatgtctgcctccattggcgtggtgggcgtgaagatgtctgcagtagacggacaaagacaagtaggagtcggctatgttgattctatccaacgcaagctgggactgtgcgagtttcctgacaatgatcagtttagcaacttagaagccctattgattcagatcggtccaaaggagtgcgtcctaccagggggggaaacggccggagacatgggtaaactaaggcaaataattcaacgtggcgggattttgatcacagagcggaagaaggcagacttttcaacaaaagacatttatcaggacctgaaccggctacttaagggaaagaagggtgaacaaatgaactcggccgtcttgccggaaatggaaaatcaggtcgccgtcagtagcctgtccgccgtcatcaagttcttagagctgctgtcagatgacagcaacttcggccagttcgagctgactacctttgatttttctcagtatatgaagctcgacatcgcagctgtgcgcgctctaaatctgttccagggttcagtggaggataccaccgggagccagtccctggccgcactcctcaacaagtgtaaaacaccccagggccagacttgttag

SEQ ID NO: 16131 - DNA, 2766 bp, synthetic construct
  misc_feature 1..2766: note = Description of Artificial Sequence: Synthetic coding sequence
  source 1..2766: mol_type = other DNA
atggccgtgcagcccaaagagactctgcagctggagtcagccgcagaggttggtttcgtgcgattttttcaggggatgccggagaaacccactaccactgtgaggctatttgatcggggggacttttacactgcacatggcgaggatgccctcctcgctgccagggaggtgtttaagacacaaggggtgatcaaatacatggggcccgcaggggccaaaaatcttcaatcagtggtgctttctaagatgaacttcgagtctttcgtgaaagacttgctgctcgttaggcagtaccgtgttgaagtgtacaagaatagggccggaaacaaagcttctaaggagaatgattggtatctggcctataaggcttccccagggaatctgtcccagttcgaggatattcttttcggaaacaacgatatgtccgcatcaataggagttgtcggcgtgaaaatgagcgccgttgacggacagcggcaggtgggtgtggggtatgttgactcgatccaaaggaaactgggactttgtgagtttcctgacaatgatcagttctccaacctcgaggcactgctcattcagataggaccaaaagaatgcgtcctaccagggggagaaacggccggcgatatgggaaagttacgccaaattatccagaggggaggaatcttgatcacagaaagaaaaaaagcggacttttcgacaaaggatatctatcaggacctgaaccggctccttaaggggaaaaagggggagcagatgaactcagcagttcttccagaaatggagaaccaggtggcagtttcaagcctgtctgccgtgatcaagttccttgagttgctgagcgacgacagcaattttggtcagtttgaacttacaacgttcgactttagccaatatatgaagctggatatagccgccgtccgcgctttaaatctcttccagggttcagtcgaagacaccaccggttcgcagtctcttgccgctttgctgaataagtgcaagacacctcaggggcagaggctggtcaatcagtggatcaagcagccgctcatggacaagaaccgtatcgaggagcggctgaatttggttgaagctttcgtagaggatgcagagcttaggcagacgctacaggaggacctgctgagaaggttcccagacctgaacagactggccaagaagtttcagcgacaggctgctaatttgcaggattgttatagactgtaccagggaatcaatcagctacctaacgtaattcaggccctcgaaaaacatgagggcaaacaccagaagctcctactcgctgtttttgtcactcccctgactgaccttcggtcagacttctccaaattccaagagatgatcgaaacaaccctggacatggaccaagtcgagaaccacgaattcctcgtcaagccaagtttcgatcccaatctaagcgaactccgagaaataatgaacgacctcgagaaaaaaatgcagtccaccctcatctcggccgcgagggacctggggctggaccccggaaaacagatcaaattggacagtagcgcacaatttgggtattatttcagggtgacttgtaaagaagaaaaagtgctgcgaaataataaaaacttcagcacagtagacattcaaaagaatggggtgaagtttacaaactctaagctgacaagccttaacgaagaatacaccaagaacaaaaccgaatacgaggaggcccaggacgcaattgtgaaggaaatagttaatatatccagcggttacgtggaacctatgcagactttgaacgatgtcctcgcccagttagatgccgttgttagtttcgcccatgtcagcaacggtgccccagtcccttacgttagaccagccattctagagaaaggtcagggacgcattatcctcaaagcatcaagacacgcatgtgtagaggtgcaggacgaaatcgcttttattcctaacgacgtctatttcgagaaagacaagcagatgtttcacattattacaggtcctaacatggggggtaagtccacctatattcgccagactggtgtgattgtgctgatggctcaaataggatgctttgtcccttgtgaaagtgccgaagtgagtattgtggattgcatattggcacgggtgggggccggagattcccagcttaaaggagtgtccacttttatggcggagatgttggaaaccgcctctatcctgcgcagcgcaacgaaagatagcctaatcattatagatgagctggggaggggcacatcaacatacgatggctttgggctggcctgggctatcagcgaatacattgcaactaagatcggagcattctgtatgtttgctacacactttcatgagctgacagcactcgcgaatcagattcctactgtgaacaaccttcacgtaactgcactgacgaccgaggaaaccttgaccatgctttaccaggttaagaagggagtctgcgaccagtcctttggaatccatgtcgcagaactggccaattttcctaagcatgttattgaatgcgctaaacaaaaggctctcgagcttgaggagttccagtatattggcgagtcccaagggtatgacatcatggaacccgcagccaagaaatgctatctggagcgagaaaatctgagagttacagaacctaaagatcagtgtctcatcctgctgacttggaagcgcaagctgcgcggcggaaaaagatccgcctgcagtcggccggagcggcagaaccagggtagtggcgagctaagttag

SEQ ID NO: 16132 - DNA, 2163 bp, synthetic construct
  misc_feature 1..2163: note = Description of Artificial Sequence: Synthetic coding sequence
  source 1..2163: mol_type = other DNA
atgatcgggatatggcacattcgcctgctgttggcaatcagcctgagcttgaagaccttttctctcgtcactatgatctgtcagcttccgctcgtcctctgggtgctcaagtgtccccagcttatggcgcgagatatgggcaaactgcgacaaattatacaacgcggcggaattctaattaccgagcgtaagaaagccgatttcagcacaaaagatatctaccaggacctgaatcgcttgctcaagggtaagaaaggggaacagatgaacagcgccgtgttaccagaaatggagaatcaggggagcgttgaggatacgacaggcagccaaagcctagccgcgctccttaacaagtgtaagaccccccagggccagaggctcgtcaatcagtggattaagcagcccctgatggataaaaacaggatcgaggagcgcttgaacctcgtggaggccttcgttgaagatgcagagcttagacagaccttacaagaagatcttttacggaggttccctgacctgaataggctcgcaaaaaagtttcagcggcaggccgctaatctacaggactgttacagattataccaagggatcaatcagttgccaaacgtcatccaagctctcgaaaagcacgaaggcaagcaccagaagttgctgctcgctgtctttgtgacacctttgaccgatctgcgcagtgatttttccaagtttcaagaaatgatagagactaccctggatatggatcaagtggagaaccacgaatttcttgttaaaccctctttcgacccaaacctgtctgagctgagggaaataatgaatgacctcgaaaaaaagatgcagagcacactgatttcagctgcacgggatctcgggcttgatcccggcaaacagataaagctggacagttctgctcagttcggctactacttcagagtaacctgtaaggaagagaaggtactgcggaataataaaaactttagcaccgttgacatacagaagaatggtgttaagttcactaactccaaactcacgagtctgaacgaggaatacactaaaaacaaaactgaatatgaggaggctcaggacgcaatagttaaagagattgtcaacattagttccggctacgtcgaaccgatgcagactcttaatgatgtgttggcccagttagacgctgttgtgtcttttgctcatgtgagtaacggcgctcccgttccctacgtgcgtcccgctatactggaaaaaggccagggaaggattattctaaaagctagccgccatgcctgcgtggaggttcaagacgaaatcgcatttatcccgaacgacgtctatttcgagaaggacaagcaaatgttccacattattactggccccaatatggggggaaagtccacatacattcgtcagactggagtgatcgtgttgatggcccagattgggtgcttcgtgccttgtgagtctgctgaggtgagtatagttgattgcatcttggcccgtgtcggcgccggcgattcccagctgaaaggcgtcagcacttttatggctgaaatgttggagacagcctccatcctgaggtcggccaccaaagattccttgatcatcattgacgagcttggacgcggaacctctacgtacgatggctttgggctcgcctgggccatctcagagtatatcgccaccaagattggcgccttctgtatgttcgccacacatttccatgaactcactgctctagcgaatcaaatcccgaccgtcaacaatttacatgtcactgcgttaacaactgaagagacattaaccatgctataccaagtcaaaaaaggggtatgtgaccagtcgttcggcatacatgtggctgaactggccaacttccccaaacatgtgatagaatgcgccaaacagaaagccctggagttggaggagttccagtatatcggcgagtctcaggggtacgacattatggaacctgcagccaaaaagtgttatttagaaagagagcagggagagaagatcatccaggaattccttagtaaggtaaagcagatgcccttcaccgaaatgagcgaggaaaatatcactattaagttaaagcagctgaaagccgaagtgattgccaaaaacaactcctttgtgaatgaaatcatcagcagaataaaagtgactacctag

SEQ ID NO: 16133 - DNA, 2433 bp, synthetic construct
  misc_feature 1..2433: note = Description of Artificial Sequence: Synthetic coding sequence
  source 1..2433: mol_type = other DNA
atggccgtgcagccaaaggagacgctgcagctcgagagcgcggccgaggttggctttgtgcgattttttcaggggatgccagaaaaacccaccacaaccgtgaggctgtttgaccggggggacttttatacggctcacggtgaagacgccctgctggccgctagagaagtcttcaagacgcagggtgtgatcaagtatatgggtcctgcaggtgctaagaaccttcagagcgtggtactttccaagatgaacttcgagtcattcgtcaaagacctgctcttggtgcggcagtaccgggtcgaggtgtacaaaaaccgtgccgggaataaggcttcaaaggagaacgactggtatctggcatacaaggccagtcctggcaatttgtctcagtttgaagatatcctttttggaaacaatgatatgtctgcgtccattggagtggtaggagttaagatgtccgctgtcgatgggcagcgacaagtgggagtcggctacgtggactcaatccaacggaaactgggcctctgcgaatttcccgataatgaccagttttccaatttagaggctctgctcattcagattgggcccaaagaatgtgttttacctggcggcgaaactgctggtgacatgggcaagctacgtcagataatccagcgtggtggaatcctgatcacagagcgtaagaaagcggacttcagcactaaggacatatatcaagacctcaaccggctgctgaaaggcaagaaaggtgagcagatgaattctgctgtgctgcctgagatggagaaccaggtggcggttagttccttgagcgccgtgattaaattcctggaactgttgagcgacgatagcaactttgggcagttcgaactgacgacattcgatttctcacagtatatgaaactggacatcgccgcagtcagggcattgaatttgtttcagggatctgtggaggacactactggatctcagagcctagccgcgctcctgaataaatgcaagacgccccagggtcagcgattggtgaaccagtggatcaaacagccactcatggacaagaacagaatcgaggagagacttaatctggtggaagcgtttgtagaagacgcagaattgagacagacactacaggaagatctgctccgccgcttcccagatctaaatcgccttgcaaaaaaattccagaggcaagcggccaatttgcaggattgctataggctatatcagggcatcaatcagctgcccaacgtgatccaggcactagaaaaacacgaggggaaacatcagaaactgctactcgccgtctttgtgactcccctcaccgatttgcgatccgatttctccaagttccaagagatgattgagactacattggatatggaccaggtggagaaccacgagttcctggtgaagccatcctttgatcctaacctgagcgagctgcgtgagattatgaatgatctggaaaaaaaaatgcagagtacacttatatccgccgctagggacttagggctggacccaggcaaacaaatcaaactggacagctcagcccaattcgggtattactttagggtcacatgtaaggaagaaaaggtcttaaggaacaacaaaaacttttctaccgtggacatccaaaaaaacggagtcaagtttacaaattctaagctgaccagtttaaacgaggagtacaccaagaacaaaaccgagtatgaggaggcccaggatgccatagttaaggagattgttaacattagtagcggctacgtggagcctatgcagacgcttaacgatgtgctagcccagctggacgcggtggtgagcttcgcccacgttagcaacggggcccccgttccctacgtgcgacctgctattttggagaagggccagggacgaattattttgaaggcgagccgccacgcctgcgtggaggtccaggatgagattgccttcatccccaatgacgtttattttgagaaggacaaacagatgtttcatataataacagggcccaacatgggaggtaagagtacatatatcagacagacaggcgtgattgtgctcatggcgcaaattgggtgtttcgtaccatgcgaaagcgctgaagtcagtattgttgattgcatactggcaagggtgggcgctggagatagccagctcaaaggtgtgtccacctttatggccgaaatgcttgagaccgcctctattttgcgctcagccacaaaggattcactgatcatcattgacgagctgggacgtggcactagtacctacgatgggttcggcctggcttgggctataagcgagtatattgcgactaagatcggagcattttgtatgtttgccaccatcttcatgaacttactcccctggcctatcagatatcagctccttattatttacatgagtcagcactcaccactgaaaaggccctag

SEQ ID NO: 16134 - DNA, 507 bp, synthetic construct
  misc_feature 1..507: note = Description of Artificial Sequence: Synthetic coding sequence
  source 1..507: mol_type = other DNA
atggataagaacagaatcgaggagagactgaatctggtggaggcttttgtagaagatgctgagctacggcagactctgcaggaagacctgctgagaaggtttcctgacttaaatcgcctggctaaaaaatttcagaggcaagctgcgaatctgcaggattgttaccgactgtatcaaggcatcaaccaactgccaaatgtgatacaggccctggagaaacacgaaggaaagcatcaaaagctcctgctcgcagtattcgttacacctctgactgatttgcgaagcgactttagtaagtttcaggaaatgatcgagacaacgctggacatggatcaggtcgagaaccatgagttcttggtgaaaccttctttcgaccccaatctgagtgaacttagggaaattatgaatgatctagagaaaaagatgcaatcaacgctcatcagcgctgctcgcgacctgggcggatcgctccagcctagatccagcaggctcgcgtgcgcgacatag

SEQ ID NO: 16135 - DNA, 1602 bp, synthetic construct
  misc_feature 1..1602: note = Description of Artificial Sequence: Synthetic coding sequence
  source 1..1602: mol_type = other DNA
atggcagttcagccaaaagagaccttgcagctagagtcagccgctgaagtcggattcgtaaggtttttccaaggaatgcccgagaagccaaccactacagtaaggctatttgaccgtggagacttctatacggcccacggagaggatgcactgctggcagctcgcgaagtgttcaaaacccagggcgttatcaagtatatgggccctgccggcgccaaaaacctacagagtgtggtgctttctaaaatgaatttcgagagctttgtgaaggatttgctgctcgtccggcagtaccgggtcgaagtttacaaaaatagagcaggcaacaaggcctccaaggagaacgactggtacctggcttacaaggctagcccagggaatctttcccagtttgaggacatattgtttggaaataatgatatgtctgcctctatcggggtggtaggcgtgaaaatgagcgccgtggatggtcagcgccaggtcggagtgggatacgtggacagtattcaacgcaagctcgggctctgcgaattccctgacaatgatcagtttagcaatctggaggccctgctgattcaaatcggtcccaaggagtgtgtcctgcccgggggcgaaaccgcaggcgacatgggtaagttgcgacagattattcaacgtggaggcatcctgatcaccgagcgaaagaaagcggatttctctaccaaagacatctaccaagatcttaaccggctcctgaagggcaagaagggcgagcaaatgaactctgccgtcctgccagaaatggaaaatcaagtcgctgtgtcttccctctctgccgtcattaagttcctcgaactgctaagcgacgatagtaacttcgggcagttcgagctgactacattcgacttctcacaatacatgaaactggatatagcggccgtgcgggcgctcaacctctttcaaggctctgttgaggatactacaggcagccagagtctcgcagcccttctgaataaatgcaagacaccacagggtcagaggctggtgaaccagtggatcaagcagccactgatggacaagaacagaatcgaggaacgactcaacctggtagaggcatttgtagaagatgctgagctgcgacagactctgcaggaggacttattgagaagattccctgacctcaatagactggccaaaaagttccaaaggcaggcagcaaacctgcaggattgctacagattgtaccagggcatcaatcagttgcccaatgtgatccaggctctggaaaaacatgaaggcaaacaccagaaactcctcttggccgtgtttgttactccactcaccgacctgagaagcgactttagcaaatttcaggaaatgatcgagaccaccttagatatggatcaggtagagaaccatgagttcttggtgaagccaagctttgacccgaacctgtcagagctgagagaaattatgaatgacctcgagaaaaaaatgcagagtaccctaatctcagctgcacgggatctgggccttgatccaggtaagcagattaagttagattcctccgctcaattcggatactattttcgggtgacctgcaaggagaaatcaccttcctag

SEQ ID NO: 16136 - DNA, 1233 bp, synthetic construct
  misc_feature 1..1233: note = Description of Artificial Sequence: Synthetic coding sequence
  source 1..1233: mol_type = other DNA
atggccgttcaacccaaggaaactctgcagctcgagagcgctgccgaggtaggattcgtgaggttttttcagggcatgcccgaaaagcccacgaccactgttcggctcttcgatagaggagacttctataccgcccatggagaggacgctctgctggccgctagagaggtatttaagacccagggagtgatcaagtatatgggccctgctggcgcaaaaaacctgcagtctgtcgtgctcagcaaaatgaactttgagagctttgtcaaggatctgcttctggttcggcagtatcgagtggaagtgtataagaatagagcgggcaataaggcgagcaaagaaaacgattggtatcttgcctacaaagcatccccaggcaacttgagccagtttgaggacatcctgttcggtaataacgacatgtcggcatcaatcggggtggtgggcgtgaaaatgtcagccgtcgacggacaaagacaagtgggtgttggctacgttgatagtatacagcggaaactcggactgtgtgaattccccgataacgatcagttttccaaccttgaggcactcctgatccagatcggacctaaggaatgcgtgctgccaggtggcgagacggccggtgacatgggcaagcttaggcagataatacagcgcgggggaatcctgatcacagagcgaaagaaagccgacttctccaccaaagacatttaccaagatttgaataggttgttgaaaggtaagaaaggagaacagatgaatagcgccgtcctcccagaaatggaaaaccaggtggctgtgtccagcctgagcgccgtcatcaagttcttggaactgctgtcagatgattcaaattttggacagtttgaactgacaacctttgatttcagccagtacatgaaactggacatagctgctgttagagccctcaaccttttccaggggagtgtggaggatactacgggctcccagtctttggcagcattgctgaacaagtgtaaaaccccccagggtcagagattagttaatcaatggattaagcagccactgatggacaagaatcggatcgaggagcggctgaacttagtcgaggccttcgtggaggatgccgaactgagacagaccctgcaggaggattactttgttgatagccaaattctgacggacctgccacgctccttcaaagataagcagcaaacctacaaaatagtcactgactctattcgcgtttag

SEQ ID NO: 16137 - DNA, 1458 bp, synthetic construct
  misc_feature 1..1458: note = Description of Artificial Sequence: Synthetic coding sequence
  source 1..1458: mol_type = other DNA
atggcggttcagccaaaagaaaccctgcagctggaatcggctgcggaagtcggattcgtaagattcttccaggggatgccagagaaaccaacaaccacggtgagactgtttgacagaggagatttttatactgcgcatggggaggacgctttactggctgctcgcgaagtgtttaaaacccagggcgttataaagtacatgggccctgctggagcaaagaacctccagtcagtggtgctctccaagatgaacttcgagagctttgttaaggacctacttctcgtgcgtcaatacagagtggaggtgtacaagaaccgggccggcaacaaggcaagcaaggagaatgattggtatctggcttataaagcatctccaggaaatctatcccagtttgaggacatactgttcggcaataacgacatgtccgccagcattggggtggtaggcgtgaagatgtccgccgtcgacggccagagacaggtcggcgtgggatacgtggatagcatccagcgcaagctgggtttgtgcgaatttccagacaacgatcagttcagcaacctggaagccctgctcatacagataggtcccaaagaatgtgtacttccagggggggagactgcaggtgacatggggaagttgaggcaaatcatacagcgtggcggcatcctgatcactgaacgcaagaaggccgacttctccaccaaggatatttaccaggacctgaataggttgttgaaaggtaaaaagggggaacagatgaacagtgccgtgctgcctgagatggagaaccaagtggctgtttcctctctcagtgccgtcataaagtttttggagttactgtcggacgacagcaatttcggacagttcgagttaacaacttttgatttcagccagtacatgaagctggatattgccgctgtgcgggctctgaacctttttcagggttctgtggaggatacaactgggtctcagtctctcgcagctctgctgaataagtgcaaaactccccaggggcaacgcctggtgaatcagtggataaagcagccactgatggacaaaaaccgaatcgaggagagactaaatctggtagaagcctttgttgaagacgctgaattgcgtcagactctgcaagaggacttactacgcaggttccctgaccttaatagactggcaaaaaagttccaaaggcaggccgcgaacttgcaggattgctacagactctatcaggggattaaccagctgcctaacgtgattcaggccctggaaaaacacgagggcaaacaccaaaagttactgctggctgtatttgtaacccctctgaccgatttgcgatcagattttagtaaattccaggagatgattgagacaaccctcgatatggaccaggtagagaatcatgaattcctcgtaaaaccaagtttcgaccccaacttgtccgaattgagaaacaatgaatag

SEQ ID NO: 16138 - DNA, 2607 bp, synthetic construct
  misc_feature 1..2607: note = Description of Artificial Sequence: Synthetic coding sequence
  source 1..2607: mol_type = other DNA
atgggcccagccggcgccaagaacctccagtctgttgttttatctaaaatgaacttcgaatctttcgttaaggatcttttacttgttaggcagtatcgcgtcgaggtttacaaaaaccgggcagggaacaaggcgtcaaaggaaaatgattggtacctagcctataaggcgagcccaggcaacctctcacagtttgaggacatcctgtttggtaataatgacatgagcgcctcaatcggggtggtgggagtgaagatgtcagctgtggatggccagcgacaggtgggggtcggatacgttgactctatccagcgcaaactgggactgtgtgagttccctgataatgaccagttttctaacctggaagcgcttcttattcaaattggcccaaaagaatgcgttctccccggtggtgagaccgcgggcgatatggggaaactccgccaaatcattcagaggggaggcatcctgattacagagcgtaagaaagccgatttctctaccaaggacatataccaggacctaaacagattgttaaaggggaagaaaggggaacagatgaatagcgcggtgctgcccgagatggagaatcaggtcgccgtctcctccctgagcgccgttatcaaatttctggaactgctcagcgacgatagtaacttcggccagtttgagcttaccacttttgacttctcccagtacatgaaactcgatatcgctgcggttagagcactgaacttgttccaaggtagcgtcgaagacacaactggatcccagtctttggccgcccttctcaataaatgtaaaacacctcaggggcagaggctggtcaaccagtggatcaaacagccactgatggacaaaaatcgtattgaggagaggcttaatctcgtggaagcctttgtcgaagacgccgagctccgccagaccctccaagaggacctgctgcgcaggttccctgacctgaacagactggcaaaaaagtttcaaagacaggcggccaatttacaggattgctacaggttgtatcagggtatcaaccagctgcccaatgttatccaggctcttgaaaaacatgaaggaaaacaccagaagctgcttttagccgtgttcgtcacaccactgactgaccttcgctcagatttctctaaatttcaggagatgattgaaacaaccctcgacatggaccaggtcgaaaatcacgagttcctcgtgaaaccttcatttgaccccaacctctctgagctgagagagattatgaacgacttagagaaaaaaatgcaaagcaccctaatttccgcagccagagacttagggctcgaccccggcaaacagattaagctggattcttcagcccagttcgggtactacttcagagtgacgtgcaaagaagagaaggtcttgcgaaacaacaaaaatttcagcaccgttgacatacagaaaaatggtgtgaaattcaccaactcgaagttgacatctctaaatgaggaatataccaaaaacaaaactgaatacgaagaggcccaggacgcgattgtgaaggaaatagtcaacattagctccggctacgttgagcctatgcagaccctcaacgacgtcctagcgcagctggatgccgtcgtctccttcgcccacgtgtccaacggcgccccagtaccttatgtgcgaccagctatcctggagaaaggccaggggcgcatcatcctcaaggcttcaagacacgcctgcgtagaagttcaagacgaaattgcctttattccgaacgatgtatatttcgagaaggataagcagatgttccacattataactgggccaaatatggggggaaagtccacctatatccgtcagactggagtcatcgtgttgatggcccagattggatgttttgtgccgtgtgagagcgccgaagtctcgatcgttgattgcatcctggccagagtcggtgctggcgactcgcaactgaagggggtgtctacattcatggctgaaatgctagagacagccagtatactcagatctgccacgaaggacagcctcattataattgacgagcttggtcgtggaacgtcaacttatgatggctttggactggcctgggctatttccgaatatatagccaccaagattggggccttctgcatgtttgcaactcatttccacgagctaacggcccttgcaaatcaaattccaacagtcaacaatttacacgtgaccgcactcactacagaggaaacactgactatgctgtaccaagtgaagaagggcgtgtgcgaccagagcttcggtattcatgtcgcagaattagccaactttcccaaacacgtcattgagtgtgctaagcagaaggcactcgaattagaagagttccaatacattggtgagagccagggctacgatataatggagcccgcagccaaaaaatgttatctcgagcgcgaacagggtgaaaaaatcatccaggaatttctgtctaaagttaagcaaatgcccttcacagaaatgagtgaggagaacatcacaataaaactgaagcagcttaaggccgaggtgatcgccaagaataattcgtttgtgaacgagattatctctcgaataaaggtaactacctag

SEQ ID NO: 16139 - DNA, 3414 bp, synthetic construct
  misc_feature 1..3414: note = Description of Artificial Sequence: Synthetic coding sequence
  source 1..3414: mol_type = other DNA
atgagcaggagaaaacccgcctccgggggattagccgcaagttccagtgcccccgcgaggcaagcagtgttatcccgtttttttcagtctaccggcagccttaaaagtacttcctcatccacaggtgcagctgatcaggtggatccgggcgcagctgcagccgctgccgcggctgccgccgccgcccctccagcaccacctgctccagcctttccacctcagctccccccgcacatcgctacagagattgatcgcagaaagaaaagaccactggagaatgacggtcctgtaaagaaaaaggtcaagaaggtgcagcagaaggaaggcgggagcgacctcggtatgagcggtaactccgagcctaagaaatgcctgcgaacaaggaacgtgtccaaaagtctggagaagcttaaagagttttgctgcgacagtgcattaccccagtctcgggttcagaccgagtcactgcaagagcgttttgccgtgctcccaaaatgtaccgatttcgatgatatctcactgctccatgcaaagaatgccgtgtcttcggaggactcaaaacgccaaattaatcaaaaagataccaccttgttcgatctgtctcagttcgggtccagcaacacctcacatgaaaacctgcagaagacagccagcaaatctgccaacaaacggtccaaatctatatacacccctttagagctccaatatattgaaatgaagcagcagcataaggatgcagtcttgtgtgtggaatgcggatataagtacaggttctttggcgaggatgcggagattgcggcgagagaactgaacatctattgtcacctagaccacaatttcatgacagcgtcaatacctacccaccgcttgttcgtccatgtacggagattagtggctaaagggtataaggtgggggtcgtgaaacagaccgaaactgcagctctgaaagccattggtgataacaggtcttcccttttttccaggaagctcaccgcactgtatacaaaatctacacttatcggcgaagacgtcaaccccctgattaaactagacgatgccgtgaacgtggatgaaatcatgacagatacaagtactagctacttattgtgcatctccgagaacaaagagaatgtccgagataaaaagaaaggtaatattttcatcgggatcgtcggagtacagccggcgaccggagaggtcgtcttcgatagtttccaagactccgcaagtagatctgaactggaaacaagaatgtcctccctgcaacccgtggagcttctgctgccttccgccttgtctgagcagaccgaggctctgattcatagagccaccagcgtcagtgtccaggacgatcgtattagggttgagaggatggataacatctacttcgaatactctcacgccttccaggccgtgactgaattttatgcaaaagatactgtcgacatcaaaggcagccagataattagcggtattgtgaacctagaaaagcctgtgatctgcagtctggctgccatcataaagtacctgaaggagttcaaccttgagaaaatgctgagtaaaccggaaaattttaaacagttgtcttcgaaaatggaatttatgaccatcaacggcaccaccctgcggaatttggagatcttgcaaaaccagacggacatgaaaaccaaagggagtctcctgtgggtgctcgaccacacaaagacaagttttggccggcggaagctgaagaagtgggtcactcagcccctccttaagctgcgggagatcaacgcgcggttagacgcggtgtccgaggtcttacatagcgagtcatctgtgttcggacagattgaaaaccatctccgtaaactgcccgacatcgaacgggggctctgctcaatataccataagaaatgttctacccaggaattcttcttgattgttaaaactctgtaccacctgaaatctgagttccaggccatcatcccagcggtgaacagccacatccagtccgatcttctcaggacggtgatcttggagatccctgagctcctgagtccggtggaacattaccttaagatattgaacgagcaagcagccaaggtcggtgacaaaaccgagctcttcaaagaccttagcgattttccacttatcaagaagaggaaagatgagattcagggggtgatcgatgagatccggatgcacctgcaggaaatcaggaaaatcctcaagaatccatcggcacagtatgtcaccgtttcaggacaagagtttatgatcgaaatcaagaatagtgctgtatcctgcatcccaacagattgggtgaaggtaggaagcacgaaagccgtgagccgctttcactctccctttatcgttgagaattatcgacatctgaatcagcttcgtgaacagcttgttctcgactgttccgccgagtggttagattttttggaaaagttcagtgagcattaccatagcctttgtaaggccgtgcaccatctggctacagtggattgcattttctcccttgcaaaagtcgccaagcagggagattattgccgacccactgtgcaggaagagaggaaaatcgtgatcaaaaatgggagacaccctgtaattgatgtcctgctgggcgagcaggatcagtacgtacctaataacaccgatctgagtgaggatagcgagagagtcatgattataacaggccctaacatgggagggaagtcatcctacattaagcaggtcgctcttattaccattatggctcagattggatcatacgtacccgcagaggaagctacaatcgggatcgtggacggtattttcacgcggatgggagcggccgataacatctacaagggccagtccacatttatggaggagctgactgacaccgctgaaatcatacggaaggcaacatctcaaagtctagtgatcttagatgagctaggccggggaactagcacacatgatggaattgcaattgcgtacgcgacccttgagtactttatccgcgatgttaaatcactgactctgtttgttacgcactacccacccgtctgcgagctggaaaagaattattctcaccaagttggtaattatcatatgggatttcttgtgtctgaagatgaaagcaaattggaccccggggccgcagagcaggtacccgacttcgttacatttttgtaccaaataacgaggggtattgccgcacggagctacggcctgaacgtggccaaattagcagatgtcccaggcgagatcctgaagaaggctgcacacaaatcgaaagagctggagggactgatcaatacaaagagaaagcgcttaaaatacttcgccaaactgtggacaatgcacaacgcacaagacctccaaaaatggaccgaagaattcaacatggaagagactcagacgtcgctattgcactag

SEQ ID NO: 16140 - DNA, 3387 bp, synthetic construct
  misc_feature 1..3387: note = Description of Artificial Sequence: Synthetic coding sequence
  source 1..3387: mol_type = other DNA
atgtccagaagaaaacctgcctctggcggcctggccgccagtagtagcgcacccgctcgtcaagccgtgcttagccgcttctttcagtcaacagggagtctgaaatctaccagtagttccactggggccgccgaccaggttgatccaggcgcagccgctgctgcagcccccccagcaccagcttttccaccacagttaccgcctcatatagcaaccgaaatagaccggcgcaaaaaacgtcctctggagaacgatggacccgtgaaaaagaaggtcaaaaaagttcagcaaaaagagggcggatctgacttaggcatgagtggcaattctgaacccaagaaatgtttgaggaccaggaacgtgtcaaagtccctggagaagctgaaagaattttgctgtgatagtgctctgccccagtctagagtacaaactgagtcactgcaggagaggtttgctgtcctacctaagtgtacggacttcgacgacattagtcttctgcacgcaaagaacgccgtatcatcagaagactctaagaggcaaattaaccagaaggatacgacgctgttcgatctgtctcagttcggatcatctaacacatctcatgagaacttgcaaaaaaccgcctctaaatcagccaataagagaagtaagtctatttacacccctctggaactgcagtacattgagatgaaacaacaacacaaagatgcggtgctgtgtgttgagtgcggatataagtaccgcttttttggggaagatgctgaaattgccgcaagggagctcaatatctattgccatctggatcataacttcatgactgccagcataccaactcacagattattcgtccacgttcgacggctcgtagcaaagggctacaaggtcggcgtggtcaaacagacagagactgccgcacttaaggccatcggcgataaccgttcatccctcttcagtcggaaattgacagccttgtatacaaagtctacactgattggagaagacgtgaaccctctgattaagcttgacgacgctgtgaatgtggatgagatcatgactgacactagtacttcatatctgctttgtatctctgagaataaggaaaacgtgagggacaagaaaaagggcaatattttcataggaattgtgggggtgcagccggcaaccggtgaggtcgtctttgatagcttccaggacagcgcctcccgatctgagctagagaccaggatgagcagtctgcagccagtggagctgctgctgccgtccgctctttctgagcagaccgaggccctgattcatagagctacctcagtgagtgttcaggacgaccgaatccgagtagaacggatggacaacatttactttgaatactctcacgccttccaggccgtgaccgaattttacgctaaggacacagtggatatcaaaggctcgcagatcattagtgggatcgtaaatctggaaaagcccgttatctgcagcctggccgccatcatcaagtacctgaaggagttcaacctcgagaagatgctgtcaaagcccgaaaattttaagcaactctctagtaaaatggaattcatgaccataaacggcacaaccctcagaaatcttgagattttgcagaatcagacagatatgaaaaccaagggctcacttctatgggttttagaccataccaagacctcgtttggacggaggaagcttaaaaaatgggttacccagccattgcttaaacttagagagattaacgcacggcttgatgcagtgtccgaagtcttgcactctgagtcctccgtttttgggcaaatcgaaaatcacctccgcaaactgcctgacatcgaacgaggcctttgttccatttatcacaagaagtgttccacacaagaattctttctgatcgtgaaaacactttatcacctcaaaagcgaatttcaggctatcattcccgcagtgaattcacacatccagagcgacctgctgaggactgtgatactcgagatccccgagttgttgagccccgtcgaacactaccttaagatcctgaatgagcaggctgctaaagtgggagacaaaacagagctgttcaaagatctgagcgatttccccctcatcaagaagaggaaagacgagatccagggagtgattgatgagataagaatgcatctacaggaaataaggaaaatactgaaaaacccatctgctcaatacgtgacagtctccggccaggagtttatgattgaaattaaaaacagtgctgttagctgcatccctaccgattgggtcaaggtcggaagtacaaaggcagttagccggtttcactccccttttattgtggagaattaccgccacctgaatcagctgagagaacagcttgtattggactgctccgccgagtggctggatttcttggaaaaatttagtgagcattaccactcactctgtaaggcggtgcaccacttggctactgtggattgcattttcagtctcgccaaggtggccaaacagggagattattgccgcccgacggttcaggaggagcggaaaatcgtgattaagaatggtagacaccccgtgatcgacgttctgttaggagaacaagatcagtatgtccctaacaatactgatctgagtgaagatagcgagagggtcatgatcatcacaggacccaatatgggagggaaatcctcttacattaagcaggtcgcactgattaccatcatggcccagatcggaagctacgtgccggcagaagaagcgacaatcggcatcgtggacggcatattcacccgaatgggtgctgccgataacatttacaagggccagagcacctttatggaagaattaaccgataccgcagaaatcatacgcaaggccactagccagtccctcgtcatactagatgagttaggaagggggacatccacacatgacgggattgccattgcctatgctacattggaatatttcatccgcgatgtgaagagtctgactcttttcgtgacacactacccccccgtttgtgagctggaaaagaactacagtcatcaggtgggcaactatcatatgggattcctggtatccgaagacgagagcaagctcgatccaggagctgccgaacaggtgcctgactttgtgaccttcttatatcagattactcgtggaatcgcagcaaggagctatggactcaacgtcgccaagctcgccgacgtgcctggtgagattctgaaaaaggccgcccacaaaagcaaggaattagaaggcctcatcaatacaaaacgtaagaggcttaagtatttcgcaaaactgtggactatgcacaacgctcaggacctccagaagtggacagaggagtttaacatggaggagactcagacctcactcctccactag

SEQ ID NO: 16141 - DNA, 2811 bp, synthetic construct
  misc_feature 1..2811: note = Description of Artificial Sequence: Synthetic coding sequence
  source 1..2811: mol_type = other DNA
atgctgcgtcctgagatcagcagcacctcaccaagtgcacccgctgtctctccgtctagcggggagactcgctctccgcagggaccccgctataacttcggacttcaggagaccccccagtctcgccctagcgtgcaagttgttagcgcctccacatgccctggcaccagcggggcggccggcgatcgttcttcttcctcctcctccctgccctgccccgcacctaattccagacctgctcaagggtcatatttcggtaataaacgcgcctacgccgagaacacagtggcatctaactttacctttggcgctagcagcagttctgctcgggacaccaattacccccaaactctgaaaacacctctctcaaccggcaacccccagcggagcgggtacaagagttggacaccccaagtgggttattccgcatccagcagctccgctatctcagcacactccccttccgtcattgtggctgtggttgaggggagaggcctcgcaaggggggagataggcatggcctcaatcgacctcaagaatccacagattattctctcacagttcgccgacaacacaacatacgcaaaggtgattacgaaactgaaaatcctctcccctttagaaattattatgtcaaacacagcctgcgcagtgggcaattcaaccaagctgtttacactcataaccgagaacttcaaaaatgtgaacttcactaccattcagcgcaagtactttaatgagactaagggcctggagtacatcgagcaactctgtatagccgagttttcgacggtactgatggaggtacaatcaaagtactattgcctggctgccgtagctgccctgttgaaatatgtggagttcatacagaattctgtctacgcccccaagagcctgaaaatttgtttccaggggagcgaacagaccgctatgattgactcttcctcagcacagaatttggagctgctcatcaacaatcaggactaccggaataatcacacgctgttcggcgttttaaactacaccaaaacacccggcggctcccgccgcctccggtcgaacatcttggagcctctggtggatattgagaccataaacatgagactcgattgtgtccaagaactgcttcaagacgaagagctgttcttcggcctgcagagcgtgatctcacgatttcttgatacggaacagctgctgtccgtcttggtccagataccgaagcaagacaccgtgaatgcagcggagagcaagataaccaatctgatttacttgaagcatacacttgagttagtcgacccgcttaagatcgccatgaagaattgtaatactcctctgctcagggcctactacggtagcctggaagacaaaagattcgggattatcctagagaagattaaaaccgtgatcaatgatgatgctaggtacatgaagggctgcctaaacatgcgtactcagaaatgttatgccgtacgctccaacataaacgagttcctggacattgcccgcaggacatatacagaaatcgtggatgacatcgctggtatgatcagccaactcggggaaaagtactctttgcccctgcgaacttctttctccagtgctcggggcttctttatacagatgacaaccgattgtatagccctgcccagcgaccagctgcccagcgagttcatcaagattagcaaagtgaagaactcatactcattcacaagcgctgacctgattaagatgaatgagcggtgtcaggagtctttgcgtgaaatataccacatgacatacatgatcgtctgcaaactgctgagcgagatttacgagcatatccactgtctttacaaactgtccgatactgtgtctatgctagatatgttgctgagctttgctcacgcctgcacgctaagcgactacgtaaggccagaatttaccgatacactcgccatcaaacagggttggcaccctattcttgagaaaatatctgcagagaaacctatcgccaacaatacgtacgtgacagagggatctaactttctcattatcacagggcccaacatgtccgggaaaagcacctacctgaagcagatagcactttgccagatcatggctcagattggctcctacgtacccgccgagtatagctctttccgaattgcaaagcagattttcacaagaatttctactgatgacgacatcgagaccaactcatccaccttcatgaaggagatgaaggagattgcatatatactgcacaacgcaaacgacaaaagcctgattctgatagatgagcttgggaggggaactaatactgaagaaggtataggtatctgttacgcagtgtgcgaatatctcctgtccctgaaggcttttacactttttgccacacacttcctggagctttgtcacatcgacgcactgtaccctaatgtcgagaatatgcattttgaggtgcagcacgtgaaaaacacgagcagaaacaaggaggccattctttacacctacaagctttcgaaggggctaaccgaggaaaaaaactatggactcaaggccgcggaggtgtccagcctgcccccatcaattgttctggatgcaaaggaaatcaccacacagattactcggcagatcctgcagaaccaaagaagcacccctgagatggagaggcagcgtgcagtgtaccacctggcaacgcgtctggtgcagactgcgcgaaattcccagctcgacccagactccctgcgcatttacctcagtaatttgaaaaaaaagtacaaggaggatttcccacgaacggaacaggttcccgagaaaacagaggaatag

SEQ ID NO: 16142 - DNA, 813 bp, synthetic construct
  misc_feature 1..813: note = Description of Artificial Sequence: Synthetic coding sequence
  source 1..813: mol_type = other DNA
atggccagcctgggcgccaatccaaggcggaccccacagggccctaggcctggtgcagctagcagtggcttcccatctccagcgccagtgccgggaccaagagaagccgaagaggaggaggttgaagaggaagaggagctggccgagattcacctttgtgttctatggaatagtggttacctaggtattgcctattacgataccagtgattcgaccattcattttatgcctgacgccccagatcatgaatcgcttaagctgctgcaaagagtgctggacgaaatcaatccccaatccgtggtgacctcggcaaagcaggacgagaacatgacccggttcctggggaaactcgcatcacaggagcatcgcgaacccaagagaccggaaatcatctttctccccagcgtagattttggcttggagattagcaagcagcggctgctctctggtaattactcttttattccggacgccatgaccgcaaccgaaaagattctatttctgtcatcgatcatccccttcgattgcttgctaacagttagagcccttggagggctcctgaagtttctgggccgccgcagaatcggggtggagctggaagattacaatgtgagtgttcctatcctcggcttcaaaaagttcatgttgacacatttagtgaatatcgatcaagatacatattccgtcctccagatcttcaagtccgaaagtcatcccagtgtgtataaggtggcttctggtctgaaggagggtttatcattattcggaatcttaaacaggtgccactgtaaatggggagagaagcttctgtag

SEQ ID NO: 16143 - DNA, 813 bp, synthetic construct
  misc_feature 1..813: note = Description of Artificial Sequence: Synthetic coding sequence
  source 1..813: mol_type = other DNA
atggcatccctgggagcaaaccctcggagaacccctcagggtcccaggccgggtgcagccagctccggatttcctagccccgctccagtccctggtcctagggaagcggaagaggaggaagttgaagaggaagaggagctggccgagatacatctgtgtgttctgtggaactccgggtatctcggaatcgcctactatgacacctccgacagcacaatccatttcatgccggacgcacccgaccatgagtccctgaagcttctacagagggttctggacgagatcaacccacagtctgtagtcactagcgccaagcaggacgaaaacatgacaagattcttgggtaaacttgcatcccaggaacatcgtgagcctaaaagacccgaaatcattttcctgcccagcgtagattttggtctggagatttctaagcagagactactgagcggtaactactcatttattcctgatgctatgacagctaccgagaagatccttttcttatcttcaatcatccctttcgactgcctcctgacggttcgcgcgttaggaggacttcttaaatttctggggcgtagaagaattggcgtcgagttggaggattacaacgttagcgtgcctatattggggtttaagaagttcatgctaacccacctcgtgaatatagaccaagatacctatagcgtcctgcagattttcaagagcgagtcacatccaagcgtttataaggttgcaagcggcttgaaagaggggctgtcccttttcgggatactgaataggtgccattgtaaatggggagagaagctcctctag

SEQ ID NO: 16144 - DNA, 585 bp, synthetic construct
  misc_feature 1..585: note = Description of Artificial Sequence: Synthetic coding sequence
  source 1..585: mol_type = other DNA
atggcctccctgggcgcaaaccccagacgaacgccccagggcccaaggccaggagccgcttcctcaggttttccctccccggcaccagtcccaggacctagagaggctgaagaagaggaagtagaggaagaggaggaactagccgaaatccatctgtgtgtgctgtggaatagcgggtatttgggaatagcttactacgacacctctgactccaccattcatttcatgcccgacgcgccggatcacgagtccctcaagcttctacaacgcgtgttagatgaaatcaatccacaatcggtcgtgactagcgccaagcaggacgagaacatgactagattcctggggaagctagcctcccaggagcaccgagaacccaagaggccagaaattatctttctgccttctgtcgattttggacttgagatctccaagcagcgattgctttccgggaattatagcttcattccagacgccatgaccgccacggaaaagatactgttcttgtcatctatcatcccgtttgactgccttctcactgtcagagccctcgggggtctgttaaaattcctgggccggaggaggtag

SEQ ID NO: 16145 - DNA, 813 bp, synthetic construct
  misc_feature 1..813: note = Description of Artificial Sequence: Synthetic coding sequence
  source 1..813: mol_type = other DNA
atggctagtctgggtgcgaacccaagaagaaccccacaaggcccacggccaggagcggcctctagtgggtttcctagtccagcaccggttcctgggccaagggaagctgaagaagaagaagtggaggaggaagaagaactggccgaaattcacctttgcgtgctgtggaatagcggttaccttggcatcgcctactatgacaccagtgactccacgatccattttatgcctgacgccccagaccacgaatccctgaaacttcttcagcgagtgctggatgaaatcaacccacagtctgttgttaccagcgccaagcaggacgagaatatgaccaggtttctgggcaaactcgcttcccaggaacatagagaacccaagagacccgagatcatattcctgccttctgtcgatttcggtcttgagatttccaagcagcgattgctgtcaggaaattacagctttattcctgacgctatgaccgccacagagaaaatactgtttctatcttcaataatcccttttgactgcctgctgactgttcgagctctaggcggtcttctaaagtttctgggcaggcgccgaatcggtgtggaactcgaagactacaacgtctcagtgcccatccttggcttcaagaaattcatgctcacccatctagtgaatattgaccaagacacttattctgtactgcaaatcttcaagtctgagtctcacccctctgtctacaaggtggcctctggcttgaaagaaggtctctctctgttcggtatccttaaccgctgtcattgcaagtggggggaaaaactcctgtag

SEQ ID NO: 16146 - DNA, 864 bp, synthetic construct
  misc_feature 1..864: note = Description of Artificial Sequence: Synthetic coding sequence
  source 1..864: mol_type = other DNA
atggcgtccctaggcgcgaatccacgtcgaacaccccagggcccccgccctggagcagcgtcgtctggatttcctagccccgctcccgtacctggaccaagggaggcggaagaggaggaagttgaggaggaggaggagctggctgaaattcacctgtgtgtactctggaacagcggctacctgggcatcgcttattatgacacttcagattctaccatccattttatgcccgatgccccggaccatgaatctcttaagctcctccagcgcgttttagacgagatcaacccccaatcagtagtcacctctgccaagcaggatgagaatatgaccagatttttgggtaaactggcctcacaggagcatagggagcccaaacgacccgaaatcatcttcctgccttccgttgatttcggtctggagatttcaaaacagcggctactttccggcaactacagcttcattcccgatgctatgaccgccaccgagaaaattctgtttctatccagcattattccattcgattgcttactgacacctccaggagatttgcggttcacccccataccgctcttgatcccgtcccaggtcagggccctgggcggactgctgaaattcctgggcaggagaaggattggggtggagttagaggactataatgttagtgttccaattctgggctttaagaagtttatgcttacgcacctggttaacattgaccaggacacctatagcgtccttcagatcttcaagtctgaatctcacccctcagtttataaagtggcaagtggactcaaggagggcctgtctctcttcggcatcttgaatcgatgccactgtaaatggggagaaaagctgttatag

SEQ ID NO: 16147 - DNA, 324 bp, synthetic construct
  misc_feature 1..324: note = Description of Artificial Sequence: Synthetic coding sequence
  source 1..324: mol_type = other DNA
aagattttgtttttaagcagcattattccttttgattgcttgttgactgttagagcccttggggggctcttgaaatttctgggccgacggagaattggcgtggaactcgaagactacaatgtatccgtgccgatactcggtttcaaaaagtttatgttaacacacctggtgaacattgatcaggacacctatagtgtgcttcagatcttcaaaagcgagtcgcaccccagtgtgtacaaagtagcctccggattgaaggaagggctgtctctgttcgggattctaaaccgatgtcattgtaaatggggcgagaaactgctatag

SEQ ID NO: 16148 - DNA, 765 bp, synthetic construct
  misc_feature 1..765: note = Description of Artificial Sequence: Synthetic coding sequence
  source 1..765: mol_type = other DNA
atggcttcccttggcgcaaatcccagaagaacaccgcagggtccgcgcccaggtgctgcttctagtggcttccccagtcccgctcctgtgccaggcccacgcgaagctgaagaggaggaggtcgaagaggaagaagagctggccgagatccacttatgtgtcctttggaattccggatatttgggcatcgcgtattacgatacatccgactcaactattcattttatgcctgacgctccggatcatgagtcactgaagcttctccagagggtgctagacgagataaatcctcagtcggtggtgacttctgccaagcaagacgaaaatatgacacggttcctcggaaaactagcttctcaagagcacagagaacctaagcggccggagattattttcctgcctagcgttgacttcggtcttgagatcagcaaacagaggctgctgtctggcaattatagttttatcccagacgctatgaccgctactgagaagatccttttccttagcagtatcatccctttcgattgtcttctgactgtccgagccctaggaggattgttgaagtttctgggacggcgccgtattggagtggagctcgaggattacaatgtgagcgtccccatcctggggttcaaaaagtttatgcttacccacctcgtgaacatcgaccaagacacttacaggctcgaatgcaacggcgctattagcgcgcagtgcaacttatgtttgcttggtagtagtgattcacccgcaagtgcttcctag

SEQ ID NO: 16149 - DNA, 1542 bp, synthetic construct
  misc_feature 1..1542: note = Description of Artificial Sequence: Synthetic coding sequence
  source 1..1542: mol_type = other DNA
atggcgatggagatagacagcagaccaggtgggttacccggatcaagctgtaatctcggagctgcccgtgagcacatgcaagcagtaaccaggaattacatcacccacccaagggtcacataccggacagtctgtagtgtgaacggccccctcgtggtgttggacagagttaaatttgctcagtacgccgaaatcgtgcacttcactctgcccgatggcacccagcgcagcggtcaggtgcttgaagttgccggcactaaggccatagtgcaagtgtttgagggaacgagtggtatcgacgccaggaaaacaacgtgtgaatttaccggagatattttgagaacacccgtgtcagaggacatgctgggaagggtgtttaatggatccggaaagcctatagacaagggacctgtggtgatggccgaagactttcttgacatcaacggacagccaatcaacccacactcccggatttaccctgaagagatgatacagaccggaatctcacctatcgatgtgatgaattctatcgcaagaggccagaaaattcctatttttagcgccgccggcctgccccacaatgagattgccgcacagatctgtagacaggccggcctggtgaaaaagtcaaaggcggtactggattatcacgacgacaattttgctatcgtattcgcagcaatgggagtgaacatggaaacagctagattttttaagtccgactttgagcagaatggcacgatgggcaatgtgtgtctgttcctcaatcttgcaaatgatcccaccattgaacggatcatcaccccaaggctggctttgacgacggcggagttcctcgcatatcagtgcgagaaacacgtgctcgtaatcttaactgacatgagctcttacgcagaagctctgagggaggtgtctgctgcaagagaggaggtgcctgggaggcgcggttttccgggctatatgtatacagatctggccacaatctacgaacgcgcaggtagggtggagggcaggggaggctctattactcagatacccattctgaccatgcccaacgacgacataacgcaccccatcccagatctgacagggttcatcaccgagggtcagatctacgtggatcggcagttgcacaaccggcagatctatcctcccatcaatgtgctgccgtcgttgagtagactgatgaagtcggccattggtgagggaatgacacgaaaggatcacggcgacgtctcgaaccaactgtatgcatgctacgctatcggcaaggacgtgcaggctatgaaggctgtggtgggcgaagaggcccttacaagcgaagatttgctgtacctggaattcctccaaaaatttgagaaaaactttataaaccaaggaccgtacgagaatagaagtgtgtttgaatctcttgatcttgggtggaagctgctacggatatttccaaaggaaatgctcaagcgcatccctcaggccgtgatcgatgagttctatagcagggagggagcactccaggacctggctccagatacagctctatag

SEQ ID NO: 16150 - DNA, 759 bp, synthetic construct
  misc_feature 1..759: note = Description of Artificial Sequence: Synthetic coding sequence
  source 1..759: mol_type = other DNA
atgtcacgtcaaagcactctctatagtttcttcccaaaatcccccgctctgtctgacgcaaacaaagctagtgccagggcctcccgggaaggcggaagggcagccgccgcccccggggcatctccctcgcccggaggcgatgccgcctggtccgaggctggtcccggtcccagacctttagctcgctctgcctctcctccaaaggccaagaacttgaacggaggactgagacggagtgtagcgcctgctgccccaacgtcctgcgactttagtccaggcgatctggtgtgggcaaagatggaaggctacccttggtggccctgcttggtgtacaaccatccattcgatggtacttttatcagagagaagggaaagagtgtgagagttcatgtccagttttttgatgactctcccacacggggatgggtctccaaacgcctactcaaaccctatacaggaagcaagtcaaaggaggcgcaaaaaggcggccacttttattcagccaaaccagaaatcctgagagccatgcagcgggccgatgaagctctgaacaaagataaaataaaaagactagaactggcagtctgcgacgaaccaagcgagccggaggaggaggaggaaatggaggtcggaacaacttacgtcaccgacaaatcagaagaggataacgaaatcgagagcgaagaggaggtgcaaccgaaaacccaaggcagtcggagatcaagccggcagatcaagaagaggagaaaaaagcggtag

SEQ ID NO: 16151 - DNA, 3177 bp, synthetic construct
  misc_feature 1..3177: note = Description of Artificial Sequence: Synthetic coding sequence
  source 1..3177: mol_type = other DNA
atggttactggcaatggctccctcaagagaaagtccagcagaaaggaaacccccagcgcaactaaacaggcgacaagcatcagctccgaaaccaaaaacacccttagggcattttcagctcctcagaactcagaaagccaagcccacgtctccgggggaggcgacgattccagccgaccaaccgtatggtaccatgagactttggagtggctcaaggaagagaagaggcgcgacgagcaccggcgtcgtcccgaccaccccgactttgatgcgagcaccctttacgttccagaagattttcttaactcctgtacgccagggatgaggaaatggtggcagattaaaagccagaactttgatttggtcatttgttacaaggtaggaaaattctacgaactgtatcacatggacgcactaattggcgtgagcgagttagggctcgttttcatgaaggggaactgggcccattctggctttcccgaaatcgctttcggcagatatagcgatagtctggtgcagaagggctataaagtggcccgcgtggaacagactgaaactcccgagatgatggaagctaggtgccggaagatggcccatatttcaaagtacgatcgtgtggtgaggagggaaatttgccgcattatcaccaaagggacccagacatatagcgtcctggagggcgatccctcagagaattactccaaatacttattgagcctgaaggaaaaggaagaggattcctctggtcacacccgcgcttatggtgtctgcttcgtcgatactagcctgggcaaattcttcattggccagtttagcgatgaccgacactgtagtcgctttaggacactggtggctcactacccccctgtgcaggtcctgttcgagaagggaaatctttccaaagagactaaaaccatactcaagtcaagcctaagttgttccctgcaagagggtctgatcccgggatcccaattctgggacgcgtctaagacgctgcgcaccctgttggaagaagagtacttcagagagaagctctctgacggcatcggcgtgatgctacctcaagtgttgaagggcatgacatcagagtcagactccatcggtctgacccctggcgagaaatccgagctggctctttcagcactcggagggtgtgttttctatctgaagaaatgtctcatcgaccaggaactcctgtccatggctaactttgaagagtatattccgcttgattcggatactgtatccaccacaagaagtggggcaatcttcaccaaggcctatcaacggatggttctggacgctgtcaccctcaacaacttggagatttttctgaacgggaccaatggctcaaccgaggggacgctactggagagggtcgacacctgtcacacacccttcgggaagcgtctgctaaagcagtggctgtgcgcccctctttgtaatcactacgcaatcaatgacagactggacgccatcgaagaccttatggtggttccagataaaatctccgaggtggtggaattgctcaagaagctgcctgatctagaacgccttctgtctaagatccacaacgtcgggtcaccgctgaaatctcaaaaccaccctgatagtcgggctattatgtatgaggagaccacttactcgaagaaaaaaatcatagactttttgagtgccctagagggtttcaaagtgatgtgcaagatcattggaataatggaagaagttgccgacggattcaagtcgaaaatacttaaacaggtgatctctctgcagaccaagaacccagaaggtaggtttcctgatttgaccgtcgaactaaatcgttgggataccgcctttgaccacgaaaaggcacgaaagaccgggctgatcacacctaaagcaggctttgatagcgattatgatcaggcactggcagatattagggaaaacgagcagtcacttttagaatatctggagaaacaaagaaaccgtattggatgtcggacaatcgtgtattgggggatcggcaggaaccggtaccagctggagatccctgaaaatttcaccacgcggaatctgcctgaggagtacgagctgaagtctactaaaaagggctgcaagcggtactggactaaaaccatagaaaagaaacttgccaatctgatcaatgcagaagaacggagagacgtctcacttaaagactgcatgcgcaggctattctataattttgataaaaattacaaggactggcagagcgcagtcgaatgcattgccgtactcgatgtgctgttatgtcttgctaactactcccgcggaggcgacggtcccatgtgcaggccggtcatccttcttcctgaggatacccccccatttttagaactcaagggcagtaggcacccctgcatcactaagacattctttggggatgatttcatccccaacgatattctgattggctgtgaggaggaggagcaggagaacggtaaagcttactgtgtgctggtgactggacccaacatgggaggaaagtctactttgatgcgccaggctggcttgctggccgttatggcacagatgggatgctacgtacctgccgaagtgtgccggctgacaccaatcgaccgcgtgtttactcggctaggcgcttcggataggatcatgagtggcgagtcaacattcttcgtagagctgagtgagaccgcttccattttaatgcacgccacggcgcacagcctcgtgttagtggatgagctgggccgcgggacagcaactttcgacggaacagctattgcaaacgctgtggttaaagagctcgctgagactatcaagtgtcgcacccttttctctactcattaccattctctggttgaggactacagccagaatgtggctgtgcgcttggggcacatggcgtgcatggtggaaaacgaatgtgaggatcccagtcaagagactattacatttctgtataagtttattaagggagcctgtcccaaatcttatggctttaatgccgctcgccttgcaaatctcccggaggaggttattcagaaggggcacagaaaggcacgagagttcgagaagatgaaccagtctctgcggctattcagggaggtgtgtctcgcttcagaacgtagcaccgtagatgcggaggccgtgcataagctgctaactctgataaaggagctatag

SEQ ID NO: 16152 - DNA, 3693 bp, synthetic construct
  misc_feature 1..3693: note = Description of Artificial Sequence: Synthetic coding sequence
  source 1..3693: mol_type = other DNA
atgagcagacagtcgaccttgtactcctttttcccgaagtctcccgcgctgtccgatgccaacaaggcatctgccagggcgagcagggaaggaggcagggccgcagccgccccaggtgcctcaccttcacctggcggcgacgccgcatggtctgaagccgggcccggtccacggcccttagctagatcagcgtcacctcctaaagcgaagaacctgaacggggggttaaggcgctccgtgggcaccacgtatgtcactgacaaatccgaggaggacaatgagatcgagagcgaggaggaagttcagccgaagacacagggaagcaggcgaagctcccgccagattaaaaagaggagagtgatcagcgactctgagtccgatatcggcggctctgacgttgagttcaagcctgacacaaaagaggaagggtcctctgacgaaatcagctcgggcgtgggggatagtgaatccgagggcctcaacagccccgttaaagtggcacggaagcgaaaaagaatggttactggcaatggtagtcttaagaggaaatcaagtagaaaagaaactccgtccgctacaaagcaggcaacaagtatttccagcgagaccaagaatacactgcgcgcatttagtgcacctcagaattccgaatcacaggctcatgtgtccggagggggagatgactcctcgagaccaacagtgtggtaccatgagactcttgaatggctcaaggaggagaagcgaagggacgaacaccggcgccggcccgaccacccagatttcgacgcatccactctgtacgtccccgaagatttcctgaacagctgtacacctggcatgcgcaagtggtggcagattaaaagccaaaactttgaccttgtgatttgttataaggtggggaagttctacgaactgtaccacatggatgctctgattggcgtgtcggaactagggctggtctttatgaagggcaactgggcacattcagggtttcctgaaattgcctttggtaggtattccgattcgttggtgcagaagggctacaaggtcgccagagttgaacagacagaaacaccagaaatgatggaagccaggtgtcgtaagatggctcacatctccaagtacgaccgggtggtccggcgcgagatttgtagaatcataaccaagggaacccagacttacagtgtgctagagggtgatcccagtgaaaattactccaagtacctactctccctgaaagaaaaggaggaagactctagtggtcatactagagcttatggcgtctgttttgttgatacatccctcggaaaattcttcatcggacaattctcagatgacagacattgtagccggtttcgcacactagtggctcactacccgccggtacaggtgctattcgaaaagggcaacctcagcaaggagactaagacgatcctgaagtctagtctttcctgctccctccaggaggggcttatcccaggcagccagttttgggacgcaagtaagacgcttcgcacgcttctcgaagaagagtactttcgggaaaagctctctgacgggattggcgtaatgttgccccaggtacttaagggaatgacaagcgagtctgattcgatcggacttacacccggcgagaagtctgagctcgccttatcagctctaggcggatgcgtcttctacctgaagaaatgcctgattgatcaggaactcctatctatggccaattttgaagagtatattccattggacagtgacacggtgtcgaccactagatccggggccatcttcacaaaggcctatcagaggatggtgctcgacgccgtaactctcaataatctggagatattccttaacggcacaaacggaagcacagaaggtactctgctggagcgcgtggacacatgccacacaccgtttggcaagcggctactaaagcagtggctttgcgcaccactttgcaaccactatgccattaatgacagactggatgccatcgaagatctgatggttgtgccagacaaaatttccgaggtggtggagctgttgaaaaaactgccggatttggagagattactcagcaaaatacacaatgttggcagccccctcaaatcacagaatcatcctgatagtagagcgattatgtacgaggaaactacgtattctaagaagaagatcattgattttttgagcgcactcgagggctttaaagtgatgtgtaagattatcggaatcatggaggaagtagctgatggttttaaaagcaaaatccttaagcaagtcatatctctgcaaaccaagaatccagagggcaggttccctgacctgactgtggagctcaaccggtgggataccgcctttgatcatgagaaagccaggaaaacgggactgattactcccaaggctgggtttgattcagattacgatcaggcactggcagatatcagggaaaatgagcagagtctgctggagtacttggagaagcaacggaatcggatcggctgccggaccatagtgtattggggcatcggcagaaaccgttatcagttggaaattccagagaacttcaccacacggaatctgcccgaagagtacgaactgaagagcacaaaaaaaggctgtaagcgttattggaccaagaccattgagaagaaactcgctaatctaataaacgcagaggagcgccgtgatgtcagcctgaaagattgtatgaggcgtctgttttataacttcgataagaactacaaagactggcagtcagccgtcgaatgcatagctgtgctggacgtgctgctttgcctagctaactattctcgagggggggacggtcccatgtgtcggcccgtgatcctcctgccagaagacactcctccattccttgaactcaagggatctcgacatccatgtatcaccaaaacattcttcggggacgacttcattcctaatgatatcctgatcgggtgcgaggaggaggagcaagagaacggcaaggcctattgtgtgctagtcactgggccaaatatgggggggaagtcgaccctgatgcggcaagccggactgctggcagttatggcacagatgggttgttatgtaccagccgaagtctgtcgactaacaccaatcgacagggtcttcactcgccttggagcgagcgaccgaataatgagcggcgaatccacattcttcgtggaactgtccgagaccgccagcattctcatgcacgccacagcacacagtctagtgttggttgatgaactggggagaggtaccgccacattcgatggcacggctatcgcaaacgcagtggtgaaggagttggctgaaactatcaagtgccggactctgttctcgactcattaccattccctggtcgaggactattcccagaacgtggcagtccgcctgggccacatggcgtgtatggtcgagaatgaatgcgaagacccctcacaggagacgatcacgttcctgtataaattcatcaagggtgcttgccctaagtcctacggatttaacgccgcccgcttggccaacctccccgaggaagtcatccagaagggccacaggaaggcccgtgaatttgaaaagatgaaccagtctttgaggctgtttagggaggtgtgccttgcaagtgagaggtccaccgtggacgccgaggcagtccacaagcttctcacccttatcaaggagctctag

SEQ ID NO: 16153 - DNA, 975 bp, synthetic construct
  misc_feature 1..975: note = Description of Artificial Sequence: Synthetic coding sequence
  source 1..975: mol_type = other DNA
atgcggagattgttttataattttgacaaaaactataaagattggcagtcagcagttgagtgcatcgccgtgctggatgtcctcttgtgtcttgctaactattctcgcggcggcgacggccccatgtgcagacctgtcatcttgttacccgaggataccccgccatttcttgaactcaaaggcagccggcacccttgtataaccaaaacattcttcggcgatgattttatccctaatgatattcttatcgggtgtgaagaggaagaacaagagaatggaaagatcgtgtgtctgcttctggaccagatttggggtgcttcgttacgcatgcgccaagccggtcttctggccgtgatggcacagatgggctgctatgtgcccgcagaagtctgtaggttgacacctatagacagggtgtttactcggctcggtgcgtcagaccggattatgtctggggagtctacatttttcgtggagctttccgagacagcctccattctgatgcacgctacggcccattcgttggtgcttgtggatgaattagggcggggaacggccacctttgacgggactgcgattgccaatgctgttgtaaaggagttagctgaaaccatcaagtgtcgaactcttttctccactcactatcacatctccaggaggcttttcagcaagtgttgctgtttgggacacatggcctgcatggtcgagaatgaatgcgaggatccttcacaggaaacgatcactttcctctacaaattcatcaagggggcgtgccccaaaagttatgggttcaacgcggcaaggctagcgaacttacctgaggaagtaattcagaagggacaccggaaggccagggagttcgaaaagatgaatcaaagtttgcgtctgtttagggaagtctgcctagcaagcgaacgctcgacggtggacgctgaggcagttcacaagcttctgaccctgataaaagagctctag

SEQ ID NO: 16154 - DNA, 3201 bp, synthetic construct
  misc_feature 1..3201: note = Description of Artificial Sequence: Synthetic coding sequence
  source 1..3201: mol_type = other DNA
atgagtcggcagagtaccctctactcttttttccctaagtccccagcactgagcgacgctaataaagcctctgcacgagcgtctcgggaaggaggacgtgcagcctgtccaagagggttatctttcccaagaagaggctgcggcctggaacgaggctgggcctggaggcctctggctagatcagcgtcaccccctaaggccaagaacctgaatggagggctgagacggtctgtggctccagccgctccaacttcatgtgacttttccccaggagatctggtctgggccaagatggagggctacccttggtggccttgcctggtgtataatcatccttttgatggcaccttcatcagggaaaagggtaaatccgtgagggttcatgtgcagtttttcgatgacagcccaacacgcggctgggtgtctaaaagactcttgaaaccatacacaggatcgaagagtaaggaagctcaaaaaggcggccacttttacagtgccaaaccggagatactcagagctatgcagcgggcggacgaagcccttaacaaggacaaaatcaaacgtcttgagctcgccgtctgcgacgagccttccgagccagaggaggaggaggagatggaagttggaaccacttacgtgaccgataagagtgaggaggacaatgagattgagtccgaggaagaggtgcagccgaaaacgcagggtagtcggagatccagtcggcaaatcaaaaaaaggagagtgatttccgattcagaaagtgacatagggggcagcgacgtcgaattcaagcctgatacgaaagaagagggatcatccgacgaaatcagcagtggggttggcgatagtgaaagtgagggtctgaattcacctgtgaaagtggctcgaaagaggaagcggatggtgacagggaatgggtcgcttaaacggaaaagtagcaggaaagagacaccaagtgccactaaacaggcgacctctatatcctcagaaactaaaaacactctgagagcattttcagctcctcagaattccgaaagccaagcccatgtgtctggcgggggcgatgactcctctcgcccaactgtgtggtaccacgaaacactggaatggctcaaggaagagaagagacgcgacgagcaccgccgaagaccagaccaccccgactttgacgccagtaccctctacgtgccagaggatttcttgaattcctgcacccccgggatgcggaagtggtggcaaatcaaaagccagaacttcgaccttgtcatctgctacaaagtgggaaaattctatgagttgtatcatatggacgcattgattggggtttccgaattaggccttgtgtttatgaaaggcaactgggcccatagcggctttcctgagattgcatttggacgctactctgattccctggtccagaaagggtataaggttgctcgggtcgagcagacagagacacctgagatgatggaagcccgctgtcgaaaaatggcccacatatccaagtacgacagagtggtgcgacgggagatatgcaggatcatcacaaagggtacacagacttactctgttttggagggggatccatccgaaaactactctaagtaccttctgagccttaaggaaaaggaagaggactcttcagggcatacccgcgcctacggcgtgtgcttcgtggacacaagccttgggaagttcttcatcggacagtttagcgatgacaggcattgctccagattccggaccctggttgcacactacccgccagtgcaagtgctctttgagaagggaaatttgtccaaggaaaccaaaaccatcctcaagtcctctttatcatgctccttgcaggaaggccttatacctgggtctcagttttgggacgcatctaaaaccctgcggacactgctggaggaggagtacttccgcgagaagctgtccgacggaatcggggtgatgcttccacaagtcctcaaaggcatgaccagcgagagtgatagcatcggcctgacccccggtgagaagtctgaactagccttgtctgccctgggaggctgcgtgttctacctcaagaagtgtttgatcgaccaagagctactgagtatggccaactttgaagaatatatacccctcgatagcgacacggtgagtaccacccggagcggtgccatctttacaaaagcctaccagagaatggtcttggatgcagtcaccctgaacaacttggaaattttcttgaatgggacaaatggctctaccgaaggcaccctcctagaacgagtggatacctgtcatacaccctttggcaagcggctcctgaagcagtggttgtgcgcaccgctttgcaaccactacgccatcaatgaccgtctagacgccatcgaggaccttatggtagtgcctgataagatttctgaagtggttgagctcctcaagaagctccctgatctggagcgcctgctttctaagatccacaacgtaggcagtccgctaaaatcccagaatcacccagactcccgtgctataatgtatgaagagaccacctacagtaagaagaaaataattgatttcttaagcgccttggaggggtttaaggttatgtgcaagataataggaatcatggaagaagtcgcagatggtttcaagtccaagattctaaagcaggttatctctctgcagacgaaaaacccagagggcagattccccgatttaacagttgagctgaatcgctgggacactgcgttcgatcatgagaaggccagaaagacaggactgatcacacctaaagccggtttcgactccgattacgatcaggctcttgcagacatacgagagaatgaacagtctctgctggagtacctggagaaacagcgcaacaggattggctgtcgaacgatcgtgtactggggaatcgggcggaacagatatcagttggagatccctgagaactttactacacgaaacctccctgaagaatacgagttgaaaagcacaaagaagggttgtaaaaggtattggaccaaaaccattgaaaagaaactggctaatctgattaacgctgaggaaaggcgcgatgtctctctcaaggactgcatgcgccgcttgttctacaactttgacaagaattacaaagactggcagtccgctgtcgaatgcattgcagtgcttggaaaaacactgaataaattagtgcttcggttgtag

SEQ ID NO: 16155 - DNA, 1569 bp, synthetic construct
  misc_feature 1..1569: note = Description of Artificial Sequence: Synthetic coding sequence
  source 1..1569: mol_type = other DNA
atgagaaaacctagggccgcagtcgggtcagggcaccgcaaacaggccgcaagccaggagggcaggcaaaaacacgctaaaaataattctcaagccaagcccagcgcctgcgacgcgggcctggcgaggcagcctgaggaagtggttttgcaggctagcgtgagttcgtatcatctctttagggacgtcgcagaggtcactgccttccgcggtagcttactgagctggtatgatcaggaaaaacgagatctgccctggcggagacgtgccgaagacgaaatggatcttgataggagggcttacgctgtgtgggttagtgaggttatgctacagcaaacacaggttgcaaccgtaatcaattactatacaggctggatgcagaagtggcctactcttcaggacttagccagcgcgtctttagaggaagtcaaccaactgtgggctggtcttgggtattactctaggggaaggcgcctccaggaaggagcacggaaagttgtggaggaactgggcgggcatatgccaagaactgccgagacgctgcagcagcttttaccgggagttggccggtacacagccggcgccatagcctctattgccttcggccaggctactggggttgttgatggaaacgttgcccgggtgctttgtcgggtacgcgccatcggtgcagatccaagttctaccttagtttcccagcagctgtggggactcgctcaacagctggtcgacccagccagaccaggcgatttcaatcaggccgccatggaacttggcgccactgtctgcacaccccagaggcccctgtgctctcagtgtcctgtggagagcctgtgcagggcccgccagagggtggaacaagaacagctgctggcctccgggtcactttctggtagccctgacgtggaagaatgcgcaccgaacactgggcagtgtcacctctgcttgccaccatctgagccctgggatcaaacgctcggcgtcgtgaattttcctagaaaggcctcccgtaagccccctcgtgaggaaagttcggcaacctgcgtactagaacaacctggcgcactgggagctcagattctgctggtgcagcggcccaacagcggtttgctggccggtctatgggagtttcccagtgtgacctgggagccaagtgagcaactgcagcggaaagccctcctgcaggaattgcagaggtgggcaggtcctttacctgctacgcatctaagacacctcggagaggtagtacacaccttctcacacatcaagctgacataccaggtctatggtcttgcactcgaaggtcaaacaccagttacaacagttccgccaggggcccggtggttgacccaggaggagtttcacactgcggccgtgtctactgcgatgaaaaaagtgttccgcgtctaccaaggccagcaaccagggacatgcatggggagtaagcgaagccaagtgtctagtccctgctctcggaaaaaaccacgcatggggcaacaggtgctggacaattttttccgctcccacatctcaactgacgcacatagcctcaactctgctgctcagtag

SEQ ID NO: 16156 - DNA, 1566 bp, synthetic construct
  misc_feature 1..1566: note = Description of Artificial Sequence: Synthetic coding sequence
  source 1..1566: mol_type = other DNA
atgaggaagccccgcgcagcagtaggatctggccatcgaaagcaggccgccagccaggaaggacgtcagaagcacgcaaaaaacaattcccaagctaagccgagcgcatgcgatggacttgcccgacagccggaggaggtggtgttacaggcctctgtgtcaagctatcacctgttcagagatgtggcagaggttaccgcgttccggggatctctcttgagctggtatgaccaggaaaagcgcgaccttccatggaggcggagggccgaagacgaaatggacttagatcggagggcttacgcagtctgggtgtctgaagttatgttgcagcagactcaagtggccacagttattaattattacacaggttggatgcaaaagtggcccaccctgcaagaccttgcctcggcttccctggaggaagtgaaccagctctgggcaggcctcggatactattccaggggcaggaggctgcaggagggagcccgcaaagtggttgaggagctgggtggacatatgcctaggaccgctgagacgctccagcagttattgcccggcgtcggacggtacaccgctggtgctattgcttccatcgcatttggtcaggctacaggcgtcgtcgatggcaacgtcgcccgagtgctttgccgggtgagagccattggtgctgacccatctagcacgttagtgagccagcagctttggggtttggcacagcaactggtggaccctgccagaccaggcgatttcaaccaggccgcaatggagctcggcgcaactgtgtgcactccacagcggcccttatgttctcagtgccccgtggagagtctgtgtagggcaaggcaaagggttgagcaggaacagctgttagctagtgggtcgctcagcggttctcccgacgttgaggagtgcgcccccaatacgggacagtgtcacctatgcctgccaccttccgaaccatgggatcaaacactaggcgtggttaacttccctcgaaaagctagcaggaagccacctcgggaagagagttccgctacttgcgtcctggagcaacccggagctctgggcgctcagatactgttggttcaacgcccaaactccggcttgctagcaggtctgtgggagttcccctcagtcacgtgggagccttccgagcaactgcaaaggaaagctttgttgcaagagctccagcggtgggctggcccactacccgcaactcacctcaggcacctgggcgaggtcgttcacaccttttcccacatcaagttgacttatcaggtgtatgggttggcattggaaggacagacacccgtgaccactgtacctcctggcgcaagatggctgacgcaagaagaattccatacagctgcagtttctactgccatgaagaaggtgttccgggtctaccagggccagcagccagggacctgtatgggctcgaagcgctcacaggtctccagtccttgtagccggaagaagccaagaatgggccaacaggtcttagataactttttccgttctcatatcagcacagacgcacactctctcaattcagctgcacaatag

SEQ ID NO: 16157 - DNA, 1641 bp, synthetic construct
  misc_feature 1..1641: note = Description of Artificial Sequence: Synthetic coding sequence
  source 1..1641: mol_type = other DNA
atgaccccactcgtgagccgcctcagcagactttgggccattatgaggaagccacgagcagcggttggatcaggccatcgcaaacaggcagcaagccaggaaggacgtcagaagcacgctaaaaacaactcgcaggccaaacccagtgcttgtgacggtatgatagccgagtgcccaggtgccccagccggactggcccgacagccggaggaagttgtgttacaggcgtcagtgtccagttaccacctgtttagagatgtcgcagaggtcactgcgttccggggttccctgctttcttggtacgatcaggagaagcgagatctgccctggagaagacgcgcagaggacgagatggatcttgaccggcgcgcatatgctgtgtgggtgtccgaagtgatgcttcagcaaacccaggtagctacagtaatcaactactatacaggctggatgcagaaatggcctacgcttcaggacctggcctctgcatcactcgaggaggtgaatcagctgtgggcaggtctcggttattacagccgcggcagaaggttgcaagaaggcgccaggaaagtggtcgaggagctgggcggacacatgccccggaccgctgaaaccctgcaacagcttctgccaggggtgggaaggtatactgccggagccattgcatccattgctttcggccaggccaccggtgtagtcgatggcaacgtggctcgcgttctctgcagagtgcgggctattggggcagaccccagcagcacactggtgtctcagcagctctggggtctggcccagcaacttgtcgaccccgccaggccaggggatttcaatcaggcagccatggaactgggagctaccgtctgcacccctcagcgacctctatgctcacagtgcccagttgagagtttgtgccgcgcacgacaaagggtggagcaggagcagctgttggccagtgggagtctgagcggatccccagatgtggaagaatgcgcccctaatacaggacagtgccacctctgcctgcccccatctgagccctgggatcagacactgggtgtcgttaattttccccggaaggcctccaggaaacctccacgggaggagtcttcagccacgtgcgtgcttgagcagcctggggcactgggcgcccagatactcctggtgcagaggcccaacagcggattactagcaggtctttgggagttcccctccgtgacgtgggagccctctgaacagctgcaacggaaggctttgctccaggaattgcagcgctgggctggtccacttccagcaacacacttaagacatctcggtgaagttgtacatacgttctcccacataaaactcacctaccaggtatacgggctggcgctcgagggacagacgcccgttaccactgtgccacccggggctaggtggttaacacaagaggagtttcacaccgctgccgtttcaactgctatgaagaaagtcttccgtgtgtaccaggggcagcagcccgggacatgcatggggtccaaacgaagccaggtgagtagcccatgctctcgcaagaagcccagaatgggacagcaagtgctcgataatttttttagaagccacatctctacggatgcccatagcctaaactctgccgcccagtag

SEQ ID NO: 16158 - DNA, 1599 bp, synthetic construct
  misc_feature 1..1599: note = Description of Artificial Sequence: Synthetic coding sequence
  source 1..1599: mol_type = other DNA
atgcgcaaacctcgtgccgcagtggggtcaggccatagaaaacaggccgctagtcaggaaggaagacagaagcatgcgaagaacaattcccaggccaagccatcagcctgcgatggaatgattgccgaatgccccggagcgcctgcaggacttgcaaggcaacctgaagaagtagtcctgcaggcttccgtctcttcctatcatctattcagagatgtagcagaagtgacagccttccggggctccctcctgtcctggtacgatcaggaaaaacgtgatcttccttggcgcagaagagcagaggatgagatggatctcgatcggagggcctatgctgtgtgggtctccgaggttatgcttcagcaaacccaggtggcaacagtcatcaactattacacagggtggatgcaaaagtggcctacgttgcaagatttagccagtgcctcacttgaggaagttaaccagttgtgggccggactgggttactactcccggggacggcggttacaagagggagctcgaaaggtcgttgaggaacttggaggtcatatgcccagaacagccgagactctgcagcagcttctgccaggagtagggcggtacacggccggagcgatcgcaagtatcgcctttggacaagctacaggagtcgtcgacggtaatgtagcaagggtcctctgtagggtgcgggctatcggagctgacccttccagtactctcgtttcacagcagttgtggggcctcgcacagcagctcgtggaccctgcccggcctggagactttaatcaggcggcgatggaacttggcgctactgtgtgcacacctcagcggcccctctgttctcagtgcccagtcgaaagcctgtgtcgggccagacagcgggtggaacaggaacagttattggccagtggttctttgagcggtagtcccgacgtggaagaatgtgcccctaacacgggacagtgccacctgtgcctgcctccatcagagccttgggatcagacccttggagtggtgaacttccctcggaaagcttctaggaaaccccccagagaagagtcttccgcgacctgtgttctagagcagcctggagcactgggagcccaaatcctcctcgtccagcggcctaattcgggactgctggccgggctgtgggagttcccttccgtcacctgggaaccatccgagcagctgcagcggaaggccctgctccaggagctgcaacgctgggcaggaccgttaccagcaacacacctccgccacctgggtgaagttgttcacacattctctcatattaagctgacatatcaggtgtatggactggccctcgaaggacagactcccgtgacaaccgtacctccgggcgccagatggctgacccaagaggagtttcatactgctgccgttagcacggcaatgaaaaaagtcttccgagtttaccagggccagcagcctgggacctgcatgggcagcaaacgctcccaggtatccagtccctgttcgcgaaagaagccccgaatgggccagcaagtgctagacaattttttccgctcccacattagtaccgacgctcactcccttaactccgccgcgcagtag

SEQ ID NO: 16159 - DNA, 1566 bp, synthetic construct
  misc_feature 1..1566: note = Description of Artificial Sequence: Synthetic coding sequence
  source 1..1566: mol_type = other DNA
atgaggaagccaagggccgctgtagggagcggccacaggaaacaggctgcgtcacaggaagggagacaaaaacatgctaagaacaattcacaagccaaaccctccgcctgtgacgggctggctagacagcctgaggaagtggtgctccaagcgtccgtgagcagttaccacctttttcgggatgtagccgaggtgaccgcttttcggggttctctcctctcgtggtatgatcaggagaaacgggacctaccctggcgaagaagggcagaggacgaaatggatttagatcggagagcatacgccgtttgggtgagtgaggtgatgctgcagcaaacacaggtcgccaccgtgataaactattacacgggctggatgcagaagtggccaactctgcaggatttggctagcgcatccctggaggaagtcaaccaactgtgggctggtcttggatattactctagggggcggagattacaggagggcgctcggaaggtagtggaagagctggggggacacatgcctagaaccgccgaaaccctccagcagctactgcccggcgtgggcaggtacacagcaggggcaatcgcttcgatcgcatttgggcaagccactggcgtggtcgatgggaacgtggcaagggtcctgtgtcgagtcagagccattggagccgatccgtccagcacccttgtatcacaacagttgtggggccttgcccagcagctggtcgaccccgctagacctggggatttcaatcaggccgcaatggaactgggcgctacggtttgtacaccacaacgccctttgtgtagccaatgccccgtcgagagtctgtgccgggctcggcagcgggtcgaacaggagcagctgttggcctcaggaagtctctccggctctcccgacgtggaagaatgcgctcctaacaccgggcagtgccacttatgcttgcccccatcggagccgtgggaccaaacactgggcgtggtcaactttcctcgcaaagcatcacgtaagccacctcgcgaagagagcagtgcaacctgtgtcctcgagcagcccggagccctaggagcccaaattttgcttgtgcagagacctaacagcggcctccttgccgggttatgggaattcccaagcgtcacatgggagccaagcgagcagttacagcggaaggcgttgctccaggagctgcagcgttgggcagggccgttgcccgccacgcatctgcggcatctaggtgaggttgtgcatacattttcacatattaagctcacataccaagtctacgggctggcattagaggggcagacccccgtaaccacggtaccacctggagcgagatggctcacccaggaggagtttcataccgccgcggtgtccaccgccatgaagaaggttttccgcgtgtatcaagggcagcaacccggcacatgcatgggtagtaagcgatcccaagtttctagtccctgcagccgcaagaagcccaggatgggacaacaggttcttgacaactttttccggtctcacatcagcacagatgcccattctcttaactcggctgcgcagtag

SEQ ID NO: 16160 - DNA, 1611 bp, synthetic construct
  misc_feature 1..1611: note = Description of Artificial Sequence: Synthetic coding sequence
  source 1..1611: mol_type = other DNA
atgacgccgctggtgagcaggcttagtagactgtgggcaataatgagaaagcccagagcagccgtgggatctggccacaggaagcaagcagcctcacaagaaggccgccagaaacacgccaaaaacaactcacaggcgaaacccagcgcatgcgacgccggcctggcaaggcagcccgaggaagtagtgcttcaggcctctgttagttcctatcacctgttccgcgatgtagcggaagtgacagcctttaggggatctcttcttagctggtatgaccaggaaaagcgggatcttccctggaggcgaagagcggaagacgagatggacttggaccggcgggcctacgccgtctgggtgagcgaggtcatgttgcagcagactcaagtcgcgaccgtgatcaactactacactgggtggatgcaaaagtggccaacacttcaagatttggcttcggctagcctcgaagaagttaaccagctctgggcaggattgggatattatagtagaggaaggagattacaggagggagcccgcaaagtggtcgaagagctgggcggacacatgccccgcacagcagagacccttcagcagttgctgccaggtgtcggcagatataccgcaggggcaatcgcaagcattgcctttggacaggcgaccggtgtagtggacgggaacgtggcccgcgttctgtgtagagtccgagcaatcggggccgacccctctagtaccctcgtctcccagcaactgtggggtctggcccaacagttagtggatcctgctaggcctggcgatttcaaccaggccgccatggagttgggcgccacagtctgtaccccccagcgcccactgtgcagtcagtgcccagttgagtcattgtgcagggcgcgccaaagggtggagcaggagcagctcctagcctcaggctctctgtcaggctcccctgatgttgaggaatgcgcccctaacactggtcaatgccacctgtgtctcccaccctctgaaccttgggatcagaccttgggcgtggtcaattttccccggaaagctagtcgcaaaccccctcgtgaagaatccagcgcaacatgtgtactggagcagcctggagccctgggggcgcagatacttttagtgcagaggccgaactccggcctacttgccggcctgtgggagttccccagcgtaacatgggagcccagcgagcagcttcagaggaaggccctcctccaggagctgcagcgctgggccgggccactgcccgcaacacacctgagacacctcggggaggtagttcacaccttctcccatattaaactgacataccaagtatatgggctcgctttggaaggacagacgcccgtgactactgtcccccccggagcgaggtggctaacgcaggaagagtttcacacagcagcagtctctacagccatgaagaaagtgtttagggtgtaccaagggcagcagcccgggacgtgcatgggcagtaaacgtagccaagtgtcttccccttgctccagaaagaaaccacgcatggggcagcaagtgttggacaactttttccgctcacacatctcgaccgacgctcacagtctgaactccgcggcacagtag

SEQ ID NO: 16161 - DNA, 1608 bp, synthetic construct
  misc_feature 1..1608: note = Description of Artificial Sequence: Synthetic coding sequence
  source 1..1608: mol_type = other DNA
atgacacccctggtgagtcggttgtcacggttgtgggctattatgcgcaagccaagggccgctgtggggagtggccatcggaagcaggccgcttcacaggaaggacgtcagaaacatgctaaaaataactctcaggccaaacccagtgcttgtgatgggctggctaggcagcccgaggaagtggtcctacaggcctccgttagttcttatcacctcttccgggacgtagccgaagtgaccgccttcagaggcagtctgctgtcttggtacgatcaggagaagagggatctcccttggcgacggagagccgaagacgagatggacctcgacagacgagcttatgctgtctgggtgtctgaagtgatgctgcaacagacacaggtggccaccgtcatcaactattacactggctggatgcagaaatggccaacattgcaagacctcgcgtcagccagtctggaagaagttaaccaattgtgggccggcctgggctattattcgcggggccgcagactgcaggaaggagcaaggaaagtggtggaggaactgggtggacatatgcctcggactgctgaaacacttcagcagcttctcccgggcgtgggcagatatactgctggggccatcgcgtctatagccttcggacaggctactggagtggtggacggcaatgtggcacgcgtcctgtgccgtgtcagagccatcggcgccgacccatcatctacgcttgttagccagcagctgtggggattggctcagcagctcgttgaccctgctcggcccggggacttcaatcaggccgcaatggagcttggggcgactgtttgcacaccccagaggcccctatgctcccagtgtccggtagaatcactgtgtagagcccggcaaagggtggagcaggagcagctcctggcctctgggtctctgagcgggtcccctgatgtcgaggagtgcgccccgaatacaggccagtgccacctatgcttacctcccagtgagccgtgggaccagactctcggggtcgtcaattttccaagaaaggcctcccggaaacctcctagggaagagtcttccgcaacttgcgtcttagagcaaccaggggccctaggtgcccagattttgctcgtgcaacgccccaacagtggtctcctggcaggtctctgggagttcccgtctgtcacatgggagccctcagagcagctccagagaaaggctttattacaggagctgcagcggtgggccggccctctgcccgctacgcatctccgccacttgggtgaggtcgtgcatacctttagtcacattaagcttacctaccaggtttacggccttgcactagaaggacagactccggtcactacagtgccgcccggcgcacgctggttgacccaggaggagttccataccgctgccgttagtacggcaatgaagaaggtcttccgcgtgtaccagggacagcagcctggtacatgcatgggctccaaacgctcacaggtcagctccccctgcagcagaaaaaaacccagaatgggccagcaggtgcttgataacttctttaggtctcacatatctacagatgcccactctcttaactcagctgcccagtag

SEQ ID NO: 16162 - DNA, 876 bp, synthetic construct
  misc_feature 1..876: note = Description of Artificial Sequence: Synthetic coding sequence
  source 1..876: mol_type = other DNA
atgagaaagcccagagccgccgtgggttccggccatcgcaagcaagccgcctcgcaggaaggtaggcagaagcacgctaaaaataattctcaggcgaagccaagcgcatgcgacgggatgatagcagaatgccccggcgctcccgcagggttggcaagacagcccgaagaggtggtgctgcaagcaagcgtatccagctatcacctgttccgcgatgtcgccgaggtgactgcctttagaggctcacttttaagctggtatgaccaggagaaaagagatctgccttggcgtagacgcgccgaagacgagatggacttggacaggagggcatacgccgtttgggtatcggaagtcatgctgcagcaaacccaggtggcaaccgttatcaactattatacaggttggatgcaaaagtggcccaccctccaagacctggcctccgcctccttagaagaagtgaaccagctgtgggctggcctgggctactacagccgaggacggaggctccaggaaggtgctcgtaaggtcgtggaggagctgggaggacacatgccccgcacagcggagaccttacagcaactgttgcccggggtgggacgttacacagctggagccatcgcttcaatcgcctttggacaagcgaccggtgtcgtggacggcaacgtagccagggtcttgtgcagagtccgcgccatcggcgcggaccctagcagcacgctggtctcgcaacagctgtggggacttgcccagcagcttgttgaccccgcgaggccaggggattttaaccaagcggccatggagcttggggccacggtgtgcacaccacagcgccccctgtgctcgcaatgccctgtggagtcactgtgtagagcatag

SEQ ID NO: 16163 - DNA, 1599 bp, synthetic construct
  misc_feature 1..1599: note = Description of Artificial Sequence: Synthetic coding sequence
  source 1..1599: mol_type = other DNA
atgcggaaacccagagccgccgtaggctcaggtcacagaaaacaggcggcctcacaagaaggaagacagaagcatgctaagaataactcacaggccaaaccaagcgcctgcgacggaatgatagcagaatgtccaggtgcccctgcaggcctggcccgccagcccgaggaagtcgtgctacaggccagtgtgtcatcctaccacctatttcgcgacgtggccgaggtaacagcctttcgcggctctctgcttagctggtatgaccaggaaaaacgagacctaccctggcgccgacgggccgaagatgaaatggatctcgaccggagggcatatgccgtttgggtgtccgaggtgatgcttcagcagacccaagtcgcaaccgtgatcaactattacaccgggtggatgcagaagtggccgaccttgcaggacctcgcttccgcctcactggaagaggttaaccaactgtgggccggactcggttactactcgcggggtaggagactgcaggagggcgcccgtaaagtcgtggaggaactcggaggccatatgccacgaaccgctgagaccttacagcagctgctgccgggtgtgggacgttatacagctggggccattgcatcaattgcctttggccaggccacaggcgttgtagatgggaatgtggcccgggtcctgtgcagagtgcgggccataggggccgacccctcctccacacttgttagtcaacaactctgggggttggcccagcagctggtggatcctgcccgcccaggagacttcaaccaggccgccatggagttaggggcaaccgtctgcacgccacagcgccctctatgttctcagtgcccagtggaatccctgtgccgagcccgccagcgggtggagcaggagcaattgctcgcctccggatccctctcagggtcgccagacgtcgaagaatgtgctcccaacaccggtcagtgccatctgtgcctgccccccagcgagccctgggaccagaccctcggcgtcgtgaattttccccggaaggccagtaggaagcccccccgcgaggagagtagcgcgacctgcgtgctcgaacaacccggcgcactgggggcccagattctcctggtgcaacgacccaatagtggcctactcgcgggactgtgggagttcccatcagttacttgggaaccaagcgagcagctccagaggaaagcactgctccaggagcttcagagatgggctggcccactgccagccacccacttaaggcacctcggagaggtggttcataccttctcacacattaagctgacctaccaggtgtatggactggccctggaaggccagacccccgtgaccacggttccccctggagcccgctggctcacgcaggaggagtttcacaccgctgccgtttcaacagcaatgaaaaaagttttccgcgtgtaccaggggcaacagcctggcacctgcatgggatccaaaagaagccaggtaagctccccttgttctcggaagaagccccgaatgggccaacaggtgctcgacaattttttccgatcacacatctccactgatgcccactccctgaactctgccgcgcaatag

SEQ ID NO: 16164 - DNA, 1650 bp, synthetic construct
  misc_feature 1..1650: note = Description of Artificial Sequence: Synthetic coding sequence
  source 1..1650: mol_type = other DNA
atgacacccctggtgagtcgactgtctcgactctgggccatcatgcgtaagcctcgcgccgcagtaggaagtggccacaggaagcaggcagctagccaggagggtcggcagaaacatgccaaaaacaattcccaagccaagccgagcgcctgtgacgcttgtgcgggtatgatcgccgaatgtccaggggcccccgctggactggcccggcagcccgaggaagtggttttacaggcatccgtgtcgtcttaccacctctttagggacgttgccgaggtgaccgccttcagaggatcattactttcatggtacgaccaagaaaagcgcgacttgccctggcgcagacgggctgaggatgaaatggatctggatagacgggcttacgctgtctgggtgtctgaggtaatgctgcagcagactcaggtggccactgtaatcaattactatacgggctggatgcaaaaatggccgaccctgcaggatctcgctagtgcctcccttgaagaggttaatcagctctgggccggcctggggtattattcacgaggacgacgcctgcaagaaggggctaggaaggtggtcgaggagttgggcggacatatgcccaggaccgccgaaacacttcagcaactgctgcctggagttggaaggtataccgccggagcaatcgctagcatcgcatttggtcaggccaccggagtggtggatggtaacgtggctagggttctttgccgcgtgcgagccataggcgcggacccatcgtccaccctggtgtcacagcagctttgggggctggctcaacaattggtggatcctgcccgtcctggagacttcaatcaagccgccatggaactgggagcgacggtgtgtacaccgcagcgaccattatgttcccagtgtcccgtggaatctctctgtcgagctcggcagcgggtggaacaagagcagttgcttgcatctggttctttgtcagggagcccagacgtggaagaatgcgctccaaacactggtcagtgccatctgtgtctcccgccctccgaaccttgggatcagaccctgggagtggtgaattttccacggaaagccagccgtaagccacccagagaagagagtagcgcaacatgcgtactggagcagcccggtgccctgggcgcgcaaatactgctcgttcagagaccgaactccggactgctggccggtttgtgggaatttccaagtgttacctgggagccgagcgagcaattgcagaggaaggcgttgctgcaagagctccagcgatgggcaggacctttgcccgctacgcatctcagacacctgggggaggtggttcacaccttcagccatataaaactgacctaccaggtgtacggtctagccctagagggacaaacgcctgtcaccacggtacctccgggagcccggtggctcacacaggaagaattccacacagccgctgtaagcaccgccatgaagaaggtgttcagagtgtatcaaggccagcagccagggacttgtatgggaagtaagcgtagtcaggtttcaagcccctgtagtcggaaaaaaccacgcatgggtcaacaggtgttggataattttttccgatcacacatcagtaccgacgcccactctcttaattcagccgcacaatag

SEQ ID NO: 16165 - DNA, 1566 bp, synthetic construct
  misc_feature 1..1566: note = Description of Artificial Sequence: Synthetic coding sequence
  source 1..1566: mol_type = other DNA
atgcggaagcccagagccgctgtgggatcaggccataggaaacaagcagctagtcaagaaggtagacaaaaacacgcaaagaacaatagccaggccaagccttccgcatgtgatggtctggcacgtcaacccgaggaagtggtcctccaagcctccgtgtcaagctatcacttattcagagatgttgccgaggtgacagctttccggggctcactcctgtcctggtacgatcaggaaaagcgcgatctgccgtggagacggcgggcagaggacgaaatggatctggatagaagagcatacgctgtctgggtaagcgaggtgatgctacaacaaacgcaagtggcaaccgtcataaactattacaccggttggatgcagaagtggcctactctacaggatttagcaagtgcttccctggaggaagtgaaccagctgtgggctgggttaggatattattctcgcggccggagactgcaggagggggccagaaaggtggtggaggagttagggggccacatgccccgaactgccgaaacactgcagcagctgctgcccggagtcggccggtatacggccggggccattgcctctatcgctttcggtcaagccactggcgtggttgatggcaacgtggctcgcgtcttatgcagggtccgggccataggcgcggaccctagctctaccctggtgtcccaacagctgtggggtctggctcaacagctggttgaccccgctcgtcctggagatttcaatcaggcagctatggaactcggagcgacagtatgcacccctcagagaccgctgtgcagccaatgccccgtggaatcactgtgccgcgctaggcagcgcgtggagcaggagcagttgctcgcgtcaggaagcctttctggttctcctgatgtcgaagagtgtgcaccaaatactggtcagtgtcatttgtgcttgcccccttctgagccatgggaccaaactttgggagttgtaaacttcccacgcaaggcctcacgcaagcccccccgcgaagaaagttctgccacctgcgtcctcgaacaaccaggggcattaggcgctcagatcctgttggtgcaacgcccaaactcggggttgttggctggattatgggaatttccctcggtgacatgggaacccagcgagcaactccaacgcaaggctctccttcaagagctccagcgatgggcaggacccctgcccgccactcaccttcgtcatttaggcgaggttgtacacactttttcacacattaagctgacatatcaggtttacgggttagctttagagggccagactccggttacaaccgtccccccaggggccagatggctcactcaggaggagttccacacagcagcggtcagtactgctatgaagaaggtttttcgcgtttaccagggccagcaaccgggcacttgtatggggagtaagcgatcacaggtatcgtcgccctgtagtcgaaagaagccacgtatgggacagcaggtgcttgataattttttcagatctcatatctcaaccgatgcacattcactcaattcagcagcccagtag

SEQ ID NO: 16166 - DNA, 648 bp, synthetic construct
  misc_feature 1..648: note = Description of Artificial Sequence: Synthetic coding sequence
  source 1..648: mol_type = other DNA
atgacccccctggtgagtcgcttgtcgcggctgtgggaggtaaaccagctatgggccggcttgggctattatagtagaggacggcgtctgcaggaaggcgccaggaaagtcgtcgaagaattaggtggtcatatgcctcgcacagcggaaacactccaacagctgctccctggcgtggggcgctacacggctggcgcaatcgcttccattgcctttggtcaggctacaggcgtggttgacgggaatgtggctcgtgttctctgtagggtgagagctataggcgccgacccaagctcaacactggtcagccaacagctctggggactggcccagcaactagtcgatcccgctcggcccggagatttcaaccaagccgccatggaattgggcgctaccgtctgcacccctcagagacccctgtgtagccaatgccctgtggagagcctgtgtcgtgcacgacaaagagtagagcaagagcagctgctggccagtggctccctgtctggcagtccagacgtagaagaatgtgctccaaacacagggcagtgtcacttgtgcctccccccttccgagccttgggatcaaactctgggcgtggtgaacttcccacgcaaggcctctcgcaaaccccctagggaggagtcttag

SEQ ID NO: 16167 - DNA, 693 bp, synthetic construct
  misc_feature 1..693: note = Description of Artificial Sequence: Synthetic coding sequence
  source 1..693: mol_type = other DNA
atgacccccctggtatccagactgtctcgcctgtgggctatcatgcggaagcctcgggccgctgtggggtccggccaccgcaagcaggccgccagtcaggagggtcggcagaagcacgctaaaaataacagtcaagccaagccatccgcctgcgacggcggcgaatccacattgggttggcccggcctcctgtttagttggcctgctgctgctgggggcagctcagaaggtcttctggcaggcctttgggaattcccctccgtcacgtgggaacctagtgagcagctgcagaggaaggccctgctccaggaactccagcggtgggcaggacctctacccgcaacccacctgcgtcacctgggcgaagtagtgcataccttcagccacatcaaactaacctatcaggtttacggtctggccctggagggccagacgccagtaactacagtgcctccgggagccaggtggcttacccaggaagagttccatacagcagctgtgtcaacggcgatgaaaaaggtgtttagggtgtatcagggccagcagcccgggacatgtatggggagcaagcgctcccaggtctcctccccgtgcagtaggaaaaagccaaggatgggtcagcaggtcctcgacaacttctttcgttctcatataagtactgatgcacacagtttaaactctgctgctcaatag

SEQ ID NO: 16168 - DNA, 291 bp, synthetic construct
  misc_feature 1..291: note = Description of Artificial Sequence: Synthetic coding sequence
  source 1..291: mol_type = other DNA
atgtcggataacgatgacattgaagtggaatcagacgaggagcagccgcggttccagtccgctgcggacaaaagggcacaccataacgccctcgaaagaaagcgcagggaccacattaaggattctttccactccctgcgggactcagttcccagcctacagggtgaaaaactgtatttcctgttttggaaattatgtacccccgtgttgcacaggcagagcctgatgcagaaatgccatactttcatttcgtcttaccaggtccacaaaaagaaggaatgcaaaatatag

SEQ ID NO: 16169 - DNA, 405 bp, synthetic construct
  misc_feature 1..405: note = Description of Artificial Sequence: Synthetic coding sequence
  source 1..405: mol_type = other DNA
atgagtgataatgacgatatcgaagtagagtcagatgaggaacagccccgatttcagtctgcggccgacaaacgggcccaccataatgcgcttgagcgcaaaagaagggatcacatcaaagattccttccactcactgagggattcagttccaagcctccagggcgagaaagcctcaagggcccagattttggacaaggcaacagagtacattcaatatatgcggagaaagaatcacacgcatcaacaagacattgacgatctcaagcgccagaatgcacttttagaacagcagggtgagcacccgtcctcgtgggggtcatggccctgttgcgcacccgcccggtctggattcggcacatgggcctgtagagtacgtgccagtcacggagtgtgtgcccagtag

SEQ ID NO: 16170 - DNA, 252 bp, synthetic construct
  misc_feature 1..252: note = Description of Artificial Sequence: Synthetic coding sequence
  source 1..252: mol_type = other DNA
atgtccgacaatgatgacatcgaagtggagtctgacgaggagcagcctcgcttccaaagtgcggccgataagagggcgcaccataacgccctggagcggaagagaagggaccacatcaaagattccttccacagtctgagggactcagtgccgtctctgcaaggtgagaaaggtaccaagatgaaactaacacttccccctgtgtttccctacgagcacctgcccttccccactgtattttgtcacggttag

SEQ ID NO: 16171 - DNA, 456 bp, synthetic construct
  misc_feature 1..456: note = Description of Artificial Sequence: Synthetic coding sequence
  source 1..456: mol_type = other DNA
atgtcagataatgatgacatcgaggtagagagcgatgcagacaaacgcgctcatcataacgcactggagagaaagcggcgggaccacataaaggattccttccacagtcttagggattcagtaccatcactgcagggagaaaaagcttcgcgcgcgcaaattctagacaaagccacagaatacatccagtacatgagacgtaagaatcacacacatcagcaggatattgacgatctgaagcgacagaatgcgctcttggagcaacaggttcgcgcgctggagaaagcaaggtccagcgcccagctgcagacaaactaccctagctctgataatagcctgtacaccaacgcgaagggcagcactatttcagcattcgatgggggatcagattcttcttcagagagcgaaccagaggagccgcagagtcggaaaaaattacgcatggaagcctcatag

SEQ ID NO: 16172 - DNA, 483 bp, synthetic construct
  misc_feature 1..483: note = Description of Artificial Sequence: Synthetic coding sequence
  source 1..483: mol_type = other DNA
atgagtgataatgacgacatcgaagtagaatccgatgaggagcagccaagattccagtcggcagcagacaagcgggcccaccataatgccctggagagaaagaggcgggaccacatcaaggactcctttcactctttgagagattctgtgccgtcccttcagggcgaaaaagccagtcgggcgcagattctcgacaaggctaccgaatacatccagtatatgagacgcaagaaccacacccaccaacaggacatcgatgacctgaagcgccagaacgcgcttctggagcaacaggttagggctttggagaaagctcgcagcagcgcccagcttcaaactaattaccctagttcggacaactcgttgtatactaacgctaagggttccacaatttccgcctttgacggcggtagcgattcgtctagcgagtcagagccagaggagcctcagagcaggaagaaactgcgcatggaagccagctag

SEQ ID NO: 16173 - DNA, 426 bp, synthetic construct
  misc_feature 1..426: note = Description of Artificial Sequence: Synthetic coding sequence
  source 1..426: mol_type = other DNA
atgctgtccgtgaaaattacaagtatcttctccattttcttttttctgctgtttcaggaggagcagccgcgctttcagagtgcggcggataagcgggcccaccacaacgctttggaacgcaagaggcgcgaccacattaaagacagctttcactccctccgcgattcagtgccctcccttcagggggagaaagcatccagagctcaaatcctcgataaagccacggagtacattcagtacatgaggcgaaagaaccacacacaccaacaggatattgacgatcttaaaagacagaatgcactactcgaacaacagggcgagcaccctagctcatgggggtcatggccctgctgcgcccccgccaggagcggcttcgggacatgggcttgtcgagtgcgggccagtcacggagtttgtgcccaatag

SEQ ID NO: 16174 - DNA, 312 bp, synthetic construct
  misc_feature 1..312: note = Description of Artificial Sequence: Synthetic coding sequence
  source 1..312: mol_type = other DNA
atgtcagataatgatgacattgaggtggaatctgatgaagaacaaccccggtttcagtcagctgctgacaagagggcacaccacaatgcactcgaacgcaagcgccgcgaccacatcaaggatagtttccatagccttcgggactcagttccaagccttcagggggaaaaagcaagtcgcgctcaaatcctggataaagccaccgagtatatccagtatatgagacgcaaaaatcatacccaccagcaggatatcgacgacttaaaaagacaaaatgccctgctagagcaacagggagagtctgagtcttag

SEQ ID NO: 16175 - DNA, 312 bp, synthetic construct
  misc_feature 1..312: note = Description of Artificial Sequence: Synthetic coding sequence
  source 1..312: mol_type = other DNA
atgtccgataatgatgacattgaggtcgaaagtgacgaagaacagccacgctttcaaagcgccgcggataaaagagcacatcacaatgcactggagcgtaagagacgagaccacattaaagactccttccatagtctgcgggactccgtcccctccttgcagggagagaaggcttcgcgggctcagattttggacaaagccaccgagtatatccagtacatgcgcaggaagaaccatacacatcagcaagatatcgacgatctgaaaagacagaacgcactgcttgagcagcaaggtgagagtgagtcctag

SEQ ID NO: 16176 - DNA, 13923 bp, synthetic construct
  misc_feature 1..13923: note = Description of Artificial Sequence: Synthetic coding sequence
  source 1..13923: mol_type = other DNA
atgcccgtgcctgacggcagcgtggccgccgcaggtctcggtcttggcctgccagccgccgattcgcgaggacattaccagctcctgctttccggacgggctctggcggataggtacaggcgaatctacactgcagcccttaacgacagggaccagggcggagggtctgcagggcaccctgcctcccgcaataaaaaaatcctgaacaaaaaaaaactcaaacgcaaacaaaagagtaaaagtaaggtgaagacacgcagtaaaagcgagaatcttgaaaacaccgtgattattcctgacatcaagctgcactcaaatcccagcgcattcaatatctattgcaacgttcgccactgcgttcttgagtggcagaagaaggaaatatcacttgctgccgcaagtaaaaatagcgtccagtctggagagtctgattctgatgaggaagaagagtccaaggagccgcctatcaaacttccaaagatcatagaagttggcctttgcgaggtgttcgagctcattaaggagacccgtttcagtcatccctcattatgtctgcgcagcttacaagcccttctgaacgtcctccaggggcaacagcccgaaggcctccagagcgaacctcctgaagtgctggaatccctgtttcagcttctgttggaaattaccgttcgatccactggaatgaatgacagcacgggacaaagtctgaccgctctctcatgcgcttgtctgtttagcctggtcgcctcctggggcgaaaccggaaggaccctgcaggccatttcagcaatcctcacaaacaacggctcccatgcttgtcagaccatccaggtgcctacaatactcaatagcctacaacgttcagtgcaagcagtgctggtcggaaagatccaaattcaggattggttcagtaacggcattaagaaggccgctttgatgcacaagtggcccttaaaggaaataagcgtggacgaagatgatcaatgtctactccaaaacgacgggtttttcttgtatctgctttgcaaagacggactttacaagataggaagcggctattccgggaccgtgaggggccacatctacaactctaccagccgcatccgtaataggaaagaaaaaaaatcatggctcgggtacgctcaagggtacttgctgtacagagacgttaacaaccatagcatgacagccattaggatctctcccgaaacgttggaacaggacggaactgtcatgctccccgattgtcacacggagggtcagaatattctgtttacggacggtgaatacatcaaccaaatagccgccagccgggatgacggctttgtggtgaggatctttgctacaagcactgagccggtcctgcagcaggaactgcagttgaagctggcgcggaaatgtctgcatgcatgcggcatcagcttgtttgacttggagaaagacctccacattatctctaccgggttcgatgaggaaagcgctattcttggcgccggaagggagttcgccctgatgaagactgccaacggcaagatctattatactgggaagtaccagagcctcggaattaagcaggggggcccaagcgcagggaaatgggtggagctgcccatcaccaaatcacctaaaattgtacatttcagcgtgggccacgacggcagtcacgcccttttagtagcagaagacggtagcatctttttcacgggttccgcttccaagggtgaagacggcgaaagcaccaaatcaaggcgccaatcaaagccttataaacctaaaaagatcatcaagatggaagggaaaatagtggtgtatacagcttgtaacaacggctcatcgtcagtcatctcaaaagacggcgagctgtatatgttcggaaaggatgctatttacagcgacagctcatcccttgttactgaccttaaaggccactttgtgacgcaggtggctatgggcaaggcccacacttgcgtgctgatgaaaaatggggaggtctggacctttggggtgaataacaagggtcagtgcgggcgcgacacgggagctatgaatcagggtggtaaaggatttggtgtcgaaaatatggccaccgcaatggacgaggaccttgaggaagaacttgacgaaaaagacgaaaaatctatgatgtgtcccccagggatgcataagtggaagctcgaacaatgcatggtttgcaccgtgtgtggcgactgtaccggctacggcgctagctgcgtgtccagcggccgacctgatagagtgccaggaggcatctgtggatgcggctctggtgagtcaggctgcgcagtctgtgggtgctgtaaggcctgtgctagggaactggacggtcaggaggcccgtcagaggggtattctcgatgctgtgaaggagatgatccctctggacctcctgctggcggtgccagtgcccggggtgaacatagaggagcacctacagcttagacaggaggaaaaaagacagagggtgatcagaagacacagattggaggagggtcgcggacctctcgtatttgcaggccccatttttatgaatcacagagagcaggccctggcccgtctgagatctcacccagcgcagcttaaacacaagcgggacaagcacaaagatggttcaggcgagcgaggagagaaggacgcatccaagatcaccacctaccccccaggatctgtgcggtttgactgtgaattgagagccgtgcaggtgagttgtgggttccatcactctgtggtactcatggagaatggggatgtgtatacttttggttatggacagcatgggcagctgggacatggcgacgtcaatagtcggggctgccccaccctggtccaggcactgccgggcccatcgacccaggtcaccgcaggatccaatcacacagcggtgctgctgatggacggacaagtcttcacattcggttcttttagcaaggggcagctgggcagacccatcttagatgtgccgtattggaatgccaaacctgctccaatgcccaacattgggagcaagtatggccgcaaggctacctggattggcgcatccggggatcagactttcttgcggattgacgaggcgttgatcaactctcatgtgctggctactagcgagatctttgcgagtaaacacattatcggcttagtacctgcgagcatctctgagccaccacccttcaagtgtttacttattaacaaagtggacggtagctgcaagaccttcaatgactctgaacaagaagacctccaaggatttggagtgtgcctagatccggtctacgatgtcatctggaggttccggcctaatacaagggagctgtggtgttacaacgctgttgtggccgacgccagactgcctagtgctgccgatatgcaatcacgatgctcaatactgagtccggaattggcactccccaccggatctcgcgccttgaccacgagaagccacgccgctctccacattttggggtgcctggatactttggctgccatgcaagatctcaaaatgggcgtggcctctacagaggaagaaacacaggcagtaatgaaagtctatagcaaagaagactatagtgttgtcaatcgatttgagagccatggtggaggttggggatactcagcccactctgtggaggccatacgcttcagcgctgacacagacatactgttaggcggattgggtctattcggcggtcggggtgagtacacagctaagatcaaactgtttgagctggggcccgatggaggggaccacgagaccgacggggacctgcttgccgaaacagatgtgttggcatacgactgcgccgcccgcgagaagtacgcaatgatgttcgatgaacccgtcctgctgcaggccggttggtggtacgtcgcctgggcaagggtgtccggtccaagttccgactgtgggagtcacggacaggcttccattaccaccgacgatggcgtggtgtttcaatttaaaagcagcaagaaatctaataatggcacagacgtcaacgccggacaaatccctcagctcctataccgcctccctacctctgacggttcagctagtaaaggaaagcagcagacttctgaacccgtccacatcttaaaaaggtcttttgcccgcaccgtttcagtcgaatgttttgaaagcctcttgtctatcctacactggtcatggactaccttggtgttgggggttgaggagttacggggcctgaaagggtttcagttcacagcaactctgcttgatttagagcgtctgcggttcgtcggtacctgctgcctgcggctccttcgagtgtatacatgtgagatctacccagtcagcgctaccgggaaggccgttgtggaagagacctccaagctggccgaatgcataggcaagactagaacgctcttacgcaaaatcctttccgagggagttgatcactgtatggtcaagctggacaatgacccccagggctacctctcccagccactgtccctgttggaggcagtgctccaggagtgtcataacacgttcacagcatgcttccattccttctaccctactccagcattgcagtgggcctgtttgtgtgatttattaaactgcctggaccaggatatccaggaagctaattttaaaacatcttctagccgcttactcgctgccgtgatgagcgccctctgtcataccagcgtaaagctgacaagtatcttccccatcgcctacgatggggaagttctattgcggagcattgtcaaacaggtgtcaacagaaaatgattccactctggttcaccgctttcctctattagttgcccacatggaaaaactgtcacagagcgaggaaaacatatccgggatgactagtttcagagaggtgcttgaaaagatgctggttatagtggtgttgcccgtacggaattctctccgccgggagaacgaattgttctccagccacctcgtgtcgaacacttgtggtttattggcctccatcgtgtccgagttgaccgcaagcgccctaggatcagaggtagacggtctgaacagcctccatagtgtaaaggcatcagcaaatagatttacaaaaaccagccaggggaggtcttggaacacgggtaacgggtctcctgatgccatctgtttctctgttgacaagccgggtatcgtcgtcgttggcttctccgtgtatggtggggggggcatacacgagtacgaactagaggtccttgtcgatgattctgagcacgccggcgattccactcattctcaccggtggacatccctggagcttgtgaaagggacctataccacggacgattcaccgagcgacatcgctgagatacgcctcgacaaagtcgtgcctctgaaggagaatgtcaagtatgccgtgaggctgcgcaattacggatctcgcaccgccaacggagacggtggcatgactactgtgcagtgtcccgatggcgtgaccttcacattttccacttgtagcctatcctcaaacggcacaaaccagacccgtggccagattccacagattttatactatcggtccgaattcgatggggacctgcagtcacagctgttgagtaaagccaatgaagaggataaaaattgctctcgcgcccttagcgtcgtgagtacagttgtgagggcatctaaagacctgttgcaccgtgccctcgccgtagatgccgatgacattcccgagttgttgtcttctagcagtctgtttagcatgctattaccacttatcatcgcatacatcggcccggtggctgcagcaatccccaaggtggctgttgaggtgttcggccttgtccagcagctgctgccgagtgttgccatcctcaatcagaaatacgctcccccagcattcaacccaaatcagagtactgattccaccactgggaatcaacctgagcaaggtctgagtgcttgtacaacaagctcccactacgccgtcatagagtcagagcacccgtataaaccggcttgtgtaatgcactacaaagtgacctttcccgaatgtgtgcggtggatgacaatcgaattcgacccccagtgcggcaccgctcaatccgaggacgtgctgagactgctgattccggttcgcacagtgcagaattcgggctacggtcccaagctgacatccgtccatgagaacctgaactcttggatcgagttgaagaagtttagcggatcatcaggttggcctactatggtgctagtcctgcctggaaacgaggctttgttttccctcgagactgccagcgactacgttaaggatgacaaggcgagcttttacggctttaagtgttttgctattgggtatgagtttagtcccggtcctgatgagggcgtgatccaactcgaaaaggaattggcgaatttagggggggtgtgtgctgcagcactgatgaaaaaagatctggcccttcccatcggtaatgaattagaagaggatctggaaattctagaggaggccgctttacaagtgtgcaaaactcattccgggatattaggaaagggattagccctttcacactcccccacgatcctggaagctctggaaggcaacctgccgctccaaatccagagcaacgagcagagttttctcgatgacttcattgcctgcgtgcctgggtcatccggcgggagactcgcacggtggctacagcctgactcctacgctgacccacagaaaaccagcctcatactgaataaggacgacataagatgtggctggccgacgaccattaccgtgcagaccaaggatcagtatggagatgtggttcacgtccccaacatgaaggtcgaagtgaaagcagttcccgtgagtcagaagaagatgtccctgcagcaagaccaggcaaaaaagccacagcgcatccccggcagcccggcggtgactgctgcaagcagcaataccgacatgacatacggtggcctggcctccccgaagttggacgttagctacgaaccgatgatcgtgaaagaggctcggtatatcgcaatcaccatgatgaaagtgtatgagaactacagtttcgaggagttaaggttcgcctcccccacgcctaaacggccaagtgaaaatatgttaatcagagtgaacaatgatggaacatactgcgcgaattggacgcccggggccattgggctgtacacgctgcatgtgactattgacggcatcgagattgatgcgggccttgaagttaaggtgaaagaccctccaaagggaatgatccctcctggtacccagctagtgaaacccaagtccgagccgcagccaaacaaggtgcggaaattcgtggcaaaagattccgccggtttgcggatccgaagtcatcccagcctccagtccgagcagattgggatcgttaaggtcaatggcacgatcacatttattgatgaaatccataatgatgacggggtctggcttagactgaatgatgagacaattaagaagtatgttcccaacatgaatggctatacagaagcgtggtgtctctccttcaatcagcatttgggcaagagtctgctcgtccctgtagacgagtccaagaccaacaccgatgacttctttaaggacataaactcttgttgccctcaagaggcaacaatgcaggaacaagacatgccatttctccgcggcggccccggcatgtacaaggtcgttaaaaccggcccatccggtcacaatatcagaagttgtccaaacctgagaggaatacctatcgggatgctcgttctgggaaacaaggtgaaggccgttggagaagtgactaatagtgaaggaacttgggtgcagcttgaccaaaactctatggtggaattctgcgagtccgatgagggggaggcatggagtctcgctcgcgaccgcggtggaaatcagtacctgaggcatgaggacgagcaggccctgttggatcaaaacagtcaaaccccacccccctcccctttttctgtgcaggccttcaataagggcgcatcatgctctgcacagggctttgattatggtctgggcaattccaaaggcgatcgaggcaatatcagtacgagttccaagcccgcttcaacttcagggaagtccgaactgtcctctaagcatagcagatctttaaagccagatgggcgcatgagtcggacaaccgccgaccagaagaagcccagggggaccgaatcactctctgcatcggagtcacttatcctgaagtctgacgccgcgaaacttcggagcgattctcactccagatcactttccccaaaccacaatacactccagacactcaaaagtgacggccgcatgccaagcagctctagggcagaaagccctggaccaggctcacgactgtcttcaccaaaacctaagaccctcccggccaaccgaagctctccatcgggcgcatccagtcctagaagttcaagtcctcacgacaaaaatttaccacagaagtcaacagctccagtgaagaccaaactcgatcccccccgtgaaagatctaagagtgattcatacactctggaccccgatacactgcgtaagaaaaagatgcctttaaccgagccattgcgcggtcgaagtaccagccccaagcctaaaagtgtgcctaaggacagtaccgacagcccaggctctgagaaccgcgccccgagcccacatgtcgtccaggaaaatttgcactcagaggtggtcgaggtttgcacttcctcaaccttgaaaactaatagcctgaccgatagcacttgtgacgactccagtgagtttaagtctgtagatgaaggatctaataaggtgcatttttctatcgggaaagctcctctgaaagacgagcaggagatgcgggcctcacctaaaatatccagaaagtgcgccaatcgccacacaagacccaagaaggagaagtctagctttttgtttaagggcgatggttcgaagccgttggagcctgcaaagcaggccatgtctccaagcgtggccgagtgcgctagggccgtgttcgcttcctttttatggcacgaggggatcgtgcacgatgcgatggcctgttcttcctttttaaagtttcaccctgaactgtctaaggaacatgctcctatccgcagcagcctgaattcacagcaaccaactgaagagaaggagacaaagctcaagaacaggcacagcctggagatctcaagtgcattgaacatgtttaatattgctccccatggacccgatatcagcaagatgggctccatcaacaagaacaaggtcctgagcatgcttaaggagcccccacttcatgagaaatgtgaggatgggaagaccgagactacgttcgagatgagcatgcacaacactatgaaatctaagtctccattgcctctgactctgcaacatctggtcgcattctgggaagacatctccttggctaccattaaagccgcttcccagaatatgattttccccagccccggatcatgtgccgtgctgaaaaaaaaagagtgcgagaaagaaaataagaaaagcaaaaaggagaagaaaaaaaaagagaaggccgaagtgagaccaagaggcaacctctttggcgagatggctcagttggcggtcggcgggcctgagaaggataccatttgtgagttgtgtggggaaagccatccttatcctgtgacttaccacatgcgccaggctcacccaggatgtggcagatacgccgggggacagggctacaatagcatcggccacttctgtggtgggtgggccggcaattgtggcgatggaggaattggcggcagcacttggtatcttgtgtgtgatcggtgcagagaaaagtacctgcgagagaagcaggcagctgcacgagaaaaagtgaagcagtcgcgtaggaaaccgatgcaagtgaagacgccaagagccctgcccacaatggaagctcaccaggtcattaaggccaacgcattgttcttgctttccctctcctcagctgccgaaccatccatcctctgttatcatcccgctaaacccttccagagtcagctacctagcgtcaaggaaggcatttcagaagacctgccagtcaagatgccgtgcctgtatctgcaaacgctcgctcgtcaccaccacgagaatttcgtcggctaccaagatgataatctgttccaggatgaaatgagatatctccgatctacatccgttcccgcaccctacattagcgttacacccgacgccagtcctaatgtgttcgaggagccagaatccaatatgaagagcatgccaccttcactcgaaacgtcaccaatcacagatacggatctggccaaaaggacagtgtttcagagaagctactcagtggtggcgagcgagtacgataagcaacatagtatcttgccggctcgggtgaaggcaatccctcggaggcgggtgaatagtggcgatactgaagtggggtccagcctcctccggcatccttcccccgaactgtctcggctgattagcgcacactcctccctgagtaagggagagagaaactttcagtggcccgtcctagcgtttgtaatccagcaccacgatctcgagggtctcgaaatcgccatgaagcaagccctccgcaaatcagcctgccgggtcttcgccatggaggccttcaattggctattgtgtaacgtcattcaaaccacatctctccacgacatcctgtggcatttcgtcgcctcacttacccctgcacccgtagaacccgaggaagaggaggacgaagaaaacaagacttcaaaagaaaattccgagcaggaaaaggacacccgagtgtgcgagcatccactgtctgacatcgtcattgccggggaggcagctcatcctctccctcacacgttccatcgtttgctccaaacaatctccgacctgatgatgtctctgccaagcggatcctctctgcagcagatggccctgaggtgttggtccctgaagttcaagcagagtgaccatcagtttttgcaccagtccaacgtgtttcatcacatcaataacattctttcaaaatctgatgacggggacagcgaggaaagcttttctatctcaatccagagtggattcgaggccatgtcccaggaactgtgtattgttatgtgcttgaaagatctcacaagtatcgtcgatataaagacatctagccgcccagccatgatcggatcgctgacggatggaagcacggaaactttctgggagagcggcgatgaagacaagaacaaaaccaaaaacatcacaattaactgcgtcaagggtatcaatgcccggtacgtgagtgtacatgtcgataatagtagggatctcggaaataaggtgacaagcatgacctttttgaccggtaaggccgtggaggatctgtgccgcatcaagcaggtggatctcgatagccgtcacatagggtgggtgacgtcagagttacccgggggcgataaccacattattaagattgagctgaagggacccgaaaacacccttcgggtgcgccaagtgaaagtcctcggatggaaggatggagagtcaaccaaaatcgccgggcagataagtgccagcgtggctcagcagcgcaactgcgaagcagagacattgcgcgtgtttaggctgataacctcccaagttttcggcaagctaatttctggagatgccgaacccacccctgagcaggaagagaaggcccttctgagctctccagaaggagaagagaaggtgtataacgctacgtccgacgccgacctcaaggagcacatggtaggaatcatatttagccgctctaagcttaccaacctacagaagcaggtgtgtgctcacatagtgcaggctatcagaatggaggccacaagagtccgcgaggaatgggagcacgcgataagcagtaaggagaacgcaaacagtcagcccaatgacgaggatgcttcgtcagatgcctactgcttcgaactactgagtatggtgttggcactaagcggaagtaatgtcggcagacagtatttggctcagcagctgacattgctacaagacctcttttcactcctgcacacagcctcccctcgggtacaacgccaggtgacctcacttttgagacgggttctacccgaggtgacaccatcccgcctggcctcaattatcggggtaaagtcccttcctcctgcggatatcagcgatataatccatagtacagagaagggcgattggaacaagctagggatacttgacatgttcctcgggtgtattgctaaagccttgactgtccagctgaaggcaaagggcacaactattaccgggactgccggcacaacggtggggaagggtgtcactactgttaccctccccatgatattcaattcatcttatttgcggaggggggaaagtcattggtggatgaagggttcgaccccaactcagatatccgaaataattatcaaattgatcaaagacatggcagctggacacttaagcgaagcctggagccgcgtcacaaagaacgcaatcgcagagacaatcattgcactcacgaaaatggaagaggagttcagatcccctgtgagatgtattgccacgacccgcctctggctggcattggccagcctgtgtgtgttggaccaggatcacgtcgaccggctgtcttccgggcgctggatgggcaaagatggtcaacaaaagcagatgcccatgtgtgacaaccatgacgacggagagactgcagctataatcctgtgcaatgtgtgtgggaacttatgtaccgactgcgaccgctttctgcacttgcatagaagaaccaagactcatcagcggcaggtgttcaaagaagaggaagaggccatcaaggtggatttgcacgaaggctgtgggagaaccaagctcttttggctcatggctctggccgactcgaaaacaatgaaggccatggtagagtttagagagcacacaggcaaacctaccacgtcttcgagcgaagcctgcagattttgcgggtcaaggtctgggaccgaattgtcagcagtcgggtctgtttgtagcgatgccgactgccaggaatacgctaaaatagcatgtagtaaaacccacccttgtggccacccatgcgggggtgttaagaatgaggagcattgcctgccttgcctgcacgggtgtgataagagcgctacatctctgaagcaggacgccgacgatatgtgtatgatatgctttactgaagcgctgtctgccgcccccgccattcaactcgactgctcacatatctttcacctgcaatgttgtcggagagttctggagaatcggtggctagggccacgaatcacattcggctttatctcctgccccatctgtaagaacaaaattaatcacattgtgctcaaggacctcctagatccaatcaaggaactctatgaggatgtacgccgcaaagctctgatgcgactggaatatgagggcctgcacaaaagtgaggcaatcaccacccccggtgtccgcttctataacgatccagctgggtatgccatgaatcggtatgcctactatgtttgttataaatgtaggaaggcctattttggaggggaagcccggtgtgatgcggaagctggcagaggggacgactatgatccccgcgagttgatttgcggcgcttgttctgatgtgagcagggcccaaatgtgtcccaaacacgggactgatttcctggagtacaaatgtaggtattgttgctctgtcgccgtcttcttctgcttcggcaccactcatttctgtaacgcctgccatgacgattttcaacgcatgaccagtattcccaaggaagagctcccacactgccctgccggccctaaggggaagcagttggaagggacggagtgccctctccatgtggtgcatccccccaccggagaagaattcgccctgggatgcggtgtctgcaggaacgctcacacattttag

SEQ ID NO: 16177 - DNA, 1542 bp, synthetic construct
  misc_feature 1..1542: note = Description of Artificial Sequence: Synthetic coding sequence
  source 1..1542: mol_type = other DNA
atgcaggagcaggacatgccttttctgagaggagggcccgggatgtacaaggttgtgaagacaggtccctcaggccataatataaggtcctgcccgaacttgcgtggaatccctatcggcatgctcgtattgggcaacaaggtgaaagctgtgggagaggtgacaaattcagagggcacatgggtgcagctggatcagaacagcatggtcgagttctgcgaatctgatgagggcgaggcatggtcactcgccagagaccgcggcgggaaccagtacttacgtcatgaggacgagcaagctcttcttgatcagaatagtcaaactccccctccatccccatttagtgttcaggccttcaacaagggcgcatcatgctccgcgcagggtttcgactacggactcggtaattctaaagtgctgaccgtgctccccacggccggagaccaactgtcagcgattcttaattccatccagtccagaccaaatctgccagccccctcaatctttgaccaagccgcaaaacccccatcaagtctcgttcactctccgttcgtgtttggtcaacccctgagcttccagcaaccccagcttcagagtgatagaggtaatatttccactagcagcaaacccgcaagtacatctgggaagtcagaactatcctcaaaacacagtaggagtctgaaacctgacgggcgcatgagcagaactacagcagatcagaagaagccccggggaacagagtctctgtcagcaagcgagagcctgatccttaaatccgatgccgctaagttgcgctccgattcacacagtcgaagcctgtcccccaaccacaacactcttcagaccttaaagtctgatggccgcatgcctagctcctcacgagccgagtctcctggtcccggatcgcggctgtcgagccccaagccaaagaccctgcctgccaatcgctcttctccctcaggcgcttcctctcccagaagtagtagccctcatgacaagaaccttccccaaaaaagcacagcaccagtaaaaacgaaacttgatcctccaagagaacgctcaaaatctgattcctatactctggatccagacactctccggaaaaagaaaatgcccttaacagagcctctaagggggagaagcacgtctcccaaaccaaaaagcgtacccaaggattccaccgacagcccgggaagcgagaatcgtgcacccagtccccacgtggttcaggaaaaccttcactccgaggttgtcgaggtgtgtacctcaagcacactgaaaactaattctctgaccgacagcacgtgcgatgacagcagcgaattcaagtctgtcgatgagggtagcaataaggtgcacttcagtataggtaaggcccctctgaaagacgagcaggaaatgagggctagccctaagataagtcgcaaatgcgccaaccgacatacaaggcccaagcgcaaaatcgaattctcatttcagaggagatggatccaggcatttagagcaagtcaggctagccatgtgagcttttgtggtcggtag

SEQ ID NO: 16178 - DNA, 14037 bp, synthetic construct
  misc_feature 1..14037: note = Description of Artificial Sequence: Synthetic coding sequence
  source 1..14037: mol_type = other DNA
atgatgatgtgcgccgctacagcaagtcctgctgccgctagctcaggactgggaggcgacgggttttatcctgccgccactttcagcagcagtccagctccaggggccctgttcatgcccgtccccgacggaagcgtcgccgccgctggtttaggactaggtttgcctgcggcggattctcgcggacactatcagctgcttctttcaggcagggcactcgccgataggtacagacgcatctataccgcagcccttaatgaccgcgaccagggaggaggctccgccggtcatcccgcctcgcggaataagaaaattctaaacaaaaagaagctgaagcgtaagcaaaagtctaaaagtaaggtaaaaactcgcagcaagtcagagaatctggaaaatactgtgatcataccagatatcaaactccactcaaacccttccgcatttaatatttattgtaatgtacgtcattgcgtgctggaatggcagaaaaaagagatctcccttgccgctgcctccaagaactctgtccaaagcggcgagtccgattctgacgaggaggaggagtcgaaagagccaccgatcaagctgcctaaaattattgaggtgggcttatgtgaggtcttcgagcttattaaggaaactcgcttttcccacccttccctgtgccttcggtcccttcaggcccttttgaatgtccttcaaggccaacagcctgaagggctgcaatctgagccccctgaagtgttggaatccttgttccaacttctgttagagattacggtgcggagcaccggcatgaatgacagtaccgggcaatcgttgaccgcattatcatgcgcctgcctgttttctcttgtagccagctggggagagaccggccgcacccttcaggcgataagtgcaattctcacaaacaacggatcccacgcatgtcagaccatacaagtccctaccattctaaactctcttcaacgttctgtgcaagccgttttggtgggtaagatccagatacaggactggttctctaacggaatcaaaaaagccgcgttaatgcacaagtggcccctgaaagaaatcagcgtcgacgaagatgaccaatgcctactacaaaatgacggattctttctctatctcctgtgtaaggatggactgtataaaatcggctctggctattccggtaccgtcagaggccacatctataacagcactagcagaatccgcaaccgcaaagagaaaaaatcgtggctgggctatgcccagggctatctcctctatcgcgatgtgaataaccacagcatgaccgccatcaggatctcccccgagaccttggaacaggatggaacagtgatgctgccagactgccataccgagggccagaatatcctgttcaccgacggcgagtacataaatcaaatcgcggcgtcgcgagatgacgggtttgtggtgcggatcttcgctactagtacagagccagtgctgcagcaagagctgcagctgaagctggcccgaaaatgtctacatgcatgtggtatcagcctgttcgacttagaaaaagacttacacatcatctcaaccggcttcgacgaggagagcgctatcttaggggccggacgcgagtttgccttgatgaagacagctaacggcaaaatttattacaccggcaaataccagagccttggcatcaaacagggcgggccatctgccggtaaatgggtggaactccctataaccaaatcccccaaaatagttcacttcagcgttgggcacgacggttctcatgccttgcttgtcgcggaggatggatccattttctttaccggaagtgcatctaagggagaagacggcgaatccacaaagtccagacgacagagcaagccatacaagcccaagaagattatcaagatggaaggtaagatcgtcgtgtatacagcatgtaacaatgggtctagttccgtgatcagcaaagatggcgaactgtacatgtttggtaaagacgccatttactctgattcgtcaagccttgtcacagaccttaaaggccatttcgtgacacaggttgcaatgggcaaagctcacacctgcgtcctcatgaaaaacggtgaggtctggacattcggggtgaacaacaaaggtcagtgtggtagagacacgggagccatgaatcaggggggaaagggatttggcgtggagaacatggccaccgcaatggacgaggacctcgaagaggagctcgatgaaaaggacgagaagagcatgatgtgtcctcccggcatgcacaagtggaagcttgagcagtgcatggtgtgtaccgtatgtggcgattgtaccggttacggcgcatcatgcgtcagctctggacggcccgaccgggtaccggggggcatctgcggatgtggctccggcgagtctggatgtgccgtgtgtgggtgttgtaaggcctgtgcccgcgagctggacggacaggaggctcggcaacgcggcattctagatgctgttaaagaaatgattcccctagacctgcttctggctgtcccagtgcccggggttaatatcgaagaacacctccagctgcgacaggaagaaaaacgtcagagggtgattagacgacataggctggaagagggcaggggacccctggtttttgccgggcctatcttcatgaatcatagagaacaggccctggccaggctacgctcccatcctgcccaactgaaacacaaacgggacaaacacaaagatggaagcggcgagcgaggggagaaggacgcttccaaaatcaccacctacccgcctggcagcgtccggttcgattgtgaactgagagctgtccaggttagttgtgggttccatcactcagtagtcctgatggaaaatggggacgtgtatacttttggatacggccagcacggccagctgggacatggggatgtgaactcccgagggtgtcctactcttgtccaggctctgccagggccgagtacccaggtgactgcaggttccaatcacactgcagtactccttatggacgggcaggttttcacttttggcagtttctccaaaggccagctgggtaggccaattctcgatgtgccctactggaacgcaaagcctgctccaatgcccaacatcgggagcaaatacggtcggaaggctacctggattggcgcatcaggcgaccagactttcctgcggattgacgaagctttaattaactcacacgtcctggccacgtccgagatcttcgccagtaaacacatcatcggcctggtgccggcgtctatttcagagcctccgcccttcaaatgtcttcttatcaacaaagtcgacggcagctgcaaaaccttcaacgacagtgaacaggaggatctccagggcttcggagtatgcctggacccagtgtacgatgttatctggaggttccgacctaatacacgagaattgtggtgttacaacgcggttgtcgcagacgccagactcccatcggccgctgacatgcagtcaagatgctccatcctatcacccgagctggctcttcctaccggctcacgcgcattaaccacccgaagtcacgccgcactgcacatcctgggctgcctggataccctggctgccatgcaggatctgaagatgggtgtagccagcaccgaagaggagactcaagctgtgatgaaagtttactcaaaagaggattattccgtggttaacaggtttgaatctcacggcggcggttgggggtattctgcccactccgtcgaggccattagattctcagcagatacagatattctgctcggcggcctgggactcttcgggggaaggggcgagtacaccgcaaagatcaagctgtttgagcttggccctgatggtggggatcatgagaccgacggggacctgctggctgagaccgacgtgctggcctacgactgtgccgctcgtgagaagtacgccatgatgttcgacgagcccgtcctcctgcaggcaggctggtggtacgtagcctgggcacgagtttccggacctagcagcgactgtggttctcacggacaggctagcattacgactgatgatggggtggtgtttcagtttaagagctctaaaaaaagcaacaatggcactgatgtgaatgcagggcagataccccagctgctgtataggctgcctacctctgacggcagcgcgagtaaggggaaacagcagactagtgaaccggtccatatcctgaagagatcgttcgcgcgcacagtgtctgttgaatgtttcgagagcctactgagcattctgcattggagctggaccactctggttttaggggtggaggagctccgtggtctaaaagggttccagtttaccgccactctactggacttagagaggttaaggttcgttgggacctgttgccttaggttacttcgggtgtacacctgtgaaatctacccagtgtccgccactggaaaggctgtcgtggaggaaaccagtaagcttgccgaatgcattggcaaaacgaggacgctgctccggaagatactcagtgagggtgtcgaccactgcatggtcaagcttgataacgacccccagggctacctgagtcagccactctcactgctggaagcagtgttgcaagaatgtcataacaccttcaccgcttgcttccactccttctaccctacacctgccctacagtgggcgtgtttgtgtgatctgcttaattgccttgatcaggacatccaggaagccaattttaaaacaagctccagcagattgttagccgctgttatgtccgcgctctgtcatacttccgttaagcttacatctatctttcccatagcctacgacggcgaggtgctcctgaggtccattgtgaagcaggtgagtaccgaaaatgattcaaccctcgttcatcgtttcccgcttctcgttgcacacatggagaaattgagtcagtcagaagagaatatctcaggcatgactagttttcgggaggtccttgaaaagatgctagttatagtagttctgcctgtgaggaattccctccggcgggagaacgagctcttttcttctcacctcgtctctaacacttgcgggctcttggcatccattgtatcagagcttacagcatcagccctggggtcagaagtggacggcctcaactcgctgcatagtgtgaaagccagcgctaaccggttcaccaaaacatcacaaggcaggtcctggaatacgggcaatggatcccctgacgcgatttgtttctccgtcgataagccaggcatagtcgtggtcggctttagtgtatacggaggtggcgggattcacgagtatgagctggaggtgctcgtggatgattccgaacatgccggagactctacacactcacaccgatggacttcactggagctggtcaagggcacttacactacagatgactcaccttccgacattgcggagatcagattggataaggtagtgccgttgaaggagaatgtgaaatacgcagtgcgcttgcggaactatggcagtagaactgctaatggcgatgggggcatgacaacggtccagtgccccgatggcgtaactttcactttctcgacttgctccttgagctcaaatggtaccaaccagacacgaggccaaatcccacagatcctctactataggagcgaatttgatggagatcttcaaagtcaactcctgagcaaggcgaatgaggaagataaaaactgcagtcgggccctttcagtagtgtcaacagttgtccgcgcatctaaggacctcctgcaccgagccttggctgtggatgcagacgacatcccggagctgttgagttcttcatctctgttttctatgcttctccccctgatcatcgcttatatcggaccagtcgccgctgctatacctaaagtggccgtagaggtgtttggactggtccaacagctgctgccaagcgtggcaatacttaatcagaaatatgcacctccggcgttcaaccctaatcaaagtacagattccacgacagggaaccaacctgaacaggggttgagcgcctgcaccaccagttcacactacgctgtcattgagtcagagcacccatacaagcccgcatgcgtgatgcactacaaagtgacgttcccagaatgtgtgcgctggatgaccatcgagtttgaccctcagtgtggaactgcacaatccgaggatgtcctcaggcttttaattccggtccgcaccgtccaaaattcagggtatgggcctaagctcacctctgtgcatgagaatctgaacagttggatcgagttgaaaaagtttagcgggtctagtggctggcccacaatggtactggtattgcctggaaatgaggctctgttttccctggaaacggcctccgattatgtgaaggatgacaaggcatccttctatggatttaagtgtttcgcgatcggctatgaattctcccctggtcctgacgaaggcgtgattcagctcgagaaggaactcgccaatctgggcggcgtttgcgccgccgccttgatgaaaaaggatctggcactaccaataggtaatgaattagaggaggatctggaaattttagaggaagctgccctccaagtttgcaaaacacattctggaattctcgggaaagggttggccctcagtcactctcctaccatcctggaggcgttggagggcaatctccccctccagattcaaagcaacgagcagtcctttctcgatgactttattgcatgtgtccccggctcctccggagggcgactggcacgctggctgcagccagatagctacgctgatccccagaagacctccctcatattgaacaaggacgacataaggtgtgggtggcccaccaccatcaccgtgcagaccaaagaccagtatggggatgtcgtacatgtcccgaatatgaaagtggaagtgaaggccgtgcctgtaagccaaaagaagatgagcttacaacaggaccaagctaagaaaccccagcggatccctggtagtcctgccgtgaccgcggcttcaagcaatacagacatgacctatgggggtctcgctagtcccaagctggacgtctcgtacgagcctatgatagtaaaggaagcacgatatatcgccatcacgatgatgaaggtgtatgagaattattcttttgaagagctgaggttcgcttcccctactcctaagcggccaagcgaaaacatgctcataagagttaataatgacgggacttattgtgctaactggacacctggagccatcgggctctatactctgcacgttactatcgacggtatcgagattgacgccggcctggaggtcaaagtgaaggatcccccaaaggggatgattcctccaggcacccaattggtgaagcctaaaagcgagccgcagccaaacaaagtccgaaagttcgtggcaaaagattccgctggcctgcgaatccgatcgcatccttctctgcagtccgagcagattggcattgttaaggtgaatggcaccattacgtttatcgatgaaatccataacgatgatggagtgtggctcagactgaacgacgaaaccatcaaaaagtatgtgcctaacatgaacggttataccgaggcctggtgtttaagctttaaccagcacttgggcaaatccctgctggttccagtagatgagagcaagacaaatactgacgactttttcaaggacattaattcatgttgcccacaggaggcgaccatgcaggaacaagacatgcctttccttcgcggcggacctggtatgtataaggtcgttaaaaccggcccatctgggcacaacatccgctcttgtccaaaccttcgcggtattcccatcggcatgctggttttaggcaataaagtcaaagctgtgggagaggtgaccaactccgaagggacatgggttcagctcgaccagaattccatggtggagttctgtgagagcgacgaaggggaagcgtggtccctggcacgggatagaggtgggaaccagtacctgcgccatgaagatgagcaggctttgctggaccaaaactcccagacccccccaccctcccctttcagtgtccaagcctttaataaaggcgctagttgcagtgcacaagggttcgactacggtctcgggaactcaaaaggcgatagaggcaacatttcaacgagctctaagcctgctagcacgagcggaaaatctgaacttagctctaaacactctcgctcactcaagcctgacggacggatgagccgcactaccgccgatcagaaaaaaccgcgcggtacagagtctctctcagctagtgagagcctgattttgaagtcggacgcagcgaaactgcggtccgatagtcacagccgctctctgagtcccaaccacaatacactacagactctcaagtcagatgggcgaatgccttctagctcacgtgcggaaagccccggcccgggctctaggctgagctcccctaaacctaaaacacttcccgctaatcgctcttcccccagtggggcctcctcaccacgcagttcttccccacatgataagaatctgcctcaaaaaagtaccgcgccggtaaaaacaaaactggatcccccacgtgaacgaagtaaaagtgattcctacacgctggacccggatactctcaggaagaagaagatgccgctgacagagccgctgcggggaaggagcacctctccgaaacccaagtctgtgccaaaagatagtactgatagcccggggagcgagaaccgcgccccgtctcctcatgtagtgcaagaaaatctgcattctgaggtggtggaggtctgtacttcatcaaccttgaaaacgaacagcctcaccgactctacctgtgacgacagctctgagtttaagtccgtcgatgaggggagcaacaaagtccatttctccatcgggaaggctcccctaaaagacgagcaggaaatgagagcttctccaaaaatctcccgaaagtgtgctaataggcatacgaggcccaagaaggaaaaaagtagttttctatttaaaggagatggcagcaaaccattagagcctgccaagcaagccatgagcccctctgtcgccgagtgcgcaagggccgtgtttgcttcttttttatggcatgaggggattgtgcatgatgcgatggcttgttcatcattcctgaaattccacccagagctgtctaaagaacacgcacctattcggagttctctgaactcacagcagcctaccgaggaaaaggagacaaaacttaagaaccggcactcgctagagatcagcagtgccctgaatatgttcaacattgctccgcacgggccagatatctccaagatgggctccattaacaagaataaagttctgagtatgctcaaggagccccccctgcacgaaaaatgcgaggacggcaaaaccgagaccacattcgaaatgagcatgcacaatactatgaagtccaaatcacccctacctctgacactccagcatctagtcgcattctgggaggatattagcctcgctactatcaaagctgcctcgcagaatatgatctttccatctccaggctcctgcgccgtgcttaaaaaaaaggagtgcgaaaaggagaacaagaagtccaaaaaggagaagaagaaaaaagagaaggcagaagtgcgcccccgcggaaatttattcggcgagatggcgcagctggccgtgggcggcccagagaaggacacaatttgcgagctctgcggtgaatctcatccttatccagttacctaccacatgcggcaggcacaccccgggtgcggccgctatgccgggggccagggctataactcaatcgggcacttctgtggcggctgggctgggaattgtggagatggtgggattggaggctcaacttggtatctcgtttgtgatcggtgccgagaaaaatacctcagagagaaacaggcagccgcccgagagaaagtgaaacaaagtcgccgaaagcccatgcaggtgaagacacccagagcactgcccactatggaggctcaccaggtgatcaaagctaatgccttgtttttgttatccctaagttccgccgcagagccttctatactctgttatcaccctgctaaaccgttccagagccaactgccaagtgtcaaggaagggatttccgaggacctccctgtcaaaatgccatgcttgtaccttcagaccctcgctcggcatcatcatgaaaactttgtgggctatcaggatgacaatctgttccaggatgagatgcgctacctaaggtcaacaagcgtgcctgctccttacataagcgtcacgccggacgcctcaccaaacgttttcgaggaacctgagagcaacatgaagtctatgcccccctcgcttgaaactagccccataaccgataccgacctggccaagcgtaccgtgtttcagcgctcatattccgtggtcgcatccgaatatgataaacagcattccattctgccggcacgcgtgaaagctatccctcggcggcgggtgaattcaggcgacactgaggtgggaagttccctgctgcgacatcctagtccagagttgtcccgtttgatcagcgctcatagcagcctgagtaagggagagaggaattttcagtggcctgttctggctttcgtaatccaacaccacgatctcgagggactggagatcgccatgaaacaggcactgcgcaaaagtgcttgtcgcgtcttcgcaatggaagcattcaactggttgctctgtaacgttattcagactacatccctgcatgatatcctctggcacttcgtcgcctccctgacgcctgcccccgttgagccagaagaggaggaggacgaggaaaataagactagtaaagagaattcggaacaggagaaggacacgcgtgtctgtgaacacccactatccgacatcgtcattgcaggcgaagctgcacatccactgccacatacgtttcacagactcctgcagacaattagcgacctgatgatgagcttaccaagtgggtccagcttgcaacaaatggcgctgaggtgctggagtctgaaattcaaacagagcgatcaccagtttcttcaccaatcaaacgtattccaccacatcaataacatccttagcaaatccgacgacggggactctgaggagagttttagtatctcgattcagagcggcttcgaggctatgagccaggagctgtgcatcgtgatgtgcctcaaagacctgacaagcattgtcgatatcaagacgagtagccgtcccgccatgattggaagcctaacagatggttcaacagagaccttttgggaaagtggcgacgaggacaagaacaagacgaagaacatcaccatcaactgcgtgaagggtattaatgctcggtatgtgtctgttcacgtcgacaatagtcgggacctaggcaataaagttaccagtatgacgttccttacgggcaaggctgtcgaggatctgtgccgaattaaacaggtggacttggactctagacacattggctgggttacatctgagctgcccggtggagacaatcatatcataaaaattgagctaaaaggccccgaaaacaccctacgcgtacgccaggtgaaggttctggggtggaaggatggcgaatctacaaaaatcgcgggccagatatccgccagcgtggcccagcagcgcaactgtgaggccgagacgctgcgcgtcttcagactaattacgtcccaggtgttcggaaagctcatcagtggcgatgctgagccaactcccgagcaggaagaaaaggcgttactgagcagcccagagggggaagagaaagtgtacaatgccaccagcgacgctgaccttaaggaacacatggttggcatcatattctcaagatcgaagctgacaaatctgcagaagcaagtgtgcgcacacatcgtccaggccattcgaatggaagcaacgcgggtgcgggaggaatgggaacatgctatctcatctaaggagaatgctaactcccagcccaacgacgaggacgccagcagcgatgcgtactgcttcgagctcttatcaatggtgcttgcactttccggctctaatgttgggcgtcaatacctcgctcagcagctgaccttgctgcaggacctgttttccctgctgcacaccgctagccccagagttcagcgccaggtcactagtctgctgcggagggtccttccagaggttactccctctagactggctagcatcatcggggtgaagtccctgcctcccgccgatatctccgacatcatacattctacagagaaaggagattggaacaagctggggatcttggatatgttcctgggctgtattgccaaggccctcacagtgcagctgaaggctaaagggacaacaattacaggtacagccgggacaactgtcgggaaaggagttacaacggttacgttaccaatgatctttaattcttcgtatttgaggagaggcgagtctcactggtggatgaaaggttctacccctactcagatctctgagattattatcaaattaattaaggacatggccgctggacacctgagtgaggcttggtcacgagtgaccaagaatgcgatcgcagagacaataatcgcactgactaagatggaagaggagtttaggtccccagttagatgtattgctacgactcgactgtggctggctctcgccagcctgtgtgttctggatcaggatcatgtagatagattaagttctgggaggtggatgggcaaggacggccagcagaaacaaatgcccatgtgcgacaatcacgatgacggtgagaccgccgcgattattctgtgtaatgtatgcggcaatctgtgtaccgactgtgatcgtttcctccatctgcaccgcaggaccaaaacccaccaacgacaggttttcaaggaagaggaagaggccatcaaagtggatctgcacgaagggtgcggacggactaagctgttttggctcatggccttggcagatagcaagaccatgaaggcaatggtggagttcagagagcacactgggaaacccacgacaagttcatccgaagcttgtcgcttctgcggttctcgatccgggacagagctgtctgccgtcggctcagtctgctccgatgctgactgccaggagtacgccaagattgcatgttctaagacacacccatgtggacacccgtgcggcggagtgaagaatgaggaacattgcctgccatgtctgcacggttgtgataaatctgctacctctttgaagcaggatgccgacgatatgtgtatgatctgtttcaccgaggccctcagtgccgccccagcgattcagctggactgttcccacatcttccacctgcagtgttgccggcgggtgctcgaaaatcggtggttgggacccagaatcacctttggttttatttcctgccctatttgtaaaaacaaaatcaaccacatcgtactcaaagatttgctggaccccattaaggagctatacgaggatgtaagacgcaaggctctgatgagactggagtacgaaggcctccacaagtccgaggcaatcacaacacccggagtgcgcttctacaacgacccggccggctacgcaatgaatcgttatgcatactacgtatgttataagtgcagaaaggcttacttcggaggggaagcacgttgcgacgccgaagccggacgaggagatgactacgatcccagagaactcatttgtggtgcatgctctgatgtttctagagcccagatgtgtcctaagcacgggaccgactttctagagtacaaatgcagatactgttgtagcgttgctgtgttcttttgtttcggaactacccatttttgcaatgcatgccacgatgactttcagaggatgacttccatccccaaagaggagttgcctcattgccccgccggacctaaagggaagcaattggagggaactgagtgccccctgcatgtggtccatcctcccactggcgaggaattcgccttggggtgcggtgtgtgcaggaacgcccacaccttctag

SEQ ID NO: 16179 - DNA, 13923 bp, synthetic construct
  misc_feature 1..13923: note = Description of Artificial Sequence: Synthetic coding sequence
  source 1..13923: mol_type = other DNA
atgccagtgccagatggcagcgtggccgctgcaggcctgggactggggttgccggccgcagattctagaggacactatcagctactgttgtctgggcgcgcgctagccgatcgatacagaagaatatacaccgccgcactcaatgatcgagatcagggaggcggcagcgcagggcacccggctagcagaaacaaaaagatcctgaacaagaaaaagctcaagcgcaaacaaaagtcgaaatctaaggtaaagacccggagcaaaagcgagaacttggagaatactgtgattatacccgacatcaaactgcactccaatcctagcgcatttaatatttattgcaatgttcgccactgcgtcctagaatggcagaaaaaagaaatcagcctggctgcagcttctaagaactctgtacaaagcggcgaatcagactcagatgaggaggaggagtcaaaggaaccacctattaaactgcccaaaatcattgaagtggggctgtgcgaggttttcgagctgataaaagagactagattttcgcaccctagcctgtgcctccggagtcttcaggccctcctgaatgtcctgcaaggtcaacagcctgagggcctgcaaagcgagccccccgaggtcctggagtccctgttccagcttttgctcgagataactgtgagaagcaccggcatgaatgactccaccggtcagtcactaacagcgctgtcctgcgcttgcctgttcagccttgttgcttcgtggggtgaaactggccgcaccctgcaggccatttcagccattctcaccaacaatgggagccacgcttgtcagacaattcaggtgcccaccatccttaatagtttgcagcggagtgttcaggccgtgttggttgggaagatacagatccaggattggttctccaatggaattaaaaaggcagcactgatgcataagtggcccctgaaagagattagcgtggacgaggatgaccaatgccttctgcaaaacgacggattttttctttacctgttatgtaaggacgggctctataagatcggatcaggttacagcgggacagtcaggggacatatttataatagtacctcaagaatccgcaaccgaaaggagaaaaaatcatggctgggatacgctcaaggttacctcctgtaccgtgatgttaacaaccattccatgacagctataagaataagccccgaaactcttgaacaggacggtacagtaatgctgcccgattgccacacagaggggcagaacatcctatttaccgacggtgagtatattaaccaaatcgccgcttctcgggatgatggtttcgtggtgcggatcttcgccactagcacagagcctgtgctgcaacaggaactgcagctcaagctggctcggaaatgtctgcacgcctgcggcatctccttattcgaccttgagaaagacctgcacattatctctaccggatttgacgaggaaagtgccatactgggcgccggacgggaattcgccctgatgaagacggctaatggtaaaatctactataccgggaagtatcagtccctgggcataaagcagggtggacctagtgccggcaaatgggtcgaactgccaataaccaagagtcctaaaattgtccatttctccgtgggtcacgacggcagccacgctctccttgtggctgaggacggctccatctttttcactgggtctgcttctaagggggaagatggggagagcaccaagtccagaaggcagtcgaagccttataaaccaaagaaaatcataaaaatggaaggaaagattgtggtgtatacagcctgtaacaatggcagtagctctgtgatatcaaaggacggggagctatatatgttcgggaaggacgctatatatagtgactcaagcagcttggttactgacctaaaaggccactttgtgactcaggtggccatgggtaaggcacatacctgcgtgttgatgaagaacggagaggtctggacctttggtgtcaacaataaggggcagtgcgggcgggataccggtgcaatgaatcagggcggcaaaggatttggagtggagaatatggccacggccatggacgaagatttggaagaggaacttgacgaaaaggatgagaagagtatgatgtgcccgccgggaatgcataaatggaagctggagcagtgtatggtatgtacagtctgtggtgattgcaccggctatggggcctcatgtgtgtcgagcggaagaccagatcgtgtacctggggggatctgtggatgcggaagcggggagtctggatgtgccgtatgcgggtgctgtaaggcatgcgcacgcgagctggatggccaggaagcccggcagagggggattttggacgcagtgaaggaaatgatccctctggacctgctgttggccgtgcccgtgcccggagtgaatatcgaagagcatctgcaactccggcaggaggaaaagcgccaacgtgttatcaggcgccatcggctggaggaaggccgcggccctctagtcttcgccggcccaatctttatgaaccaccgggagcaggccctggcacgcctgcggtcacatcctgctcaactgaagcataagcgagacaagcacaaagacggtagtggagagagaggcgagaaggacgcgagtaagataacaacctatccgcctgggtccgtgcgttttgattgcgagctccgcgccgtgcaggtctcatgcggtttccaccatagcgtggtcctgatggaaaatggcgacgtgtataccttcggctatgggcagcacggccagttggggcatggagatgtgaattcccgaggctgccccacactcgttcaggctctcccaggcccctcaacacaggttacggccggatcgaaccatacagccgtactgcttatggacggtcaagtgttcactttcgggagcttttctaagggccaattgggccggcccatcctggacgtgccctactggaatgctaagcctgctccaatgcccaatataggatccaaatatggccggaaagcgacttggatcggcgctagcggcgaccagacctttcttagaattgatgaagccttgattaactcccacgtactcgcgactagtgagatcttcgccagcaagcacatcatcggattagtccctgcctcaattagcgaaccccctccttttaagtgtcttctgatcaataaggtggatgggagctgtaagacttttaacgactctgaacaggaggatctccagggattcggcgtgtgcctggacccagtgtatgatgtgatctggagatttcgccctaatacccgagaactttggtgttataatgcagttgtggctgacgctcggctaccaagcgcagctgacatgcagtctcgttgcagcatcctgagtcctgagttagcacttccgaccggcagtcgagccctaacaacaagatctcacgcagctctccacatccttggctgtttggacacactggctgctatgcaggatcttaaaatgggtgttgctagcacggaagaggagactcaagccgtcatgaaagtatacagcaaagaagactattctgtcgtgaacaggttcgagtcacacggtgggggttggggctactccgcacattccgtggaggcaatccggttcagcgccgatacagacattctcttggggggactgggtctgttcggtggcagaggagagtataccgctaagataaaactcttcgagcttggacctgatggcggtgaccacgaaacagatggcgacctgctcgcggaaacagatgtccttgcatacgactgcgccgcacgggagaaatatgcaatgatgttcgatgaacccgtgttgctgcaggcagggtggtggtatgtggcatgggcgagggtcagtggtccgtcctctgattgcggttcccacggtcaggcaagcatcacaaccgacgacggagtcgtcttccagtttaagagcagtaaaaagagtaataacgggaccgacgtcaacgcaggccagatcccccaactcctgtaccgtctgccaacaagtgacgggagtgcctcaaagggcaagcaacagacttcggaacctgtgcatattttaaagaggagttttgctcggactgtgtctgtggagtgttttgaaagcctcttatctatcctgcactggtcctggacaaccctagtgctgggtgtggaggaattgagaggactgaaaggcttccagttcacggccacgcttcttgatctggagcgcctgcgcttcgtgggcacgtgttgcttacgcctgctcagggtctatacctgcgaaatctaccccgtttctgctacaggcaaggctgtggttgaggagaccagcaaattggccgagtgcatcgggaaaaccagaactctcctgaggaaaatcttgagcgaaggagtggatcactgcatggtgaagctggacaatgatccgcaggggtatctgagtcagccacttagcctgctggaagccgtgctgcaggaatgccataacactttcactgcttgtttccatagcttttaccccactccagcgcttcaatgggcttgtctgtgtgacctgctaaactgtcttgaccaggacattcaggaggctaacttcaaaacatccagctctagactgttggctgctgtgatgtccgccctctgtcatacatccgtaaagctgacatccattttcccaatcgcttacgacggcgaggttttgctgaggtccattgtgaagcaggtgtcaactgaaaacgatagcactttggtgcatcgcttccccctgctggtcgcccacatggaaaaactgtctcagtcagaagagaatatcagtggcatgacctcattcagagaagtgctggagaaaatgctggtgatcgtcgttctgcctgtgaggaatagtctgagaagagaaaatgaactttttagcagccaccttgtgagcaacacatgtgggttgctggcatcgattgtgagtgaactcacagcaagcgcgctggggagcgaagtggatggtcttaatagccttcacagtgttaaagcatccgccaatcgattcactaagacatcccagggacgaagttggaataccggcaatgggtcaccagacgcgatttgcttctccgtggacaaaccagggatagtcgttgtcgggttctccgtctacggaggtgggggcatacacgagtacgaactcgaggtgctcgtcgatgattcggagcacgccggcgattccacacattcccacaggtggacgtcacttgaactggtcaagggtacttacactaccgacgactcaccatctgatattgctgaaataagactcgacaaagtggttccccttaaggaaaatgtcaagtacgccgttcgcttgagaaactacggcagcaggactgcgaatggagacggcggcatgaccacggttcagtgccccgatggggttacgttcactttttccacatgcagcctttccagcaacggaaccaaccagactcgtggacaaataccacagattctatactaccgttcagagttcgatggagacctccagagccaactgttatccaaggcgaatgaagaagataaaaactgctctagggcactgagcgtcgtgagcactgttgtgagggcatcaaaagatctgctacatagggctttagctgtcgatgcagatgatataccagaacttctgtctagttcgtctctcttctcgatgcttctaccgctcataattgcatatatcggcccagtcgccgcagctattccgaaagtggccgtggaggtgtttgggttggttcagcagctgctcccaagtgtcgcaatcctcaatcagaaatatgctcctcctgccttcaacccaaaccagtcaactgacagtaccaccggaaaccagccagaacaggggctctctgcgtgcactacctcctcccattatgcagtgatcgagtccgagcacccttataagccagcgtgcgttatgcattacaaagtgaccttccctgaatgtgtacggtggatgacaattgagttcgacccccaatgcggtactgctcagtccgaggatgtcttgagattgctgatccccgtgcgtaccgtacagaactccggctacggaccaaaattaacttccgtacatgagaacctgaatagctggatagaactgaagaaatttagcggaagcagcggctggccaaccatggtgctggtcctgccgggaaacgaggctctgtttagtctggagacagccagcgattatgtcaaggatgacaaagcctctttctacgggtttaaatgcttcgccattggttacgagtttagccctgggcctgatgagggcgtgattcagttggagaaagagctggccaatcttggaggggtctgcgccgccgcgctgatgaagaaagatctggcgcttcccattgggaacgaactcgaggaagatctcgagattctggaagaagcagccctccaggtctgcaaaacacattcaggtatccttggaaagggcctcgcccttagccacagccccactattctggaggcgctcgagggcaacttacccctccagatccagtccaatgagcagtcatttctggacgatttcatcgcatgtgttcccggcagttcgggcggccgactcgcccggtggctccagccagactcctacgcggatccccaaaagacctccctgattctgaataaggatgatatacgatgcggctggcccactaccatcactgtgcagactaaggatcagtatggagatgtcgtgcacgtccccaatatgaaagtggaggtcaaagccgtgcctgtaagtcagaagaaaatgtctttgcagcaagaccaagccaagaaaccacaacgcatccctggctcacccgcagtgacagccgcaagttctaatactgatatgacatacggcggcctggcctcccctaagctagatgtgagctacgagccaatgatagtcaaagaggctaggtatatcgccatcaccatgatgaaggtctacgagaactactccttcgaagaactgcgcttcgcaagcccaacacccaagcgaccctccgagaacatgttaattcgagtaaacaacgacggcacttattgcgccaactggactcccggcgccattgggttatatacccttcacgtaaccattgatggaattgaaatcgatgcggggctcgaagttaaagtgaaagatcctcctaaggggatgattccacctggaacacagctggtgaaaccgaaatctgagccgcagcccaataaagtacgcaaatttgtggctaaggactccgccggactgagaattaggagccatccaagcctgcaatcagaacagattggaatcgtgaaggttaacggcaccatcacatttatcgatgagattcacaacgacgacggggtgtggttaaggctcaacgacgagacaattaaaaagtacgttccgaatatgaatggatatacagaggcctggtgtctttctttcaaccagcatctcggcaagtccctccttgttcctgtggacgagtccaagactaacacggacgacttcttcaaggacattaactcctgctgcccacaggaggctactatgcaggagcaggacatgcctttcctgcgagggggacctgggatgtataaagtggtcaagacgggtccttccggccacaacattcggagctgccccaatctccgggggatccccatcgggatgctcgtgctgggtaacaaggttaaggcagtgggcgaggttacaaattctgaggggacctgggtccagctggaccaaaacagtatggttgaattctgcgagagtgacgaaggggaagcctggagcctcgcgcgcgataggggtggtaaccaataccttcgccacgaggatgagcaggctctcttagatcagaactctcagactcctcccccctcccccttctccgtgcaggccttcaataaaggcgcctcctgctctgcccagggatttgactacgggttagggaacagcaagggcgaccgcgggaacatctccacctcttctaaacctgcttcaacctcgggtaaatctgaattaagcagcaagcactctaggtcactcaaacctgacgggaggatgtcaagaacgaccgccgaccagaaaaaacctagaggcacagagagcctgagcgcatccgaatcgctcattctaaagtctgacgcagctaagcttcgtagcgactctcattctcggagcctgagccctaatcataatacactgcagaccctgaaatccgacggccgcatgccttcctcctcccgcgctgaatcccccggaccaggtagccggctgtccagccccaagcccaaaaccctcccggccaaccgttcctccccgtccggcgccagcagcccaaggtcatcttccccccacgacaaaaatctgcctcagaagtcgaccgctcccgttaagacgaagctggatccaccccgcgaacgctccaagtcagattcctacacccttgaccccgataccctacggaaaaaaaagatgccgctgacagaacccctgcgcgggcgaagcacctctccaaagcctaagtccgttcctaaagattctaccgactcgcccgggtccgagaaccgagcgccctcaccacatgtggtgcaggagaacctccatagtgaagtggttgaagtttgtacctcttccaccctgaagacaaatagcttaaccgatagcacatgcgacgattcttcagagtttaagtctgtcgacgaaggctccaacaaagtgcacttctcaatcgggaaagctcctctcaaggacgaacaagagatgcgggctagtcctaaaatctcaagaaagtgtgctaacaggcatactaggcctaaaaaggaaaagtcaagtttcctgtttaaaggcgatggctctaaacccctcgaaccggctaagcaggccatgtccccaagcgtggccgagtgcgccagagcagtgttcgcgtcatttctgtggcacgaagggatcgtgcacgacgcaatggcttgctccagctttcttaagttccacccagagctgtccaaagagcatgcgcctattcggtccagtttgaattcccagcaaccaacagaggagaaagagaccaaactcaagaatagacattcgttagaaatttcatctgctttgaacatgtttaacattgcgccccatggcccggatatttctaaaatggggtccatcaataaaaataaagtcttgagcatgctgaaagaacccccactacacgaaaaatgtgaggatgggaagacggagacaacctttgaaatgagtatgcataacaccatgaagtccaagtccccactcccattaacactgcaacacctcgtggccttctgggaagacataagtcttgctacgataaaagccgcaagccaaaatatgatcttcccatcacctggttcatgcgcagtactgaagaagaaggagtgcgaaaaggagaataaaaaatcaaaaaaggagaaaaagaagaaagaaaaggcagaagtgcgccccagagggaatctcttcggcgaaatggcccagctagcggttggaggccccgagaaagacaccatctgtgaactatgcggcgagtcccacccatacccagtgacctatcatatgaggcaagcgcaccctggatgcgggaggtacgcgggtggacagggctataactccatcggtcatttttgtggcggctgggcaggcaattgcggcgacggaggaattggcggttcaacgtggtacctcgtttgcgatcgatgtagggaaaaatacctcagagaaaaacaggccgctgctagagagaaggtgaaacaatcccgccggaaaccaatgcaggttaaaactcctcgcgctctgcccacaatggaggcccatcaggttataaaggccaacgctctctttttgttgagtctgagcagcgcagcagaaccttcaatcctgtgctaccaccccgccaagccgtttcaaagccagctgcctagtgtcaaggagggaatttctgaggacctgccagttaagatgccttgtctgtatctccagaccctggcgcgccaccaccatgaaaactttgtgggctatcaagacgacaacctgttccaggatgagatgcgttaccttcgtagtaccagtgtccccgctccttatatcagtgtcacccccgatgcgagcccaaatgtgttcgaggaaccagagtcgaatatgaagagtatgcctccctctcttgagacctctccaatcacagacaccgatctcgccaagagaacagtttttcagagaagctattctgtggtcgcctctgagtacgacaagcagcactccatcctccccgctcgcgtgaaggcaatcccacggaggcgcgtaaactctggtgacactgaagtgggttcatccctgctccggcacccctccccggagttaagcaggctcatcagcgcccactcttcactctccaagggcgaacgcaacttccaatggcccgtattagcgttcgtcatacagcaccatgatcttgaaggcttagagattgccatgaaacaggcactaaggaagtcagcctgcagagtgttcgccatggaagcgtttaattggctgctgtgcaatgtcatacaaacaaccagcctgcatgatatcctgtggcattttgtggcttctctaacacctgcgcccgttgaaccagaggaggaagaggatgaggagaacaagacctcaaaggaaaatagtgaacaggaaaaggatacaagggtgtgcgagcaccccctttctgatattgtcatcgctggagaagcggctcaccccctcccacatacattccatcggctgttacagaccatctccgacctgatgatgagtttaccttctggcagcagcctccagcagatggctctgagatgttggtcactcaagttcaagcagtccgatcaccaatttctgcatcaatctaatgtctttcaccatatcaacaatatactcagcaaatctgatgacggagactcagaagagtccttctctattagtatccagagtggatttgaagcaatgagccaggaactatgtatcgtcatgtgtttaaaggatttgacgtcgattgtagatataaaaaccagttccagacccgcaatgatcggatctctcactgacgggagtaccgaaacgttctgggagtcaggcgatgaggataaaaataaaaccaagaatatcaccatcaactgcgtcaaaggcatcaatgccagatatgttagcgtccacgtagataattctagggacttaggcaacaaggtcacatcgatgaccttcttgactggcaaagccgtggaagacctgtgtcgtattaagcaagtggatcttgatagtcgacacatcggatgggtcaccagcgaactgcctggtggggacaaccacatcattaagatcgagctgaaaggccccgagaatactctccgagtacgccaagtgaaggtgctgggctggaaggatggagaatctaccaagatcgccggtcagatatccgcatctgttgcccagcagcgcaactgtgaggctgaaaccctgagagtgtttagacttattacatcccaggtttttggtaagcttatatccggtgacgctgagcctacaccggagcaggaggagaaggcgctcttgtcctcgccagagggcgaggaaaaagtgtacaatgccacttcagacgccgatctcaaagaacacatggtcggaatcattttcagtcgttcgaaactgaccaacttgcagaagcaggtgtgtgcccacatagttcaggctattagaatggaagccacaagggtgcgcgaggagtgggaacacgccataagttctaaggaaaatgcgaatagccagccgaacgacgaggatgctagtagtgatgcctactgcttcgaactgctttcaatggtcctggctctgtcaggtagcaacgttggaaggcagtatctggcccagcaactgaccttgctgcaagatctgtttagcctcctgcacaccgcctcccccagggtccaacgccaggttacctcacttctgagaagagttctaccggaggtgacacctagccgactagcctccattataggcgtcaaatcactgccccccgccgatatcagcgacatcattcattcaactgagaaaggggattggaacaagctggggattctcgatatgtttttagggtgtattgctaaggcccttacagtgcaacttaaagcaaagggcaccactatcactggcactgccgggacaacagtcgggaaaggtgtcacgacagttacactgcccatgatattcaacagcagctatctgagacgcggcgaatctcactggtggatgaaagggagcacacctactcaaattagcgaaatcatcatcaagctgatcaaggacatggcggccggccacctttccgaggcttggtcacgcgtgacaaaaaatgccatcgctgagactatcatcgcccttacaaaaatggaggaggagttccggagccctgtccgttgtatcgccacaactagactgtggctggccctcgctagcctctgtgtgttagaccaggaccatgtggaccggctttcctctggacgttggatgggcaaggacggacagcaaaaacagatgcctatgtgtgacaaccatgacgacggcgagacagcagcaatcattttatgtaacgtgtgtggcaatttatgtaccgattgtgatagattcctgcatctccacaggcggaccaagacccaccagagacaggtcttcaaagaggaagaagaagctattaaggttgacctgcacgagggttgcggccgaaccaagctgttctggctgatggctttggccgactcaaagaccatgaaagcaatggtcgaattccgggagcatactgggaagcctaccacttccagcagcgaagcatgccgattttgcggaagcagatcaggcacagaactctcagccgtggggagtgtgtgctcggatgctgactgtcaggaatacgccaagatcgcctgtagcaaaacgcacccttgtggacatccctgtggaggggtgaagaacgaggaacactgtttgccctgcctccatgggtgtgacaaatccgcgacatcacttaagcaggacgcggatgatatgtgtatgatttgctttactgaggccctgtccgcagctcctgccattcagctggactgctcccacatattccacttgcagtgttgccggcgcgtgctcgagaacaggtggctcggtccccgcattacttttgggtttatcagttgccctatttgcaagaacaagatcaaccacatcgtactgaaggacctcctcgatcccatcaaggaactgtatgaggatgtacgccgcaaagcccttatgcgacttgagtatgagggcctgcataagagcgaagcaattacgacacccggggtcagattttataatgacccagctggctatgcaatgaatcggtatgcttactacgtgtgctacaaatgcagaaaagcctacttcggaggcgaggcccgttgtgatgcagaggcgggccgcggggatgattatgatccccgagaattgatctgcggcgcctgtagtgacgtcagccgcgctcagatgtgtcccaagcacggaacggacttcctggaatacaaatgccgctactgctgcagtgttgcagtgtttttctgttttggcaccactcacttttgcaacgcttgtcacgatgacttccagagaatgacctctatacccaaggaggaactgccccactgtcctgccggaccaaaaggcaagcaactcgaggggacagagtgtcccttacacgttgtccacccgccaacaggggaagagttcgcacttgggtgcggggtctgtcggaatgctcataccttttag

SEQ ID NO: 16180 - DNA, 930 bp, synthetic construct
  misc_feature 1..930: note = Description of Artificial Sequence: Synthetic coding sequence
  source 1..930: mol_type = other DNA
atgcgtcccgatagggctgaggcccccggtccccccgcaatggccgccgggggccccggtgctggctcagcagccccggtcagtagtacctccagcctacccctagcagccctgaacatgcgggttcgtaggagactgtctctgttccttaacgttagaacacaggtggctgcagactggaccgccttggctgaggaaatggattttgagtatctcgaaatcaggcagctcgagacccaggccgacccaaccggccgattgctggacgcatggcagggccggcctggagccagcgttggccgcctgctggaacttctgacgaaactgggccgcgatgatgtcttgttagagctgggaccgtccatcgaagaagactgtcagaagtatatcttgaaacagcaacaagaagaagctgagaaaccccttcaggtggccgctgtggactcatccgtcccccgaaccgccgagctcgccggaattactaccttggacgaccctttaggtcatatgccagaacggttcgatgcattcatctgttattgcccctcagacattcagtttgttcaggaaatgattcgacagctcgagcaaacaaactacaggttgaaactgtgcgtcagcgaccgtgatgtcctgccggggacatgcgtttggagcatcgcgtctgaactgatcgagaagcgatgccgacgtatggtggtcgtagtatctgacgattatctgcagagtaaggaatgcgacttccagacgaagtttgcactgagcctctcgccaggggcgcatcagaagcgcttaatacctatcaagtacaaagcaatgaaaaaagagttcccctccattctccggtttataacggtatgcgattatacaaatccgtgcaccaagagctggttttggacccgacttgctaaagcactgtccctcccgtag

SEQ ID NO: 16181 - DNA, 858 bp, synthetic construct
  misc_feature 1..858: note = Description of Artificial Sequence: Synthetic coding sequence
  source 1..858: mol_type = other DNA
atggccgctggcgggcctggagccggctcagcagctcccgtgagctctacttcctcactaccattggcggctttgaacatgcgcgtgaggcgccgactctcccttttcctcaacgtgagaacacaagtggccgccgattggacagcccttgccgaagaaatggactttgaatacctagagattaggcagctcgagactcaggccgaccccactggcgcatcagttggtagactgctggagttactcactaagctggggcgcgacgacgtgctgctggaactgggtcccagtatcgaggaagattgtcaaaaatacatcttgaagcagcagcaggaagaggccgaaaaaccactccaggttgcagcagttgatagttctgtgccgcgaaccgcagagctagcagggatcactacactcgacgaccctctgggacacatgccagaacgctttgacgctttcatctgttactgcccgagcgatatccagtttgtgcaagaaatgatccggcagttggagcagactaactaccgcttgaagctgtgcgtatccgaccgcgatgtgctcccaggcacttgtgtttggagtatagcctccgagttgatcgagaagaggtgccggcggatggtcgtggtagtgagcgacgactacctacagtctaaagaatgtgatttccagactaagtttgctctttctctttcaccaggcgctcaccagaagcgcctgatcccaattaaatataaagccatgaagaaagagtttccttccattcttcgatttatcaccgtttgcgattatacaaatccatgtaccaagtcttggttttggacgcggcttgctaaggcactgtctctgccttag

SEQ ID NO: 16182 - DNA, 954 bp, synthetic construct
  misc_feature 1..954: note = Description of Artificial Sequence: Synthetic coding sequence
  source 1..954: mol_type = other DNA
atgagacctgacagagccgaagctcccggtcctcccgctatggctgccggtggccccggggccgggtcagcagcaccggtctcatctactagtagtctgcccctggcagctctgaacatgagagtgagacggcgcctctcactctttctgaatgtgcggacacaggtagcggcagactggactgcactggccgaagaaatggatttcgagtatctagaaattaggcagctcgaaacccaggcggaccccacagggcgcctgctggatgcctggcaaggtcgccccggcgcctcggttggtcgcttgcttgagctgctcacaaaactggggcgtgatgatgtcttactggagctcggaccgagtatcgaggaagattgtcagaagtatatactcaagcagcaacaggaggaggccgagaaacctctccaggtggctgcagtcgatagttctgtccccaggaccgccgagcttgcaggaataaccacactcgatgacccattgggacacatgccagagagattcgatgccttcatttgctattgcccttctgatatccagtttgtacaggaaatgatccggcaactcgagcaaaccaattatcggctcaaactttgtgtaagtgaccgtgacgtgctcccaggtacatgcgtgtggtcgattgcgagcgaactaatagaaaaacgattagctcgacggccacggggcggatgccggcgtatggtcgtggtggtgtccgacgattatttgcagagcaaagaatgtgatttccaaaccaagtttgctctgagtctgtctccaggagctcatcagaaaaggctgattccgattaagtacaaggctatgaaaaaagagttcccatctattttacgatttataacagtttgtgactatactaacccctgcaccaagagctggttctggacacgactcgcaaaagctctgagtctcccctag

SEQ ID NO: 16183 - DNA, 510 bp, synthetic construct
  misc_feature 1..510: note = Description of Artificial Sequence: Synthetic coding sequence
  source 1..510: mol_type = other DNA
atggcagcaggaggcccaggggccggctcagcagcacctgtttcttctacaagcagcctaccacttgcggctttaaacatgagggtacgacggcgactgtcgctgtttctcaatgtgcgaacacaagtggcagccgactggacggcccttgccgaggagatggacttcgaatatctagaaattagacaactcgagactcaggccgatcctacaggccggctgctggacgcttggcaggggcgcccgggcgcttcggtcggtcgactgctggagctactcacaaagttgggtcgggacgacgtcctgctcgagttgggacctagtatagaggaggactgccagaagtatattctcaaacagcaacaggaagaggcagaaaagcctctccaggttgccgctgtggactctagtgtgccgccacatctgatgaccccgtgggggatctgtctcagtgtctcaatgccgtctagcgctattgcccctgccacaagcagcctctgcagacggtag

SEQ ID NO: 16184 - DNA, 963 bp, synthetic construct
  misc_feature 1..963: note = Description of Artificial Sequence: Synthetic coding sequence
  source 1..963: mol_type = other DNA
atggagcttctctcacccccgctccgggacgtggatttgactgccccggatggtagtctgtgttcctttgccacaaccgacgacttctatgatgatccctgttttgactcacctgacctgcggttctttgaagacctggacccgcgcctgatgcacgttggtgcccttctgaaacctgaggaacacagtcactttccagccgccgttcacccagctcccggggccagagaagacgaacacgtacgtgccccatcggggcatcaccaagctggacggtgtctgctgtgggcttgtaaggcctgtaaacgaaagaccaccaatgctgatcggagaaaagctgccaccatgcgagaacgccgacggctgtccaaggtgaacgaagctttcgaaacccttaagagatgcacctcttccaatcccaaccagaggttacctaaagtggagatcctgcgcaacgccatcagatacattgagggtcttcaagctctgctgagagaccaggatgcagctcccccgggcgctgccgccgccttctatgcacccggcccactgcctcctggtcggggcggggagcattactccggtgacagcgatgcttcctccccccggtcaaattgcagtgatgggatgatggactactccggtccaccatccggtgcccgcaggagaaactgctacgagggcgcgtactataacgaggccccctctgaaccccgtcctggcaaatccgctgcagtttcgtctctcgactgcttgagctctatagtggagaggatttcaacagagtctccggccgctcctgctctgctgctggccgatgtgccctcggaaagcccccctcgccggcaagaagcagctgctccgagcgaaggggaatcctccggcgacccaacgcagtcccctgatgccgcacctcagtgtcccgccggcgccaaccctaatccgatttatcaggttctgtag

SEQ ID NO: 16185 - DNA, 5538 bp, synthetic construct
  misc_feature 1..5538: note = Description of Artificial Sequence: Synthetic coding sequence
  source 1..5538: mol_type = other DNA
atgggtgatgttaagcttgtggccagtagccacatcagcaagacgagcctgagtgtggacccttcccgagtggattcaatgcctcttacggaagcccctgcgttcattctgccaccacgaaatctatgcattaaggagggcgctaccgctaagtttgaaggccgggtgagggggtacccggagccacaagtgacatggcaccgcaacggccagcctatcacatcgggagggaggtttctcctcgactgtggcatacggggcacctttagcctcgtgattcacgcagtgcacgaggaagaccgtggaaaatatacgtgcgaggcgacaaatggctcaggcgcacgccaggtgaccgtcgagttgactgttgaaggctcttttgccaagcagctcggccaacctgtggtatcaaaaactctgggcgaccgtttcagcgcccctgccgtcgaaaccagacccagcatttggggagagtgcccccccaaattcgccactaaattgggtagagtggtggtgaaggagggacagatgggcagattttcttgcaagattacgggcagaccacagccgcaagttacttggctgaaggggaatgtccctctgcagcctagcgccagggtgagcgttagcgaaaaaaatggaatgcaggtcctagagattcacggagtcaaccaggatgacgttggcgtatatacatgcctagtagtgaacgggtccggcaaagcaagtatgtcagccgagctgagcatccagggactcgactccgcgaacaggagcttcgtgcgcgagacaaaggccaccaacagcgatgtaagaaaagaggtcaccaatgttatttcgaaagaaagcaaattagattcactggaggccgcagcgaaatctaaaaactgcagctctccacagcggggagggagccctccctgggctgccaactcacagcctcagccccctagggagagtaagctggagagctgcaaagactcgcctcggactgcaccacagaccccagtgctccaaaaaacatcgagcagcataacactgcaggcagcccgcgttcaaccagagccgcgcgccccgggcctaggcgttctcagtcctagtggagaggagagaaagcggccagcccctcccaggcccgcgacattcccaacaaggcagccaggactgggatcccaagacgtagtgtcaaaggcagcgaatagacgtattccaatggagggacagagagacagcgctttccctaagttcgagtccaagcctcaaagccaggaagtcaaggaaaaccagacggttaaattcaggtgtgagggactggccgtgatggaggttgctccaagcttttcttcggtacttaaggattgcgccgtgatcgagggacaggattttgtgctccagtgtagcgttcgagggaccccggttccccgtattacttggctactcaacggtcagcctatccagtatgcacgcagtacgtgcgaggccggcgtggcggagctgcatattcaggatgctcttcccgaggaccacggcacatacacctgcctggcggagaatgcgctgggacaggtgagctgctcagcgtgggttaccgtacatgagaagaaaagtagccggaagagtgaataccttttacccgtggcgccctccaaacctactgcccccattttcctgcagggactgagtgatctgaaggtgatggatggctcgcaggttacaatgacggtccaagtcagcggaaaccctccaccagaggtcatctggctgcataatggcaacgagatacaggagtctgaagattttcatttcgagcagagaggaacacagcactccctgtgcatacaagaggtctttccagaagataccggcacatacacgtgcgaagcctggaatagtgctggtgaagtacggactcaggcagttctgactgtacaagagcctcacgacggcacacaaccttggttcattagcaagccaagatccgttaccgctagcctcggtcaatcagtgctgatctcgtgcgcaatcgcaggcgatcccttccccaccgttcattggctccgcgacggaaaggccctgtgcaaggacactggccattttgaggtgctgcagaacgaagacgtcttcacactggtgctgaaaaaggttcagccgtggcacgccggtcagtacgagattctgctgaagaatcgggtgggcgagtgttcttgtcaagtgtccctaatgttacagaactcatcagcccgggccctcccaagaggaagagaacctgccagttgtgaagacctctgcggaggaggggtaggagcggatgggggagggagtgacagatacggaagtctacgcccagggtggccagctcggggccagggttggctagaggaggaagatggtgaggacgttcgtggtgtgctgaagcgcagagttgaaactaggcaacacaccgaggaggccattcgccagcaggaagtcgagcagctggacttcagagatctccttgggaagaaagtttcaacaaaaacgttgtcagaggacgacttaaaagagatccctgccgagcagatggacttcagggccaacctgcaacgacaggtaaaaccaaagacagtaagtgaagaggagcggaaagtgcacagcccgcaacaggtggactttcgctcagtacttgctaagaaaggcactagtaaaacccccgttcctgagaaagtccccccccccaagcctgccactccagatttcagatcagtactcggggggaaaaaaaagctgcctgcggaaaacggcagctcctcagctgaaactctaaatgcgaaagctgtggaatcctctaagcccttgtcaaatgctcagccttctgggcccttgaaaccagttgggaacgccaagcccgctgagacgctcaagcctatggggaacgctaaacccgctgaaactttgaaacctatgggcaacgcaaagccagatgagaatctgaaatccgccagtaaggaggaactgaagaaggacgtcaagaacgacgtgaattgcaagaggggccacgctggaaccactgataacgaaaaaagatccgagtctcagggtactgcccctgcctttaagcaaaaactacaagatgtacatgttgccgaaggaaagaagctgttactccagtgccaggtgtcctccgatccacctgcgactatcatttggaccctcaacgggaaaacattgaagactactaagtttatcattttgtcgcaagagggtagcctctgttcagtaagcatagaaaaagccctccccgaggacaggggcttatataagtgcgtggcaaaaaacgacgcaggacaagctgagtgctcctgccaggtcacagtagacgatgctccagccagcgagaatacaaaggctcccgaaatgaagtctcggcggcccaagtcatccctgccgccagtcctaggcaccgagagcgacgcgactgtcaaaaaaaagcccgcaccaaaaacgcctcccaaagctgcaatgcccccacagattattcagtttcccgaagaccaaaaggtgagagctggcgagtctgtcgagttatttggcaaggtcacaggaactcagcctataacctgcacgtggatgaagtttcggaaacagatccaagaaagcgagcatatgaaggtggaaaactctgaaaatggctctaagttaactatactcgcagcaaggcaggaacactgcgggtgttacacactgctagtggaaaacaagttgggcagtagacaggcacaagtaaatctgaccgtcgtagataagcctgacccaccagctgggaccccatgcgcctcagatattagaagctccagtctgacactgtcctggtatggctcgtcttatgacggggggagcgccgtgcaaagctattctatcgagatctgggattcggctaacaagacttggaaggaattggcaacgtgtcgtagtacttcgtttaatgtacaggatctgctgccagatcacgagtacaagttccgcgtgagagccatcaatgtttatggcacgagcgaaccgagtcaggagtccgagctaacaacagtgggggaaaagcctgaagaacccaaagacgaggtggaggtatccgacgatgacgagaaagagcccgaagtcgactatcgcactgttaccataaacactgagcaaaaggtcagcgatttctacgatatcgaggagcgtcttggctccgggaagttcggacaagtgtttcggctcgtggaaaagaaaaccaggaaagtatgggctggtaaattttttaaggcttacagcgccaaggaaaaagaaaatatacggcaggagatctctattatgaattgcctgcaccacccgaaactggtacaatgtgtcgatgccttcgaggagaaggccaacatcgtaatggtgctagaaattgttagtggaggggagctgtttgagcgcatcattgatgaggactttgaattaaccgagagggagtgcataaaatacatgcggcagattagtgagggagtagaatacattcataaacagggcattgtgcacctggacctgaaacctgagaatattatgtgtgttaataaaacaggcacaagaatcaagctgatcgattttggcctcgctcggaggctcgagaacgccggttctctaaaggtgctgttcgggacacctgagtttgttgcgccagaggtgatcaactatgaacccatcgggtatgcgaccgatatgtggagcattggggtgatttgctacatcttggtaagtggattgagccctttcatgggcgataatgacaatgaaaccctagctaacgttacttctgccacatgggacttcgacgacgaggcgttcgatgaaatttccgacgatgcaaaggacttcatcagcaatctgttgaaaaaggatatgaaaaatagattagactgtactcagtgtctgcagcatccttggctgatgaaagacaccaaaaatatggaagctaagaagctgtccaaagatcggatgaagaaatatatggctcggaggaaatggcaaaaaacaggaaatgcggtgagggccattggccgcctaagctctatggccatgataagcggcctgagcgggcgcaagtcctctaccgggtcccctacctcccccttaaatgctgaaaaactggagagtgaagaggacgtatcccaggcatttctcgaggctgtggctgaagaaaaacctcacgtaaaaccttatttttccaagacgattcgggatctggaggtggtggaaggctcggccgctcgctttgattgtaagattgagggttatcccgacccagaagtggtatggtttaaggatgatcaatctatcagggagagtaggcacttccagattgattacgatgaggacggaaattgctctctgattattagcgacgtctgcggggatgacgatgcaaagtatacatgcaaggctgtgaactccctcggggaggccacctgtacggccgagttaattgtggagactatggaagagggggaaggcgaaggcgaggaggaggaagagtag

SEQ ID NO: 16186 - DNA, 2145 bp, synthetic construct
  misc_feature 1..2145: note = Description of Artificial Sequence: Synthetic coding sequence
  source 1..2145: mol_type = other DNA
atgaaatcccggcgtccgaagtccagtttacctcccgtgcttggtacggagtctgacgccaccgtgaaaaaaaaacctgctcccaaaacacctcccaaagcggcaatgcccccacagatcatccagttcccagaggaccagaaagtgagggcaggggaaagcgttgaactcttcggaaaggtgacgggcactcagcctatcacgtgcacctggatgaagttcagaaagcagatacaggagtccgagcacatgaaagtggagaatagtgaaaatggcagcaagttaacaatactggccgcgagacaggaacactgcggctgttatacgttattggtggagaataagctgggctcacggcaggcccaggtgaacctgactgtggtagataagcccgacccaccagccggcacaccctgtgctagcgacattaggtcatcttctctgactctcagctggtacgggtcatcctacgacggaggttccgcggtgcagtcctactcaatagaaatctgggatagtgccaataagacctggaaggaactggcgacttgcaggtcaaccagtttcaacgttcaggacctcttgcctgaccacgaatataaattcagagtgcgggccatcaatgtatatggaacttctgagccttctcaggaaagcgaattaactacagtcggcgaaaagcccgaggagcccaaggacgaagttgaggtctctgatgacgatgagaaagagcccgaggtcgactatcgtaccgtaacaattaataccgagcaaaaggtttcggatttctatgatattgaggagaggcttggtagtggtaagttcggacaggtctttcgcctggtcgagaaaaagaccaggaaagtgtgggccggaaaattttttaaagcatatagcgccaaggagaaagagaacatccgccaagagatcagcatcatgaactgtcttcaccaccctaaactggtccagtgcgtagatgcattcgaagagaaagcaaatatcgtcatggtcctcgagattgtgtcgggaggtgaactgtttgaaagaatcatagacgaggattttgaactgactgagcgggagtgcatcaagtacatgaggcagattagcgagggagtagagtacatccacaaacaggggatcgtccatctggatctgaagccagaaaacatcatgtgcgtgaataagactggaacccgcataaagctgattgatttcggcctagctcgacggctggagaacgcgggatcgctgaaagtcctgttcggaacccccgaattcgtcgcaccggaagtgattaattatgaacctattggctacgccacggacatgtggagcatcggagtcatttgttatatcctagtcagcggcctaagcccttttatgggcgacaacgacaacgagacactggcaaatgtgacttctgctacttgggacttcgatgacgaagcatttgatgaaatctccgatgacgctaaggattttatatctaatctgctgaaaaaggacatgaagaaccgtctggattgtacacagtgtctgcaacacccgtggcttatgaaagataccaagaacatggaggccaaaaagctcagtaaagatagaatgaagaagtacatggcacggcgcaaatggcagaagaccggaaatgctgtcagggctatagggcggctgtcatctatggccatgatatccgggctcagcggccgtaaaagttctaccggtagtcctacatcacctctcaacgcggagaagctggagagcgaggaggacgtgtcccaggctttcctggaagctgttgcagaagaaaaaccccatgtgaagccatacttttctaagacaatcagggatttggaagtggtcgagggaagcgccgccagatttgattgcaagattgaaggctacccagaccccgaggtggtctggtttaaggatgaccaatctattagagagtcgagacactttcagatcgactatgacgaggacggcaactgtagcctgatcatctcagacgtctgcggcgacgatgatgcaaaatatacctgcaaggccgtcaacagtctgggagaagctacttgtactgcagaattaatagttgaaaccatggaagaaggcgagggtgagggtgaggaggaggaggagtag

SEQ ID NO: 16187 - DNA, 5592 bp, synthetic construct
  misc_feature 1..5592: note = Description of Artificial Sequence: Synthetic coding sequence
  source 1..5592: mol_type = other DNA
atgggagacgtgaaactagtggccagtagccacatttcaaagacttcgctgtctgtggatccctctcgtgtagattcaatgcctctgacagaagcacctgccttcattttaccaccgaggaacctctgcatcaaggagggtgccaccgccaagtttgaaggcagagtgcggggataccctgagccccaggttacctggcataggaacgggcaaccgattacgtctgggggaaggtttctgcttgactgtgggattaggggaacttttagcttagtgattcacgcagttcacgaggaggaccgtggaaagtacacctgtgaagccaccaacggaagcggtgctcgtcaggtgactgtggaactgacagtggaaggatcattcgccaagcagctcggacagcccgtggtgtcaaaaacacttggagatcgattttcagcccccgcggtggaaacccggccgagtatttggggggaatgtcctccgaaattcgcgactaagctgggccgcgtagtggtgaaagagggccaaatggggagattctcctgcaagataactggtcgtccacaaccacaggtaacatggctcaaggggaacgtcccccttcaaccctctgcccgagtgagcgtgtccgaaaagaacggaatgcaggtcttggagattcacggcgtgaaccaggacgatgtgggagtttatacatgcctggttgttaacggctctgggaaggcctctatgtctgcagagctctccatccagggactagacagcgctaaccgcagctttgtccgcgaaacaaaagccactaactcggacgtcaggaaggaggtgacaaacgtcattagcaaggagagcaaacttgattctctagaggccgctgctaagtccaagaattgttcatccccccaacgcggagggtcacccccctgggcggcgaacagtcaacctcagcccccgagggagtctaaacttgaaagttgcaaggattctccacgcacagcgcctcagacgccggtcctgcagaaaaccagttcaagtattaccctgcaggcggcgagggtacagcccgagccacgtgccccggggcttggagttctgagcccttctggagaggagagaaagcgcccagctccacctagacctgcaacttttccgactagacagcccggcctggggagtcaggacgtagtctccaaagcagctaacagaagaattcccatggagggtcaaagggatagtgcgttccctaagttcgagtcgaagccacagtcccaggaagtgaaggaaaatcagacagttaaatttaggtgcgaagtaagcggcatacctaagccggaagttgcctggtttctggagggcacgcccgtgcgccgccaagaaggctccatagaagtatacgaggatgctggatcacattatctttgcctgttgaaagcccgcactagggatagcggcacatacagctgcactgcttctaatgctcagggccaactttcatgctcatggacgctgcaggtcgagcgtttggccgtgatggaggtggccccatctttcagtagcgtgctgaaggattgtgccgtcatagagggtcaggatttcgttctccagtgctcggttagaggtacacctgtaccacggatcacctggctgttgaatggccagccgatccagtacgcccggagtacatgcgaggctggggtggcagagctgcatattcaggacgcacttcccgaggaccatggcacatacacctgcctggcagagaatgctctcgggcaggtttcatgtagtgcctgggtgaccgtgcacgagaaaaaaagttctcgcaagtccgaatacctgcttccagttgctccctccaagcccactgccccgatattcctgcaaggcctcagtgaccttaaagttatggatggtagccaggtgactatgacggtccaggtcagcgggaacccaccccccgaagtgatttggctgcataatggcaacgaaatccaagagtccgaagatttccacttcgaacagcgcggtacccagcacagtctctgcatccaagaagtctttcccgaggacactggaacctacacgtgtgaggcgtggaactcagctggggaagtgcggacacaggcagtcctgactgtacaagagcctcatgacggtactcagccttggttcatatcaaagccccggtcagtcaccgcatcactgggccagtccgtgctgattagctgtgccattgcaggcgatcccttcccaactgtgcattggctgagagacggcaaagctctgtgcaaggatactggacattttgaagtactgcaaaacgaagacgtgtttaccctggtactgaagaaggtacagccctggcacgcagggcaatatgaaatactgctgaagaatcgtgtaggcgaatgttcgtgtcaggtgtcactgatgctgcaaaatagcagtgcccgggctctaccaagggggcgtgagccagcctcgtgtgaagacctgtgcggagggggggtcggcgcagatggaggagggagcgatagatatggctcactgcggcccgggtggcccgctcggggccaggggtggttagaggaagaggatggagaggacgtgcgcggcgtgttaaaacggagggtggaaaccagacagcacacagaggaggccatcaggcagcaggaagtagagcagctggatttcagagatttactcgggaagaaggtgtctacgaagacgctcagtgaagacgacctcaaggaaatacccgcagaacagatggattttcgcgcgaacctgcagcgccaggtcaagccaaagaccgtcagcgaggaggagcggaaagttcactcgccacaacaggtggacttcagatccgtgctagcaaaaaagggaactagcaaaactcccgtgcctgagaaggtgccccctcccaaaccagcgacccccgacttccgttctgtgcttggtggcaagaaaaaactcccagccgagaacggctcaagctccgcggaaaccctgaacgcaaaagccgtggaatcctctaagcctctgtcaaatgctcagccatctggccctttaaaaccagtcggtaacgcaaaaccagctgaaacgttaaaacctatgggtaatgcaaaacctgctgagaccctaaagccaatggggaacgctaaacctgatgagaacctcaaaagtgccagtaaggaagagctgaagaaggacgtgaagaatgatgtcaattgcaagcgaggccacgccggaaccaccgacaacgagaagcggtccgaaagtcaagggactgccccagcctttaaacagaagctgcaagatgtgcatgttgctgaggggaagaaactgctgttgcagtgtcaagtctccagcgaccctcctgccacgataatctggacgctcaacggcaagacacttaaaacaaccaagttcattatcctcagtcaggaaggctccctttgcagtgtctccatagagaaggccctgccagaagaccgtggactttataaatgcgtggccaaaaacgacgccggccaagccgaatgcagctgtcaggttactgtggatgatgcaccagcatccgaaaacaccaaggccccagaaatgaaaagcagaaggcccaagtctagtcttcctcccgtcctgggtactgaatctgatgctacggtgaaaaaaaagcccgcccccaaaacaccaccaaaagctgccatgccgcctcagataattcaattccccgaggatcaaaaggtaagggccggcgagtccgttgaactgtttggaaaagtgactgggacccaaccaatcacttgcacctggatgaagttcagaaagcagatccaggagagtgagcatatgaaagttgagaatagtgagaacggctctaagctgacgatactcgcggcaagacaagagcattgcggatgctacaccttactggtggagaacaaactgggtagcaggcaagcacaggtaaacctgactgtcgtggacaagcccgaccctcctgccggcacaccctgcgcttctgacattcgctctagttccctgacactgagttggtatggatcaagttacgacggagggtcagccgtgcagagctactcaatcgagatctgggatagcgccaataagacctggaaggagctggcgacatgtagatctacatcgtttaacgtccaggaccttcttcccgatcacgagtataaattccgagtaagagcaataaatgtctacggtacctctgaaccctcccaggagtccgaactaactacggtgggagagaaacctgaggaacccaaagatgaggttgaagtaagcgacgacgacgagaaagaacccgaagtggactatcggaccgtgaccatcaatactgagcaaaaggtgtctgatttctatgacattgaagagcgactgggctccggaaagttcggccaggtgtttaggttggtggagaagaagacccggaaggtatgggcggggaagtttttcaaggcctactctgctaaggagaaggagaatatcagacaggaaatttctataatgaactgcctgcatcatccaaagttggtacaatgtgtagatgcatttgaagagaaggctaatattgtcatggtattggagatcgtgtccggaggggagctgtttgagcggatcatcgatgaagactttgaactgacagaacgtgaatgcatcaagtacatgagacagatcagtgagggtgttgagtatatccataagcagggtatcgtccacctggatctgaaaccggaaaacatcatgtgtgttaataagactggcaccagaattaagcttatcgattttggcctggctaggagactagaaaacgctgggtctttgaaagtattattcggtactccagagttcgtcgctccggaggttatcaactatgagcctatcggctatgccactgacatgtggagtataggagttatctgttatatccttaaccggctagattgtactcagtgcttgcaacacccctggctcatgaaggacacaaagaacatggaagcaaaaaagctgtctaaggataggatgaagaagtacatggcccggaggaagtggcagaaaacaggcaatgcggttcgagccattggtagactatccagtatggcgatgatatccgggttgtccggtaggaagtccagtaccgggagcccaactagccctctaaacgctgagaaattggagtccgaggaagatgtatcccaagcttttcttgaagccgtcgccgaagaaaagccacacgtcaagccatatttcagcaaaacaatcagagatctggaggtcgtcgagggcagcgcggcccgttttgattgtaaaattgagggatatccagatcccgaggtggtgtggttcaaggatgatcaatccatacgcgagagtcggcacttccagatcgattatgacgaggatgggaattgttcacttatcatttcagatgtatgcggagacgatgacgccaagtacacttgtaaggctgtgaattccctcggcgaagccacttgtacggcagagctcatcgttgaaacaatggaagaaggtgaaggtgagggagaggaagaagaggagtag

SEQ ID NO: 16188 - DNA, 5745 bp, synthetic construct
  misc_feature 1..5745: note = Description of Artificial Sequence: Synthetic coding sequence
  source 1..5745: mol_type = other DNA
atgggggatgtcaaattggtggcatcttcacacattagtaagaccagtttatccgtagacccatcgcgggtggatagcatgccccttactgaggcccccgcatttattttaccgccccggaacttgtgcatcaaggaaggagcaaccgcaaagtttgaagggagagtccggggctatcctgagccgcaggtgacgtggcaccgcaacggccagcctataacctcaggaggccgttttctcctggactgcggtattagaggaaccttcagcctggtaattcacgccgtgcacgaggaagaccgcggcaaatacacatgtgaggccaccaacggatctggggccagacaggtgacggtcgaattgacagtggaagggagcttcgcaaaacaattggggcagcccgttgtgagtaaaacgctcggcgaccgattcagcgcacccgccgtggagacgcggccgtccatttggggggagtgccctccaaagtttgccactaagctgggaagggtggtcgtgaaagagggtcagatgggcagattttcctgtaagattactggacgcccccagccacaagtgacctggctgaaaggcaatgtgccgttgcaaccttcagcacgagtaagcgttagtgaaaagaacggtatgcaggtgttggaaattcacggagttaaccaggatgacgttggcgtttatacttgtttggtcgttaacggaagcggcaaggccagtatgagcgccgagctttcaatccagggcctcgactcagccaatcgtagttttgtgagagaaacaaaagctaccaatagcgacgtacgaaaggaagtgacaaacgtcatatccaaagaatctaaacttgactctctcgaagctgctgccaagagcaagaactgctccagcccccagaggggtggcagcccaccttgggccgccaacagccagccacagcctcccagggagagtaagctggagtcctgtaaggatagtcccagaacggccccacagaccccagttctccagaaaaccagctccagcattaccctgcaggctgcaagggtgcagcccgagccccgagcgccaggcctgggagtgctgagtccatctggcgaggaacgcaaacgaccagcgccaccacgccccgcgacattcccaacccggcagcctgggctaggatcccaagatgtcgtctcgaaggcggctaacaggcggatacccatggaggggcagagagatagtgcatttccgaagtttgagtccaaaccccagagccaggaagttaaggaaaaccaaactgtcaagttccgctgcgaagtgagcggaatcccaaaacccgaagtggcatggttccttgagggcacccctgtgagacgtcaggaggggagtattgaggtgtatgaagacgctggttcccactatctttgccttctgaaggcccggacaagggactctgggacatatagctgcacagcatctaacgcacaaggacagctgagctgcagctggacactgcaggtcgaaagactcgctgttatggaagttgcaccttctttttccagcgtgctcaaagactgtgctgtgatcgagggtcaagactttgttctacagtgtagcgtccgagggacgccagtaccaaggatcacctggctcctgaacggacagccaatacagtacgcgaggtcaacatgtgaggcaggagtggcggaacttcatattcaagacgctctcccagaagaccatggtacatacacatgcctggctgagaatgctctgggccaggtgtcatgttctgcctgggtcactgtgcatgagaagaaatcctctagaaagtcagagtatctgctgccagtagcgccaagcaaacctacagcgcccatcttcctacagggactatctgatctgaaagtcatggatggatcccaggtaaccatgactgtccaggtgagtggcaaccctcctcctgaggtgatctggctccataacggtaacgaaatacaagaaagcgaagacttccactttgaacaacggggaactcaacattcgctgtgcatacaggaggtgtttccggaagataccgggacctacacctgtgaggcatggaacagcgccggcgaagtcaggacccaagccgtgctgaccgtccaggagccgcacgacggaacccagccatggttcatttctaaaccacggtcagtcactgcatctctgggccagtctgttctaatatcctgcgccattgccggggatccctttcccacagtgcactggctgagggatggcaaagcactttgtaaggacacaggtcacttcgaagtgctgcagaatgaagacgtgtttacactggtattgaagaaagtgcagccatggcacgctggacagtacgaaattctgctgaagaaccgcgttggcgagtgcagctgtcaggtgtcacttatgctgcaaaattcaagtgcaagagcattgccccgaggacgagaacccgccagttgcgaagatctgtgcggaggaggcgtaggcgcagacggcggcggtagtgacaggtacggctctctgaggccaggttggccggcacggggacaagggtggttggaggaggaggatggggaagatgtaaggggcgtgctgaagagacgagtggagacccggcagcatacagaggaggccatccgacaacaggaagtggagcagttggactttcgtgaccttctaggaaagaaggtcagtaccaagacgttatccgaagacgacctaaaggaaattcctgccgaacagatggattttcgtgcaaatctgcagcgccaggtaaagccgaagactgtttctgaggaggagcgtaaggtccattcaccccaacaggttgattttagatctgtactggctaaaaaaggcacctccaagactcctgtgccagaaaaagtgccacctcctaaacccgcgactcccgacttccgcagcgttctaggaggcaagaaaaagctccctgcggaaaacgggagcagctctgctgaaactctgaatgccaaagcagtcgagtcctccaaacctttgtccaacgcccaaccctctggccccttaaaaccagtgggtaacgccaaacctgccgagaccctgaagccaatgggaaatgccaagccggccgagaccctgaaacccatggggaatgcgaaacctgacgaaaatctcaaaagtgccagtaaagaagagctgaagaaagatgtgaagaatgatgtgaactgtaaacgcggccacgccggaacaaccgataatgagaaacgctcagagtctcaggggactgcacccgcattcaagcagaaactgcaagacgtccatgttgcagaggggaagaagctgttactgcagtgtcaagtttcatcggatccacccgcgaccatcatttggactctaaatggaaaaaccctcaagacaactaagttcattattctgtcccaggaggggtctctgtgctccgtatcaattgagaaggcactgccagaggacagaggtctgtacaagtgcgtggccaagaatgacgcgggtcaggcagagtgttcatgtcaggtaacagtcgacgatgcaccggcgtcggaaaatacaaaggcccctgaaatgaaatcccggagacccaagtcctccctaccccctgtgctgggtacagagagtgacgctactgttaagaaaaaaccggcccctaagactcctcctaaagccgccatgcccccacagattatacagtttcctgaggatcagaaagtcagagctggggagtcagtggaactttttggcaaggtgactggtacccagccaataacctgtacttggatgaagtttagaaagcagattcaggagagtgagcatatgaaggtcgaaaattcagagaacggctcaaagttgacaatcctggcggcgaggcaggagcattgcggatgctataccctgttagtcgaaaacaaactgggatccaggcaggcccaggtaaatctaaccgtggtagacaagcccgacccccctgcaggaacaccatgcgcatctgacatccgttcaagcagcttaaccctgagctggtacgggagcagttatgacggcggatctgccgtgcaatcatacagcattgagatctgggactccgcaaataagacttggaaggaattagcaacgtgtcggtctacatcatttaacgtccaagatctcctgccggatcatgagtacaagttcagggtgagagcaatcaacgtctatgggacaagcgaaccaagccaggaatcagaactgaccaccgtgggggaaaaaccagaagaacccaaggatgaagtggaggtgtccgacgatgatgaaaaggaacctgaggtagactaccgcacagtaaccatcaacacggagcagaaggtctcagacttctacgacatcgaggagagattgggctctgggaaatttggacaggtgttccgacttgttgagaagaagacaaggaaggtctgggcaggcaaattcttcaaagcgtattctgccaaagagaaagagaatattagacaggagatctcaataatgaactgcttgcaccaccctaagctggtgcaatgcgtggacgcttttgaggaaaaagccaacattgtaatggtattagaaattgtgtctgggggtgagctttttgagcgcataatcgatgaagattttgaactaaccgaacgcgagtgcatcaagtacatgcgtcaaatctcagaaggtgtggagtacatacacaagcagggcattgtgcacctggacctgaagcccgagaacataatgtgtgtgaacaaaacagggactcgaattaagctgattgattttggactggcccgccgattagaaaatgccggaagccttaaagtcttattcggtacccctgaatttgtcgctccggaggtgatcaattacgaaccaatcgggtacgccaccgacatgtggtctataggcgtaatatgctacattctggtgtcaggtttgagtcccttcatgggtgacaacgataatgaaacactcgccaatgttacaagtgctacctgggacttcgacgacgaagcttttgatgagatcagtgacgatgctaaggattttatctcaaacctgctgaagaaggacatgaagaaccggctagattgtacccagtgcttgcaacacccttggctgatgaaagacaccaaaaatatggaggctaaaaagttgtcgaaggatagaatgaaaaagtatatggctcgccgaaaatggcagaagactggtaacgcagtcagagcgataggcagactgagttctatggcaatgatctctggactgagcgggcggaagagcagcacaggctcacccacgtcaccccttaatgcagaaaagcttgaatccgaggaagatgtgtcccaggctttcctggaggctgtggccgaggagaaaccccatgttaagccatacttcagcaaaaccattcgtgacctagaggtggtggaggggtccgcggctcgatttgattgtaaaatcgagggatacccagatccagaagttgtttggttcaaagacgaccagtctatcagggagtcccgacattttcagattgattatgatgaagatggaaattgctcactcatcatttctgacgtctgcggagacgatgacgctaagtacacctgcaaggctgtaaacagcttgggagaagcaacctgcaccgcggagcttatcgtggaaactatggaagagggcgagggtgagggagaggaggaggaagagtag

SEQ ID NO: 16189 - DNA, 231 bp, synthetic construct
  misc_feature 1..231: note = Description of Artificial Sequence: Synthetic coding sequence
  source 1..231: mol_type = other DNA
atgggagatgtaaagctcgttgcaagttcacacatctctaagacttcactttccgttgatccatcaagagtggatagcatgcctctgacagaagcccctgctttcatactccccccccggaatttgtgtatcaaggagggtgctactgcaaagttcgaagggcgcgtgcgggggtatccagaaccgcaagtcacatggcacagaaatggccagcctatcacaagcgggtag

SEQ ID NO: 16190 - DNA, 5592 bp, synthetic construct
  misc_feature 1..5592: note = Description of Artificial Sequence: Synthetic coding sequence
  source 1..5592: mol_type = other DNA
atgggcgacgtgaagctggtggcctcgtcccacatctccaaaacaagccttagcgttgacccctcccgggtggatagcatgcccctgacagaggctccagctttcatccttccacctcgtaacctctgcatcaaagagggagcgacagcgaagttcgagggtcgcgtacgcggctaccctgaaccacaggtgacttggcatagaaacggccagcccattactagcggaggcagattcctgttggactgcggaatacgtggaactttttccctggtgatacacgcggtccacgaggaggaccgcggaaaatacacttgtgaggccaccaacgggtcaggggcgaggcaagtgactgtggaactgaccgtggaagggtctttcgctaagcagttgggacaacctgtcgtgagtaaaacactcggggacaggtttagcgccccggcggtggagacaagaccctctatttggggggaatgtccaccaaaattcgcaaccaaactcggccgggtggtagtgaaagagggccagatgggacggtttagttgtaagattaccgggaggccccagccacaggtcacttggcttaaaggcaatgtgccactccaacctagtgcacgggtgtctgtgtcagaaaaaaatggaatgcaggtactggagatccacggcgtaaatcaggatgatgtgggagtgtatacgtgcttggtcgttaacggcagcggtaaagcatctatgtccgcagaactgagcattcagggcttagactctgcaaacaggagttttgttcgggaaaccaaggctaccaacagtgatgttcggaaagaggtgaccaacgtaatctcaaaagagagtaaactggactcactggaggcggcagcaaagtctaagaactgcagttctcctcagagaggcgggtcacctccatgggccgccaattcccaaccgcagcctccacgcgagtcaaaactggaaagctgcaaagacagtccccgcacagcgccgcagacccctgtcctgcagaagacaagttcctcgataacgctccaggctgcgagggttcagcctgaaccccgcgctccggggctaggtgtcctctcaccttccggagaggaacgaaagcggcccgctccgcctcggcctgcaacatttcctacacgccagcccgggttaggatctcaagatgtcgtcagcaaggcggccaatcgccggatccccatggaggggcagcgagattccgctttcccgaagtttgaaagtaaaccccagtcacaagaggtgaaagaaaatcagacagtgaagttcaggtgtgaggttagcggtattcccaagcccgaggtggcatggtttctggaggggactcctgtccgaagacaagagggcagtattgaagtgtacgaggacgccggcagtcactatctgtgccttctgaaggcccggacgcgggactcaggcacctattcatgtaccgcctccaatgcacagggccagctctcatgctcttggacactgcaggtcgaacgactggcagtcatggaagtggctccatcatttagctcagtgctcaaggactgcgctgtgattgaaggtcaagatttcgtcttacaatgttccgtcagggggaccccagtgccgagaatcacatggctgttgaacggtcagcctattcaatatgcccggagtacttgtgaggctggagtggccgaactccatattcaagacgctctcccagaggaccatggcacttacacctgtcttgccgaaaacgctctggggcaggtgtcctgctctgcctgggttacagtccacgagaagaagtcctcccgcaagtctgaatacttgttgcccgtagcccctagcaagcctacagccccgattttccttcagggactctcagacctgaaagtcatggatggctcccaagtgacaatgacagttcaggtctcaggaaacccacctccagaggtgatctggctgcacaacggcaatgagatccaggagtcagaagacttccacttcgaacagcggggcactcagcattcattgtgcatccaagaagtgttccctgaggacactggcacttacacctgcgaagcatggaattctgccggcgaggtccgcacacaggctgtgcttactgtgcaggaaccccatgacggcacacaaccatggtttatttccaagcctcgatctgtgacagcgagtctgggacagtcagtgctgatttcctgcgccattgcaggtgatcctttccctacagtccactggctccgcgacggaaaagccctgtgcaaagacactggccatttcgaagtgctccaaaatgaggacgtattcacacttgtgctaaagaaagtgcagccttggcacgccgggcagtatgaaattctgctgaaaaacagggttggagagtgcagctgtcaggtgtcactcatgttgcagaattcatccgctagagcactcccacgcggcagggagccagcatcttgcgaggatctgtgcggaggaggggttggggcagacgggggtggatccgacaggtacggaagcctgagacctgggtggccagctagagggcaagggtggctggaagaggaggacggtgaagacgtgcggggtgtccttaaacgtcgggtcgaaactcggcagcatactgaggaagcgatccggcagcaagaggtagagcagttagactttagggatctcctgggaaaaaaggtctctactaagaccctttcagaggacgatctcaaggaaatccccgctgaacagatggattttagggctaacctacagaggcaggtcaaaccaaagacggtcagtgaagaagagcgcaaggtccatagcccacagcaggttgatttccgcagtgttctggctaagaagggaaccagcaaaacgccagtccctgaaaaagttccacccccaaaaccagctacccctgattttaggtccgtcctcggaggcaaaaaaaaacttccagctgaaaacggtagcagttccgccgagacactaaatgccaaggcagtcgagtctagtaagccattgtctaacgctcaacctagtgggccccttaaacccgtgggcaacgccaagcctgccgagacattgaagcccatgggcaatgctaagcccgcggaaaccctgaaaccaatggggaatgcaaagcccgatgagaaccttaagtcagccagcaaggaagaactgaagaaggacgtgaagaatgatgtcaattgcaagcggggccacgccgggaccaccgacaatgagaagcgctccgaatcccaggggacagctccggcttttaaacagaaactgcaggacgtgcatgtagccgaaggcaaaaagttgctgttgcaatgtcaggtctcatctgatcctcctgccacgattatttggacactaaacgggaaaactctgaaaactacaaaattcatcatcctgtcccaggaaggaagcctgtgttcggtgagcatcgaaaaggcgctgcccgaggatcgcgggctctacaagtgcgtagccaaaaatgacgcgggccaagccgagtgttcatgccaggtcaccgtggacgatgccccggcaagcgagaataccaaagcaccagaaatgaagtctagacgaccaaagagctccttacctcccgtcctcggaactgagtccgacgcaaccgtgaagaagaagcccgcccccaagacccctcccaaagccgcaatgccccctcagattatacagtttccagaagatcaaaaggtgagggctggtgagagcgttgaactgttcgggaaagttacagggacacaacctataacttgtacctggatgaagtttaggaaacagatccaagagtcagagcacatgaaagtggaaaacagcgaaaacggaagcaagcttaccatattggcagcccgccaagagcattgcggatgttacactctcctcgtggaaaacaaacttggtagtaggcaggcccaagtcaatctgacggtcgtagataaacctgacccccctgccggcactccatgtgcttccgacatcaggtcatcgtctttgacactgagctggtacggaagttcttacgatggaggatctgcagtccagtcatattctattgagatatgggactccgcgaacaagacatggaaagagcttgcgacgtgcagatccacctcatttaacgtacaggacctgctgccggaccacgaatacaaattccgcgtgagagcaattaatgtttacgggacgtccgaaccatcacaggagagcgaactgaccacagtgggcgagaagcccgaggaaccaaaggatgaggtggaggtgagtgacgatgatgagaaggagccggaggtggactataggaccgtgacgattaacacagaacagaaggtttcagatttctacgacatcgaggagcggttggggagtggcaaattcggccaggtttttcggctggttgaaaagaagaccaggaaggtgtgggctggcaagttttttaaagcctactcggctaaagagaaagaaaatatccgccaggagatttccatcatgaattgtcttcaccatcccaaactggtccagtgcgttgacgctttcgaggagaaggccaacattgtgatggtgctggagatagtctccgggggggagctctttgagagaatcattgacgaggacttcgagcttaccgaacgcgagtgcataaagtacatgcgccagatttctgaaggggtggagtatattcacaagcaaggcatcgtgcatctggatttaaagccagagaacatcatgtgtgtcaacaagacgggaacacgaattaagctgattgacttcggcttggctagacgtctagagaatgccggctctctcaaggtcctgtttggcactccagagttcgtggccccagaagtgataaactacgaacccattgggtacgcgacagacatgtggagcatcggggtgatttgctacatactgaatcggctcgactgcacacagtgcttgcagcatccctggctgatgaaggacacaaagaatatggaggctaagaagctgagtaaagatcggatgaaaaaatatatggccagaaggaaatggcagaaaaccggaaatgcagtgcgagccatcgggaggctttcttccatggctatgatttccgggctctcgggacggaagtcctcaaccggaagccctacttccccgctgaacgctgaaaaattggagagcgaggaagacgtaagccaagcttttcttgaggcagtcgccgaggagaagccacacgttaagccttatttcagtaaaacaatcagagacctcgaggtggttgagggctccgccgctcggttcgattgcaagatcgaaggctacccagatccggaggtcgtgtggtttaaagacgatcaaagtatccgcgagagccggcacttccagattgactacgatgaggacggcaattgctccctcattataagcgacgtctgcggggatgatgatgccaaatacacatgtaaagccgtgaactctctgggggaagccacatgtactgcggaattgatagtcgaaaccatggaggagggggaaggggaaggggaggaggaggaggaatag

SEQ ID NO: 16191 - DNA, 465 bp, synthetic construct
  misc_feature 1..465: note = Description of Artificial Sequence: Synthetic coding sequence
  source 1..465: mol_type = other DNA
atggccatgatcagcggcctgtcaggtcgcaagagcagcaccggcagtccaaccagtccgttaaacgcggagaagctggagagtgaggaggacgtgtcccaagctttcctcgaggcagtcgctgaggagaaacctcatgtcaagccttacttctccaagaccatcagggacctcgaggttgtcgagggaagcgcagccagatttgactgtaagattgaggggtatcctgaccccgaagtcgtgtggttcaaggatgatcagagcatacgagagtcaagacatttccagattgactatgacgaagatggaaattgctctttaatcatttccgatgtatgcggcgacgatgacgccaagtatacctgcaaggctgtgaacagtctcggggaagcaacttgcactgcagaattaatcgtcgaaaccatggaagagggtgaaggggaaggggaggaagaggaagagtag

SEQ ID NO: 16192 - DNA, 5745 bp, synthetic construct
  misc_feature 1..5745: note = Description of Artificial Sequence: Synthetic coding sequence
  source 1..5745: mol_type = other DNA
atgggggacgtcaaacttgtggcatcctcccatatatccaaaacctctctgagtgttgacccaagcagagtggacagcatgccattgaccgaggcaccggctttcatcctaccaccccgtaatctctgcatcaaggaaggagccactgctaagttcgagggaagggtcaggggatatcccgaaccccaggtgacatggcatcggaacggtcagccgattacatctggagggcgatttttactggattgcggtatccggggaacgtttagcttagtcatccatgcagttcatgaggaagacagggggaaatacacttgcgaggcaactaacgggtccggtgccaggcaagtcacagtcgagcttacagtggaagggagcttcgctaagcaactggggcagccagttgttagcaaaacgctaggcgacaggttcagcgcccctgctgtggagaccagacctagtatttggggcgagtgcccacccaaattcgccacgaagctgggtcgcgtggtcgtgaaggaaggacagatggggcgattcagttgcaaaatcacaggacgtccgcagccgcaggtgacctggctgaagggtaatgtaccgctgcaaccaagcgccagagtcagcgtgtcagagaagaatggcatgcaggtgctggagattcatggtgtcaaccaggacgatgtgggcgtatacacatgcctggtggtgaatgggtctggcaaagcgtccatgtcagccgagctctccatccagggcttggacagcgctaataggagtttcgtgagggagacaaaagcaaccaactccgacgttaggaaggaggtcactaacgtcatttctaaagaatctaagcttgacagccttgaggccgccgccaagagtaagaactgttcgtcaccccagaggggtggttctccaccctgggccgcaaattcccagcctcagcccccacgcgaaagcaagctggagtcatgcaaggacagtccccgaactgcgccccagacacccgtcctgcagaagacctctagctctatcacacttcaggctgcgagagttcagcctgagccacgggcaccgggactgggtgttctgagcccaagcggggaagaacggaagcgtcccgcccccccacggccagcaaccttccccaccagacagcccgggttggggagtcaagatgttgtcagcaaggccgccaatcgccggattcctatggaagggcaaagggatagcgcgttccccaaattcgaatccaagccacagtctcaggaggtgaaggaaaatcagaccgtaaagtttaggtgtgaggtaagtgggatacccaaacctgaggttgcctggttcctggagggcactcctgtcaggaggcaggaagggtcaattgaagtgtatgaggatgcaggctctcattacttgtgcttgctcaaggccagaacccgggactccggcacatactcatgcactgcttccaatgcccagggacagctctcttgcagctggaccttgcaggtggagagacttgccgtcatggaggtcgcacccagcttttcgagcgttctgaaggactgtgccgtaattgaaggccaagattttgtgctccagtgctcggtgcgcggtacccccgtgccacggatcacctggcttctaaacggccagcccattcagtacgcacgcagcacttgtgaggcaggcgtagcagaattacatattcaggacgcactgcctgaagaccatggcacctacacgtgcttggcagagaatgctcttggccaggtttcctgcagtgcctgggtaactgtgcatgagaaaaaatcatctcggaagagtgagtatctccttcctgtcgccccaagtaagccaaccgcccccattttcctgcaggggctctctgatctgaaagtgatggatggctcccaggtgacaatgaccgttcaggtttcgggaaatccgccacccgaggttatttggctgcataacggcaatgaaattcaagagagcgaggattttcactttgagcagcgaggcacccagcattccctgtgtattcaagaagtgttcccagaggacaccggcacttatacttgcgaggcctggaactccgcaggcgaggtacgcacacaggctgtgctaacagtgcaagaacctcacgacggcacgcagccctggttcatatcgaaaccacgctctgtcaccgccagcctggggcagtcagtgctcatctcctgcgccattgcaggcgacccgtttcccacggtgcattggctgagagatgggaaagccctctgcaaggacacaggtcacttcgaggttttgcagaatgaggatgttttcacactggtgctgaaaaaagtccaaccctggcacgctggtcaatatgaaatcctgctgaagaaccgtgtaggagagtgctcctgccaggtgtccctaatgctgcagaatagttcggccagggcgctacccaggggcagggaaccagcatcttgtgaagacctgtgtggaggcggggtcggcgccgatgggggcggcagtgaccgctatggaagtctgagaccaggatggcctgcccggggtcagggatggctggaggaggaagatggcgaggatgtgaggggagtgcttaaacgccgagtggagacacgacagcacactgaggaggcaatccgacagcaggaggtggaacaactggattttagggaccttctgggcaaaaaggtgagcactaaaacactgagtgaggacgacttaaaagaaattcccgccgaacagatggacttcagagcgaacctgcaacgccaagtaaagccaaaaactgtgtcggaggaggagagaaaagtccacagcccccagcaggtcgactttagaagtgtccttgctaagaagggaacatcaaaaacaccagtgcctgagaaagtgcccccccccaagcctgcaacccctgacttccgttctgtgcttggaggcaagaagaagctgccagccgagaacggcagttccagcgctgagaccttgaacgccaaagctgtggaatcttctaaacccctaagcaatgcacagccctcagggcccttgaagcctgtgggaaacgctaagccggccgagactctcaagcccatggggaatgccaaaccggcggaaacgttgaaacctatgggcaacgccaagcctgacgagaatcttaagagtgcatccaaggaagagctgaagaaagacgtgaagaacgacgttaactgcaaacggggccatgctgggactacggataacgaaaagcggtcagaaagccaaggtacagccccagcctttaaacaaaaattgcaggacgtccacgtggcagagggcaagaagctgttgcttcagtgtcaagtttcaagtgatcctccagcgaccattatctggacactgaatggcaagacccttaaaactaccaagtttatcattctctcacaggagggaagtctctgttctgtgtcaattgagaaggcactgcccgaggataggggcctttataagtgcgtggccaagaacgatgccggacaggctgaatgttcttgccaggtgacagttgacgatgccccagcgtcagagaacaccaaagcacccgaaatgaagtctagaagaccaaaatctagcctgcctcccgtgctggggaccgaaagcgacgccacggtgaagaaaaagcccgctccaaagacccccccaaaggccgcaatgccaccacagatcattcagtttcccgaggaccaaaaggttagggctggggagagtgtggagctgttcggaaaagtgactggcactcagcccattacctgcacatggatgaaattcagaaaacaaatccaggaatcagagcacatgaaggtggagaactctgaaaatggctcgaagctgacgattctcgccgctagacaggagcattgcggttgctacactctgctggtagagaataaactggggtctagacaagcccaggtaaatctaacagttgtggacaagccagaccccccggcgggaactccttgcgcatctgacatcagatcttcaagcctcaccctgagctggtacggctcgtcctatgacggcggctcggccgtacaatcttatagtatcgaaatttgggactccgcgaacaaaacctggaaggaactggccacctgccgctctacatcgttcaacgtgcaggacctcttgccagaccatgaatataaattccgcgtgcgcgccatcaatgtttacggcacgtcggagccttctcaggaaagcgagctaacaactgtgggcgagaaaccagaagagcccaaggacgaagtggaagtgtccgatgatgatgagaaagagcctgaggtcgactaccgcactgttactatcaataccgaacagaaagtgtcagacttttacgatatagaggaacgacttggctcaggcaagttcggtcaggtgttccggctggttgaaaagaaaacaaggaaggtttgggccggaaaattctttaaggcctattccgcaaaagagaaagagaacataaggcaggagatcagcattatgaactgtcttcaccatcccaagttggtgcagtgtgtcgacgcatttgaggaaaaggcgaacattgtgatggttcttgagatcgtttctggtggagaactctttgaacggattatcgacgaggactttgagctcacggagagagagtgcatcaagtacatgagacagatctccgagggtgtggagtacatccataaacaggggatcgtgcacctggatctgaagccagagaacatcatgtgtgtaaataagaccggaacccgcatcaagttaattgatttcggcctggctcgtagactcgaaaatgcaggatccctcaaggtactttttggcaccccggagtttgtggcacctgaggttataaattatgaaccaattggctacgccactgatatgtggtcaattggcgtgatctgttacattcttgtttccggattaagcccttttatgggagataatgataacgagaccctagcgaatgtaaccagcgcaacatgggacttcgacgacgaagccttcgacgagatttctgatgacgccaaggatttcatcagcaacttactcaaaaaggacatgaaaaatcgcctagactgtacccagtgcctccagcatccctggctcatgaaagataccaagaatatggaagcaaaaaaactgtccaaagataggatgaagaaatacatggcacggagaaaatggcagaagacaggtaacgcggtgcgcgccatcggaaggctgagcagcatggctatgatctcaggactgagcggccgtaaatcttctacgggtagccctacgtctccattaaacgctgagaagctggagagcgaagaggacgtgtctcaagcttttttggaagcagtggctgaggaaaaacctcacgtcaagccctacttcagcaaaactattagagaccttgaggtagtggaaggtagtgcagcacgtttcgactgcaagatcgagggttaccccgatcccgaggtggtttggttcaaagacgatcaaagtatcagggaatccagacattttcagattgactacgatgaagatggcaattgctctctgatcatttccgatgtgtgcggggatgacgacgcgaagtatacgtgcaaggccgtgaacagcctcggtgaggccacttgcaccgctgagctaatcgtggaaacaatggaggagggagagggggagggtgaagaagaagaggaatag

SEQ ID NO: 16193 - DNA, 5931 bp, synthetic construct
  misc_feature 1..5931: note = Description of Artificial Sequence: Synthetic coding sequence
  source 1..5931: mol_type = other DNA
atggcccagcgcacaggtctggaggatccggagaggtatctgtttgtcgaccgagctgtcatttataatccagccacgcaggcggattggacagctaagaaactggtctggatcccatctgaacgacatggattcgaagctgcctcaattaaagaggagagaggggatgaagtgatggtcgaactggcagagaacgggaaaaaggccatggtaaataaggacgatatacaaaaaatgaacccgcccaagttctctaaagttgaagatatggcggagctcacatgcctgaacgaggcttccgttctgcacaacctgaaggataggtactattcaggcctcatttatacgtactccggattattctgcgtcgtgattaacccgtacaaaaatctccccatatatagtgagaatattatcgaaatgtatcgcggcaagaaacggcatgagatgccgccacacatttatgccatatctgagtcagcttaccgctgcatgcttcaagacagagaagaccagagtatcctttgcacaggggagtctggagccgggaaaacagagaacactaagaaggtaatccagtacctcgctcacgttgcctcatcccacaaaggacgaaaagaccataatatcccgggtgaactggagcgccagttgcttcaagccaaccccatccttgaatccttcggtaacgccaagacagttaagaacgacaatagctcacggttcggaaagtttataagaattaattttgatgtgacagggtatattgtcggcgctaacatagaaacatacctcttggaaaagagccgagcagtccgccaggcaaaagatgaaaggaccttccatattttctatcaactgctgtccggagccggcgagcatctgaagagtgatctgctgctggaggggtttaacaattacaggtttctatctaacggatatatcccaattcccggacagcaggacaaagacaacttccaagaaacaatggaggcgatgcacattatgggcttttcccatgaagagattctgagcatgcttaaggtggtgtcaagcgttctgcaattcggcaacatctcttttaagaaagagagaaacacagaccaggcctctatgccagaaaacactgtggctcagaagctgtgccatctcctgggtatgaacgtcatggagttcacgcgagcaatcttgactccccgcataaaggtggggagggactatgtgcaaaaggcgcagactaaagagcaggcggattttgcagtggaggcattggccaaggcgacctatgagaggctctttaggtggctcgtccacagaattaacaaagcactagatcgaacaaagaggcaaggggcaagcttcatcggcatcctggacatcgccgggtttgagatttttgagctcaatagctttgagcagctgtgtataaactacacgaacgagaaactacagcagcttttcaaccacacaatgttcatactggagcaggaggagtatcagagagagggaattgaatggaactttatagacttcgggttagacctgcagccatgtattgatcttattgaacggcccgcgaatccaccaggggtcctggcccttctcgatgaagaatgttggtttcccaaagcaacagataaaactttcgtagagaagctggtgcaagagcaaggctcccacagtaagtttcagaagccgcggcagcttaaggataaagccgacttctgtatcatacactatgctgggaaagtcgactataaggcagatgagtggctgatgaagaatatggatcccttgaacgataacgtcgcaaccctcctgcatcaatcttctgaccgcttcgtcgccgaactgtggaaagacgtggaccggatcgtgggtctggatcaggtaaccggaatgacagagactgccttcggatctgcttacaagaccaaaaaaggcatgtttagaaccgtcggacagttgtacaaggaaagcctcacaaaactgatggccactctccgcaacactaaccccaactttgtgagatgcattattcctaaccacgaaaaacgggcaggaaaactggaccctcatctggtgcttgaccagctgcggtgtaacggggtgctggaaggcatccgtatctgtaggcagggctttcctaatcgcattgtttttcaggaatttcgacagaggtacgagatcctgacaccaaatgcaatccctaagggatttatggacggcaagcaagcatgtgaacgcatgatccgggcccttgagcttgaccccaacttataccggatcggacagagcaagatattttttagagccggtgtgctggcccatctggaggaggagcgcgacttaaaaatcacagacatcatcatctttttccaggctgtgtgccgtggctacctcgcacgtaaggccttcgccaagaaacagcaacagctgtccgctttgaaggttctccagagaaactgcgccgcctatctgaagcttaggcactggcagtggtggagagtgtttacgaaagtgaagcccctccttcaggtgacacggcaggaggaggagcttcaagccaaggacgaagagctgcttaaggttaaggagaaacagacaaaggtggaaggggagctggaagagatggagcgcaaacatcagcaacttctcgaagagaagaacattctggccgagcagctacaggcagagactgaactgtttgccgaggccgaagagatgagagcccggctggctgccaaaaaacaggagctggaggagatcctccacgatctggagtctagagtggaagaagaggaagagagaaaccagatccttcagaatgagaaaaagaagatgcaggcacacattcaggacctggaagagcagttagatgaagaggagggggcccgccaaaagctgcaactcgagaaggtgaccgccgaggctaagatcaaaaagatggaagaggaaattcttctcctcgaggaccaaaattccaaatttattaaagagaaaaagctgatggaagaccgtatagccgaatgttccagtcagctggcggaggaggaggagaaagctaaaaacttagccaagattcggaacaagcaagaagtgatgatttctgatctggaagaacgcttaaagaaggaagagaagacccgccaggagctcgaaaaggccaaaaggaagttagatggagaaaccacagacctgcaagaccagattgcagaacttcaagcgcagatcgatgaattgaaattgcagctggctaagaaagaggaggaactgcagggtgcactagcgaggggtgatgacgagaccctgcataagaacaatgcactcaaagtggtgcgtgaactccaggcccagatcgctgagcttcaggaggatttcgaatccgagaaagctagcaggaataaggccgaaaaacagaagcgcgatctcagcgaggagctggaggcactgaaaacggagcttgaggatactctagacacaacagcagctcagcaggaactgaggactaagagagaacaggaagtcgccgaattaaaaaaagcactggaggaagagactaaaaaccatgaagcacagattcaggatatgagacagaggcatgccactgctttggaagagttatccgaacaactggagcaggctaagcgcttcaaggcgaacctggagaagaataagcagggactggagactgataataaggaactcgcctgcgaggtcaaagtccttcagcaggttaaagccgagtccgaacataagcggaagaagctggacgctcaggtgcaagagttacacgctaaggtgtctgaaggggataggctgcgtgttgagctggcggagaaggccagcaaactgcagaacgaactcgataatgtgagcactttgttggaggaggccgaaaaaaaggggatcaagttcgccaaagacgcagcctccctggagtctcagctgcaggacacccaggaactgctgcaagaagagacacggcaaaaactgaacctgtcctcccggattcgtcagctggaggaagagaaaaactctttgcaggaacaacaagaagaagaggaggaagccagaaagaatctggagaagcaagttttggccctccagtcccagctggccgacaccaaaaaaaaggttgacgacgatttgggcactatagaatctttagaagaggccaagaaaaagctgctaaaggatgccgaggcacttagccagagactggaggaaaaggccttagcatacgacaagctggaaaaaaccaagaaccggctgcagcaagagttggacgacctgacagtagacttggatcaccagcggcaggttgcaagcaatctggagaagaagcagaagaagtttgaccagctcctggctgaggaaaagagcatttctgcgaggtatgctgaggagcgagaccgcgctgaagcagaagcacgagaaaaggaaactaaggccctgtccctggcccgagccctggaggaggcccttgaagctaaggaagagttcgagagacagaacaagcagcttcgggcagatatggaggatctgatgagttccaaggacgatgtcgggaaaaacgttcacgagcttgaaaagtctaaaagagccctggaacagcaggtggaggagatgaggacccagctagaagagcttgaggacgaactgcaggcaacggaagacgccaagttgaggctcgaagtgaacatgcaagctatgaaagctcagtttgaacgtgacctacagaccagggatgagcagaacgaggaaaagaaaaggctcctcatcaaacaggtcagagagcttgaagcagaactcgaagatgagaggaagcaaagagcgttggcggtggcaagcaagaagaagatggagatcgacctgaaagaccttgaagctcagatcgaggctgctaataaggccagagacgaggttataaagcagttgcgaaagctgcaggcccaaatgaaggactatcaacgggagttggaagaagcgagagctagccgggatgaaattttcgctcagagcaaggagagcgagaagaagctgaagagcctggaggccgaaatcctgcaactgcaggaagagctcgcctcaagcgagcgggctcggaggcatgcagagcaagagcgggacgagcttgccgatgagattaccaactcagctagtggcaagtcagctcttctggacgagaaacggcgcctcgaagcacggattgctcagctggaggaggaactggaagaagagcagtcaaacatggaactgctgaatgatcgctttagaaaaactactttacaggtggataccctgaacgccgaactcgccgcagaacgctcagctgctcagaaatctgataatgctcgacaacagctcgaacgccagaataaggagctcaaagcaaagctccaggaacttgagggcgccgtaaaaagcaagtttaaggccaccatttctgccttggaagcaaagatcggtcagctggaggaacagcttgaacaggaggccaaggagagagcagccgcaaacaagctggtaaggcgcactgaaaagaagcttaaggagattttcatgcaggttgaggatgaaagaaggcacgcagatcagtacaaggagcagatggaaaaagcaaacgccagaatgaagcagctcaagaggcaacttgaagaagccgaggaagaggccacccgcgcaaatgcaagccgccggaagctgcagcgggagcttgatgacgccactgaggctaacgaagggttgagccgcgaggtgtccacccttaaaaacagacttcggagggggggaccgatcagcttctctagtagccgaagtggccggaggcagttacacctagagggcgcatcgctggaattatccgacgatgacactgagagcaagacttcagatgttaacgaaacccagcctccacaaagcgaatag

SEQ ID NO: 16194 - DNA, 6024 bp, synthetic construct
  misc_feature 1..6024: note = Description of Artificial Sequence: Synthetic coding sequence
  source 1..6024: mol_type = other DNA
atggcgcaacgtacaggattggaggatccagaacggtacctatttgtcgatcgggcagtgatctacaatccagccacccaggcggattggacagcaaagaagctggtctggattccctcggagaggcacggcttcgaagctgccagcatcaaggaggaaagaggtgacgaagtgatggtggagctagctgaaaatggcaaaaaagctatggtgaataaagacgacatccagaaaatgaaccctcctaagtttagtaaggttgaggatatggccgaactgacatgcctgaatgaagcgtccgtgctccataacttgaaggaccgatattattctgggctaatctatacctatagtgggcttttctgtgtggtcatcaacccatacaaaaatctcccgatctatagtgaaaacattatcgagatgtatagagggaaaaagaggcatgaaatgcctccacacatttacgccatttccgagagcgcctaccggtgtatgctccaggacagagaggatcagtccatcctgtgtactggagagagcggcgctggaaagacagaaaacactaagaaagtgatccagtatctggctcacgtcgcgtcatctcacaagggccgcaaggaccataatattccacaggagtcccctaaaccggtaaaacaccagggcgaactggaacgacaactgttacaagcgaatcccattctggagagtttcggtaatgcaaaaaccgtaaaaaatgacaacagttctcgttttggaaaatttatccgcattaactttgacgtgaccgggtatatcgtgggggctaacatagagacatacctacttgaaaagtcccgcgcagttagacaggccaaggatgagcgcaccttccacatcttctaccagctgctcagcggtgccggcgagcaccttaaaagtgatcttctgctcgagggttttaacaactaccgtttcctgtctaacgggtacataccgatacccgggcagcaggataaggataactttcaggagaccatggaagcaatgcacatcatggggttctcccatgaggagatcctgagcatgcttaaggtagtgagttctgtgctccagttcggtaacatctccttcaagaaagaacgcaatacagatcaggcctccatgcccgagaatacagtcgctcagaaactgtgccatctcctgggcatgaacgtcatggagtttacaagagctatcctgacaccacgaataaaagtgggaagggattatgtgcagaaagcacagaccaaagagcaggcggacttcgccgtcgaagctctggccaaggccacatatgaacggctattccgatggctggtccaccgcatcaataaagccctggacaggacaaagagacaaggcgccagcttcatagggatcctagacatcgcaggcttcgaaatcttcgaattgaatagtttcgagcaactatgtattaattacacaaatgagaaacttcaacaactctttaatcacacgatgttcatcttagagcaggaagagtatcaacgtgagggcatcgaatggaatttcatcgatttcggccttgatctgcagccctgcatcgacctaatagagcgcccggccaatccccctggtgtgcttgccctcctcgatgaagagtgctggttccccaaggctaccgataagacttttgtggagaagcttgtgcaggagcaaggcagccattctaaattccagaaaccaaggcagctgaaggataaggcagatttctgtattatacactacgctggtaaggtggactataaggccgacgaatggctgatgaagaatatggatcctctcaatgataacgttgctaccttactccaccaatcttcagatcgcttcgtagcagaactttggaaagacgaaatccaaaacattcagagagcatctttttacgacagcgtctctgggcttcacgagcctccggtcgaccgcatagtgggcctcgaccaggtcactggaatgactgagaccgcgttcggaagcgcttacaagacaaaaaaaggtatgttccggaccgtgggccagctgtacaaagagtcactgactaagttaatggctacgctcagaaatacaaatccaaatttcgtgagatgcatcatccccaatcatgagaagagagctggaaagctcgaccctcatctcgtcctggaccagctgagatgcaacggagtactcgaagggattagaatttgtaggcagggcttccctaaccgtatcgtattccaggaatttaggcagaggtacgaaatattgacaccaaacgcaatacctaagggctttatggacgggaagcaggcctgcgagcgaatgatccgggcactggagctagacccaaatctgtaccgaatcgggcagtcaaagattttcttcagggccggcgtgctcgcccacctggaggaggaaagagacttgaagatcaccgacattatcattttcttccaggccgtgtgtaggggatacctcgcacggaaggcctttgccaaaaaacagcagcagttgtctgcccttaaggtcctgcaacggaactgtgccgcctacctcaagttacgccattggcaatggtggagggtgtttacaaaggtaaagcctctcctgcaagttacccggcaagaggaggagttgcaggccaaggacgaagagctcctgaaagttaaagaaaaacagaccaaagtcgaaggcgaattggaggagatggagcgcaaacaccagcagttgctcgaggaaaaaaacatccttgccgagcagcttcaagcggagactgaactgtttgccgaggctgaagagatgagagcccggcttgccgctaagaagcaggagctggaggagatattgcacgatctggaatcacgcgtggaagaggaagaggaacgaaatcagatcctacagaacgagaagaagaaaatgcaggcacatatccaggatctcgaggagcagctggatgaggaggagggcgcacgacagaaacttcaactggagaaggttaccgctgaggctaagatcaagaaaatggaagaggaaattcttctcttggaagaccaaaatagcaagtttattaaggagaagaagctgatggaagatcgaatcgcggagtgcagctcccagttggccgaggaggaagagaaagctaaaaatctggccaagataagaaataagcaagaggtcatgatcagcgacctggaagagcgtttgaaaaaggaggagaaaactcgccaggagttggagaaggctaagcgaaagttagatggtgagaccactgatctccaagatcagattgctgaactccaagctcaaatcgacgaacttaaacttcaattggccaagaaggaagaggagttgcagggcgctctagcccgcggggacgacgaaaccctgcacaagaataatgctctcaaagtggtgcgtgaactgcaggcccagatcgctgaactgcaagaggacttcgagtcagaaaaggcttcccgcaataaggcggaaaagcagaaaagggacttgtccgaagaactggaagctctgaagacggagctagaagacactctggatactacagcagcacagcaggagctgcggaccaagcgagaacaggaggtggccgaactgaaaaaggcacttgaggaggagactaagaatcatgaggcacaaatacaggacatgagacagaggcatgctaccgctttggaagaactttccgaacagctagagcaagccaagaggtttaaggccaatctggaaaaaaacaagcaggggctcgagactgataacaaggaactggcgtgtgaggtcaaagtcctccagcaggtaaaggcagagagcgagcataagcggaagaagttagatgcccaagtgcaggagctccacgctaaggtatccgaaggcgatcgcctcagggtggaattggccgaaaaagcgagtaagctccagaatgagctggacaacgtgagcacgctgctggaagaagctgagaagaaagggatcaagttcgcaaaagatgctgccagcttggagagtcagctccaggatacccaagagctgcttcaggaagagacacggcagaaactaaatttgtcctcaaggatacgacagctggaagaagagaaaaatagcctgcaggaacaacaagaggaagaagaagaggcacgcaaaaacctggaaaagcaggtcctggccttgcagagccagttggctgataccaaaaaaaaagtcgacgacgatcttggaacgattgagtccctggaagaagcaaagaagaagcttttgaaggatgcagaagccctcagtcagagactggaggagaaggccctcgcctatgacaaactcgagaagaccaagaatcgactgcagcaagagctggatgatctgacggtggacctggatcatcagaggcaggtagcttctaatttggagaaaaagcagaagaagttcgaccagctactagccgaagagaagtcgatttctgctcgttacgctgaggaaagggacagggccgaagcggaggctagagagaaagagacaaaggctctatccctggcccgggcgcttgaagaggctctagaggccaaggaggagtttgaacgccagaacaaacagctgagagccgatatggaggacctgatgtcaagtaaagatgacgtgggcaagaacgttcatgaactggagaaatctaagagagcactggagcaacaggttgaggagatgcggactcaattggaagagctcgaagacgaactgcaagccacagaggatgcaaaattgcggctcgaggttaacatgcaggcgatgaaagcgcaattcgaaagagacctccagactcgcgacgaacaaaacgaagaaaagaagcgactgttgattaagcaggtgcgcgaacttgaggctgagctggaggacgagagaaagcaacgcgccctggccgtggcttctaagaaaaaaatggaaatagatctgaaagacttggaagcacagatagaggccgcaaacaaggctcgggacgaggtcattaagcagctcaggaagctacaggcccagatgaaagactaccagagggagttggaagaggcccgagcctccagggatgagattttcgcgcagtctaaggagtctgagaagaaacttaagtctctcgaagccgagatcctgcaactgcaggaagagttggctagcagtgagagagcccggaggcatgcggagcaagagcgcgatgaactcgcagatgaaattacaaactccgcatcaggcaaaagtgccctgctggacgaaaagcggcgcctcgaagctaggattgcgcagctcgaggaggagttggaggaggagcagagcaacatggagctgctcaatgacagattcagaaagaccacccttcaagtcgatacgctgaacgcagagctggccgcagaaagatctgccgcccagaagtctgacaacgccaggcaacagcttgaacgtcagaacaaggagctgaaggcaaaactgcaagaactggagggagcggttaagagtaagtttaaagcaacaatttccgcgctcgaagccaagattggacaactggaagagcagctcgagcaggaggccaaggagagggctgcggcaaataaactagttaggcggacagagaagaagttgaaagagatttttatgcaggtcgaggacgagcggaggcatgccgaccagtataaagaacagatggaaaaggccaacgctcgcatgaagcagttgaaacgccaactagaagaggccgaggaggaagccacccgggccaatgcctccaggagaaagctgcagagagagttggacgacgccacggaagctaatgaaggccttagccgggaagtttcaaccctgaagaacaggctacgtcggggggggccaatctccttcagttcaagccgcagcggcagacgtcagcttcatcttgagggagctagcctggaattatccgacgacgacactgagagtaaaactagcgacgtgaatgaaacccagccaccccagtccgagtag

SEQ ID NO: 16195 - DNA, 5979 bp, synthetic construct
  misc_feature 1..5979: note = Description of Artificial Sequence: Synthetic coding sequence
  source 1..5979: mol_type = other DNA
atggcgcagagaacgggccttgaggacccagagcggtacctgtttgtagatcgcgccgtgatctacaatccagccacacaggccgactggaccgctaagaaactggtctggatcccttcggagcggcacggcttcgaagcggccagcattaaggaggaaagaggcgacgaagttatggtggaattagccgagaacggtaaaaaagctatggtgaataaggacgatatacagaagatgaatcctccaaagttctcaaaggtagaggatatggccgaactcacttgcttgaacgaggcatcagttctccataatctcaaggataggtactactctggtcttatctatacctacagcggactgttctgcgttgtaatcaacccatataagaacctccccatctacagtgaaaacatcatcgagatgtatagaggtaaaaaacggcacgaaatgcctccacatatctacgccatttcagagtcagcctaccgctgcatgctccaggacagggaagatcaaagtatactgtgtacgggagagtcaggagctggcaagaccgagaatactaagaaggttatacagtacttagcccacgtggcctcttcccataagggacggaaggatcacaacattccacaagagagtccgaaaccggttaagcaccaggcaagcgccttactgtatggtgagctagagcgacaactgctgcaggcaaaccccatcttggaatctttcggcaatgctaaaactgtcaaaaacgacaacagtagccgtttcggtaaattcatccgcatcaatttcgatgtgactgggtacatcgtcggtgccaacatcgaaacatacctcctggaaaagtccagggcagtacgccaggcaaaagacgagaggacgtttcacattttctaccagttgctgtccggcgccggtgagcacctcaaatctgacctcctgctggaaggctttaacaattacaggtttctctccaatggatacatcccaattccaggccagcaggataaggacaactttcaagagaccatggaggctatgcatatcatgggcttcagtcacgaagaaatattgagcatgctgaaggtagtgtcctccgttctccaattcggtaacatcagtttcaaaaaggagcgcaacaccgatcaggcatcaatgccagaaaacacagtcgcccagaagctgtgccaccttttgggtatgaacgttatggaatttacaagagcgatactcactcccaggatcaaggtggggcgggactatgttcagaaagctcagactaaggagcaggctgattttgcagttgaagccttggcaaaggccacctacgaaaggctctttcggtggctggtccacaggatcaacaaagccctcgaccggaccaaaagacagggagcgtcattcattggcatactggatatagctggattcgagatattcgagctgaactcattcgagcagctatgcattaattacaccaacgaaaagctccagcagttatttaatcacacaatgtttattttagagcaggaggagtaccaaagagagggaatcgaatggaattttatcgactttggactggatctgcagccttgtatcgacctgatcgaacggcccgccaatccaccgggggtcctggcattgctagacgaagagtgctggttccccaaagcaacggataaaacatttgtggaaaaactcgtgcaggagcaaggtagccattccaagtttcagaagccccgacaactgaaagataaagccgatttttgcataatccattacgccggcaaggtcgattataaggccgatgagtggctcatgaaaaatatggaccccttgaacgacaatgtggccacattgctgcaccagagctctgacaggtttgtggcagagctctggaaagacgtggacaggattgtgggcttggaccaagtgacaggcatgacggaaacagcattcgggtccgcctataagacaaagaaagggatgtttcggacagtgggacagctgtacaaagagtcgctgaccaagttgatggccactctgcgcaataccaaccccaacttcgtgcggtgcatcatccccaatcatgagaagagggccggaaagttggacccacacctggttctcgatcagttaagatgcaatggcgtgcttgagggcataaggatctgtagacagggcttcccgaacagaatcgtgttccaggaattccggcagcgatatgaaatcttaactccaaacgccatccctaaagggtttatggatggtaaacaggcttgcgaacgaatgattcgtgccctagaattggaccccaatctgtatcgaattgggcagagtaaaattttcttcagagccggtgtactcgcacacctggaagaagagagagacttgaaaatcacggacatcatcatattttttcaagccgtatgcaggggctatctggctaggaaggcgtttgctaaaaaacagcagcagctttctgcgttaaaagtgcttcagcgcaattgcgcagcctatctcaagctgcgccattggcagtggtggagagtgtttaccaaagtgaagcctctcctgcaggtgacgcggcaggaggaggaacttcaggcaaaagacgaggaactcttaaaagtgaaggaaaaacagacaaaggtcgagggagaactggaagagatggagcggaaacatcagcagctgctggaagaaaagaacattttagcagaacagcttcaggccgagacagagctctttgccgaagctgaagaaatgagagcaagactcgcagctaagaaacaggaactggaagagatcctacacgatttggagtcccgggtggaagaggaagaagagcgcaatcagatcctacagaacgagaaaaagaagatgcaagctcatatacaagatctggaggagcaactggatgaggaagaaggagcgcgtcagaaattacaactggaaaaagtgacagcagaagcaaagattaagaagatggaagaagagatcctgctactagaggatcagaactcaaagttcatcaaagagaaaaagctcatggaagaccgcatcgctgaatgttcctcacaacttgccgaagaggaggaaaaggctaaaaatctggctaagatccggaacaagcaggaagttatgatttccgaccttgaagaaaggctcaaaaaggaggagaagaccaggcaggagctagagaaagccaaacgcaaacttgatggcgagaccactgatctgcaggatcagattgccgaattgcaggcccagattgacgaattaaagctgcagttggctaagaaagaggaagaactgcagggcgcactcgcccggggtgacgatgagacactccacaaaaataatgccctcaaggttgttagggaattgcaggctcaaatagccgagttacaggaggatttcgaaagtgagaaagcctctcggaataaggccgaaaagcagaagcgggacctctccgaagagctagaggctctcaagaccgaactggaagacacgctggataccacagccgcacagcaagagttacgtactaagagggaacaggaggtcgccgagctgaagaaggccctggaagaagaaactaagaaccatgaggcacagattcaggacatgaggcagcgacacgcaactgccctggaagagctgtcagagcagctcgagcaggcgaaacgatttaaagccaacctggagaaaaacaagcaaggcctggaaaccgacaataaggagctagcatgcgaagttaaggtgctacagcaagtgaaggccgaatcagaacacaaaaggaagaagttggacgcccaagttcaggaactccacgccaaagtctctgaaggcgacaggttgagagtcgagcttgcagagaaggcttccaagctgcagaacgagctggacaatgtcagcacactactggaggaggctgagaaaaagggaattaagtttgctaaagatgccgctagcctcgagagtcaactccaagacacccaggaactgctccaggaagaaacccggcagaagctaaatctgagctctagaattaggcaactagaggaggagaaaaattccttgcaagaacagcaggaggaggaggaagaagcacgtaaaaatctggaaaaacaggtcctggctctgcagtcacaactggccgacacaaaaaaaaaagttgatgacgatttaggaactatcgagtctctggaggaggctaagaagaaactcctcaaagacgccgaagcactgagccaacggctcgaagaaaaagccttagcttacgataaactggagaaaaccaaaaaccggctccagcaggagctcgatgatcttacagttgacttagaccatcaaaggcaagtggcctccaatctcgaaaaaaaacagaagaagttcgaccagctgctcgccgaggaaaagagcatctcagcacgttacgccgaggagcgggatagagccgaggctgaagcccgcgaaaaagagacgaaagctctgtccctcgctagggctctggaagaagccctggaagctaaagaggagtttgaacgacagaacaagcagctgagggcggacatggaagatctgatgagcagtaaggatgatgtcggaaagaacgtacacgaactcgagaaaagtaaacgggccctggagcagcaggtcgaagagatgagaactcagctggaagaactcgaggacgagctgcaagcaacggaagatgccaaactgaggctggaggttaacatgcaggctatgaaagcacagttcgaaagagacctccagaccagggacgaacagaacgaggagaagaaacgcctgctcatcaaacaggtgcgcgagttagaggcagagctggaagatgagaggaaacaacgagcactcgcagtggcctccaagaaaaagatggaaatcgacctcaaggatctggaggcacagatcgaagcggctaacaaggcaagggacgaggtcatcaagcagctgcgaaagctgcaggcccaaatgaaggactaccagagggaactagaggaagcaagagcaagtcgggacgagatctttgctcagtctaaagaaagcgagaaaaagctgaagtctctggaggccgagatcttgcaattacaggaggaactggcttcaagtgagcgagcccgaagacatgcagagcaggagcgggacgagctggcggatgagatcactaacagtgcctctgggaaatcagccctgttagacgagaaacgtcgtctagaggcaagaatagcccagctcgaagaagaactggaggaggaacaatccaatatggaattattaaacgatcgttttagaaagactaccttgcaggtcgatacattaaatgctgagctcgccgctgaaagatcggctgcgcagaagtctgacaatgcccggcagcagctggagcgacagaataaagaactcaaggccaaacttcaggagctggagggtgcagtaaagtccaaatttaaggccacaataagcgccctggaggctaaaatcggtcagctcgaagagcagcttgagcaggaggcaaaagagcgtgccgcagctaacaagcttgttcgacggaccgagaagaagctgaaagagatatttatgcaggtggaagatgagagacgtcacgctgaccagtataaggagcagatggagaaagcaaatgctcgtatgaagcagcttaaacgccagctggaggaggcggaggaagaggctacaagagccaatgcttcccgtcgcaaactacagcgggagttggatgatgccactgaagcaaacgagggcttgagccgcgaagtgtctaccctgaagaataggctgagaaggggcggacccattagctttagctcgtctaggagcgggcgtcgacaactgcacctggagggcgcctccctggagcttagcgacgacgatacagagtccaagacatccgacgtaaacgaaacgcagccccctcagtccgagtag

SEQ ID NO: 16196 - DNA, 5994 bp, synthetic construct
  misc_feature 1..5994: note = Description of Artificial Sequence: Synthetic coding sequence
  source 1..5994: mol_type = other DNA
atggcccagcggactggactggaggacccagaaaggtacctgtttgttgacagggctgtgatctataatccagccacacaggcagactggacagctaagaaacttgtgtggatcccctccgagcggcatggctttgaggccgcctctataaaggaagaacgaggggacgaggtgatggttgagctggctgagaacggtaagaaagccatggttaataaggatgatattcagaaaatgaaccctccaaagtttagcaaggtcgaggacatggccgagctgacgtgccttaacgaagctagcgtgctgcacaatctgaaggatcggtattatagcgggctcatatacacatactcaggtctgttctgcgtcgtaattaatccctataagaacctaccaatttactcagagaacatcattgagatgtacagaggcaagaaaagacacgaaatgccccctcacatatacgcaatctcggagagtgcctatcgttgtatgcttcaggatcgagaagaccagtccattttgtgcacaggcgaatccggagcaggaaaaaccgaaaataccaagaaggtcatacagtatttagcccatgttgcatcaagccataagggacgcaaggatcacaatatccctggagagctcgagcggcagcttctccaggccaatccaattctcgaatcctttggcaatgcaaaaactgtgaagaacgataatagctcaagattcgggaagtttattaggatcaatttcgacgtgaccggctatattgtgggtgctaacattgagacctatcttctggagaagagtcgggccgtgaggcaggcaaaggatgaaaggactttccacatcttttaccaactgttatcaggagcgggtgagcacctgaagagcgatctcctgctggaggggttcaataactaccgatttttgagcaatggttacatccccatcccagggcagcaggataaagataacttccaggagaccatggaggctatgcatatcatgggattttcccatgaggaaatcttgtccatgttgaaagtggtctcatcagtgctgcaattcggcaacatcagctttaaaaaggagaggaacactgatcaggcttcaatgccagaaaacacggtcgctcagaagttgtgtcatctactgggcatgaatgtcatggagtttaccagggcgatcctaacccctcggatcaaggtgggtcgcgattacgtccagaaagcacagaccaaggaacaagccgactttgcggtagaggcgctggcgaaagcaacttatgaaaggctctttagatggctggtacacagaataaataaggcattggataggaccaagagacagggcgcttccttcattgggatcctcgacatcgctgggttcgaaatttttgagctgaacagttttgagcaactctgtattaactatacgaatgagaagctccagcaacttttcaaccacacgatgttcattctggagcaggaggagtaccaaagagaaggcattgagtggaatttcattgatttcggtctggatctgcaaccctgtattgacctgattgaacgtcccgcaaacccccctggagtgttggcgttgctggacgaggaatgctggtttccaaaggccacggacaagacattcgtcgaaaagctcgtacaggagcaggggagtcattccaaatttcagaagcctcggcaacttaaggataaggctgacttttgtattattcattatgcagggaaggtagactataaggccgacgaatggctgatgaagaatatggatccactcaatgataacgtggccactttgctgcaccagtcctcggatagattcgtggcagaactgtggaaagatgagatacaaaacatacagcgggcgtcattctacgacagcgtaagtggactgcacgagccacctgttgacaggattgttggcctagaccaggtcacaggtatgaccgagaccgccttcggatcggcttacaagactaagaaaggaatgttccgcaccgtgggacaactttacaaggagtcacttaccaagctgatggctacattgcgcaataccaaccccaactttgtacggtgtatcatccccaaccatgaaaaacgggccgggaagttggatccacacctagtgctggaccaattacgatgcaacggagttctcgaagggattcgcatttgtaggcaggggttcccaaatcggattgtgttccaggaattcaggcagcgttatgagatacttactccaaatgccatccctaagggctttatggatggcaagcaggcctgtgagaggatgataagggccctggaactggaccctaacctctatcggatcggacagagtaagatcttctttagagctggtgtccttgcccatctggaggaagagcgagatctaaaaattactgatatcattattttttttcaagctgtttgtcgggggtacctcgcacgaaaggcattcgcaaaaaagcaacagcagctttcagctctaaaagtattacagcgtaattgtgccgcttacctcaaacttaggcattggcagtggtggagagtgtttactaaagtgaagcccctcctgcaggtgacaagacaggaagaggagcttcaggccaaagatgaggaactgctgaaggttaaggaaaaacagactaaggtggaaggagaactagaggagatggagagaaaacaccagcagctgctggaagagaaaaacatcctggccgaacagttgcaagctgaaacggagctgtttgctgaggccgaagagatgcgggctcgacttgcagccaaaaagcaggagctggaagagatactacatgacctggagtcaagagtggaggaagaagaggaacgtaaccagattctccaaaacgagaagaaaaaaatgcaggcccatatccaagatctcgaggaacagctggatgaggaggagggtgctcgacagaagctgcaactggaaaaggttacagccgaggccaagattaagaagatggaggaggagattctgctattagaggatcagaacagcaaattcatcaaggaaaaaaagctgatggaagacagaatcgcggaatgtagttctcagttagcggaagaggaggagaaagccaaaaacttggcaaaaattcggaacaagcaggaggtaatgatctctgacttggaagaaaggctaaaaaaggaggagaagactcggcaggaactcgaaaaagccaagcgtaagcttgatggtgagaccacggacctccaggaccagatcgccgaattacaggcgcagatcgacgaattaaagttacagctagccaagaaggaggaggagttgcagggcgccctggcacgaggggacgatgagactcttcataaaaataatgctctgaaggtggtgcgggagctgcaagcacaaatcgcggagttacaggaggatttcgagagcgaaaaagcttctcgcaacaaagcagaaaagcagaagcgcgacctgtccgaagaactggaggctctgaagaccgagctagaggacacgttggatacaacagcagctcagcaggagctaaggactaaacgtgagcaggaagtcgctgaactcaagaaggcattagaagaagagacaaagaatcacgaggcacagattcaggacatgcggcagaggcacgctaccgccctggaagagctctccgaacagctggaacaggccaagcggtttaaggccaacctggaaaagaacaagcagggcttagaaaccgacaataaagagctggcatgcgaagtgaaagtattgcagcaggtcaaggccgagtcagagcacaaacggaaaaagcttgatgcccaggtgcaagaactgcacgctaaggtgtcggagggtgacaggctgcgagtcgaattggccgaaaaagcttctaaactgcagaatgaactggacaacgttagtacgctcttggaagaggccgagaaaaaaggcatcaagttcgctaaagatgccgcgtccctggagtctcagttacaggacactcaagaacttttacaggaggagaccagacaaaagcttaacctgagtagcaggatcagacagctggaagaagaaaagaactcactgcaggagcagcaggaggaagaggaggaagctcgcaaaaatcttgagaagcaagtgttggctctgcagagccagcttgccgataccaaaaagaaggtagacgatgatctcggcacaatcgagtcacttgaggaggctaagaaaaagttgttgaaggatgccgaagccctgagccagcggctagaagagaaagcccttgcttatgataagctggagaagacaaaaaacagactccaacaggagctcgacgacctgaccgtcgatttggatcatcagaggcaagtagcttctaacttggagaaaaagcagaaaaaatttgaccagctgctggcagaagagaagtctatttccgctcgctacgccgaagagagagaccgagcagaggccgaggcaagagagaaggagaccaaggctctgagcctggcccgcgctctggaagaggccctggaggcaaaggaggagtttgaacgtcagaacaagcagctgcgggcagatatggaagacctgatgtcatccaaggacgatgtaggcaaaaacgtgcacgagctcgagaaaagtaagagagccctggaacaacaagtggaggagatgagaactcaactggaggaactcgaagatgagctgcaggctacggaggatgctaaattgcggctagaggtcaacatgcaggcgatgaaagcccagttcgagagagatctacagacacgggacgaacaaaacgaagaaaagaagcggttacttatcaagcaggtcagggagctggaggcggaactggaggacgaaaggaagcaacgcgctctggccgtagcatctaaaaaaaaaatggagatcgacctgaaggatctggaagctcaaattgaagctgcgaataaggcgagagatgaggtgattaagcaattgaggaagttacaggctcaaatgaaagattatcagcgcgagctggaagaggccagagccagcagggacgaaatctttgctcagtccaaagagagcgaaaagaagctcaagagcctggaggccgaaattctgcagctgcaagaggaacttgcatcgtcagagcgcgcccgaagacacgccgagcaagaacgcgacgagctggccgacgaaattacaaattcagccagcgggaagagcgcgctgctcgatgaaaagcgcaggctcgaggcccgtatcgcacagctcgaagaggagcttgaggaggagcaatcaaacatggaacttttgaatgacagatttcgaaaaacaaccctccaggttgacaccctcaatgccgaacttgccgcggaaaggtccgcagctcaaaagagcgacaacgcccgacagcaactagaaagacaaaacaaggagctcaaagcgaagctccaggagttggagggggcagtaaagagtaaattcaaagccacgataagcgcgctggaagccaaaatcggccaactagaggagcagcttgagcaggaagcaaaggaacgggccgccgcaaacaagctggtgcggcgcactgaaaaaaagttgaaagagatctttatgcaggtcgaggatgaaaggagacacgccgatcaatacaaagagcagatggagaaagcaaatgccaggatgaaacaacttaagagacaactggaagaagccgaagaggaggccacccgagccaatgccagccggcgtaagcttcagagagaactggacgatgccaccgaggccaatgagggactgagtagagaggttagtacgcttaagaaccgtttgcggcgaggtggcccaatcagtttttcaagcagtaggtctgggcgcaggcagctgcacttagaaggggccagtctggagttgagcgatgatgacacggagtccaaaacgtccgacgtcaacgagacacagcctccacaatccgaatag

SEQ ID NO: 16197 - DNA, 567 bp, synthetic construct
  misc_feature 1..567: note = Description of Artificial Sequence: Synthetic coding sequence
  source 1..567: mol_type = other DNA
atggctcagaggacaggcttggaggaccctgaacgatatctcttcgttgatcgcgccgtcatctataatccagctacccaggcagattggactgctaagaaattggtgtggattccctcagaacgccacgggttcgaagccgcttccataaaggaagaacgtggtgacgaagtgatggtcgaactcgcagagaacgggaaaaaagctatggtgaacaaggacgatattcagaagatgaaccccccaaagttcagtaaagtggaagatatggctgagttgacatgtcttaacgaagcgtctgtcctgcataacctcaaggataggtactatagcggactaatctacacctactctggtcttttttgcgtggtgattaacccgtacaaaaacctgccaatctactctgaaaatattattgaaatgtaccggggcaagaagcgacacgagatgcctccacatatctacgcaatttcggagagcgcttaccggtgcatgctacaggatcgggaggaccagagcatcctctgtaccggtgaatcaggtgctggcaagactgagaacacatag

SEQ ID NO: 16198 - DNA, 1446 bp, synthetic construct
  misc_feature 1..1446: note = Description of Artificial Sequence: Synthetic coding sequence
  source 1..1446: mol_type = other DNA
atgtatgacgcggaaagaggttggtcgttgagctttgccggctgtggcttcctcggattttatcacgtgggcgccacgcggtgcttgtctgagcatgcaccacacctgctgcgtgatgcaaggatgctctttggagccagcgcgggcgctctgcattgtgtgggcgtcctgagcggcattccattggaacagaccttgcaggtgcttagtgatctggttcggaaagctcgctcccggaacatcggaatcttccacccttcctttaacttgagcaagttcctgcggcagggcctgtgcaagtgtctcccggctaacgtgcaccagctgatcagcggcaaaatcggaatcagcctcactcgggtgagtgacggcgaaaatgtgctcgtttcagatttccggtctaaggacgaagtggtagacgcactggtgtgcagttgctttatcccgttctacagtgggctcatacccccaagctttcggggcgtgcggtacgtggatggaggagtgtcagacaacgtgcctttcatcgacgcaaaaaccacgatcactgtttcacctttctacggagagtacgacatttgcccaaaagtgaaatctaccaacttcctccatgttgacatcacgaaactatcattgcgcttatgtacgggtaacctataccttctgtctcgcgcttttgtcccaccagatctgaaggtgctcggcgagatatgtctgaggggctacctcgacgcctttcgcttcctggaggaaaaggggatctgcaatcgcccccagccaggcttgaaatcctcctcagaggggatggatcccgaggtggccatgccctcttgggccaacatgagcctcgacagttcccccgaatctgcagccctggccgttcggctggaaggggacgagttgctcgatcacttacgcctgagcattcttccctgggatgaatctatcttggacactctctcacccaggctcgccaccgccttaagcgaagaaatgaaggataaaggcgggtacatgtctaaaatttgcaatctgttacctattagaataatgagctatgtcatgctaccgtgcaccctgcccgtggagagcgccatcgctatcgtccagaggttagtgacatggttacccgacatgcctgacgatgtgctgtggctgcagtgggtgacctctcaggtcttcacacgggttcttatgtgcttgctacccgcttctagatctcagatgcctgtctcctcacagcaggcgtccccatgtacgcctgaacaagactggccatgttggacaccttgtagcccaaaggggtgtcccgccgaaaccaaagccgaggccaccccccgcagcatactgcggagcagcctgaatttcttcctcgggaataaggtcccggccggcgcagaggggctgtctaccttcccctcatttagtctcgaaaagtctctttag

SEQ ID NO: 16199 - DNA, 4149 bp, synthetic construct
  misc_feature 1..4149: note = Description of Artificial Sequence: Synthetic coding sequence
  source 1..4149: mol_type = other DNA
atgtacaaaggtaagaagagacatgaaatgccgccccacatctacgctatcacagacaccgcttatcggagcatgatgcaggatagggaagatcagtccatcttgtgtaccggggagtccggagccggcaagaccgaaaataccaaaaaagtgatacagtatctcgcgtatgttgcttcatcacataaatcgaagaaagatcaaggcgagctggagagacagctcctacaggctaaccccattttagaagctttcggaaatgccaagaccgtgaaaaatgacaacagcagcagattcggtaagttcattagaatcaatttcgatgttaacggctacattgttggggccaatatcgagacatacctgctggagaaaagcagagctatccgccaggccaaagaggagaggacctttcacatcttttactacttgctgagcggtgccggtgagcacctcaaaaccgatctgttactagaaccctataataagtaccggtttttgtcaaacgggcacgtgactatcccaggtcagcaggataaggatatgttccaggagaccatggaagcgatgcgcattatgggcatacctgaggaggaacaaatggggctgctgcgggtgatcagcggggtcctgcaactcgggaacattgtgtttaagaaggaaagaaatacagaccaggcatctatgcccgataacacggcggcccagaaggtgagtcacctgctcggaatcaacgtgacagactttacaagagggatacttactccacggatcaaggtcggacgtgattatgtccagaaagcgcaaactaaggaacaggccgattttgctatagaggctctggccaaggcaacgtatgaacggatgttcagatggttagtcctgcggatcaataaggcgctggacaagacgaagaggcagggcgcctctttcattggtatcttagacatcgctggcttcgaaatctttgacctgaactcttttgagcagctctgcatcaattacacaaacgagaaattgcaacagctcttcaatcacacaatgtttattctcgagcaggaagagtatcagcgagaagggatcgaatggaattttatagatttcggcctcgacttgcagccttgcatagaccttatcgaaaagcctgcggggccccctggaatcttggcactccttgatgaggaatgctggttcccaaaggcgacggataagtccttcgttgagaaggtgatgcaggaacaaggaacccacccaaagttccagaagcccaaacagctgaaggataaggccgatttctgcatcattcactacgccggaaaagtggactacaaggccgacgaatggctgatgaagaatatggaccctctcaacgacaacatagcaactttgctgcaccagtccagtgacaagtttgtgtcagagttatggaaagacgtcgatcggatcatcggcctagaccaagtcgccggaatgtctgaaacggccctacccggtgccttcaaaaccaggaaggggatgttcaggacagtcggtcagctgtataaagagcagttggccaagctgatggctactctccggaacaccaaccccaacttcgtgcggtgtatcattcccaaccacgaaaaaaaagctggcaagttagacccacacctggtcttagatcagctccggtgtaacggagtgttagagggaattagaatctgtagacagggctttccaaaccgtgtggtctttcaagagttcaggcaacggtatgaaattctgacgcccaattctattccaaaagggtttatggacggtaagcaggcctgcgtgctcatgatcaaggcactggagctggattccaacctatacagaattggtcaaagcaaggtcttctttagggcgggcgtccttgcccatctggaggaggaacgggacctgaagatcactgatgtgattataggattccaagcctgttgtcgcgggtatcttgccaggaaagcattcgccaagagacagcaacagctgaccgctatgaaggttctgcagcgcaattgcgctgcatacctcaagctgcggaattggcaatggtggaggctgttcacgaaggtgaaaccactgctgcaggtatcccgtcaggaggaggagatgatggccaaggaagaggaactggtgaaggtgcgagagaaacaactggcagcagagaaccggctgacagagatggaaaccctgcagtcgcagcttatggcagagaaacttcagttacaggaacagctccaagccgaaaccgagctttgtgccgaagctgaggaattaagagccaggctgactgccaagaagcaagaacttgaggagatatgccacgatctggaggccagagtcgaagaggaggaagaacgctgtcaacacctgcaggcagaaaagaaaaagatgcagcagaacattcaagaattggaggagcaacttgaagaggaggaaagcgccaggcagaagctgcagctggagaaggtgacaaccgaggcgaaactgaaaaagttggaggaagagctggacgatctcctggttgacttggatcatcagcggcaatcagcgtgtaatctggaaaagaaacagaagaagttcgatcaactgcttgcggaagaaaagaccataagtgctaaatacgccgaggaaagagacagagctgaggcagaggctcgggaaaaagagaccaaggccctgtctctggcccgagcactcgaagaggctatggagcaaaaggccgaattggagcgcctgaacaagcaattccggacagaaatggaggacctcatgtctagcaaggacgatgtcgggaagagtgtacacgagctggaaaaaagcaaacgcgccttagagcagcaagtggaggaaatgaagacacagctcgaagagttagaggatgaactgcaggcgacagaagatgctaagctgcgtctggaggtaaatctgcaggccatgaaggcacaatttgagagggacctgcagggacgggatgaacagtctgaagagaaaaagaagcagctggtaagacaggtcagggagatggaggctgagttggaagatgaacggaaacagcggagcatggccgtcgccgcacggaagaagctcgaaatggacctcaaggatttagaagctcacatagactcagcaaataaaaatcgcgacgaggctattaagcagctaaggaagctacaggcccagatgaaggattgcatgcgggagctagatgacacccgcgcctcccgggaagagattctggcgcaggccaaggaaaatgaaaagaaactgaagagcatggaggctgaaatgatccaattgcaggaagaactcgcagccgcagaaagggccaagagacaggcccagcaggagcgagacgagctggcagacgagattgccaactcgtcaggcaagggcgcattggcgctcgaggagaagcgcagactggaggcccgtattgcccaactggaagaggagctggaagaagaacaggggaacacagagctgattaacgatagactgaaaaaagctaatttgcagatcgatcagattaacacagatttgaacctggagcggtcacacgcccagaagaacgaaaacgcaagacagcagctggaaaggcagaataaagagttgaaagtcaagttgcaggagatggaagggactgttaaaagcaagtacaaagcaagcattacagcgctggaggctaaaattgctcagctcgaagaacagctcgacaacgaaactaaagagagacaggccgcctgtaagcaggtgagacgtacagaaaagaagctgaaggacgttcttcttcaagtcgatgatgaaaggagaaatgccgagcagtacaaggaccaggccgacaaggctagtactcggctcaaacagctcaaaagacagctcgaagaggccgaggaggaagcccagcgggcaaatgcttctcggcgcaaactccagcgcgaacttgaggacgcaactgaaactgccgacgcaatgaacagggaggtatctagtctgaaaaacaagcttcgccgcggcgacctgcccttcgtcgtgccccgcaggatggctaggaagggggcaggggacggctccgacgaggaggtggacggaaaagctgatggggctgaggccaagcctgccgaatag

SEQ ID NO: 16200 - DNA, 1689 bp, synthetic construct
  misc_feature 1..1689: note = Description of Artificial Sequence: Synthetic coding sequence
  source 1..1689: mol_type = other DNA
gcttcaggaaccagaaggcgatggccacccacgacttcttggaggaggccacgcagaggatgcagcaggtcttggaccacctgctggtggacctggacgaccagtgctcgggccagggcgacctggaggcggtcccgtaggtccctaacctctagctggaggcgaagacgcccttcgctgcccagcatgcagcgaagcgcaacaggattgcggcgacggccggagcgtaggagaccccgcctctgcagatggcccggacccgaagaagctatggaacagaaagccgaactcgagcgcctgaacaagcagtttagaaccgagatggaagaccttatgtcttccaaggatgacgtcgggaagagtgtacatgagctggaaaaaagcaagagagctctggaacaacaggtagaggagatgaagacacagctggaggagctggaggatgagctacaagctaccgaggatgccaaacttcgtcttgaagtgaacttgcaagctatgaaggcccagtttgagcgcgacttgcagggaagggacgagcagtctgaagagaagaagaagcagttggttcgccaggtgcgcgagatggaggccgaactcgaagacgaacgcaagcagaggagtatggccgtagctgcacgcaaaaagctggaaatggaccttaaagacctggaggcacacattgatagtgcaaacaagaacagagacgaggccatcaaacagcttagaaaactacaagcgcagatgaaggactgcatgcgagagcttgatgacacacgggccagtcgcgaagagattctcgcccaggcaaaggaaaacgaaaagaaactgaaatctatggaggctgaaatgatccagctgcaagaggagctcgcagcggcagagagagctaagaggcaggcccagcaggaacgggacgagctggccgacgagatcgcgaattcgtcagggaaaggtgctttagccctcgaagagaaaaggagactagaggctcgaatcgcccagttggaggaagagctggaagaggagcaggggaacacagaactgattaacgaccggcttaagaaggccaatctacaaatcgaccaaataaacacagatttgaacctggagcggtctcatgctcagaaaaatgaaaacgcaagacagcagctggaacgacagaataaggaattgaaggtgaaactgcaagaaatggagggcaccgttaaaagcaaatataaggcgtccattactgcacttgaggctaaaattgcacaactcgaagagcagctggacaacgaaacaaaagaaagacaggccgcatgtaaacaggtgaggcgtactgaaaaaaaacttaaggatgtcctcctgcaggtcgatgatgagaggcgtaacgctgaacagtacaaggaccaggccgataaagcttccaccaggttgaagcaactgaagaggcagttggaagaggccgaagaggaggcccagcgggcaaatgcgagcagacgcaaactgcaaagagagctggaagacgctacagaaaccgctgatgctatgaatcgggaggtcagctcactcaagaacaaactgcggcggggagacctgccttttgtggtgccccgcagaatggcccgaaaaggtgccggcgatgggagcgacgaggaggtggatgggaaagcagatggtgccgaggctaagcctgcagagtag

SEQ ID NO: 16201 - DNA, 657 bp, synthetic construct
  misc_feature 1..657: note = Description of Artificial Sequence: Synthetic coding sequence
  source 1..657: mol_type = other DNA
atggcccagcaggccgcggataagtacctgtatgtggataaaaatttcatcaacaaccccttggcgcaggctgactgggccgccaaaaagctggtctgggtcccctccgacaaatcaggattcgagcccgcatctctgaaggaggaggtgggagaagaggccatcgtggagctggtcgaaaatggcaaaaaagtgaaagtcaataaagatgacatacagaagatgaaccctccaaaattttcaaaagtggaagatatggccgagctaacatgcctgaacgaagcgtctgttctacacaaccttaaggagcgttattactctgggcttatctacacctatagcggcctgttctgtgtggtcatcaacccatataaaaatctcccaatatactccgaggagatcgtcgaaatgtataagggaaagaagagacacgagatgcctccgcatatctacgccattactgacacggcctaccggagcatgatgcaggatcgggaggatcagagtattttatgtacaggcgagtcaggggccgggaaaaccgagaacacaaagaaggtgattcagtacttggcctatgttgcctctagccacaagtccaagaaagatcaggaagcttatttcaagaacagggccgtcagactcggtgtactctag

SEQ ID NO: 16202 - DNA, 312 bp, synthetic construct
  misc_feature 1..312: note = Description of Artificial Sequence: Synthetic coding sequence
  source 1..312: mol_type = other DNA
atggctcagcaagctgcagacaaatatctgtatgttgataagaacttcattaacaatcctctggcacaggccgactgggccgcaaaaaagctggtttgggtcccctccgataaaagcggtttcgaaccagcctcactaaaagaagaggtgggggaagaggcaatagttgaattggtagaaaatggaaagaaggtgaaagtaaacaaggatgatatccagaaaatgaacccacctaaatttagcaaagtggaagacatggcggaactcacctgcctgaatgaagctagtgtgctgcataatctcaaagagtag

SEQ ID NO: 16203 - DNA, 519 bp, synthetic construct
  misc_feature 1..519: note = Description of Artificial Sequence: Synthetic coding sequence
  source 1..519: mol_type = other DNA
atgagctccaaacgggccaaggccaagactaccaaaaagcggccccaaagagccacatccaatgtatttgctatgtttgaccaaagccaaattcaagaatttaaggaggcgtttaacatgattgatcagaatcgtgatggcttcattgacaaggaagatcttcacgacatgttagcaagcctgggcaagaacccaacagatgaatacctggaggggatgatgtctgaagcccccggccctatcaactttacaatgttcctaacaatgtttggagaaaaattaaacggcaccgacccggaggatgtgattcggaacgccttcgcatgctttgacgaagaagcttcagggttcattcacgaagaccacctcagggagttgctgacaacaatgggcgatcgattcactgacgaggaggtggacgaaatgtaccgtgaggctcctattgataaaaagggcaactttaactatgtggagtttacaaggatcctcaagcatggcgccaaggataaagatgattag

SEQ ID NO: 16204 - DNA, 357 bp, synthetic construct
  misc_feature 1..357: note = Description of Artificial Sequence: Synthetic coding sequence
  source 1..357: mol_type = other DNA
atgagttcaaagagggctaaggccaaaaccacaaagaagcggccccagcgcgccaccagtaacgtgtttgctatgtttgatcagagccagatccaggaattcaaagaggccttcaatatgattgaccagaacagggatgggtttatcgataaagaagatttacacgatatgctcgcctcactgggatttatccatgaggaccatctgagggagttgctgacaaccatgggcgaccgctttactgatgaagaggtggacgaaatgtatagggaggctcctatagacaagaaaggaaatttcaactatgtggagtttaccagaatcctcaagcatggagcaaaagataaggatgattag

SEQ ID NO: 16205 - DNA, 927 bp, synthetic construct
  misc_feature 1..927: note = Description of Artificial Sequence: Synthetic coding sequence
  source 1..927: mol_type = other DNA
atgcaggagctgactttgtctccaggcccagccaagcttaccccaaccctggatccaacacatcgaatggagctgattctctccacttcccctgccgagctcaccctggatccggcctgccaacccaagctgccgctagattctacttgccagcctgaaatgactttcaaccccggtcctacagaattgacactcgatcccgaacatcagcctgaggagacgcccgcacccagcctggcggaactaaccctcgaaccagtgcacaggcgacctgagctgttggatgcatgtgccgatctaataaatgaccaatggccgcgcagccgcacaagcaggctgcattcattggggcagtcttcggacgccttcccgctctgcctgatgctcctgtcccctcacccaacattggaggcagcccccgtggtggtggggcacgcccgtttgtcccgggttctcaaccagcctcagagtctgctcgtggaaacggtagtcgtggcccgggcccttcgggggaggggcttcggccggcgcctgatggaaggtctagaggtgttcgcccgggctcgtggcttcaggaaactgcacttgacgacccacgaccaggtgcatttttatacgcacttgggttatcagctcggagagcccgtgcaaggactcgtttttacatcacgcaggctcccagcgactctgctcaacgccttccctaccgccccctctccccggccacctaggaaggcacccaacctcacggctcaagcagccccgcgcggacccaaggggcccccactgcctccaccacctccactgcctgagtgcctgacaatatctccaccagtgccctctggcccgccctctaagtctctgcttgagactcagtatcaaaatgtgcgggggaggccaattttttggatggaaaaggacatctag

SEQ ID NO: 16206 - DNA, 861 bp, synthetic construct
  misc_feature 1..861: note = Description of Artificial Sequence: Synthetic coding sequence
  source 1..861: mol_type = other DNA
atggagctcatcctttcaacaagtcctgctgaattgacactcgaccctgcctgtcaacctaaactcccactggactccacctgccaacctgagatgacatttaatcctggaccaacagaactcaccctggaccccgagcaccagcccgaagagacaccagctcctagcttggcagaactgacactggagcccgtgcaccgacgtcctgagttattagacgcttgcgctgatctcatcaatgaccagtggccccgatctcgtacaagccggttacatagcttagggcaatcttcggatgcgttccccctgtgtctcatgctcctctcgccacacccaaccctcgaggcggctccagttgttgttgggcacgccaggctgagcagagtcctgaaccagccgcaaagcttactggtggagacagtggttgtagccagggcccttcgaggacgagggtttggtaggcgcctgatggaagggttggaagtgttcgcaagagctagagggtttaggaagctgcacctaacaactcatgaccaggttcatttttatactcacctcggataccagctgggcgagcccgtgcagggcctcgtgttcacctcacgacgtctcccagctaccttgcttaatgcatttcccacagcaccctcacctcgcccacctcggaaggccccaaaccttacagcacaagctgcacccagaggcccaaaagggcctccactgcctccccctcccccccttcccgagtgcctgacaatcagcccccccgtgccgagtgggcccccctcgaaatcacttctggagacacagtaccagaatgttagagggcgaccaattttttggatggaaaaggacatttag

SEQ ID NO: 16207 - DNA, 174 bp, synthetic construct
  misc_feature 1..174: note = Description of Artificial Sequence: Synthetic coding sequence
  source 1..174: mol_type = other DNA
atggagctcatactctctacaagcccagccgagctgacgttagatccagcctgccaacctaagctcccactggactctacctgccagcctgagatgacctttaacccggggccaactgagctcacattggaccccgagcatcagccagaagaaacaccagcccccagcctctag

SEQ ID NO: 16208 - DNA, 861 bp, synthetic construct
  misc_feature 1..861: note = Description of Artificial Sequence: Synthetic coding sequence
  source 1..861: mol_type = other DNA
atggagcttatcctgtcaacctctccagccgaactgactcttgatccagcatgtcagccaaagcttccattggattctacttgtcagcctgagatgacttttaatcctggaccaacggagttgacactggacccagaacaccagcccgaagagacccctgccccttccctggctgaattaacactggagccggtgcatcgaagaccagagctgttagatgcctgcgctgacctaattaatgaccagtggccacgcagccgaacctccagactgcattcactgggccagtctagcgacgctttcccattatgcctgatgcttttgagcccccatcccacactggaggctgcccccgtggtggttggccatgctagactgagcagagtccttaatcaacctcagagtctactggtggagacagtggttgtcgcccgtgcactgcggggaaggggctttgggcgccgactgatggagggactggaagtgtttgctcgcgcccgtgggtttcgcaagctccatttaactacacacgaccaggtgcacttttacacacatctgggataccaactcggcgagcctgtccagggcctagtatttacctctcgtaggctgcctgccaccctgcttaatgcattccccactgctccatctcctaggccaccaaggaaggcccccaatctcacagcgcaagctgcccctagaggcccaaaggggcccccgctcccccctcctccaccgctgccagaatgtctcacgatttctccccccgtaccttccggtcccccctcaaaatcattgcttgaaacccaataccagaacgtgcgtggtcggcccattttttggatggagaaggatatctag

SEQ ID NO: 16209 - DNA, 861 bp, synthetic construct
  misc_feature 1..861: note = Description of Artificial Sequence: Synthetic coding sequence
  source 1..861: mol_type = other DNA
atggagctaatactgtctacttctccagccgaattgaccctggacccggcatgccagcctaagctcccccttgacagcacatgccagccagaaatgaccttcaaccccggaccaactgagctgacccttgatcccgagcaccagccagaagaaacccccgctccttccctggctgagctgactctggagcccgttcacagaaggcctgagctattggatgcatgtgccgacctaatcaatgatcagtggccaaggtcacgcactagccgtctccattccctggggcaaagtagtgatgcttttcctttatgcctgatgctgctgtctccgcaccccactctggaggcagcccccgttgtcgtggggcatgcgcgactttccagagttctgaatcagccacaaagcctcctagtggaaactgtggtcgtcgctcgcgccctacgggggcgcggcttcggacgccgactgatggaaggactcgaagtgtttgcccgagctagaggatttagaaaactccacctgacgactcacgaccaggtgcacttctatacccacctaggctaccagctaggcgagccagtgcagggcctcgtctttaccagtaggcgactccctgcgactctgcttaatgcgttcccaaccgctccctctccccggcctcctcgaaaggcgcctaatctcacagctcaggcagccccacgggggcccaaaggccctccactacccccccctccacctttgcctgaatgcctgacaatcagcccccctgtcccttctgggcctccctctaagagcctgcttgaaacacaataccagaatgtcagaggcaggcctatcttctggatggagaaggatatttag

SEQ ID NO: 16210 - DNA, 261 bp, synthetic construct
  misc_feature 1..261: note = Description of Artificial Sequence: Synthetic coding sequence
  source 1..261: mol_type = other DNA
atggaattgattctgtccacatcgccagccgagctgaccttggacccagcctgtcagcccaagctcccactcgatagcacatgtcagcccgaaatgactttcaatccagggccaaccgaactcacgctcgacccagaacaccagccagaggagacacctgcacctagcctggcagagcttactttggagccagttcaccgcagaccggagctgctagatgcatgtgctgacctcataaacgaccagtggcccagatcctag

SEQ ID NO: 16211 - DNA, 30 bp, synthetic construct
  misc_feature 1..30: note = Description of Artificial Sequence: Synthetic coding sequence
  source 1..30: mol_type = other DNA
atggagctgattctcagcacctccccttag

SEQ ID NO: 16212 - DNA, 987 bp, synthetic construct
  misc_feature 1..987: note = Description of Artificial Sequence: Synthetic coding sequence
  source 1..987: mol_type = other DNA
atggctgagctccaggaggtgcagatcaccgaggagaagcctctgctgccaggccagactcccgaggccgcaaaaacacactctgtggagactccatatggctctgtgaccttcacggtctacggaacgcctaagcccaaacggcctgccatactcacttaccatgatgtgggactcaattacaagtcatgttttcagcccctttttcagttcgaggacatgcaggaaattatccagaatttcgtgcgcgtgcatgtggacgcaccgggtatggaagaaggcgctccggtgttccccttggggtatcagtacccatccctcgatcagttagccgacatgatcccatgcgtactgcaatacctgaatttctctactatcatcggggtcggggttggggccggcgcctatattctcgctcggtatgccttaacagggctcaccagctcaatacctgagatgatccttggtcacctgttctcgcaggaggagttgtctggcaatagtgaattaatccagaagtaccgcaacattatcacacacgcccctaacctggataatatcgaactgtactggaacagttataacaatagaagggacctaaacttcgagaggggtggggatattacgctgaggtgcccagtaatgctcgtggtgggcgaccaggccccacatgaagatgccgtcgtcgagtgcaactcaaagctcgatccgactcagacatcctttttgaaaatggccgatagcggtggtcaaccacaattgactcagccagggaaacttactgaggcctttaagtactttctgcagggcatgggctacatggcctcctcttgtatgacaagactatcccgctccaggaccgcttccctgacttcagctgcctctgtggatgggaaccgatctcggagccgcacgttgtcccagagttctgagagcggcacactgtcaagtggccctccaggacatacaatggaggtgagttgctag

SEQ ID NO: 16213 - DNA, 1116 bp, synthetic construct
  misc_feature 1..1116: note = Description of Artificial Sequence: Synthetic coding sequence
  source 1..1116: mol_type = other DNA
atggctgagttgcaggaagttcagattactgaggagaaacccctgctgcccgggcagacgcccgaggcggccaaggaggctgaactagctgcgcgcattttgttagatcagggacagactcactcagtagagacaccttatggaagcgtgacctttactgtatatggaacacctaagccgaaacgcccagcgatcttgacttaccacgacgtgggcctcaattataagagttgctttcagccactttttcagttcgaagacatgcaggaaatcattcagaattttgtgagggtgcacgtggacgctcccggcatggaagagggcgctccggtgttcccactcgggtatcagtatccttccctggaccagctcgcagatatgatcccatgtgttttacagtacctgaacttctcaacaattatcggagttggagtgggtgcaggtgcatacatcttagccagatatgccctcaaccatccggatacggtcgaggggttggttttgataaacatcgaccccaatgccaaaggttggatggactgggccgcacataaactgaccgggctgacgagctcaatccccgaaatgatccttggtcatctcttctcccaggaggaattgtctggcaattccgaactgatccaaaagtatcgcaatattattacccacgcacccaaccttgacaatatcgaactgtattggaatagttataacaatcgccgagatctgaactttgaacgtgggggcgacattacgttaaggtgtccagtgatgctggtggtgggagaccaggccccacatgaagatgcagttgttgaatgcaattctaagctcgatcccactcagacttccttcctcaaaatggccgacagcggggggcaaccacagttgacacagcctggcaaactaacagaagcttttaagtattttttacagggcatggggtacatggccagcagttgcatgacgagactatctcggtctcgaactgcctcccttacatccgccgcatcagtagacgggaaccggagccgtagccgaacactcagtcagtctagcgaatccgggactctgtctagtggcccccctgggcacaccatggaggtgtcctgctag

SEQ ID NO: 16214 - DNA, 1074 bp, synthetic construct
  misc_feature 1..1074: note = Description of Artificial Sequence: Synthetic coding sequence
  source 1..1074: mol_type = other DNA
atggcggagctccaggaggtgcagatcactgaagagaaacctctcctgcccggacagacacctgaagccgccaaaactcattccgttgagaccccatacggtagtgtcacgtttactgtttatggaaccccgaaaccaaaaaggcctgctatcctaacttaccatgatgtgggcctgaactacaaatcctgctttcagcccctctttcagtttgaggatatgcaagaaatcattcagaatttcgttcgcgttcacgtggatgctccgggtatggaggagggcgcccccgtgtttcccctgggctaccagtaccccagcctggaccagctggcagatatgatcccatgtgtgctgcagtatttgaacttctctactatcatcggtgtgggcgtgggcgccggggcatatatcctagctagatacgctctcaaccatccggacactgtggagggcttagtactgataaacatcgaccctaatgctaaaggatggatggattgggctgcacacaaattgacagggctgacaagcagtattccggagatgatcttgggtcacctgttttcacaagaagagctcagcggcaatagtgagttaatccagaagtaccgaaacatcattacacacgcccccaatcttgacaatattgaactttactggaacagttataacaaccgtcgcgacctgaattttgaaagggggggtgacataaccctcagatgcccagtgatgttagttgtgggcgatcaggcccctcacgaagatgctgtagttgagtgcaattctaagctggatcccactcagacctcttttttaaagatggccgactccggcggccagcctcagctgacgcagcctggcaaactcactgaagccttcaagtatttcctgcaggggatgggatacatggcttcatcatgcatgacaaggttgtccaggtccagaacagcctccctgacatcagctgccagtgtagacggtaatagaagcaggagtaggaccctgtcccaatcatcggagtcgggtacactcagctccggcccaccaggacacacaatggaggtgtcttgttag

SEQ ID NO: 16215 - DNA, 1074 bp, synthetic construct
  misc_feature 1..1074: note = Description of Artificial Sequence: Synthetic coding sequence
  source 1..1074: mol_type = other DNA
atggctgagcttcaagaggtgcagatcaccgaggagaaacctttactcccaggccaaaccccagaagctgcaaagactcactccgtggagactccttatgggagcgtgacctttacagtctatggcactccgaaaccaaagaggccagccatcctcacgtaccatgatgtcggcctgaattataagtcatgttttcaacctctgtttcaattcgaggacatgcaagagattatccaaaattttgtccgggtacatgtagatgcacctggcatggaggagggagcccccgtcttccctctgggatatcagtacccaagtttagaccagctcgcagacatgattccttgcgtgttgcagtaccttaattttagcaccatcatcggagtgggcgtgggcgctggggcttatattctggcgaggtacgctctcaaccatccagacaccgtggaagggttagtgctgattaacattgatcctaatgcaaagggttggatggactgggccgctcataaactgaccggcttgacctcaagtatacctgaaatgatattgggacacctctttagtcaggaggaactgtctgggaattctgagctgatacaaaaatatcgcaacattattacgcatgcaccaaatcttgataatattgagctctactggaactcctataacaaccggagagaccttaatttcgagagaggaggcgatattaccctcaggtgccctgtaatgctcgtggttggtgatcaggcccctcatgaggatgctgtcgtggaatgcaactctaagttggatcctacgcagacttctttcctgaagatggccgattctggtggccagccacagcttacacagcccggtaaactgaccgaagccttcaaatattttctgcagggcatggggtacatggcctcttcgtgcatgactcgactaagcaggagccggacggcgtctttgacctccgcggcctccgtcgacggaaacagaagcagaagcagaacactgtcccaatcttccgagtccggaactctgtcttctggcccccctgggcatacaatggaagtaagctgttag

SEQ ID NO: 16216 - DNA, 1026 bp, synthetic construct
  misc_feature 1..1026: note = Description of Artificial Sequence: Synthetic coding sequence
  source 1..1026: mol_type = other DNA
atggccgaactacaggaagtgcagatcactgaggaaaagcccctgctcccaggccagacccccgaggcagctaaaacgcatagcgtcgagacgccctacggatctgtgacttttactgtctatggaacgcctaaacctaagagacccgcgatactcacctatcatgacgtaggcctcaactacaagtcctgtttccaacctctcttccagtttgaggacatgcaggaaatcatccagaattttgtccgtgtgcacgtcgatgctcccggaatggaggaaggggctccggtcttcccgctgggctaccagtacccaagcctcgaccagctcgctgacatgattccatgcgtgttacaatatctgaacttcagtacaattatcggtgtcggcgttggtgcaggtgcatacatccttgcacgatacgccctgaaccatcccgacacagtggaaggactggtgctcatcaacatcgacccaaacgccaaagggtggatggattgggccgctcacaaacttacggggctgacgtcctcaatccccgagatgatcctcggccacctgttttcgcaggaggagctgagcggaaattcagagctgatccaaaagtaccgaaacattattacacatgccccgaatctcgacaatatcgagctgtattggaactcttacaataatagacgagatctgaactttgagcggggtggggacattacactgaggtgcccagtcatgctcgtggtcggggatcaggctccccacgaggatgccgtgatggctgactcggggggacaacctcagttgacacaacctggaaagctcaccgaggcctttaagtacttcctgcaggggatgggctatatggcatcctcctgcatgacaagattatctagaagccggacagccagccttactagcgccgcctcagtagatgggaaccgatcccgcagtaggactcttagccagtccagtgagtccgggacgctgtcgagtggaccacctggccacaccatggaagtgtcctgttag

SEQ ID NO: 16217 - DNA, 1083 bp, synthetic construct
  misc_feature 1..1083: note = Description of Artificial Sequence: Synthetic coding sequence
  source 1..1083: mol_type = other DNA
atggcagagctccaggaggtgcaaatcaccgaagagaagcccctactcccgggccagacccctgaggcagccaaggaggcagagctcgcagccagaatcctcctcgaccagggacagacacactccgtcgaaaccccgtatggatccgtgacgttcaccgtttatggtactcctaaacctaaaagacctgccatcctcacttaccatgatgtggggttgaattataagtcttgttttcaaccactttttcagttcgaggatatgcaggaaattatacaaaatttcgttcgggtccacgtggacgcccctgggatggaagagggagctccagtctttccacttggctaccagtacccgagcttggatcagctcgctgacatgataccctgtgtgctgcagtatctgaacttctccaccatcattggcgtcggcgtaggggcaggtgcttacatactggcccgttatgccttgaaccaccctgacacagttgagggattagtgttaattaacattgacccaaatgcaaagggatggatggactgggcagctcacaagctgacaggcctcaccagtagcatccctgaaatgatcctgggacacttattctcacaagaagagctgagcggcaactctgaactgattcagaagtaccggaacataatcactcacgcgcctaatctcgacaatatagaactgtactggaactcctacaataatcgcagggacctgaacttcgaacgaggtggggatattactctgcgatgcccggttatgctcgtggtggaatgcaacagcaaactggacccaacacagacctccttcttaaaaatggccgattctggggggcagcctcagctaactcagcctggcaagttgacagaggccttcaagtatttcctgcaggggatggggtacatggccagctcatgcatgacaagactatctagatcccgcacggcatctctcacatctgccgctagcgttgacggcaatagatcccggtcaagaacactttctcagtcatccgagtccggcacgttgagcagtggacctcctggccacacaatggaagtttcttgttag

SEQ ID NO: 16218 - DNA, 1116 bp, synthetic construct
  misc_feature 1..1116: note = Description of Artificial Sequence: Synthetic coding sequence
  source 1..1116: mol_type = other DNA
atggcagaactccaggaggtacaaatcactgaggagaagcctctgctccccggccagacaccagaagcagccaaagaggccgagcttgccgcccgcatactcctggaccaaggccagactcactctgtggagaccccttatggatctgtcacattcacagtgtacggcacacccaagcctaaacgcccggctattcttacctatcatgacgtgggcctcaattataaatcatgttttcagcccctgtttcagttcgaggacatgcaggagattatccagaactttgtgcgggttcatgtggacgcccctggcatggaggagggagcccctgtgttcccgctaggctatcaatacccttcgctggatcagctcgctgatatgatcccttgtgtgctgcaatacctaaacttctcaactataattggagtgggagtgggagcgggggcttacattttggcaaggtacgccctgaatcatccagatactgtcgaggggctggtgctaattaacatagatccaaatgccaaggggtggatggactgggcagcccataagcttactggccttacctctagcattcccgaaatgatcctgggacatctgttcagccaagaggaattatccggaaatagtgaactcattcagaagtaccggaacatcattacccacgctcccaatctggacaacatcgagctctattggaactcatacaacaaccgcagggatctgaacttcgagaggggcggggatatcaccttgcgatgtcccgtcatgcttgtggtcggagatcaggcgcctcacgaggatgcggtcgtggaatgtaatagcaaactcgaccccacccaaacctcttttctgaagatggccgatagtggtgggcagccgcagcttactcaacctggtaaactgaccgaagcattcaagtactttctgcaaggtatggggtatatggcttcaagctgtatgaccaggctcagtaggagcagaactgcatctctcactagcgctgcttctgtggacggcaataggtcacgttctcgtaccctgtcacagtcttcagagtcaggcactttgtccagcggaccaccaggacatactatggaagtttcctgttag

SEQ ID NO: 16219 - DNA, 1116 bp, synthetic construct
  misc_feature 1..1116: note = Description of Artificial Sequence: Synthetic coding sequence
  source 1..1116: mol_type = other DNA
atggccgagctccaagaagtccagattacggaggagaagcccttactgccggggcagactcccgaggccgcaaaagaggccgagctggctgctagaattttgctggatcaggggcagacccacagtgtggagaccccttatggtagcgttacgtttaccgtgtacggtactccaaaacctaagcgtcctgcaatcctgacctatcatgatgtgggcctgaactacaagagctgctttcaacctcttttccaattcgaagacatgcaagaaatcatccaaaacttcgtgagggtgcacgttgacgccccaggcatggaagaaggtgcaccggtatttccgttgggctatcaatacccatctctagatcagttggctgacatgatcccctgcgtgctccagtatctgaattttagcacaatcatcggggtgggcgtgggcgcaggagcttatatactggcacggtatgcactaaatcatcctgatactgtagagggcctggtactgattaatatcgacccgaacgccaagggatggatggactgggcagcgcataagcttacaggactgacttcctccatacccgaaatgatattgggccatcttttcagccaggaagagctgtcgggtaactccgagctcatccaaaagtaccgaaatattatcacccatgctccaaatctggataacatcgagctttactggaactcatacaacaatcggagggatttaaactttgaacgaggcggcgacatcacgttacggtgcccagtcatgctggtggtcggcgaccaggcgcctcacgaagacgcggtagtggagtgcaattctaaactggatccaacccagacctcctttctcaagatggccgacagcggaggccaacctcagctgactcagccgggcaaactaacagaagccttcaagtacttcctgcagggcatgggctacatggcctcctcctgcatgacccggttgagcagaagtcggaccgcttcgctcacaagtgccgccagcgtagacggtaacagatctaggagtaggaccctcagtcagagctccgagtcaggaacgctgtcttccggcccccccgggcacaccatggaagtgtcctgctag

SEQ ID NO: 16220 - DNA, 987 bp, synthetic construct
  misc_feature 1..987: note = Description of Artificial Sequence: Synthetic coding sequence
  source 1..987: mol_type = other DNA
atggccgagctgcaggaagtccagatcactgaggaaaagcctttgttacctggccagactccggaggcggcaaaaacccactctgtagagacaccttacggctcagtgacatttaccgtgtacgggacccccaaacctaaaaggccagcaatacttacatatcacgatgtggggctcaattataaatcatgctttcagccactgtttcagtttgaagacatgcaggaaattatccaaaacttcgtccgcgttcacgtcgatgcaccaggcatggaagaaggggctccggtgttcccacttggataccagtatcccagcctcgaccagctcgcagatatgattccatgcgtcctgcagtaccttaattttagcacgattatcggtgtgggcgttggcgccggcgcctacatcctagcccgctatgctcttacggggctcacatcctctattcccgagatgattctggggcacttgttttcccaagaagagttatctggaaatagcgaactgattcaaaagtataggaatataatcactcatgcccccaacctggacaacattgagctgtattggaattcgtacaacaaccgtagggatttaaattttgagaggggtggtgatatcacactgcgctgtcccgtaatgctggtcgttggcgaccaagccccgcacgaagacgccgtcgttgaatgtaacagcaaattagacccaacccaaacctcatttctgaaaatggccgacagcggcggacagccacaacttactcagccaggaaaactgacagaggctttcaaatatttcctccagggaatggggtacatggcgtcttcatgcatgactaggctttctaggtcacggaccgcgagcctcacctcagccgcaagtgtggacggaaatagaagcagaagtcgcacgctgtctcagtcgagcgagtccggcacgctctcatcaggcccgcccgggcacactatggaggtgagctgttag

SEQ ID NO: 16221 - DNA, 1026 bp, synthetic construct
  misc_feature 1..1026: note = Description of Artificial Sequence: Synthetic coding sequence
  source 1..1026: mol_type = other DNA
atggccgagttgcaggaagtgcaaataacagaggagaaacccttattgcccgggcagacaccggaagcagcaaaaacgcattccgtagagaccccgtatggatctgtcacctttactgtctacggaacccctaagccaaagagacctgctattctaacctatcatgatgttggactgaactacaagagctgttttcagcccttatttcagttcgaggatatgcaggaaatcattcagaacttcgtgcgcgtgcatgtcgatgctccagggatggaagagggtgccccagtgttccctctgggatatcaatatccatcccttgaccaattagccgatatgatcccctgcgttttgcaatatctcaattttagcaccatcattggcgtgggggtgggggccggcgcatatattctggcgcggtatgctctgaaccatcccgataccgtggagggattagtgctgataaacattgatcctaatgcgaaaggttggatggactgggctgcacataagctgacaggcctaacaagttccatccccgagatgatcctgggccaccttttctcccaggaggagttaagcgggaactccgaactaattcagaagtacaggaacatcattacgcacgctcctaatctggacaatatcgagctgtactggaacagttataataaccgcagggacctgaatttcgaacgtggcggggatattactctgagatgccccgtgatgctagtggtaggggaccaggctccacacgaagacgccgtcatggcagacagcggcggccagccccaactgacacagccaggcaagctgaccgaagcattcaagtatttcctgcaggggatgggttacatggcatcctcatgcatgactcgcttgtcaaggtcccgtaccgcttccctcacatctgccgcctccgtcgatggcaaccgtagcaggagccggacactctcacaatcatccgagagcggcactctgagctccggcccacctggtcataccatggaagtgtcatgctag

SEQ ID NO: 16222 - DNA, 1116 bp, synthetic construct
  misc_feature 1..1116: note = Description of Artificial Sequence: Synthetic coding sequence
  source 1..1116: mol_type = other DNA
atggccgagttacaagaggtccagattaccgaagagaaacctcttctcccaggccagacacccgaagcagcaaaggaggccgagttggctgccaggattcttcttgatcagggccaaacccattccgtagagacaccctacgggtcagtgaccttcacagtttacgggactccgaagccgaaaaggcctgctatcttgacctatcacgatgttggcctcaattacaagtcctgctttcagccgttgtttcaatttgaggacatgcaagagatcattcagaattttgtacgggtccacgttgatgcgccaggaatggaagagggggctccagtcttcccactggggtaccagtatccttcactggatcagctagccgacatgatcccttgcgtgctgcaatacctaaatttctccaccattattggcgtcggcgtcggggccggcgcttacatcttagctcgttacgccctgaatcatccggacacagtggaggggttggtgcttatcaatattgatccgaatgccaaggggtggatggactgggcagcccataagttaactggcctgacaagcagcattcctgaaatgattctcgggcatctctttagtcaggaggaactttctgggaatagtgagcttatccagaaataccgaaacattataacgcatgcacccaacctcgacaacattgaactttactggaactcctacaataaccgcagggatttaaatttcgagcgtggcggcgatatcaccctgaggtgcccagtcatgctcgttgttggcgaccaggctcctcacgaggacgcggtggtcgaatgtaattcaaaacttgaccctactcaaacatcgtttctgaaaatggccgactctggtggacagcctcagctgacccagcccggcaagctcactgaagcctttaaatattttctgcagggcatggggtatatggctagtagctgtatgacaagactttctcgctccaggaccgcctcactgacatccgcagcttccgtcgatggcaacagatcccgatctagaacactgtcgcagagctccgaatcaggaacattgtcgagcggacctccaggccataccatggaggtgagctgctag

SEQ ID NO: 16223 - DNA, 1104 bp, synthetic construct
  misc_feature 1..1104: note = Description of Artificial Sequence: Synthetic coding sequence
  source 1..1104: mol_type = other DNA
atggagaatggggggagcatgcaagccacaatggcagagcttcaagaagtgcagattactgaggagaagcccttactgccgggacagacaccagaagccgcaaagacacattcagtggaaaccccctatggctccgtcaccttcactgtgtatggcactcccaaaccaaaacgacccgctattctcacgtatcatgatgtgggtcttaattataagtcctgcttccagccactatttcaattcgaggacatgcaggagattattcagaactttgtgcgagttcacgtggacgctccgggcatggaggagggggcacccgtttttcccctgggatatcagtacccctctttggatcagctagctgatatgatcccctgcgtactccaatacctcaacttctccaccatcatcggagtcggtgtgggcgccggtgcttacatcctcgcgaggtatgccttaaaccaccctgacaccgtcgaaggacttgtgctcattaatatagatcccaatgcaaaagggtggatggactgggccgcccataagcttacggggctcacatcatccattcctgagatgatcttgggtcacctcttctctcaggaagagctgtctggaaattctgagctcatccagaaataccggaatatcatcacccatgcccctaatttggataatattgagctgtactggaactcatataataatcgacgagatctgaactttgagcgcggaggcgacattacattgagatgtcccgttatgctggttgtgggtgatcaggccccgcatgaggatgctgtggtggaatgcaattcgaagctagaccctactcaaaccagcttcttgaaaatggccgatagtggcggccagccccagttaacgcagccaggcaaactgaccgaagcctttaaatatttcctccagggcatgggctacatggccagctcttgcatgacccgcctctctaggtcaagaacagcatctctcacaagtgcggccagtgtggatggaaacaggtcccgctctagaacgctcagccagagctcagagagtggaacactttctagtggcccacccgggcacactatggaagtgtcgtgttag

SEQ ID NO: 16224 - DNA, 504 bp, synthetic construct
  misc_feature 1..504: note = Description of Artificial Sequence: Synthetic coding sequence
  source 1..504: mol_type = other DNA
atggccgaactgcaggaagtccaaattacggaggagaagcctctgctccctggtcagactcctgaagcagccaagacacatagtgtggagacaccatatggatctgtgacatttaccgtctatgggaccccgaagccaaagcgccccgcaatcctgacttatcatgacgtcgggctgaactacaagagctgcttccagccactgttccagtttgaagacatgcaggagattattcagaacttcgtgagagtgcatgttgatgccccaggcatggaagaaggagcccctgttttcccactcgggtatcagtatccttctctcgatcagctagctgacatgatcccctgtgtgttgcagtacttgaatttcagcacaatcataggtgtaggggtcggagccggagcatacatactcgcacgctacgctctcaatcatccagatacagtggaaggccttgtgctgatcaatatcgatccgaatgccaagggatggatggactggtag

SEQ ID NO: 16225 - DNA, 1074 bp, synthetic construct
  misc_feature 1..1074: note = Description of Artificial Sequence: Synthetic coding sequence
  source 1..1074: mol_type = other DNA
atggccgagctccaggaggtgcagataaccgaagaaaagccactgctaccagggcagactccagaggccgccaaaacccattctgtggagacgccctatggctccgttacctttaccgtctacggcactcctaaacctaaaagacccgccatcctgacatatcacgacgtgggccttaattataagtcttgttttcaaccactgttccagttcgaggacatgcaggagattatccagaacttcgtcagggtgcacgtggacgcgccaggaatggaggaaggagcccctgtcttcccacttggctaccaatacccttcactggatcagctggctgatatgatcccttgtgttctccagtacctgaatttctccacaattataggggtgggcgtcggagcaggggcttacattcttgccagatacgctcttaatcacccggataccgtggaggggctggtcctaatcaatattgaccccaatgccaaaggatggatggactgggcagctcataagttgactgggctcaccagctcaatcccagaaatgatcttgggacacttattttcccaggaagaattgagtggaaactctgagcttatccagaagtaccgaaatattatcacacatgctcctaacttagataacattgagctgtattggaacagttacaataatagacgcgatctgaacttcgagagggggggggatatcactcttcgctgtcccgtgatgctggtcgtcggggaccaggcacctcacgaggatgctgtcgtagagtgtaactctaagctggatcctacccagacaagctttctcaaaatggccgatagtggtggccagcctcaactgactcaacccggaaagctcaccgaggccttcaagtatttcctgcaagggatgggttatatggcttccagttgcatgactaggttgagcagatcccgaacagccagtctgaccagcgccgcctcagtcgatggaaacaggtcacgctcacgcacactctctcagtcatcagagtcaggaacactgagttccgggccgccaggacataccatggaggttagttgctag

SEQ ID NO: 16226 - DNA, 522 bp, synthetic construct
  misc_feature 1..522: note = Description of Artificial Sequence: Synthetic coding sequence
  source 1..522: mol_type = other DNA
atggcagagcttcaggaggtacagattaccgaggagaagcccttactccccggacagacgcccgaggctgccaaagaggccgagctggccgcgcggattcttctagaccagggacagacgcattccgtagaaactccctacggcagtgtaacattcactgtgtatggcacgcccaagcccaagagacccgctatcttaacctaccacgacgtgggtcttaattacaaaagctgttttcaaccactattccagttcgaagacatgcaggaaattatccaaaactttgtgcgcgtgcacgttgatgcccctggcatggaggagggtgcccccgtgtttcccctcggctatcaatacccttcgctggaccagctggccgatatgattccatgtgtcctgcagtatcttaatttctccaccattatcggcgtaggcgtgggggccggcgcatatatactcgcccggtatgcccttaaccatccagatactgtggagggccttgtactcatcaatatcgatccctag

SEQ ID NO: 16227 - DNA, 759 bp, synthetic construct
  misc_feature 1..759: note = Description of Artificial Sequence: Synthetic coding sequence
  source 1..759: mol_type = other DNA
atggcagaactgcaagaggttcagataaccgaagagaaacctcttctgcctggccaaactccggaggccgctaaagaagcagagttggccgccaggattctgctggaccaaggccaaacccactccgtggagacaccctacggcagcgttacattcacagtctatggaacacccaagccaaagagacccgccattcttacctaccatgacgtcggactgaactacaaaagttgctttcagcctctgttccagtttgaagatatgcaagaaatcattcagaacttcgtacgggtacatgtagatgccccaggtatggaagagggagcaccagtctttcctttgggctaccaatatccatcccttgaccagttggccgacatgatcccttgcgtgctgcagtacctgaacttttcaacaatcataggagtgggagtgggagcaggcgcgtacattctggcacgttacgcactgaaccacccagataccgtcgagggccttgtattaatcaatatcgaccccaacgccaaaggatggatggattgggcagcacacaagctaacagggctgacaagtagtatccccgagatgattctgggacatcttttttctcaggaggagctcagcgggaactcagaattgattcagaaatatagaaatatcattacccacgcccccaatcttgataatattgagctttactggaattcttacaataatcggcgggacttgaatttcgagcgtggaggcgacattacctag

SEQ ID NO: 16228 - DNA, 525 bp, synthetic construct
  misc_feature 1..525: note = Description of Artificial Sequence: Synthetic coding sequence
  source 1..525: mol_type = other DNA
atggcagagctacaggaagtccaaatcacggaagaaaaacctctgttaccgggccaaactccggaagctgcaaagacacactccgtggagacgccctacggcagcgtaaccttcaccgtgtacggcacaccaaaaccgaagaggcctgccatcctgacctaccacgatgttggactgaactataagtcctgttttcagcctctgttccagtttgaggatatgcaagagatcatccagaattttgttcgcgtacacgtggatgctccaggtatggaagagggagcccctgtgttccctctgggatatcagtaccccagccttgatcagctggctgatatgattccatgcgtactccagtatctgaacttcagcactatcattggcgtgggtgttggtgctggtgcctacatcctggcccggtatgccctcaaccacccagatacagtggaggggcttgttcttattaatattgaccccaacgcgaaagggtggatggactgggcggcccataagcttacggggtag

SEQ ID NO: 16229 - DNA, 1074 bp, synthetic construct
  misc_feature 1..1074: note = Description of Artificial Sequence: Synthetic coding sequence
  source 1..1074: mol_type = other DNA
atggctgagctccaggaggtgcagattaccgaagaaaaacccctgctgcctggccagacacctgaggccgcgaaaactcactccgtggaaactccctacggctcagtgacttttacagtttatggcacgccaaaacccaaaaggccggcgattctcacgtaccacgacgttgggttgaattacaaatcttgtttccagcccctctttcagtttgaggacatgcaggagattatacagaatttcgtccgagtgcatgtcgatgctccaggtatggaagagggagcacccgttttccccctgggatatcagtaccctagccttgatcagctcgccgatatgattccttgcgtgctgcagtatttgaactttagtaccatcatcggagttggcgtgggggcgggggcttacattctggccaggtatgccctgaatcaccccgatactgtggaggggctagttctcattaatatcgacccaaacgctaaagggtggatggactgggctgcccataaacttacgggcctcacctcctccatcccagaaatgatcctcggccacctgttctcacaagaggagttgtccggcaacagtgaacttatacagaaatatcgaaatattatcacgcatgcaccaaaccttgataacattgagctctactggaactcatacaataacaggcgcgacttaaattttgaacgcggcggagatatcacactgcgatgtcccgtgatgttggtggtcggcgatcaggcacctcacgaagacgcagtggtagaatgtaattctaaactagatcctacccagacaagctttctgaaaatggctgattccggcggtcaacctcagcttacgcagcccggcaagctcaccgaagctttcaagtacttcctccagggaatgggatatatggcctcttcttgtatgaccaggctcagccgcagcagaacggccagcctcacttcagccgcctctgtagatgggaatagatcgcgctcccgaacactgtcccagtcttctgagagcggcactttgagttccgggcctcctgggcacacaatggaagtgtcctgttag

SEQ ID NO: 16230 - DNA, 450 bp, synthetic construct
  misc_feature 1..450: note = Description of Artificial Sequence: Synthetic coding sequence
  source 1..450: mol_type = other DNA
atggccgaattgcaggaggtgcagattaccgaggagaaacccctcttacccggacagactccagaagccgcgaaggaggcggaactggctgccagaattctgttggaccaagggcagacacattcggtcgagaccccctatggctccgtaacctttactgtctacggcacgccaaaacctaaaagacccgctatcctcacttatcacgacgtgggactcaactataaaagttgcttccaaccgctctttcaatttgaggatatgcaagagattatacagaactttgtgagagtacacgtggacgcaccaggaatggaagaaggcgcgccggtgtttcccttaggatatcagtaccctagtttagatcagctggcagatatgattccatgcgtgcttcaatatctaaactttagcaccatcataggtgtcggagttggggccggggcctag

SEQ ID NO: 16231 - DNA, 261 bp, synthetic construct
  misc_feature 1..261: note = Description of Artificial Sequence: Synthetic coding sequence
  source 1..261: mol_type = other DNA
atggctgagttgcaggaagtgcagataactgaggaaaagcctctgctaccgggccaaacacctgaggcagccaaggaagccgagctggctgctaggatcttactggaccaggggcagactcactctgtggaaaccccttatggtagtgtgactttcaccgtgtatgggacacccaaaccaaagaggcctgctattctgacatatcacgatgttggactgaattacaaaagctgctttcagccgctgttccagtttgaatag

SEQ ID NO: 16232 - DNA, 390 bp, synthetic construct
  misc_feature 1..390: note = Description of Artificial Sequence: Synthetic coding sequence
  source 1..390: mol_type = other DNA
atggccgagcttcaggaagtgcagatcacagaggaaaaacccctcctacctggccaaacacctgaagccgccaaggaagccgagctggccgcccggatacttctggaccaaggacaaactcattctgtcgagactccttacggaagtgttaccttcactgtatatgggaccccaaagcctaagaggccggcgatactgacctaccacgacgtcggcctgaactacaaaagctgcttccagcccctgttccagtttgaagatatgcaggagatcattcagaactttgtcagagtccacgtggacgcgccaggtatggaggaaggggctccagtgtttccccttggctaccagtatccttccctggatcagctcgctgacatgatcccttag

SEQ ID NO: 16233 - DNA, 447 bp, synthetic construct
  misc_feature 1..447: note = Description of Artificial Sequence: Synthetic coding sequence
  source 1..447: mol_type = other DNA
atggcagagctccaggaagtgcagatcactgaagaaaagcctctcctgcccggacagacccccgaggcagctaaggaggccgagctagctgccaggatcttgcttgatcagggccagacacattcagttgaaactccctatgggagtgtcacatttactgtatacggtactcctaaaccaaagcggcccgctattctcacctatcacgatgtgggcttaaactataaaagctgttttcaacctttgtttcagttcgaggacatgcaggagattatccaaaacttcgttagggtacacgtggatgcacccggcatggaggagggtgcccctgtgttccccctcggctaccagtatccatctctagaccagcttgcggatatgattccatgcgtcctgcagtatcttaatttttcaactatcataggagtcggagtaggtgccggctag

SEQ ID NO: 16234 - DNA, 405 bp, synthetic construct
  misc_feature 1..405: note = Description of Artificial Sequence: Synthetic coding sequence
  source 1..405: mol_type = other DNA
atggcagagctgcaggaggtgcaaattactgaggaaaaacctcttctgccaggccagacccccgaggcggcaaagacccactctgtggagaccccttacggatctgtgacgttcacagtatacggcacgccgaagcctaaacgtcccgcgatcctgacttaccacgatgtaggtctgaactataagtcgtgctttcagcccctctttcagtttgaagacatgcaggagatcatccaaaattttgttcgagttcatgtcgatgcccccggcatggaggaaggcgccccagtgtttccactcgggtaccaatacccatccttagatcaactagcagatatgattccttgcgtgcttcagtacctgaacttttcaacaattattggggtgggagtgggagccggatag

SEQ ID NO: 16235 - DNA, 327 bp, synthetic construct
  misc_feature 1..327: note = Description of Artificial Sequence: Synthetic coding sequence
  source 1..327: mol_type = other DNA
atggccgaattgcaggaggtccagattacagaggagaaaccccttttacccggtcaaacgcctgaggctgcaaaaacacactcagtcgaaacaccgtatgggtctgtgaccttcacggtttacggaacccccaaacctaaacggccggctatcttgacttaccatgacgtgggactgaactacaaaagctgtttccagccactatttcagttcgaagatatgcaggaaatcatccaaaactttgtgcgtgttcacgtggatgcaccagggatggaggagggagcccctgtcttcccactgggctaccagtatccatccctcgactag

SEQ ID NO: 16236 - DNA, 363 bp, synthetic construct
  misc_feature 1..363: note = Description of Artificial Sequence: Synthetic coding sequence
  source 1..363: mol_type = other DNA
atggctgaactgcaggaagtacagattaccgaagaaaagccgcttctgcccgggcagactcccgaagccgctaaaacacactccgtggagacaccatatgggtctgttacctttaccgtgtatggcactccaaaacccaagagacctgccatactcacttatcacgacgtcggactcaattacaagtcttgtttccagcctctcttccaatttgaagacatgcaggagattatccaaaatttcgtgagggtccacgtggatgctcctggtatggaagagggagctcctgtgtttccattaggctatcaatatccgtctctggatcagctagctgacatgattccctgcgtacttcagtactag

SEQ ID NO: 16237 - DNA, 300 bp, synthetic construct
  misc_feature 1..300: note = Description of Artificial Sequence: Synthetic coding sequence
  source 1..300: mol_type = other DNA
atggcagagttgcaggaggtgcagattaccgaagaaaaaccccttctgcccgggcaaacacctgaagccgccaaggaggccgaactggcggcaagaatactgctcgaccaggggcagacccactctgtggaaactccatacggatctgtgacctttactgtgtatgggactccaaaaccgaaacggccagcaatcctaacataccacgatgtgggactcaactataagtcatgctttcagcctttgttccagtttgaggatatgcaggagatcattcaaaacttcgttagggtgcattag

SEQ ID NO: 16238 - DNA, 279 bp, synthetic construct
  misc_feature 1..279: note = Description of Artificial Sequence: Synthetic coding sequence
  source 1..279: mol_type = other DNA
atggccgaactccaggaagtgcagatcacagaagagaagccactactgcccggccagactcccgaggccgcgaagacacattcagttgaaaccccgtatggatccgtgacatttacagtctacggaacacccaaacccaagcggcctgcaattctgacctatcacgacgtcgggctcaactataaatcttgctttcaaccgttattccaatttgaagacatgcaagaaatcatccagaattttgtgagagtgcacgtggacgcacctgggatggaatag

SEQ ID NO: 16239 - DNA, 462 bp, synthetic construct
  misc_feature 1..462: note = Description of Artificial Sequence: Synthetic coding sequence
  source 1..462: mol_type = other DNA
atggctgagctgcaggaagtgcagatcacagaagaaaaaccattgctgcccgggcagacaccagaggccgctaaaactcactctgtcgagaccccgtacggcagcgtaacgttcaccgtgtacggcacaccaaagcccaaaagacccgcgatcctgacttatcacgatgtcgggctcaattataagagctgttttcagcccctgttccagtttgaagatatgcaggagattattcaaaacttcgtgcgcgtgcacgtggatgcccccggaatggaagagggagcacccgttttccctctcggatatcagtatccatctctggaccagttggctgacatgatcccctgcgttctccagtacctgaatttctctaccatcatcggcgtgggcgtgggtgccggggcctacattctggctcgatacgccttgaatcatcccgacacagttgaaggcctggtgtag

SEQ ID NO: 16240 - DNA, 1074 bp, synthetic construct
  misc_feature 1..1074: note = Description of Artificial Sequence: Synthetic coding sequence
  source 1..1074: mol_type = other DNA
atggccgagctgcaagaagttcagattaccgaggaaaaaccactactacctggtcagactccagaggcagcaaaaacacattcagtggagaccccatatggtagcgtgacatttacagtctacggaactccaaaaccaaaaagaccagcaatcctgacgtatcacgacgttggtctgaactataaatcctgctttcagcccctgtttcaattcgaagatatgcaagagattatccagaacttcgtgagagtgcacgtggatgccccagggatggaggagggagcgccggtatttcccctcggttaccagtacccctccctggatcaactggccgatatgatcccctgcgtgctgcagtatttgaactttagcactatcattggggtaggcgtcggagccggggcatatatcctggccagatatgccttgaaccatccagacaccgtcgagggcttagtcctcatcaacatcgatcctaatgccaagggatggatggactgggcagcacataagttaactggactgaccagtagtataccagagatgatccttggacacctgttctctcaggaagagttgtctggaaacagcgaactaatacagaaatatcggaatattatcactcacgcaccgaacctagacaatatagaactctactggaactcttacaacaatagaagagacctcaacttcgagcggggtggcgacataactctcaggtgcccagtaatgcttgttgttggtgatcaggccccgcacgaggacgccgtggtagagtgcaactccaaactggaccctacgcagacttctttcctcaagatggctgactccgggggtcagccacagctcactcagcccggcaagttaaccgaagcattcaagtactttttacaagggatgggttacatggctagttcatgtatgacaaggctgagcagatctagaaccgccagtctaacgagcgccgcctcagtggacggaaaccgttccaggagcagaactctgagccagtcatccgagtccggcactctgtcatcgggtcctcccgggcacaccatggaggtctcttgttag

SEQ ID NO: 16241 - DNA, 585 bp, synthetic construct
  misc_feature 1..585: note = Description of Artificial Sequence: Synthetic coding sequence
  source 1..585: mol_type = other DNA
atggcagagctgcaggaggtccaaattacagaggagaaacctcttctgcccggtcagacacccgaggctgcaaaagaagccgagttagccgccagaatcctgctggatcagggacaaactcactcggtggagacaccatacggatcagtcaccttcactgtttacggtacccctaaaccaaaacgacccgcaattctcacgtaccatgacgtcggcctgaattataaaagctgcttccagcccctgttccagtttgaagacatgcaggagatcatccagaatttcgttcgcgttcatgttgacgcaccaggaatggaagaaggggcgcccgtatttcctctggggtatcagtatccctccctcgaccagctggctgacatgattccttgtgtgctgcagtatttaaacttttccaccatcatcggcgtcggagtgggcgcaggcgcctatattctggctaggtacgcactgaatcaccccgataccgttgagggcctggtgctgattaatattgaccccaatgccaagggctggatggattgggctgcccacaaactgacaggactgaccagttccatcccatag

SEQ ID NO: 16242 - DNA, 387 bp, synthetic construct
  misc_feature 1..387: note = Description of Artificial Sequence: Synthetic coding sequence
  source 1..387: mol_type = other DNA
atggccgaactgcaggaggtgcagattaccgaagaaaaaccactgttacccgggcagacccctgaagcggcgaagacacactcagtggaaaccccatacggaagcgtgacctttacagtgtacggcacgcctaagcccaaacgccccgccattctgacttatcacgacgtggggttaaattataaatcatgtttccagccactctttcagtttgaagacatgcaggagataatccaaaatttcgtccgggtccacgtagatgcgccaggaatggaggagggcgccccagtctttccactgggttaccaataccccagtctcgaccagctggccgacatgattccttgcgttctgcaatacttgaatttttctacgatcataggatag

SEQ ID NO: 16243 - DNA, 660 bp, synthetic construct
  misc_feature 1..660: note = Description of Artificial Sequence: Synthetic coding sequence
  source 1..660: mol_type = other DNA
atggcagagctgcaggaggtgcagattactgaggagaagccccttttgcccgggcagaccccagaagccgccaaggaggctgagctcgctgcccggatcctgctcgaccaaggacagacccattcagtggagactccttacgggagtgtgacctttaccgtatatgggactcccaaacctaaacgccctgctatcctcacctaccacgacgtggggctgaattacaagagctgtttccagcctctgttccagtttgaggacatgcaggaaatcatccaaaattttgtgcgggtacacgtcgatgcacctggaatggaggagggagccccagtgtttcccttaggataccagtatcctagtcttgaccaacttgccgacatgattccctgcgtcctacagtacctgaacttctctacgatcattggggtcggggttggcgcgggggcatacatcttagcaaggtacgcgctcaatcacccagataccgttgagggattggttctcataaatattgaccctaacgcgaagggctggatggactgggccgctcacaagctgactggtctgacaagctccatcccagagatgattctcggtcacttattttcacaggaggaactttctgggaatagcgaactgattcagaagtatcgtaattag

SEQ ID NO: 16244 - DNA, 666 bp, synthetic construct
  misc_feature 1..666: note = Description of Artificial Sequence: Synthetic coding sequence
  source 1..666: mol_type = other DNA
atggccgagcttcaggaggtgcaaatcacagaagagaaaccgttattgcctggacagactcctgaggcagcaaagacacacagcgttgaaactccttatgggtccgtcacatttaccgtgtacggcactcctaaacccaagaggccagccattctgacttaccatgacgttgggcttaattacaaaagctgcttccaacccctttttcagttcgaagacatgcaagaaattattcagaattttgtgcgcgtgcacgttgacgcgcccgggatggaggagggagcccctgtgtttccactgggttaccagtacccgagtttggaccagctggcagacatgatcccttgcgtattacagtatctgaacttctctactatcatcggcgtcggagtcggcgcaggtgcatacattttagcgcggtatgccctgaaccacccagacacggtggaggggctggttcttattaacattgaccctaacgcgaaggggtggatggattgggcggcccacaaattgacagggctgacatcctccatcccagaaatgatccttggccatctgttcagccaagaagagctgtccggtaactctgagttgatccagaagtaccgaaatataatcacgcatgctccaaatctggataacatcgagctgtattggaactag

SEQ ID NO: 16245 - DNA, 1116 bp, synthetic construct
  misc_feature 1..1116: note = Description of Artificial Sequence: Synthetic coding sequence
  source 1..1116: mol_type = other DNA
atggccgagttgcaggaggtgcagatcacagaggagaaaccgcttctgcccggccaaacacccgaagcggccaaggaggcggagctggccgcgaggatcctattggatcagggccagacccacagcgtggagactccctatggctctgtcacctttacagtctacggtacaccaaagcccaagcgccctgccattctaacctaccacgacgtggggttaaactataagtcttgtttccagcccctgtttcagttcgaggatatgcaggaaataatacagaacttcgtccgtgttcacgtggatgctcccggaatggaagaaggagcccctgtctttcccctgggttatcaatacccttctttggaccagctggctgatatgattccttgtgttctgcagtacttaaacttctccaccatcattggcgttggcgtgggagccggcgcttatatcctagctcgttatgctcttaatcatcccgatacggtggagggactggtccttatcaatatcgatcctaacgccaagggatggatggactgggcagcacacaaactcacagggctcacatccagcatccctgagatgattctaggccatctattctctcaggaggagcttagtggtaactctgagctcatccaaaagtatcgcaacatcattacccatgcgcctaacttggataatatcgaactatactggaacagttacaacaataggagggacctgaatttcgaaagagggggtgatataaccctgcggtgtcccgttatgcttgtcgtaggcgatcaggctccacacgaagatgcagtagtggaatgcaacagtaagctcgaccccacgcagaccagcttcctcaaaatggccgactctggcggacagccacagctcacacaacctggtaagctgacggaggcctttaaatatttcctacagggcatgggatatatggcttcatcctgtatgacgcgactctcacggtcccggaccgcatccctaaccagtgcagcatccgttgacgggaacagaagccgctctcggacgctgagccagtcatctgaaagcggcactctgtcctcagggcctccaggccacactatggaggttagctgttag

SEQ ID NO: 16246 - DNA, 432 bp, synthetic construct
  misc_feature 1..432: note = Description of Artificial Sequence: Synthetic coding sequence
  source 1..432: mol_type = other DNA
atggcagaacttcaagaagttcaaatcaccgaagagaagcccctcctgcctggccagacccctgaagctgctaaaactcatagcgtggaaacaccttacggatccgtgacttttactgtttacggcacacccaagccaaagcgtcctgctatcctgacataccacgatgtcggcctgaattataagagctgtttccaacctctgttccagtttgaagatatgcaggaaatcatccagaacttcgtcagggttcacgtggacgcacctggcatggaggaaggcgctccagtgttccctctcggataccagtatccctcgttagaccagctggctgacatgatcccatgcgttttgcagtaccttaattttagcacaatcattggcgttggggtgggggcaggcgcctacattctggctagatatgccctatag

SEQ ID NO: 16247 - DNA, 483 bp, synthetic construct
  misc_feature 1..483: note = Description of Artificial Sequence: Synthetic coding sequence
  source 1..483: mol_type = other DNA
atggccgagctgcaggaagtacagatcacagaagagaaacccttacttccgggacagacccccgaggccgctaagacacattccgtcgaaacaccatacggaagcgtcaccttcacagtgtatggcactcccaaacctaagaggcctgctattctgacatatcatgacgtcggactgaactacaaaagttgtttccagccactctttcagttcgaagatatgcaggagataatacagaacttcgtcagggtgcatgtggacgcccccggcatggaagagggggcgccagtctttcccttggggtaccagtacccatccctagatcagttagctgatatgatcccttgtgtgctgcaatatctaaatttcagcacaattattggcgttggagtgggcgccggagcctatatcctcgcccggtacgccttgaaccatcccgacacggtggaaggtttagtgctcattaatatagaccccaattag

SEQ ID NO: 16248 - DNA, 426 bp, synthetic construct
  misc_feature 1..426: note = Description of Artificial Sequence: Synthetic coding sequence
  source 1..426: mol_type = other DNA
atggccgagttacaagaagttcagataaccgaagaaaagccgttgttgcccggacagaccccagaggcagccaaggaagccgaactcgccgctagaatcttgcttgaccagggccaaacccactctgtcgaaacaccttacggttcagtgacattcacagtctatggcactccaaaacccaaacggcctgcgattctcacatatcacgacgtgggcctgaactataaatcctgtttccagcccttgttccaattcgaggacatgcaggaaattatccagaacttcgtccgcgtacacgttgacgctcccggcatggaggaaggggctccagtttttcccctggggtatcagtaccccagcctggaccagctcgcggacatgatcccctgcgttctgcagtatctgaatttctcaaccatcatttag

SEQ ID NO: 16249 - DNA, 357 bp, synthetic construct
  misc_feature 1..357: note = Description of Artificial Sequence: Synthetic coding sequence
  source 1..357: mol_type = other DNA
atggccgagctccaggaggtccaaatcaccgaggaaaagcctctgctacctggacagacacccgaggcggctaaggaggccgagctagccgccaggatcctgctggaccagggccagacccattcagttgagactccatacggcagtgtaacctttacggtatacggaactcccaagcctaagaggccagctatcctgacctatcacgacgtgggccttaactataagtcctgtttccaaccactattccagttcgaggatatgcaggagattattcagaactttgtaagggtgcatgtagacgctccgggtatggaggagggggcccctgtatttcccctgggctaccagtactag

SEQ ID NO: 16250 - DNA, 423 bp, synthetic construct
  misc_feature 1..423: note = Description of Artificial Sequence: Synthetic coding sequence
  source 1..423: mol_type = other DNA
atggccgagttgcaggaggtgcagattaccgaggagaagcctctgctacccgggcaaacaccagaggccgctaaggaggctgaactcgcagctcgtatattgctagatcagggtcagacccatagcgtcgaaaccccctatggctctgtgacattcactgtgtacggaactcctaagcccaagcgccccgctatacttacgtaccatgatgtcggcctaaactataagagctgtttccaacctttgtttcagtttgaagacatgcaggaaatcatccagaacttcgtacgggtacatgtcgatgcacccggaatggaagaaggtgcacctgttttcccactcggataccagtaccccagcttggatcagctagcagatatgataccatgcgtccttcaatacttaaattttagtaccatatag

SEQ ID NO: 16251 - DNA, 435 bp, synthetic construct
  misc_feature 1..435: note = Description of Artificial Sequence: Synthetic coding sequence
  source 1..435: mol_type = other DNA
atggctgagctgcaggaggtccagatcaccgaggagaaacccttattgcctggacagactcctgaggctgcgaagacacacagtgttgagaccccgtatgggagcgtcactttcaccgtctacgggactccaaagcccaaacggccagcgattctgacctatcacgacgtgggtctgaactataaatcttgctttcagccgttattccagtttgaggacatgcaggagattatccagaatttcgttcgggtgcacgtggacgcccctggaatggaggagggagctccagtgttccccctcggttatcagtatccgtcactggaccagttggctgatatgatcccttgtgtgctccaatacctgaacttttccacgatcatcggggtgggagtgggcgcaggagcctatatcctggcaagatacgcccttaattag

SEQ ID NO: 16252 - DNA, 462 bp, synthetic construct
  misc_feature 1..462: note = Description of Artificial Sequence: Synthetic coding sequence
  source 1..462: mol_type = other DNA
atggcggaactccaagaggttcaaattactgaggaaaaacccttgctgcctggtcaaacccccgaggcagccaaaacacacagcgtcgagacaccgtacggaagcgtgacatttacagtgtatggcactcccaagcctaagcgccctgcgattctcacataccacgacgtcggactgaactacaagagctgttttcagcccttgttccaatttgaagacatgcaggaaatcatccaaaactttgtccgcgtgcacgtcgacgcgccgggaatggaagagggggcaccagtgttcccgctgggataccaatatcctagtttagatcagctcgctgatatgatcccctgtgtcctgcagtatcttaatttttcaaccattattggagtgggcgtgggcgccggcgcctacatccttgcgagatatgctctgaatcacccggataccgtcgagggcctggtctag

SEQ ID NO: 16253 - DNA, 675 bp, synthetic construct
  misc_feature 1..675: note = Description of Artificial Sequence: Synthetic coding sequence
  source 1..675: mol_type = other DNA
atggctgagttgcaggaagtccagatcacagaggaaaagcccctcctgcctgggcaaacccctgaggctgcgaaaacacattccgtagaaaccccctacggttccgtgacgttcacagtatacggcacacctaagcccaagcgtcctgccattctcacgtaccacgacgtcgggctgaactacaaaagttgttttcaacccttattccagtttgaggacatgcaggagattattcagaacttcgtgagagtgcacgtggatgctcccggaatggaagaaggggcaccagtttttcccttgggatatcaataccctagcctggatcagctcgcagacatgatcccttgtgtgttacagtacttgaatttctctacgatcatcggcgtgggggtgggagcgggcgcgtatatcctggcccgctatgcactgaatcaccccgacaccgtagagggactggtgctgattaatatcgatccaaatgcaaagggctggatggattgggcagcgcacaaactgactggcctgacgagcagcattccagaaatgatcttgggacacctgttcagtcaagaggaactgtctggaaattctgaacttattcaaaaataccggaatataatcacgcatgctcctaatttggacaacatcgagctctattggaactcatataattag

SEQ ID NO: 16254 - DNA, 453 bp, synthetic construct
  misc_feature 1..453: note = Description of Artificial Sequence: Synthetic coding sequence
  source 1..453: mol_type = other DNA
atggccgagctccaggaagttcagataactgaggaaaaaccactgctgcccggtcagacccccgaggccgcaaagacccattccgtggagaccccatatgggagcgtcacctttaccgtgtatggaactcccaagcctaagcgtcccgccattctgacttatcacgatgtcggcctgaattacaaatcctgctttcaaccactctttcagtttgaagacatgcaagagatcattcagaactttgttcgcgtccatgtcgacgcacccgggatggaggaaggtgctcccgtgttcccccttggttatcaatatccgagcctggaccagctggcagatatgatcccctgtgttctccagtatcttaacttttctacgatcataggcgtgggcgtgggcgccggagcctacattctcgcacggtacgccctcaatcacccggacacagtggaatag

SEQ ID NO: 16255 - DNA, 384 bp, synthetic construct
  misc_feature 1..384: note = Description of Artificial Sequence: Synthetic coding sequence
  source 1..384: mol_type = other DNA
atggcggaactccaagaggttcaaattaccgaagagaaacccttgctgcctgggcaaactcccgaggccgccaaaacacatagtgtcgagacgccctacggctcggtgacttttacagtgtatggtacacctaagccaaagcgtcccgccatccttacttaccatgacgttggacttaactacaagtcttgctttcagcccctctttcagtttgaggacatgcaagagatcatccagaatttcgtgcgcgtccacgtcgacgcccctgggatggaggagggggcccccgtgttccccctgggttatcagtatccctctcttgaccagctggcagacatgatcccttgcgtattacagtacttgaatttcagtacgattatctag

SEQ ID NO: 16256 - DNA, 450 bp, synthetic construct
  misc_feature 1..450: note = Description of Artificial Sequence: Synthetic coding sequence
  source 1..450: mol_type = other DNA
atggccgagctccaagaagtgcaaatcacagaagagaagcccttgctacctgggcagactcctgaagccgctaagacccatagcgtggagacgccgtacggctctgttacctttaccgtgtacggcacacctaaacctaaaagacccgctatattgacctaccacgacgtggggcttaactataagtcatgttttcagccactgtttcagtttgaggatatgcaggagatcattcagaacttcgtgagagtgcacgtggacgccccgggtatggaagagggagcccctgtcttccccttaggctatcagtacccaagtttagatcagctggccgacatgatcccgtgcgtgttgcagtacttgaatttctctaccatcatcggagtgggtgtcggggccggcgcctacatactggccagatacgccctgaatcatccggatactgtgtag

SEQ ID NO: 16257 - DNA, 1128 bp, synthetic construct
  misc_feature 1..1128: note = Description of Artificial Sequence: Synthetic coding sequence
  source 1..1128: mol_type = other DNA
atggacgaactccaagatgtgcagctgaccgagatcaagccgctgttaaatgataagaacggtactaggaatttccaggatttcgactgtcaggagcacgatattgagactacacacggggtggtgcacgtgactatccgtggtctacctaagggcaaccggcctgtcatcctgacctaccacgacatcggactgaatcataagagttgttttaatgcgtttttcaatttcgaggatatgcaggagatcacccagcacttcgcagtctgccacgttgacgcgccgggtcagcaagaaggggcccctagctttcctactggatatcagtacccaacaatggatgaattggctgaaatgctaccgcctgttctgacccacctatccctcaaaagtatcattggaatcggcgtaggcgctggagcctacatcctttcaagatttgctcttaaccaccctgaactcgtcgagggcctggttttgatcaatgtggacccttgcgctaaaggatggatcgactgggccgcatcaaaactgtctggcctcaccacgaatgtggtggatattattctagcccaccacttcggtcaggaggaactgcaagccaatctcgatctcatccagacgtaccggatgcacatcgcgcaggatatcaaccaggataatctccagctgttcctcaattcttacaacggccgccgggacctggagattgaaagacccatcctaggccagaacgataataaatccaaaactctcaagtgctcaacccttctggtggttggggacaacagccctgctgtggaagcagtggtggagtgtaacagccggctcaaccctattaacaccacactcctgaaaatggccgactgtggtgggttgccacaagtcgtgcagcccggaaaattaactgaagcttttaaatactttcttcagggcatggggtacatcccttccgcctcaatgacccgcctcgcgcgctcacgcacccactccacaagcagcagcttggggagcggtgaatccccttttagccgcagcgtgacgtccaatcagagtgacggaactcaggagtcttgcgagagccctgacgttcttgacaggcaccaaacaatggaggtgtcatgctag

SEQ ID NO: 16258 - DNA, 1092 bp, synthetic construct
  misc_feature 1..1092: note = Description of Artificial Sequence: Synthetic coding sequence
  source 1..1092: mol_type = other DNA
atggacgagctacaagatgtgcagttgacagagatcaaacctttgttaaatgataaggagcacgatatcgaaaccacccacggagtggtccatgtgacgattcgagggctgccaaagggaaatcgtccagttatcttgacataccacgacattggactgaaccataagtcgtgcttcaatgctttctttaactttgaggatatgcaagaaatcacacagcatttcgctgtgtgtcacgttgatgcccccggacagcaagaaggggctccaagttttccaactggctaccagtaccccacgatggacgaactggctgaaatgctcccccccgtcctcacccacttatctctcaaatctatcatcggtattggggtcggcgctggtgcgtacatcctttcaaggtttgcattaaatcacccggaactggttgaagggctcgtcctcatcaacgtggacccgtgtgctaaaggctggatagattgggcagccagcaagctgtctggattgactacaaatgttgtggatataattctcgctcaccacttcggccaggaggaattacaggccaatctggacctgatccaaacatatcgcatgcatatcgcacaggatatcaaccaagataacctccagctgtttcttaacagctacaatgggcggagagacctcgagatcgaaagacccatacttggacagaacgataacaagtctaagacactgaagtgtagcacgctactggtggtaggtgacaactctcctgcagtggaagctgtggtcgaatgtaatagcaggctcaatccaataaatactacactacttaaaatggctgactgcggagggttgccccaggttgttcagcccggaaaattgacggaagcctttaagtattttttacaaggtatgggctatattccatcagcgtccatgacaaggcttgcgagatcaaggacacattccacgtccagttccttaggatccggagagtctccatttagtagatcagttacgtctaatcaaagcgacggaacccaagagtcctgcgaatcaccggatgttctcgaccgccatcagaccatggaagtgtcttgctag

SEQ ID NO: 16259 - DNA, 843 bp, synthetic construct
  misc_feature 1..843: note = Description of Artificial Sequence: Synthetic coding sequence
  source 1..843: mol_type = other DNA
atggtgcaggagacatcccgtacgctcacagtacgttaccagtatcctacaatggatgagctcgcagaaatgttaccacctgtgttgacccatctatctttgaagtccatcattgggatcggggtcggggcaggagcgtatatcttaagcagatttgctctgaatcaccccgagttagttgaagggctggtgctgatcaatgttgatccatgcgctaagggctggattgactgggcggcgtccaagctgtccggccttacaacaaatgtggtggacatcatacttgcccatcacttcggacaggaggagttgcaagctaaccttgatcttatccaaacgtaccgcatgcacattgcacaagacataaatcaagacaaccttcagctcttcttaaattcttataacgggcgcagggacctcgaaatcgagcgtcccatcctgggacaaaacgacaataagagtaaaactctgaagtgctctaccttgctagtggtgggagataactccccggcggtggaagcggtagtcgaatgtaattctagactgaaccctattaacaccactctgcttaaaatggccgattgtggaggactgcctcaggtcgtgcagccaggcaagctgacagaagcctttaagtatttcctccaaggcatggggtatatcccttctgccagcatgacaaggttggctagatccagaacacattccacatcatccagcctcggttctggtgaatcaccattttcaaggtctgtcaccagcaaccaatccgatggcactcaggagtcttgcgagagcccagatgtgctggatcgtcatcagactatggaagtctcatgctag

SEQ ID NO: 16260 - DNA, 816 bp, synthetic construct
  misc_feature 1..816: note = Description of Artificial Sequence: Synthetic coding sequence
  source 1..816: mol_type = other DNA
atgatccgctaccagtaccctaccatggacgagctggctgaaatgttgcctccggtgctcacacacctaagcctcaagagtatcatcggcattggagtgggtgctggtgcctacatcctaagtcgattcgccctgaaccacccagagcttgtcgagggattagttctgatcaacgtcgacccttgtgcgaagggctggatcgactgggctgcttccaagttgagcgggctgactaccaatgtggtcgacataattcttgcacatcactttggacaggaggaactgcaggcaaacctggatctgatccagacctatagaatgcatatcgcccaggacatcaatcaagataacctgcagctctttctgaattcgtataacgggcgccgcgatttagagatcgaaaggccgatcctcggccagaatgataacaaatcgaagacactgaaatgctccacattgttggtggtgggagacaacagtcccgcagtcgaggctgttgtggaatgtaattctcggctgaacccaatcaacacaaccctactgaagatggccgattgtggcggccttcctcaggtcgtccagcctggcaaactgactgaagcctttaaatacttcctgcaggggatggggtacatcccttccgcttctatgacacgacttgcccgaagcaggacccactctacttcatcttcactcggctcaggagagtccccgtttagccgtagtgtcacctctaaccagagcgacggtacacaggaaagctgtgagtctcctgatgttctagatcgtcatcaaactatggaggtgagttgctag

SEQ ID NO: 16261 - DNA, 420 bp, synthetic construct
  misc_feature 1..420: note = Description of Artificial Sequence: Synthetic coding sequence
  source 1..420: mol_type = other DNA
atgccagaaggcccagagctgcatctggcgagtcagttcgtgaacgaagcatgtagggccctggtcttcgggggatgcgtggagaaaagctctgtctctcggaaccctgaagtgccttttgaaagcagcgcttatcgaatatcagccagcgctagaggcaaggagctgcgacttatcctgtccccactacccggagctcagccacagcaagagccgcgggccccccgtggcgcagccactccttgcccccccgccctgcttcacggcccagcgtggcccccagccagacctatgttcagaggccaccctcccgtacgacccctgggtccatgggggaaggtagccgccgggccgcgggctttgtgtctcgccggggtccctgccgtccagggagaatgcgctacaaagcccagcgggtag

SEQ ID NO: 16262 - DNA, 1173 bp, synthetic construct
  misc_feature 1..1173: note = Description of Artificial Sequence: Synthetic coding sequence
  source 1..1173: mol_type = other DNA
atgcctgagggaccagaattacacttagctagtcaatttgtgaatgaagcctgcagagctcttgtcttcggaggttgcgtggagaaaagcagcgtgtctcggaatcctgaagttcccttcgagagttccgcctaccggatctctgcctcagctcgcggtaaagaactgcgcctaatcttgagccctttgccaggggctcagccacagcaagaaccgctggcattggtgttccgcttcggtatgtcgggatcctttcagctggtgcctcgggaagaactgcctcggcacgctcatctccgcttctacactgctcctccagggccacgtcttgcgctgtgtttcgtggatattcggcgctttggtagatgggatctcggcggaaaatggcaacccgggcgggggccgtgtgttttgcaggagtaccagcagttcagagagaatgtcttgagaaatctcgccgacaaggcatttgatcgtcctatctgcgaagcacttttagaccaacgcttcttcaatggaatcggaaattatctgagagctgagatcctatatagactgaagattccgccctttgagaaagcaaggtccgtcctcgaggccctgcagcaacacagaccttctcccgagttgactttgtcacagaagatcagaacaaaattgcagaaccctgacctgctcgagctgtgtcattccgtgcctaaggaggtggtccaacttggtgggaagggatacggctccgagagtggcgaagaggacttcgcggcctttagagcctggttgaggtgttacggtatgcctggcatgtctagcctgcaggaccggcacggccggacgatctggttccagggggaccctggacctctggctcctaaggggcgcaaatctaggaagaagaaatccaaagccactcagctcagtcctgaagaccgagttgaggatgccctgcctccaagcaaggcaccatcccggacacggcgggctaagcgcgatctgcccaagagaaccgctacacagcggcccgaggggacctccctgcaacaggatcccgaggcaccgactgtgcctaaaaaggggaggcggaaaggcaggcaggcagcaagcgggcactgccggcccaggaaagtgaaagccgatataccaagtctggaacctgagggcacatcagcttcctag

SEQ ID NO: 16263 - DNA, 1173 bp, synthetic construct
  misc_feature 1..1173: note = Description of Artificial Sequence: Synthetic coding sequence
  source 1..1173: mol_type = other DNA
atgcccgagggcccagaacttcatttagcgagccagttcgtaaatgaagcctgtcgcgcactggtctttgggggctgcgtggaaaaatcttcagtgagccgaaaccccgaagtcccttttgaaagctctgcataccggatatctgcgtcagccaggggaaaggaactgaggttgatcttgagtcctttgccaggtgcccagcctcagcaagagcctctggcactggtcttccgctttggcatgtccggaagcttccaactggtgcctcgggaagaacttccccgtcacgcccacctccggttctataccgcccccccggggcctcgacttgcgctgtgcttcgtcgatatacgaaggttcggccggtgggatctgggcgggaaatggcagcctggtaggggaccgtgcgtgctgcaggagtaccaacagttcagggaaaatgtcctccggaatctggctgacaaagcctttgaccggccaatatgcgaggccctcctggaccaacggttcttcaacgggattgggaactacttacgggctgaaattctgtacaggctgaaaatccccccttttgagaaggccaggagcgtcctcgaggcacttcagcagcacagaccaagcccagaattgacactctcgcagaagatacgcaccaagctgcagaaccccgacctcttggaactctgtcattcggtgccaaaggaagtcgttcagttgggcggaaagggatatgggtccgagagtggagaggaggatttcgctgcatttcgcgcttggctgaggtgctatggtatgcccggcatgtctagcctgcaggataggcatggccgaactatttggtttcagggtgatccaggcccgctggctcccaaaggccgcaaaagccgaaagaaaaagtcgaaggccacgcagttgagtcctgaagacagggtcgaggacgcacttcccccatccaaggctcctagccggacaaggagggcgaaaagagacctgcccaagagaaccgctacacagaggccagagggcacgtcactgcagcaggaccccgaagctccaacggtgcccaagaaaggcaggaggaaaggacgacaggccgcttccggacactgcagaccaaggaaagtcaaggctgatattccgagcctcgaacctgaaggcacatcggccagttag

SEQ ID NO: 16264 - DNA, 999 bp, synthetic construct
  misc_feature 1..999: note = Description of Artificial Sequence: Synthetic coding sequence
  source 1..999: mol_type = other DNA
atgcctgaaggccccctggtgcgcaagttccaccatctcgtcagccctttcgtgggacagcaagttgtgaagacagggggcagcagcaaaaaactgcagcccgcctccttgcagagtctatggctccaggatacgcaggttcatggaaagaagctgttccttaggttcgaccttgacgaggaaatgggcccaccgggcagtagtcccacacccgagccccctcaaaaggaggtccagaaagagggcgcagctgaccccaagcaggtgggagaacctagcggacagaaaaccttggatggcagtagtcggtccgcagagctggtgcctcagggagaggacgacagcgagtacctggagagagatgcacccgccggggacgcagggagatggttaagggttagctttggtctgtttggtagtgtctgggtcaacgatttttctagggcaaaaaaggcaaacaaaagaggtgactggagagatccttctcctaggctggtgctgcacttcggagggggcggattcctagccttttataactgccagcttagctggagctcctcccctgttgttacccccacctgcgatatacttagcgagaaatttcacagaggtcaagcactcgaggcacttggccaggcccaaccagtctgctacactcttctggatcagagatatttttccggcttgggtaatattattaagaacgaggctctgtatcgtgcagggatccacccactatctctcggcagtgttctgtctgcctcccgcagggaggtccttgtcgaccatgtagtcgaattttcaaccgcatggcttcagggcaaattccagggcaggccacagcatactcaagtgtaccaaaaagaacagtgccccgctgggcatcaggtcatgaaggaagcgtttggtccggaggacggtctgcaaagactgacttggtggtgtccccaatgtcagccccagctttctgaggagcctgaacaatgccagttttcatag

SEQ ID NO: 16265 - DNA, 954 bp, synthetic construct
  misc_feature 1..954: note = Description of Artificial Sequence: Synthetic coding sequence
  source 1..954: mol_type = other DNA
atgccagaaggaccgctggtccggaagttccatcaccttgtgtcccccttcgtgggacaacaagttgtgaagacgggcggcagctctaagaagcttcagcctgccagtctacaaagtttgtggcttcaggacactcaggtgcatggcaaaaaactttttctcaggttcgatctcgacgaagagatgggcccaccaggatcatcaccaaccccggagcctccccagaaagaagtccagaaaaaaactctcgacggatcttccagaagcgcagaactggttcctcagggagaggacgatagcgagtaccttgaaagggacgcccctgccggcgacgccggtcgatggcttcgcgtttcttttggcttattcggaagcgtttgggtgaacgactttagccgcgcaaagaaagctaataagcgcggtgattggcgagatccaagtcctcgcttggtgctgcacttcggagggggcgggtttctggctttttacaattgccagctgagctggtcttcgtctcccgtggtgacccctacttgcgatattctgtccgagaagttccaccgcggtcaggccctcgaagccctgggccaagctcaacctgtttgctacaccctgctagatcaaaggtattttagcggactcgggaacataatcaagaacgaagctctgtacagagccgggattcaccctctcagcctaggcagcgtgctatccgccagccggagggaagtcctggtagatcacgtcgttgagttctcaacagcctggctgcagggcaaatttcagggcagaccccaacacacacaggtctatcagaaagagcagtgtcccgcgggacatcaagttatgaaggaggcttttggtcccgaggatggcctgcaaagactgacatggtggtgcccccaatgccagccacagcttagcgaagaaccagaacagtgtcagttctcatag

SEQ ID NO: 16266 - DNA, 816 bp, synthetic construct
  misc_feature 1..816: note = Description of Artificial Sequence: Synthetic coding sequence
  source 1..816: mol_type = other DNA
atgggaccacccggctcttcacctaccccagaacccccccagaaggaagtacaaaaggagggggcagctgacccaaaacaggtcggggaaccttcaggacagaagaccctggacgggtccagtcgtagcgccgaactggtcccccagggcgaagacgacagcgaatatctggagagagacgccccagcaggcgacgcaggcagatggctcagggtgagctttggattgtttgggagtgtgtgggttaatgatttcagcagggctaagaaggcaaataaaagaggagactggcgcgacccaagccccaggttggttctccattttggaggagggggatttcttgccttctataactgccagcttagctggtcttctagccctgtggtgacacctacctgcgacatactgtctgaaaagtttcacagagggcaagcgctggaggccttgggccaggcacagcctgtctgttatacgctattggatcagagatattttagcggactggggaacatcattaagaacgaggccttataccgggcgggaatacacccactttcacttgggtcggtgctttctgctagcagaagagaggtcctggttgaccatgtggtcgaattcagcacagcttggttacaggggaaattccagggccgcccacagcatacccaggtctatcagaaagaacaatgcccagctggacatcaggtcatgaaggaagccttcggcccggaagatggactccagcgtctgacctggtggtgtccccagtgccagccacaactgtctgaggagcccgagcaatgtcaattttcctag

SEQ ID NO: 16267 - DNA, 999 bp, synthetic construct
  misc_feature 1..999: note = Description of Artificial Sequence: Synthetic coding sequence
  source 1..999: mol_type = other DNA
atgcccgaaggcccattggttagaaagttccaccatttggtgtcccctttcgtgggacagcaggttgtgaaaacagggggctcttctaagaagttacagccagccagcctccagtcgctctggctccaggatacccaggtgcacggcaaaaagttatttctgcgctttgatctggatgaggagatgggacctccgggatcatctcctacgcccgagcccccccagaaggaagtgcagaaggagggggctgcagacccaaaacaggttggagagccaagcggtcagaaaaccctagacggctcaagcagatcggctgagcttgtcccccagggtgaggatgattcagaatatcttgaaagagacgcgccagctggtgatgccgggcggtggttacgggtgagctttgggctttttggctctgtctgggttaatgacttctcacgggccaaaaaggccaacaagaggggagattggcgcgatccgagcccccgcctggtgttgcactttggcgggggcggcttcttggctttctacaattgtcagctgagttggagttcttcccccgttgtgacacccacgtgtgacatcctgtcagagaagttccaccgaggtcaggccctggaggccctgggacaggcgcagcccgtttgctacacattgctcgatcaaaggtacttctccggtctgggcaatatcatcaaaaacgaagccttgtaccgcgcgggcatccacccactctccctcggctcagtccttagtgccagccgtcgagaagtactcgtcgatcatgtcgtcgagttcagtactgcatggctccagggtaagtttcaagggcgaccacagcacacccaagtgtaccagaaggagcagtgtcccgctggccaccaggttatgaaagaagcattcgggcccgaggatggtcttcagcggctgacatggtggtgtccacagtgccaacctcagctgagtgaagaacctgaacaatgtcaattttcttag

SEQ ID NO: 16268 - DNA, 999 bp, synthetic construct
  misc_feature 1..999: note = Description of Artificial Sequence: Synthetic coding sequence
  source 1..999: mol_type = other DNA
atgccagaggggcccctggttagaaaatttcatcatctggtcagtccttttgtggggcagcaggtggtgaaaacgggaggaagttctaagaagttacaaccagcatctctgcagagtttgtggctgcaggacactcaggtgcatgggaagaagctgtttcttcgatttgacttagacgaggaaatgggccctccaggctcttctcctacgccagaaccgccacaaaaagaagtacagaaggaaggagccgctgatcccaaacaggtgggcgaaccctcagggcaaaagactctcgacggctcttcaaggtctgccgaactggttccacagggcgaagatgactctgaataccttgaaagagacgctccagcaggagacgccgggcgttggctccgtgtgtccttcggtctcttcggcagcgtttgggttaatgacttttctagggccaaaaaggcaaataagcggggcgactggcgcgacccttcaccaaggctggtccttcactttgggggcgggggtttcctggctttctataactgccaactatcctggtcctccagtcccgttgttacgccaacttgcgacattctttccgagaagtttcatcggggtcaagccctcgaggcattaggtcaggcacagcccgtttgttacacactgttggaccagcgctatttctctgggctggggaatattataaaaaatgaagccttatatcgcgctgggattcaccccctgagcctcggatcagtgctctctgcatcccggcgagaggtgctggtggaccatgtggtggagttctccaccgcctggcttcagggcaaattccagggccggccgcagcatactcaggtttaccagaaggagcagtgtcccgctggacaccaggtgatgaaagaggccttcggtccagaagatgggttacaacggctgacatggtggtgtccacagtgccagccgcagttgtctgaggaaccagagcagtgtcagttcagctag

SEQ ID NO: 16269 - DNA, 651 bp, synthetic construct
  misc_feature 1..651: note = Description of Artificial Sequence: Synthetic coding sequence
  source 1..651: mol_type = other DNA
atgccagagggcccccttgtccgaaagtttcaccatctggtatctcccttcgtggggcagcaggtagtgaaaaccggtggcagctccaagaagctgcagcccgcttcattgcagtccctttggcttcaggatacccaggtccgcttggtcctgcatttcggtgggggcggatttctcgccttctacaactgtcagctttcgtggagttcctcgccagtcgtcaccccaacttgtgatatcttgtcagagaagttccaccgaggccaggccctggaagcgctgggccaggcacagccagtctgttacactttactagatcagcggtactttagtggactcggcaatatcattaagaatgaggccctctatcgagctgggatccacccactgtccctgggatctgtactgagtgcatcaaggcgggaagtgctcgtcgaccacgtggtagaattttcaacggcatggctgcaaggaaagtttcaaggacggcctcaacatactcaagtatatcaaaaggagcagtgccccgctggtcaccaagtaatgaaagaagcatttggtccggaggatgggctgcagcgtctgacctggtggtgtccgcagtgccagcctcaactgtccgaggaaccagagcagtgtcagttctcctag

SEQ ID NO: 16270 - DNA, 1818 bp, synthetic construct
  misc_feature 1..1818: note = Description of Artificial Sequence: Synthetic coding sequence
  source 1..1818: mol_type = other DNA
atggtcgagggaccaggctgtactcttaacggagaaaaaatcagggcccgcgtcttacccggacaagcggtgacaggtgtcagggggtccgccctgcggtctctccagggccgcgctcttagactcgctgctagcactgttgtggtaagtcctcaggccgctgctttaaataatgatagctcacagaacgtactgtctttatttaatggatacgtttactctggcgtggagacattgggtaaggaactcttcatgtatttcggcccgaaagccttgcgaattcattttggcatgaaaggctttatcatgatcaaccccctggaatacaaatacaaaaatggtgcctccccggtgctcgaggtccagctcacgaaagacctgatttgcttttttgattcaagcgtggaattgaggaattccatggaatcacaacagagaattcgtatgatgaaagaattagacgtgtgctctcccgagtttagctttctccgcgcggagtctgaggtcaagaagcagaaaggccgaatgctaggtgatgtcctcatggaccaaaacgtgctcccgggggtgggcaacattatcaaaaatgaagctctgttcgacagcggcctgcaccctgcagttaaggtgtgtcaactgactgatgagcaaattcatcatctgatgaagatgattagagatttctctatacttttttatcggtgtcggaaggccggccttgcattgtcaaagcattataaggtatataaacggcctaattgcggccagtgtcactgtcggattacagtgtgcaggtttggcgataataatcgtatgacatatttctgtcctcactgtcaaaaagagaacccacagcatgttgacatctgcaagctgccaacaaggaacaccatcatcagctggactagcagccgcgtggaccatgtgatggattctgtagcccgcaaatcggaagagcattggacctgtgtcgtgtgtaccctcataaacaagccttcctcaaaggcatgcgatgcgtgcttgacttcaagacctatagacagtgtcttaaaaagcgaggaaaatagcacagtctttagccatcttatgaagtatccgtgcaacacctttggcaagccccatacagaagtcaaaattaatagaaaaactgcctttggcacgacaacactggtgctgaccgatttttccaataaatctagcacactcgagcggaaaaccaaacaaaaccagattcttgacgaggaattccagaattctcctcccgccagtgtgtgtctaaatgacatccagcatccatccaagaagactaccaacgacatcactcagccctcaagcaaggtgaatatatctcccaccataagcagcgaaagtaaattgttttctcctgcacacaaaaagccaaagacagcccagtactcgtcacctgagttgaaaagctgtaatcccggctactccaatagcgagctgcagattaatatgaccgatggcccacgtacgttgaatcctgatagccctcggtgttccaagcataatcgcctgtgtattttaagagttgtgggcaaggatggagagaacaagggtcgacaattctatgcatgtcccctgccccgcgaggctcagtgcggctttttcgagtgggcagacctttccttccctttctgtaaccatggaaaacgttccaccatgaaaaccgtgttgaaaatcgggccaaataacggaaaaaatttcttcgtgtgtccgctgggcaaagagaagcagtgcaatttctttcagtgggctgagaacggccccggcataaagatcatccccggctgctag

SEQ ID NO: 16271 - DNA, 1743 bp, synthetic construct
  misc_feature 1..1743: note = Description of Artificial Sequence: Synthetic coding sequence
  source 1..1743: mol_type = other DNA
atgcccggatggccctggggactattgcttacagctggtacgctcttcgccgctcttagccccgggcctccagcaccagcagacccgtgtcacgatgaaggaggtgctcctcgcgggtgtgttcccggcctggttaatgccgcgttggggcgggaagtcctggcttcctcgacctgtggacggccagccaccagagcctgtgacgcttccgatccccggcgcgctcactctccagccctgctgacctctcccggggggacggcatccccattatgttggaggagtgagtctctgccacgcgcccccttgaatgtcacactgactgtgcccttagggaaggcctttgagctggtttttgtttccctgcgcttctgttcggccccacctgcgagtgtggctttgctcaaaagccaggatcacgggcggtcctgggcaccactgggtttcttcagttcccattgcgatctggattacggacgactgcccgctccagctaacggccccgcggggccagggccagaggcgctgtgcttccctgccccccttgcccagccagacggttccggattgctggctttcagcatgcaagacagctcgccccccgggttggatctcgactcttcacccgtactccaggactgggtgaccgccacagacgttagagttgtcttgacgcgccccagtacagcaggggaccccagggatatggaggccgtagtgccttatagttacgccgccacagacctgcaggtcgggggtcgttgcaagtgcaacggacatgccagccgatgcctgcttgacacccagggacacttaatctgcgattgccgtcacggaactgaaggaccggactgtggccggtgtaagcctttttattgtgaccgaccgtggcagcgggccactgccagggagtcccatgcgtgcctggcttgttcctgcaacggccatgcgagaaggtgtaggtttaacatggagctgtaccggctttcggggcgccggagcggcggcgtctgccttaattgtcgacacaataccgctggaaggcattgccactactgtagagaaggcttctaccgcgatcccggtcgtgccctctcggaccgcagagcttgccgggcctgtgattgccaccccgtcggagctgccgggaagacctgtaatcagacaaccggccagtgcccctgtaaagacggcgtaacgggtctgacttgcaatcggtgcgccccagggttccagcaaagcaggtcgcctgttgccccgtgcgtgaagacgccaattccagggccgacagaggactcttcacccgtccagccccaagactgtgattctcattgtaagcccgcaaggggcagctatcggatcagtctaaaaaagttttgcaaaaaggattatgctgtacaggtggccgtgggtgcgaggggcgaggcacgtggcgcatggaccagattccccgtggccgtactagcagtattcaggtctggagaggagcgggcgcgccgcggttctagcgcactgtgggtgcctgcgggtgatgctgcttgtggttgcccgaggctcctacctgggcggcgctatctactgttggggggaggacccggagctgcagccggaggggcagggggccgcgggcccggattaattgcggctcgcggctcactggtgctcccttggagagatgcctggacccgccgactgaggagattgcagcggcgggaaagacgcggtaggtgttctgctgcatag

SEQ ID NO: 16272 - DNA, 2547 bp, synthetic construct
  misc_feature 1..2547: note = Description of Artificial Sequence: Synthetic coding sequence
  source 1..2547: mol_type = other DNA
ctcttctgtttcgtcttcagcgtaagtctgcaggttgacatcgtgccttctcagggtgagatctcagtcggagagagcaaattttttttgtgtcaggtggctggagatgcaaaggacaaggatatcagttggttcagtcccaacggcgagaagctaacgcctaaccaacagaggattagtgtggtttggaatgacgattcgtcctctacactcaccatttacaacgcaaacattgacgacgcaggcatttacaaatgcgtggttaccggggaggatgggagcgagagtgaggctactgtgaacgtgaagatctttcaaaagcttatgttcaagaatgcacccaccccccaggagtttagagagggtgaagatgcagtgatcgtgtgtgatgtggtgtcttctctcccaccgacaataatatggaagcataagggtagggatgtgatcctgaaaaaagacgtgaggttcatcgtcctctctaacaattatttgcagattagagggattaagaagactgacgagggaacttaccgctgcgaaggccggatccttgccagaggcgagattaatttcaaagatatacaagtcatcgttaacgtccctcctaccattcaggcccggcaaaatattgtgaacgccacagcgaatctcggccagagcgtaactcttgtatgtgacgcagaagggtttcccgaaccaaccatgagctggacaaaggacggcgagcaaatcgagcaggaagaagatgatgagaagtatattttctcagacgatagctctcagctcaccatcaagaaggtcgacaagaatgacgaggcagagtacatttgtattgccgagaacaaagcaggggaacaagacgctactatccatttgaaggtctttgccaagccgaaaataacttacgtggagaaccagactgcgatggagctggaggaacaggtgacacttacatgtgaagcgagcggagatcctatcccaagcatcacgtggcgcacctccacccggaatattagcagcgaggagaaagctagctggacgcgtccagaaaaacaggaaacccttgatggacatatggtggttaggagtcacgccagagtgtccagcctcaccctcaagtctattcaatacacagacgccggcgaatacatctgtactgcctctaacaccatcggtcaggacagtcagtcaatgtatctagaggtccagtacgcacctaagctgcagggaccagttgcggtctacacgtgggaaggtaatcaggttaatattacctgtgaggtctttgcctacccctctgctaccatatcttggtttagggatggccagcttttgccgtcttcgaattattccaacattaagatctataacaccccctcagccagctacctggaggtgacaccagacagcgaaaacgattttggaaattacaattgcacagccgtcaatcgcataggacaggagagtcttgaattcatcctggtacaggctgacacacccagcagtcccagcatcgaccaggtggaaccctactcctccaccgcccaggttcagtttgatgaacctgaagctaccggtggcgtaccaattcttaagtataaggctgagtggcgtgccgttggagaggaagtgtggcacagtaaatggtatgacgcaaaagaagcatcaatggaaggcatcgtgacaatagtcgggcttaagccagaaactacctacgctgtgagactggcagcactcaacgggaaagggctgggcgagatttccgcagcttccgagtttaagacccagcccgttccgggcgagccttctgctccaaaactcgagggacagatgggcgaagacggaaattcaataaaggttaatctgattaagcaggacgatggagggtccccgatacggcactatttggtgcgatatcgggcattatcaagcgaatggaagccagagatccggctccccagcggaagtgatcacgtgatgctgaagtctctcgactggaacgcggagtatgaggtgtatgttgtggccgaaaaccaacagggaaaatctaaggctgcacattttgtgtttagaaccagcgcccagccgacagctattcccgccaatggcagccctacctcagggctttccaccggggccatcgtggggattctcatcgttatattcgtcctactgctggtggtcgttgacattacatgttactttttgaataagtgtgggctgtttatgtgtatcgctgtaaacctatgtggtaaggctggccccggtgctaaaggaaaggacatggaagaaggcaaagcggctttttcaaaagacgagtccaaggagcctatcgtggaggtccgaacagaagaagaaagaacccccaatcacgatggcggcaagcataccgagccgaacgagactaccccacttaccgagccagagaagggtcctgtggaagctaagcctgagtgtcaggagaccgaaaccaaacctgcccccgctgaggtgaagacagtacctaatgacgctacccagacaaaggaaaacgagagcaaagcctag

SEQ ID NO: 16273 - DNA, 1995 bp, synthetic construct
  misc_feature 1..1995: note = Description of Artificial Sequence: Synthetic coding sequence
  source 1..1995: mol_type = other DNA
attactatcagggatgaaatttgggtgctgttctgttttgtcttcagcgtgtctctgcaggtggatatcgtgccaagtcagggagaaatctccgtaggggagtctaaattctttctgtgccaggtggccggggatgccaaagacaaggatatcagctggttttctcccaacggggagaagttaacaccgaaccagcaacggatttccgtagtgtggaacgatgacagttccagcaccctgacaatttataacgccaatatcgatgacgctggcatctataaatgcgtggtgaccggcgaggacggcagcgagagtgaagccacggtgaatgtaaaaatattccaaaaactgatgttcaaaaacgcacctacccctcaggagttccgagagggcgaggacgcggtcattgtctgtgacgtggtgagctccctgccgcctacaataatttggaaacataaagggcgtgacgtgattctgaagaaggacgttagatttattgtgctcagcaataattacctgcagatccgcggaatcaaaaagaccgacgaggggacttacagatgtgagggccggattctggcacgaggagaaattaatttcaaggacattcaagtgatcgtcaatgtgccacccacaatccaggctcgacaaaacattgtgaatgcaacagccaatctagggcagagtgtcaccctggtctgtgacgccgaggggttccctgaacctaccatgtcatggacgaaggatggcgagcagatcgagcaggaagaggatgatgagaaatatatcttttccgatgatagtagccagcttactatcaaaaaagtcgacaagaatgacgaggcagagtacatatgtattgccgagaacaaagccggggagcaggatgccaccattcacctcaaggtgttcgctaaacctaaaattacctatgtggagaaccagaccgctatggagcttgaagagcaggtcacactcacatgtgaagcgagtggcgatccaatcccatcaattacttggcggaccagcacgaggaacatcagctcagaggagaaagctagttggactaggcccgagaaacaggagacactggatggtcacatggtcgtgagatctcatgccagggtgtcgtctctgaccctgaagagcatccagtacacagacgctggagaatacatttgtaccgcatctaacaccatcgggcaggattcccagtccatgtacctcgaggtacagtatgcgcccaagctccaggggccagtggctgtgtacacgtgggaaggcaaccaggtgaatatcacttgtgaggtcttcgcctacccatcagcgaccatctcttggttccgtgacggccaactactgccttcctccaattacagcaacattaagatctacaataccccatccgcctcctatctggaagtcacccccgattcagaaaacgactttggcaattacaactgcaccgcagtgaaccgcattggacaggagtccctcgagtttatccttgttcaagcagacactccatcttcgccctccatcgaccaggtggagccctattcttccacagcccaagtgcagttcgatgagccagaggcgacaggtggcgtgcctatattaaaatacaaagcagaatggagggctgtgggggaagaggtgtggcacagcaaatggtatgacgcaaaagaggcttcgatggaggggatcgtgactattgtgggtttgaaacctgaaaccacctatgccgtgaggctggccgccctaaacgggaagggcttgggcgagatttctgcggcttccgagttcaaaactcagcccgtgcaagcgcctcctccaacagcttctgcctctagttctacgcccgttcccctgtcccctccagacacaacatggccactccccgccctcgctacaaccgagcccgccaagaatattgcccagaatcactgctgcaatatgttccaggccggactacacaacgcgctgatgaaatag

SEQ ID NO: 16274 - DNA, 942 bp, synthetic construct
  misc_feature 1..942: note = Description of Artificial Sequence: Synthetic coding sequence
  source 1..942: mol_type = other DNA
atggaaggcattgtcacaatagttgggctcaaaccagagaccacctacgccgtgagactggccgcactgaatggcaaaggcttaggtgaaatttccgctgcgtcagagttcaagactcaaccggtacacagtccgcccccccctgcatcagcctcttcgtccacgcctgtccccctttctcctcctgatacgggtgagccttccgcacctaagctggagggacagatgggagaagatgggaactccatcaaggtgaacctgattaagcaggatgacggcggtagtcctataagacactatttggtgaggtatagagcattatcaagtgaatggaaaccagaaataaggctgccctcgggctccgatcacgtcatgctgaaatcactcgattggaacgccgaatacgaggtttatgtcgttgcggaaaaccagcagggcaagtccaaagcagcccacttcgtgttcagaactagcgcccagcccacagccattccagccaatgggagtccgacatcgggcctgagcacgggagccattgtggggatactcattgtcatctttgtcctcctgttggtcgtcgtcgatataacctgttacttcctcaacaagtgtggactgttcatgtgcattgccgtgaacctatgcggcaaggccggcccaggtgctaaagggaaagacatggaagagggtaaggctgccttctccaaggacgaaagcaaggaacctattgttgaggtaagaaccgaagaagagaggacccctaaccacgacggtgggaaacacaccgaacccaacgaaactacccccttaactgaaccggagaaaggaccagttgaggccaaaccagaatgtcaggagactgaaaccaaaccagcccctgctgaagtgaaaaccgttccaaatgacgcgacgcaaactaaagagaatgaaagcaaggcatag

SEQ ID NO: 16275 - DNA, 570 bp, synthetic construct
  misc_feature 1..570: note = Description of Artificial Sequence: Synthetic coding sequence
  source 1..570: mol_type = other DNA
atgacagaatataaattggttgtggtgggagcgggtggggtgggtaaatccgcactgacaattcagttgattcagaaccattttgtggacgagtacgaccccacaatcgaggacagttacaggaagcaggtagtgatagacggtgaaacttgcctattggatattctggacaccgcaggccaggaagagtacagcgcgatgcgcgaccagtatatgcgaacgggagaggggtttttgtgcgtctttgccattaataattcaaagtctttcgctgacataaatttgtatagagagcagataaaaagagtcaaagatagcgatgatgttccaatggtgctggtggggaacaagtgcgatctgccgacgaggaccgtcgacactaaacaggctcatgagctcgcaaagtcctatggtatccctttcatagagaccagcgctaaaacacgccaaggggtggaagacgccttctacaccctggtgagggaaattcggcagtaccggatgaagaagctgaattcttccgacgacggcactcagggctgcatgggtcttccttgcgtggttatgtag

SEQ ID NO: 16276 - DNA, 651 bp, synthetic construct
  misc_feature 1..651: note = Description of Artificial Sequence: Synthetic coding sequence
  source 1..651: mol_type = other DNA
atgccaggtaacctgatgagccaaacttcaagggcagtgtctatttggaagttccccgcgaagctcgggaaaacccacggacaccgcgcccttgaggctactggcatgatgcttagggtattagtcggcgccgtgctcccagccatgctgttggccgcccctccaccaatcaacaagctagctttgttccctgataagtccgcctggtgcgaggctaaaaacattacccagatagttggccattctgggtgtgaggccaagagtattcagaatagggcttgccttgggcagtgtttctcctactccgttccaaatactttcccccagtctaccgagagcctcgttcactgtgacagttgtatgccggctcagtctatgtgggagatcgtgaccctggagtgccctggccatgaagaagtgccccgagtggacaagctggtggagaagatactgcactgttcctgccaagcctgcgggaaggaaccttcccatgaagggctttctgtatacgtgcagggcgaggacggtcccgggagccagcctgggacccaccctcaccctcatccccacccacatcctgggggacaaacacccgaacccgaagacccccctggagcacctcacacagaggaggaaggggccgaagactag

SEQ ID NO: 16277 - DNA, 546 bp, synthetic construct
  misc_feature 1..546: note = Description of Artificial Sequence: Synthetic coding sequence
  source 1..546: mol_type = other DNA
atgatgttgcgcgtactggtcggtgctgtgctgcccgctatgcttttggctgcaccaccccctattaataagctcgctctgtttccagataaaagcgcatggtgcgaggccaaaaacatcacccagatcgtcggccactccggatgcgaagccaaatccattcagaatagggcatgcctgggtcagtgtttttcttactccgttccaaataccttcccacagtctacagaatcgctcgtgcactgtgacagttgcatgcccgcccagagtatgtgggagatcgtgaccttagaatgccccggccacgaagaagtgccaagggtggataaactggtggagaagattctccactgcagctgccaggcgtgcggaaaggagccttcccacgaaggcttgtccgtgtatgtccaaggtgaagatggccctggcagtcagcctggtacacacccccacccacatccacaccctcatccaggaggccagacccctgaaccagaggatccccctggggcaccccatacggaagaggaaggtgccgaagactag

SEQ ID NO: 16278 - DNA, 351 bp, synthetic construct
  misc_feature 1..351: note = Description of Artificial Sequence: Synthetic coding sequence
  source 1..351: mol_type = other DNA
atgatgcttcgggttctggtgggcgccgtcctgcccgcgatgctcctggccgcacctccaccaataaataagctggccctgttcccagacaagtctgcatggtgcgaagcgaagaacattacgcaaattgtagggcactctggatgcgaggctaaaagcatccagaatagggcttgccttggtcagtgcttctcgtattcggtgcctaacacattcccccaaagcacggagtccctggtacactgtgacagttgtatgcctgcccagagcatgtgggaaattgtgacgttagagtgccccggccacgaggaggttccgagggtggataagcttgttgagaaaatcctctag

SEQ ID NO: 16279 - DNA, 492 bp, synthetic construct
  misc_feature 1..492: note = Description of Artificial Sequence: Synthetic coding sequence
  source 1..492: mol_type = other DNA
atgttgcgcgtactggttggtgcagtgttacccgcaatgctgctggcagccccaccgcctatcaataagctggcactgttcccagacaaaagtgcttggtgtgaagcaaagaacatcactcagatcgtcgggcatagcggctgcgaggcgaagtctattcaaaacagagcatgtctgggccagtgcttttcttattctgtgcccaacaccttcccacagagcactgagtcgctggttcactgcgactcctgtatgcccgcgcagtctatgtgggagattgtgacattggagtgccctggacatgaagaggtgcctagagttgataagctggttgagaagatactacattgtagttgccaggcctgcggaaaggaaccatctcatgagggactgagcgtttatgtgcagggagaagatgggcccggaagtcaaccaggcacccatcctcaccctcatccacacccccatcccggcgggcagactccagagtag

SEQ ID NO: 16280 - DNA, 354 bp, synthetic construct
  misc_feature 1..354: note = Description of Artificial Sequence: Synthetic coding sequence
  source 1..354: mol_type = other DNA
atgatgctccgggtactggtaggcgccgtgctcccagcgatgctgttggccgccccccccccgatcaataagctggccctcttccctgataagagcgcttggtgtgaagccaagaatataacgcaaatcgttgggcactccgggtgtgaggccaaatcgatccaaaatcgggcttgcctgggccagtgcttcagctactccgttcccaacacctttcctcagtcaacagaaagccttgttcattgtgacagctgcatgcccgcccagtcgatgtgggagatcgttacgctggaatgccccggccatgaagaagtgccaagagttgacaagctggtagaaaaaattctccactag

SEQ ID NO: 16281 - DNA, 330 bp, synthetic construct
  misc_feature 1..330: note = Description of Artificial Sequence: Synthetic coding sequence
  source 1..330: mol_type = other DNA
atgatgctccgcgtactggtcggggccgtgctgcctgcaatgctgctggcagccccaccacccatcaacaaattagctcttttcccagacaagtccgcctggtgtgaggctaaaaatataactcagatcgttgggcatagcgggtgtgaggccaaatccatccagaaccgggcctgcttagggcaatgcttttcctactccgtgccaaatacgttcccacaatctactgagagtttagtccactgtgactcgtgcatgccagcgcagtccatgtgggaaattgtgactctggaatgtccaggacatgaagaggtcccgcgggtggactag

SEQ ID NO: 16282 - DNA, 387 bp, synthetic construct
  misc_feature 1..387: note = Description of Artificial Sequence: Synthetic coding sequence
  source 1..387: mol_type = other DNA
atgatgctgcgcgtcctggtgggtgccgtgctacccgcaatgttactggccgcccctcccccgattaacaaactcgcactcttccccgacaaaagcgcatggtgtgaggctaagaatattacacagatcgttggccactctggatgcgaggcaaaaagcattcagaatcgcgcctgtttagggcaatgcttttcctattcggttccaaatacattcccacagtctactgaaagtctggttcactgcgattcatgcatgccagcccagtccatgtgggaaattgtgaccttagagtgtccaggtcatgaagaagtgccgcgcgtggataagctagtggagaagatcctgcactgctcttgccaggcctgcggtaaagagccctcttag

SEQ ID NO: 16283 - DNA, 543 bp, synthetic construct
  misc_feature 1..543: note = Description of Artificial Sequence: Synthetic coding sequence
  source 1..543: mol_type = other DNA
atgcttagggtgctggtcggggccgtgctccctgccatgctgctggccgcaccgccacccatcaacaagcttgcattgttcccagataaatcagcctggtgcgaggcaaagaatatcacacagatcgttgggcattccggttgcgaggcaaaaagtattcaaaaccgcgcctgtctcggccaatgtttctcatacagcgtccctaacactttccctcagagtacggagtcgctggtacactgtgactcatgcatgcccgcccaatcaatgtgggagatcgttacactagagtgccctggccacgaggaggtgcctagagtcgacaagctggtcgaaaagatactccattgcagctgccaggcttgcggtaaggaaccgtctcacgaggggctatcagtttacgtccagggcgaagacggccctgggtcccagcctggcacgcatccgcaccctcacccccacccacatcccggtggacagacacccgaaccggaagatccgcccggtgcccctcacacagaggaggagggagctgaagattag

SEQ ID NO: 16284 - DNA, 8457 bp, synthetic construct
  misc_feature 1..8457: note = Description of Artificial Sequence: Synthetic coding sequence
  source 1..8457: mol_type = other DNA
atggccgctcacaggcccgtcgagtgggttcaggctgtcgtctccaggttcgacgagcagttaccaatcaaaaccgggcaacagaacacacatacgaaagttagcaccgagcacaataaggagtgtctgattaatatctcaaaatataagtttagtttggtcatcagcggtctgactactattctcaagaacgtcaataacatgcgcattttcggggaggccgccgagaagaacctttacctgagccagcttataattctggacactctggagaagtgtcttgctgggcaaccgaaggacaccatgaggctcgacgagaccatgctggtgaagcagttgctccccgaaatctgccacttcctgcatacctgcagggagggcaaccagcatgctgccgagttacggaactctgcttccggcgtactgttcagcctctcctgtaataacttcaacgccgtcttctctaggataagtactcgcctgcaagagttaaccgtgtgcagcgaggataatgtggacgtacatgatattgaactattacagtacattaacgtggactgtgcaaaattgaagaggttgctcaaggagacagcgtttaaattcaaagctctgaaaaaggtggcccaactggctgtgatcaattcactggagaaggcattctggaactgggtggaaaactaccctgacgaatttactaaactctatcagatcccccagacagacatggccgagtgcgcggagaagctttttgacctcgtggatggctttgccgagtccacaaaaagaaaagctgccgtctggccactccaaataatcctgctgattctgtgccctgaaattatccaggatatcagcaaggacgtcgttgatgagaacaacatgaacaagaagctgtttttggattcactccggaaggccctcgccggccacggaggctctcggcagctgaccgaatcagccgccattgcgtgtgtgaagctgtgtaaggcctctacatatatcaattgggaggataacagcgttatatttttgctggtgcagtcaatggtcgtcgatctgaagaatcttcttttcaaccctagtaaacccttctcgcggggcagccaacccgcggatgtagatctcatgatcgattgtctcgtgtcctgtttcaggatatcccctcacaataaccagcacttcaaaatctgtctcgcgcagaatagcccaagcactttccactatgtcctggtaaatagcctccacagaattattactaactcagcgctcgactggtggcctaaaatagatgccgtctattgtcactccgttgaattgagaaatatgtttggagagacccttcacaaggccgttcaggggtgtggggcgcaccctgccatcagaatggcaccatcattgactttcaaagagaaagtcacgtcacttaagttcaaagagaaaccgacggacctggaaacccgatcatacaagtaccttttgctgtctatggtgaagctcattcatgccgatcccaagctgcttttgtgtaaccctcggaagcaaggaccagaaactcagggcagcacagcagaactcataaccggtctcgtccagctggttcctcagagccacatgcccgaaatcgcccaagaggcaatggaggccctcttggtgttgcaccagcttgacagcatagacctctggaacccggacgcacccgtggaaaccttctgggagatcagttcacagatgctattctacatatgcaaaaaattgactagccaccagatgctgtcatctacagaaattctgaagtggcttcgggagatactgatctgcaggaacaaattcttgttaaagaataagcaagccgacagaagctcttgccacttccttctcttttatggcgtggggtgcgacattccatcctcaggcaataccagccagatgtctatggatcatgaagagctgctacggacacccggcgcttcactccgcaagggcaaggggaatagcagcatggactccgcagccgggtgttccggcacaccacccatttgccggcaggctcagacgaagttagaggtggccctctacatgttcctttggaatccggataccgaggcggttctggtggcaatgtcctgctttaggcacttgtgtgaggaggcagacattagatgcggagtggacgaagtctctgtgcacaatctgctgcccaactacaataccttcatggagtttgcctccgtaagcaatatgatgtccaccggacgggctgcactgcaaaagagagtcatggctttattacgccgcatcgagcacccgactgcaggtaacaccgaagcatgggaagatacccacgctaagtgggagcaggccaccaagttgattttgaactacccaaaggccaaaatggaagacggccaggctgccgaatcactgcacaagaccatcgttaaaagacgcatgtcacacgtaagtggaggcggcagcattgatttaagtgataccgattcactgcaggagtggatcaacatgacgggatttctatgtgcgcttggtggggtgtgccttcagcaaagatccaatagcggtctcgccacttatagcccaccgatgggacccgtgtcggaaagaaagggcagcatgatctccgtgatgtcctccgaaggcaacgccgacacgcctgtcagcaaattcatggatcgattgcttagtctgatggtgtgcaatcacgaaaaggtgggactgcagattaggacaaatgtgaaagatttagtcggtttggagttgtccccggccctctacccaatgcttttcaacaagctgaagaacactatttctaagttttttgatagccaagggcaggtactcctaactgacactaatacacagtttgttgagcagacaatagctattatgaaaaacctgcttgacaaccacacggaggggagctcagaacacttgggccaggcaagcatagaaactatgatgcttaacctggtgcggtacgtgcgggtcctgggcaacatggtccacgctatccaaatcaagacaaagctctgccagttagtcgaagtgatgatggcccgccgggacgatctctctttctgccaggaaatgaaattccgcaataagatggttgagtacctgacagactgggtcatggggactagcaatcaggcagctgacgatgatgtcaaatgcctgacacgggacttggatcaagcaagcatggaagcggtcgtaagtctgctggccgggcttccgctgcagccagaggagggcgacggagtcgagttaatggaggccaagtcacaactgttcctcaagtacttcacactctttatgaatttgctcaacgattgtagcgaggtcgaggatgaatcagcccagaccgggggacggaaacggggaatgtctaggcgactggcctctttgcggcattgtacagttctcgccatgtctaacctgcttaatgcgaatgtggattccggcctgatgcatagcatcggtctgggataccacaaagacctgcagacgcgggctacgtttatggaagtcctgactaagattctccagcaaggcacagagttcgacaccctcgccgaaaccgtgttagccgaccggttcgaacggctggtcgaactcgttacaatgatgggcgatcagggcgaacttcccatcgccatggctctagccaatgtcgtgccttgttcacaatgggatgaactggctagagtgttggtcactctgttcgacagtcggcatctgttataccagttgctttggaacatgtttagcaaggaggtcgagctggcagatagtatgcagaccctgttcagaggcaatagcctggcttctaaaataatgacattttgttttaaagtgtacggggccacgtatctgcaaaagttactggaccccctgctccggattgtaattacttcttccgattggcaacacgtatcattcgaggtcgatccaactcggctggagccatccgagtcacttgaagagaaccagcgtaatctgcttcaaatgacagagaagttcttccacgccatcatctccagttcctctgaattccctccccaactccggagtgtgtgccactgcctttaccaggtggtgtctcagcgcttccctcagaactcaattggagcagtgggaagcgcaatgttccttaggttcattaaccccgctattgtttctccctacgaagccgggatcctcgacaaaaagcctccacctcggatcgaaagaggcctgaagttgatgtctaagatattacagagcatcgcaaatcacgttctttttactaaagaagagcacatgagacccttcaatgactttgtgaagtccaacttcgatgccgcgagacggttcttccttgacatagccagtgactgtcctactagtgacgccgtaaaccacagcctgagcttcattagcgatggtaatgtattagcgctccatcgtctcttgtggaataatcaggaaaaaatcggccaatacctgagctctaatcgagaccacaaagccgttggtcgacgcccttttgacaagatggcaaccctcctcgcatatctcgggcctcccgaacacaagcctgttgctgatactcactggagttctttgaatctgacctcaagcaaatttgaagaattcatgactcggcaccaagtgcacgagaaggaagagtttaaggccctaaaaaccttatccattttctaccaggcgggcacgtccaaggccggtaatcccattttctactatgtcgccagacggttcaagacaggtcaaatcaatggggacctgctgatttaccacgtcctcctaaccctgaagccttactacgccaaaccttacgagatcgtggtcgatctgacccacactgggccaagcaatcgcttcaaaactgactttttgtcaaagtggtttgtggtgttccctggcttcgcctacgacaacgtttctgctgtctacatatataattgtaatagttgggtgcgtgagtacacaaaataccatgagcgtttgctaactggcttgaaaggcagcaagcgacttgtctttattgattgccccggtaagctggccgagcatatcgaacacgagcagcaaaaactccctgctgcgaccctcgcactggaagaggatctcaaagtgttccacaatgccctgaagctggctcacaaggacacaaaggtgtccataaaggtaggctctacagcagtgcaggtgacatctgccgaaagaaccaaggtactgggtcagagcgtgtttctgaatgacatttattacgcctctgagattgaggagatctgcctggtcgatgagaaccagtttaccctcacaatcgctaatcaggggacaccgctgacttttatgcatcaggaatgcgaggccatagtgcagtccatcatacatatccgcacgagatgggagctgtcacagccggatagtatacctcagcacactaaaatcaggcctaaagacgtccccggaacgcttctgaatattgctctgctaaatcttggctccagcgatccttcactccggtcggccgcctacaatctgctctgcgccttgacgtgtacttttaatctaaaaatcgaaggccaactgctcgaaacaagtggactctgtattccagcaaataatactctgtttatcgtttcgataagtaagactcttgccgctaatgaaccacacctgacactggagtttttggaggagtgtatctcgggcttcagcaagagcagtatcgagctgaaacatttatgcttagaatacatgacaccttggttatccaatctggtgcgtttttgtaaacataatgacgacgctaaacgccagcgtgtgaccgccattctggacaagcttattacaatgacgattaatgagaaacaaatgtacccttccattcaggcaaaaatatggggatcacttgggcaaattaccgatctgctggacgtcgtgctggactcttttattaagacctcagccacgggagggttggggagcatcaaagcggaggtcatggctgacactgctgtggcactcgcctcagggaacgtgaaactagtgtcaagcaaggtgattggtcggatgtgtaagatcattgataagacctgcctgagcccgacccctactttggaacagcatctcatgtgggacgacatcgcgatcctggcgaggtatatgctcatgctcagtttcaacaactctttagatgtggccgcccacctgccctatctgttccatgtagtgaccttcctggtggccacaggtcctttaagcttgcgcgcttccacgcacgggctcgtaattaatattatccattcactgtgcacctgtagtcagctgcacttcagtgaagaaactaagcaagtcctccggctgtcactcaccgagttctctttaccaaagttttatctcctcttcgggatctcaaaagtgaagtcggccgccgtcatcgcattcaggtcatcttacagagatcgaagtttctcgcccgggtcttacgagcgggagacgtttgccctaacttccctggaaactgtgacagaagcccttctggagataatggaggcatgcatgcgagatatccctacctgcaagtggctcgatcagtggaccgagctagcccagaggttcgcttttcagtataacccatctcttcagccaagggcactcgtggtgtttggttgtatttcgaagagagttagccatggccagatcaaacagattatacgtatactgtcaaaggcactagagagctgtctgaagggccccgacacatacaactcacaggtcctcattgaagctaccgtcatcgccttaactaaactgcaacctctcttgaataaagactccccactgcacaaggctctcttttgggtggctgttgccgtcctgcaattagatgaagtaaatttgtacagcgccggaactgccttgctggaacagaacctccacactttggactcgttaaggatctttaatgataagagccctgaggaggtgtttatggccattcgcaacccactagagtggcactgcaaacagatggatcactttgtgggcctgaactttaattcaaacttcaacttcgcccttgtggggcatctcctgaaagggtacaggcacccaagcccagccatcgtggcgcggactgtgcggattctgcatactctactcaccctggtcaataagcaccgcaattgtgataagtttgaggtcaatacacagtcggtcgcctatttggctgccctgctgactgttagtgaagaagttaggtcccgctgcagtttgaagcatcgtaagagcttactgttgactgatatttctatggagaatgtgcctatggatacctatcccattcatcacggcgatccctcctatagaacactaaaggagactcagccatggtccagccctaaaggatcagaaggctacttggccgcaacgtaccctaccgtcggccagaccagccctagagctcgaaagtcaatgtcattagatatggggcagccaagtcaggcgaatacaaaaaagctcctgggtactcggaaatccttcgatcacttgatttccgataccaaggcaccaaaacgacaggagatggaatcaggtataacgactccgcccaagatgagacgggtcgccgagacagactacgagatggagacgcaacgtatctcttctagccaacagcatccacatctccgcaaggtcagcgtcagcgaaagcaatgtactgcttgacgaggaagtgctcactgaccccaaaatccaggccctgctgctgacagtacttgcaacgctggttaaatacactacagatgagttcgaccaaaggatcttatatgagtacctggctgaagcttcggtagtgttccccaaggtttttccagtcgtccacaacctgctggattctaaaattaatacactgcttagcctgtgccaggaccccaacctgctgaatcccattcacggaattgtgcaatctgtggtgtaccacgaggagagcccgccacaatatcagacatcttacctgcaatcgttcggctttaacggactgtggagatttgcgggaccgtttagcaaacagacgcagatacctgattacgcggaactgattgtgaaattcctcgacgcattgatcgatacgtatctgcctggaatagatgaggagacctctgaggaaagcctgctaaccccaacctccccatatccccccgcgctgcaatcacagttgagtatcacagccaatctgaatctgtccaacagcatgacttctctggccacttcgcaacattcacctgggatcgataaggaaaacgtggagctctcccccaccacaggacattgtaactctggccgaacacgccacgggtctgctagccaggtacagaagcaaaggtctgcaggcagcttcaagcggaacagtatcaagaaaatcgtgtag

SEQ ID NO: 16285 - DNA, 8520 bp, synthetic construct
  misc_feature 1..8520: note = Description of Artificial Sequence: Synthetic coding sequence
  source 1..8520: mol_type = other DNA
atggctgcccataggccggtcgaatgggttcaggctgtggtcagccggtttgacgagcagctacccattaagactggccagcagaacacacacactaaagtaagcaccgaacacaataaggagtgtctcattaacattagtaaatacaaattcagcttggttatctccggactgacgacgatcctgaagaacgtcaacaatatgcgaatctttggtgaagctgccgagaagaacctgtacctgtctcagctgatcatcctcgacactctggagaagtgtttagctggacagcccaaggacaccatgcggctggacgaaacaatgctggtcaaacaactactgcccgaaatctgtcattttttgcacacatgccgcgaagggaaccagcacgctgctgagttgaggaattccgcgagtggcgtgttattcagtctgagttgcaataactttaacgcggtgttttctcgcatctcaacccgcttgcaggagctgacagtgtgtagtgaagataacgtcgacgtgcatgacatcgagctgcttcagtacattaatgtggactgtgctaagcttaaaaggctcttgaaagagacagctttcaaattcaaagcgcttaagaaggtggctcagctggcagtaattaattctttagagaaggcattctggaactgggtggaaaattatcctgatgaattcaccaagttgtaccagataccacaaacagatatggcggaatgcgcagaaaagttgtttgatctggttgacggattcgcagagagtaccaagcgaaaagctgcggtttggccactccagattattctgttgattttgtgtccagagattatccaggatattagtaaagatgtggtggatgagaacaatatgaacaaaaagctgtttctggactctctccgcaaagctctggccggccacggaggatcgcgtcagctgaccgaatctgcagccatcgcctgtgtgaagctatgtaaagcctcaacctacattaactgggaagacaactctgttatttttctgctggtgcagagcatggtagtcgatttaaagaatttactctttaacccctcaaaacctttctcaaggggcagccagcccgccgacgtggacctgatgattgactgcctcgtcagctgtttcaggatctccccccacaacaatcaacattttaagatttgtctcgcccagaatagccccagcactttccactacgtgctcgtgaactctctccacagaattataactaatagcgccctggattggtggcccaagatcgatgccgtttactgtcactccgttgagcttagaaacatgttcggcgaaactctgcacaaagccgtccaggggtgtggcgcgcaccccgccatccggatggctcccagcctcactttcaaggagaaggttacaagcttgaaattcaaggagaagcctacagacttagagactaggtcttataaatatctgttgctgagcatggtcaagttgatacacgccgacccaaaacttcttttgtgcaatcctcgcaagcagggaccagaaacgcagggttccaccgctgaactcatcaccggactagtacaactggtcccccagagccacatgccggaaatcgcacaggaggctatggaggcgcttttagttctgcaccagctcgactctattgatctttggaatcctgacgcccccgttgaaacattctgggagatatccagtcaaatgctattctacatctgcaagaagctcaccagccatcagatgctgagctcaactgaaatccttaaatggttaagagaaatcctgatttgccgcaacaagtttctgctgaaaaacaaacaagccgacaggtcatcctgccatttcctgctattttacggcgtcggctgcgatatccccagctctgggaacacctcccagatgtcaatggaccatgaggagctgctgaggactcctggagctagcctgagaaaggggaagggtaatagttctatggactctgccgccggttgcagtggcacaccccccatatgcaggcaggcgcagactaagctggaagtggccctgtatatgttcctctggaatccagacacagaggccgtgctggtcgccatgagctgcttccgccacctctgtgaggaggccgacattcgttgcggagtggatgaagtctccgttcacaacctgcttcccaactataacacatttatggagtttgcaagcgtgtcaaacatgatgagcacagggagggctgccctgcagaaaagggtgatggccttgctgaggcgtattgaacatcccacagctggtaataccgaggcatgggaggacactcacgccaagtgggagcaggctaccaagctgatactgaactatccaaaggccaaaatggaagacggtcaggccgctgagagcctccataagactattgtcaagagaaggatgagccatgtttcaggaggaggaagcattgacctcagcgacaccgatagccttcaggagtggataaatatgacaggcttcttgtgtgcactgggtggcgtttgtttgcagcagaggagtaattccggcctcgccacctacagcccaccaatggggcctgtttcagaacgcaaagggagcatgatatcagtcatgagttccgagggtaatgctgacactccagtttccaagttcatggaccgcctgctgtcactcatggtatgcaatcatgagaaggtgggcttgcagatccgaacaaacgttaaagatctcgttgggctcgaactgtctcccgctctgtatcccatgctgtttaacaaactgaaaaacacaatatcaaaatttttcgattcccagggccaggtattgttaactgatacaaacactcagtttgtggaacaaactatcgccattatgaagaatctcttggataatcacactgaggggagctccgaacatttggggcaggcgtcaattgagaccatgatgctgaacctagtgcggtacgtgagagtattgggaaatatggtccatgcgatccagattaagacaaagctttgccagctcgttgaagtcatgatggctcgccgcgacgatctctctttctgccaggaaatgaaattcaggaataagatggtggagtatctcactgactgggttatgggcacaagtaaccaagcggccgatgatgatgtgaagtgtttaacgagagacctggatcaggcctccatggaggctgtcgtaagcctgcttgccggcctacccttgcagccagaggagggagacggcgtcgagttgatggaagcaaagtcccagctgttcctgaagtacttcaccctttttatgaacttgctcaacgactgctctgaggttgaggatgaatctgcgcagactggtggaagaaagagggggatgagtcggaggcttgcgagtctgcggcattgtactgtcctggccatgtccaacctgctgaacgccaacgtggacagtgggctcatgcactctatcggactcggctaccataaggacctgcagacccgggccacttttatggaggttctcaccaaaatactgcagcagggcactgaattcgacactctggccgaaacagtgctggcagatcggtttgaaagactcgtggaactagtgacaatgatgggcgatcagggagagttgccgatcgctatggcactggccaatgtcgtgccttgcagtcaatgggatgagttagcccgggtactagtgacactgttcgacagccggcacctgctttatcagctcttgtggaacatgttcagtaaagaggtggaactagcagacagcatgcagactctttttcgcggaaattctctggcctcaaaaattatgacgttctgcttcaaagtttacggagccacttatctgcaaaagttgctagatccattgttgcgcatcgtgatcacctcaagcgactggcagcacgtgtcttttgaagtggacccaacacggctggagccttccgagagtttagaggaaaaccagcggaatctgttacagatgactgaaaagttcttccacgcgatcatcagcagttcttccgaatttcccccacaactgcggagcgtttgtcactgcttgtatcaggccacatgtcacagcttgctgaacaaggcgaccgttaaggaaaagaaggaaaataaaaaaagtgttgtctcccaaaggtttccacaaaattctataggagctgtgggttcagccatgtttctgagatttattaaccctgcaattgtgagcccctacgaggccggcatactggacaaaaagccccctcccaggatagaacgcggcctgaaattgatgagtaaaattctgcaatcaattgctaaccacgtgttgttcaccaaggaggaacacatgagaccatttaatgactttgtgaaatcaaacttcgatgccgccaggcgtttctttctggacatcgcatccgactgtccaacttccgacgccgtgaaccacagtctcagcttcatatccgacggcaacgtcctcgcccttcacaggctcctgtggaacaaccaggagaaaattggacagtatttgtctagtaatcgcgatcacaaggcggtggggaggaggccttttgacaagatggcgacattgctggcttatctgggccctccagagcacaaaccggtcgctgacacgcactggtctagcctgaatctgaccagtagtaaatttgaggaattcatgaccaggcatcaagtgcatgagaaggaggaattcaaagccctgaagacactttcgatcttctaccaagctggtacctctaaggctggaaatcccattttctattatgtggccagaaggttcaaaacaggccagatcaacggggatcttcttatctatcatgtcttgctgacactgaagccgtactacgccaagccgtatgagattgtagtggacctgacccataccggacccagcaatcgattcaaaacggacttcctttcaaagtggtttgtggtcttccctggatttgcatacgataacgttagtgctgtgtacatttacaattgtaactcctgggtgagggaatatacgaaataccacgagagactgctgacgggccttaaaggtagcaaaaggcttgttttcatagactgccccggaaaacttgcagaacacatcgaacatgagcagcagaaattgccagcggccacacttgctcttgaggaagatcttaaggtgtttcacaacgctctgaagttagcgcataaagataccaaggtttctatcaaggtgggctctaccgcagttcaggtgacttctgccgaaaggacaaaagtgctgggccagtctgtgtttctcaatgatatttactatgcgagcgaaattgaagaaatatgcctcgtcgacgaaaaccagtttacacttactatagctaaccagggaacacctttaactttcatgcaccaggagtgcgaggcaattgttcagtctatcatccacattcgcacaagatgggagctcagccagccagactcaatccctcagcacacaaagattcgaccaaaggatgtcccaggcaccttactgaatattgccctgttgaatctgggcagttctgatccgagtcttaggagcgccgcctacaacctgttatgcgcactgacctgtacctttaatttgaaaatagagggacagttgctggagacctctgggttatgtatcccggccaataacacactattcattgtgtcaatcagcaaaaccctagcagcaaacgagccccacctcacactcgagttcctggaggagtgtatttctggcttctccaaatcctccatcgaactgaagcatctttgcctcgagtacatgaccccatggctgtcgaacttggtacggttctgtaagcacaatgacgacgcaaagcggcagagggtgacagctatccttgacaagctgattaccatgactatcaatgagaaacaaatgtacccctccatacaggctaagatatgggggagtctgggacaaataacagaccttttggacgtcgtgctggattctttcattaagacttcagccaccggagggctcggttctattaaagctgaggtgatggctgacaccgctgtggctcttgcatccggcaacgttaagctggtttcctctaaggttatcggaagaatgtgcaagattatcgacaagacctgcctgtcacctaccccaactctcgagcaacacctgatgtgggatgacatagccatcctggcacggtacatgctcatgctgtctttcaacaactccctcgacgtggcagcccacttaccatacctcttccacgtggtgacgtttctcgtcgctacaggacccctgagtttgcgggcctctacgcacgggctggtgatcaatatcatacactctctttgcacgtgttctcagctgcatttctcagaggaaacaaaacaggtcttgcgtctgtcccttactgaattttcactgccgaagttctacctgctgttcggaattagcaaagtgaaatctgctgcagttatagctttccgctcgtcatatcgggaccgctctttcagcccagggtcctatgagcgtgaaacattcgcgctgaccagtctggagacggtcaccgaggccttgcttgaaataatggaggcttgcatgcgggatatccctacttgcaaatggctggaccagtggacagaactggcgcagagattcgctttccagtataatccttcccttcaacctcgggcattagtcgtttttggatgcatcagcaaaagggtcagtcacggacagatcaagcaaattatcaggatactgtcaaaagcgctggagtcctgtctgaaaggtcctgacacttacaatagtcaggtcctgatcgaggccaccgttatagcccttacaaagctccagcctctgcttaacaaggattcaccactccataaggccctgttttgggttgctgtggcggttctgcagttggatgaagttaacctgtactcggcagggacagcgctcctcgaacaaaacctccataccctagattcattaagaatttttaacgacaaatctccggaagaggtattcatggcaattagaaacccgctcgagtggcattgcaagcaaatggaccacttcgtcggtctcaactttaatagcaactttaacttcgctctggtggggcatttgctgaaggggtacaggcaccccagtcccgccatcgtggccagaaccgtgcgcatactgcacaccctactgaccctggtcaacaagcacaggaattgcgacaaattcgaggtgaatacacagtctgtcgcctacctggcggcgctgctaaccgtaagtgaagaagtgaggtctcgttgcagccttaaacacaggaaatctttgctgctaaccgatattagtatggagaatgtccctatggacacctaccccatccatcacggcgacccgtcatatcgtaccctcaaggagacccaaccttggagcagccctaaagggagcgaaggttatctggcagctacttatccaaccgtaggtcagacaagtcccagggccaggaaatcgatgtctctggacatgggtcaaccatcccaggctaataccaaaaaactgctgggaaccaggaaatcatttgaccatttaattagcgacacaaaggcaccaaagagacaagagatggaatccggtataacaacacctccaaaaatgaggagagtggctgagacagactatgagatggaaactcagcggatttctagctcccaacagcacccgcacttgcggaaggtgtcagtgtccgagtcaaatgtgctactggatgaggaggtgttaactgatccaaagatccaagcactgttactcactgttttagccactcttgtcaaatacaccactgatgaatttgaccagcgcattctttatgagtacttggccgaggcttccgtcgtgttcccaaaggtgttccccgtggtacacaacctgttggattccaagatcaataccctgctgagcctgtgtcaggatccaaatcttctgaatccaatccacggcattgtgcagtcagtcgtataccatgaggaaagcccccctcaataccagacctcctacctgcaaagcttcgggtttaacggactatggagatttgccggccccttttccaagcagacccagattcccgactatgcagaactcattgttaagttcctcgatgcgttaatcgatacttatctgccagggatcgacgaagagacgtctgaagagagcctgttgactcccacgtcaccatatcctccagctctgcagtctcaactgtccataacagccaacctaaacctgagcaattccatgacatccctagctaccagtcagcactcaccaggcatcgataaagaaaacgtcgagctgtcaccaacgacaggacattgcaactctggtcggacaaggcatgggagcgcatctcaggttcagaaacagagatccgcgggttcttttaaacgaaacagcataaaaaagattgtctag

SEQ ID NO: 16286 - DNA, 615 bp, synthetic construct
  misc_feature 1..615: note = Description of Artificial Sequence: Synthetic coding sequence
  source 1..615: mol_type = other DNA
atgcacgagaggtacagtaatgtccaggtcgccgggcccgtcgatcgcacatcctcaaaggactcccccctgcataaggcgctattttgggtagccgtcgctgtactacagcttgacgaagtcaacttgtacagcgccggcactgcattgctggagcagaacctccacacccttgattcattaaggattttcaatgataagagccctgaggaagtcttcatggccatcagaaacccactggagtggcactgtaaacagatggaccatttcgtcgggctgaattttaacagtaatttcaactttgctctagtgggccatctgctgaaagggtaccgccacccctccccagctattgttgcacgcacggttagaattctacatactctcctcactctggtcaacaaacacaggaattgcgacaagtttgaggtgaatacccagagtgttgcatacctggccgccctgctgactgtgtctgaagaggtacgatccagatgctcactcaagcatcgcaaaagtcttctcttgactgatatttccatggagaacgtgcccatggatacctatcctatacatcatggagatccgagttacagaaataaggaaaagttctag

SEQ ID NO: 16287 - DNA, 1782 bp, synthetic construct
  misc_feature 1..1782: note = Description of Artificial Sequence: Synthetic coding sequence
  source 1..1782: mol_type = other DNA
atggcagcccaccggcccgtggaatgggttcaggccgtagtctctcgatttgacgaacagttgcctattaagacagggcagcagaatacacacacgaaggtttctaccgagcacaacaaggaatgccttatcaatatttcaaagtataaattcagtctggtcatttctggcctgacgaccatactcaagaatgtcaacaatatgcgcatctttggggaggctgcagaaaagaacctttatctttcccagctcattatcctcgacacgcttgagaagtgcctggcggggcaacctaaagatactatgagactcgacgagaccatgcttgtaaagcagcttcttcccgagatctgccacttcctgcatacatgccgagagggaaatcaacatgcagcagaacttagaaactctgcttcaggagtattgttctctctgtcttgtaataacttcaacgcagtgttctcccgcataagtacacggcttcaggaattgacagtgtgcagcgaggacaacgtcgatgtgcatgatattgagctcctgcagtatattaatgttgactgtgccaaactgaaacgcctcctgaaggaaactgcattcaaattcaaagcgctcaagaaagtggcccagcttgcagtgattaacagcctcgagaaagccttctggaactgggtggaaaactatcctgacgagttcacaaaactctaccagataccccaaaccgatatggcggagtgcgccgagaagctattcgatctagtggatggcttcgccgagtctacgaaaaggaaggccgccgtctggccactgcaaatcatactgctgattttgtgccctgagatcattcaagacatttctaaggatgtggtggacgagaacaacatgaacaagaagcttttcttagactcattacgcaaagcgttagccggccacgggggatcacgccagcttacagagtctgccgccattgcctgcgtaaagttgtgcaaggccagcacatacattaactgggaggacaattccgtgatctttctcctggtgcagtcaatggtcgtagacttgaagaacctgctattcaatccttctaaaccgttttccagagggtcgcagcccgccgacgtggacctcatgatagactgtcttgtgagctgtttccgaatctccccccataataatcagcacttcaagatatgtcttgcccaaaactcaccttctacgtttcactatgtgcttgtgaacagcctacatagaattattaccaattccgctttggactggtggcctaaaatcgacgccgtgtattgtcacagtgtggagctaagaaatatgttcggcgagactttgcataaagccgtccagggatgcggcgctcaccccgccataagaatggccccgtctttgactttcaaggaaaaggtgacctccctcaagtttaaggaaaagcccaccgatctggaaactcgttcctataagtacttattgctctctatggtgaagcttattcacgccgatcccaagctgcttctatgtaaccccaggaaacagggtccagagacccaaggatcgacagccgagctcatcacaggacttgtccagttggtgcctcagtcccatatgcctgagatcgcacaggaggccatggaggccctcctggtgttgcaccagttggactccattgacctctggaaccccgacgctcctgtcgaaactttctgggagatccggtatatgtacttctatttcttgaatagcacattcaagttttatttcgttttcctttcctag

SEQ ID NO: 16288 - DNA, 1917 bp, synthetic construct
  misc_feature 1..1917: note = Description of Artificial Sequence: Synthetic coding sequence
  source 1..1917: mol_type = other DNA
atgcacgaacgttactctaatgtgcaagtggccggccccgttgacaggactagctccaaattttgtggaagcttcaattgccgcttcgcattccagtacaatccttccctgcaacctcgcgcccttgtggtgttcggctgcatcagcaaaagggtatcgcacgggcaaataaaacagataattcggatactcagcaaagccttagagtcatgcttgaaaggccctgatacctacaactcacaagttttgatcgaggcaacggtcattgccctgaccaagctgcaaccacttcttaacaaggattcgcccctgcataaggccctgttttgggtggccgtggcagtactgcagttggacgaagttaatctgtactcagctgggacggctctcctggaacagaacctgcacacattggactcgttacgcattttcaacgataaatctccggaggaggtttttatggcgattcgcaacccactggagtggcattgtaaacaaatggatcactttgttggcctcaattttaactctaactttaattttgccttagtcggtcatctcctgaagggctataggcacccttccccagctattgtggccaggaccgtgcgcatactgcatacattgctcactctggttaacaagcatcggaattgcgataaattcgaggtgaacacacaatccgtggcctatctggccgccctgctaaccgtctccgaggaggtcagaagtagatgctcactgaaacataggaagagcttattgcttacagacatcagtatggaaaatgtacctatggacacataccctatacatcatggggaccccagctacaggaccttgaaggagacccaaccttggtctagccccaaaggcagtgaaggatacctggccgccacatatcccacagtgggtcagacttccccgagggctcgcaaatccatgtctctcgacatgggtcaaccctctcaggcaaacacaaagaagctactggggactcggaagagttttgatcacttgatttctgatacaaaggctcccaagaggcaggagatggagtccggaataaccacaccccccaagatgcgcagagtggccgagacggattacgagatggagacacagcggatctcttcttctcagcaacacccacacctaaggaaggtgtccgtgtccgaaagtaacgtcctgctggatgaggaagtactgactgatccaaagattcaagcacttttacttacagtcctggccaccctcgttaagtataccacagatgagtttgatcaacgtatcctttacgagtaccttgcagaggcctcagtcgtatttccgaaggtatttcctgtcgtgcataatctgctcgattccaagatcaatactctgctgtcgttgtgtcaggacccaaatctgcttaacccgatccacggcatagtgcagtcggtggtgtaccatgaagagtcaccgccccagtaccagaccagctacctgcagtctttcgggttcaatgggctgtggcgctttgcaggcccatttagcaagcaaacccagatacccgactacgcagagctcatagtgaagttcctggacgccctcattgatacctacctgcccggaatcgatgaggaaacttccgaggagagtcttctgactcctacaagtccatacccccctgccctacaatctcagctgtccatcacagccaacctaaacctgtccaactcaatgacatctcttgccacttcccagcactcacccggcatagataaggagaatgtggaactgagccccacgaccggccactgcaactctgggagaacacgccatggcagcgcctctcaggttcagaagcagcggagcgccggctccttcaaattggcgcttctgaatctgctgacggcgcaccagaactctctgtag

SEQ ID NO: 16289 - DNA, 7509 bp, synthetic construct
  misc_feature 1..7509: note = Description of Artificial Sequence: Synthetic coding sequence
  source 1..7509: mol_type = other DNA
aactgggaggacaattccgtcatttttctgctcgttcaatcaatggttgtcgatctgaagaacttgctatttaatccttctaaacccttctctaggggcagccagccagcagatgtcgacttgatgatagactgtctagtcagttgctttcgtatcagcccacacaacaaccaacacttcaaaatttgcttggcccagaattcaccttctaccttccattacgtgctcgttaactcactccatcggattattacgaattccgccctggactggtggcccaagatcgatgctgtatattgtcacagcgtcgagctgaggaacatgtttggagaaacattgcataaagccgtgcagggatgtggagctcatcctgccattagaatggcacccagcctcaccttcaaggagaaggtcacttctttgaaattcaaagaaaagcctacggatctggaaacaaggagctataaatacctgttgctgtccatggtcaagctgatccacgctgaccctaaacttctactctgtaacccaaggaagcagggacctgaaactcagggtagcacagcagagcttataacaggactggtgcaactcgttcctcagtcccatatgccagagattgcccaggaagccatggaggccctgctcgtgctgcatcaactggactccatcgacctatggaacccagacgctccagtcgagactttttgggagatctcttcccaaatgcttttttacatttgtaagaagcttacttcccatcagatgctaagttccactgaaatcctcaaatggcttcgcgagatcttgatttgtaggaataagttcttactcaaaaacaagcaggcagaccgctcgtcgtgccatttcctcttgttctatggagttggttgcgacatcccttcttctgggaacacgtcccaaatgagtatggaccacgaagagcttttgagaacacccggggcgagtctccgaaaaggtaaaggcaattcttcaatggattccgccgccggttgttctggaacaccacctatctgccggcaagctcagacaaagcttgaggttgctctgtacatgttcctctggaaccccgatacagaggcggtgcttgtggctatgagctgcttcagacatctgtgtgaagaagccgacattaggtgtggcgtggacgaagtttctgtgcataatctactcccgaattacaataccttcatggagttcgcatccgtttccaacatgatgagcactggtcgagctgctttgcagaaacgggtgatggctctcctaagaaggatcgagcatcctaccgctggcaacacagaagcctgggaggatacacatgctaaatgggaacaggctactaagctgatcctgaactatccaaaggcaaaaatggaagatggtcaagctgctgagtccttacacaaaacgatcgtcaaacgacgtatgtcccacgtttctggtggcggatctatcgatctctctgatacggactccctgcaagagtggatcaatatgacgggatttctgtgcgccctgggcggcgtgtgtttgcaacagcggagtaactctggtttggcgacatactccccacctatgggaccggtctcagaaagaaaaggcagtatgatttcagtgatgtcctcggagggcaatgccgatacacctgtgtctaagtttatggacagacttctttcccttatggtgtgtaatcatgagaaagttggcctgcagattcgaacaaacgtcaaggaccttgtcggcttggagctgtcaccggccctatatccgatgctgttcaataagttaaaaaataccattagtaagttcttcgattcacaaggacaggtgctgcttaccgacactaacacacagttcgtcgaacaaacgatcgcaatcatgaaaaacctgttagataatcacaccgaagggtccagcgagcatcttggtcaagccagcatcgaaactatgatgctcaacctggtgcggtatgtgagggttctgggcaacatggttcacgccattcagatcaaaacaaagctctgtcagctggtggaggtaatgatggctaggcgggacgatctgtccttttgtcaggaaatgaaattccgaaacaagatggtggagtacctcactgattgggttatgggtacttctaatcaagctgcagatgatgatgtcaagtgtctgacgagagacctggaccaggcatctatggaagctgtggtgagcctgctagccgggttgccgctccaacccgaagaaggagatggtgtcgaactgatggaagctaagtcacagctgtttcttaaatacttcaccctgtttatgaacctgctcaacgactgttctgaagtggaggacgaatccgctcaaacagggggacgcaagagaggtatgtcacggagactagcgtcccttcgtcattgtaccgtactcgccatgagtaatctactgaacgctaatgttgactcgggcctgatgcattccattggcctcggctaccacaaagatttgcagaccagagccaccttcatggaggtgttgactaagatccttcagcagggaacggagttcgacacactggccgaaacggtacttgctgatcgcttcgagcgcctcgttgagcttgttaccatgatgggcgaccagggcgaactgcccatcgcaatggcactggcgaacgtggtaccgtgttctcagtgggatgagcttgccagggtgctggttactttgttcgatagtagacatctgctgtatcagttgctgtggaacatgttttctaaggaggtagaactggcagactccatgcagaccctctttaggggcaactctttagccagcaaaatcatgaccttttgtttcaaagtttatggggctacttatctccagaaactgctagaccccttactgagaattgtgatcacgtcgagcgactggcagcacgtcagttttgaagtcgaccccacaagactagagccatcagaatccctggaggagaatcaacgtaacctgctgcagatgaccgaaaagtttttccacgccataataagtagttcctccgagtttccccctcagctgagaagcgtatgtcattgtctgtatcaggtcgtttctcagcggttccctcagaattcaattggagcagtcggtagcgctatgtttctcagatttataaatcctgcgattgtctctccctacgaagcagggattctagataagaaacccccaccacgaatagaaagaggcctgaagctgatgagcaaaattttacagtccatcgccaaccacgtactgttcactaaagaagaacacatgcgcccctttaatgatttcgtcaagagcaacttcgatgctgcaagaaggttctttctggacatagcgtcagactgcccaacctctgatgctgtgaatcacagtctgagctttatctccgatgggaacgtgctagccctccataggttgttatggaacaaccaggagaagatcggacagtatctatctagcaaccgggaccacaaagccgtgggcaggaggccatttgacaagatggctacactgttggcctacctaggaccccccgagcacaaacccgtggctgatacacactggtcctctctaaatctgacctcatcaaagttcgaagaatttatgacacgacaccaagtgcacgaaaaggaggagtttaaagccttgaaaacgctgagtattttctaccaggccggaacctctaaagccggcaacccgatattttattacgttgctcggcggtttaagaccgggcagatcaatggtgatcttcttatttatcatgttctcctcacgctgaagccatactatgccaagccatacgagatagtggtggacttgacccataccgggcctagtaacaggtttaagactgactttttatctaaatggttcgttgttttcccaggatttgcatatgataacgtgagtgcagtgtacatctacaactgcaattcttgggttagagaatacacaaagtatcacgaacgactcctgaccgggctcaaaggaagcaaacggctggtgtttatcgactgcccggggaagctcgcagaacacatagaacacgaacagcaaaagctacctgccgccacgcttgcactcgaggaggatctcaaggtgttccacaacgctctcaagttggctcacaaggacactaaggtttcaatcaaagtgggctctacagctgtacaggtgacttcggcagagagaactaaggtgctggggcaatcggttttcctgaacgatatatactatgcgagcgaaatagaggagatctgcctcgttgacgagaaccaattcacgctgacaattgcgaaccaggggacccctttgacattcatgcatcaagaatgcgaggctatagttcagtcgataatccacattcggaccaggtgggagctttctcagccggactcaatcccccagcacaccaaaatccgccctaaggacgtcccgggcactttacttaacattgcactgctcaatctgggctcctctgacccctccctgaggagcgccgcttacaatttgctgtgtgctctgacctgcacattcaacctcaaaatcgaagggcaattactagagaccagtggactctgcatcccagccaataatactctcttcattgtctcaatatccaaaaccttggcagccaacgagcctcacctgacgctggaattcctggaagagtgtatttccggtttcagcaagtcaagtattgaactgaaacacctgtgtcttgaatatatgacaccttggctgtcaaacctggtcaggttttgcaaacacaatgacgatgctaaacggcagcgggtgaccgcaatcctggataaactcatcacgatgaccatcaatgaaaagcagatgtatccatcaatccaggccaagatctggggatccctaggacaaataaccgatctcctcgatgtcgtgctggactcctttatcaagacctccgctactggaggcttgggttccatcaaggccgaagtcatggcagatacagccgtggccctggcctccggaaatgtgaaactcgttagctcaaaagtgattggacgcatgtgcaaaatcatcgataagacatgcttgtctcctaccccaacactggagcagcacttaatgtgggacgatatcgccatcttggcgaggtacatgctcatgctttccttcaacaacagccttgatgtcgcggcccatttgccatatctgtttcacgtggtgacgtttttggtggcaactggcccgctgagtctgcgcgccagcacacatggcctcgtgatcaatataattcatagcctgtgcacttgctctcaactgcattttagcgaggagacgaagcaagtgctgcgcctctcactgactgagttcagtcttccaaagttttacttgcttttcgggatctcaaaggtgaagtcagcggcggtgattgctttcaggtcgagctaccgggaccgctcctttagtcctggctcctacgagagagagacatttgccctgaccagcctggaaacggtgaccgaggccctgctcgagataatggaagcctgtatgagagatattccaacttgcaaatggctggatcagtggacagagttagcacagagattcgcctttcaatacaacccctcccttcagcctagggcgctcgttgtgttcggatgcatatcaaaaagagtcagtcatggccaaatcaaacagatcattcgcattctgtccaaagctctggaaagctgtctgaaagggccagatacttataattctcaggttctaattgaggctaccgtgattgccctgactaaactacagcccctcctcaacaaagatagcccactgcacaaagcactgttctgggttgccgtggctgtcctgcagctggatgaggtcaatctgtactctgctgggacggccttgctcgagcagaacctgcataccctggactctctccggattttcaatgataaatctcctgaggaggtgttcatggccattagaaatccactcgagtggcactgcaaacagatggatcacttcgtgggtctcaacttcaactcgaacttcaattttgcattggtggggcacctgctgaagggctataggcatccgtcaccagccatagtcgcaagaacagtccgtatcctccacaccttgcttaccttagtgaataagcacaggaactgcgacaagtttgaagtgaatacccagtctgtcgcatacctggctgcccttctgacagtgtcggaggaggtgagaagcaggtgtagcctaaaacatagaaagagcctgctcctcacagacataagcatggagaacgtccctatggacacataccctattcatcacggcgacccttcatacaggacactgaaggaaacccagccatggtcctctccgaagggcagcgaaggctacctagccgccacttatcccactgtgggacagacctctcctcgtgcccgtaagagcatgagtctggatatgggtcaaccgtcacaggccaacactaagaagctactaggcactcggaagtcgtttgaccacctgatcagcgatacaaaagcgccaaaacgccaagagatggaatccgggataaccaccccacctaaaatgcgccgcgtggccgagaccgattacgagatggagacacaacgaatttcttctagtcagcagcatccacacctgagaaaagtcagcgtgtccgaatctaacgtcctattagatgaagaggttctgacagacccaaagattcaggcgctgctcctgactgtcctcgctacactcgttaaatacactaccgacgagtttgaccagcgcattctgtacgaatacctcgctgaggccagcgtggtgttccccaaggtgtttcctgtggtgcataatcttctagattccaagattaacacgttactgagtctctgtcaggatcctaatctgctgaatccgatccatggcatcgtccagtctgtggtgtaccatgaagaaagcccccctcagtaccagacttcctatctgcaatccttcggctttaatggcctgtggaggttcgccgggccattttccaaacagactcagatcccagactacgcggagctgattgtgaagttcttggatgccttgatcgacacctacttaccaggtatagatgaagaaacatctgaggaatccctgctgactccaacatcaccatacccgccagccttgcagtcccagctatctattacagctaatctgaacctgagcaatagtatgactagcttagcaaccagccagcactctcccgcatctctcccttgctccaagagcgcagtgtttatgcagctgtttccccaccagggcattgataaagagaacgtggagctgtctccaactacagggcattgcaacagcggacgcacccgccacggttctgcttcacaggtgcaaaaacaacggagcgcaggttcttttaagcgcaattccatcaagaagattgtctag

SEQ ID NO: 16290 - DNA, 1524 bp, synthetic construct
  misc_feature 1..1524: note = Description of Artificial Sequence: Synthetic coding sequence
  source 1..1524: mol_type = other DNA
atggctggggcgattgcctcgagaatgagtttctcttccctgaaacgcaagcaaccaaaaaccttcacagtgcgaatcgtgactatggacgccgagatggaattcaattgtgaggtaaagaaacagatactggatgaaaagatctactgcccaccggaagcgtctgttctgcttgctagctacgccgtgcaggccaaatatggcgattatgatccgtcagtacataagcgaggctttctggcacaggaagaactgctccccaaaagggtcattaacctgtaccagatgacgcctgaaatgtgggaggaaaggattactgcatggtatgccgagcatcgtggtcgcgcgagggacgaggccgaaatggaatacctgaaaatcgcacaggacctggagatgtatggcgtgaactatttcgccataagaaacaaaaagggtaccgaactgctgctcggggtggacgcccttgggctgcacatttacgaccctgagaacagactgacccccaagatctcctttccttggaatgagattcggaatatcagctatagcgataaagagttcacgatcaagcccttagacaaaaaaattgacgtcttcaaattcaattcgtcaaaactgagagtaaataaactcatcctgcagctatgcatcggaaatcacgacctgttcatgcgtagacggaaagctgattccttggaagtgcagcaaatgaaagcccaggcccgagaggagaaagctagaaaacagatggaaaggcagagattagctcgcgaaaaacagatgagagaggaagccgaacggactagggacgagctggaaagacgactgctgcagatgaaggaagaggccactatggctaacgaagccctcatgcggtccgaagaaactgctgacctactggcagaaaaggcgcagattacagaggaggaggcaaagctcctggcccagaaggccgcagaggctgagcaggagatgcaacgcatcaaagctacagcaatcagaacagaagaagagaagcgcttaatggaacagaaagtgctagaggccgaggttcttgctctgaaaatggctgaggaatctgagcggagagcgaaagaggcagatcaattgaaacaggacttacaagaagctagggaggccgagagacgcgcaaaacaaaaattgctcgagattgctaccaaacccacttatcctcctatgaatccgattcctgcacctctgcctccagatataccaagtttcaacctgatcggggattcgctttccttcgattttaaggatactgacatgaagcggctctcaatggaaatcgagaaggaaaaagtagaatatatggagaaatcaaaacatttacaggagcagctgaacgaactcaagacggagattgaagccttgaagcttaaggagagagagacagccctcgacatcctccataatgagaattccgatcgcggaggctcatcaaaacacaacaccatcaagaagcctcaggcccagggtcgccgcccaatttgcatttag

SEQ ID NO: 16291 - DNA, 1788 bp, synthetic construct
  misc_feature 1..1788: note = Description of Artificial Sequence: Synthetic coding sequence
  source 1..1788: mol_type = other DNA
atggccggcgcaattgcaagcaggatgtccttttcttccctcaagcggaagcagccaaaaacattcaccgtacgcattgtgacaatggatgctgaaatggaatttaactgcgagatgaaatggaaaggtaaggatctgttcgatctcgtgtgcaggacacttgggttgcgggagacatggttcttcggtctgcaatacactattaaggatactgtggcctggctcaaaatggacaagaaggtgttggaccacgatgtaagtaaggaggagcccgtcacatttcatttcctggcaaagttttatccggagaacgctgaggaagagcttgtgcaggagattacccagcatttatttttcctccaggttaagaagcagatcttagacgagaagatatactgtccccccgaagcctctgttctcctggcctcatacgcagtgcaagccaagtatggagactacgacccatctgtgcacaaaagaggcttccttgcacaggaggagcttctgcctaagagagtaatcaacctgtaccagatgactcctgagatgtgggaggaaagaattactgcctggtacgctgagcacagggggagagcccgagacgaggcggaaatggaatacctgaagattgctcaagatctggaaatgtatggggtgaattatttcgccatcaggaacaaaaaggggactgaacttttactaggagtggatgctctgggcctgcacatctacgaccctgagaatcgcctgacaccgaaaatctctttcccgtggaacgaaataagaaatatatcttacagtgataaggagttcacaatcaaaccattagataaaaagatcgatgtctttaaattcaactcttctaaactacgagttaacaaactgattttgcaactatgcattggcaatcatgacctcttcatgaggcggcgcaaagctgattcacttgaggttcagcaaatgaaagctcaagcacgagaagaaaaggctcggaaacagatggaacgccaaaggctagcaagggagaaacagatgcgagaagaggcggaaaggacacgagatgaacttgaacggcgcctccttcagatgaaagaggaggccaccatggcaaacgaggctcttatgagatcagaggagaccgcagatctgctggcagaaaaagcgcagataaccgaggaggaagcgaagttactggcacaaaaagcggcagaagccgaacaagagatgcagcggatcaaggccacagctatcagaaccgaggaggaaaagaggttaatggagcaaaaggttttagaagctgaggtattggccctgaagatggctgaggaatctgagcgacgcgccaaagaggcagaccaactgaagcaggatctgcaggaggcaagggaggccgaaagacgagcgaagcaaaaattacttgagatcgcaactaaaccaacttatccacctatgaacccaattccagccccgctgcctcccgatatcccctctttcaatttaatcggggactccctgtctttcgacttcaaggataccgacatgaagaggctgagtatggaaattgagaaagagaaggtcgagtatatggaaaagagcaaacaccttcaggagcagctgaacgagctgaaaacagaaatcgaggctctgaagttgaaagagagggaaaccgccctggacatccttcataatgagaattccgacagggggggctccagtaagcacaataccatcaagaaacttacactgcagtcagccaagagtagagtggcattcttcgaagagctgtag

SEQ ID NO: 16292 - DNA, 663 bp, synthetic construct
  misc_feature 1..663: note = Description of Artificial Sequence: Synthetic coding sequence
  source 1..663: mol_type = other DNA
atggctggcgctatcgcttctcggatgagctttagttcacttaagcgcaaacagccaaagacattcacagttagaatagtgaccatggatgctgaaatggaatttaactgtgaggtgaagaagcagatcttagatgaaaaaatttactgtcctcccgaggccagcgtgttgctcgccagttacgctgttcaggcgaagaacaagaaaggcacagagctgctcctgggtgtcgacgccctgggcctccacatctacgatccggaaaataggctaactcctaagatatctttcccatggaacgaaatccggaacatctcctatagtgataaagaattcactattaaacctctggacaagaagattgacgttttcaaatttaactcttcgaagctgcgggtgaacaagctcattctccagttatgtataggaaatcatgacctcttcatgcggcggcgaaaagccgacagccttgaagtgcagcagatgaaagcccaagctcgggaagaaaaggcgaggaagcagggacagaggggacggtcggccgaagcgggtcctgctgggagcaccagaggtggagctaagtcccaggccgaggcccccggggattgtcatcaggctcacgtcccagcacacgagcccaactcctccaccgtagcaagttag

SEQ ID NO: 16293 - DNA, 1524 bp, synthetic construct
  misc_feature 1..1524: note = Description of Artificial Sequence: Synthetic coding sequence
  source 1..1524: mol_type = other DNA
atggccggggctatcgcgagtcggatgtcctttagcagtctaaagaggaagcaacccaagacattcacagtaagaattgtcacaatggatgcagaaatggagttcaactgtgaggtcaagaagcaaatcttagatgagaaaatctactgcccaccagaagcatcggtccttttagccagctatgcggtgcaagctaaatacggcgattacgatcctagcgttcacaagagagggtttttggctcaggaagaattattgcccaaaagagtgataaacttataccagatgactccggagatgtgggaagaaagaataacagcctggtacgccgaacatcgcggaagagcccgagatgaggcagagatggagtatttaaagattgcccaggacctagaaatgtacggggtaaactatttcgctatacggaacaagaaaggcactgagctgctcctcggcgtggatgctttaggactacacatctacgatcctgagaatcggcttacaccaaagattagctttccttggaacgaaatcaggaacatctcatattcagataaagaattcactatcaaaccgctcgacaagaaaattgacgtttttaagtttaactcctcgaaactccgtgtcaacaaacttatactccagctgtgtattgggaaccacgatcttttcatgagaaggcgcaaagcagattctctagaagtgcagcagatgaaagcacaggcccgagaggaaaaggcccgcaagcaaatggaacggcaaaggttagcacgggaaaagcagatgagagaggaggcggaacgaacacgggacgaactggaacgtagactgttgcagatgaaggaggaggccacaatggctaacgaggctctgatgaggtctgaagaaactgcagatctgttggccgaaaaggctcagatcactgaggaggaggcaaagcttctagcccaaaaagctgcggaggccgaacaggaaatgcagcgtatcaaagccaccgcaattcggactgaggaggaaaagcgattgatggagcagaaagtgttagaagccgaggtgctggcacttaagatggcggaagagtctgagagacgcgccaaagaggccgaccagcttaagcaagacctccaggaggcaagagaggccgagaggagagcaaagcagaaactgctggagatcgccacaaaaccaacctacccacccatgaatcccatccctgcccccctgccccctgatattccctcttttaacttgattggggattccctgagttttgactttaaagacacagatatgaagcgactgagtatggaaatcgagaaggagaaagtcgagtacatggagaaaagcaagcatctccaggagcagctcaatgaactcaagacagaaattgaggccttgaaattaaaagagagagagactgccttggacatattacataacgagaattcagacagaggaggatcttcaaaacataacaccattaagaagccccaagctcagggacggagacccatctgtatatag

SEQ ID NO: 16294 - DNA, 1773 bp, synthetic construct
  misc_feature 1..1773: note = Description of Artificial Sequence: Synthetic coding sequence
  source 1..1773: mol_type = other DNA
atggcaggtgcaattgcctcccgaatgagtttctcaagtctgaagaggaaacagccaaagacttttacagtgaggattgtcacaatggatgctgagatggagtttaattgtgaaatgaaatggaaggggaaagatttgtttgatctggtgtgtagaaccctagggttacgtgaaacctggttctttggccttcaatacacgattaaagatactgtggcctggctaaagatggataagaaagtcttagaccatgatgtgtcaaaggaagagcccgtgacctttcactttttggccaagttttacccagaaaacgcggaggaagagctagtgcaagaaattacgcagcacctgttctttctccaggtcaaaaaacagatcttggatgaaaaaatttactgtccccccgaagcgagtgtgcttctggcatcctatgccgtccaagccaagtatggcgactacgatccaagcgtgcataaaaggggatttttggctcaggaggagcttttaccaaaacgcgtaatcaatctgtaccagatgacccccgagatgtgggaagagaggatcaccgcatggtatgctgagcaccgggggcgtgcgcgcgacgaagcagaaatggaatatctgaagatagcccaggacctcgagatgtatggggttaattacttcgcaatcaggaacaagaagggtactgagttgctcctgggggttgatgcattaggcttacatatctacgacccggaaaacagactgactcccaagattagcttcccctggaatgagatccggaacatctcttactctgacaaggagtttacaatcaagccgctggataagaagattgacgtgttcaagttcaactcctccaagctgcgcgtgaataagcttatactgcaactgtgcattggcaaccatgacctgttcatgcggagaagaaaggccgacagtcttgaggtccaacagatgaaggctcaggcacgagaggagaaggcaagaaagcagatggagcgccaaagactggcacgagaaaagcagatgcgggaagaggctgagcggacccgagacgaactggaacggcgactactccagatgaaggaagaggccaccatggcaaatgaggctctaatgcggtccgaggaaactgccgatctcctcgctgaaaaggctcaaatcaccgaggaagaggcgaaactcttggctcagaaagctgctgaggctgagcaggaaatgcagcgaatcaaggctacagccattcggactgaagaggaaaagaggctgatggaacagaaagttctggaagccgaagtgctggcactgaagatggccgaagaatccgagcgtcgcgcaaaggaagcggatcagctgaaacaggacctccaggaagcgcgggaagcggaacggagggctaaacagaagttgcttgaaatagccactaaaccaacatacccacctatgaacccaatacccgcgccactcccacctgacataccttcttttaacctgatcggggactcactcagtttcgacttcaaggacaccgacatgaagaggctgtccatggagattgaaaaagagaaggtcgagtatatggaaaaatccaagcacctgcaagagcagctaaatgagctgaagaccgaaatcgaggcgttaaaactcaaagagcgcgagaccgcactagacatcctgcacaatgaaaacagtgataggggaggttctagtaagcacaacaccatcaagaaaccacaagcacaaggtcggcgtcccatctgcatttag

SEQ ID NO: 16295 - DNA, 1650 bp, synthetic construct
  misc_feature 1..1650: note = Description of Artificial Sequence: Synthetic coding sequence
  source 1..1650: mol_type = other DNA
atggcgggcgctattgcttctcgtatgtctttttcatccctgaagagaaaacagcccaagacctttaccgtgcgcatagtgacaatggacgcggaaatggagttcaattgcgaaatgaagtggaagggaaaggacctgttcgatctagtgtgccgcactctcgggctgcgggagacctggttttttggactgcaatatacaattaaggacactgtcgcctggctgaaaatggacaaaaaggtgaagaagcagatcctcgacgagaaaatctattgccctcccgaggcttccgtgttgttggcctcctatgctgttcaggccaaatatggcgactacgatccttcagtgcataaaaggggatttttagcacaagaagagctgcttcccaagagggtgataaacctgtaccagatgacccccgagatgtgggaggaacgcatcaccgcctggtacgccgaacaccgcggccgcgctcgcgacgaagcagaaatggagtatctgaaaatagcccaggatttagaaatgtacggcgtgaactacttcgctataaggaacaagaaaggaactgagctcctgctcggggtggacgctctcggacttcatatttacgacccagaaaatagactcacccctaagatcagtttcccatggaacgagatccggaacatctcatattccgataaggagttcactattaaaccccttgacaagaagattgatgtgttcaagttcaactcttctaaattacgggtcaataagctgattctccaactgtgcatagggaaccacgatttattcatgcgccgtaggaaggcagactctctagaagtccagcagatgaaagcacaggccagagaggagaaagccagaaagcagatggagaggcaaagattagctcgtgagaaacagatgcgggaagaagcagaacgcacgcgggacgaactcgagaggcgcctcttgcagatgaaagaagaggcaaccatggcaaatgaagctctgatgagatctgaggaaacagccgacctcctcgctgagaaggcccagattactgaggaggaggctaaattgctagcacagaaggccgcagaagccgagcaggagatgcagcgtatcaaggcaactgccattcggacagaggaggaaaagcggctgatggaacagaaagtgctggaggcagaggttttagccttaaaaatggctgaggagagcgaacggcgtgcaaaggaggctgaccaactaaagcaggatcttcaggaagcacgggaagcggaacgtagagctaagcagaaactgctggagattgcaaccaaaccaacctaccctccaatgaacccaatcccggccccccttccccctgacataccaagcttcaatctgatcggcgactccttgagctttgacttcaaggacaccgacatgaagagactgtccatggagatcgaaaaggaaaaagtggaatacatggaaaagagcaagcatttgcaggagcagttgaatgagttgaagacagaaattgaagctctcaaactaaaagagcgggaaacagccttggacatcctgcacaacgaaaacagcgatcgagggggctcgtcaaagcacaacactataaagaaaccgcaggcacaggggagacgccccatttgcatctag

SEQ ID NO: 16296 - DNA, 1647 bp, synthetic construct
  misc_feature 1..1647: note = Description of Artificial Sequence: Synthetic coding sequence
  source 1..1647: mol_type = other DNA
atggcaggagctatcgcatcccggatgagcttctcgtctctgaaacggaaacagccaaagaccttcaccgtgagaattgttaccatggatgcagagatggagttcaactgcgaagtcctagaccatgacgtgtccaaagaggaacccgttacgttccactttcttgccaagttctatcctgaaaacgcggaagaggaactcgttcaggaaattactcagcatcttttttttctccaggttaagaagcagattctcgacgaaaagatatactgtccgcccgaagcctcagtgcttctagccagctatgcggtgcaggcgaagtacggggactacgaccctagtgtgcataaacggggatttcttgcacaagaggaactgttaccgaagcgcgtgattaacctataccagatgacccctgagatgtgggaggagagaatcacagcatggtatgccgaacaccgcggccgggcgagagatgaggccgagatggaatacctaaagatcgcccaagatctcgaaatgtacggggtgaactacttcgcaattcggaacaaaaaagggacggagctcctcctgggcgtggatgcgctgggacttcatatctatgaccccgaaaaccgcctgactccaaaaatttcctttccctggaacgaaatccggaatattagttactctgacaaggaattcacaattaagcccctcgacaaaaaaattgacgtgttcaaattcaacagctcaaaattaagagtgaataagttgatcctgcagttgtgcatcggcaaccatgacctgttcatgcgccggcgcaaagcagacagcctagaagtgcaacaaatgaaagcccaggctagagaggaaaaagccagaaaacagatggagcgacagcgtcttgcaagggagaaacagatgcgtgaggaagctgagaggacccgtgacgagctggagcgacggctgctccagatgaaggaggaggctaccatggccaatgaagccctaatgaggagcgaggaaacagccgacctgctggccgaaaaggcgcaaatcaccgaggaagaagcaaaattgctggctcagaaagctgcggaggccgagcaggaaatgcagcgcatcaaagctaccgcaatccggactgaagaggagaaaagactcatggagcagaaagtcctggaagccgaagtgctcgctctcaaaatggctgaggagtccgagcgccgggctaaagaggctgatcaactgaaacaagacctgcaggaggcccgcgaggcagaaaggcgggctaagcaaaaactgttggaaatcgctactaagccaacatacccgccgatgaatcctatccccgcccctcttccccctgacattccttctttcaacctgatcggggacagcctgtcctttgattttaaagatactgacatgaagagactgtccatggagatcgagaaggaaaaagtggagtacatggaaaagagtaaacatttgcaggaacagctaaacgagctgaagactgagatcgaagcgttgaagctcaaggagcgagagactgccctcgatattctgcacaacgagaatagtgaccgcggaggttcttcaaagcataatacaattaaaaaacctcaggcccaagggcgacgcccaatctgcatctag

SEQ ID NO: 16297 - DNA, 1773 bp, synthetic construct
  misc_feature 1..1773: note = Description of Artificial Sequence: Synthetic coding sequence
  source 1..1773: mol_type = other DNA
atggcaggcgcgattgcttcgaggatgagtttttctagccttaaacgcaaacagccaaaaactttcaccgttcgcattgtgacgatggatgcagaaatggagtttaactgtgaaatgaagtggaaaggcaaggatcttttcgatctggtctgccgtaccttggggctgagagaaacttggttcttcggtctgcagtacacaatcaaggatacagttgcttggctcaagatggacaagaaagtgctggaccacgacgtgtcaaaggaggagcctgtcacctttcattttctcgctaaattttacccagaaaacgcagaggaagagctggttcaggagattactcagcacctgttctttctgcaggtgaaaaaacagattctcgatgaaaagatctattgtccccccgaggcctcagtgctgctcgccagctacgccgtgcaggcaaaatacggagactacgacccttctgtgcacaaacggggtttcctcgcacaagaagagctcctccctaagagagtcattaacctgtatcaaatgactcctgagatgtgggaagagagaatcactgcgtggtacgccgagcatagggggcgagccagagacgaagccgagatggaatacctgaaaattgctcaggacttagagatgtacggcgtgaattactttgcgattcgcaacaagaagggcacggagctgctgctgggagtggacgccctcgggctgcatatctacgatccggagaaccggctgacgccaaaaatttcattcccctggaacgaaatccgaaacatatcatattctgataaggagttcaccattaagcctctcgacaagaagattgatgtgtttaagttcaatagttcaaagctcagagtgaacaagctgatactgcagttatgtatcggaaaccacgatctattcatgaggagaagaaaagcagatagtctcgaggtgcagcagatgaaagcccaggctcgtgaagaaaaggcacgcaagcagatggagaggcagaggctggccagggaaaagcagatgagagaggaggccgaacggacccgggatgaactggaaagacgcctgcttcagatgaaggaggaggctactatggccaatgaggctctcatgcgctcagaagagactgctgatttgctcgcggagaaggcacagattactgaggaggaagctaaactcctggcacagaaggccgccgaagcggagcaggaaatgcagagaattaaggctactgccatcagaaccgaggaagaaaaacgcctgatggaacaaaaagtgctggaggccgaagtccttgccctgaagatggccgaagaatccgagcggcgagccaaggaagccgatcagctgaaacaggatctccaggaggctcgcgaggctgaaaggcgggccaagcagaaactgctggaaatcgctaccaagcccacctacccccccatgaatcccattccggcccctcttccccccgacattccaagcttcaacctaattggggactctctgagcttcgattttaaggacacagatatgaagcgcttatcaatggagatcgagaaggaaaaagtcgaatacatggagaagagtaagcacctccaggaacaactaaacgagctgaaaacggagatcgaagccctcaaactgaaagaacgcgagaccgcgctcgacatcttgcataatgagaatagcgaccgtggtggcagtagcaaacacaataccatcaagaaaccgcaggcccagggacggaggcctatctgtatttag

SEQ ID NO: 16298 - DNA, 1806 bp, synthetic construct
  misc_feature 1..1806: note = Description of Artificial Sequence: Synthetic coding sequence
  source 1..1806: mol_type = other DNA
atggcgggtgcgattgcttcccggatgtctttctcatctcttaaacggaagcagcccaagacctttacggtgcggatagtgacgatggatgcagagatggagtttaattgtgagatgaaatggaagggtaaagacctgtttgatctggtatgccggaccttgggacttcgggaaacttggttcttcggactgcagtataccattaaggacactgtggcatggttgaaaatggataaaaaagttctggaccatgatgtatcaaaagaggaaccagtgacattccactttctggccaagttctacccagagaatgcagaagaggagctggtgcaggagattacgcagcatctgttctttttacaggttaagaagcaaatcctggacgagaaaatctattgtcctcctgaagcttctgttctgcttgccagctatgctgtacaagcaaagtatggagactacgatccaagtgtgcataaacggggattcctggcacaggaagagctgttgcctaaaagagtgataaatctgtaccagatgacacctgagatgtgggaggaacgaataactgcctggtacgcagaacacagaggcagggccagagacgaggcggagatggaatatttgaagatcgcccaagacctggaaatgtatggtgtcaattacttcgcaatccgtaataaaaagggtaccgaacttctcttaggtgtcgacgccctcgggcttcacatctatgacccggagaacaggctgacacccaaaatcagttttccttggaatgagattcggaacatctcatactctgataaggagtttacaataaaacctctggacaagaagatagatgtattcaagttcaatagttccaaattaagggttaataagttgattctacaattatgtatagggaaccacgatctctttatgcgccgccgaaaggctgactcactagaagttcaacagatgaaggcacaagctcgggaagagaaggctagaaaacagatggagaggcagcggctggctcgggaaaagcagatgcgggaggaagctgaaaggactcgcgatgagctggaacgacgcctcctgcagatgaaggaagaggcaacaatggctaatgaagctttgatgaggagcgaagaggccgaacaggagatgcaacgcatcaaggccaccgcaatccgcactgaagaggagaaacggctgatggaacaaaaggtcctcgaggccgaagtgttggccttgaaaatggccgaggaaagtgagcggagagccaaagaggcggaccaattaaagcaagaccttcaagaagctcgggaggccgagaggagagccaaacaaaaactgctggagatcgccactaagcctacctatccacccatgaatcctatccctgcacccctgcctcccgatatcccgagtttcaacctaatcggagactcgttgtcattcgactttaaggataccgacatgaaacgtctctcaatggagatcgagaaagagaaagttgagtacatggaaaagtcgaagcaccttcaggagcagttaaatgagctcaaaactgagatcgaagctctgaaactcaaagagcgtgagacagccctcgatatcctacacaacgaaaattccgaccgcggcgggagctctaagcataacactattaaaaaaggcatgtttctgttctttttcattctgttttgttggttctccctcaagccgaaggctgaggaccttagtgcctttgagccttcaaatagtccatgtagagccccctctcccgagtggccaagtctgaagtcctcttcacggtag

SEQ ID NO: 16299 - DNA, 1686 bp, synthetic construct
  misc_feature 1..1686: note = Description of Artificial Sequence: Synthetic coding sequence
  source 1..1686: mol_type = other DNA
atggcaggtgctatcgcctcaagaatgtctttctcgtcgcttaaacgcaaacaacctaagacattcacagtgcgcatcgtgaccatggatgccgagatggagtttaactgcgaaatgaaatggaagggtaaagatctgtttgaccttgtgtgtcgaactttgggcctgcgcgagacttggtttttcggccttcaatacacaattaaagatacggtggcatggctaaaaatggataaaaaggtgctggaccacgatgtctcgaaagaggagccagtaaccttccacttccttgcaaaattttatcccgagaacgccgaagaggagctggtgcaggagattactcagcatctgtttttccttcaggtgaaaaaacagatcctggacgagaagatatactgccccccagaagcaagtgtgctgcttgcatcttacgccgttcaagccaagtacggtgactacgacccttcagtgcataagcgcggcttcctggcccaggaggaactgctccctaagagggtgattaatttgtatcaaatgacccctgaaatgtgggaggaacgtattaccgcatggtacgccgaacacaggggtcgggccagggatgaggccgaaatggagtacctgaaaatagcccaggacttggagatgtacggagtaaattactttgccattcggaacaagaagggcaccgaactgctacttggagtggacgctctggggcttcacatctacgatcctgagaatagactgacccccaagatctccttcccctggaacgaaatacgaaatatctcatattctgacaaagagtttacaatcaagcctttggataagaaaatcgatgtcttcaagtttaatagctcaaagctgcgcgttaataaacttattctccaactgtgcatcggcaaccatgaccttttcatgagacgccgtaaggctgacagtctcgaagttcagcagatgaaagcgcaggcaagggaggagaaggccagaaaacaaatgaaggaggaggcaacgatggcaaatgaagcactgatgcggtccgaagaaaccgccgacttgctggctgaaaaggcacagatcaccgaggaagaggcgaaactcctggcccaaaaagccgccgaggccgaacaagagatgcagaggattaaggctactgctatacgaaccgaggaggagaaaaggctcatggaacaaaaggtcctcgaggccgaggttttagcactcaagatggcagaagagtctgagagacgagctaaggaggctgatcaactgaagcaggatctccaggaggcccgagaagctgaaaggcgggccaagcagaagctgttggagatcgcaactaagccgacttaccccccaatgaatccaattcctgctccactcccgcctgacattccctcctttaacctgattggagatagcttgtctttcgacttcaaggatactgatatgaagcgcctgtcaatggagatcgaaaaagagaaggtggagtacatggagaaatcaaaacatctgcaagagcaattgaatgagctgaagactgaaatcgaggccctgaagctgaaggagcgtgaaacagctctggacatccttcataacgagaacagtgatcgtgggggcagttccaagcacaacactattaaaaaaccacaagcccagggccggaggccgatctgcatatag

SEQ ID NO: 16300 - DNA, 1773 bp, synthetic construct
  misc_feature 1..1773: note = Description of Artificial Sequence: Synthetic coding sequence
  source 1..1773: mol_type = other DNA
atggccggagctatagccagtcgcatgtcattttcgagtctgaaaaggaaacagcccaagacttttacggttcggatcgtcacgatggacgccgagatggagttcaactgcgaaatgaagtggaagggaaaagacctgtttgacttggtatgtcggaccctcgggctgcgcgagacctggttcttcggtctccagtatacaatcaaggatacagtggcctggttgaagatggataagaaggtgctcgaccatgacgtgtccaaggaggaacctgttactttccactttctggcaaagttttacccagaaaacgcggaagaagagcttgtacaagaaattactcagcacctattcttcttacaggtgaaaaagcagatcctcgacgagaagatctactgtccccccgaggcaagcgtgctgctggcctcttatgcagtgcaggccaagtatggcgattacgatccttccgtgcataaacgcggattcctggctcaggaagaactgcttccaaagagggtgatcaatctgtatcagatgacacctgagatgtgggaggaaagaataaccgcctggtacgcagaacataggggaagggcacgggatgaagcagaaatggaatatctgaagattgcacaggacctcgagatgtacggtgtcaactacttcgccatccggaacaaaaaggggacagaactcctccttggcgtggacgcattgggcctgcatatttatgatcccgagaaccggttgacacctaagatctcgtttccctggaatgaaatccgcaatatttcctattccgacaaagagttcaccattaaacccctggacaaaaaaatcgatgtgtttaaattcaattcatcaaaactgcgggtgaataaactcatcctgcaactctgtataggcaatcacgacctgttcatgagacggcgcaaggctgactctttggaagtacagcagatgaaggcccaggctagggaagaaaaggccaggaaacagatggagagacagaggttggccagggaaaagcagatgcgcgaagaagccgagcgtactcgcgacgagcttgaaagacggctactgcagatgaaagaggaggcaactatggctaacgaagctctgatgaggtcggaggaaaccgctgacctgttggccgagaaagcccagattaccgaagaggaagcaaagctgttagcccaaaaggccgctgaagcagaacaggagatgcagcgcattaaagcaaccgccatcaggaccgaggaggaaaagcgacttatggaacagaaggtactggaggcggaggtgcttgccctgaagatggccgaggaatctgagcggagggcgaaagaggctgaccaactgaaacaggacctgcaggaggcacgggaggccgaaaggcgcgccaagcagaaactgcttgaaatcgctactaagcccacataccctccgatgaaccccatcccagctcctctacctcccgatatccccagcttcaacttgattggagatagcctctcattcgattttaaagacacagacatgaaacggcttagtatggagatcgagaaagaaaaggtagagtacatggaaaagtcaaaacacctccaagaacagttgaacgagctaaaaactgaaattgaagcgttgaagttgaaagagcgcgagacggctctggacatcctccacaacgaaaattccgatagaggcgggtcctcgaaacataatactatcaagaaacctcaggcacagggacgcaggcccatttgtatctag

SEQ ID NO: 16301 - DNA, 498 bp, synthetic construct
  misc_feature 1..498: note = Description of Artificial Sequence: Synthetic coding sequence
  source 1..498: mol_type = other DNA
atggccggagcaatcgcatcaagaatgtctttttctagtctgaagcgtaaacagcctaagacatttacagtgagaattgtgactatggatgccgaaatggaatttaactgcgagatgaagtggaagggcaaagacttgtttgatttagtctgccggacacttggactccgggagacctggttctttggactgcagtacacgatcaaagacacagtcgcatggttgaaaatggacaaaaaggtgctcgatcatgatgtgagcaaagaggaacctgtgaccttccacttccttgccaaattttaccctgagaatgccgaggaagagctggtgcaagaaattactcagcacttgttctttcttcaagtgaaaaaacaaattctagatgagaaaatttattgcccgccagaagcctcggtcctcttagcctcatacgctgtgcaagccaaactgaccttgcagtccgctaagagccgggtcgcattctttgaggaactttag

SEQ ID NO: 16302 - DNA, 663 bp, synthetic construct
  misc_feature 1..663: note = Description of Artificial Sequence: Synthetic coding sequence
  source 1..663: mol_type = other DNA
atggccggagcgatcgccagccgaatgtcattttcctcccttaaaagaaagcaacccaagacttttactgtacgtatcgtgaccatggatgcagaaatggaattcaactgcgaggtgaaaaaacagatcctggacgagaagatttattgcccccctgaagcctcagttctgctggcatcatacgcggttcaagctaagaacaagaaagggactgaactgttgctgggtgttgacgccctgggactccacatctacgaccccgaaaaccgactcacacctaagatctcatttccatggaatgagattcggaatatctcttacagtgacaaagagtttactattaagcctctggacaagaagattgacgtattcaagtttaactcctcgaagttgcgggtgaataagttgatccttcaactttgtatcgggaatcatgacctgttcatgcgccggaggaaggctgattccctcgaggtgcagcagatgaaggcacaggcgagagaggaaaaagcgaggaagcagggccagcgaggcagatcggccgaggccggacctgctggcagtaccaggggcggggcgaagtcgcaggctgaggccccaggagactgccaccaggcccatgttcccgcccatgaaccaaacagctccaccgtagcctcctag

SEQ ID NO: 16303 - DNA, 2772 bp, synthetic construct
  misc_feature 1..2772: note = Description of Artificial Sequence: Synthetic coding sequence
  source 1..2772: mol_type = other DNA
atggagcgaggcctgcctttattgtgcgccgtgctggccctggtcctggcacccgctggcgcctttcggaacgataaatgcggtgacactatcaaaatagaaagccccggataccttacatctcccggctacccacactcctaccatccgagtgagaagtgtgaatggctgattcaggccccggatccatatcagcggattatgatcaatttcaacccccactttgacttggaagacagagactgcaaatacgattatgttgaagtgttcgacggcgagaatgagaacggccatttcaggggcaagttctgtggaaaaattgccccacctcctgtggtgagtagcggccccttccttttcatcaaattcgtatccgattacgagacacacggggctggttttagtatacgctacgagattttcaagagaggacctgaatgtagtcagaattacactactccgtccggggtgattaagagtcccggatttcccgagaaataccctaactcgctcgagtgtacttacattgtcttcgtgccaaaaatgtccgaaatcatattagaattcgagagtttcgacctcgagcccgattcaaacccgcccggcggtatgttctgccgatatgaccgccttgagatctgggacgggtttcccgatgttggacctcatatcggccgatactgtgggcaaaagacgccaggccgaatcagatctagcagtggaatcctaagtatggtgttttacacagattctgcaatcgcgaaggaaggcttcagtgcgaactacagtgttctgcaaagttctgtgtcagaagatttcaaatgcatggaggcattaggcatggagtcaggcgaaattcactccgatcaaataactgcttcatctcaatactccacgaactggagcgccgagagaagccgccttaactaccctgagaacggctggacaccgggagaggattcttacagggagtggatccaggtggatttaggcctgctgcgctttgtcacagcggttggaactcagggggcaattagtaaagaaaccaagaaaaaatactatgtgaagacctacaagatagatgtgtccagcaatggagaggactggatcaccatcaaggaaggaaataaacccgtgctgtttcaggggaataccaaccctacggacgtcgtggtcgccgtattcccaaagcccttaataacaagattcgttcggatcaaaccagccacttgggagacaggaatcagtatgcgctttgaggtgtacgggtgcaaaatcacagactacccctgctccggtatgctaggcatggtaagcggacttatttccgattcacaaattacctcctctaatcagggagatcgtaattggatgcctgagaatattcggctggtgacgagccggagcggttgggccctgccccctgctcctcactcctatatcaacgagtggttacaaattgatctgggtgaggagaaaattgtccgcgggatcatcattcaaggcggcaaacaccgcgagaacaaagtcttcatgcggaagtttaagattggatatagcaataacggaagtgactggaagatgataatggatgactcaaaaaggaaggctaaatcatttgaggggaataacaactacgacacaccggagctgcgaacttttccagctctgagcacccgcttcattcggatatatcccgagagagctacacacggaggtctgggactgcgtatggagttattgggatgcgaggtggaggctcccaccgctgggcccactacccccaatggtaacttagtggacgagtgcgatgacgaccaagccaattgccatagcggtaccggtgatgactttcagctcactggtggcacaaccgtgttggccaccgagaagccgacagttattgacagtactattcagagcgagttccctacatacgggttcaattgcgaattcggctgggggagccataaaaccttctgtcactgggagcacgataaccatgttcagctgaagtggagcgttttaacctcaaagaccggcccaattcaagatcataccggagatggtaatttcatttatagtcaagctgacgagaatcagaagggcaaggtcgcccgacttgtgtcacctgtagtatattcccagaattcagctcactgtatgaccttttggtaccacatgtccggcagtcacgttggcacacttagagtgaaactccgctaccaaaaaccagaggagtacgaccagttggtgtggatggcgatcggacaccagggagatcactggaaggaaggaagagtgctcctgcacaaatcgttgaagctgtaccaggttatctttgaaggggaaatcggcaagggcaatttgggcgggattgccgttgacgatattagtattaacaatcatatctcacaggaagactgtgctaagccagctgacttagataaaaaaaatcctgaaatcaaaatagacgaaacaggctctactcctggctacgagggtgaaggagaaggtgataagaatatctcaagaaagccgggcaatgtgctcaaaacacttgaccccattcttattactataattgcaatgagcgccttgggggtgctcttaggcgccgtgtgcggcgtcgtgctgtactgtgcctgttggcacaatggtatgtcagaacgcaatctgagtgcgctcgaaaattacaatttcgaactcgtggatggtgttaagttgaagaaggataaactgaatacgcagagtacttacagtgaagcttag

SEQ ID NO: 16304 - DNA, 420 bp, synthetic construct
  misc_feature 1..420: note = Description of Artificial Sequence: Synthetic coding sequence
  source 1..420: mol_type = other DNA
atggacgacagcaaacgtaaagcaaagagcttcgaagggaataacaactatgacacacccgaactgcggacattcccggctttgtcaacaagattcatccgaatataccctgagcgggccacccacggcggcctgggtctcaggatggaactgttaggctgtgaggttgaggcacccaccgctggacccaccactccaaacggaaacctggtcgacgagtgcgatgacgaccaggctaattgtcacagtggaactggagatgatttccagctcactggaggaactacagtcctagctacagagaaacccactgtgatcgactccacaatccagtcaggttcccgctttttcaagcaccatcataagcagcagtccatgcgacctcagaatctccatcacaactctatactgttgctctag

SEQ ID NO: 16305 - DNA, 1926 bp, synthetic construct
  misc_feature 1..1926: note = Description of Artificial Sequence: Synthetic coding sequence
  source 1..1926: mol_type = other DNA
atggaacgtggcctacctctcctgtgtgcggtgcttgctcttgtgctagcacctgccggagcctttcgcaatgacaaatgcggcgacactattaagatagagagcccgggctacctgacttctcccggttacccacattcctaccatccatcggagaagtgcgaatggcttattcaggcccccgatccttatcagaggatcatgatcaactttaacccccactttgacctggaggatagagactgtaagtatgactacgtagaggttttcgacggcgagaatgagaatggccattttcgcggaaaattctgcgggaaaattgcgccaccgcctgtggtgtcttccggccccttcctcttcattaaattcgttagcgactatgagacccatggcgcggggtttagcattcggtacgaaatttttaaacgcggaccagaatgctcacaaaattacaccacaccatcaggcgtgataaaaagcccagggttcccggagaagtaccccaatagcttagagtgcacttacatcgtgttcgtccctaagatgagcgagatcattctggaatttgagagttttgacctggagccagacagcaatccccctggcggcatgttctgtagatacgacagactcgagatttgggatggcttccctgatgtaggcccgcacatcggccgttactgtggtcagaagacccccggaagaatcagaagtagcagtggaatcctgagcatggtgttctatacagacagcgccatagccaaagaagggttctccgctaactatagcgtcctccagtcaagcgtgagtgaggatttcaagtgtatggaggccctgggaatggaaagtggcgaaattcactccgaccaaattacagcatcatctcagtactctacaaattggagcgccgaacgcagtcgtctgaactaccccgagaacggttggacaccgggggaagatagctaccgggaatggatccaagtagacctcggcctgctgcgctttgttaccgctgtcgggactcagggggccatttccaaggagacgaagaagaaatactatgtaaagacctataaaatagacgtgagcagcaacggcgaagactggattacaatcaaggagggaaataagcccgtactgtttcaaggcaatacaaatcccaccgatgttgtcgtagccgtcttccctaaacccctgatcaccagatttgtgcggatcaagcccgccacctgggaaaccggaatttcaatgagattcgaagtttacggctgcaagatcaccgactacccatgttcaggaatgctcggcatggtctctgggttaataagcgattcgcagatcacatcctccaaccagggcgacagaaattggatgcctgagaacatccgcctggtcacgtcacgttccggttgggcgctaccccccgctcctcatagctatattaacgagtggctgcagatagatctcggggaagagaaaattgtacggggcattatcatccagggcggcaagcacagagaaaacaaagttttcatgcgcaagttcaaaattggatacagcaataatggttctgactggaaaatgattatggatgattctaaacgcaaggcaaaatcattcgaaggcaacaacaattatgatacacccgagctccgcacgttccctgctctgagcacaaggttcatccggatttacccagagcgagctacacatggggggctaggcttgcgcatggaactgctgggatgcgaagttgagggtacaataaacaccgaccaggagtgtccatgtgcaagagccttagcaaaagacgctaagaagaaaaagcggtgggccgattccacccactgtagatgtgtacgatctatacacggggagatgtggagcagtggcaaaggtgtctgttcattggatgccaatctctag

SEQ ID NO: 16306 - DNA, 567 bp, synthetic construct
  misc_feature 1..567: note = Description of Artificial Sequence: Synthetic coding sequence
  source 1..567: mol_type = other DNA
atgtccgagataatactcgaattcgagagctttgacctcgagccggacagcaatccacccgggggcatgttttgtagatatgaccgcctagagatctgggatgggtttcccgacgtcggcccccacattggacgctactgtggacagaagacacccgggcgcataagatcgtcatctggaattctcagcatggtgttctacacggattcggcaattgcgaaggagggcttttccgctaactacagtgtgctgcaaagcagtgtgtccgaagacttcaagtgcatggaagcactgggcatggagtccggggaaatccacagtgaccaaataacggcttcttctcaatatagtactaattggtccgcggagaggtctaggctgaactaccctgaaaacggctggacacccggcgaggactcctacagagagtggatccaggacgccaagtaccgactcagggttagcgtcgtgagatccaagagttcctccagttcaactagtctggagcctaggcctttgtcctctttgaagctttcttttttttcctataagattaaaattacatag

SEQ ID NO: 16307 - DNA, 1830 bp, synthetic construct
  misc_feature 1..1830: note = Description of Artificial Sequence: Synthetic coding sequence
  source 1..1830: mol_type = other DNA
atggagagagggctgccgctgctctgtgcagtgctggccttagtgctggcacccgcaggagcattccgcaatgacaagtgcggcgatacaattaagattgaaagtccggggtacttaacctccccaggttatccccatagctaccatccgtcagagaaatgcgagtggctgatccaggctcccgacccttatcagcggataatgattaatttcaaccctcattttgatctcgaagacagggactgtaagtatgactacgtggaagtcttcgacggcgaaaatgagaatggacattttagaggcaagttctgtggaaagatagccccaccacctgtagtgtcaagtggaccattcctgtttatcaagtttgtctccgactatgaaacgcatggggcaggattctcgattagatacgagatttttaagcggggacctgagtgctctcaaaactatactacgccaagtggtgttattaagtctcccggtttccccgaaaaatatcctaattcccttgagtgtacttacattgtcttcgtgcctaaaatgtccgaaataatcctggagttcgagagcttcgatctggaaccagacagcaacccccctggcggcatgttttgtcggtatgaccgcctggagatttgggacggctttccggatgtgggccctcatatcggtaggtattgcggacagaagacacccggcaggattcgctctagctccgggatcctctctatggtcttctacaccgattccgccattgccaaggaaggtttctctgctaattacagcgtgctccagtccagcgtgtctgaggactttaagtgtatggaggctctcgggatggagtcaggagagatacactcagatcagatcaccgcctccagccagtatagtactaactggagcgctgagaggagtcgcctgaattacccggagaatggctggactcccggcgaggatagctaccgggagtggatccaggtcgacctggggctcctcaggttcgtcacagctgtgggaacacaaggggccatctccaaagaaaccaagaagaagtactatgtgaagacttacaaaatagatgtgtcatcaaatggcgaggactggatcacaattaaagaaggtaataaacctgtactctttcaagggaatacgaaccccaccgacgtagtggttgctgtgtttccgaaaccgctgatcacacggttcgtcagaattaagcccgcaacatgggaaacaggcatcagtatgagattcgaggtctacggctgcaaaattactgattatccttgctctggaatgcttggcatggtatccggtctgatctcagatagccagattacaagctcaaatcagggggaccggaattggatgcccgaaaacatccggctggtcacgagccggagtggatgggctctaccccctgctccacattcttacatcaatgaatggctacaaatagatcttggtgaggagaagatcgttcgcggaataataatccagggaggcaaacatcgcgaaaacaaggtattcatgcggaagtttaaaatcgggtatagtaataatgggtcggactggaagatgattatggacgactcaaaacggaaggctaagtccttcgagggcaataataactacgacaccccggagctgcgtaccttccctgctctgtccacccggtttatcaggatctaccccgaacgagccacccacggaggactggggctccgcatggaactgcttggctgtgaggtagagggaggtactaccgtactcgctacagagaaacctacggtgatcgacagcacaatccagagtgggattaagtag

SEQ ID NO: 16308 - DNA, 1935 bp, synthetic construct
  misc_feature 1..1935: note = Description of Artificial Sequence: Synthetic coding sequence
  source 1..1935: mol_type = other DNA
atggagcgtgggcttcctcttctctgcgccgtgctcgctctcgttttagcacccgcgggagcgttccgaaacgataaatgtggagatactattaagatagagagtcctggatacctcacaagtccgggttaccctcactcttatcatccgagcgaaaaatgtgaatggttgatccaagctcccgatccgtatcagaggatcatgatcaattttaacccccacttcgatctggaggatcgtgactgtaaatacgattatgtggaagtgttcgacggcgaaaacgagaatggacactttagaggcaagttctgtggaaaaatcgcacctccaccagtggtgtcttcggggcccttcctcttcatcaaatttgtgtctgactatgaaacacacggagcaggcttctctatcaggtacgaaatctttaaacgtggacccgagtgttctcagaactatactacaccctctggcgttattaagtcccctggctttcctgaaaagtatccgaactcgctcgagtgcacgtatatcgtgttcgttccgaagatgtctgagatcatcctggaattcgagagttttgacttggagccggattcgaatcctccaggtggaatgttttgccggtacgacagactggagatctgggacggctttcccgacgtgggcccccacatcggccgttactgcggccaaaaaactcccggaaggataagatcgtcttcagggatcctatctatggtgttctacactgattcggctatcgctaaggagggcttctccgctaactattccgtcctccagtcaagtgtgtccgaggattttaagtgcatggaggctctgggtatggaatccggcgaaatccattcagatcagatcacagcttcgtctcaatatagtacaaattggagcgcagaacggtcccggctgaactatccagaaaatggctggaccccaggcgaggattcttatcgagaatggatccaggtggatttaggattgctaaggtttgtcaccgcagttggcacccagggtgccataagtaaggagactaaaaaaaaatactatgtgaaaacatataagatagacgtgtcgtctaatggcgaggactggattacaattaaagagggcaacaagcccgtgcttttccaagggaacacaaacccaactgacgtagtggtggccgtgttcccaaaaccactcattacccggtttgttcgtataaagccggcaacctgggaaaccggcatctcaatgagatttgaagtatatggttgcaaaattaccgattacccttgcagcggcatgcttgggatggtatctggactcatcagcgactctcagatcacaagctcaaatcaaggtgaccgcaactggatgccagagaatatccggctggtgacaagccgatcgggatgggccctgccccctgccccccactcttatatcaatgagtggttgcagattgacctgggagaagagaaaatcgtgagaggaataatcatacagggaggtaagcacagggaaaataaggtatttatgagaaaatttaagattgggtatagcaacaacggtagtgattggaagatgataatggatgattccaaaagaaaggccaaatcctttgaaggtaataacaattatgatacaccggagctccgcacgtttccagctctgtctacacggttcattcggatatatccagagcgggccacacatggagggctgggacttaggatggaacttctcggttgcgaggtggaggcgcctactgctgggccgacgacacccaacggaaacctggtcgatgaatgcgacgacgatcaagcaaattgccactccggtacaggagatgacttccagctgacaggcgggacaacagttttagcaacggagaagccaaccgtcattgactctaccatccagagtggcatcaaatag

SEQ ID NO: 16309 - DNA, 2115 bp, synthetic construct
  misc_feature 1..2115: note = Description of Artificial Sequence: Synthetic coding sequence
  source 1..2115: mol_type = other DNA
atggagagaggacttccgctgttatgcgccgtgttagcgctggtcctggctcctgcaggagctttccgaaacgacaaatgtggcgatacgatcaaaatcgaatcgccaggctacctgacctcccccggctacccacactcctatcacccatcagagaagtgcgaatggctgatccaggcccctgacccgtaccaaagaattatgatcaatttcaatccacactttgacctggaggatagagattgtaagtacgactacgttgaggtattcgatggcgagaacgaaaacggccacttcagaggaaaattctgcgggaaaatagctccccccccggtggtctctagcggccccttccttttcattaagtttgtcagtgattacgagactcacggggcgggctttagcatcagatacgaaatatttaagagaggccctgagtgctcccagaattacacaactcccagtggagttataaaatcacccggctttcccgagaaatatccaaattccctggaatgtacttatattgttttcgttcccaagatgtcagaaatcattctggaattcgagagttttgacctggagccagattccaaccccccgggcggtatgttctgtcgatatgatcggctcgagatctgggacgggttccctgatgtcggtccccatataggacgatattgtggtcagaagacccccggacggatacggtctagcagcggcatcctgtctatggtgttctacaccgacagcgccatagccaaagaaggcttttctgccaattactcagtgctccagtcatccgtctccgaggacttcaaatgtatggaagctcttggcatggagtccggtgaaatccattccgatcagatcactgcctcgtcccagtactccactaactggagcgctgagcgctctcggctcaactatccagaaaacgggtggacccccggcgaagatagctatcgtgaatggatccaggtggacctcgggctgttgagatttgtgaccgcagtaggaacgcagggtgctatttctaaggaaactaaaaagaaatactatgtaaagacatataaaattgatgtgagctctaatggagaagattggatcaccattaaggagggcaataagcccgtattatttcaggggaacaccaatcctacagatgttgtcgtggcagtcttccctaagccactgataaccaggtttgtgcggattaaaccagccacctgggagactgggataagcatgcgctttgaggtgtatggttgcaagattactgattacccatgcagcggcatgttaggaatggtcagtggcttgatttctgactcacagatcacgtcttccaaccaaggagacagaaattggatgcctgaaaatatcagactggtcacgtcacggtcaggctgggctttgccgcctgcaccacattcctatatcaatgagtggctgcagatagacctgggagaggagaagatcgttcgcggcatcatcattcagggcggcaagcaccgcgaaaataaggtttttatgcgcaagttcaagattggatactccaataacggtagcgactggaagatgattatggatgatagcaagagaaaggcgaagtcattcgagggaaacaataactacgatacccctgaattgagaacattccccgccctctctacacgcttcattaggatctacccagaaagggcaacccatggtggtttagggctgcgaatggagttgctgggatgtgaggtcgaagcacctaccgccggtcccacaaccccaaatggcaatttagtggacgaatgtgacgatgaccaggcaaactgtcatagcggcacgggggacgatttccagctcactggtgccgagactatctttatccccctgctctatcatttttcaagttgtctcagttgggatcaactcaccccagtgtgtgtgctagttacaccgcacggcagagaacttccgagaaataggtcttgcttggcccggacaagagcaagttccttcccccacgtcatatggattgacgaactcttcctcattgcaaccacgatttgtaacaataacctcagccattttgaatcccagcgcctgggcctgtcatag

SEQ ID NO: 16310 - DNA, 261 bp, synthetic construct
  misc_feature 1..261: note = Description of Artificial Sequence: Synthetic coding sequence
  source 1..261: mol_type = other DNA
atggagttattgggatgtgaagtggaagctccgactgcaggtcctacaacgccaaacggaaacctcgtcgacgaatgtgacgatgaccaagcaaactgccacagcggtacgggcgatgactttcagctcaccggaggcaccactgtcctcgccactgaaaagccgactgtcatcgattctaccattcagtcagctcggctcgaggtctctactctgaatctgtccctgcacaacccaccccagcagaaagcattgatttag

SEQ ID NO: 16311 - DNA, 2772 bp, synthetic construct
  misc_feature 1..2772: note = Description of Artificial Sequence: Synthetic coding sequence
  source 1..2772: mol_type = other DNA
atggaaagaggactccccctactttgtgcagtgctggcccttgtgctcgctcccgctggcgcgtttagaaatgacaagtgcggcgataccatcaaaatcgaaagcccaggctacctaacaagccctggatatcctcatagctatcatccttctgaaaaatgtgagtggctgatacaggcaccagacccctaccagcggattatgattaattttaatccccatttcgaccttgaggaccgtgactgtaagtacgactatgttgaggtgttcgacggcgagaacgagaatgggcacttccggggaaagttctgtggtaaaatcgccccgccaccagtagtgagctcaggcccattcctctttatcaaatttgtctcagactacgagacacacggggcggggttcagtataaggtacgaaatattcaagagaggaccagagtgcagccagaattatactaccccgagtggagtaatcaagagcccgggcttcccggagaaatatcctaattccttagaatgcacatacattgtgttcgtgcccaaaatgtctgaaatcattctggaatttgaatctttcgacctggagccagacagcaacccaccagggggaatgttttgcagatacgatcgtctcgaaatatgggatggcttccctgacgtcggcccgcacatcggccgttactgcggccagaaaaccccggggagaattaggagctcatctgggattttgtctatggtattttacaccgatagtgctatcgccaaagaaggcttctccgccaactacagcgttctgcagtcctcggtttctgaagattttaagtgcatggaggcccttggaatggagagcggagaaatacacagcgaccagataacagcatctagccaatacagtacgaactggagcgctgagcgctccaggcttaactaccccgagaatgggtggactccaggagaagattcctacagagagtggatccaggtcgaccttgggctcctgaggttcgtgacagctgtaggcacccaaggcgcaatctccaaggagaccaagaagaagtactacgttaagacttacaagatcgatgtatccagtaatggcgaagattggattactatcaaggaaggtaacaagcctgtactatttcaggggaatacaaatcccaccgatgtcgtggtggctgtttttcccaagccgctcataacccggtttgtacgaatcaaacctgctacatgggaaacgggtatttcgatgcgcttcgaggtttatggttgcaaaatcacagactatccgtgtagcggaatgctcggcatggtgtccgggctgatctctgattcacagatcacgtctagcaaccagggcgacagaaactggatgccagagaacatcaggctggtgacctcgaggtcaggctgggctctccctccggcccctcacagctacatcaatgagtggctgcagatcgatttgggggaggagaagattgtgcggggtatcatcatacaaggtggaaagcaccgagagaataaggtttttatgaggaaattcaaaatcggctattccaacaacgggtctgactggaaaatgattatggacgacagtaagcggaaggcaaagtcatttgaggggaacaataattatgacacacctgagttgagaacctttcctgccctgtcaactagatttatcaggatctaccccgaaagggccactcacggaggtctgggtctccgcatggagctgttaggatgcgaggttgaagctccaaccgccggcccaacaacacctaacggcaatctggtggacgaatgcgatgacgaccaggccaattgtcactctggcacgggtgacgatttccagcttactggaggcacaaccgtgttagcaactgaaaagccaaccgtcatagattccacaatacagtccgaattccctacctatggcttcaattgcgagtttggttggggcagccacaagaccttttgtcactgggagcatgataatcatgtacagctcaagtggtcagtcctcaccagtaagacaggaccaatccaagatcacactggcgatggcaacttcatctactctcaagcagacgagaatcaaaagggaaaggtggccagattggtgtctccagtggtgtactcccaaaattccgcccattgcatgacgttctggtaccacatgagtggatcccatgtagggaccttgcgtgttaaactgaggtaccagaagcccgaggagtatgatcagctcgtgtggatggctattggtcatcaaggagaccattggaaagagggccgtgtgttactccacaaatccctgaagttgtatcaggttattttcgagggcgaaatcggaaagggcaatcttgggggcattgccgtggatgatatatcaatcaacaatcacatttctcaagaggactgcgctaagccggcggaccttgacaaaaagaaccccgagatcaagatcgatgagaccgggtccacccccgggtacgagggggagggcgaaggtgacaaaaatatctcacgcaagcccgggaacgtcctgaaaacacttgatccaatcctaataactatcatcgccatgtccgcactgggcgttctcctaggtgcagtgtgcggcgtcgtgctgtactgtgcctgttggcataatggcatgtcagaaagaaacctcagtgctctagagaactacaatttcgagttagtagacggagttaaattgaagaaggataagctcaacacccaaagcacctattctgaagcctag

SEQ ID NO: 16312 - DNA, 2208 bp, synthetic construct
  misc_feature 1..2208: note = Description of Artificial Sequence: Synthetic coding sequence
  source 1..2208: mol_type = other DNA
atgtctgagattatcctagaattcgaatcctttgacctcgagcctgatagtaatcctcccggtggcatgttttgtcgatacgacagacttgagatatgggatggctttccagacgtaggcccccatatcggtagatactgcggtcagaaaactccaggaagaatcagaagtagttcaggtatcctttctatggttttctacaccgattccgcgatcgcgaaagagggtttttcagctaattactcagtcctccagtcctccgtgtctgaggatttcaaatgtatggaggctcttggaatggagagcggggagatccatagcgatcagattacggcaagcagtcagtactccactaattggagcgcggaacggagccgcctaaactaccccgagaatggatggactcctggcgaagattcttatcgagagtggatccaggtcgatctggggctcctgcggtttgttacagccgttggcacccaaggagcaattagcaaagaaactaaaaaaaaatactacgtgaagacttataaaatcgatgtgtcctcaaatggagaagactggattacaattaaggaaggaaataagcctgtcctgtttcaaggcaacacaaaccctacagacgttgtggtggccgtgttccctaagccgcttattacacggttcgtccggattaagcccgcaacttgggaaacaggcatctcaatgagattcgaggtctacggatgcaagattactgattacccatgctctggcatgctgggcatggtgtctgggctgatctctgacagtcagatcactagcagtaaccagggagatagaaattggatgcctgagaacattcgactcgtgacaagtagaagtggttgggcactgccaccggccccgcatagttatatcaacgaatggctgcagattgatctcggcgaggagaagatcgtgagggggatcatcatacaggggggtaaacatagagagaataaagtgttcatgaggaagttcaaaattggatactccaataacggaagtgattggaagatgataatggacgatagcaagcgcaaggctaagagcttcgaaggcaataacaattatgacacccctgagctgcgtacattccccgcacttagcacgagattcatccgcatttaccccgagcgcgctacccatggcggactgggtctgcggatggaactgctcggttgcgaggtagaagcaccaaccgcaggcccaactacacccaatggcaacttagtggacgaatgcgacgacgatcaggccaattgtcattcgggaactggcggaaccacagtgctcgctaccgaaaagcctacagtgatcgatagcactatacagtcagaatttccaacctatggctttaactgtgagtttggctggggcagccacaagacattttgccactgggagcacgacaaccatgtacagctgaagtggtctgtactgacttcaaaaacagggcctatccaggatcacaccggagacggcaatttcatatactcccaggccgacgagaatcaaaaggggaaggtcgctagactcgttagtcccgtggtgtactcccagaactctgctcactgtatgaccttctggtaccatatgtccggcagtcacgttggaacgctccgggtgaaactgaggtatcagaaaccagaggagtacgaccagctcgtatggatggccatcggacatcagggggatcactggaaggaaggccgggtgttactccataagtctctgaagctgtaccaggtaatctttgagggagaaatcggaaaaggcaacttagggggtatcgcggttgacgacattagcatcaataatcatatctcacaagaggactgtgccaaacctgcggacctggacaaaaagaatcctgagatcaaaattgacgaaacgggttctacccctggctacgagggcgagggagaaggcgacaagaacatatccaggaaaccaggcaacgtgttaaaaacgctggacccaatcctgatcaccattattgccatgtccgctctgggggtcctgctgggcgctgtgtgtggcgtggtgctttactgcgcctgttggcataacggtatgagtgaaagaaacttatcagctctagagaattataacttcgaactggtggatggggtgaagttgaaaaaggacaaactgaatacacaatctacgtactcagaagcatag

SEQ ID NO: 16313 - DNA, 2721 bp, synthetic construct
  misc_feature 1..2721: note = Description of Artificial Sequence: Synthetic coding sequence
  source 1..2721: mol_type = other DNA
atggagcgagggctgcccctcctgtgtgccgtgttagccctggtacttgcgcccgccggtgcatttaggaatgacaagtgtggcgatacgatcaaaatcgagtcaccaggctatttaaccagccctgggtacccacactcatatcacccatccgagaaatgcgaatggctgattcaagcaccagacccttatcaaagaatcatgatcaatttcaacccccacttcgacctggaagatagagactgcaaatatgactatgttgaagtgtttgacggggaaaacgagaacgggcatttccgggggaagttttgcggaaagatcgcccctcccccagttgtgagcagcgggccttttttattcattaaattcgtgagcgactacgaaacccacggtgccggatttagtattaggtacgagatttttaaacgcgggcccgagtgctctcaaaactacacaacgcctagcggcgtcatcaagtccccagggttccccgagaaataccccaactcgctggaatgtacgtacattgtgtttgttcctaaaatgtccgaaataatcctggagttcgagtctttcgacttggaacccgattcaaatcctcccgggggtatgttctgccggtacgatcgccttgagatctgggatggcttcccggatgtaggccctcatattgggagatattgcggtcagaaaacccccggcaggattcgatcctcctctgggattttgagtatggtgttttataccgatagtgctattgcaaaagaagggttctctgccaattactctgtacttcaaagcagcgtctctgaagattttaaatgcatggaggcccttgggatggaatctggagagatacacagtgatcagattacggcctcttctcaatactccaccaactggtccgccgagaggtcgagactcaactatccagagaacgggtggacccccggagaggactcttaccgggagtggattcaggtggatcttggcctactccgttttgtgactgctgtgggtactcagggtgctatatcgaaggaaactaaaaagaagtattatgtgaaaacatataaaatcgacgtttcttctaatggcgaggactggattactatcaaggaaggaaacaaaccggtgctttttcaggggaacacaaatccaacggacgtggtagtggctgtgttccccaaacccctaatcactcggtttgttcggatcaagcccgctacctgggaaaccggcattagtatgcggttcgaagtatatggttgcaaaatcactgattacccttgctccgggatgttgggcatggtgtcggggctgatcagtgattcacagatcacttcctctaaccagggggataggaattggatgcctgaaaatatccgcctagtcacctcaaggtctggctgggccttgcctcctgcccctcactcatatatcaatgagtggctgcagattgatctaggcgaagaaaaaattgtccggggcattataattcagggggggaaacatcgggaaaataaggtgtttatgagaaagttcaaaattggctactctaacaacggttccgattggaaaatgatcatggacgactccaagcgcaaggccaagagctttgaaggtaacaacaactacgatacccccgagcttcggacttttccggctctgtcgaccagattcatccgcatctatccagagcgcgccactcacggtggcctcgggttgcgcatggaactgcttgggtgcgaggtcgaggcgccaacggccgggcctacaacacctaatggcaacctcgtggatgagtgcgacgacgaccaggcaaactgtcattccggcacgggcgacgatttccagctgaccggagggactaccgtcctcgcgacggaaaagccaacggtgatcgactccacgatccagagcgagttccccacctacggatttaactgtgaattcggatggggaagccacaagactttttgtcactgggaacacgacaaccatgttcagctgaagtggtcagtgctcactagcaagacagggccaatccaggaccacaccggtgacggcaactttatctacagtcaggcagacgagaaccagaaagggaaggtggccaggcttgtatcaccagtcgtttattcccagaactctgctcactgtatgacattctggtatcacatgtctggatctcatgtcggcacgctccgggtaaagctaagataccagaaaccagaggaatacgatcaattagtgtggatggcgattggacatcagggggaccattggaaggaagggagggtgctcctgcacaaatcgttaaagctttatcaggttattttcgagggtgaaataggcaaggggaacttgggtggaatcgctgttgatgatatttctatcaacaatcacatcagccaggaggactgcgccaggagcactcccggatatgagggcgagggcgaaggagacaagaatatctcaagaaaacccggcaacgttctgaaaaccctcgatccaattcttatcactataatcgccatgagcgccttgggggtcttactgggcgccgtgtgcggagtcgtgctgtattgcgcatgctggcacaacggcatgtccgaacggaatctgtccgccctagaaaattataactttgagcttgtcgacggcgttaagctcaaaaaggataaactgaacacccagtccacttactcagaagcgtag

SEQ ID NO: 16314 - DNA, 318 bp, synthetic construct
  misc_feature 1..318: note = Description of Artificial Sequence: Synthetic coding sequence
  source 1..318: mol_type = other DNA
aaccacatcagtcaggaagactgtgcacggtcaactcccggctacgagggagaaggcgaaggcgataaaaatataagccgtaagccaggtaatgttctgaagacattggatcccatactgatcacaattatcgcaatgagtgccttaggtgtgctcctgggagccgtctgtggagttgtgctgtactgtgcatgctggcataacggaatgtctgagcgcaatctgagcgctctcgaaaactataacttcgaactagtagacggagtgaagctcaagaaagacaaactcaatacccaatccacctactctgaagcatag

SEQ ID NO: 16315 - DNA, 234 bp, synthetic construct
  misc_feature 1..234: note = Description of Artificial Sequence: Synthetic coding sequence
  source 1..234: mol_type = other DNA
tgacctactgccggacccacaacccccaatggaaacctggtggacgagtgcgacgacgaccaggctaattgtcactctgggactggtgatgacttccagctcactggcgggactactgtactggctaccgagaagccaacagttatcgatagcaccatccagtccgctaggctcgaggtgagcactctgaacttgagccttcataatccaccccagcagaaagccctcatttag

SEQ ID NO: 16316 - DNA, 303 bp, synthetic construct
  misc_feature 1..303: note = Description of Artificial Sequence: Synthetic coding sequence
  source 1..303: mol_type = other DNA
tagacccatggtgggctgggtcttcgcatggagctgctgggctgcgaagtggaggccccgaccgcaggcccaactactcccaacggaaatttggtcgatgagtgtgatgatgaccaggccaattgtcactcaggaacaggcgatgactttcagttgacaggggggaccactgtgctagctaccgagaagccaacagtaattgactctaccattcagagcgggagtcggttctttaaacaccatcacaaacagcagtctatgagacctcagaacctgcaccataactccatactgttgctgtag

SEQ ID NO: 16317 - DNA, 711 bp, synthetic construct
  misc_feature 1..711: note = Description of Artificial Sequence: Synthetic coding sequence
  source 1..711: mol_type = other DNA
gtggacttaggactgctgcgctttgttaccgccgtcggcacccagggagcaatttccaaggaaactaaaaaaaaatattatgttaaaacgtacaaaatcgacgtgtcctcaaacggtgaagattggataacaatcaaggaaggtaacaaacctgtgttattccagggcaataccaatcccactgacgtcgtagtggcagtttttcccaaacccttgattacccgttttgtccgcataaagcccgctacttgggagaccggaatctcaatgagattcgaggtgtacggttgtaagatcaccgattacccttgttctggcatgctgggcatggtctcaggattaatctcagactcccaaataacttcatccaatcagggtgaccggaactggatgcccgaaaacatcagactcgtcaccagccgtagcggatgggcgctgcctcccgcaccacacagctacattaatgagtggttgcagattgacctgggagaggagaagattgtgcgtggcatcatcattcaaggggggaagcatagagagaacaaagtcttcatgcgtaaatttaaaataggttacagcaacaatggtagtgactggaaaatgatcatggatgactcgaagcgaaaggctaaggtccgggcaggagactgggaggaggtaatcccatacgtgcttgacttcaaccaggggcccctcgcgttctctaggtag

SEQ ID NO: 16318 - DNA, 513 bp, synthetic construct
  misc_feature 1..513: note = Description of Artificial Sequence: Synthetic coding sequence
  source 1..513: mol_type = other DNA
taacctggaggcatgttctgcaggtatgaccgcctggagatatgggacggtttccctgacgtggggccccatatcggcaggtattgcggccagaaaacacccggtagaatccgcagctcttcaggaatccttagtatggtgttctatacggacagtgcgatagctaaggaaggtttttccgcgaattacagcgtcttgcaatcttcagtctccgaagacttcaagtgcatggaagcactcggaatggagtccggggagatccatagcgaccagatcaccgctagctcccagtattccactaactggtctgcagagcgcagtcggttaaactatcccgaaaatggatggactcctggcgaagattcttatagagagtggatccaggatgctaagtacaggctgagagtttcagtcgtgagatctaaaagctcttcctcgtccacatcgttggaaccaaggcctctgtcatcactgaagttatcatttttttcctacaagatcaagattacatag

SEQ ID NO: 16319 - DNA, 2721 bp, synthetic construct
  misc_feature 1..2721: note = Description of Artificial Sequence: Synthetic coding sequence
  source 1..2721: mol_type = other DNA
atggacatgttccccctgacttgggtgttcctcgccctttacttcagccgtcaccaggttaggggccagccagatccgccctgcggcggtcggctcaatagcaaggatgccggatacatcactagcccggggtatccccaggactaccctagccaccagaattgcgaatggattgtttatgccccagagcctaatcagaaaatcgtattaaattttaaccctcacttcgagattgagaagcacgattgtaaatacgactttattgaaatacgtgacggcgactcggagtccgcggatctgcttggaaagcattgcgggaacatcgcccctcctacaatcatcagttcaggttcgatgctgtacatacgatttacaagcgactacgccagacagggggctgggttctctttacggtacgaaatttttaaaacgggaagtgaagattgttccaaaaacttcaccagccccaatggcacgatagaatctcccggctttcctgaaaaataccctcataatttagattgtacctttacgatcttagccaaaccgaaaatggagattatcctccagttccttatattcgacctggaacatgatcctctgcaagtgggcgaaggtgactgcaagtacgactggctggatatatgggacggaatcccacacgtaggccccctgatcggcaaatattgtggtaccaagacccccagcgaactcagatcatcgacaggtatcctctccttgactttccataccgatatggccgtggctaaggacgggttttctgcccggtactacctggtccatcaagagccactggagaatttccaatgtaacgtacccttaggtatggagagcggtcggattgccaacgagcaaataagtgcaagttcaacctattccgacggaaggtggaccccccagcagagcaggctgcatggggacgacaatgggtggactccaaacttggatagcaacaaggagtatctgcaagtggatcttagatttctgacaatgctgactgccattgccactcagggggcaatctcgagggaaacacagaacggctactatgtgaagagctacaaactggaagtctctactaacggggaggactggatggtatacaggcatggaaagaaccacaaggtgttccaggctaataacgatgccaccgaggtggtactgaacaaactgcacgcccccttactgacccgctttgtgcgtattaggcctcaaacatggcactcgggaattgctctaagacttgagttattcggttgccgcgtgacagatgcgccttgctctaatatgttgggtatgctgtccggtctcatcgccgactctcaaatcagcgcatccagtacacaggaatatctgtggtctccaagcgccgcgagactggtatcaagccgatctggctggtttccccgaataccccaagcccaacccggcgaagagtggcttcaggtggacctggggaccccaaaaaccgtgaaaggcgttatcatccagggagcacgaggcggagattccatcacagcagttgaggcccgcgcttttgtgagaaagttcaaagtcagttatagcctgaatggcaaagactgggaatatattcaagacccccgcactcagcagcccaaattatttgaggggaatatgcattacgacactccagatatcagacggttcgacccgattccggcccagtatgttcgggtgtatccagagcgttggagccccgccggaatcggcatgagactggaagtgctaggctgtgactggaccgacagcaaaccaaccgtggagacactcggcccaacagtcaagtctgaagagaccaccaccccttatcccaccgaagaagaagccactgaatgcggtgagaattgtagctttgaagacgacaaggatctgcagttgcccagtgggtttaactgtaacttcgacttcctcgaggaaccatgtgggtggatgtacgaccacgcaaaatggctgagaacaacctgggcatcctcgtcaagccccaatgaccgtacttttccagatgatcgcaatttcttgaggctccagtctgattcccagcgcgagggtcaatatgcccggctcattagtccaccagtgcacctgccccggtcacctgtctgcatggagttccagtaccaagcgacgggcggccggggcgttgctctccaggtcgttcgagaagccagtcaggagtccaaactcctttgggtaatccgggaagaccagggaggtgagtggaaacacggccggattatcctgccctcctatgacatggaatatcaaatcgtgttcgagggcgtcattggaaagggccgctcaggcgaaattgccattgacgacatcaggatcagcactgacgtgcctctggagaactgtatggagcccataagtgccttcgcaggggaaaacttcaaaggcggaactctgctccctgggactgaacctaccgtggataccgttcctatgcagcctatccctgcatattggtattacgtcatggccgctgggggagcagtcctggttctcgtatctgtagccttagctttggtgttgcactatcaccgtttccgatacgctgctaaaaaaacagaccatagcatcacttacaagacaagtcactacactaatggcgcaccactggctgttgaaccaaccctgaccatcaaactcgagcaagacagaggttctcattgttag

SEQ ID NO: 16320 - DNA, 300 bp, synthetic construct
  misc_feature 1..300: note = Description of Artificial Sequence: Synthetic coding sequence
  source 1..300: mol_type = other DNA
atggacatgtttccactcacatgggtgttcctcgccctgtattttagtaggcaccaggtgcggggccagccagaccctccatgcggtggccgattgaattccaaagacgctggttacataacctctcctgggtatccccaggactaccctagccatcagaattgtgagtggatcgtgtacgcacctgagcccaatcagaaaattgttttaaacttcaacccacactttgagattgagaaacatgactgtaacctgttgtctgcgtggaaaatcagcctgacatctaggtccttcgcatag

SEQ ID NO: 16321 - DNA, 1668 bp, synthetic construct
  misc_feature 1..1668: note = Description of Artificial Sequence: Synthetic coding sequence
  source 1..1668: mol_type = other DNA
atggatatgttcccattgacctgggttttcttagccctgtatttctcccgccaccaggttaggggacagcccgacccaccgtgtggcggaagactgaatagcaaagatgccggctacattacctctcccggctacccccaggattacccgtcccaccagaattgcgaatggatagtgtacgccccagagccaaatcagaagattgtgctgaacttcaatccgcacttcgaaattgagaaacacgattgtaagtacgacttcatagaaattagagatggcgacagcgagtccgcggacttgctgggcaagcattgtggaaacatcgctccaccaaccattatcagctccggaagtatgttgtacattagatttaccagcgactatgcccggcaaggcgccggttttagtctgcgctatgaaatttttaagactgggtcagaggactgctcaaaaaacttcacaagtcccaacggtaccatcgagtccccgggctttccagaaaaatacccacataatcttgactgcacattcacgattctcgccaagcctaaaatggagatcatactgcagtttctaatttttgatctggagcatgatccgctccaggtcggtgagggggactgcaagtacgattggctggacatatgggacgggattccgcacgtaggtccgctgattgggaaatattgtgggactaagactccaagcgagctcaggtcttcaacaggaatattgtcacttactttccataccgacatggccgtggcaaaggacggtttctcggctcggtactacctcgttcaccaggaacccctcgagaatttccaatgtaatgtgccactggggatggaaagcgggaggatagcaaacgagcagatctccgccagcagtacttactcagacggtaggtggacaccacagcagagtcggctgcacggcgatgataatgggtggactccaaatttggactccaataaggagtatttgcaggtcgaccttcggttcctgaccatgctgacagccattgccacacagggcgcaatttctcgggagactcagaatggatactacgtgaagagttacaaactcgaggtttcaactaatggagaagactggatggtttaccggcacggtaagaaccacaaagtttttcaggctaataacgacgccaccgaagtggtattaaacaaactgcatgcccctctgctcaccaggtttgtccggattcgccctcagacatggcacagtgggattgccctgagactggaactgtttggttgtagagttacggatgcaccatgctccaacatgcttggcatgttaagcgggttaatagccgactcgcagatctcggcctcctccacccaggaatacttatggtctccaagcgctgcccgccttgtgagtagcaggtcaggatggttccccagaataccccaggcacagcctggcgaagagtggctccaggtagatttagggacacctaagacggtgaagggcgttatcattcagggtgcacgagggggagattctataaccgcagtagaagctagagcatttgttaggaaattcaaggtatcatatagcctgaatggcaaggattgggaatacatccaggacccccggacacagcaaccgaaggttggctgttcttggaggcctttgtag

SEQ ID NO: 16322 - DNA, 2706 bp, synthetic construct
  misc_feature 1..2706: note = Description of Artificial Sequence: Synthetic coding sequence
  source 1..2706: mol_type = other DNA
atggatatgttccctctcacatgggtgtttctggccctatacttctccaggcatcaggtgaggggacagcctgatccaccatgtggggggcgcctcaactctaaggacgcaggttatatcacttcccctggttacccccaggattacccgtctcaccagaattgtgagtggattgtctacgctcccgagcctaaccagaaaatagtgttgaatttcaacccccactttgaaattgaaaagcacgactgtaagtacgactttatcgaaatccgagacggtgatagtgagagcgctgaccttcttgggaagcattgtggcaatatcgctccccccacaataatcagctccggctctatgttatacatccgtttcacgtccgactacgcaaggcagggtgccggtttcagtctgcgatatgagatctttaaaaccgggtcagaggattgttccaaaaactttaccagtccaaatggaacaattgaaagtccgggcttccccgagaagtatccacacaacctcgattgtacctttactattctcgctaagccaaaaatggagatcatcctccagttcctaatctttgaccttgagcacgaccctctacaagttggtgagggcgattgcaagtacgactggctcgatatatgggacggtattcctcatgtcggacctctgatagggaagtactgcggaaccaagacgccgagcgagctcagatcatccacagggattctgtctttgacatttcacacagacatggctgtggctaaagacggcttctccgccagatattaccttgtccaccaggaacctctggagaactttcaatgtaacgtaccactggggatggagtccggaagaatagccaatgagcagatttctgcctcgtccacttactccgacgggcggtggacgccccaacagagtcggttgcatggcgatgataatggatggacccctaatctcgatagtaacaaagaatacctgcaggtagatctgaggttcctgacaatgctgactgctatagctacacagggagctatctcgcgagaaacacagaacggctactacgtcaaaagctacaaactggaggtcagcaccaatggcgaggattggatggtgtaccgacatggaaagaatcacaaggtctttcaggctaataacgatgccacagaagtggtcctgaacaaactgcatgcccctctactgacacgcttcgttaggatccggcctcagacttggcactcgggtatcgcactgaggttggagctgtttggatgtagagtgactgatgccccatgttccaacatgctgggcatgctgtctggattaatcgccgacagccagatttcagctagttccactcaggagtatctgtggtcacccagtgccgcacgtctcgtgtcgtctaggtcaggatggttcccaagaattcctcaggcccagcctggggaggagtggctccaggttgatctgggcacacccaaaacagtaaagggggtcattatccagggagcaaggggcggcgacagcattacggccgtggaagcaagggcttttgtgaggaaatttaaggtgtcttattcactgaacgggaaagattgggaatacattcaagaccctcggacccaacagcccaagctgttcgaaggcaatatgcactacgatactcctgatatcaggcggttcgacccaatcccagcgcagtatgtgagagtgtatcctgagcgatggtctcccgctgggattgggatgagacttgaagtactggggtgcgattggaccgatagcaagcccactgtggagactctgggtcccactgttaagagtgaagaaaccacgactccttatcctactgaggaagaagcaactgaatgcggcgagaattgtagctttgaagacgataaagatcttcagttaccatcgggatttaactgcaactttgactttctggaagagccatgtggctggatgtatgatcatgcaaagtggctgcgtactacttgggcatcctccagctctccaaatgataggaccttcccagatgaccggaattttctgagactgcaaagtgacagtcagagggagggacagtacgccagactcattagccctccggtccacctgcccagaagtccagtttgcatggaattccagtaccaggccaccggcggccggggtgtggctctgcaggtcgttagagaggcgagccaggagtccaagctgctatgggtcatacgtgaggatcagggcggagaatggaagcacggccggattattctcccttcttatgacatggagtaccaaattgttttcgaaggggtgattgggaaaggcagaagcggggaaattgctattgacgatattagaatttccactgatgtgccactcgaaaactgcatggaaccgatatctgcattcgccgggggaaccctgctgcctggaaccgagccgaccgtagacactgtgcctatgcaaccgatccccgcttactggtactacgtgatggccgccgggggggcagtcctggtgttagtttccgtggccctggctctggtactgcattaccacagattccggtacgcagcaaagaagaccgatcattctattacttacaaaacctcccattatacgaatggcgcaccgctggccgtagagcccacactgacaatcaaattagaacaggatcggggtagccattgttag

SEQ ID NO: 16323 - DNA, 2781 bp, synthetic construct
  misc_feature 1..2781: note = Description of Artificial Sequence: Synthetic coding sequence
  source 1..2781: mol_type = other DNA
atggatatgtttcctctgacgtgggttttcctggccctatacttcagccggcaccaggtaagagggcaaccagaccccccttgcggtggaaggttgaactcaaaagatgccggatacattacctccccgggatatccgcaggattacccatctcaccaaaactgcgagtggatagtctacgccccggagccaaatcaaaagatcgttctcaatttcaaccctcatttcgaaatagagaaacacgattgcaagtatgactttattgagattagggacggggattcagaatcagccgatctgctgggaaagcactgcggaaatatcgcccccccaacaatcatctcaagtggttctatgctctacatccggtttacttccgactacgcccgccagggagccggcttctcccttagatatgaaatcttcaagacaggatctgaagactgcagtaaaaacttcacaagtcctaatggcaccattgaaagcccaggattcccagagaagtacccacacaacttggactgtactttcactatcctggctaagccaaagatggagatcatcctgcagttcctgatatttgatctcgaacacgatccactgcaagttggagagggagattgtaagtatgattggctggacatatgggacgggattccacacgtgggccccttgattgggaagtactgtggcaccaagacaccaagcgaattgaggagcagtaccggcattctaagcctgaccttccatactgatatggccgtggccaaggacgggttctccgccagatattacttagtgcaccaggagcctctcgagaatttccagtgtaacgtgcccctgggaatggaatcaggccggatcgccaacgagcaaatttccgcctctagtacttactcagacggccggtggaccccacagcagtcgcgcctccatggagacgacaatggatggacaccgaatttagactcaaacaaagaatacctgcaggtggacttgagattcctaactatgctgaccgccattgcaacccagggtgcgatcagtcgagagacacagaatgggtactacgtgaaatcctacaagcttgaggtttcaacgaacggggaggattggatggtctaccgccatggtaagaaccacaaggtttttcaagctaataatgatgccacggaagtggttctcaacaagttacacgctcccttgctcacaaggttcgttcgcatccgcccgcagacctggcattctggcatagcacttagacttgaactgttcggctgcagagttacagacgcaccatgctctaacatgctcggtatgctcagcggcctgattgctgacagccagatctccgctagcagtactcaggaatacctctggtcaccatcagcagcacggctggtcagctcccgctcagggtggttccctcgtatccctcaggcacaacctggggaggaatggctccaagtggatctcgggacgcctaagacagttaaaggcgtcattatccagggcgctcgcgggggagacagcatcaccgcagtagaggccagagctttcgtgaggaagttcaaggtgagttattctctgaacgggaaagactgggagtacatccaggacccgcgtactcaacaacccaagctctttgaaggcaatatgcattacgatactcctgacatcagacgttttgaccccatcccggcacaatatgttagagtttaccccgaacgatggtctccggccggtattggcatgcgcctcgaggttctcggatgtgattggactgattcaaaacccaccgttgagaccctgggccctactgtgaaatcagaagaaacgaccaccccctatcctacagaagaggaggccaccgaatgcggtgaaaattgcagctttgaggacgacaaggacctgcaactgccctccggttttaactgtaattttgacttcctggaggaaccatgtggatggatgtatgatcacgccaagtggctgagaacgacatgggctagttccagttcaccgaatgacagaacattcccagacgatcgtaacttcctgcggttgcagagtgattcccagcgtgaaggccagtacgccaggctgatatctccccctgttcatctgcccaggtcacctgtatgcatggaatttcagtaccaggcaacaggtggcaggggagttgccctgcaagtggtcagagaagccagccaagagagcaagctactttgggtgattagggaagatcagggaggggaatggaaacacggtcggattatcctgcccagctatgatatggagtatcaaattgtttttgagggggtgatcggcaaaggcaggagcggcgaaatcgcgatcgatgatatcagaattagtaccgacgtacccctggaaaattgtatggaaccaatctcagccttcgccgtggatatacccgagatccatgaacgagaaggctacgaagacgaaatcgatgacgagtatgaagtggactggagcaattcatccagcgccacatccgggagtggtgccccatcaacggacaaagagaaatcctggttgtacacactcgaccccattctgattaccatcatcgcgatgtctagcctaggagtactgcttggggcaacctgcgcggggctgttgctatactgcacttgcagctattcggggctgtcctcccggtcttgtacaacactggagaactacaattttgagctgtatgacgggttgaagcacaaggtgaagatgaaccaccaaaagtgctgttcagaagcctag

SEQ ID NO: 16324 - DNA, 2796 bp, synthetic construct
  misc_feature 1..2796: note = Description of Artificial Sequence: Synthetic coding sequence
  source 1..2796: mol_type = other DNA
atggacatgttcccgttaacgtgggtctttcttgcgctctacttctccaggcatcaagtgcggggccagcccgaccctccttgcggaggacgactaaattctaaggatgcagggtatattactagtcccggctatccacaggattatccgagccaccagaactgcgaatggatagtgtacgcaccagaacccaatcagaaaattgtcctgaattttaatccacattttgaaatagagaagcacgattgcaagtacgactttatcgagatacgggacggtgacagtgaatcagcagatttactcggtaaacactgtggcaatatagctcccccgaccatcatctcatccggttctatgttgtatatcaggttcaccagcgactatgcgcgccagggcgccgggttctcactgaggtacgaaatcttcaagaccggctctgaagattgctccaagaactttacttctccaaatggaacaattgaatcaccagggttccctgagaagtatccccataacttagattgtacgtttacgatccttgccaaacccaagatggagattattctgcagttcctaatttttgatcttgagcacgatcctttacaggtgggggagggagactgtaagtacgattggctcgacatctgggacgggattccccatgtgggacccttgatcggaaagtactgcggcacgaaaactccttctgagttgcgttcttctacaggaatcctgtctttaactttccatacggacatggcagtagccaaagatggctttagcgcgcgatactatctagtgcaccaagagcccctggaaaactttcagtgtaacgtcccccttggcatggaatccgggcgcatagccaatgagcaaatcagtgcttcttcgacctactccgacggaagatggaccccccagcagtccaggctgcacggtgacgataacggctggacacccaatctagactcgaataaggagtatctccaggtcgacctgcgcttcttgacaatgctcacagcgattgccacacaaggtgccatctctagagagacacagaatggatactacgtgaaaagctacaaactggaagtgagtaccaatggcgaagattggatggtttacagacatggaaaaaaccataaagtgttccaggccaataacgacgctactgaagtggtactgaacaaactgcacgcacctcttcttaccagattcgtgagaatccgccctcagacttggcattccgggatcgcgctgaggctcgagctcttcggctgccgagttactgatgccccctgctcaaatatgctgggtatgctttctggcctcatagccgatagtcagataagcgctagttcgacccaagaatatctgtggtcaccttccgcagcccggctcgtgagctcccggtcgggctggttccctcgcattcctcaggcccaaccgggcgaagagtggctgcaagtagatttagggaccccaaagaccgtcaagggagttataattcaaggtgcacgcgggggcgactccatcactgcggtagaagcacgcgccttcgtgagaaaatttaaggtgagctatagccttaatggcaaagactgggagtatatccaggatccacggacgcaacagcccaaactcttcgagggaaacatgcattacgacactcctgacattcgccggtttgatcccattccagctcagtatgtgagagtgtaccccgaacgttggtcacccgctggcataggcatgagactggaagttttggggtgtgactggacagattcgaaacctacagttgaaaccctgggaccgaccgtgaaaagtgaagagacaacaactccatatcctaccgaggaagaagcaaccgagtgcggcgaaaattgctctttcgaggacgataaggacttacagctgccatcagggttcaactgtaacttcgactttctggaggagccttgcggctggatgtatgaccacgccaaatggcttaggactacatgggccagctccagcagtcccaatgatagaacttttcctgacgatcgtaattttctcaggctgcaaagcgattcccaacgcgagggccaatatgcaagattgatcagcccacctgtccatctgccaagatccccagtgtgcatggaattccagtatcaggctaccggtgggagaggcgtagccctgcaagttgttagagaggcatcccaggagagtaaactcctatgggtgatccgggaggatcagggcggtgaatggaaacatgggcgcatcatcctcccttcctacgacatggagtatcagattgtgtttgagggtgtaatcgggaaggggcgatcaggagagatagctattgacgatataagaataagcactgatgtgcccctcgaaaactgtatggaacccatttccgcttttgccggagagaatttcaaggtggacatacccgagatccacgagcgcgagggctatgaagatgaaatagacgatgagtacgaagtcgattggtccaatagctcaagcgcaacctccggatcgggggcacccagtactgacaaagagaaatcctggctgtatacacttgatcccattttaataacaataatcgccatgagctctctgggcgttcttctgggagccacatgcgcgggacttctactatattgtacctgttcatactctggcttgtcgtcccggagctgcacaactctggaaaattacaactttgagttatacgacggcctaaagcataaagtgaagatgaaccaccagaagtgttgtagcgaagcttag

SEQ ID NO: 16325 - DNA, 2730 bp, synthetic construct
  misc_feature 1..2730: note = Description of Artificial Sequence: Synthetic coding sequence
  source 1..2730: mol_type = other DNA
atggatatgttcccattaacatgggtttttctggctctttactttagccggcaccaggtacggggacagcctgatcctccatgtggcggaagattgaactccaaggatgctggttacatcacttcccccgggtatccgcaggactatcccagccaccaaaattgtgaatggatcgtttacgcacccgagcctaatcagaaaatcgtgctgaattttaatcctcactttgagatcgagaagcacgactgtaagtacgactttattgaaattcgcgatggcgattctgagagcgccgatctcctaggaaaacattgtggcaacattgcacctccgacaattatcagctctggctccatgctgtatatccgctttacctccgattacgccaggcagggcgcaggctttagtctgaggtacgagatattcaaaactgggtctgaagactgttctaaaaactttacaagcccaaacggtactatcgagagtcccggattccctgaaaaatacccacataacttggactgcactttcactatcttagcaaagccaaaaatggagataattttgcagttcttgatcttcgacctggagcacgacccgctccaagtgggggagggggactgcaagtatgactggttggacatatgggacggcatcccgcatgttggacccctgattggaaaatactgtggaaccaagactccatctgaactccggtcctccacaggaatcctgtccttgacctttcataccgacatggccgttgctaaagatgggttcagcgcaaggtattatttagtgcaccaggagcctttagaaaactttcaatgcaacgtgcctttagggatggagagcggtagaattgccaatgaacagatcagcgccagtagcacctactcggacggcaggtggacgccacagcagtcgaggttgcatggcgatgacaacggatggacaccaaatctcgatagtaacaaggaatatctgcaagttgacctgaggtttttaacgatgttgacagcaatcgccactcagggagccatatcgcgcgagactcagaatgggtactatgtgaaatcatataaacttgaagtttccaccaacggagaagactggatggtttatcgccatggcaagaaccacaaagtgttccaggccaacaatgatgcaactgaggtggttcttaataagctgcacgcgcctctgctgaccagattcgtccgcattaggccccagacctggcatagtggtattgctctaagactggagctgttcggatgcagggtgacagatgccccttgctccaatatgctcgggatgctctctgggctgattgccgattctcagatcagcgctagtagcacacaagagtacttgtggtctccttcagccgcacgtctcgtctcctctcgatccggctggtttccgagaattcctcaggctcagcctggtgaagagtggctgcaggtagatttggggacacccaagactgtaaaaggagttattattcagggggcaagaggtggtgatagtatcaccgctgtcgaggcacgcgcgttcgtgcgcaagttcaaggtctcctacagcctgaacgggaaagattgggagtacattcaggatcccaggactcagcaacccaagctcttcgaaggcaacatgcactatgatacgcctgatatcaggaggttcgatccaattcccgctcaatacgtgcgagtttaccccgagaggtggtccccggcgggcataggaatgaggctggaggtgttgggctgcgactggaccgattctaaaccgaccgtagagacactaggacctaccgtgaagtctgaagagactaccactccgtaccctaccgaggaggaggctactgaatgtggcgagaactgtagcttcgaagatgacaaggatctacagctgccaagtggctttaactgtaatttcgatttcctggaagagccttgcggctggatgtacgaccacgccaagtggctcagaaccacctgggcctcgagtagttcccccaacgatcgcacttttccagatgacaggaacttcctccggctccaatccgactcccaacgggaagggcagtacgccagactgataagcccccctgtgcatctccccaggtccccagtgtgtatggaatttcagtatcaggccactggaggccgaggggttgctcttcaggtggtcagagaggcatctcaggaatcaaaacttctgtgggtgattcgggaagaccagggcggtgagtggaagcatggacgaattatcttaccttcatacgatatggaatatcagatcgtattcgaaggcgtaattggcaaagggagaagtggagagattgccatcgacgatatcagaatttctaccgatgtgccgctagagaactgtatggagcccataagcgccttcgccgacgagtatgaggtagattggtcaaactcttcaagtgcaacaagcggtagcggagctccctctaccgacaaggaaaagagctggctgtacacactagatcccatcctgatcaccattattgctatgtcctcattgggagtcctgttgggtgcaacatgcgccggactgttgttatactgtacttgctcctactctgggctgtcctcacgttcttgcaccactctcgaaaactacaactttgaattatacgacggactcaagcataaagtgaaaatgaaccatcaaaagtgctgctccgaggcttag

SEQ ID NO: 16326 - DNA, 1668 bp, synthetic construct
  misc_feature 1..1668: note = Description of Artificial Sequence: Synthetic coding sequence
  source 1..1668: mol_type = other DNA
atggacatgttcccactgacctgggtgtttcttgctttgtacttttcccgccaccaggtacgtggccagcccgatcccccctgtggggggcgcctgaacagcaaggatgctggttatatcacctctccaggctaccctcaagactatccgtctcatcagaattgcgagtggatcgtatacgcacccgaaccgaaccagaaaattgtactgaactttaatccgcactttgagatcgaaaaacatgactgcaaatacgactttatcgaaatcagagatggagactctgagtcggcagatttactcgggaagcactgcggaaatattgccccgcctactatcatcagctctggatcaatgttgtacatcagattcacctccgactatgcgcgccagggcgctggatttagtctacgctacgaaatttttaagaccggtagtgaggactgcagcaagaattttacaagccctaacgggacgatcgagtcccctggatttccggagaaatatccccataacttggattgcacattcactatcttagcaaaacccaaaatggagatcatcctgcagtttctgatcttcgacctggaacacgaccccctgcaggtgggcgagggggattgcaagtacgattggctggacatctgggatggaattccccacgtcggtccacttatcgggaagtattgcggaaccaaaaccccctcggaactgcgctcctctaccggaattttgtccctgactttccacactgacatggctgttgcaaaagatggattctctgccaggtactacctggttcatcaggagcccctggaaaactttcagtgtaatgtgccccttggaatggagagcggacggatagccaatgaacaaattagcgcctcgtctacttactcggatggtcgatggacgcctcagcagtctcgtctgcatggtgatgataacggttggacaccgaacttggactcaaacaaagaatacctgcaggtagatctgaggttcctgaccatgttgaccgcaatagccacccaaggtgccatctctcgagaaactcagaacggctattacgtgaagtcatacaaactcgaggtgagcaccaatggtgaggattggatggtgtaccgtcacgggaaaaatcacaaggtgttccaggcaaacaacgacgccacagaggtggtgctgaataaactacatgctccgctgttaacaaggttcgtgcgtatacgaccccagacgtggcactctggaattgccttaaggctggagcttttcggatgtagagtcacggatgccccttgttctaatatgctgggaatgttgtcgggccttatcgccgactcccagataagcgcctctagcactcaagaatatttgtggtctccctccgccgctcgcttggtgtcttctcgctccggctggtttccacgaataccacaggcacagcccggagaggagtggctgcaagtggatctgggcactccaaagacagtgaagggagtgatcatacaaggcgctcgcggtggcgactccattactgcggtggaggctagagcattcgtgagaaagtttaaagtcagctactcactgaatgggaaggattgggagtacattcaagatccgagaacccagcagcctaaggtcggctgctcatggaggccactatag

SEQ ID NO: 16327 - DNA, 309 bp, synthetic construct
  misc_feature 1..309: note = Description of Artificial Sequence: Synthetic coding sequence
  source 1..309: mol_type = other DNA
atggatatgtttccactgacctgggtattcctggccctgtatttttctcgacaccaagttagagggcaacccgatcccccctgtggcggacgccttaacagcaaagacgctggctatattaccagccccggctacccacaggattatccgagccatcagaactgcgagtggatcgtttacgctcctgagccaaatcaaaagattgtgctcaacttcaatcctcattttgaaatcgagaagcacgactgcaaatatgacttcatcgagatcagggatggtgatagtgaaagtgctgacctgctgggttag

SEQ ID NO: 16328 - DNA, 2781 bp, synthetic construct
  misc_feature 1..2781: note = Description of Artificial Sequence: Synthetic coding sequence
  source 1..2781: mol_type = other DNA
atggatatgttccccctgacatgggtgttcctcgctttgtactttagtcgtcatcaggtcagagggcaacccgaccctccttgtggcggcagacttaattctaaagacgccggatatattaccagccccggatatcctcaggactatccatcacatcaaaattgcgaatggatagtttacgcccctgaaccgaaccagaagattgtcctgaatttcaatccacatttcgaaattgagaaacatgactgtaaatatgatttcattgaaatccgcgacggcgactcagaatccgcagacctcctcggaaagcattgcggaaatatcgctcctcccaccattatttcaagcgggtccatgctttatatccggttcacctccgattacgctagacagggggctggattctcactgcgctatgagatcttcaagaccgggagtgaggattgttccaaaaactttactagccctaacggaaccatcgagagtcctggtttcccggaaaagtacccccacaacctggactgtacattcaccattctcgccaagccgaagatggagataatcttgcaatttctgatcttcgacctggagcacgatcctcttcaagtgggggagggcgactgtaagtatgactggctcgatatatgggacggcattccgcatgtaggtccactcatcgggaagtattgcggcaccaagaccccttctgagcttcgatcatccacagggattctttcactgaccttccacaccgacatggccgtggctaaagacggattctctgcccggtattatctggtacaccaggagcccctggagaactttcagtgcaacgtgccactgggtatggaatctggccggattgccaatgaacagatcagcgcaagtagtacctacagcgatggcaggtggactccgcaacagtctcgcctccacggggacgataatgggtggactccaaatttggactcgaacaaggaatatctgcaggtagatctgcgttttctgacaatgttgactgcaattgcaacccagggggcgattagccgggaaacccagaatggatattatgttaagtcatataagctggaagtcagcaccaacggagaggattggatggtctacaggcatggcaaaaatcataaagttttccaagcgaataatgacgccacagaggtcgtgttaaataaactccacgcccctttgcttacccgctttgttcgaatccgtccacaaacctggcatagtggaattgcactgcggttggagttgttcggatgccgggtgacggacgccccttgcagcaatatgctcggcatgttatccggtctcatagcagattcacagatcagtgccagcagcacacaggaatatctatggtccccatcagccgcccggttggtcagcagtcggagcggctggttcccacgaataccccaggcccagcccggtgaggagtggttgcaggtggacctgggaactcctaagaccgttaaaggggtgatcattcagggggcgcgcggcggcgactctataaccgccgtcgaggccagagcatttgtcagaaaattcaaagtgagttattccctgaatggcaaggactgggagtacattcaggatcctcgcacacagcagcctaagctgtttgagggcaacatgcattatgacacccccgacattcgcaggttcgaccccatccccgcccagtacgttagagtataccccgagcggtggagccctgctgggattgggatgcgccttgaggtgctgggttgcgattggacagacagcaaaccaactgtcgaaaccctcggccctaccgttaagtcggaagagacaaccactccataccctacggaggaagaggctacagagtgtggcgaaaactgcagttttgaggacgataaggacctacagttgccaagtggttttaattgcaactttgacttcctcgaagagccctgtggctggatgtatgatcacgcaaaatggctgagaacaacatgggcgtctagtagttctccaaacgaccgcacattccccgatgacaggaacttcctcaggcttcagagcgattcccagagggaaggccagtacgcccgccttatttcaccgcccgtgcatctccctcggtcccccgtctgcatggaatttcagtaccaggctactggtggtcgaggggttgccctgcaggtggtgcgcgaagcatctcaggagtccaaactgctgtgggtcatcagagaagaccaagggggagaatggaagcacggccgcatcattctaccatcttacgatatggagtatcaaatcgtgtttgaaggcgtgattggaaagggacgcagcggcgaaattgccatcgatgatattagaatttcaacggacgttcccctggagaactgcatggcaaccgtctctgccagtatcgtggatatccccgagatccacgagcgggaagggtacgaggacgagattgatgatgagtatgaggtagactggtctaacagcagcagtgcgacatccggaagcggagctccctccaccgataaagaaaaatcttggctgtatacactggatcctattctgatcaccattattgctatgagcagtctcggcgtactgctgggcgctacatgtgctgggcttttactgtactgtacatgtagttactctgggttgagttccagatcttgcaccacgctcgagaattacaatttcgagctatatgacggcctgaaacacaaggtcaagatgaatcatcagaagtgttgctcagaagcgtag

SEQ ID NO: 16329 - DNA, 2730 bp, synthetic construct
  misc_feature 1..2730: note = Description of Artificial Sequence: Synthetic coding sequence
  source 1..2730: mol_type = other DNA
atggacatgtttcccctgacatgggtttttttagcattgtacttctcacgacaccaagtgagaggacagcctgacccgccttgtggcggccggttgaatagtaaggatgctgggtacatcacatcccctggctacccgcaagattatccttcacatcagaattgcgagtggatcgtgtatgcccctgaacccaaccagaaaattgtgttgaactttaatcctcatttcgaaatcgagaagcacgactgtaaatacgacttcatcgagatccgggatggcgactctgagagcgcggaccttctggggaaacattgcggaaacatcgctccaccgacaatcatctccagtggctcaatgctgtatatcaggtttacgagcgactacgcacgccagggtgccggattctccctgagatatgaaatcttcaagacaggaagcgaggactgttcaaagaactttaccagcccgaatgggacgattgagtcacccggattccccgagaagtaccctcataatctcgattgcacgttcaccatactggccaaacctaagatggagattatccttcagttcctgatctttgacctcgagcacgaccccctgcaggttggagagggcgattgcaaatacgattggttagacatctgggacggaattccacatgtgggcccactcattgggaaatactgcggaaccaagacaccctcggagctgaggagttccaccggcatcttgtcgctgaccttccacacagatatggccgtggccaaagacggtttttctgcaaggtactacctcgtgcaccaggagccactggagaacttccagtgcaacgtaccgctgggtatggagagtggcaggatcgcaaacgaacagatatcggcctccagcacctattcagacggccgatggacaccacaacaatctagattgcatggggacgataacggatggacacccaatctagatagcaacaaggagtatctgcaagtggatctcagattcttaacaatgcttacagccatagcaacacagggagccatctctcgggagactcaaaacggttattacgtgaagtcgtacaaactggaggtttccacaaatggagaggattggatggtgtatcggcacggcaagaatcacaaggtcttccaggccaataatgatgcgaccgaggtggtgcttaacaagctccacgcaccgcttcttacgagattcgtccggatcagaccccagacttggcacagcggaatcgcattgagattggaactcttcggctgccgcgtgacggacgctccatgcagcaacatgcttgggatgttgtcaggattgatcgctgattcgcagatcagcgcgagttccactcaagagtacctatggagccccagcgcagctcgccttgtttcttcacgctccggctggttcccaaggataccccaagcccagccaggagaagaatggttgcaggttgatctcgggactcctaagacagtaaagggcgtgattatccaaggcgctcgggggggcgattccatcactgccgttgaagcccgagcatttgtgcgaaagtttaaggtgagctacagccttaacggtaaggactgggagtatatacaagacccacgcacacaacaacccaagctcttcgagggaaacatgcactacgacacgccagacatcagaaggtttgaccccatacccgcccaatacgtgagagtttacccagagagatggagccccgccggcattgggatgaggctcgaggtactgggttgtgactggaccgacagtaagcctacagtggagactctcggcccaaccgtgaagtctgaggagacaaccactccgtatcccaccgaggaagaggccaccgagtgcggggagaactgttcgttcgaggatgataaggatctgcagctcccatcaggattcaattgtaatttcgacttcctagaagaaccatgtggctggatgtacgatcatgctaagtggctgcgtacgacttgggccagttcctctagcccaaacgacaggacattccctgacgacaggaactttttgcggctgcagtcagatagccagcgtgaggggcagtacgctaggctgatttctccaccagtccaccttccgagatcccctgtctgtatggagttccagtaccaggcgacaggaggcagaggcgtcgcgctgcaggtggttagggaagcgtctcaagagagcaagttgctgtgggttataagggaagatcagggcggggagtggaagcacggaagaattatcctaccaagctacgacatggagtaccagatcgtgttcgaaggcgtgatcggaaagggacggtcaggagaaattgccatcgacgatattcgcatatcaacagacgtgccgctcgagaattgcatgggccccaaagcttgcattgccgacgaatacgaggtcgactggagtaacagcagtagcgctacatccggtagcggagcccctagcacagacaaagaaaaatcatggctctacacactcgaccctatactcattaccatcatcgctatgtctagcctgggcgtgctcctgggggcaacctgcgccggattgctgctgtattgtacttgtagctattccggtcttagctctcgaagctgcacaacattagaaaattacaatttcgaattatacgacgggctcaaacacaaggtaaagatgaaccatcagaagtgctgcagtgaggcatag

SEQ ID NO: 16330 - DNA, 462 bp, synthetic construct
  misc_feature 1..462: note = Description of Artificial Sequence: Synthetic coding sequence
  source 1..462: mol_type = other DNA
atgaccaagattaaagccgatccagacggacctgaggcccaagccgaagcctgctctggtgagcgtacatatcaggagctgttggtgaatcagaaccctattgcccagccattggctagccggcgcctgaccagaaagctctataaatgtattaagaaggccgttaaacagaagcagatccgtcgcggggtgaaagaagtacagaaattcgtcaacaagggagagaaaggcataatggtcttggccggcgatactctccccatagaagtgtactgtcatctcccagttatgtgcgaggaccgcaacttgccttacgtgtacataccctctaagaccgatctaggggcagcagccgggtcaaaacgccctacctgcgtgattatggttaagcctcacgaagaataccaggaggcctatgatgagtgcctggaagaagtgcagagccttcccctaccactttag

SEQ ID NO: 16331 - DNA, 273 bp, synthetic construct
  misc_feature 1..273: note = Description of Artificial Sequence: Synthetic coding sequence
  source 1..273: mol_type = other DNA
atgaccaagataaaagccgaccctgacggccccgaggcacaggccgaagcctgcagcggcgaaaggacgtatcaggagctgctggtgaatcagaatccaatcgcccagcccctggccagtagacgactcacgaggaaactatacaaatgcataaaaaaggccgtcaaacagaaacaaattaggcgtggcgtgaaggaagtccagaaattcgtgaataaaggtgagaagggcacttgggtgcaacctcaagctcctagcgcccctcctgtttag

SEQ ID NO: 16332 - DNA, 2265 bp, synthetic construct
  misc_feature 1..2265: note = Description of Artificial Sequence: Synthetic coding sequence
  source 1..2265: mol_type = other DNA
atgtggaaacttctgcccgccgccggaccggccggcggcgagccttaccgactgctgacaggggtcgagtatgtcgtgggtcgaaaaaattgtgctatactgattgagaatgatcaatcgatatctagaaatcacgctgtcctcacagctaacttctcagtcactaacctgtcgcagacagacgagatcccagtgcttacccttaaggataatagtaagtacggcacattcgtgaatgaggagaagatgcagaatggcttttcgcgcacgctgaagagcggcgacggcattacattcggagtctttgggagtaaattcagaatcgagtacgaacctctggtggcttgttcatcctgcttggatgtgtcagggaagacagccctcaaccaggccattcttcaactcggtggctttaccgttaataattggactgaagagtgtacgcatctggtgatggtgtcggttaaggtaacgattaaaactatttgcgccttgatatgcggcaggcctatcgttaagccagaatatttcaccgagtttctcaaggcggttgagagtaagaaacaaccgcctcagatcgaatcattctacccccctcttgacgagccttcgattggctctaagaacgtcgacctgtcaggaaggcaggaacgcaagcagatctttaagggcaagacttttatatttctgaacgcgaaacagcataaaaagctgtctagtgctgtcgtctttggtggcggggaggcccgattaataactgaggagaacgaagaggagcacaacttctttctggcacccggcacctgcgtggtggacactggaataactaatagccaaactttaatcccagactgtcagaagaaatggatccagtccatcatggatatgctgcagagacagggactgcgccctatccctgaggccgaaatcgggttggctgtgattttcatgactactaagaactattgtgacccccagggccaccctagcacagggctgaagaccacaaccccaggacctagcctgtctcagggggtctcagttgacgagaaactgatgccctccgctcctgtgaatactactacttatgtcgccgacaccgagtctgagcaagctgatacttgggatctgagcgagcgtcctaaggagattaaggtgtcaaagatggaacagaagttccggatgctgagccaggatgctccaacggttaaggaatcctgcaagaccagctccaataataacagtatggttagtaatactttagccaaaatgaggataccaaattatcagctctctccaaccaagttaccatcaatcaacaagagcaaggacagagccagccagcaacagcagaccaattcgattcggaactactttcagccatccacaaagaaaagagaaagagatgaagagaatcaggaaatgtcaagctgtaagtcagctcgcattgaaacctcatgctccctgttagaacagacccagccagcgacaccttccctgtggaagaacaaggaacagcatctaagcgaaaatgagcctgtcgacactaactcagataataacctttttactgataccgacctaaaatctattgtcaaaaattcagcttctaagagtcatgctgccgaaaagctcagaagcaataagaagcgggagatggatgatgtggctatcgaagatgaggtgctggaacaacttttcaaggacacaaaacctgagctcgaaatcgacgtgaaggtgcagaaacaagaggaagacgtcaatgtaagaaaacgccctcggatggatatagaaactaatgacacgttctcggatgaggccgttccagaaagttccaagatttcccaggagaatgaaatagggaaaaagcgagagttgaaagaggacagcctatggagcgccaaagaaatctccaacaatgacaaactgcaggacgactcggagatgctaccgaaaaagctcctgttgactgaatttaggtctctggtaataaagaatagcactagtaggaatccctctggtataaatgacgactacggacagctgaagaattttaaaaagtttaagaaagtgacatacccgggagccggcaaactgccccatatcattggagggagcgacttaatcgcccaccatgctagaaaaaatacagagctcgaagagtggctccggcaggagatggaggtgcagaaccaacacgcgaaagaggaatccctggccgacgacctttttagatacaacccttacttgaagagaagaagatag

SEQ ID NO: 16333 - DNA, 1437 bp, synthetic construct
  misc_feature 1..1437: note = Description of Artificial Sequence: Synthetic coding sequence
  source 1..1437: mol_type = other DNA
atgtggaaattgctgcctgccgccgggccggcagggggagagccctatcgactcctgacaggggtcgagtatgtcgtgggccgaaagaactgtgctatccttattgaaaatgatcagtccatctcacggaaccacgccgttctgaccgccaatttctcggtgactaacctgagtcaaacggacgagatcccagtcctgactctgaaggacaactcaaagtatgggacttttgtgaatgaggaaaagatgcagaatggtttctcacgcaccctcaagagcggggacggcattacattcggcgtgttcggctctaaattccgaatagaatacgaacccctggtagcctgcagttcctgtttggatgtgtctggcaagacggccttaaatcaggcaatactccaactgggaggttttaccgtgaataattggaccgaggaatgtactcacctggtcatggtttctgtgaaggtcacaatcaaaactatttgtgctcttatctgtggccgaccaattgttaaaccagaatatttcacagagttcctgaaggcggtcgagtccaaaaagcaaccaccacagatcgaatcattctacccaccacttgacgagccaagcattggtagcaagaacgtcgacctttccggacgacaggaaagaaaacagattttcaaagggaagactttcatattcttgaatgcaaagcagcacaagaaactgtcctccgctgtcgtctttggaggaggtgaggcaagacttattaccgaggagaacgaagaggagcacaacttttttctggcacctgggacatgcgtggttgacactggcatcacgaactctcagaccttgattcccgactgtcagaaaaaatggatacagagtataatggatatgctccagaggcaggggttgcggcctatcccagaagccgagatcgggctggccgtgatatttatgactacaaagaactattgtgatcctcaggggcatcctagcacaggccttaagactactacaccgggtccctccctcagccagggtgtatctgtggacgagaagctgatgccttcagcacctgtcaacaccaccacctatgtggccgacactgaatcagagcaagccgacacgtgggacctatctgagcggccaaaggaaattaaggtgtcaaagatggagcagaagtttcgcatgctctcccaggacgcccccacagtgaaagagtcctgtaaaacttctagcaacaataactcaatggtgtcaaataccctggctaaaatgagaatccccaattatcagcttagccccaccaaacttccatctatcaacaaatccaaagatagagcatctcaacaacaacagaccaacagtattcggaattactttcaaccatccaccaaaaagagagagcggctacacctcaagaaaaagaagaagaaaaaatag

SEQ ID NO: 16334 - DNA, 333 bp, synthetic construct
  misc_feature 1..333: note = Description of Artificial Sequence: Synthetic coding sequence
  source 1..333: mol_type = other DNA
atgggtgctagcggatcaaaagcaagaggactgtggcccttcgcgagtgctgcaggcggtggaggtagcgaggcagccggtgccgagcaagcactggttcgccccaggggtagagccgttcctcctttcgtcttcactcgcagggggtcaatgttctatgatgaagatggggatttggcacatgagttctatgaggaaacaatcgttacgaaaaacgggcaaaaacgggctaaactgagacgtgtccacaagaatctcattccacaaggaatcgttaagctcgaccacccccgcatccacgtcgattttcctgtgatcttgtacgaggtgtag

SEQ ID NO: 16335 - DNA, 1206 bp, synthetic construct
  misc_feature 1..1206: note = Description of Artificial Sequence: Synthetic coding sequence
  source 1..1206: mol_type = other DNA
atgtggtctggggggtctggcaaggcgcgcggatgggaagcggccgctgggggccggtcttctccaggacgtctgagccgccgtcgcatcatgagtatgtcgcctaagcatactacacccttttctgtgtcggatatcttgtcccccttagaggagagttataagaaagtcggcatggaggggggaggattgggcgcaccattagctgcatacaggcaggggcaggccgccccccctaccgccgccatgcagcagcacgccgtgggtcatcacggcgcagtgaccgccgcctatcacatgaccgccgctggcgtaccacagctcagtcattccgctgtgggggggtactgtaatggcaacctcggaaatatgtcggagctgccaccataccaggataccatgcggaacagcgcatcaggacctggctggtacggcgctaatccagaccctaggttccctgctatttccagatttatgggcccggcatccggcatgaatatgtccggtatgggtggactgggcagcctcggcgatgtgagcaaaaacatggctccgttgccatcagccccccgacgaaagcggcgggttctgttctcacaggcccaggtctacgagctcgaaaggcgattcaagcaacagaagtatttgtccgccccagaaagagaacacctagcctccatgattcatctcactcctactcaagtgaagatttggtttcagaatcaccgttacaagatgaagagacaagctaaggacaaagccgctcagcagcagctgcaacaggattccgggggtggcgggggcgggggcggcacgggatgtcctcagcagcaacaagctcagcagcagtctcccagacgcgtcgccgtgcctgtgctggtaaaagatgggaaaccctgtcaggccggcgcccctgctccaggagccgcaagtttgcaaggtcatgcccagcagcaagcccaacatcaggcgcaggcagctcaggcagcagcagctgccatctccgtcggttccggaggggccggtctcggtgctcacccagggcatcagcccgggagtgctgggcaatcccccgatttggcccatcatgccgcttctcccgcagcccttcagggacaggtatcttccctgagccatctcaactcttccggtagcgactacggaaccatgagttgcagtacactcctttatggccggacatggtag

SEQ ID NO: 16336 - DNA, 1116 bp, synthetic construct
  misc_feature 1..1116: note = Description of Artificial Sequence: Synthetic coding sequence
  source 1..1116: mol_type = other DNA
atgtcaatgtctccaaagcacactactccattcagtgtcagcgacatcctctctcccttggaagagtcctacaaaaaagtggggatggagggtggtggactcggagcccccttagctgcctatagacagggacaggcggcacccccaaccgcggcgatgcagcagcatgccgtcggccatcatggcgccgtcacagccgcctaccatatgactgccgccggcgtcccacagctctcacatagcgcagtaggaggctactgcaatggcaacctggggaatatgtcagagctccccccttatcaggatacaatgaggaacagcgcctcagggcccgggtggtacggcgctaatcccgatccccggtttccggcaatcagcagattcatgggccctgcctcaggcatgaacatgagcggcatggggggactcgggtcgctcggagacgtgagtaagaatatggccccactgcctagcgcacctcggagaaagaggcgtgtgctgttcagccaggcgcaggtctacgaacttgagcggcggttcaaacagcagaaatacctcagtgcacctgaacgtgaacacttggcttctatgattcacctgacacccacacaggtcaaaatatggttccagaaccacagatacaagatgaagaggcaggccaaggacaaggctgctcagcagcaattacagcaggacagtggcggtggcggtgggggaggtggtacaggctgtccacagcagcagcaggctcagcagcaatccccgaggagagtggctgttcctgtgcttgtcaaggatggcaagccatgtcaagctggggcacccgcaccaggagcagcttctctgcaaggccatgcccagcagcaggcccaacaccaggcccaagcagctcaggcggcagctgccgctatatcagtgggctccggtggcgcaggccttggcgcacaccccggccaccagcctggctccgcaggccagtcacccgacctcgcacaccacgccgccagtcccgcagcccttcaaggccaagtgagcagcctgtcgcacctaaattcctcagggagcgactacgggacaatgtcctgctccacgctgttatatggacgtacatggtag

SEQ ID NO: 16337 - DNA, 1116 bp, synthetic construct
  misc_feature 1..1116: note = Description of Artificial Sequence: Synthetic coding sequence
  source 1..1116: mol_type = other DNA
atgtccatgtcccccaagcacacaacaccgttctctgtctctgacattttatcccccctggaggagagttataaaaaggtgggaatggaaggtggaggactgggcgcccctctagcggcgtatcgtcagggccaagccgcccctcctacagctgcaatgcagcagcacgctgtaggacaccatggcgcggttacggccgcctatcacatgacggcagctggcgtgccacagttgtcccactcggctgtcggaggctactgtaatggaaacctgggaaatatgtccgaactgcccccctaccaggacacaatgcgaaactccgcttccggaccaggttggtacggcgccaaccctgatcctaggttcccagctatatcccgatttatgggacccgctagtgggatgaacatgtccggaatgggaggactaggcagcctgggagatgtttctaagaatatggcacctttgccatcagcacctagacgcaagcggcgtgtgctgtttagccaggcgcaggtatacgaacttgaaagacggtttaagcaacagaaatacctgtctgcccccgagagagagcacctggcctccatgatacatctaacaccaacccaggtgaaaatatggttccagaatcatcggtataagatgaaaaggcaggccaaagataaggccgctcaacaacagttgcagcaggactctggtggaggtgggggtggcggtggtacgggctgcccacagcaacagcaggcacagcagcagtcacccaggcgagtggcagtccctgtgctagtgaaggacggtaaaccttgccaagccggagctcccgcccccggagccgcgtcattgcaggggcacgctcagcagcaggcccagcaccaggcccaggccgcgcaggctgcagcagcagccattagtgtgggctccgggggcgccggcctgggggcacaccctggacaccagccggggagtgccggtcagtcaccggacttggcccaccacgctgccagccctgcagctcttcaggggcaggtaagcagcttgagccacctgaactctagtgggagcgactatggtaccatgagttgttctactttactttatggacggacgtggtag

SEQ ID NO: 16338 - DNA, 1116 bp, synthetic construct
  misc_feature 1..1116: note = Description of Artificial Sequence: Synthetic coding sequence
  source 1..1116: mol_type = other DNA
atgagtatgtcccctaagcacaccacaccattctctgtctccgacatcctatctcccctcgaggagagctacaaaaaggttggcatggagggcgggggacttggcgccccactcgctgcttatcggcagggtcaggctgccccacctactgccgccatgcagcagcatgccgtgggccatcatggtgccgtcaccgccgcttatcacatgaccgctgctggcgtacctcagctttcgcactcagcggtaggcggttattgcaacggcaacctcgggaatatgagcgagctgcctccctaccaggacacaatgcgtaacagcgcctcagggcccggttggtatggggctaaccccgatcccagatttccagccattagtcgatttatgggccccgcctccggaatgaatatgagtggaatgggcggcctgggatcgctaggggacgtgtccaagaacatggcacctctgcccagcgcacccagacggaaaaggagagtgctgttcagccaagcccaggtttatgagctggaaagaaggttcaaacagcagaagtatttgtcggcaccagagcgagagcatctcgcctctatgatccacctaactccaactcaagttaaaatttggttccagaatcaccgctacaaaatgaagcggcaagccaaagataaagctgctcaacaacagctccaacaggactcaggagggggaggaggcggcgggggcactgggtgtccccagcaacaacaagctcaacagcaatccccgcgcagagtggcggtaccagtgttggtgaaggatggcaagccctgtcaggctggtgcccccgctcctggcgcggccagtttacagggccatgcgcaacagcaggctcaacaccaggctcaagctgcacaggccgccgccgccgcaatctcagttgggtctggaggtgctggtctcggagctcaccctgggcatcaacctggctcagccggccagagtcctgatcttgcgcaccacgccgctagccccgccgcactccagggacaggtgtcttcactgtcacatttgaatagttccgggtccgattacggcaccatgtcatgcagcacgctgctgtacggaaggacctggtag

SEQ ID NO: 16339 - DNA, 105 bp, synthetic construct
  misc_feature 1..105: note = Description of Artificial Sequence: Synthetic coding sequence
  source 1..105: mol_type = other DNA
atgtggtccggcgggtccgggaaagcaagggggtgggaagctgccgccggtgggcgaagctcccctggaaggctctcggcctatgcaccacctcttgtggcgtag

SEQ ID NO: 16340 - DNA, 573 bp, synthetic construct
  misc_feature 1..573: note = Description of Artificial Sequence: Synthetic coding sequence
  source 1..573: mol_type = other DNA
atgttacgcgtccccgaaccgcgtcctggtgaggccaaggccgagggtgcagccccacccaccccctcgaagccactgacctcttttctgatccaggacatcctgagagacggagcccccgaggaagctgaaactctggcggaaactgagcctgagcgacatctgggaagctacctgctcgactccgaaaatacatccggtgctttgccgcggctgccacaaacaccgaaacaaccccaaaaacggagcagggccgccttttcccatacacaggtgatagaactggaaaggaagttttcccaccagaagtatctgtctgcgcctgaaagggcgcatctggccaaaaacctgaaactgactgagactcaggtcaagatctggttccaaaataggaggtacaaaaccaagaggaaacagttgagtagtgaactgggagacctggagaagcatagctcgcttcccgccctcaaggaagaagcatttagccgagccagtctggtgtccgtgtataactcttacccgtactacccctacttatactgtgtaggcagctggtccccggccttttggtag

SEQ ID NO: 16341 - DNA, 705 bp, synthetic construct
  misc_feature 1..705: note = Description of Artificial Sequence: Synthetic coding sequence
  source 1..705: mol_type = other DNA
atgttgcgcgtccccgagcctaggcccggggaagcaaaagccgaaggcgcagctccgcccacaccatccaagccactaacatccttcctaattcaagacattctacgcgacggcgcgcagcggcaaggaggtcgcacatcctctcagaggcaaagagacccagaaccagagcctgagcccgaaccagaaggtggtcggtctcgggctggcgctcaaaacgatcaactgtctacgggccctagggccgcccccgaagaggctgagacgctcgccgagactgaacccgaaagacacctgggctcctacctgctggattctgaaaataccagcggagccttgcctcgtcttccccagacacctaagcaaccccaaaaacggtcccgggcagcattcagccacacacaggtcatcgagctcgaaagaaagttcagtcatcaaaagtatctctctgcaccagagagggcccatctggcgaaaaacctgaaattgactgagactcaggttaagatttggttccagaatcgtaggtacaagaccaaacgcaaacagctcagcagtgaacttggggacctggaaaagcactcctcccttcctgccctcaaggaggaagccttcagcagggcgtcactggtctctgtgtacaatagctatccatactacccatatctgtattgtgtgggctcctggtctcccgccttctggtag

SEQ ID NO: 16342 - DNA, 480 bp, synthetic construct
  misc_feature 1..480: note = Description of Artificial Sequence: Synthetic coding sequence
  source 1..480: mol_type = other DNA
atgctccgggttccagaaccccgacccggcgaagccgagactcttgccgaaactgaaccagagagacatttagggagctatcttctggattctgagaacactagcggggcccttccccgtcttccacagaccccaaagcagccccagaagaggtctagggccgccttcagccacacacaggtgatagagctggaaaggaagttctctcaccagaaatacttatcggcaccagagcgggcccatttggccaagaatctgaaattgaccgaaacacaggttaaaatctggtttcagaaccggcgatacaagacgaagcgcaagcagttatctagcgagctcggcgatctggagaaacactcatccttgcccgccctgaaagaagaggcctttagccgtgcatccctcgtgtcagtgtacaactcatacccctactatccttacctgtactgtgtgggttcgtggtcaccagcattctggtag

SEQ ID NO: 16343 - DNA, 4212 bp, synthetic construct
  misc_feature 1..4212: note = Description of Artificial Sequence: Synthetic coding sequence
  source 1..4212: mol_type = other DNA
atggctacacagcagaaagccagcgatgaaagaatttcgcagtttgaccataaccttctgccggagctctccgccctccttggcctggacgcagtgcaactggcaaaggagctcgaggaagaggaacagaaagagagggctaaaatgcagaaagggtataacagtcagatgcggagcgaggctaagaggcttaagacctttgtcacatatgaaccatactcttcctggatcccccaagagatggcagccgcagggttttactttactggcgtgaaatcggggatacagtgtttctgctgttctttgatactctttggggcaggactcaccagacttcccatagaagaccataagaggtttcaccctgattgtggatttttgcttaacaaggatgtaggcaacattgccaagtacgacatccgggtgaaaaacttgaagagtaggttgagaggaggcaaaatgcgttatcaggaagaggaggcccgtttggcatcgttccgcaactggcctttctatgtccaggggatttcaccctgcgtgctcagcgaagctggttttgtgttcacaggaaagcaggatactgtgcagtgcttttcatgtggcggctgcttggggaattgggaagagggagatgatccatggaaagaacacgccaagtggtttccaaagtgtgaattcctgaggtctaagaaatcctcggaggagatcacacaatatatccagtcctacaaaggattcgtggacatcacgggggagcactttgtgaattcttgggtgcaacgtgagctgcctatggctagcgcttattgcaacgactccatctttgcctacgaagaactgaggctggactcattcaaagattggcccagagagtctgccgtcggcgtagccgcattggcgaaggcgggcttattttacaccgggatcaaagacatcgtgcaatgcttctcctgcggaggatgcctggaaaaatggcaggaaggggacgacccactcgatgatcacactaggtgcttcccaaattgcccctttttgcaaaacatgaaaagcagtgcagaagtgaccccggacttgcagtcacgaggcgaactatgcgagttgctggaaaccacaagcgaaagtaatctcgaggactccattgccgtgggccctattgttcctgagatggcccagggcgaggcccagtggttccaggaagctaaaaatctcaatgagcagctacgggccgcatacacctcagcttcctttcggcatatgtccttgcttgacatttcgtccgacctggccactgaccatctattagggtgtgacctaagcatcgccagcaagcacatctcaaagcccgtccaggagcccctggtgctgccggaagtcttcgggaatctaaacagcgtgatgtgtgtggagggtgaagcgggaagcggaaagacagttttactgaagaagattgcctttttgtgggcgtcaggttgctgtccactgcttaatcgattccaactggtgttctacctgtcactgtcctctaccaggccagatgaagggcttgccagcatcatctgcgatcaactgcttgaaaaggaaggctcagtgactgagatgtgcgttaggaacatcatccagcaactgaagaatcaagttctcttcctgcttgacgactataaagagatatgctccattcctcaggttatcgggaaattaattcaaaagaatcacctctcaaggacctgtctgctcatcgccgttcgtactaacagggcgcgagacatccgcagatacctagagacaatactcgaaattaaggccttcccattttacaataccgtttgcattctccgaaagcttttttctcataacatgacaagacttcgcaagtttatggtgtattttggcaaaaaccagtctctgcagaagatccagaagactcccttgtttgtcgccgccatatgcgcacattggttccagtaccccttcgaccccagcttcgacgatgtcgccgtgttcaaaagctatatggagagactgtccttgcgcaataaggccactgccgaaattctgaaggcaacagttagctcttgcggagaattggctcttaagggattcttcagctgttgtttcgagttcaacgatgatgacctcgcagaggccggagtggacgaggatgaggacttaactatgtgtctgatgtcgaagtttacagctcaacgactgcggccattctataggttcctttctcccgcctttcaggaatttctggcaggcatgcgtcttattgagctccttgacagcgatcggcaggagcaccaagacctggggctgtatcatctcaagcagattaacagccctatgatgacggtgtccgcctacaacaactttctgaactacgtaagctcgctgcctagcacgaaagccggccccaaaatagtgtctcacctgctgcacttagttgacaataaagaatcattggaaaacatttccgagaacgacgattatctgaaacaccaacctgagatctctctgcagatgcagctgttacgcggattatggcaaatctgccctcaggcgtatttctctatggtgagcgaacacctgctcgtgcttgctctaaagacggcatatcaatccaacactgtggctgcatgctctccatttgtgcttcaatttctccagggccggaccctgaccttgggcgccctgaacttacagtatttttttgaccatcccgagtccctctctctactgagatcgatccacttccctattcgggggaacaaaacatccccgcgggctcacttttctgtgctggaaacttgcttcgacaagagccaggtgccgacaatagaccaggactacgctagcgctttcgaaccaatgaatgagtgggagcgtaacctggcggagaaggaggacaacgtcaaatcatacatggatatgcagcgcagagctagccccgacctaagcaccgggtattggaaactcagccccaagcagtacaaaattccttgcctggaagtagacgtaaacgacattgacgtcgtggggcaggatatgttggaaattctgatgactgtgttctcagcgagccagcgaattgaattgcatctcaaccacagtaggggattcatcgagtctattcgccccgcgcttgaactctcaaaagcatctgtaacaaaatgcagtatctccaaattggagttatctgctgctgaacaggagctgctgctgacccttccttctctggagagcctggaagtgtccggaaccattcagagccaggaccagatcttccccaatctcgataagttcctgtgtctgaaggaactgagcgtcgatttggaaggcaacatcaacgtgtttagcgtcatccctgaggagtttcccaactttcaccacatggaaaagttgctgatccagatatctgcagaatacgatccttccaaactcgttaaactcattcaaaactcgccgaacctgcatgtgttccacctgaagtgcaacttcttcagtgattttggcagccttatgacaatgctcgtgagctgtaagaagcttactgagattaaattctctgactcattctttcaggctgttccgtttgtcgccagcctgccaaactttataagcctgaagattttaaacctggagggacagcagttccctgatgaggaaacgtcagagaagtttgcgtatatcctcggaagtctgagcaacctggaggagctgatcctgccaacaggggacggcatataccgtgtggccaaattgatcatccagcaatgtcagcagctacactgtctcagggtgctgagcttttttaagaccctgaatgacgatagtgtcgttgagatcgctaaggttgccatctccggaggctttcagaaactggagaacctgaaactcagcatcaaccacaaaattactgaggaagggtatcggaacttctttcaagcactcgacaacatgccgaacttgcaggagctggacatttcccggcattttaccgagtgcatcaaagcccaggccaccacagtgaaatccctgtctcaatgtgtcctcaggttaccacgtctgattaggctgaacatgttatcttggctgctagacgccgacgatattgccctcctgaacgttatgaaagagagacatccccagtccaaatacctgactattcttcagaagtggattcttcccttctccccaattatccagaagtag

SEQ ID NO: 16344 - DNA, 3726 bp, synthetic construct
  misc_feature 1..3726: note = Description of Artificial Sequence: Synthetic coding sequence
  source 1..3726: mol_type = other DNA
atgcccctgcacattggggatttcgtgtgggatagtaaggtacactcgcttcaaagtagcctgaacatctttagcctgctgcccactaagggtagaaccgaacacctctttttcagtcatatcctcagttttcactggccagctttctcaagcattaggctggaactatggattaatctcaggtgtgagtttcttcgttcaaaaaaatcgtctgaggaaattacccagtatatacagtcatataagggcttcgtcgacatcactggggaacactttgtgaattcatgggtccagcgcgaactgcccatggcaagcgcttactgtaacgattcgatcttcgcttatgaagagctaaggctggatagcttcaaagactggccccgtgagagtgcggtcggggtagccgccctggcaaaagccgggctgttttacaccggtattaaggacatcgtgcaatgcttttcgtgtggaggatgtctcgagaaatggcaggaaggagatgaccccctagacgatcatacgaggtgcttccctaactgcccttttttacagaatatgaaatcttccgctgaggtgacgcccgatctgcagtcaaggggagagctgtgcgagctcctcgagaccacatcagagagtaacctcgaggactccattgctgtaggccccattgtgcctgaaatggcccagggagaggcccagtggttccaggaggcgaagaaccttaacgaacaactccgggctgcatacacttccgcgagctttcgacatatgtccctgcttgacatatccagcgacctcgccacagatcacctccttggctgcgacttgtccatcgcctccaaacatatctctaaacccgtgcaagaacccctggtgctccctgaagtgtttgggaaccttaactctgtgatgtgtgtagaaggtgaagccggtagcggcaagacagtgttgctgaagaaaatcgcatttctgtgggcctctggatgctgccccttgctcaataggttccagcttgtgttttacctctcgttgagttccactcgccccgatgaggggttggctagcattatctgcgatcaattactggagaaggaaggaagcgtgacagagatgtgtgtgcgtaacatcatacaacaactcaagaaccaagttctgttccttctcgatgactacaaagagatttgctccatcccccaggtaattggaaagctgatccagaagaaccacctgtcccgcacatgcctcctgatagcagtgcgcaccaatcgggcaagggatattaggcggtacctcgagaccatactcgagattaaagcctttcctttctacaacacggtatgcatcctgcggaagttattcagtcataacatgacaagactcagaaaattcatggtctacttcggaaaaaaccagtccttgcagaagatacagaagactccactattcgtagccgctatttgtgctcactggtttcagtatcccttcgacccgagtttcgacgatgtggccgtgttcaaaagctatatggagagactgtccctgcgaaataaggccacggccgaaatcctcaaagcaactgtgagctcctgcggggaactggcgctgaaagggtttttctcatgttgtttcgagtttaacgatgacgacttagccgaggccggcgtcgacgaggacgaggacctgaccatgtgtctcatgagtaagtttaccgctcagaggcttaggcctttctaccgattcctctcaccagctttccaggaattcttagctggaatgcgcctgatcgaactgctcgactcggaccggcaagagcaccaagacctgggtctgtaccacctgaagcaaattaacagcccaatgatgaccgtgagcgcatataacaactttctcaattacgtaagttccctccctagtacaaaggcaggccccaagattgtgtctcatctgctacacctggtcgacaacaaagagagcctagaaaatatatccgaaaacgacgattacctgaaacatcagcctgaaattagcctgcagatgcagttgttaaggggcctgtggcaaatctgtcctcaggcgtacttcagtatggttagcgagcaccttttggtcctcgccttgaagaccgcttaccagtctaatactgttgcggcttgcagcccattcgttctccagttcctccaggggcgaacattaactctgggcgccttaaatctccagtacttctttgatcacccagagtccctgtcgctgctcagatccattcacttccctatcagaggtaataagaccagcccgcgcgcccacttttcagtgctggaaacctgcttcgacaagtcacaggtcccaactatcgaccaggactacgcgtcagcgtttgaaccaatgaatgaatgggagcgcaatcttgccgaaaaggaagacaacgtgaaaagctatatggacatgcagcggcgcgcatctcccgacctcagcacaggatattggaagctgtcacccaagcaatacaagattccctgtttggaagtcgatgtcaatgacatcgacgtggttggtcaggacatgttagaaatactcatgacagtcttctctgcaagccagcgcatcgagttacatttgaatcactccagggggttcattgaaagcattcgccccgcactggagttatccaaggcatctgtgaccaagtgttcaatctccaaacttgaattatctgccgccgaacaagagctgctccttaccctgccttccctcgaatctctggaggtatctggaaccatccagtcccaagaccagatcttccctaatctcgataagttcctgtgcctgaaggagctgtccgtggatcttgagggcaacattaacgtatttagcgtcattccagaggagttcccgaactttcaccacatggagaagttactgatccaaatcagcgccgagtacgacccctcgaagctggtaaagttaatccaaaattcacctaacctgcacgtgttccatctcaagtgtaatttcttttcagattttggcagtctgatgaccatgctagtgtcttgcaagaaactgactgagattaagttcagcgactcctttttccaggcagtcccttttgtggcctcgctgccaaacttcataagcttaaagatactaaatctcgaggggcagcagttccctgacgaggagacttcagaaaagttcgcatatattttgggctctctgtcaaatttagaagaactgatactgccaacaggagatgggatttatcgggtggcaaaactgatcattcagcagtgccaacagctgcattgtcttagagtactttccttcttcaagactctgaatgacgattcagttgttgagattgcaaaggtggcgatttcaggaggtttccagaaacttgagaacctgaaattgtcgattaatcacaaaatcaccgaggaaggttatcggaatttctttcaggccctcgacaacatgccaaatttacaggagctggacataagtagacacttcacagaatgcataaaggctcaggctaccactgtgaagtccctctcccagtgcgtgcttagactgcctcgcctgatccggttgaacatgctttcctggctccttgacgccgacgacatcgcgttgctgaacgttatgaaggagcgccaccctcagtcaaagtacctgactatcttacaaaagtggatactgcccttcagccccattattcagaagtag

SEQ ID NO: 16345 - DNA, 4212 bp, synthetic construct
  misc_feature 1..4212: note = Description of Artificial Sequence: Synthetic coding sequence
  source 1..4212: mol_type = other DNA
atggccactcaacaaaaggcgtccgatgagcgcattagtcaatttgatcacaacctactgcctgagctgagcgccctgctcgggctagacgctgtccagttggccaaagaactggaagaggaggaacaaaaagagagagctaagatgcagaaggggtacaactcccagatgaggtccgaggccaaaagactcaaaacctttgtcacgtatgaaccctatagcagctggatcccccaggaaatggctgcggcaggattctacttcaccggggtcaagtctggcatccagtgcttttgttgcagcctgatcctattcggagcaggactcacaagactaccgatcgaagatcacaaaagatttcatcccgactgtgggttcctgctgaacaaggatgtcgggaatatcgccaaatacgacattcgcgtgaaaaatctgaaatcaagactgcggggaggaaaaatgcgttaccaagaggaggaagctcgtttagcgtctttcaggaactggccgttttacgtccaggggattagcccatgcgtactttctgaggccggctttgtgtttaccggaaaacaggatacagttcagtgtttcagctgcggcggctgtctcgggaactgggaggaaggggatgatccttggaaagagcacgccaagtggttccctaaatgtgagtttctccgatctaagaaatcaagtgaagaaattacccagtatattcagtcctataaaggcttcgtggacataactggcgagcattttgtcaattcatgggtccagagagagttacctatggcgagcgcgtattgtaatgacagtattttcgcctatgaggagctacgtctagacagttttaaggattggccacgcgagtctgcggtaggagtagccgccctggctaaagcaggcctgttctacaccgggattaaggatattgtgcaatgtttttcttgcggtggctgcctggagaagtggcaggaaggggacgaccctctggatgaccatacccggtgtttcccaaattgcccttttctgcagaacatgaaatcatccgcagaagttacccccgacttgcagagtcgcggagagctgtgtgagttgcttgaaacaacctcagaatccaaccttgaagacagcattgccgtcggtcctattgtccctgagatggctcaaggagaggcccagtggttccaggaggcgaagaatcttaatgagcagctgagagctgcatataccagtgccagcttccgtcacatgtccctgctcgacatctctagcgacttagccacagatcacttactgggttgcgacctttcaattgcatccaagcatatcagtaaaccagtacaggagccccttgtcttgccagaggtattcggcaacctcaactcagtgatgtgtgtggaaggcgaggcaggctcgggtaagactgtcttgttgaagaaaatcgcttttttatgggcctccgggtgttgtcccctgctgaatcgcttccagttagtgttctacctttccctgtcttctaccagacccgatgagggcttagcctctatcatttgcgatcagctcctggagaaagaaggaagtgtgactgaaatgtgtgtgagaaacataattcagcagctgaagaaccaggtgctgttcctactggatgactacaaggagatctgctccattccccaggtcattgggaaactgatccaaaaaaaccacctttcacgcacctgcctcctgatcgcagtgcgaacaaaccgcgctagggacattaggaggtatctcgaaacaattctggagattaaggcgttccccttctacaacacagtgtgtatcttgcgcaaattgttttcgcataatatgacccgtctgcgcaaattcatggtgtacttcggtaagaaccaaagcctgcagaaaatccagaagacacccttgtttgttgcggcaatatgcgcacactggttccagtaccctttcgatccttcgtttgacgatgtggccgtcttcaagagctacatggagcgccttagccttcgcaataaggcgaccgctgaaatactcaaagccaccgtctcttcatgcggcgagctggcgctaaagggcttcttttcttgttgcttcgagttcaatgacgacgatctggccgaggcaggggtggatgaggacgaggacctcaccatgtgccttatgagcaaattcactgcccaaagactgagacctttttaccgcttcttgtctcccgccttccaggagtttctggctggaatgcgactgatcgaactattagatagcgataggcaggaacaccaggatttggggctgtatcacctaaaacagattaattccccaatgatgacagtttccgcatacaataactttctaaactatgtatcaagcctaccttccacaaaggccggcccgaagattgtatcccatttgctccatctcgtggataataaggagtccttggaaaacatcagtgagaacgatgactatttgaaacatcagccagaaatctctctccagatgcagctgctcaggggtctgtggcagatatgtcctcaggcttacttttccatggtctctgagcatctgctggtgctggccttaaagaccgcttatcaaagtaacaccgtggcggcttgttcacccttcgtgctgcagttcttgcagggccgcacgcttactctcggcgcccttaatctccaatacttctttgaccacccagaaagcttgagcctgctccgaagtatccacttccccatccgcggcaacaaaactagtccaagagcacatttctcggtcttagagacatgctttgacaagtcacaggtccccaccatcgaccaggactatgcctctgcctttgagcctatgaacgaatgggaaagaaacctggccgagaaagaggacaacgttaagtcttacatggacatgcagcgaagagctagccctgacctctctacgggctactggaaactgtccccgaaacaatacaagattccgtgcctggaagttgatgttaatgacattgacgtggtagggcaagacatgttggagatccttatgacagtgttcagtgcctctcagaggattgagctgcacctaaaccacagtagaggtttcatcgaatccattcggcccgccctggaactcagcaaagcctcagtgaccaaatgttctatttcaaagctggaactatccgccgcagaacaggaattgttactcaccttgccttctctcgagtcactcgaggtatccggaacaatacagagtcaggatcaaatttttcccaacttggataagttcttgtgcttaaaagaattgtcggtggatttagagggaaacatcaatgtcttctccgtaattcctgaagagttccccaattttcatcacatggagaaactgttgatccagatatctgcagaatatgacccctcaaagctggtcaagctgatccagaatagtcccaacctccacgtctttcacctgaagtgcaattttttcagcgatttcggttcacttatgacgatgctggtgtcttgcaaaaaacttaccgagatcaagttctcggattctttctttcaggccgtgccatttgtagcttctctgcctaactttattagtctcaaaattctcaatcttgagggccagcagtttccggatgaggaaacatcagagaagttcgcatacatcctgggcagcttgtctaacctcgaggagctgatactgcctacaggggatggcatctacagggtagccaagctgatcatccagcagtgtcagcaactgcattgccttcgtgtactgtcattcttcaagacactgaatgatgattctgtcgtagagatcgcaaaagtcgccattagtggcggattccagaaactggagaatctcaaactgagtataaatcataagataaccgaagaaggataccggaatttcttccaggctcttgacaacatgcccaatctccaggaacttgacatttctcgccacttcactgagtgcatcaaggcacaggccacaactgtcaaaagcctgtctcaatgcgtgttacgcctgccacgtctgattcgcctcaacatgttgagctggttgcttgatgccgacgacatcgctctgttgaatgtgatgaaagaacggcacccccaaagcaaatacttgacaattttgcaaaaatggatactcccctttagtcccattatccagaagtag

SEQ ID NO: 16346 - DNA, 3726 bp, synthetic construct
  misc_feature 1..3726: note = Description of Artificial Sequence: Synthetic coding sequence
  source 1..3726: mol_type = other DNA
atgcctcttcacatcggagacttcgtctgggactctaaggttcactcactacagtcctcgctcaatatcttcagcctgttgcccactaagggtaggacagagcacttgttcttcagccatattctgtccttccattggcctgctttctcaagtatccgcctggagctatggattaacctgcgttgtgaatttctccgttccaagaagagctccgaagagatcacccagtacatccagtcttataagggattcgtggacataactggggagcacttcgtgaactcttgggtgcagagggaattgcctatggcttctgcttactgcaacgactctatcttcgcttatgaggagttaagactggacagttttaaagactggccccgggaatccgccgtgggtgtcgccgccctggctaaggctgggctgttctacacggggattaaggacatcgtccaatgttttagctgtggagggtgccttgagaagtggcaagaaggcgacgaccccttggatgatcacactaggtgctttcctaattgtccatttctgcagaatatgaaatcatccgcagaagtcacaccagacttgcagagccgcggagaactatgtgagctcctcgagactacttccgaatctaacctagaggactcaatcgccgtgggtcccatcgtgccagaaatggctcagggcgaagcacaatggttccaagaagccaaaaatctcaacgagcaattaagagctgcttacaccagcgctagcttccggcatatgagccttttggatatatcaagcgatctggcaacagatcatctacttggctgtgatctttcgatagcgtcgaagcacatcagtaagcctgttcaagaacctcttgtcctccccgaagtgtttggaaacctgaattcagtgatgtgcgttgagggcgaagccgggagcggcaagacagttctgcttaagaagatagccttcctgtgggctagcggatgctgtccgctgcttaataggttccaactcgtgttttatctgtccttatctagcaccaggcccgacgagggactggccagcattatctgcgaccagttgctggaaaaggagggctccgtgacggaaatgtgtgtgcgtaatataattcagcaactaaaaaatcaggtactcttcctattggatgattataaagaaatttgcagcattccccaggtcatcggaaagcttatccagaagaaccatcttagtcgcacttgcctgttaattgccgtacggacaaacagagcccgagacatccggcgatatctcgagactatactggagattaaggcctttcctttttataacacggtgtgcatccttcgtaaactattcagccataacatgacgaggctacggaagttcatggtctattttgggaaaaatcaatcccttcaaaaaatccagaagactcctctgtttgttgccgctatctgcgcacactggttccagtatccctttgacccgtcattcgacgacgtggctgttttcaaaagttacatggaaagactctctttgcggaacaaagctaccgccgagattctcaaggccaccgtgtcaagctgtggcgagctggcgctaaagggattcttcagctgctgtttcgagttcaacgatgatgacctcgccgaagcaggcgtcgacgaagatgaagacctgactatgtgcttgatgagcaaattcaccgctcaacggctcagacccttctaccgatttctctctcccgctttccaggagtttttggccgggatgcgcctgatcgagctgcttgactctgaccggcaggaacatcaagatctgggtctttatcacctgaaacagattaacagccctatgatgacagtcagtgcctataataatttcctcaactatgtctcctcattgcctagcactaaggcaggcccaaaaattgttagtcatttgttgcacctggttgataataaagaaagtctcgagaacatttccgagaatgacgattatcttaagcaccagccagaaatttctcttcagatgcagctgcttcggggactttggcagatctgtccgcaggcttacttcagtatggtgtccgagcacttgctggtattagcactcaaaacagcctatcagagtaatacagttgctgcatgctccccgttcgttctgcagtttctccaggggcgtactctaacattaggggctctgaaccttcaatacttttttgatcatccggagtctctgtctctgttgcggtccattcactttcctattcgcggcaacaagacttcacctagggcacatttttccgtgcttgagacatgtttcgacaagagccaggtgcctacaatagatcaggattatgcctcggcctttgagcccatgaatgaatgggagagaaatctggccgagaaggaggacaatgttaagtcctatatggacatgcagaggcgggcaagtcccgacctgtccacaggttactggaagctgtctcctaagcagtacaagatcccatgtttggaggttgatgtcaacgacatcgatgtcgtgggacaggacatgctcgagatcctgatgacggttttctcggcatctcagagaatcgaactccatctcaatcactctcggggctttattgaatccatacgccccgccttagaactgtccaaagcctctgttacaaagtgtagcatctcaaaactggaattaagtgccgctgaacaggagctcttactcacgctgccttctctagagtcactggaggtgagcggaacaattcaaagccaagaccaaatatttcccaatcttgataaattcctctgcttgaaagaacttagcgtggacctcgaaggcaatataaatgtgttttcagttattcctgaggaatttcccaattttcatcacatggagaagttgctgatccagattagcgctgagtacgacccgtccaaactggttaagctgatacagaattccccgaatctgcacgtctttcatttaaaatgtaactttttctccgacttcggctctcttatgaccatgttggtgagctgcaaaaaactgactgaaattaaattcagtgactccttcttccaggctgtaccattcgttgcttctctgccgaacttcatttcactcaaaatactgaacctggaaggacagcagttcccagacgaggagacttccgagaagttcgcttacatcctcgggtcactgtcaaatcttgaggagttaatcctcccgacaggagatggaatttaccgggtcgccaaactgataatccagcaatgccagcaactgcattgcttgcgtgtgctcagtttctttaaaacgctgaacgacgacagtgttgtagaaattgcgaaagtcgctattagtggcggctttcagaagcttgagaaccttaagctctcgattaatcataaaataaccgaagagggttaccgcaatttcttccaggcccttgacaacatgccaaacctgcaagagcttgacatttcgaggcacttcacggaatgcatcaaggctcaggcaactaccgtcaaaagtttgagccagtgtgtcttgaggctgcccagacttatccggcttaatatgctctcttggctgctagatgctgatgatattgcactgctgaacgtgatgaaggagagacatcctcagagcaaatacctgacaatcttgcagaagtggattttgccattttcccctatcattcaaaagtag

SEQ ID NO: 16347 - DNA, 678 bp, synthetic construct
  misc_feature 1..678: note = Description of Artificial Sequence: Synthetic coding sequence
  source 1..678: mol_type = other DNA
atgttaggcctggacgcatgcgaactgggcgctcaactgcttgagttactgcggttagcgctgtgcgctcgggtgttgctcgctgacaaagagggcggccccccggccgtggatgaggtcctcgacgaggctgttcctgaatacagagcccccggcagaaagtcactcctcgagatacgacagttagacccagatgacaggtccctcgcaaaatacaaacgggtgctgctgggcccccttccgccagcagtggatcccagtctccccaacgtgcaggtcacccgtctgacactgttgtccgagcaggcccccggcccagtcgtgatggatctgacaggggacctggccgtgctgaaggaccaggtgttcgttttaaaagagggcgtggactatcgggtcaagatcagtttcaaggtgcatagagagatagtgtctgggttgaaatgtttacaccacacctaccgaagaggcctgagagtggataaaacggtgtacatggtaggtagttacggacctagcgcgcaagagtacgaattcgtgacaccggtggaagaggcaccaaggggcgccctggtcaggggaccttacctggttgtttcccttttcacagacgacgatcgcactcaccacttgtcctgggaatggggcctatgcatctgccaggactggaaagattag

SEQ ID NO: 16348 - DNA, 882 bp, synthetic construct
  misc_feature 1..882: note = Description of Artificial Sequence: Synthetic coding sequence
  source 1..882: mol_type = other DNA
atgcctgcccggagtggagctcagttttgtcgtagaatgggacagaagaaacagcgacccgcccgcgccgggcaaccccactcatcgtcagatgcagcccaggccccggcagagcaacctcactctagctccgatgctgcccaggcaccatgcccgcgagaaagatgcctcggccctcctaccactcccggcccctaccgatcaatctacttttcttctcccaaggggcacttgacccgactcggactcgaattttttgaccagcccgcggtgccactagccagagctttcctgggtcaggtcctggtccggagactgccaaatgggacagagctgaggggccgtatcgtcgagactgaggcctacttggggcctgaggatgaggctgctcactctagaggaggacgccagactcccagaaacagaggcatgttcatgaagcccggtacactctacgtgtacataatttatggcatgtatttttgtatgaacatttcaagccagggtgacggggcctgcgtgctgttgcgtgctttagagcctttggaaggacttgaaaccatgagacagcttcgctccacactgcgtaaggggaccgcctcccgggtgttgaaggacagagaactgtgctcagggcccagtaagctgtgtcaggccctcgcaatcaacaaaagtttcgaccagagagacttagctcaggatgaggctgtctggctggaacgaggacccctggagccatctgagcctgctgtcgtggcagctgccagagtgggcgtgggtcatgccggagaatgggcccgcaagccactaaggttttacgtgcgtggaagcccttgggtgtccgtagtggaccgtgtagccgaacaagacacccaggcttag

SEQ ID NO: 16349 - DNA, 846 bp, synthetic construct
  misc_feature 1..846: note = Description of Artificial Sequence: Synthetic coding sequence
  source 1..846: mol_type = other DNA
atgggacaaaagaaacagcgacctgccagggctggccagcctcactcctcttctgatgccgctcaagccccagcagaacagcctcactcttcctccgacgcagcgcaggctccttgcccccgcgagcgctgcctgggtccacctactactcccggaccctatagaagcatttactttagtagccccaagggccaccttacccggttaggcctcgaatttttcgaccagcccgctgtaccgctggctcgggccttcctgggtcaggttttggtcagacggctccccaatggcacagagttgcgtgggcgtatcgtggagacagaggcctacttaggtcccgaagacgaagcagctcactctcgcggaggaaggcagaccccccggaaccggggtatgttcatgaaaccagggaccctctatgtgtacatcatatacggaatgtacttttgtatgaacatttccagccagggagacggcgcttgtgtgctgttaagagcgctggagccccttgaaggcctcgagacaatgcgtcagttgagatcgacattacgcaagggcaccgcttctcgagtcctcaaggatcgtgaattgtgcagtggaccctctaagctgtgccaggccctggccattaacaagtcctttgatcagagagatctggcccaggacgaggcagtgtggttagagagaggtcccctcgaacccagtgaacccgctgtagtagctgcggcgagggttggagtcgggcatgcgggcgagtgggctaggaaacccctgagattctacgttcgcggttccccatgggtgtccgtcgttgatcgggtcgctgaacaagacacacaggcgtag

SEQ ID NO: 16350 - DNA, 756 bp, synthetic construct
  misc_feature 1..756: note = Description of Artificial Sequence: Synthetic coding sequence
  source 1..756: mol_type = other DNA
atgggccagaaaaaacaaagaccagcgcgggcaggacagcctcactctagtagcgatgcggcccaggctccggccgagcagccacattcatcatcagacgcagcccaggctccatgtcccagggagcggtgccttgggcctccgactacacctggtccctatagaagcatatatttttccagtcccaaggggcatctcaccagattaggactggaattttttgatcagccagccgtgccactggctagagcttttctggggcaggtcctggttaggcgattacccaatggtactgagctcagaggccggattgttgagaccgaagcttatctcgggcctgaggacgaagccgcccacagccgaggaggtcgccagactccacgtaaccgtggcatgttcatgaaacctggcactctatacgtttacatcatttatggtatgtacttttgtatgaacatctctagccaaggggatggggcctgcgttttgctcagggctctggagccactggagggtctggaaaccatgcgccagctgcggtccaccctgcgaaaaggtaccgcctctagggtactcaaagacagagagttgtgtagcgggccgagtaaactgtgccaggccttggctataaacaagagtttcgatcagcgggatctagctcaggacgaggctgtgtggttggaaagagggcctctcgaacccagcgaacctgctgtggtggcggcagccagggtcggtgtgggccacgcaggatag

SEQ ID NO: 16351 - DNA, 1044 bp, synthetic construct
  misc_feature 1..1044: note = Description of Artificial Sequence: Synthetic coding sequence
  source 1..1044: mol_type = other DNA
atgcacgcccactgtctgccctttctgctgcatgcctggtgggccctgcttcaggccggagctgccactgtggcaactgcattgctgaggactagagggcagcctagctcgcccagccctctggcttacatgctgtccctgtatcgggatccattgccacgagcagacatcattagaagcttgcaagcggaagacgttgctgtagacgggcagaattggacttttgccttcgattttagcttcctgagtcagcaggaggatttggcctgggctgagctgcgccttcagctcagctcccctgtggacctgcccacagagggtagccttgccattgaaatatttcatcaacctaagcctgacacagaacaagctagcgattcctgccttgagcgttttcaaatggatctgttcacagttacactttcacaagtcacgttctccctgggttctatggttctagaggtcacgcggccactctccaaatggttaaagcatcccggcgcgctggagaaacaaatgtcccgcgtggctggagagtgctggccccggccccccacacccccagccactaacgtcctgttgatgctgtatagcaatctatctcaggaacagcgccagctcggaggaagtacactgctgtgggaagccgaatcctcctggcgggcgcaggagggtcaactctcctgggagtggggcaagaggcatcgcagacatcacctccccgacaggtcgcagctatgcaggaaagtcaagttccaggtggacttcaacctgatcggctgggggagttggatcatctaccccaagcagtacaacgcttacaggtgcgagggagagtgccccaatcctgtgggagaggagttccaccccactaatcacgcctacattcagagtctgcttaagcgctaccagccccaccgcgtacctagcacatgctgtgctcccgtgaaaactaagcccctctccatgctttacgtcgataacgggagggtcctgctggatcaccacaaagatatgatcgttgaagagtgtggctgcctgtag

SEQ ID NO: 16352 - DNA, 879 bp, synthetic construct
  misc_feature 1..879: note = Description of Artificial Sequence: Synthetic coding sequence
  source 1..879: mol_type = other DNA
gatcagcagctgggcattcagaccaaggatgtggctgttgatggacagaattggactttcgcctttgatttttcatttctgtcccagcaagaagatttagcgtgggcggagctgcgcctgcagctctcatcaccagtcgatctgcctactgagggaagcctcgccatcgagatttttcaccaacccaaacccgacactgagcaggcatctgacagctgtcttgagcggtttcaaatggatctctttaccgttactctgtcgcaggtcaccttctctctgggctcaatggtcctggaagtcacaaggccactttccaaatggcttaagcatcctggtgctctcgaaaaacagatgagccgggtagctggggaatgttggccacggcctcccacacctccggccactaatgtgttgcttatgttgtattcaaatttgagccaagagcagcgacagctgggaggtagcacactactgtgggaagccgagagctcatggcgagcgcaggaaggccagctgagctgggaatggggaaagaggcatcggcggcaccacttgcccgaccggtcccagctttgtagaaaggtgaagtttcaggtcgacttcaatttgattggctggggctcgtggatcatctatccgaaacagtacaacgcctaccgctgcgaaggagagtgtccaaatccagtgggcgaagaatttcatccaacaaaccacgcttatattcagtctctccttaagcgataccagccgcacagggtaccctctacttgttgcgctcccgtcaaaactaagccactcagcatgttgtatgtggataatggccgcgtcctgctcgatcatcacaaggatatgatcgtggaggagtgcggctgcctgtag

SEQ ID NO: 16353 - DNA, 534 bp, synthetic construct
  misc_feature 1..534: note = Description of Artificial Sequence: Synthetic coding sequence
  source 1..534: mol_type = other DNA
atggttcttttaagtacactgggcattgtctttcagggagaggggcctcccatttcctcatgcgatactggcactatggcaaactgcgaacgtacctttatcgcgattaagccggacggcgtgcagagaggcctcgtgggggagatcatcaagcgctttgagcagaaggggtttcggctggttggtctcaaatttatgcaagcctccgaagatcttctgaaggagcactatgttgatcttaaggatcgccccttttttgcagggctggtgaaatatatgcacagcggtcccgtggtggcaatggtttgggagggattgaacgtggtgaaaaccggacgcgttatgctcggggagaccaacccagccgatagcaaacccggaacaatcagaggcgacttttgcattcaagtcgggagaaatattatccacggaagcgactctgtcgaatccgcagaaaaagagattggactatggttccacccagaagaattggttgattatactagctgtgcccagaactggatttatgagtag

SEQ ID NO: 16354 - DNA, 534 bp, synthetic construct
  misc_feature 1..534: note = Description of Artificial Sequence: Synthetic coding sequence
  source 1..534: mol_type = other DNA
atggttctcctgtccacgctcggaatagtgtttcagggagaggggccgcctatttcctcctgcgacactggaacaatggcaaactgtgagaggacatttattgctatcaagccagatggtgtacagcgcgggttggtgggagaaattatcaagcgcttcgagcagaagggatttagactcgtgggtttgaagttcatgcaagcctctgaagacctgttaaaggagcattacgtcgatctgaaagacaggcctttctttgcgggactggtgaaatacatgcattcggggcccgtggtggctatggtgtgggaggggctcaacgttgtgaaaactggtagggtgatgttaggagaaactaatcccgccgactctaagcctggcaccattagaggtgatttctgtatacaggtcgggcgaaatattatccacggaagcgacagcgtcgagtcagccgaaaaggagattggtctttggtttcacccggaagagttggtcgattatacatcatgcgcccagaactggatttacgagtag

SEQ ID NO: 16355 - DNA, 459 bp, synthetic construct
  misc_feature 1..459: note = Description of Artificial Sequence: Synthetic coding sequence
  source 1..459: mol_type = other DNA
atggccaactgcgagcgcacttttatagctatcaagcctgacggcgtgcagcggggcctggttggagagataatcaaacggtttgaacagaagggcttcagactggttggccttaagttcatgcaggcctccgaggacttactgaaagagcactacgtagacctaaaagacaggcctttcttcgcgggcctagtgaagtacatgcactcaggacccgttgttgcaatggtttgggagggtctgaatgtggtcaagaccggcagagtgatgctgggggagactaatcccgccgatagtaagccagggacaattagaggcgatttctgcattcaggtgggccgcaatattatccatggcagtgacagtgttgagtctgcagaaaaagaaattgggctctggtttcaccctgaagaattggtggattacacctcttgcgcccagaattggatttacgagtag

SEQ ID NO: 16356 - DNA, 183 bp, synthetic construct
  misc_feature 1..183: note = Description of Artificial Sequence: Synthetic coding sequence
  source 1..183: mol_type = other DNA
atggtgctgctgagcactcttggcattgtttttcagggcgagggtcccccaattagttcctgcgatacagggacgatggcaaattgtgagagaacattcatagctatcaaacctgatggagtccagagagggctcgttggggagattatcaaaaggtttgaacaaaagggattccgcctatag

SEQ ID NO: 16357 - DNA, 1443 bp, synthetic construct
  misc_feature 1..1443: note = Description of Artificial Sequence: Synthetic coding sequence
  source 1..1443: mol_type = other DNA
atggccactgtcccaggcctgcaacctctccccacgttggagcaagacctggaacaggaggaaattttaatagtaaaagtggaggaggatttctgcttggaagaggaaccatctgttgagaccgaggacccctcaccggagacttttcggcagctctttcggctgttttgctatcaggaggtggctggtcctagagaagcactcagccgactgtgggagctctgttgtcgctggctccgtcctgagcttcgtaccaaggagcagatccttgaactcctggtcctggaacagtttcttacagtgttacctggagagattcaggcaagagtacgcgaacagcaacccgagagcggcgaggaggcagtcgtcctcgttgaaggcctgcagaggaaaccccggaagcaccgccaacggggcagcgaactgctcagcgatgatgaggtgccacttggcatcggaggccagtttttaaaacaccaggcagaagctcagcccgaagacttaagtctcgaagaggaggcacgcttctctagtcagcaaccccctgcccaattatctcaccgcccccagagagggcccctgctctggcctgagcgcgggcctccagcacccaggcatcaggagatggcaagcgcctccccattcttgtccgcctggtcacaagtgcccgtgaacttggaagacgtggccgtttacctgagcggagaagaacctaggtgcatggaccctgcacagagggacgccccgctggagaacgaaggccccggcattcagttggaggacggcggagatggccgcgaggacgccccactgaggatggagtggtaccgagtcctaagtgcccgatgccaggggcctggccatcccctgccgggccagagaccagcaccagtgcgcgggctggtgcgtcccgaccagccacggggcgggcctcctcctggtcggcgcgcctcacatggggccgacaaaccatacacatgccctgagtgtggaaagggtttcagcaaaaccagtcacctgaccaagcaccagcgcacacatacaggcgaaagaccatacaaatgtctggtttgcggcaagggcttcagcgatcgctctaacttcagcacccatcagcgggtgcatactggggagaaaccttatccttgtccagaatgcggaaagcgttttagtcagagcagtagcctcgtgatccatagaaggacacatagtggcgagcgaccctacgcttgcactcagtgtgggaagagatttaacaactcctcacacttctctgcccatagacgaacccacaccggagaaaagccttatacttgtcctgcctgcgggcgcggctttcgccgcgggaccgatttacacaaacatcaaagaacccacatgggagcgggctcactgcccacattacaacctgttgctcctggaggcccaggtgcgaaagcctag

SEQ ID NO: 16358 - DNA, 588 bp, synthetic construct
  misc_feature 1..588: note = Description of Artificial Sequence: Synthetic coding sequence
  source 1..588: mol_type = other DNA
atgggcggtcttttttggcgttctgctctccgaggccttagatgcggacctagagcccccggcccaagccttctagtgagacatggcagtggtctgcccccctccgccctcaaacgagggcccagttggacaagagagagaacactcgtggctgtcaagccggacggggtgcagagaaggctcgtcggggacgtgatccagcgcttcgagaggcgtggctttacactggtgggaatgaaaatgctccaggcccccgagtccgtgcttgcagagcactaccaggacttgagaaggaagcccttctaccccgctctgattagatacatgagtagcggacctgtagtcgccatggtctgggaaggctacaacgtagttagagcctcgagggctatgattgggcacaccgacagcgccgaggccgcccctggaacaatcagaggggacttcagcgttcatataagcagaaatgtgatccacgcgtccgattccgttgagggagctcagcgcgagatccaactgtggtttcagtcatctgagctggtgagctgggcagatgggggccaacattcctctatccatcctgcttag

SEQ ID NO: 16359 - DNA, 354 bp, synthetic construct
  misc_feature 1..354: note = Description of Artificial Sequence: Synthetic coding sequence
  source 1..354: mol_type = other DNA
atgaaaatgcttcaggcgccagaatctgtgctggcagagcactaccaagacctgcgtaggaagcctttctacccggcgctgatccgatacatgagctccggccccgtcgtagcgatggtttgggagggatacaacgtggtgcgggccagtcgagcaatgattggtcacacagattctgctgaagccgctcccggcacaattcgcggcgacttttcagtgcacatttccagaaatgtcatacacgcctcagattctgtggaaggggcacagagggagatccagttatggtttcagagcagcgaactggtttcttgggctgacggcggacagcattctagcatccacccagcttag

SEQ ID NO: 16360 - DNA, 510 bp, synthetic construct
  misc_feature 1..510: note = Description of Artificial Sequence: Synthetic coding sequence
  source 1..510: mol_type = other DNA
tagtggcggtctgcactgcgagggttgcggtgcggacctagggccccaggtccttctctgcttgtcaggcatggctcagggggcccttcatggacacgggagcgcaccctggtggccgtcaagccagatggagttcaaaggcgtctcgtaggcgatgtgatccagcggttcgaacgccgggggtttactctggttgggatgaagatgttgcaggcccctgagagcgtgttagcagaacattatcaggatcttcggcgaaaacccttctaccctgccctgatccgatatatgtcatccggccccgtggtggcgatggtgtgggaagggtataatgtggtcagggcaagcagggccatgatcggccacaccgattctgcggaagctgctccagggactatacggggcgatttctctgtgcacatcagttctcatagactggccccactggatcgcggtcagcgtgagcagcaaatggtgccggggattccccagggggcccacgaagcttag

SEQ ID NO: 16361 - DNA, 702 bp, synthetic construct
  misc_feature 1..702: note = Description of Artificial Sequence: Synthetic coding sequence
  source 1..702: mol_type = other DNA
atgggcggcttgttttggcgcagcgctctgcggggcctgagatgtggcccaagggcccccgggcctagtctgctcgtgaggcacgggagtggcgggcctagctggactcgtgaacgtaccctggtggccgtaaagccagacggcgtgcagagacggctggtaggagatgtaatccagcggtttgagcggcgcggcttcaccctggtgggcatgaagatgctacaggcaccagagtcagtgctggccgaacattaccaagatcttcgcagaaagccattctaccccgccttgattcgttatatgtcttccggaccagtggtggcaatggtgtgggaaggctacaatgtcgtgcgagcctccagggcgatgatagggcacaccgactccgcagaagcagcgcctggaacaatcaggggcgatttcagtgtccatatcagccggaacgttatccacgcatccgattccgtcgagggcgcgcaacgcgaaatccagctgtggttccagtcatctgagctgtcacccaccggcgccccatggcctagtagaagacctacctggcgcggcactactgtgtctccacgtaccgcgacgtccagcgccagaacctgttgcggaactaagtggccctcatctcaggaggccgcactggggctcggatccggactccttagattttcctgcggcacggccgcaattaggtag

SEQ ID NO: 16362 - DNA, 354 bp, synthetic construct
  misc_feature 1..354: note = Description of Artificial Sequence: Synthetic coding sequence
  source 1..354: mol_type = other DNA
atgaagatgctccaggccccagaatccgtgttggctgaacattatcaagacttacggaggaagccgttctatcctgccctgatcagatacatgtctagcggacccgtagtggcaatggtatgggagggttacaacgtggtgcgcgcgagtcgcgctatgattgggcacacagatagtgccgaggcagcccccgggacaattcggggagacttctcagtgcatatatcacgcaacgtcatccatgcctcagattcagtcgaaggagctcagagggagatccagctctggttccagtcttccgaactagtctcttgggccgacgggggacagcattcctcgattcatccagcttag

SEQ ID NO: 16363 - DNA, 114 bp, synthetic construct
  misc_feature 1..114: note = Description of Artificial Sequence: Synthetic coding sequence
  source 1..114: mol_type = other DNA
atgaaaatgctccaggctcctgagtctgtcctggcagagcactaccaggatctacgtcggaagccattctaccctgcgttaatcaggtacatgtcatctggcccagttgtgtag

SEQ ID NO: 16364 - DNA, 195 bp, synthetic construct
  misc_feature 1..195: note = Description of Artificial Sequence: Synthetic coding sequence
  source 1..195: mol_type = other DNA
atgttcctccagtactatctgaatgaacagggggatcgtgtttatacactgaagaagttcgaccctatgggccagcagacttgctcagcccatccagccagattctcccccgacgacaagtacagccgccaccggatcacgattaaaaaaaggttcaaagtgcttatgacccagcaacccagacctgtgttgtag

SEQ ID NO: 16365 - DNA, 7668 bp, synthetic construct
  misc_feature 1..7668: note = Description of Artificial Sequence: Synthetic coding sequence
  source 1..7668: mol_type = other DNA
atgccccctcttttggccccattgctgtgtctggcactgttaccagcactcgccgctcgtggacctcggtgttcacagcccggagagacgtgcctcaatggcgggaaatgtgaagctgccaacggcacagaagcttgcgtatgcggcggcgccttcgtcggtccacgctgccaggaccccaacccctgcctgtctacaccctgcaagaatgccggcacttgtcacgtggttgatcgacggggcgtcgccgactatgcatgttcctgcgctttgggttttagcggccctctgtgtcttacccctctggacaacgcttgtctcacaaatccttgccggaatggcggtacttgtgatttattgacactgactgaatacaagtgccggtgtcctcctggttggtctgggaagtcatgtcagcaggccgatccgtgcgcaagcaatccctgtgctaacggtggccaatgcctgccattcgaagcatcatacatatgccattgccctccctcttttcatggccccacgtgccgccaggatgtgaatgagtgtgggcagaagccagggttatgcagacatggtggtacatgccacaacgaggtcggatcataccgctgcgtctgtagggcaacccataccggccccaattgcgagcgcccatatgtcccctgcagccctagcccatgccagaacgggggcacctgcaggccgacaggagacgtcacccatgagtgtgcctgtctgccagggtttaccggccagaattgtgaggagaatatcgacgattgccccgggaacaactgcaagaacggaggagcctgtgttgatggagtgaatacttataattgccgttgcccccctgaatggacaggccaatattgtactgaggatgtggacgaatgtcagctgatgccaaacgcctgccagaacgggggcacttgccacaatacccacggaggatataactgcgtgtgcgtcaacggatggactggtgaagactgcagtgagaatattgacgattgtgcgtctgcagcttgcttccacggggctacctgtcatgatcgcgtggcctctttctactgtgaatgtcctcatggccgcaccggcctgctgtgccacctcaacgacgcgtgtatcagtaatccttgcaacgaaggatccaactgtgacactaacccagtgaatggtaaggccatttgcacgtgcccatccggctacacaggtcctgcatgcagccaagatgtcgacgaatgcagtttaggggcgaatccttgtgaacacgcgggcaaatgcatcaataccttaggtagctttgagtgccaatgtctgcagggatataccggcccgagatgtgagatcgatgtcaacgaatgcgtttccaacccctgtcaaaatgatgccacatgtcttgatcagatcggtgaattccagtgtatttgcatgcccggctatgagggcgtgcactgcgaggttaacacagatgagtgcgcaagctccccttgcctccacaacggcaggtgcttagataaaatcaatgaattccagtgcgaatgtccaacgggtttcaccggacatctgtgccagtacgacgtggacgagtgtgcctcaactccgtgcaaaaacggcgccaagtgcctggacggccctaacacttatacgtgtgtgtgcacagaaggctacacaggcacacactgtgaagttgatatcgacgaatgtgatcctgacccatgccattacggaagctgcaaagacggtgtggctacatttacttgcctgtgccgtcccggctataccggacaccactgtgaaaccaacataaacgaatgttcatcgcagccttgtaggcacgggggaacttgccaggaccgggataacgcatatctgtgtttctgtctgaagggaactacagggccaaattgcgagattaacttagatgactgcgccagctccccttgtgacagcggcacttgcctggacaagatagacggctatgagtgcgcttgtgaacccggatacacaggcagtatgtgtaatatcaacatcgacgaatgcgccgggaacccttgccacaatggtggcacttgcgaggatggaatcaatggcttcacttgccggtgccctgaaggatatcacgatcccacctgtctgagcgaggttaatgaatgcaactctaacccatgcgtacatggggcctgtagggattctctcaatggttacaagtgtgattgcgaccctggatggtccggtaccaactgtgacattaataacaacgagtgcgagtccaatccttgcgtgaatggggggacatgcaaggatatgacctccggttacgtgtgcacctgccgggaaggcttcagcggtcctaactgccaaacaaatatcaatgaatgtgcaagcaacccgtgtctgaatcaggggacttgcattgacgatgtcgcgggttacaagtgtaattgcctcctcccttacacaggagcaacctgcgaagtggtgctggcgccctgcgcgccctccccctgtaggaatggaggcgaatgcaggcagagtgaagattatgaatctttctcttgcgtgtgccctacggggtggcaagggcagacttgtgaggttgatattaacgaatgcgttctgagcccatgccgtcacggcgcatcgtgtcagaacacccatggaggctaccgatgccattgccaagctgggtacagcgggagaaactgtgaaactgacattgatgattgtcggcccaatccctgtcacaacggaggctcatgtacagatgggattaataccgccttttgcgattgccttccggggttccgcggcacattctgtgaggaggatataaatgagtgtgcctcagatccttgtcgcaatggcgccaactgcacagactgcgtagacagctacacatgcacttgcccagctggtttttccggcattcactgcgagaataatactccggactgcacagaatcatcttgctttaacggcggcacatgcgtggacggaatcaacagcttcacttgtctctgcccgccaggatttaccggttcttactgccagcacgatgtgaacgaatgcgactctcagccatgcctgcatggcggaacctgccaggacgggtgcggatcataccgatgtacctgtccgcagggatataccggtccaaactgccagaacctagtgcattggtgtgattcctcaccatgtaagaatggaggcaaatgttggcagacacatactcagtacaggtgcgagtgcccaagcggctggactggactatactgtgacgtgcctagcgtctcatgcgaagttgccgcacagcgccagggagtggacgtggcccgcctgtgccagcatggcggattgtgcgtggacgcaggaaacactcaccactgccggtgccaagccgggtacaccggctcatattgtgaagacctggtggacgagtgctcaccaagtccatgccagaatggagctacctgtacagattatctggggggctattcctgcaagtgtgtcgcagggtaccacggcgtcaattgctcagaggagatcgacgagtgcctgtcgcatccctgccagaacggcggtacctgcctggatctgcccaacacatataaatgctcttgtcctaggggcacacagggggtccattgtgagatcaatgtggacgattgcaatccccctgtcgatccggtgtcccgttcaccaaaatgtttcaacaatggtacttgcgtggaccaagttggcggttactcatgtacttgtcccccagggttcgtgggcgagaggtgcgaaggtgatgtcaacgagtgtctgtctaacccatgtgatgcgaggggcactcagaactgcgttcaacgcgtaaacgatttccactgcgagtgcagggccggtcacaccggccggaggtgcgaaagtgtaatcaacggatgcaagggtaagccgtgcaaaaacggcggcacttgcgcggttgcttcaaacaccgctcgtggcttcatttgcaaatgcccggcgggtttcgagggcgccacctgcgagaacgacgcccggacttgcggctccctccggtgcctcaatggaggcacatgtatctctggtcctaggagcccaacatgtctctgcctaggcccctttacaggacctgagtgtcagttcccagcctcgagtccttgcctggggggaaacccatgttacaatcagggaacctgcgagcctacatctgagagtcctttctatagatgcctgtgtcccgccaaattcaacggactgctgtgtcatatcctagattacagcttcggaggaggcgcagggagggacatcccaccccctttaattgaagaggcttgcgaactccctgagtgccaggaggatgcaggaaataaagtctgctcgcttcaatgcaacaaccacgcctgtgggtgggatggcggtgactgttcactgaatttcaatgacccctggaaaaactgcactcagtcccttcagtgctggaaatatttttccgacggccactgcgatagccagtgcaacagcgctggttgtctctttgatggattcgattgtcagcgggctgaaggacagtgtaatcctctgtacgaccagtactgtaaagaccacttcagcgacggccactgtgatcaaggctgcaattcagccgagtgtgagtgggatggactggattgcgcagagcatgttcctgaacgcctggcagccggtaccctcgttgtcgtcgtattgatgccccccgaacagctgcgcaacagttcttttcatttcttgagagaattgtccagggtgctccatacaaatgtagtgtttaagagggacgctcatggacaacagatgatatttccctattatgggcgcgaggaggaactgaggaagcatcctattaagcgtgctgcggagggttgggccgctcccgatgcattactaggccaagttaaggccagtcttctgccaggaggatccgaaggaggccggcgccggcgggagctggatcccatggacgtaagaggtagtatcgtctacctcgaaattgataatcgacagtgcgttcaagcttcctcacagtgctttcagagcgcaaccgatgttgcggcattcctgggcgcgctagcgtcactcgggtccctgaatatcccgtacaagatcgaggccgtgcagtcagaaacagttgaacctcctccaccggcccaacttcacttcatgtacgttgccgcagctgcttttgtgctgttattcttcgtgggctgtggggtgcttctgagtcggaaacgacggagacagcatggacagctgtggttccctgagggcttcaaggtcagcgaggcgtccaaaaagaagcgccgggaaccactcggggaggattccgtagggctgaagcccctgaagaacgcttctgacggagcactcatggatgataatcagaacgagtggggcgacgaggatctggagacaaaaaagtttcgattcgaggagcccgttgtccttcccgacctggacgatcagactgatcacaggcagtggacccagcaacatctagatgcagcagacttgagaatgtctgccatggctcccactcccccccagggcgaagttgatgctgactgcatggatgtgaacgtgcgtggtcctgacggttttactccacttatgatagcaagctgttctggcggcgggcttgagacaggaaacagtgaggaagaagaggacgctcccgccgtgatttccgactttatctaccagggtgcctccctgcataatcagaccgatcgtacaggtgaaaccgccctccacctggccgccaggtattccaggtcggatgctgccaagcgtttattagaagcctccgccgacgcaaacatccaggacaatatgggccgcacacctctgcacgcggccgtgtccgctgatgcccaaggcgtcttccagattctgatccgtaaccgcgctactgatctcgatgcacggatgcacgatgggacaactccactcattttggctgccaggctggctgtagagggcatgttggaggacctgattaatagtcacgctgacgtaaacgctgtggatgacctcggcaaatcggccctccactgggccgctgcagtaaataacgtggacgcagccgtggtccttttaaagaatggagccaataaggacatgcagaacaaccgagaggaaacacccctgttcctggctgccagagaggggtcttatgaaacagctaaggttctactagatcactttgccaatcgcgatattacggatcacatggatcggctgccgcgggacattgcacaggaacgtatgcatcacgatattgtgcgccttcttgatgaatataatctggtccggtcccctcaactccacggggctccactgggcggcacgccgaccctttccccaccactgtgctctcctaacgggtacctgggcagtctaaagcctggcgtacagggcaaaaaggtccggaagccctcctctaagggcttggcatgcggaagtaaggaagccaaggatctaaaggcccgtcggaagaagagccaggatggcaaggggtgcctgctggattcttcgggcatgcttagtccagtggactccctggagagcccccacggatatctcagcgatgtggccagccctcctttgctgcccagcccatttcagcagagtccctcagtgcccctaaaccacctcccaggtatgccggacactcacctgggcatcggacatctgaatgttgctgctaaaccagaaatggcagctctcggcggcggaggaaggctagcttttgagacaggaccgccacggctatctcatctccccgttgctagcggaacttctactgtgctcggcagtagctctgggggggcactgaattttaccgtcgggggatctacttccctgaacgggcagtgcgagtggttatcgcggctgcagtccggaatggtgcctaaccagtacaaccccctgaggggaagcgtggcacccggacccctcagcacacaggccccaagtcttcagcacgggatggtgggccccctgcacagctcactggcagcgtctgctctgagccagatgatgtcttaccagggattaccaagcactcggctggccacccagccgcatcttgtgcagacccagcaggttcaacctcagaacttgcagatgcagcagcagaacctgcaacccgctaacattcaacagcagcagagtctgcagccgcctccgcctccccctcagccacatttgggcgtgtcttccgccgcatcaggccacctgggaagatcgttcttgtcaggggagccttcgcaggctgacgtgcagccgttaggccctagtagtctggctgtccacacaatactacctcaggagtctccagctcttccgacaagcctcccgtcttccctcgtgccgcccgtgactgccgcccaattcctgactccaccaagtcagcattcttattcgagccctgtagacaacaccccttcccaccagctccaggtccccgagcacccattcctcactcccagtcctgaaagccccgaccaatggagctcctcctcaccccattcgaacgtgagcgattggagcgaaggcgtatccagtccacctacttctatgcagagtcagatcgctagaatcccagaagccttcaagtag

SEQ ID NO: 16366 - DNA, 6012 bp, synthetic construct
  misc_feature 1..6012: note = Description of Artificial Sequence: Synthetic coding sequence
  source 1..6012: mol_type = other DNA
atgcagccaccgtctctgctgttactgttactcctgttactgctactgtgtgtttcagtggtgaggccaagaggattgctgtgcggctctttcccggagccctgtgcaaacggaggtacttgtctctctttatctttgggccagggcacctgccaatgcgcccccggcttcctgggcgagacatgccaattcccggatccttgccagaatgctcagctgtgccaaaatggggggagttgtcaagcattgctgcctgctcccctcggactgccatcttctccttcacccttaaccccttcgttcctctgcacgtgtttgccaggattcacaggcgaacgctgtcaggcaaagctggaagacccctgccccccatcattttgtagcaagcggggaagatgtcatatccaggcatctggaagaccacagtgtagctgcatgccagggtggacaggtgagcaatgccagcttcgggacttctgctccgccaatccctgtgtcaatggtggtgtgtgtctggctacataccctcagattcagtgtcattgtcctcctggttttgaaggccacgcttgcgagcgggacgtgaatgaatgtttccaggaccccggcccctgtcctaaagggacgagctgccacaatacattgggctcattccagtgtctgtgcccggtaggccaggagggccctagatgtgaactcagggccggtccatgtccgcccaggggctgttccaacggcggcacttgtcagctcatgcctgaaaaggacagcacatttcacctttgcctgtgtccacctggattcatcggacccgactgtgaggtaaacccagacaactgtgtatcccatcagtgccagaatggaggcacatgtcaggatggcctggacacctacacgtgtctatgcccagagacatggaccgggtgggactgtagtgaagacgtggacgagtgcgagactcaagggccgccccactgtcgcaatggaggaacttgccagaatagcgctggctcttttcattgcgtttgcgtgtccggatggggcgggacctcatgcgaggaaaaccttgatgactgcatcgccgccacttgcgcacctggtagtacttgcatcgatagggtgggatcatttagctgtctttgccctcctggtcgcacaggcctactgtgtcatttggaggacatgtgtctttcacaaccttgccacggcgatgctcaatgtagcactaacccacttacagggtctactctgtgcttgtgtcagccaggatactcgggacccacctgccatcaggacttggacgagtgtttaatggcccagcagggaccgagtccctgtgaacatggcggaagctgtcttaacaccccaggatcgtttaactgcctgtgccctccagggtatactggctcccgttgcgaggctgatcataacgaatgtctgagccagccatgtcatcccggctctacgtgcctggacctcctagcaacatttcactgcctctgcccccccggtctagagggacaactatgtgaggtcgaaaccaatgagtgtgcgagcgctccatgcttaaatcatgctgactgccatgatctactaaatgggtttcagtgcatttgccttccgggattctctgggactagatgtgaggaagatatcgacgaatgcagatctagtccatgcgccaatgggggtcagtgccaggatcagcctggagcgtttcattgtaagtgcttgcctggattcgaaggaccaaggtgtcagaccgaggtggacgaatgtctgtccgatccctgccccgtcggtgcttcctgcctggatctccccggcgcttttttttgcctttgccctagcggatttacaggtcagctgtgcgaagtccccctttgtgcacccaacctctgccagcctaagcagatatgtaaggatcagaaggacaaggctaattgcttgtgccctgatggcagccctggatgcgccccacccgaagataactgcacctgccatcacggacactgtcagcgctctagctgtgtgtgtgatgtgggctggacaggcccagaatgcgaggctgagcttggcgggtgtattagtgccccttgtgcccatgggggtacctgctatcctcaaccaagcggttacaattgtacctgcccgactgggtataccggcccaacttgctcggaagagatgacagcttgccactctggaccttgtttgaatggaggttcttgtaatcctagccctggagggtattattgtacctgccctccatcccacactggaccccagtgtcaaacctctacagactactgtgtctccgctccctgctttaacggcggcacatgcgtgaataggcccggtacttttagttgcttatgcgctatgggctttcaggggccccgctgcgagggcaagctccgacccagctgtgcggatagcccttgtaggaatcgggccacatgtcaggactcaccccaggggcctaggtgtttgtgtcctacggtgtatacagggggaagctgtcaaactttgatggatctgtgcgcacaaaaaccctgccccagaaattcccattgcttacagaccggtccaagttttcactgtctgtgtttgcagggatggaccggccctctgtgtaatctgccactgtctagctgccagaaggccgccctgtcccaaggtatcgacgtgagttccctgtgccacaatggagggttgtgtgtcgattctggtccaagttacttctgccattgtccgcccggatttcagggctccctatgccaggaccatgtaaacccctgcgagagcagaccatgtcagaatggcgctacctgcatggcgcagccatctggttacctctgtcagtgtgctccaggatacgacggccagaattgctcgaaggaactggacgcctgccaatcacaaccttgtcacaatcatggcacatgtacccccaaacctggaggatttcattgcgcctgcccccccggattcgttggcctccgctgcgagggcgatgtcgatgaatgcctggaccagccttgtcaccccaccggaactgctgcatgccactccctggcaaacgctttttattgccagtgcttgcctggccacacggggcagtggtgcgaggtggaaattgatccttgtcatagccagccttgcttccacggcggcacctgcgaagcaacagccggatcgccactcggcttcatttgccattgcccaaaagggttcgaaggacccacttgctcacatcgagccccgagctgtggtttccaccattgccatcacggcggactgtgccttcctagtcctaaaccagggtttcccccgcgatgcgcatgtctgagcggctatgggggcccggattgcttgacacccccggccccgaaaggctgtggccctccatcaccatgcctgtacaacgggagttgtagtgagacgaccggtttagggggcccgggattccggtgctcttgtccccacagttctccgggaccaaggtgtcagaagcccggagcgaagggttgtgaggggcgttctggagatggcgcatgtgatgccggctgctccggacctggcggaaattgggacggaggcgactgctcacttggggtgcctgatccttggaaaggctgccctagccatagcaggtgctggctactgttcagagatggtcaatgtcatccccaatgcgacagcgaggagtgcttatttgatggatatgactgcgagaccccgccagcttgtactcccgcctatgaccagtactgccacgatcacttccacaatggccattgcgaaaaagggtgcaatactgctgagtgcgggtgggatggaggcgactgtcgtccggaagacggggacccagagtgggggccatctttagcactcctcgtggtgctgtcccccccagcactcgatcagcagttattcgccctcgccagagtgctgtcactcacactacgcgtcggactgtgggtcaggaaagaccgggacggaagagatatggtttacccatatcctggagcacgcgccgaagagaagctggggggtaccagagatcctacttaccaggagagggctgctcctcaaacccagcctttaggcaaagagactgacagcctgtccgccggatttgtcgtggtgatgggagttgacctgagccgatgtggtcctgaccaccccgcgtcacggtgtccatgggatcctggactactgctcagatttctcgctgcaatggcagccgtgggggcgctagaacctcttctgcccggccccctcctggctgtacatccccatgcagggacagcaccaccggccaatcagctgccttggcctgtgttgtgctctcccgtggctggcgtaatccttctggccctcggggccctcctagtgctgcaacttataagacggcggcggcgagagcacggagctctgtggctgcccccaggctttaccagaaggcctcgtactcagtcagcaccgcataggcgtcgaccgcctctaggtgaagacagcataggactaaaggcacttaagccaaaggcagaggtggatgaggacggggttgtgatgtgcagtggaccagaggagggcgaagaggtgggacaagctgaggagactggacccccctcaacatgccaattatggagcctgagcggcggatgcggtgccttaccacaggctgctatgttaactcctccacaggagtctgaaatggaggcccccgacctggacacccgcggcccggacggagttacccctttgatgtccgcagtttgttgcggggaggtgcagtcagggactttccagggcgcttggctgggatgtcccgagccatgggaacctctactcgatggaggagcctgtccgcaggcacacaccgtcggcacaggagagacacccctgcacttggccgcccgtttttcccgtccaacagctgctcggcggctgctggaagctggcgctaatcccaatcagcccgaccgggccgggagaactccactgcatgcggctgtcgcagcggacgcaagagaggtgtgccaactcctgttgaggagcagacaaacagcggtagacgccagaacagaggacggtacaacaccactgatgctagccgctagactggcagtagaagatctggttgaggagcttatcgcggctcaggcggacgtgggagctagagataagtggggtaaaacagctttgcattgggctgcggccgtcaataatgcgagggccgccaggtccctgctgcaggccggtgcggacaaagatgcccaagacaaccgggagcagaccccactgttcctcgcggcccgagagggggccgtggaggtcgcccagctgttgttaggtctgggggcagctcgtgagctacgtgatcaggccggtctcgctcctgctgacgtggcgcaccagcgcaatcactgggatttgttaaccctgctcgaaggcgccgggccccccgaagcgcgacacaaggccacccccggcagggaggcaggcccctttcctcgagctaggactgtctcagttagcgttccgccacatggaggtggcgctctgcctagatgtcggactttgtcggccggcgccggacctcgtggcggcggcgcatgtttacaggcccgcacctggtccgtggacctcgctgcacgcggtggtggagcctactcacattgtcgctcgcttagcggcgtcggtgctgggggcggacctacccctcgaggaaggaggttcagtgcaggtatgagaggtccgagacctaatcccgccatcatgaggggcagatacggcgtcgccgctggacgggggggacgggtgagtactgacgattggccttgcgattgggtcgcactgggagcttgtggcagcgcctcaaacattccgatccctcccccctgcctcaccccaagccccgagcgtgggtccccacaactggactgtggaccgcctgctctccaggagatgcccatcaaccagggaggagagggcaagaagtag

SEQ ID NO: 16367 - DNA, 561 bp, synthetic construct
  misc_feature 1..561: note = Description of Artificial Sequence: Synthetic coding sequence
  source 1..561: mol_type = other DNA
atgtccgctgtctgctgtggagaagtacagtctggaacctttcagggtgcttggttgggttgcccagagccatgggagcctttgctggatggcggggcatgtcctcaggcccacactgttggaaccggcgagacaccactacaccttgctgcacgcttttccaggcctaccgcggcccggcgcttactggaagcaggagccaatccaaaccagcctgaccgggccggcagaacccctttgcacgcagctgtggcagcagacgctagggaggtgtgtcaactgctgttaagaagcagacagaccgccgttgatgcgagaacagaggacggcacaacgccacttatgctggccgcccgtctggcagtggaagacctggtggaggagttgatcgcagcccaggcagacgttggagcccgcgacaaatggggcgccgatgctgcaataccaggtggtgctggtcgcagcggggggtcaagccccgcaacggccggcgccggcggctctccccgggctgcaggtccaggttgggcctcggcggggggtcgtagatcacccacttag

SEQ ID NO: 16368 - DNA, 1734 bp, synthetic construct
  misc_feature 1..1734: note = Description of Artificial Sequence: Synthetic coding sequence
  source 1..1734: mol_type = other DNA
atgcactggctcagaaaggtgcagggattgtgtactctgtgggggactcagatgtccagcaggacactgtacatcaactcacgccaactagtctccctccaatggggtcatcaggaggtgcccgccaagttcaatttcgctagcgatgtgctggaccactgggccgacatggaaaaggcaggtaaaaggctgccgtccccagccttgtggtgggttaacggaaagggcaaggaacttatgtggaactttagggaactctcagaaaactcgcaacaggcagctaacgtactaagcggagcatgtggcctccagaggggtgatcgcgtggctgtggtgttgccaagggtgccagagtggtggctggtcatcctcgggtgcatcagagctggcctaatcttcatgcccggaaccatacagatgaagtctaccgatattctgtacagactccagatgtccaaagcgaaagctatcgtggcaggcgacgaggtgatacaggaagtggacaccgtcgcatctgaatgcccctcccttcgtattaagctgttggtttctgagaagagctgtgatggctggctcaatttcaagaagctgctgaatgaagcctctactactcatcattgcgttgagactggatcacaagaggcatctgccatttatttcacgtccgggacaagtggattgcccaaaatggctgaacattcctactcatcactggggctgaaggccaaaatggatgcaggctggacaggcctgcaggcaagcgacatcatgtggaccatcagtgacaccggctggattttaaacattctgtgctctctgatggaaccttgggctctgggcgcttgcaccttcgtgcacctcctaccgaagtttgatccgcttgttatactgaaaacccttagctcgtacccgatcaaatccatgatgggtgctcccatagtttaccgtatgctgcttcaacaggatctcagttcctacaagttcccacacctccaaaactgtgtcaccgtcggtgaatcgctcctccccgagaccttggagaattggagggcacaaaccggcctggatatcagggagagctatggccaaacagaaaccggactgacgtgcatggtatccaaaacaatgaaaattaaaccaggctacatgggtaccgcggcttcctgttacgatgtacaaatcatagatgataagggcaatgtactgccccctggaaccgagggtgacattggtattcgggtaaagccgatcagacctatcgggatattttccggttacgttgacaaccctgacaaaacagctgctaatatccgcggggatttctggctgctgggcgaccgcggaattaaggacgaagacgggtattttcagtttatggggcgtgctaatgacatcatcaactctagcggctaccggataggcccctctgaggtggagaatgccctgatggagcaccccgccgtagtcgagaccgctgtaatctcaagccctgatccggttcgaggcgaagttgtgaaggctttcgtcgtgctcgcctcccaatttctgagtcacgatcccgaacagttgacaaaggaactgcagcagcatgtcaagagcgtgacagcaccttataaatatccacggaagatcgaatttgtgcttaatctgcctaagaccgtgaccgggaaaatccagagagctaagctccgcgataaggagtggaagatgtctggcaaggctcgagcccaatag

SEQ ID NO: 16369 - DNA, 4368 bp, synthetic construct
  misc_feature 1..4368: note = Description of Artificial Sequence: Synthetic coding sequence
  source 1..4368: mol_type = other DNA
atgggcggcgcatgcagtagctttacaacctcatcctctcccacgatttatagcacgtccgtcaccgatagtaaagccatgcaagtggaatcttgctctagcgccgtaggcgtctccaaccggggggtgagcgaaaaacagctcacatcaaacaccgtccagcaacatccgtccactccgaagcgccacacagtcttgtatatcagccctcccccagaggatcttctagataatagccgtatgtcctgtcaggacgaggggtgtgggctggagtctgagcagtcttgttccatgtggatggaagattcacccagtaatttctccaacatgagcacgtcatcctataacgataacacagaagtgccaagaaagtccaggaagaggaaccctaaacagagacctggagtcaagaggcgagactgtgaggagtctaacatggatattttcgatgccgatagcgccaaggctcctcattacgtcctctcacaactgactacagacaataaaggaaactcaaaagctggcaacgggacccttgagaaccagaaaggcaccggggtgaaaaagtctccaatgttgtgtggccagtatcctgttaaaagtgagggcaaggaacttaaaattgtagtgcaaccagagacacagcaccgcgcacgttatctcaccgaagggtcacgaggttcagtgaaggatcgaacacagcaggggttccctactgtaaagctggagggacataacgaacccgttgtcttacaggtctttgtgggaaacgactccgggcgggttaagcctcacggtttttatcaagcatgcagagtaaccgggaggaataccacaccatgtaaggaagtggacattgaaggaaccacagtgattgaggtggggcttgaccctagcaacaatatgacattggctgtggactgtgtcgggattttgaaactacggaacgcagatgttgaagcaagaatcgggatcgccggcagtaagaagaagagcacgagggcgagattggtgttcagagttaatatcatgcggaaagatggtagtactctgactctacagacaccctccagtcctatcctttgcacccagcctgccggtgttcccgagattcttaaaaaaagtctccattcctgctccgtcaaaggagaagaggaagtgttcctcatcggcaaaaatttcctgaaaggcaccaaggtcatctttcaagagaatgtatccgacgagaatagctggaaaagtgaggctgagatcgatatggagctgtttcatcagaaccaccttattgtaaaagttccaccgtaccacgatcaacacatcacactgcccgtttctgtgggcatttatgtagtgaccaatgctggtcgcagtcatgatgtccaaccattcacgtacacacccgaccccgctgcagcaggtgccctaaacgtaaatgtgaagaaggagatatctagtccagccaggccatgttcttttgaggaggccatgaaggctatgaagactaccggatgcaaccttgacaaggtcaacattattcctaacgccctcatgacaccgctgatcccttcctccatgatcaagtccgaggatgtaactcctatggaggtgaccgcggaaaagcgatcttctactatcttcaaaaccaccaagagtgtcggatcaacacaacagacacttgaaaatattagcaacatagctggaaacggctcattctcttccccatcttcaagtcatttgccttccgagaacgagaagcagcagcagattcaaccaaaagcctacaaccctgaaacgctgacaaccatacaaacccaagacatctcccagcctggcacctttccggcggtctcggccagtagccagctacctaattcagacgccctgctccagcaggcaacccaatttcaaaccagagagacacaatcacgggaaatcctgcagagtgatgggaccgtggtgaatctcagccaactaaccgaggcatcacaacagcagcagcagtccccattgcaagaacaagcccaaacacttcagcaacagatcagcagcaacatcttccccagtccaaacagcgtatctcagctccagaacaccatccagcagttgcaggccggatcatttactggtagtacagccagcgggtccagtggttccgtcgacttagtgcagcaggtgctcgaggctcaacagcagctgagcagcgtgttgttctctgctcccgacggcaatgagaacgtccaagagcagctatccgctgacatattccaacaggtcagtcaaatccagagtggcgtcagtcccggcatgttcagcagcaccgagcctacagtgcacacacgtcctgataatctgctgcccgggcgagccgagagcgtacacccccaaagcgagaatacattgagcaatcagcagcagcagcagcagcagcagcagcaggtgatggagtcctctgccgccatggtcatggagatgcaacagtcaatctgtcaagccgctgctcagattcagtcagaactgtttcccagtacagcctcagctaacggaaatttgcagcaaagtcctgtttaccagcaaactagccatatgatgtcggcactgagtacaaacgaggacatgcagatgcagtgtgagctattttcctctccacctgcggtctccggcaatgagactagtacgaccaccactcaacaggtcgccaccccggggacaacaatgtttcagacatcttctagcggtgatggtgaagaaactggcacccaggcaaaacagatccaaaatagtgtgttccagacaatggttcaaatgcagcattctggggacaatcagccacaagtcaacttgttctcctctaccaagtccatgatgagtgtgcagaactccggtacacagcagcaggggaacggtttgtttcagcaaggcaatgagatgatgagtctgcagtccggaaacttcctccagcagagtagccatagccaggcccagctgttccacccacagaatcctattgcagacgcgcagaatttatctcaggagacacaggggtctctcttccatagtcccaaccctatagttcactctcaaacctctacaacttctagtgaacagatgcaaccccctatgttccactctcaatctacgatcgccgtactgcaaggttctagtgttcctcaggatcagcagagcactaacatcttcttgagccagtcacctatgaataacttgcaaacaaatacagtagctcaggaagcatttttcgccgcaccgaactcaatctcgccacttcaatcaactagtaacagcgagcaacaggctgctttccagcagcaggcaccaatctctcatattcagacacctatgttgtcacaagagcaagctcaaccccctcaacagggattgtttcaaccacaggtcgccctgggaagtctgccgcctaatccaatgccacaaagccagcaggggaccatgtttcagagccagcacagcattgtggcgatgcagtccaattctcccagccaggagcagcaacagcaacagcagcagcagcaacagcagcagcagcagcagcagcaatccatccttttttccaatcaaaacaccatggccactatggcttccccaaagcagcctcctcccaacatgatcttcaatcccaatcaaaatcccatggccaatcaggagcagcagaatcagtcgatatttcatcagcaaagtaacatggctccaatgaaccaggaacagcagcctatgcagtttcagtctcagagcaccgtgtcctcgctccagaacccgggcccaacacaaagcgaatcttcccaaactccactcttccacagctcgccgcagatacaactagtgcagggctctcccagctcccaggaacagcaggtaaccctttttctgagcccagccagtatgtcagccttgcagaccagtataaatcagcaggatatgcagcagagtcctttgtactcacctcagaataacatgcctggcatccaaggcgctacctccagtccccagcctcaggccacactatttcataacaccgctggaggcactatgaaccaactccagaactccccaggctcttctcaacagacgtctgggatgttccttttcggaattcagaacaattgttcccaactccttaccagcggacccgcaacactgcccgatcagttaatggcaatctcccagccgggacagccccagaatgagggccagcctcccgtcacaaccttgctcagtcagcagatgccagaaaacagccccctggcttcaagcatcaacactaatcaaaatatcgagaagattgacctcctcgtgagtctccaaaaccaggggaacaacctaacgggctccttttag

SEQ ID NO: 16370 - DNA, 4647 bp, synthetic construct
  misc_feature 1..4647: note = Description of Artificial Sequence: Synthetic coding sequence
  source 1..4647: mol_type = other DNA
atgccctcggactttatcagcctgctctcagcggacctggatctggaaagccctaagtctctttatagcagagattcactcaagttgcacccatcacaaaattttcatcgcgcagggctgctcgaggaatcagtgtatgatctgttacccaaggaattacagttacccccatctcgagagacttctgttgcatccatgagccagacgagtggaggagaagccgggtctcctccacccgctgtagtcgctgcggacgcctcttctgccccatcttccagctccatgggaggcgcctgcagcagttttacgaccagttctagtcctactatatattctacgtcagtgacggattctaaagcaatgcaggtggagtcctgcagctcggcagtgggggtcagcaatcgaggggtgtcggaaaaacagctcacctccaatacagtgcagcagcaccctagcaccccaaaacggcacacagtgctgtatatttccccccctccagaggacctgctggataattcacggatgtcgtgccaggatgagggctgtggcctcgaatctgagcagagttgtagcatgtggatggaagactctcctagtaatttcagtaacatgagcacttcctcttataacgacaacacagaggttcctcgaaagtcaaggaaaagaaatcctaaacaaagacctggcgtgaaaaggagggattgcgaggaatccaacatggatatcttcgatgcagactctgctaaggccccacactatgtcctgtctcagctgacgactgataacaagggaaattctaaagctggaaatggcacactggaaaaccagaaagggactggcgtcaagaaatccccaatgttgtgtggacagtaccccgtcaaaagcgagggcaaggaactgaaaatcgttgtgcagccagaaacgcagcaccgtgctcgatatctcactgaggggagtcggggttcggtaaaggacaggacgcagcaggggttccccaccgtgaagcttgagggccataatgaaccggtagtcctccaggtatttgtggggaacgacagcggaagagttaaaccacatggcttttaccaggcatgcagagtcacaggtcgaaatacaactccctgcaaggaggttgacatcgagggcactactgtgatcgaagtgggcctggaccctagcaataacatgactctggctgtggactgcgtcggaatccttaaactcaggaatgcggacgtcgaagctaggatcggtatagcaggctctaagaaaaaatcaactagagctcgcctggtctttcgcgtcaatattatgagaaaagatggtagcaccttgaccctgcagaccccttcatctccaattctctgtacccaacccgccggcgtcccggagattctgaaaaagtccctccactcttgttctgtgaagggtgaagaggaggtgtttctgatcggaaagaactttctgaaggggaccaaggtaatttttcaggaaaacgtgtcggatgaaaattcttggaagtctgaagccgaaattgacatggaattgtttcatcaaaatcaccttatagtcaaggtgccaccctatcatgatcagcacataaccctgccggtctcagtgggaatctacgtggtcaccaacgccgggagatcacatgatgttcagcctttcacttatacaccagaccccgctgcaggtgccttgaacgtcaacgtgaagaaagaaatttctagtccagctcgaccgtgttcctttgaggaagctatgaaagcaatgaaaaccacgggctgtaacctcgacaaggttaacatcatccccaatgctctgatgacgccactaatcccatcctctatgatcaagtctgaagacgttacccctatggaggtcaccgccgagaaaaggtcgtctacaatctttaaaactacaaagtctgtaggctctacacagcagacactggaaaacattagcaacatagccggaaacggctcattcagctcaccatcctccagccatctgccaagcgaaaatgagaagcaacagcagattcaacccaaagcctacaacccagagactctaactaccatccagacccaggacatttcacagcctggaacatttcctgctgtgagtgcctcctctcagctgcccaacagcgatgcccttctgcagcaagctacccagttccagacgcgggaaacccagtcccgggagattctccagtccgatggcactgtggtgaatttgtcacagctcactgaggcatctcagcagcagcaacagtcccccctgcaggaacaagcccagaccctccagcagcagatctcctcaaacattttcccttctcccaatagcgttagccaattgcagaacaccatccagcagctccaggcaggctctttcaccgggagcaccgcctcagggtcaagcggatccgttgatctggtgcagcaggtgctggaggcccaacagcagctgagttctgtgctattcagtgcccctgacggaaacgaaaatgtgcaggagcaactcagtgcagatatcttccaacaggtttcgcaaatccaatccggagtgtcgcctggcatgttttcttcaaccgaacctactgtccatacacgtccagataacctcctcccaggtagagccgaatcagtgcatcctcagtctgagaataccctaagtaaccagcagcaacagcaacaacagcagcaacaggtgatggagagcagcgctgccatggtgatggagatgcagcagtccatctgccaggccgcagcccagattcagagcgaactttttcctagcactgcctcggccaacggaaatctgcaacaatctcctgtctatcaacaaacgtctcacatgatgtctgccctcagtaccaatgaggatatgcaaatgcagtgtgaattatttagcagccccccagctgtcagtggcaacgagaccagcactaccaccacccagcaggtggcgacaccgggaacaacgatgtttcagaccagttctagcggcgatggtgaggaaactgggacacaggcaaagcagattcagaacagcgtgttccaaaccatggtgcagatgcagcatagtggggataaccagcctcaggtgaatcttttctcttccacaaagtctatgatgtctgttcaaaactcaggcacccagcaacagggcaacgggttgttccagcagggcaacgagatgatgagcctccaaagtggcaattttctgcagcaatcatcccactcacaggcccaattgttccacccacaaaaccctatagccgacgcccaaaacctgtcccaggagacccagggcagtctatttcattcccccaatcccatagttcactcccagacgagcaccaccagctctgagcaaatgcagcctcctatgttccattcccagagcactatcgctgtcttgcaggggtcatcagtaccacaagaccagcaatcaaccaatatcttcctgagtcagagccctatgaataacctgcagacaaatactgtagcccaggaggctttttttgccgctccaaattccatttctccactgcaatccacatccaattcagagcagcaagccgctttccagcagcaagccccaatctcccacatccaaacgccaatgctttcccaggagcaggctcagccgcctcagcaggggctgttccagccacaggtagcactcggttcactcccaccaaatcctatgccacaatcacagcaaggtaccatgtttcagtctcagcactcaattgtggctatgcagagcaactcgccctcccaggagcagcaacaacagcagcaacaacagcagcaacagcagcagcaacagcaacagtcgattttgttcagtaaccagaacaccatggcaaccatggcatcccccaagcagcccccacccaatatgattttcaaccccaatcagaatccaatggccaatcaggagcagcagaaccagagcattttccaccagcagtcaaacatggctcctatgaatcaggagcagcaacctatgcagttccagtctcagagcactgtgtcctctctccagaacccaggtccaactcagagcgagtcctcacaaactccgctctttcactcatctccacagatccagctggtgcagggctcaccctcaagccaggagcaacaggtcacactgtttttatcccctgcctcaatgagtgctctccagacttcaatcaatcagcaagatatgcagcagtcgccgctatacagcccccagaataatatgcctggcatccagggcgcgaccagctccccccagccccaggccaccctgttccataataccgcgggtggtaccatgaaccaacttcagaacagtccaggctcaagtcaacagaccagtggcatgtttctgtttggaatccaaaataactgctctcaactcctgacttccgggcccgctaccctccctgaccagctcatggctatcagtcaacctggccagcctcaaaatgaaggacagcccccagtgaccactctgctgtcacagcagatgcccgaaaattccccactcgctagcagcattaatactaatcagaacatcgaaaaaattgacctgttggtgtctctccagaaccaggggaacaatttaacggggtccttttag

SEQ ID NO: 16371 - DNA, 4368 bp, synthetic construct
  misc_feature 1..4368: note = Description of Artificial Sequence: Synthetic coding sequence
  source 1..4368: mol_type = other DNA
atgggtggtgcctgctcttcttttacgacatcgagcagtcctacgatctactcaacgtccgttaccgactccaaggcaatgcaggttgagtcttgctccagtgctgtcggggtctcaaataggggtgtatctgagaagcaactcacttctaacacggtccaacaacacccgtctactcctaaaagacatacagtactgtatatctcccctccacctgaggatctcttggacaactcaagaatgagttgtcaggatgagggctgcggactggagtctgagcaaagttgctcgatgtggatggaggactccccaagcaactttagcaacatgtccacctcatcttataatgataataccgaggtgccccgcaaaagcaggaagagaaaccccaagcagaggccgggggttaagagacgagattgcgaagaaagtaacatggacatttttgacgctgattcagcaaaagcaccacactatgtgctatctcagcttaccactgataataaggggaactcaaaggccggcaatggcactctggagaatcaaaagggaacgggggtaaaaaaatcccctatgctgtgcggacagtaccctgtgaagagcgaagggaaagaactaaagatcgtcgtccagcccgagacccagcacagagcccgttatctcacagaggggtcccggggctcagtcaaagatagaacgcagcaggggtttcccacagtgaaattggaggggcacaacgagcccgttgtgctccaggtcttcgtcggaaatgactccggccgtgtcaaaccccacggcttctaccaggcctgtagagtgactggccggaataccaccccttgtaaagaggtagatatcgagggcactaccgtgatagaagtaggtcttgacccaagcaacaatatgaccctggccgtcgattgcgtaggaatcctcaaattgcgcaacgcagatgtcgaggctcggatagggattgccgggtccaagaaaaagagcacaagagcccgactagtgtttagagtgaacattatgcgcaaggacggatccacacttactcttcagaccccaagcagccccatcttatgcacgcaacccgccggggtccctgagatcctcaagaagtctctacacagctgttcagtcaagggtgaggaagaagtcttccttatcggtaagaattttttaaaaggtacgaaagtaatatttcaagagaatgtgagcgacgaaaactcctggaaatctgaggccgagattgatatggagctgttccaccaaaatcatctgatcgtgaaggttccaccctaccatgatcagcacattacgctgcctgtgtcagtgggtatttacgttgtgaccaatgccggacgcagccatgacgtccagccattcacttacacaccagaccccgcagcggccggagcccttaacgtcaatgtcaaaaaagaaattagcagccccgccaggccttgttctttcgaagaagcgatgaaggctatgaaaacaactggctgcaacctcgacaaagtgaacattatcccgaacgcgcttatgacccccttaatcccatcaagcatgattaaatctgaagacgtgacccccatggaggttaccgccgagaagcgatctagcaccatcttcaagaccaccaagtcggttggcagcacgcagcagaccctcgagaacatcagcaatatcgccggaaacgggtcttttagcagtccctcttcctctcatctgccgtccgagaacgagaagcaacagcagatacagcctaaggcctacaatcccgagaccctgacaactattcaaacccaggatataagtcaaccaggtacattcccggctgtgtcagcgagcagtcagttgccaaactccgatgccctgctgcaacaggcgacacaatttcagactcgagagactcaatccagagagattctgcagagtgacggcacagtcgtgaacctgtcccagctcacggaggctagtcagcagcaacagcagtcccccttacaagaacaggcccagacattacagcaacaaataagctcaaatatcttccctagccctaacagcgtgtctcagctgcagaacacaattcaacagctccaagcaggctccttcacaggctccactgcgtccgggagttcaggctcagtcgacttggtgcaacaggtcctcgaagcccagcagcaactctcgtcagtgcttttcagtgctcctgatggaaatgagaacgtgcaggaacagttgtccgccgacatcttccaacaggtgtctcagattcagtcaggagtcagtccaggcatgttttctagtaccgagcccaccgtacacacgcgtcctgacaacctgctgcctgggcgcgcagagagcgtgcatccccagtcggaaaataccctgagtaatcagcagcagcagcaacagcagcagcaacaagtaatggagtcatcagccgccatggttatggaaatgcaacagagcatctgtcaggccgccgcacagatccaaagcgaactttttccctcaacggccagcgctaatggaaacctgcagcagtcgccagtgtatcaacaaacatctcatatgatgagcgctctttctaccaatgaagacatgcagatgcagtgcgaattgtttagctcacctccagctgtgagcggtaacgaaactagtacgactactacacagcaagtcgccacccccggcactacaatgtttcaaacctctagttctggcgatggggaagaaactggaacccaggccaagcaaattcagaatagtgtgtttcaaaccatggttcagatgcagcacagcggcgacaaccagccccaggtcaacctgttctcaagcaccaaatccatgatgtccgttcagaactccggaacccagcaacagggaaacgggctgtttcagcaagggaatgagatgatgtcactccaatcaggcaacttcctccagcaaagtagccacagccaggcccagctgttccatccacagaacccgatcgcagacgcacagaacctttcccaggagacccagggaagcttattccactcacctaatcctatcgtgcattcacagactagtacgacttccagcgagcagatgcagccacccatgtttcatagccagagcaccatcgcggtgctgcaggggtcttccgtcccccaggatcaacaaagtacaaatatctttctgtctcagagtccaatgaacaacctacagaccaataccgttgcccaggaggcgttcttcgccgcacctaatagcatttctcccctgcaatccacatctaattcagagcaacaggccgcatttcaacagcaagcccctataagccacatacagactccaatgctgtcccaggaacaggctcagcctccccagcaaggattgttccagccacaggtggcattgggatcacttccccctaaccctatgccacagtcacagcaagggaccatgttccaatctcaacattccatcgtggcaatgcagagtaacagcccaagccaggagcaacagcagcagcagcagcagcagcagcagcagcagcagcagcagcagcaaagcattctcttcagcaaccaaaacaccatggcgactatggcatcgcctaaacaaccccccccaaacatgattttcaacccaaatcaaaacccaatggccaatcaggagcagcagaatcagagtatctttcatcagcaatcaaatatggcacccatgaatcaggagcagcaacccatgcaattccaaagtcaaagcacagtctcctccctgcagaaccccggtccaacacaatccgagagctcccaaacccctctgttccacagcagcccacagatacaactagtacaaggttctccgtccagccaggaacaacaggtaaccctgtttctctctcccgcgagtatgagtgccctgcagacatctatcaatcaacaggacatgcagcagtcccccctatacagcccccaaaacaacatgcctggaatccagggcgcaacaagctcacctcaaccgcaagcaacgctgttccacaacacagctggtggtaccatgaaccaactgcagaactctcctgggagctctcagcagacgagcggaatgtttctgttcggcatccaaaacaactgctctcaactgctaaccagcggaccagcaactcttccagaccagctgatggctatctcacagcctggccagccccaaaatgaaggccaacccccggtgactacacttctttcacagcagatgccggagaattctcctctcgcttcatcaatcaatactaaccagaacattgagaagatagacctgctggtctccctccaaaatcaaggaaacaatttgactggatccttctag

SEQ ID NO: 16372 - DNA, 4596 bp, synthetic construct
  misc_feature 1..4596: note = Description of Artificial Sequence: Synthetic coding sequence
  source 1..4596: mol_type = other DNA
atgcctagcgatttcatctccctgctgagcgccgatttagacctggaatctcccaagagtctgtactcacgggagagtgtatacgacttgttgcccaaggagctgcagttgcctccaagccgcgagacatccgtcgcatctatgagccaaactagcggcggagaagcggggtctccaccccctgcagttgtcgccgccgacgcgagtagcgccccaagctcctcctcaatgggcggggcgtgttcctcttttacaaccagcagttcccccacgatttactctacttccgtcacagacagtaaggctatgcaagtggagagctgttcctcagctgtgggcgtgagtaatcgcggtgtgagtgaaaaacagctgacatcaaacactgtgcaacagcacccctccacccctaagcgacacactgtcctatatatcagtccgcccccagaggatttactggataatagcagaatgtcttgtcaggatgaaggctgtgggctggagagtgagcagagctgcagcatgtggatggaggattctccatcaaactttagtaacatgtccacttcatcttacaacgataacaccgaagtgcctcggaagagcaggaaacggaaccccaagcaacgtccaggggtcaaaagacgggactgcgaagagtctaacatggatatatttgacgctgactcggcaaaggcaccgcactacgtactctcccaactgactacagataacaaaggcaacagtaaagccggcaatgggacacttgaaaaccagaaggggacaggtgtgaagaagtcgcccatgttgtgcggccaataccctgtgaagtccgagggaaaagagctaaaaattgtagtacagcccgagacccagcacagggcccgctacttaactgaaggtagtcggggatcagttaaggacagaacacaacaaggatttccaaccgtgaagctcgagggccataatgagcctgtggtgctgcaagtttttgtcggcaatgatagcggcagagtgaaacctcatgggttttaccaggcttgccgtgtgacagggaggaacacgacaccatgtaaagaagtggacattgagggcaccactgtcatcgaagtaggactcgacccctcgaataacatgacactggccgtggactgtgtgggaattctcaagctccgaaacgctgacgttgaagctcggatcggcatcgctgggagcaagaagaagtctactagagcaagattggtattccgcgtcaacataatgcggaaagacggaagtactctgactttgcagacaccatctagcccaatcttatgtacccagcctgctggagtgcctgagattcttaagaaatctctacatagctgctcagtcaagggggaggaagaggtcttcctaataggcaaaaacttcctgaagggaaccaaagtgattttccaggagaacgtctctgatgagaatagttggaagtctgaggccgaaatcgacatggagctgttccaccagaatcatcttattgtgaaggtgccaccatatcacgatcagcatatcaccctcccagtctcggtaggcatttatgtagtgaccaatgcagggcggtcacacgacgtccagccctttacatatacccctgatcccgctgccgccggcgctctgaatgtgaacgttaaaaaagaaattagttcccctgccagaccttgctccttcgaagaggctatgaaagccatgaaaactacagggtgcaatctcgataaggtgaatattattcctaacgcacttatgacccctctgatacctagctctatgattaaaagcgaggatgtgacccccatggaagtcacagcagaaaagagatcctccacgatattcaaaactacaaaatccgtcggttcaacccagcaaacactcgagaacattagcaatatcgctggtaatggaagcttttccagccctagttcctcgcatttgccatcagagaacgagaagcagcaacagatacagcccaaggcctataaccccgaaaccttaaccacaatacagacacaggacatctctcagcctgggacgttccctgcagttagcgcatcaagtcagcttccgaactccgacgccctcctgcagcaagcaacccagttccaaaccagagagacgcagtcacgcgaaatattacaaagtgatgggaccgtcgtgaatcttagtcagttgacagaagcatcccagcagcaacagcagtcacccctccaggagcaagctcagacactccagcaacagatttctagcaacatattcccgtccccaaatagtgtctctcaacttcagaatacaatccagcagctgcaggccgggtccttcacgggctccaccgcatctggttcttccggcagtgtggacctcgtccagcaggtgttagaagcccagcagcagctgtccagtgtgttgtttagcgccccggacgggaacgagaacgtccaggagcagctaagtgcagatatctttcagcaggtcagccaaattcaatccggtgtaagcccaggcatgttttcgtcgaccgaacctaccgtgcatacccggcctgataaccttctgccgggtagagcagagtctgtgcatcctcagagtgagaacaccctctccaaccagcagcagcagcagcagcaacagcagcaggtaatggaaagctctgcagccatggtaatggagatgcagcagtcaatctgccaggcggcggctcaaattcaaagcgagttgtttccaagcacggcttcagccaacgggaatctgcaacagtctcctgtgtaccagcaaacaagccacatgatgtctgccttatcgaccaacgaagacatgcaaatgcagtgcgagctttttagcagccctccagcagtttctggcaatgagacgagcactaccactacccagcaggtggcaacacccggaacaaccatgtttcaaaccagcagcagcggagatggcgaagaaacgggaacccaggcaaagcaaatccaaaacagcgtctttcagactatggtgcaaatgcagcactctggggacaatcagcctcaggtcaacttgttcagtagcacgaagagtatgatgagcgtacagaactcgggcactcagcagcagggaaacggactgtttcaacaaggcaacgaaatgatgagtctgcaatccggaaacttcttacagcaaagcagtcactcccaggcccaactgtttcacccgcagaatcctatcgccgatgcacagaatctgtctcaggaaacccaggggtcactgttccacagccccaaccctattgtccattcccaaacctcgaccacctcctcagaacagatgcagccaccgatgtttcactcacaatccacaatagctgtgctgcagggcagttctgtaccgcaagaccaacaatccacgaatattttccttagccagtcacctatgaataaccttcaaactaataccgtggctcaggaagctttttttgcagcccctaactcaattagtccactgcagagcacaagcaatagcgagcaacaagcagcattccagcaacaagcgccaatttcacacattcagacaccaatgctgtctcaggaacaggcccagcccccccagcagggcctttttcaaccacaggtggcccttggatcccttcccccaaatcctatgccccagtctcaacaggggactatgttccagagccaacactctatcgtggccatgcaaagcaatagccctagtcaagagcagcagcagcagcaacagcaacaacagcagcagcagcagcaacagcaacagagcattctgttctccaatcagaatactatggcaaccatggcttcaccaaaacagccgcctcctaatatgattttcaatccgaaccagaaccccatggctaaccaggaacagcaaaatcaatccattttccatcagcagtctaatatggcacccatgaaccaagaacaacagccaatgcagttccagagtcagtctacagtgagtagcctccagaatcctgggcccacccagtcagagtctagccaaaccccacttttccactcctctccacaaatccaactggtacaaggaagcccatcatcgcaagaacagcaggtcacactctttctgagcccagcgagcatgagtgcgttacagacgagcattaatcagcaagatatgcagcagtccccactgtactcaccccaaaacaatatgcctgggattcaaggcgccacctcctctccacagccccaggccacccttttccataatactgccggcggaaccatgaaccagctgcaaaacagccctggatccagccagcagacctctggaatgtttttgtttggtattcaaaataactgttctcagctccttaccagtgggcctgctactctacctgaccaactgatggcgatatcccagccaggccagccacaaaatgaggggcagccacctgttaccactttgctgagtcagcagatgcccgagaattctccccttgcttcttcgattaataccaatcaaaatatagaaaagatcgacctgttggtgtcactccagaaccagggaaataacctgacggggtcattctag

SEQ ID NO: 16373 - DNA, 4368 bp, synthetic construct
  misc_feature 1..4368: note = Description of Artificial Sequence: Synthetic coding sequence
  source 1..4368: mol_type = other DNA
atgggcggggcatgcagcagctttactacctcttcttccccgaccatatactccacctcagttacagactccaaggctatgcaggttgaatcgtgttccagtgccgtgggagtgtcaaaccgcggcgtctcagagaagcagcttacatcaaacacagttcagcagcatccgagtacacctaagagacacactgtcctgtatataagcccacccccagaggacctgctagataactcccgaatgtcttgtcaagatgaggggtgcggcttggagtcggagcagtcatgttccatgtggatggaagactcgccctccaacttcagcaacatgtctacctctagttacaacgacaatactgaggtgccacggaaatcaagaaaacgaaaccctaaacagcggccgggggtgaagcggcgggactgcgaggagtctaacatggacatcttcgacgccgatagcgccaaagccccccattatgtcttatcacagcttaccactgacaacaagggcaactcgaaggccgggaatggcacattagagaaccagaaggggaccggagtgaaaaaaagtccaatgctgtgcggtcagtacccagtgaaatcggaggggaaagagttgaaaattgtggtacagccagaaacccagcaccgagcgcggtaccttaccgagggaagccgcggaagcgtgaaagacagaactcagcaaggcttcccaactgttaagctggagggccataacgaacccgtggttttgcaagttttcgtgggaaacgactcagggagagtcaagccccacgggttctatcaggcctgcagagtcacgggccgcaacactacaccttgcaaagaggttgacatagaggggaccactgtgatagaagtgggcctggacccctctaacaatatgaccttggccgtcgactgcgtgggtattctgaagctgagaaacgccgacgtggaggcgcggattgggatcgcagggtccaagaagaagagcacacgcgcccgacttgtgtttagggtgaacatcatgcgcaaggatggatccactctgaccttacaaacaccgagctcacccattctctgtacccagcctgcaggagtccccgagattctgaagaaatccctgcactcttgcagcgtgaaaggagaggaagaagtctttctcatcggaaaaaatttcctcaagggcacgaaagtaatctttcaagagaatgtgagtgatgaaaatagttggaagagtgaggcggagatcgatatggaactttttcaccagaatcatcttatagtgaaggttcctccctaccatgaccagcacattacccttccagtgagcgtcgggatctacgtggtgaccaatgcaggccgatcccacgacgtccagccatttacctatacaccagacccagccgctgccggcgcgctgaacgttaatgtaaagaaggagattagttctcccgccagaccctgttcctttgaagaggccatgaaggccatgaaaaccaccggatgcaatttggacaaagtaaacattatcccaaatgccctgatgacccccctgatcccatccagcatgattaagtctgaagacgttactcccatggaagtgacagccgagaagcgctccagcactatatttaagacaactaagtcagtgggcagcacacaacagacactagagaatatatcaaatattgctgggaacggaagctttagtagccccagtagctcacatctgccctcagaaaacgagaagcagcaacagattcagcccaaagcctataaccccgaaaccctgaccaccattcaaacacaggacatctcacagcccggcacttttccggcggtctctgcatcatcccagcttccgaattctgatgcactcctgcagcaggctacccaattccagacccgggagacgcagtctcgagagattctgcaatccgacgggactgtcgtgaacctttctcaacttaccgaagcttctcagcagcagcaacagtctcctttgcaggaacaagcccagacgctccaacaacagattagctcaaatattttcccatcacccaacagtgttagtcagctgcaaaacaccatccaacagctgcaggccgggagtttcaccgggtctactgcatcaggtagctccggttcggtggatcttgtgcagcaggtgctggaagcacagcagcagcttagctcagtgctgtttagcgcgcccgatggtaatgagaatgtccaagaacagttgtcagctgatatctttcaacaagtctcgcaaatccagagcggggtctcacctgggatgttttctagtacagaacccacggtgcatacccggcccgacaacctattgccaggcagggccgaaagcgtgcatcctcagtccgaaaacaccttatcaaatcagcagcagcagcagcagcagcagcagcaggtcatggagtctagcgcagccatggttatggagatgcagcagtcaatttgccaagccgctgctcagattcaaagcgaactgttccctagcacagcctccgccaatggcaaccttcaacagagtccggtgtaccagcagaccagtcatatgatgtccgctttaagcaccaacgaggacatgcaaatgcagtgcgaattattttccagcccccctgccgtttctggcaacgaaacgagcaccacaaccacacagcaggtggccacgcctggcactaccatgtttcagacatcctcatccggcgacggtgaggagaccggcactcaggcaaagcagattcaaaattccgtatttcaaacaatggtccaaatgcagcattccggggataaccagccacaagtcaatcttttttcatcaaccaaaagcatgatgtccgtccaaaatagcggtacccagcaacagggaaacggcttgttccagcagggcaacgaaatgatgtccttacagtctgggaacttcctccagcaaagctcccactctcaggcccagctgttccacccccaaaacccgattgcggacgctcagaacctgtctcaggaaacccagggatcactgtttcacagccctaaccccattgtgcattctcagacgagtacaacctcaagtgagcagatgcaaccccccatgtttcacagccagtccacaatagcagtcctgcaggggtcctccgtgccccaggatcagcagtcaactaatatctttctttcccaaagcccgatgaacaatctccaaacaaacactgttgcccaggaagcattttttgctgcccccaatagcatctctccgctgcaatctacaagcaattcagaacagcaggccgcattccaacaacaagctcccatttctcacatccagacacccatgctgagccaagagcaggcccagccacctcagcaggggctgtttcagccccaggtggcgctgggttcattaccgccaaatccgatgcctcagtcccagcagggaaccatgtttcagtcacagcactctatcgttgccatgcagtccaactcaccgtcccaggagcagcagcaacagcagcagcagcagcagcagcagcagcagcagcagcagcagagtattctcttctccaatcagaacacgatggctaccatggcatcacctaagcagcctccacctaacatgatctttaatccaaatcagaatcccatggcgaatcaggagcagcagaaccagagcatttttcatcagcagagtaatatggcgcctatgaatcaggagcaacagccaatgcaattccaaagtcagtcgacagtgagttcattacagaacccaggccctacgcagtctgaaagcagtcagacccctcttttccatagcagtccccaaatacagcttgtccagggtagtcccagctctcaggagcagcaggtcacactgttcctctcccccgcatctatgagtgccctgcaaactagtatcaaccagcaggatatgcagcagtccccgttatacagtccccagaataatatgcccgggatccaaggcgcaactagttcgcctcagcctcaggccactctgttccataacaccgccggtggtactatgaatcaactgcagaactctcctggatcaagtcaacagacaagcggtatgtttctgttcggcattcagaataattgttcacagctactcacctctggaccagcaaccctgcccgatcagctcatggccatttcacagcctggtcaacctcagaatgagggccagcccccagtcacgacactcctttcccagcagatgcctgaaaacagccccctggctagctccatcaacacgaaccagaacattgaaaaaatcgatcttctcgtgtcactgcagaaccaggggaataacctgaccggcagcttttag

SEQ ID NO: 16374 - DNA, 4647 bp, synthetic construct
  misc_feature 1..4647: note = Description of Artificial Sequence: Synthetic coding sequence
  source 1..4647: mol_type = other DNA
atgccctcagatttcattagccttctgtcagccgatttggatctggaatctcccaagagcctgtatagcagagattccctcaaactgcacccctcacagaatttccaccgggccggccttttagaggagagcgtgtacgacctgttaccgaaagaattacagctaccccctagccgcgagacctcagtagcatcaatgagccaaacctccggcggtgaagcgggttcccccccacccgccgtggtagctgcggacgcgtcctcagctcccagcagctctagcatgggtggagcctgcagtagcttcactacgtcatcttcacccaccatttacagtacctccgttacagactccaaggctatgcaggtggagtcctgctccagtgcggtgggtgtgtccaacaggggcgtatcggagaaacagctgacctcaaataccgtacagcagcacccttcaacgccaaagcgtcatacagtcctgtatatttcacctcccccagaagacctgcttgataactctaggatgtcgtgccaggacgaggggtgcggcctggaaagcgagcagtcttgttccatgtggatggaggattcccctagcaacttcagcaacatgtcaactagctcctacaacgacaataccgaagtcccacgtaaaagtcgtaagcgaaacccgaagcagagacccggtgtaaagcgcagggactgcgaagaatccaatatggacatttttgacgccgattcagccaaagcaccccattatgtgctgagtcagctgacgactgataacaagggcaactcaaaggctggcaacggaacactggaaaaccagaagggcactggggtcaagaagtcaccgatgttgtgtggccagtacccagttaaaagcgagggcaaggagctgaagatcgttgtgcaacctgaaacacagcacagagccagatacctgacagagggtagtagaggcagcgtgaaagacagaacacagcaggggtttcccaccgttaagctggagggccacaacgaacccgtcgtgttacaggtgtttgtagggaacgattcaggtcgcgttaaaccacatggtttctatcaagcctgccgggtcaccggccgaaatactacgccttgtaaagaagtggatattgaagggacaactgttatcgaagttgggctggaccccagtaacaacatgactctggcagtcgattgcgttggcatcctcaagcttcggaacgccgacgtggaggcccggattgggatcgccggctcaaaaaaaaagtcaacccgcgctcgccttgtatttcgcgtgaatatcatgcgaaaggacggctcaaccctgacgctacagacaccctcaagtccgatcttgtgtacgcagccggctggagtaccagaaatcctgaaaaaaagccttcatagctgtagcgtaaagggggaagaagaggtgtttctgatcggaaagaattttctgaaaggaaccaaagtcatctttcaggagaatgtgagcgacgaaaactcatggaaatccgaggctgagatcgatatggagctgttccaccaaaatcacctcattgttaaggttcctccataccatgaccagcacataactctcccagtgagcgtaggtatttacgtcgtgactaatgctggcagaagccatgatgtgcagcccttcacctacacacccgaccctgcagctggcgcactcaatgtgaatgtgaaaaaggagatcagcagcccagcaagaccttgttcatttgaagaggcgatgaaagcaatgaaaactactgggtgcaacctggataaagtcaatattatccccaatgcgctcatgacaccactcattcctagctccatgattaagagcgaagatgtcacaccgatggaggttactgccgaaaaaaggtcatctacaatttttaagaccaccaaatctgtagggagcacgcaacagacattggagaacatcagcaatatcgcaggcaacggatccttttcttcaccctcatcttctcatctcccatccgagaatgaaaaacagcagcaaattcagccgaaagcctacaatcctgagacccttaccacaatccagacacaggacataagccagcctggcacctttcccgctgtcagtgcgtccagccagctgcccaactctgatgccctgctccagcaagcaacccaatttcagacgcgtgagactcagagccgggagattttacaaagtgacggcaccgtggtaaacctgtctcaactgacagaggcttcacagcaacagcagcagtcaccacttcaggaacaggctcagactctccaacagcaaattagctcaaatatctttcctagccccaactcagtgtcacagttgcagaacaccatacagcagctacaagctggttcttttaccggaagtacagctagtggctcatccgggtcggtcgatctggtccagcaggtcttggaggctcaacagcagttatcttctgtgctgttcagcgcacctgacgggaacgaaaatgtgcaggaacagttgagcgccgacatcttccaacaggtgtcccaaatccagagcggagtgtcaccagggatgttctccagtaccgagcccactgtgcatacaagacccgacaatttactgccaggtagagctgagtcagtgcacccacagagcgagaataccttgtccaaccagcagcaacagcaacagcagcaacagcaggtgatggaaagctccgctgcaatggttatggagatgcagcagagcatatgtcaggccgcggctcaaattcaaagcgagctgtttccaagtactgcgagtgccaatggtaacttgcaacagagcccagtataccagcagacatctcacatgatgtctgcactttccacgaatgaagacatgcagatgcagtgtgagctcttttcttcccctcctgccgtcagtggaaatgagacctctaccacgaccacacaacaagtggcaactccaggaacaaccatgttccagacgtcgagttcaggagatggggaagagaccggaactcaggcgaaacaaatccagaactccgtgttccagacgatggtccaaatgcagcactcgggcgacaatcaaccccaggtcaacttatttagctctactaagtccatgatgtctgttcaaaatagcggaacccagcagcaagggaacgggcttttccagcagggtaacgaaatgatgtcactgcaaagtggtaatttcctgcaacagtcttctcactcacaggcgcagctcttccacccccagaaccctattgccgacgcccagaatctgtcccaggagacacaggggtccctttttcactcccctaaccccattgtccactcacagacatccactacatcatctgagcagatgcagcccccaatgttccattcgcagtcgacaattgcggtgctgcaggggagctccgtgcctcaggaccagcaatcgacaaatatcttcctcagccagtctccgatgaataacttacagaccaatactgttgcacaggaggctttctttgccgccccgaatagcatttcccctttacaaagcacaagtaattcagagcagcaagcagctttccagcagcaggctcctatttcacacatccagacgcctatgcttagccaggagcaggcccaacctccacagcagggactctttcagccacaagttgccctcggcagcctcccacctaaccccatgccccaaagccaacaaggtactatgttccaatcacagcactccattgtggccatgcaaagcaattctcctagccaagaacaacagcaacagcagcaacaacaacagcagcagcagcagcaacagcagcaaagtattctgttttccaaccaaaatactatggccaccatggcgtcccccaaacaacctccaccaaacatgatcttcaaccccaatcagaaccccatggctaatcaggaacaacagaatcaaagtatctttcaccagcagtctaacatggccccaatgaatcaggagcaacagcccatgcagttccaaagccagtccacagtgagctcgttgcagaacccagggcccacacagtcagaaagctcccagacccctctctttcactcaagcccacagatacagctggtccagggatccccctcatcccaagaacagcaggtgactttattccttagccccgcgtccatgtccgccctccagacaagtattaatcagcaggacatgcagcagagcccactgtatagcccccagaacaatatgccgggaatccaaggggcaactagctctcctcagccgcaggcaacactttttcacaacaccgcagggggaaccatgaatcagttacaaaactccccagggtctagtcagcaaacgtccggaatgtttctgtttgggatccagaacaactgcagtcagctgctgacctcaggaccggccaccctgccagatcagctgatggctatttctcagcccggccagcctcagaatgagggccagcctccagtgacaacactgctgagccaacagatgcccgagaacagccccttagcctccagcataaacacgaaccagaacattgagaagatcgatctgttagtctcgctgcagaatcaggggaataatctcaccggaagtttctag

SEQ ID NO: 16375 - DNA, 4650 bp, synthetic construct
  misc_feature 1..4650: note = Description of Artificial Sequence: Synthetic coding sequence
  source 1..4650: mol_type = other DNA
atgccttcagatttcatttctctactcagcgcagacctcgatctggagagcccaaaatcactctattctagagactcattgaagcttcacccttctcagaactttcaccgcgccggccttttagaggagtcagtctacgatctgctgcccaaagagctgcagttgcccccatcaagggagacatctgtggctagcatgagccaaactagcgggggggaggccggctctcccccgcctgcagtcgttgccgccgatgcatcgtcagcgccttccagctcatccatgggcggcgcttgctcgtcatttacgacatcttctagccccacaatatattcgactagcgtcaccgactcaaaagctatgcaggtcgagagttgttcaagcgcggtgggggtgtccaatcggggtgtgtccgagaagcagctgaccagcaacaccgtccagcagcaccctagtactccgaagcggcacactgttctttacattagtcctccccctgaggatctgttggacaattcaaggatgagctgtcaggatgaaggctgcggcttggagagcgaacagtcttgcagcatgtggatggaggactcccccagtaacttttctaacatgtcaacgtctagctataatgataataccgaagtccctagaaaaagtagaaagcgcaatccgaagcagcgccccggtgtgaaaaggcgagattgtgaggagtctaacatggatatcttcgatgctgattcggcgaaagcgccccactatgtgctatcccagctgacaacagacaacaaggggaattccaaggccgggaatggcacgttggaaaaccagaaaggcacaggggtcaagaagtcaccaatgctgtgtggccagtaccccgtgaaatcagaaggaaaagaactgaaaatcgtggtgcagcccgagacacaacatagagcgcggtatctcactgaggggtcaaggggatctgtcaaggatcgtacacagcagggatttccaactgtcaagctggagggccacaacgaaccagtggtactacaagtctttgtgggaaatgacagtggccgagtaaagccccacgggttctaccaggcatgccgcgtaactggacgtaacactacaccgtgcaaagaagtggatatagagggtacaacggtcatagaagttggacttgacccttctaacaacatgacactggcagtggactgtgttggaatcctgaagttgaggaatgccgacgtggaagccaggatagggattgccggctccaagaagaagagtacaagagcgcgattggtgttccgagtgaacattatgcgcaaggacggttccacactgacgctccaaacgcccagctccccaatcctgtgcacccagcctgccggcgtgcccgagatcctgaaaaagagtcttcattcctgtagtgtgaagggtgaggaggaagtctttctaatcggtaaaaatttcctcaaaggcactaaagtcatattccaggagaatgtttctgacgagaattcatggaagtcagaggcagagatcgatatggagctgtttcatcagaatcatcttatagttaaagttcccccatatcacgaccaacatatcacccttcccgtctcagtcggcatttatgtagtgacgaacgccggacgttcccacgacgtgcaacctttcacttataccccagacccagcagccgctggagcactaaatgtcaatgtgaaaaaggagatatctagtccagccaggccctgttcctttgaagaagccatgaaggccatgaagacaaccggttgcaacctcgacaaggtgaatatcattcccaacgcactgatgacacccttgatcccttcaagcatgatcaagagcgaggatgtgacacccatggaagtcacagcagagaaacgaagcagtaccatatttaaaaccaccaaaagcgtgggctctacacagcaaacgctagagaatatttctaatatcgctggcaatggctctttttcgagcccctctagttctcatctgccgagcgaaaacgagaagcagcagcagatccagcctaaggcctataatcccgaaacgttgacaactatccagacacaggacatctctcagccggggacgtttcccgcagtgtctgcctcgtctcagctccctaacagcgacgccctcctccagcaagcgactcagttccagacgcgtgagacccagagccgtgaaatcctgcagagcgacggcaccgtcgttaacttgagccaactaaccgaggctagccagcagcagcaacagtccccattgcaggagcaggcacagacgttgcagcagcagatttcatctaacatctttccttcacccaatagtgtgtcgcagctgcagaatactattcaacagcttcaggccggctctttcacaggatccacagccagcggctctagtggaagtgtggacttagttcagcaggtgttagaggcacagcagcagctgagctctgtcctcttttcagcacctgatggcaatgagaacgtccaagaacagctgagtgcagacatcttccaacaagtgtctcaaatccaatcaggagtgtctccggggatgttctccagcaccgagccaacagtgcatacgagaccagacaacctcctgcctgggcgagccgagtctgtgcatccacaaagcgagaacacactgagcaaccaacagcagcagcaacagcagcagcagcaggtaatggagagtagcgctgcaatggtgatggaaatgcagcagagcatctgccaagcagctgcccagattcagagtgaactgtttcctagcacagcctcagccaatgggaacctgcagcagagcccagtttatcagcagacaagccacatgatgagtgccctgtctacaaacgaagacatgcaaatgcagtgtgagctgttcagttcgccacccgccgtgtccgggaacgagacttctaccacaacaactcagcaagtggccacccccggtacgacgatgttccagaccagttcctctggagatggtgaagagaccggtactcaagctaaacagattcaaaactcagtgtttcagaccatggtgcagatgcaacactcaggagataaccaaccccaggtcaaccttttctctagcacgaaatccatgatgtctgtgcagaactctggcactcagcagcagggtaatggtctgttccagcagggcaatgagatgatgtctttacagagcggaaactttctgcagcaatcgtcccactcacaggcccagcttttccaccctcagaaccccattgctgatgcccagaatctgtcacaggaaacacaggggagtctgttccacagtccaaatcccattgtccacagtcaaaccagcacaacatccagcgaacagatgcagccgccaatgttccattctcaaagtaccatagcagtgctccaggggtcaagcgtccctcaagaccaacagagcaccaatattttcctctcccagtctcctatgaataatctgcagacgaacacagtcgcccaggaagcttttttcgccgcacctaacagtatatccccgctgcagagcacctctaatagcgagcagcaggctgctttccagcagcaagcacccatcagccacatccagactcccatgctttcacaggaacaggcccagcctccgcaacagggcttgttccagcctcaggtcgccctgggcagtctcccacccaaccctatgcctcagtctcagcaggggacaatgtttcagtcccagcattccatcgtagctatgcagtctaatagcccttcgcaggagcagcagcagcaacagcagcagcaacagcagcagcagcagcagcaacagcagtcaattctgtttagcaaccagaataccatggcaactatggctagtccgaagcagccccccccaaatatgatcttcaatcctaaccaaaaccccatggctaatcaggagcagcagaaccagtcaatcttccaccaacaatctaacatggcgcctatgaatcaagagcagcagcctatgcagtttcaatcacagagtacagtgtcctccctgcagaacccagggcctactcagtctgaaagcagtcagacaccactttttcacagctctcctcagatccagctcgttcagggctcacctagctcacaggaacagcaggtgacgttattcctgagccccgcatcgatgtccgcactccagacctccattaatcaacaggatatgcaacagtctccattgtactcacctcaaaacaacatgcctggtattcagggcgccacctcttcgcctcagcctcaggcgaccctcttccacaacaccgctggtggaacaatgaaccagcttcagaattcccctggctcatctcaacagacgagcggaatgttcctctttggcatccagaacaattgttctcaactactcaccagcggccctgcaaccctgcccgaccaattgatggccatctcccagccggggcagcctcagaacgagggccagccaccggtcaccaccctcctcagccagcagatgccggagaacagtcccttggcctctagcataaataccaaccaaaatatcgagaagattgatctactggtctcactgcagaatcaaggaaataacctgacgggctcattctag

SEQ ID NO: 16376 - DNA, 2151 bp, synthetic construct
  misc_feature 1..2151: note = Description of Artificial Sequence: Synthetic coding sequence
  source 1..2151: mol_type = other DNA
atgccatctacctcctttcccgtgccatccaagttccctctcggacctgcagctgcagttttcgggaggggagagaccttgggaccagccccaagggcaggtggcaccatgaaaagtgccgaggaggagcactacgggtatgcctcctcaaatgtgtcgccggcgctgccccttcccacagcccacagcacactccccgcgccatgtcataatctgcagacttccactccaggtatcattccacccgcagatcaccccagtggttacggcgcagcactggacggaggcccagccggctattttttatcttcaggtcataccaggcctgatggcgcacccgctctagaatccccacgcattgaaattacgagctgcctgggactgtaccataacaataaccagtttttccatgacgtggaagtagaagatgtgttaccaagctctaagagatccccttccaccgctactttaagcctcccctctctggaggcataccgggatcccagttgcctttcccccgccagctccctgtcatcccgtagctgtaacagtgaggcttcatcgtatgagtccaattattcgtacccttatgctagccctcagacatccccttggcaatctccctgtgtgagcccaaaaacaactgaccctgaggagggctttccccgcggactgggagcgtgcacactcctgggttccccgagacactctcctagcacaagtcctagggcctcagtgacggaagagagctggctcggagcgcgaagcagcagaccagcatcaccctgtaacaaacggaagtactctcttaatggtagacagcccccttactccccccaccatagcccaactcccagccctcacggctcccctagagtgagcgtgacggatgattcctggcttgggaataccacccagtacacatcatcagccattgtggcagcaatcaacgccctcacaacagactcctcattggacctgggggatggcgtccctgtgaaaagtcggaagaccactctggagcagccgccatctgttgccttaaaggtggagcccgtgggtgaggacttgggctccccccccccgcccgctgatttcgctcccgaagattattcctccttccagcacatccgtaagggcggcttttgcgatcaatatctcgccgtgccacagcacccataccaatgggctaagccgaaacccctctccccaacctcctatatgagcccaaccctgcccgcactcgattggcaacttccaagccactcgggaccatacgagctgcggatcgaggtgcagcccaagagtcatcaccgggctcattacgaaaccgaggggtcccgcggagctgtgaaggcttccgcaggaggacaccccattgtccagctgcatggctatttggagaacgagcctctgatgcttcagctgttcataggcaccgccgatgataggcttctgaggccacatgccttttatcaggtgcataggattacaggcaagactgtatcgacgacttcacatgaggccatcctctctaatacaaaggtcctcgagatcccccttctgcctgaaaattctatgcgcgccgtgattgactgcgccggaatcctgaaacttagaaactccgacattgagcttagaaagggggagacagacatcgggcgtaagaacaccagagtaagactcgtcttccgcgtccacgtacctcagccttccggtaggactctttcactccaggtagcttcaaacccaatcgagtgttcgcagcggtctgcccaggagctcccactggtggaaaagcagtccactgattcctacccggtggtggggggaaagaaaatggtgctctctgggcataatttcttacaggatagcaaggtcatattcgtcgaaaaagctcctgatggacatcatgtctgggaaatggaagcaaagactgatcgggatttatgcaagcccaacagtctcgtagttgaaatccccccctttagaaaccagcgtatcacgagccctgtgcatgtgtccttctatgtctgcaacggaaagaggaaaaggtcccaatatcaacgattcacatacctgcccgcaaatggaaacgccattttcttaactgtatcccgggagcacgaacgggtagggtgctttttctag

SEQ ID NO: 16377 - DNA, 2478 bp, synthetic construct
  misc_feature 1..2478: note = Description of Artificial Sequence: Synthetic coding sequence
  source 1..2478: mol_type = other DNA
atgcctagcacctccttcccagtcccgagtaaattcccattggggcccgccgcagccgtcttcggaagaggtgagacactcggcccagcccctagggctggaggcacgatgaagtcagccgaggaggagcactacgggtacgcgtcaagtaacgtttcacctgccttgcccctcccaaccgctcactcaactctgcccgctccgtgccataacctacagactagcactcccggcattatccctcccgccgaccacccctcaggctatggagcagcactggacggaggtccggctgggtactttctctcctctggacacactaggccagacggcgctcctgccctcgagagccctcggattgagataactagctgcctaggtttatatcacaacaacaatcagttttttcatgatgtagaagtggaggatgtcctgccgtccagcaagaggtcaccttccacagctactttgtctctgccatcactggaagcctacagagacccatcttgcctttccccagccagctccttgtcctcccgtagctgcaacagcgaagcttcttcctacgagtctaattattcatacccctatgcaagtcctcagacgagcccgtggcaatccccgtgcgtcagtccaaagaccacagaccccgaagaggggttccccaggggcctgggggcctgtacattacttgggtcaccacggcattcgccctctacctctccgcgtgcctctgtgaccgaggagagttggctgggcgccagaagttctagacctgccagcccctgcaataagaggaagtactctctcaacggccggcaaccgccctactcccctcaccattctcccactccttccccccacgggagtcccagagtctctgtgacggacgatagttggctgggcaataccacccagtacacctcttccgccattgtcgctgctatcaacgccttgacaacggattcgtccctcgacttaggcgatggagttccagtgaagtccagaaaaaccacactggagcagcccccatctgttgcactaaaggtggagcctgtcggagaagatttagggtcacccccccctccggccgattttgcacctgaagattactcttctttccaacatatcagaaaaggaggcttctgcgatcagtacttggctgtaccacaacatccgtaccagtgggcgaagcccaaacccttgtctccaacatcctacatgtcaccaacacttcccgctctggactggcagcttcccagccactcaggcccctatgagttgcgaatcgaggtgcagcccaagtcccatcacagggcccactacgagactgagggatcccggggcgcagtgaaagcaagcgcaggaggtcaccctatcgttcaactgcatggctatctggagaacgaaccactaatgctgcagttgttcattggcaccgcggacgacagattgcttcgccctcacgcgttctaccaggtgcataggatcactggcaagacagtgagcactaccagccatgaggcaatcctgtccaacacaaaagttttggaaataccgttattaccggaaaactcaatgcgcgccgtgatcgactgcgcagggatcctgaaactgcgtaacagcgatatcgagttacgcaaaggcgaaacggacatcgggagaaagaatacccgcgtccgcctggtgttccgggttcatgtgccacagccctcaggacgtaccctgagtcttcaggtcgcatctaacccaattgaatgctcccagcgaagtgcacaggaattgccacttgtggagaaacagtctaccgactcctaccccgtggtaggagggaaaaagatggtgctcagcgggcacaatttcttacaggacagtaaagtgatcttcgtggaaaaggcccccgatggacatcatgtgtgggaaatggaggctaagactgatcgcgatctgtgcaagcccaacagcttagttgtggagattcccccatttcgaaatcagagaattacctctcccgtgcatgtgtccttctacgtctgtaatggaaagaggaaacggtctcaatatcagcggttcacgtaccttcctgccaacgtccccattatcaagaccgaacccaccgacgattacgagccagcccccacctgtggaccagtcagccaaggactgtccccattaccgaggccatactatagccagcagctggctatgccccccgatccaagctcatgtcttgtggccgggtttccaccatgccctcagagaagcaccctgatgccagccgcacccggcgtgtcaccaaaactccatgacctgagcccagccgcttataccaaaggagtggcctctccaggccactgtcatcttggcctcccccagccagcaggggaggcacctgccgtgcaggatgtgccccggcccgtagccacacaccccggctcaccagggcagccaccacctgccctgctacctcagcaatag

SEQ ID NO: 16378 - DNA, 2832 bp, synthetic construct
  misc_feature 1..2832: note = Description of Artificial Sequence: Synthetic coding sequence
  source 1..2832: mol_type = other DNA
atgccaagcactagttttccggttccttctaagttcccactcggtccagccgccgctgtcttcgggagaggcgagactctgggtcccgccccgcgcgccggtggaaccatgaaaagcgctgaggaggagcactatggctacgcctcttccaatgtctcacccgccctccccctccctaccgcccacagtactttgcctgcaccttgccacaaccttcaaactagcacgcctgggatcatccccccggccgaccacccaagcggctatggggctgcattggatggagggcctgccgggtacttcctaagctccggacatactcgtcccgacggcgcaccagcactggagagcccccgcattgagattacatcttgtctgggcctgtaccacaataacaaccagttttttcatgacgtggaggttgaggacgtcctcccgagcagcaagcgaagtccaagtacagcaactctcagtctgcctagcctggaggcttacagggacccatcctgcctgagcccagcttctagcctttccagtaggtcttgcaatagcgaggcatccagctacgagagcaactactcctacccgtacgcctctccccagacgagtccctggcagagcccctgcgtttcccccaagactaccgacccagaagaaggattcccccgtggtctgggcgcgtgtactctgctcggcagtccacgccactctccatccacttcccccagggcatctgttaccgaagagtcctggctcggggcgagatccagccggccagcgtccccctgtaacaagcgaaagtattccctgaacggccgacaacctccttactctccacaccatagcccaaccccctcgccacatggcagtcctcgtgtttctgtgaccgatgatagctggctaggcaacactactcaatacactagctcagccatcgtggccgccattaacgctctcaccacagatagtagtctggatttgggtgacggagtgcctgtgaagagtcgaaagaccacactagaacagcccccctcagtggcccttaaagtagagcccgtgggggaggacttagggtctcctccgcctcccgctgacttcgcacccgaagactacagctcattccagcatatccgaaaggggggtttctgtgatcagtatcttgccgtcccgcagcacccataccaatgggccaagcccaagccactttctcctactagttacatgtcccctacactacccgctctagattggcagttacccagccatagcggaccctacgaactcaggatcgaagtccagcccaagtcacatcatcgggcccactacgagaccgagggatctcgaggagcagttaaagcttcagctggtgggcacccgatcgtgcagctccacggatatttggaaaacgaacctctcatgctgcaactgtttatcggcactgcagacgacagactactgaggccacatgctttttatcaagtccacaggattacgggcaaaacggtgtccaccacaagccatgaggccattttatccaatacaaaggtcttagaaattcccctactcccagagaattctatgcgggcagtcatcgattgtgctggcatcttgaagctcagaaattctgacatcgaacttagaaaaggcgaaacggatattgggagaaaaaatacacgtgttaggctggtctttcgagtccacgtgccccagcctagcggaagaactctgtccttacaggtggcatctaaccccattgagtgttcccagcgtagtgcgcaggaactgccactcgtggagaagcaatcaacagacagttaccctgtcgtcggagggaaaaagatggtgctgtctggacataacttcctgcaagacagcaaggtaatttttgtcgagaaggctcccgacggccatcacgtctgggaaatggaggctaagacagaccgcgacctgtgcaagcccaattcactggtcgtggagataccccctttccgcaaccagcgtataacctcccctgttcatgtgtccttctacgtctgcaacggaaaacgaaaaaggagccaataccagcgttttacctatctgcccgccaatgtgccaattatcaagacagaacccacggatgattacgagcccgcgcctacgtgtggaccagttagccaaggactctcccctctgccccgtccctactactctcagcagctggccatgccccctgacccctcctcttgcctggttgctggattccctccctgcccacagaggtcaaccctcatgcctgcggcccctggcgtttcaccaaaactgcatgacctttctccggctgcgtacacgaagggcgtcgccagccccgggcactgtcatctgggcctcccacagccagcaggcgaggcccctgccgtccaagacgtccccaggcccgtggcaacccatccagggagtccgggacagccaccacctgccttgcttccccagcaggtttccgccccgccgtcaagctcttgtcccccaggtttggagcacagcctctgcccgtcttctcctagcccaccattgcctcctgccacacaggagcccacatgtctgcagccctgtagcccagcttgtccacccgccaccggccgaccacagcacctgccctcgaccgtgaggcgtgatgagtctccaacggcgggaccccggcttcttccagaagtacatgaagatgggtcccctaatttagctcccatacctgtcacagtgaaacgggaaccggaggagctggaccagctgtatttagacgatgttaatgagattattcggaacgacctgtcctcaactagtactcactcctag

SEQ ID NO: 16379 - DNA, 2793 bp, synthetic construct
  misc_feature 1..2793: note = Description of Artificial Sequence: Synthetic coding sequence
  source 1..2793: mol_type = other DNA
atgaccggactggaggaccaggaatttgacttcgagttcctcttcgagttcaaccagcgcgatgagggagccgctgccgcagctcctgaacactacggttacgcatcctccaacgtgtctccggccctcccactccccaccgctcactctaccctgcccgccccatgtcataatttacagacgagtacacccggcatcataccacccgccgaccacccaagcggctatggagccgctttggacggaggtcccgctggatactttctcagctcagggcacaccagacccgatggtgctcctgcccttgagtcaccccgtattgaaatcacaagctgcctcgggctgtaccacaacaataaccaattttttcatgacgtcgaagtcgaagacgttctacctagtagcaaacggagcccatctacagccacactttcacttccctctcttgaggcctatcgcgacccttcatgtctgagtcccgcgtcttcactttcatcccggtcttgcaactcagaggcctcaagttacgagagcaactacagctacccatacgccagccctcagacttcgccttggcaaagcccttgtgttagtcctaaaacaacagacccggaggaagggttccccaggggactgggcgcttgcacacttctgggttctcctcgccattcaccttctacatctcctagggcctccgtcaccgaggagtcctggctgggcgctagaagctcccgaccggcctctccgtgcaacaagcgtaagtattctttaaatgggaggcagccgccgtacagcccacaccattcccctaccccatctcctcacggctcccccagggttagcgtaactgatgattcatggttagggaacaccacccagtacacatcctctgctatcgtggctgctatcaatgccctgacaactgatagttcactggatctgggagacggcgtccccgtgaaaagtcgtaaaacgactctggagcaaccaccatccgtggcgctcaaagtggaaccagtgggtgaggatttaggtagtccgccaccacctgcggactttgcaccggaagactactcctcatttcagcacatccgaaagggggggttctgcgaccagtacctggccgtaccccagcatccatatcagtgggctaaacccaaacctctgagccctacatcatacatgtcccctaccctccccgctctggattggcagctacctagccatagcgggccctatgagctgagaattgaggtacagccaaaaagccaccatagagcccattacgagactgaggggtccagaggcgccgttaaagcctctgccggagggcatccgatcgtccagcttcacggctatttagagaacgagcccctcatgctacagctgttcattggaaccgctgacgatcggctgttgagaccccacgccttttatcaggttcatcgtatcaccggtaaaacagtgtctacaacctcacacgaagcaatcctctctaacaccaaagtccttgaaatccccctgctcccggaaaattccatgagggccgtcatcgactgcgccggcattcttaagctgaggaacagcgatatcgagctgaggaaaggcgagaccgacatcgggcggaagaacactcgcgttcggctggtgttccgcgttcacgtgccgcaaccatctggccgaacccttagcctgcaggtggctagtaatccgatcgagtgctcgcaacggtcagcacaggagctaccattggttgagaagcaatccacagacagctaccccgtggtcggggggaaaaagatggtgctgtccggacacaacttcctgcaggatagcaaggttatatttgtggagaaggcgcctgacggacaccatgtgtgggagatggaagccaaaacagatagagatctctgcaagcctaattccctagtggtcgagattccacctttccgtaaccagcgaataacctcacccgtgcacgtttctttttacgtctgcaatgggaagagaaagaggtctcagtaccagcggttcacttacctgcctgcgaacgtgcccatcattaagacggaacccactgacgattacgagcccgcccccacctgcggacccgttagccaaggattaagcccgctgcctagaccatactacagtcaacaactggctatgccacctgacccgtctagctgcctagtggccggctttcccccgtgcccccagaggtctaccctgatgcctgctgctcccggcgtgagccccaaactccatgatcttagtcccgcagcctacacaaagggcgtcgcatcccccggtcactgccatctgggactgccacagcctgccggggaggcccctgccgtgcaagatgtgcctagaccagtcgcaacacaccccgggagtcccggtcagcccccccccgctcttctgccgcagcaggttagtgcccccccatcctcgagttgcccacctgggctggaacacagtctttgcccttcttccccaagccctcctttgccacctgccacccaagaacccacttgtcttcagccatgttctcctgcctgtcctcctgctacgggacgacctcagcacttgccctccactgtaaggagagatgagtcacccaccgcagggcctaggctgcttcccgaggttcacgaggatggcagtcccaatctggccccaatccccgtcactgtgaagcgggaacctgaagaattggatcagctctatctcgacgatgtgaacgagattatcagaaacgatctctcctccactagtacacattcctag

SEQ ID NO: 16380 - DNA, 1062 bp, synthetic construct
  misc_feature 1..1062: note = Description of Artificial Sequence: Synthetic coding sequence
  source 1..1062: mol_type = other DNA
atgttacagctctttattgggactgcagatgatagactgctgcggccacatgccttctatcaggtgcatcggatcacggggaaaactgtgagtacaacctctcacgaggccattctgtcaaatactaaggtccttgagatccctctcctccctgaaaatagcatgagggccgttatcgactgcgcagggattcttaaattgcgcaactccgacatagagctccgcaagggcgaaaccgacataggtcggaagaacacccgtgttaggttagtttttagagtgcatgtgcctcagccaagtggtcggactctctctttgcaggtggccagcaatccgattgagtgcagccagcgaagtgcccaggagctcccgctggtagaaaaacaatccaccgactcttaccccgttgttggtggcaagaaaatggtgctgtccggccataattttctccaggactctaaggtaatatttgtggaaaaagcacccgatgggcaccacgtctgggaaatggaagcaaaaactgacagagatctctgcaagcctaactctctcgtcgtcgaaatcccacctttccggaaccagaggataacatcaccggtgcatgtcagcttttacgtgtgcaacggcaaacgaaaaaggtctcagtaccagcgtttcacctacctgcctgccaatgtgcccatcatcaagactgagccaacagacgactacgaacctgcacccacttgtgggcctgtatcccagggcctgtccccgttgcctcggccatactattcccagcaactggcgatgccacccgacccatcttcatgcctggtcgcaggatttcccccttgtcctcaaaggtctaccctgatgccggccgcccctggagttagccccaagcttcacgacctttcccctgccgcctacactaagggcgtggcaagccccgggcattgccacttgggccttccgcagccagccggcgaggcacccgcagttcaagatgtgccacgtccagtggccacacacccgggcagtcccggtcagccaccaccggcactgctcccccagcagtag

SEQ ID NO: 16381 - DNA, 2724 bp, synthetic construct
  misc_feature 1..2724: note = Description of Artificial Sequence: Synthetic coding sequence
  source 1..2724: mol_type = other DNA
atgaagtccgggactcttgaacattacgggtatgcttcatcgaacgtgagtccagcactgcctctaccaactgcccattctactcttccggccccctgtcacaatctgcagacctctactccaggtataattcctccagcagatcatccaagcggatacggggcagctttagacgggggaccagccggctattttttatcatcaggacacacacggcccgatggcgccccagctttggagtccccccgcatcgagattacctcctgcctgggcctgtatcataataacaaccagttcttccacgacgtggaggttgaggacgtgttgcccagctctaaacggtctccatctacggcaacattatccctgccctcactcgaggcataccgtgatccctcatgcctgtccccagcttcctccctgtcgtctagatcgtgcaattcagaggcgagctcgtatgaatctaattatagctatccctacgccagccctcagacatccccctggcaaagcccttgcgttagtcctaagactaccgaccctgaggagggttttccccgagggctcggagcctgcacactcttagggtcaccaagacactccccttcaacaagcccaagggccagtgtgacggaggaaagttggcttggcgcaaggagtagtcgccctgcttctccttgtaataagaggaagtatagtctgaacggccggcagcctccatactccccacatcactcaccaaccccctccccccatggctcaccccgggtatccgtgaccgacgatagctggcttggaaatactacgcagtacactagttcagcaatcgtagcagcaattaacgcccttactacagacagctccctggatttaggtgacggtgtccctgtcaagagtaggaagaccacactggaacagcctccatctgtcgcgttgaaagtggagccggtcggagaagacctggggagtcctcctcctcctgccgacttcgcacccgaggactacagttcgtttcaacatatccgaaagggtgggttctgtgatcagtatctggctgtgccccagcacccttatcagtgggcgaagcccaaaccgctgtctcccactagttatatgagccctaccctgccagctctcgattggcagctgcctagccatagcggcccctatgagttacgaatcgaggtgcaaccaaagtcacaccacagagcccattatgagaccgagggcagccgcggtgcagtgaaagcaagcgctggtggccatcccattgtgcagttgcatggctatttggagaacgaaccactcatgctgcagcttttcatcggtaccgctgacgaccgcctcttgaggccccacgctttctatcaggtgcacagaatcacagggaagacagtgtctaccacatcacatgaggcaatcctgtcaaacaccaaagttctggagatcccattactgcctgagaacagcatgagggccgtaatcgattgcgctggcatactcaaattgcgcaactccgacattgaactgaggaaaggggagacagacataggcaggaagaatactcgcgtgagactagtgtttcgtgtgcacgtgcctcaaccttctggtcggaccctctccctccaggtagcctccaacccgatcgaatgtagtcagagaagtgcccaagaactgcccctagtggaaaagcagagcacagactcctacccagtcgtaggcggaaaaaaaatggtgctctccgggcacaattttctgcaggactctaaggttatctttgtagagaaggctccagacggtcatcatgtctgggaaatggaagcaaaaaccgatagagatctatgtaagccaaactcactcgtcgtagaaattcccccttttcgtaatcaacggatcacaagcccagtgcacgtgtcgttttacgtatgtaacgggaaacgcaagaggtcccagtaccaacggtttacatatctccccgcaaacgttccgatcatcaagaccgagccaacagacgactacgaacctgctcccacgtgtggcccagtttcccagggcctctctcccctgccacggccctattatagtcaacagctggcaatgcctccagatccctcctcatgtctggtggcagggttccctccttgtcctcaaagatcaacactaatgcccgctgctcccggggtgtcccccaaattacacgacttgagccccgcggcatacacgaagggtgtggcctctcctggccactgccacctagggcttccgcagccagccggtgaggctcctgccgttcaggacgtaccgcgccctgttgcaacacaccccgggagccccggacagccccctcccgccctcttaccccagcaggtatcagcacctccttcttcctcatgcccccccggactagagcatagcttatgcccgagcagcccctccccacccttaccacctgccacccaggagcctacctgcctgcagccctgctcccccgcctgtccaccggccacaggtcggccccagcacctgccatcaactgtgcggagagacgagtctcctactgccggcccccggctgctccccgaagtgcacgaggacggaagccctaacttagcccccatcccagtgactgtgaaacgagagccagaagagctcgatcaactctatctagatgatgtgaatgagatcatacggaacgacctatcctccacgtctacccactcttag

SEQ ID NO: 16382 - DNA, 2745 bp, synthetic construct
  misc_feature 1..2745: note = Description of Artificial Sequence: Synthetic coding sequence
  source 1..2745: mol_type = other DNA
atgacagggttggaagaccaggagtttgacttcgagtttttgttcgagtttaaccaacgcgatgaaggagccgcggcagccgcccctgaacattacggatatgcaagcagcaacgttagtccagccttacctctcccaacagcccattcaactctccctgcaccttgtcataacctgcaaaccagtaccccagggatcatcccaccagccgatcacccttctggctatggcgctgccctggacgggggccccgccggatactttctgagcagcggacatacaagacctgacggtgctcccgcccttgaatcaccccgcattgaaataacatcctgtctcgggctgtatcacaacaacaatcagttcttccatgacgtggaggtggaggatgtgctacctagtagcaagaggtccccaagtaccgcaactctgagtctcccatcccttgaggcgtatcgcgatcccagttgtctctcaccagccagcagcctatccagccgctcttgcaatagcgaggctagctcttatgagtctaattatagttacccttatgccagcccacagacctctccctggcaatccccctgcgtgtcccctaaaactactgatcccgaggagggttttccccgggggttgggtgcgtgcacactactcggatcacccagacattcaccttcaacttcccccagagcctctgtgacggaggagagctggctcggggcccgtagcagcaggcccgcgtccccatgtaacaaaagaaaatactctctgaatggacgtcagccaccctacagtcctcatcatagcccaacacccagcccccatggaagccctcgcgtctcagtcactgacgacagttggctgggcaacaccacgcagtatacttcatcggccattgtggccgccattaatgctctgaccacagactccagcctcgatctgggtgatggagtgccagttaagagccgtaagacaacactcgagcagcctccctccgtggctttgaaggtggagcccgttggggaggacttgggtagtccaccacctccggcagactttgctcccgaggattactcaagcttccaacatattcgtaaaggtggcttttgtgaccagtacttggcagtgccacaacacccttaccagtgggctaaacccaagcctttatctcctacgtcttatatgtcgccgactcttcctgcactggattggcagctgcccagccacagcggtccatacgaattgcggatcgaagtgcagcccaaatctcaccaccgtgcacactatgaaacagagggcagtaggggggccgtcaaggcttccgccggcggacaccctatagttcagctgcatgggtatctagaaaatgagcctcttatgctccaactcttcatcggaaccgctgatgacaggttactgagaccacacgcattttatcaggtgcatagaatcaccggcaaaacagtgagcacaacaagtcacgaagcgatccttagcaataccaaggtgttagagataccactgttgcccgagaattcaatgcgcgcagtgattgactgtgcgggcatcctcaaactacgcaacagtgacatcgaacttaggaaaggagagacagatatcgggcggaaaaatacccgggtacggctggtcttcagggtgcatgtgccacagccttctggtcgtacactgagcctccaggtcgcttcaaacccgatcgagtgttcgcagcgctctgctcaggagctcccgctcgtcgagaagcagtccaccgattcctaccccgtggtgggggggaagaaaatggtgctgagcggacacaacttcttacaagattcaaaagtgatattcgtggagaaggctccggacgggcaccatgtttgggaaatggaagccaaaacagatcgcgacctctgtaagccgaactccctcgtggttgagataccccccttcaggaaccagagaattacatcgcccgtacatgtctccttttacgtctgcaatgggaaaaggaaacggagccagtaccagagatttacatacctgcctgcaaacgtgccaatcattaagaccgaacccactgatgattacgagcccgcaccaacgtgcggtcccgtgtctcagggactgtcccccctgcctagaccttactacagccagcagcttgccatgcccccagacccctcgtcttgtctggtggcggggttcccgccgtgcccgcaacgaagtactctcatgcctgccgcaccaggggtttccccaaagctgcacgacttgagtcccgcagcttacaccaagggggtggcatcacctggacactgtcacctggggctgccacagccggccggcgaagcaccagccgtccaggacgttccaaggccggtcgccacccatccgggtagcccaggccagccaccgccagccttgttacctcagcaggtcagcgcaccacccagctcaagctgtccacccggcttagaacattctttgtgcccttcatcccctagcccaccactgcctcctgcaacacaggaaccaacctgtctgcaaccgtgttccccagcctgcccgcctgctacaggtaggcctcagcaccttccttctacagtgagacgagacgagagccccaccgctgggccacgcttgcttccggaagtacacgaggacggctccccaaaccttgcacccatccctgtgaccgttaagcgcgagcccgaagagctcgaccaactctacctggacgattag

SEQ ID NO: 16383 - DNA, 2142 bp, synthetic construct
  misc_feature 1..2142: note = Description of Artificial Sequence: Synthetic coding sequence
  source 1..2142: mol_type = other DNA
atgccttcgactagctttcctgtgccgagcaaatttcctctgggacccgcggccgcggttttcggtagaggtgagactctgggccctgctcctcgggccggcggtactatgaagtccgcagaagaagagcactacggatacgcctcttctaatgtttccccggcgcttcctttaccaactgctcacagcaccctcccagctccctgccacaaccttcagacatctactcccggcatcatcccacccgccgatcacccttcaggatacggagctgcactggatggcggccccgcggggtacttcctgtcaagcgggcacacccgacctgacggtgctcccgcgttagagagtcctaggatcgagattacaagctgtttaggcttgtatcataacaacaaccaattctttcacgatgtcgaagtggaggatgtgcttccttcatctaaaagatcccccagcactgctacactgagccttccatcactagaagcttatagagatcctagctgtttgagccctgccagctccctatcctctaggtcatgcaatagtgaggcatcttcttatgaatccaactatagctacccatatgctagccctcagaccagtccatggcagtctccctgcgtcagcccaaagacaaccgaccctgaggagggatttccgagaggccttggtgcgtgcactctgctgggcagccctaggcatagccctagtacaagccctagagcatctgttactgaggagtcctggctgggagcccgatcctcccgacccgcctcaccatgcaataagagaaagtattctctgaatggaagacagcccccttacagccctcatcatagcccaacgccatcaccacatggaagccctcgtgtatcagtcacagatgatagctggttgggaaataccactcagtatacaagcagcgccatcgtcgcagctatcaatgctctgacaacagacagcagtctggatttgggcgatggtgtgccagtgaagtcccgcaagacaaccctggagcagccccctagtgtagctctgaaggtggagcctgtaggcgaagatctggggtccccacccccccccgccgatttcgctccagaggactacagctcattccagcatatcagaaaaggaggtttttgtgatcagtatctggccgtaccgcaacacccttaccaatgggctaagccaaagcctctcagccctaccagctatatgagccccactcttccagccttagactggcagctgccttcacatagtggtccctatgagctgagaatcgaggttcagcctaagagccaccaccgtgcccattacgagacagaaggatcgagaggtgcagtgaaggccagcgccggcggccatccaattgtgcagctccacggataccttgagaacgagcctcttatgctgcaattgttcataggtacagcggacgataggcttctgcgacctcatgccttctaccaagtccaccgtatcactggtaagactgtgagtacaaccagccacgaggcaatactgagtaatactaaagtgttagagattccactactgcccgaaaactctatgcgtgcggtcatcgattgtgcagggattttaaaactgagaaattcagacatagaactccggaagggagaaaccgacattggtcgcaaaaataccagggtgagactggtgttcagagtgcacgtaccccaaccctccggcaggacactttccctacaagtggcatccaaccccatcgagtgtagtcagcgctcggcccaggagcttcctctggttgaaaaacagtctactgatagctatccggttgtgggcggcaagaaaatggtgctctctgggcacaactttctgcaggactctaaggtgatcttcgtggagaaagcccctgacgggcaccacgtgtgggagatggaagccaagaccgatcgcgacctctgcaagcctaattccctcgtagtcgaaattccaccttttcgtaatcagcgtataacctcccccgtccatgtgtccttttacgtgtgcaatggtaagaggaaacgtagccaatatcagcgcttcacgtaccttccagctaacgtaaatgaaattattcgtaacgacctatcttctacaagcactcattcgtag

SEQ ID NO: 16384 - DNA, 1416 bp, synthetic construct
  misc_feature 1..1416: note = Description of Artificial Sequence: Synthetic coding sequence
  source 1..1416: mol_type = other DNA
atgttgcagcttttcattggcacagctgacgatcgacttcttcggccacacgcgttttaccaggtccaccggattactggaaagaccgtgagcactacctcccacgaagccattctgagcaacactaaggtcctcgagattccactgctgccagagaactcaatgcgagcagtgattgattgtgcaggaatccttaagctgaggaactctgacatcgagctccgaaaaggcgaaactgatattggcaggaagaacacccgagtgcggcttgtattccgggtgcacgtgccccagccctcgggacggactctgagcctgcaagttgcctcaaaccccatagaatgctctcagcggagtgcccaggaacttcctctggtcgagaaacaaagcacagatagttatccggtggtaggggggaagaaaatggtgctgagcggacataatttcttgcaagattccaaagtgatttttgtggagaaagcccctgatggtcaccacgtgtgggaaatggaagccaagaccgatcgcgacttgtgtaaacctaatagtctggtcgtcgagatcccccctttccgcaatcaacgcataacatcaccggtccacgtatctttttatgtatgcaacggcaagcgaaagagaagtcagtatcagaggttcacctatctcccagccaacgtccccattattaaaaccgaacccacagatgattacgaacccgcccccacctgcggccccgtttctcaaggactgtccccactgccacgtccgtactattctcagcagctcgcgatgccacctgatccgtcctcctgcctggtggccggcttccccccttgcccacagagatctaccttaatgcccgccgcacctggtgtgtcacccaaactgcacgatttatcccctgccgcctacacaaagggtgttgcgtccccaggacactgccacctgggtctgcctcagccagcaggggaagcccccgctgttcaggacgtgccacgtcctgtagcaacccaccctggaagtcctggccaaccccccccagcactattaccccagcaagtctcagccccaccatccagtagttgtcctcccggactagaacatagtctatgcccaagcagcccttcacctcctctcccccccgcgacgcaggaaccaacctgccttcagccatgctcaccagcttgtccacccgccactggccgacctcagcacttaccgtcaactgtgagaagggacgaaagtccaaccgccggaccacgtcttctacctgaggtgcacgaagacggatcacctaatctcgcccccatccctgttacggttaagcgggagcccgaggagttggaccaactttatctcgacgatgttaatgaaattattaggaatgacctgagctccacttcaacccacagttag

SEQ ID NO: 16385 - DNA, 2766 bp, synthetic construct
  misc_feature 1..2766: note = Description of Artificial Sequence: Synthetic coding sequence
  source 1..2766: mol_type = other DNA
atgaacgcccctgagagacagccccagcccgacggaggcgacgctcccggtcacgaaccgggcggctcgccccaggatgagctggatttttccatcttattcgactacgaatatctaaacccaaatgaggaagagccgaatgctcacaaggtggctagtcctccatcagggcctgcttatcctgacgacgtgttggactacggcctgaagccttatagcccgctggcctctctctctggagaacccccaggtaggtttggcgagcctgaccgggttggtccccagaaatttctgagcgccgccaaaccagcaggcgcatccggcttatctccaagaatcgagattacaccctcacacgaactcattcaagccgtgggccccctcagaatgcgggacgcagggctcctcgtcgaacagcctccacttgctggggtggccgcaagtccacgctttacacttcccgttcccggctttgagggctacagggaaccactgtgcctctcgccagctagttctgggagctcagcaagctttattagcgatacctttagtccgtatacctccccttgcgtcagtcctaacaatgggggccctgacgacctatgcccacagttccagaacatcccagcccattacagtccacggacgtctcctatcatgtctccccgcacgagtctggcagaggattcctgcttaggtcggcactctcctgtgcccagaccagctagtaggtcgagttctcctggggccaaacggagacattcctgtgccgaagcacttgtcgccctgcccccaggtgcgtccccccagcggtcccggtcgccatcgcctcagccatcctcacacgtggcgccacaggaccatggaagccctgccggataccctcctgtcgctgggtctgcagtcataatggatgctctcaattccttagccactgacagtccttgtggtattcccccaaaaatgtggaagacaagtcctgaccccagtccagtatccgcagctccatccaaggctggcctgccacggcatatttaccccgccgttgaatttctcggaccctgtgagcaaggcgagaggcgaaatagtgctccagagtcaatcctgcttgtcccaccgacctggcccaaaccactggtcccagcaataccaatctgctcaattcctgtgactgcaagtctgcctcctctggagtggccgctgtcttcccagagtggatcctacgaattgcggattgaggtccagccaaagccccaccaccgggcccattacgagactgaggggtctaggggcgctgttaaagcacccacagggggccatccagttgtgcagctgcacggatacatggaaaacaagccactcggcctgcagatctttataggcactgcagatgagagaatccttaagccacacgcattctatcaggtacatagaatcacagggaagaccgtgacaacaacatcctacgagaaaattgttggcaacaccaaagtcctggaaatcccactcgaacccaagaataacatgcgcgccactatcgattgcgcaggcatccttaaactgagaaacgcagacatcgaacttcggaagggcgaaacagatattgggcgcaaaaatacacgggttagactggtgtttcgtgtacacatccctgaatccagcgggcgcatcgtttctcttcagacagcctccaaccccatcgagtgcagccaaagatctgcgcatgagctgccaatggttgaacggcaggacaccgacagctgtcttgtctacggagggcagcagatgattctcaccggccaaaatttcactagcgagagtaaggtcgtgtttaccgagaagactacagatggacagcagatctgggaaatggaggcaacagtggacaaggataaaagccaacccaacatgttgttcgttgaaataccggaatataggaataaacacatcaggactcctgtgaaagtgaacttttatgtgattaacggaaagcgcaaaaggtcccagccacagcacttcacataccacccagttcctgctataaagactgaacccacagatgagtacgaccctacactcatctgcagtcccacccacggaggacttgggagtcagccctactacccccagcaccctatggtggcagaatctccctcctgcctcgtggcaactatggccccttgccagcagtttcggactggcctcagcagccctgacgctcggtatcagcagcaaaacccagctgctgtgttatatcagaggtcaaagagtctcagcccctctttacttgggtaccagcagcccgcactcatggcagctcccctatccctggcagatgcccacagatcggttttggtgcacgctggaagccagggacagagtagcgcgctgctccatcccagcccgactaaccagcaggcgagtccagtaatccattacagtccaactaaccagcaactccgctgtggtagccaccaggagttccagcatatcatgtattgtgagaatttcgccccggggacgactcgaccgggccccccacccgtttcgcaagggcagaggctctcacccgggagctaccccaccgtgattcagcagcaaaatgccacctctcaaagggccgccaagaatggcccccctgtctctgaccagaaagaggtccttcctgccggagtcaccatcaagcaggaacagaatctcgatcagacttaccttgacgatgagctaatcgacacccatctgtcgtggattcagaacatattatag

SEQ ID NO: 16386 - DNA, 978 bp, synthetic construct
  misc_feature 1..978: note = Description of Artificial Sequence: Synthetic coding sequence
  source 1..978: mol_type = other DNA
atgtctccacgcacatctctggcagaagattcgtgtctgggcaggcactcccctgtccctagaccagcctcccggtccagctcacctggggccaagcggaggcactcctgcgcagaggcccttgtggcccttccccctggagcatccccccagagatctcgtagcccttctccgcagccgtcaagccacgtcgctccccaggatcacgggagcccagccggttatccccctgtggccggatcagcagtgattatggacgctctgaactcactagcaactgattctccctgcggaatcccacccaaaatgtggaagacatcccctgaccctagccccgtcagtgcagctccttcgaaagccgggctgccacgccatatctacccagcggtggagtttctcggcccctgcgagcagggcgagcggcggaacagcgctcctgagagcatcctgttagtcccacccacgtggcccaaacccctggttccggccatccccatttgctccattcctgtgactgctagcctgccccctctagagtggccgctgagtagccagagcggaagttacgaattgcggattgaggtccagcccaaacctcaccaccgcgcccactacgagacagagggctcaagaggagccgtcaaggcgcccaccggcggacaccccgtcgtgcaactacatgggtacatggagaataagcccttaggcctccagatctttatcggaacagcagacgagcggatattgaagccacatgcgttctaccaggtgcacagaattacgggaaaaactgttaccaccactagctacgaaaaaattgtgggaaatacgaaagtgctcgagatcccactcgaacccagtaccgctccccacctgctctccccctttatgttcataagtcagccaggggtgcacacacgcattaacgtctgggcccttagcggattgagcctgaaggaactggcaacttctctctag

SEQ ID NO: 16387 - DNA, 2778 bp, synthetic construct
  misc_feature 1..2778: note = Description of Artificial Sequence: Synthetic coding sequence
  source 1..2778: mol_type = other DNA
atgaacgctccggagagacaaccacaacccgacggcggggacgctccaggacatgagcccgggggttccccacaggacgagttggatttctctatattgtttgactacgagtaccttaatcccaacgaagaggagcccaacgcccataaggtggcttctccaccatcagggcctgcctatcccgacgatgtgttagactatggactgaaaccatacagccccctcgcctctctgagcggggaaccccctggtaggttcggcgagcccgatagggtcggtcctcagaaatttctgagtgcggcaaaaccggccggagccagtggtctgagcccaaggattgagattacaccttctcacgaactgatacaagcagtgggccctctacgcatgcgggacgcggggctgctggtagaacagccacctctggccggggttgccgcctccccacgctttactctgcccgttcctggattcgaggggtacagagagccattatgcctgtccccagcgtcatctggaagcagtgcctccttcatttcagacaccttctccccatacacatcaccttgcgtctctcctaacaacggcggacccgatgatctttgtccccagtttcaaaacatcccagcacactactcacccagaacgtctcctataatgtccccaaggacttctcttgccgaggacagttgcctcgggcggcactcacccgtcccccgccccgcctcccgctcaagtagcccgggggcgaaaagacgtcacagctgcgctgaggctctggtcgccctgccacctggtgcaagccctcagaggtctcggtctcccagccctcagcctagctctcacgtcgctccacaggatcatggctctccagccgggtaccctcccgtggcagggtcagcagtcatcatggatgccctgaattccctggctacagattcaccatgcgggattccacctaagatgtggaagacctcccctgacccaagccctgtgagtgctgcccctagcaaagcgggcctccctcggcatatataccctgcagtagagtttctgggaccgtgcgaacagggggagcgccggaactctgctcctgagtccatcttactggtacctcccacatggcccaagcccctggtgcccgccattcctatctgtagtattcctgttacagcatctctgccgcctttggagtggcccctgtcatcccagagcgggtcatacgaactgaggatagaagttcagcctaaaccgcaccaccgggcacactacgaaacggagggatcacggggtgccgtcaaagctccgactgggggtcatcccgtggtacagttgcatggctacatggagaacaaaccactgggcctgcaaattttcataggtactgctgatgaaagaattctgaaacctcacgccttctaccaagtccacaggatcaccggcaagaccgttacaaccacaagctatgaaaaaatcgtgggcaacacgaaggtgttagaaatcccgttagaacccaagaacaacatgagggctaccatcgactgcgcgggcatactgaaactcaggaacgcagatattgaactaaggaagggcgagaccgatattggcagaaagaatacgcgagtgagactggtgtttcgggttcacatccctgaatcttccgggagaatagtttcactccagactgcatccaatccaattgagtgctcacagcgatccgctcatgagctgcccatggtcgaacggcaggacaccgactcgtgtctcgtgtatggcggccagcagatgatactaacagggcaaaactttacctcagagagcaaggttgtctttacagagaagaccacggacggccaacagatttgggaaatggaggccacagttgataaggataagtcccagcccaacatgctgtttgtcgagattcccgaatatcgaaacaagcatatacgaacaccagtgaaagtgaacttctacgttattaacggaaagagaaagcgctctcagcctcagcatttcacatatcaccccgtgccagctattaaaaccgagcccacagatgagtacgacccaaccttgatttgcagtccaacacatgggggactggggtctcagccttattatccacaacatccaatggttgccgaatcaccaagttgcctcgtagctaccatggctccgtgccaacagttccgcaccggattgagctcacccgatgcccgatatcagcaacagaaccctgcagctgtcctctatcagagaagcaagtcgctctccccgagcctgctgggataccagcagccagctctgatggccgcaccgctcagcctggccgatgctcaccggagcgttttggtccacgcgggtagccaggggcagtcttcggctctccttcacccttctcccactaaccagcaagcttcccccgttatacattactcccctacaaatcagcagctgcgctgcggcagccaccaggaattccaacatatcatgtactgcgaaaattttgctccaggaacaacacgtcctgggcccccacctgttagtcaagggcagcgactttcccctggctcctaccctacggtaattcagcagcagaacgcaaccagtcagagggccgctaagaacggtccccctgttagcgaccagaaggaggtgctgcctgcgggcgtaacaatcaagcaggaacagaatctggaccagacctacctggatgacgtgaacgagattatccgaaaggaattttctgggccgccggcgcgcaaccagacttag

SEQ ID NO: 16388 - DNA, 2706 bp, synthetic construct
  misc_feature 1..2706: note = Description of Artificial Sequence: Synthetic coding sequence
  source 1..2706: mol_type = other DNA
atgcagagggaagcagcattccggctcggccattgtcatcctctgcgcatcatggggtcagtggatcaggaggagccaaacgctcataaggtagcctctcctccatccgggcctgcctacccagacgatgtgttagattatggtctaaagccttactcaccgttggcatccctgagcggcgaacctcctggaaggttcggagagccagatcgggtgggaccccaaaagttcctgtccgcagcaaagcccgccggcgcttccggccttagtccacggatcgaaattacaccctcccatgaactcatccaggcggtgggtccactcagaatgagagatgcgggactcttggtggaacagccccccttagctggagtagccgcctctccacgcttcacactgcctgtgccaggctttgaaggctaccgggagcctctgtgcttatcacccgcatcatcaggcagttccgcaagcttcatttcagacacattctctccgtacacttctccatgtgtgagccccaataatggtggtccagatgacctctgtcctcagttccagaacattcccgctcattacagtcccaggacctcacctataatgagcccaagaacaagcctggcggaggatagctgcctgggtcggcactctccagtgccaaggccagcttccagaagcagctcacctggcgccaagcgcaggcatagctgcgccgaggctctagtcgcactgcctcccggtgcttcacctcagaggagcaggtccccatccccacagccctcctctcacgtggctccacaggatcacgggagccctgccggatatcctccggtggcgggttcggcagtcatcatggatgccttaaactccctggcaaccgattctccttgcgggatcccacccaagatgtggaaaactagcccggacccgtcaccagtgtccgccgctcccagtaaggcaggactgccacgtcacatttatccagcggtcgagttcttgggcccttgcgagcagggtgagagacggaactccgctccagagtctatcctgctggtgccccccacctggcccaaaccactcgtgcctgccattcccatatgctcaattccagtaacggctagtctcccacctctcgagtggcctttatcctcccagtctggctcgtatgagttgcggatcgaggtacagcctaagccgcaccatagagcccattacgagaccgaaggcagtagaggtgccgtgaaggcccccactggcgggcacccggtcgtgcagctacacggatatatggagaacaagccattagggctacagatattcatagggacggcagacgaaagaatcctgaagcctcacgctttttaccaggtgcataggataacaggtaaaaccgtaaccaccacaagttatgaaaaaatagtgggaaacaccaaagtgctagagatccccctggaacccaagaataacatgcgagcaacgatcgattgtgcaggcatcttaaaactgaggaatgccgatatcgagctcagaaaaggtgaaacagacataggtcgaaaaaatacaagagtccgcctggtattcagggtccacatccctgagagctcaggccgaatcgtttcattgcagactgcaagcaacccaatagaatgcagccagagatccgcacacgagttgccaatggtggaacggcaggacaccgacagttgcttggtatatggaggacagcaaatgattttaacaggtcagaactttaccagtgagtccaaagtcgtcttcacggaaaagacaaccgatggacagcagatttgggagatggaggcgactgtggataaggacaaatctcagccgaacatgttgttcgtagagattccggaatacaggaacaagcacatccggacgccagtgaaggtgaatttttacgtgatcaacggcaaacgaaagaggagccagcctcagcattttacgtaccatcctgtcccagccatcaagaccgagccaaccgacgagtatgatccaactttaatctgctcccctacacatggaggcttgggtagccagccttactacccccagcaccctatggtggctgagagcccctcttgcctggtcgccacaatggccccctgccagcagtttcgtacgggactctcgtctcccgacgcccgatatcagcagcagaatcccgctgccgtcctgtaccaaagatctaaatccctgtccccgagtctcttgggttaccagcagcccgccctcatggcagcccctctgagcctggcggatgcccataggagtgtcctggtgcatgctggctcacagggtcagtcctctgcactgctccatccaagtcctacgaatcaacaggcaagcccagttattcattattccccaacaaaccagcagttaagatgtggatcccatcaggagtttcagcacattatgtattgtgagaattttgctccagggacaacacgaccaggaccaccacccgtgtcacaaggacaaaggctaagcccgggatcctacccaaccgtcatccagcagcagaatgctactagccaaagagctgccaaaaatggacccccggtcagcgatcagaaggaggttttgcctgcaggggtgaccattaaacaggagcagaacctggatcagacatacctggatgacgaattgattgatacccacctgtcctggattcagaacatactctag

SEQ ID NO: 16389 - DNA, 3207 bp, synthetic construct
  misc_feature 1..3207: note = Description of Artificial Sequence: Synthetic coding sequence
  source 1..3207: mol_type = other DNA
atgacgacggctaactgtggagctcacgacgagttggacttcaagctcgtgttcggcgaggacggggccccagctccgcctccacctggttcccggcccgccgaccttgaacctgacgactgtgctagtatctatattttcaatgttgacccgccaccttccacactaaccacacccctgtgcctgccccaccacggcctgccctcgcattcatctgtgctcagcccatccttccagttgcagtcccacaagaattacgagggcacgtgtgagatccccgaatcaaagtattccccactgggtggtcctaagcctttcgagtgcccttccattcaaattacctctatctctccaaactgccatcaggaactcgacgcccacgaggatgatctgcaaattaacgacccggagcgggaatttctggagcgcccttcccgcgaccatctttatctgccacttgagccctcttacagggagtctagtctttcccccagcccggctagcagtatcagttccaggagttggttctcagacgctagctcatgcgaatcactgtcccacatatatgacgacgttgactccgagctgaatgaagccgcggctagattcaccctgggttcacccctgacctctcccggcggctcgcccggagggtgtccaggggaggaaacatggcatcagcagtacgggctcggacatagtctgtcccctaggcagtcaccttgtcactccccaagatcatctgttacagatgagaattggctgagccctagacctgcctcaggaccttcctcacgcccaactagcccctgcgggaagcgcaggcactcatctgcggaagtgtgttacgctgggagtctgtcacctcatcactcacctgttccctcgcccgggcattcccctcggggttccgtcacagaagatacctggttgaacgccagcgtgcacggcggttctggcctgggaccagcagtgtttccattccaatactgcgtcgagactgacataccactgaaaacaagaaagaccagtgaggaccaggctgcaatccttcccggaaagcttgagctgtgcagcgacgatcaaggctccctgtcccccgcccgggaaacgagcatcgacgacggccttggtagccaataccccctcaaaaaagactcttgtggggaccagtttctgagtgtgcctagtccttttacgtggtccaagcccaagccgggccacaccccaattttcagaaccagttcccttccccccctggactggccccttccagcccactttggtcagtgcgaactgaagatcgaggttcagccaaagacacaccacagggctcattacgaaacggaggggagtcgtggagccgtgaaggccagcacaggcggacaccccgtagtgaaactcctgggttataatgagaaacctatcaacctgcagatgtttattggtaccgccgatgataggtacttgcggcctcatgctttctatcaggtgcaccgcattacgggcaagaccgtcgcgactgcatctcaggaaattattatcgcatccacaaaggtgttggaaatccccttactgccagaaaataatatgtctgcctcaattgattgcgctggcattctaaaattaaggaacagtgacatagagttgcggaagggcgaaaccgacattggacggaagaacactcgcgttcggctagtgtttagggttcatataccccagccaagcggaaaggtgctgtctttacagattgccagcatccctgtggaatgctcccagcgcagcgcccaagaattacctcacattgagaagtattctataaactcctgttccgtaaacggaggccatgagatggtcgtgaccgggagtaatttcctgcctgagtccaagataatctttctggagaaagggcaggatgggagaccgcaatgggaagttgagggcaaaatcatccgggagaaatgccaaggtgctcacatcgtgctggaggtaccaccctaccataacccagcagtcactgcagccgttcaggtacacttttacctctgtaacggtaaaagaaagaagagccagagccagagatttacctatactcctgtgctaatgaaacaggagcaccgcgaggagattgacctgtcctcagttccctcccttccagtgccccatccagcccagacccagaggccatcctccgactccggatgttcccatgactctgtcctgtccggccaacgttcgctgatctgttccatcccgcagacatacgcctccatggttacatcctcacacttaccacagcttcaatgtagggacgaaagtgtgagtaaagagcagcacatgatcccatccccaatcgtgcatcagccgtttcaggtcacaccaacgccgccagttggctcaagctatcaacccatgcagaccaacgtggtgtacaatggcccaacctgtctgccaattaacgccgctagctcccaagagtttgatagcgtgctgttccagcaggacgcaaccctctctggcttagtgaatctcggttgccagccactttctagtatcccgttccacagttcaaactccggatccactggacatctgctggcacatacgccacactctgtccacacccttccccatttgcagtcaatgggataccactgttcaaatacaggccaacgttctctctcttccccggtggctgatcaaattaccggccagccaagctcccaactgcaacccatcacctatggaccctctcacagtggatcggcaaccacagcttcaccagctgcctcacaccctcttgctagcagccctttaagcgggcctccgtctccacaactgcagccaatgccttatcagtcgccatcctctgggaccgcaagttccccctcacccgcaaccaggatgcactcgggccaacactccacccaggctcaatctacggggcaaggaggcctttctgcaccctcctctcttatttgccattccctgtgcgatcccgcgtcatttccgcccgacggagccacagtgtccattaagcctgagcctgaagaccgcgagccaaattttgctaccatcggtctccaggacattacgcttgacgacgaccagttcatctctgaccttgaacatcagccgtccgggtcagctgagaagtggccaaaccattctgtattatcctgccctgctccgttctggaggatctag

SEQ ID NO: 16390 - DNA, 3228 bp, synthetic construct
  misc_feature 1..3228: note = Description of Artificial Sequence: Synthetic coding sequence
  source 1..3228: mol_type = other DNA
atgacaaccgctaattgcggtgcccacgacgaactcgatttcaagctggtgtttggcgaagatggtgcaccggctcccccaccgcccgggtcacggcctgcagaccttgagccggatgactgcgcttctatttacatctttaacgtggacccaccacccagcacactgactaccccgctctgcctgcctcaccatggcttacctagccattcaagcgttctgagccccagtttccagctgcaatctcacaagaactacgagggaacttgtgagatacctgagagcaagtacagtccccttggtggtcctaaacccttcgaatgcccgtcaattcagatcacaagcattagcccaaactgccaccaggaattagacgcacatgaagatgacctgcagatcaacgaccccgagcgggagtttttggagagacccagcagggaccacctgtacctgccgctggagccttcttatcgtgaaagcagtctgtcaccttctccggcaagcagtatttctagcaggtcgtggttcagtgacgcctcaagctgtgaatcccttagtcacatttacgacgacgtggatagtgaactaaacgaggccgcggcaaggttcacgctgggttctcctctaacaagccccggtgggtctcctggcggctgtccgggcgaggagacgtggcatcagcagtacgggttgggtcactctttgtccccaagacagagtccttgccacagcccccggagtagtgtgacggatgaaaattggctgtcccccagaccagccagcggcccatctagcaggcccacatcaccttgcggtaaacgtcgacattcatcagctgaggtgtgttatgcggggtcactgagtccccaccatagtccagttcccagccctgggcactcacctcggggctccgtgactgaagacacttggcttaatgcatcggttcatggcggaagcggcctgggccctgccgtgtttccgtttcagtattgcgttgaaaccgatattccccttaaaacaagaaagacctccgaggaccaggccgccattctgcctgggaagttggaattatgcagcgatgatcaaggctccctaagccctgctcgggagacctcaatcgacgacgggctagggagtcagtatccccttaagaaggactcctgtggtgatcagttcctttccgtgcctagcccttttacctggtcaaagcccaagcctgggcacaccccgatcttccgaaccagctcactaccccccctggactggcctctgcctgcccatttcggccaatgtgagctgaagatagaggtacaaccaaaaacgcaccacagggctcactatgagacagagggatcccgaggggcggtgaaggcatctacgggggggcaccccgtagtgaagctgttaggctacaatgagaagcctataaacctgcaaatgtttataggaaccgctgacgacaggtaccttagacctcacgctttttaccaggtccatcgcatcaccggcaagacagtcgcaacagccagccaggagataattatcgcatcgacaaaagtgttagagatccctctgttgcccgaaaataatatgtcggcaagcatcgattgtgccggaatactcaaacttagaaacagtgatattgaactcagaaaaggtgagacagacatcggtcggaagaacacccgcgtgaggttagtctttcgggtgcacattccccaaccttcggggaaagtgctgtcactgcaaatcgcctccatcccagtggaatgcagtcagaggagtgcacaggaactgccacacattgagaagtacagcattaattcctgtagcgttaatgggggacacgagatggtggtaactgggtcaaacttccttcccgagagtaagataatctttctggagaaaggacaggatggccgacctcagtgggaagtggaaggcaagattatccgagaaaagtgtcaaggggcccacatcgtgttggaagtgcccccctaccacaacccagctgtgacggccgcagtgcaggtgcatttctatttgtgcaatggtaagaggaaaaagagccagagtcagcgattcacatatacccccgtgttgatgaagcaggaacacagggaggaaatcgatctgtcttctgtgccttctttgcctgtgcctcacccagcacagacccagaggccttcctctgattctggctgcagccacgactccgtactgagtgggcagagaagcttaatctgtagcatccctcagacctatgccagcatggtgaccagtagccacctgccacagctccagtgccgggatgaaagtgtgtccaaagagcagcacatgattccttcccctatcgtacaccagcccttccaagttacgccaactccgccagtgggatcctcctaccaacccatgcagactaatgtagtttacaatgggcctacttgcctgcccatcaacgctgcctccagtcaggagttcgactccgttctattccagcaagatgctaccctcagcgggctagtaaacctagggtgtcagccccttagtagcatcccttttcattcatctaacagcggctctaccggacatctgctggcgcacactcctcactcagtgcatacattgccccacctgcagtccatgggttaccactgctccaataccgggcagcggagtcttagtagccccgtggcagaccagatcacaggtcaaccctcttcccagctgcagcctataacatatggcccttcccactcaggttctgctactaccgccagtcccgcggcgagccatcctttggcctcatcccctctctctggaccacctagcccacaactgcaacccatgccataccagtccccatcttcaggtacagcttctagtccatcacctgcaacacgaatgcatagtggtcaacacagcacccaggctcagtccacgggacagggggggttgtcagcccccagcagcctgatctgtcactcgctttgtgatccggcctcatttccaccagatggagctacagtgtcgattaaaccagagcctgaggatcgagagccaaactttgccacaatcgggcttcaagacatcaccctggacgacgtcaacgaaatcattggtagagacatgagtcagatcagtgtgtcgcagggcgcgggagtgtctagacaggcaccgctgccatctcctgaatcactggatctcggccgaagtgacggcctttag

SEQ ID NO: 16391 - DNA, 3198 bp, synthetic construct
  misc_feature 1..3198: note = Description of Artificial Sequence: Synthetic coding sequence
  source 1..3198: mol_type = other DNA
atgacaacagcaaattgcggggctcacgatgaactggactttaagttggtatttggcgaggatggagcgcctgctcctcctccacccggctctaggcccgcagatcttgagcctgacgattgcgcttccatttacatattcaatgtggatccaccgcccagtaccttgacaaccccactgtgtctgcctcatcatgggctgccatcacactcttcagtgttgtcaccatcctttcagcttcagtcccataaaaactatgaaggcacatgtgagataccagagtcaaagtacagtccgttggggggtcccaagccgttcgaatgtcctagcatccagataacctcaatcagccccaattgccaccaggagctagacgctcatgaggacgacctacaaataaacgacccagaaagggaatttctggagcggccttccagagaccacttatacctgcctctggaaccctcctaccgtgagtcaagcctttcaccttctcctgcgagctccatttcttcacgttcctggttttcagacgcaagtagctgcgaatctctaagtcacatctatgacgacgtggattctgaactgaatgaggccgcagctcggttcaccctcggatccccactgacttcaccaggcggcagtcccggtgggtgtcctggagaggagacgtggcatcaacagtacgggctgggccactccttgtctcccagacagagcccatgccactcacctcgttcaagtgtgaccgacgagaactggctgtcaccgcggcccgcgagcggcccgtctagccgtcccacctccccctgcggcaaaagaagacactcatctgcagaggtctgttacgctggatcattatcacctcaccactcgccggtgccctctccaggacactccccgagggggtccgtgactgaagacacttggctgaacgcctctgtgcatggtgggtctgggctgggtcctgccgtgtttcctttccaatactgtgttgaaaccgatattccacttaagacacgcaagacgtccgaagatcaagccgctatcctgccaggaaaacttgaactgtgttccgatgaccaggggagccttagccccgctcgggagacatctattgacgatgggctgggcagccaataccctctgaaaaaagactcatgtggcgatcagttcttatccgtgccaagtccctttacttggagtaaacccaagcccggccacaccccaatctttcggacttcaagcctgccacccttagattggcccttgcctgcccattttggtcaatgcgagctcaagattgaagttcagcccaagactcaccaccgagcccactacgagacagagggctctcgcggggcagtcaaggcttctactggcggccaccccgtggttaaactgctggggtataacgaaaaacctatcaacttgcagatgttcattggtactgcagacgaccgctacttgaggccccacgccttctaccaggtccacagaattacaggcaagaccgtggccacagcttctcaggaaattatcattgcatcgacaaaggttctggagatcccattactaccagaaaacaacatgtctgcgtccatagactgcgctggcattttaaagctgcgaaactccgacatcgaactgcgaaagggtgagacagacatcgggcgcaaaaatacacgggtgcgtttagtattcagggtccacataccccagcctagtgggaaagttttgagtctacagatagccagcatccccgtcgagtgttcacagcgcagcgcccaagagctgccacacattgagaagtactccattaacagctgttccgtcaatggcggccatgaaatggtggtaaccggctcaaatttcctgccggaaagcaaaatcatctttttggaaaagggacaggatggccggccccagtgggaggtggaaggtaaaatcatccgagagaagtgtcagggcgcccacatagttctggaggtgccaccatatcacaacccagccgttaccgctgcagttcaagtgcatttttacttatgcaacgggaagagaaagaagagccagagccagaggttcacatatacccctgtcctcatgaagcaggagcatagggaagagattgatttgagctcagtgccctctctgccagtccctcacccagcacagacgcagaggccttcatccgactccggctgcagtcatgacagcgttctgagtggccagagatccctgatatgtagcatcccacagacctatgcatctatggttaccagttctcacctgccccagctgcagtgccgcgatgagagtgtttcaaaggagcagcacatgataccttccccaatagtccaccagccattccaggtgactccaacccccccagttgggtcatcataccagccgatgcagaccaatgtcgtgtacaacggacctacctgcctgccgatcaatgccgcctctagccaggaattcgactctgtcttattccagcaggacgcaacgttaagtggattggtgaatctggggtgtcagcccctgagctctatcccttttcattcatccaattctggttccaccggtcacctgctggctcacacccctcacagcgtgcacacactcccccacttgcagtcgatgggctaccattgttccaacaccggccaacgttccctctcctctccagtcgccgatcaaataacaggtcagcctagctctcaactgcagccaatcacctacggcccttcccacagtggctcagccactacagcatctccggccgcaagtcacccacttgcatcatctcccctgtcgggccctcccagcccacagctgcaacctatgccctaccagtccccttcttccggcacagcatctagtccctctcccgcgacgagaatgcactctggccagcattctacacaagcccagagcacaggccaagggggcctgtcagcccctagtagcctcatttgtcactcgctgtgcgatcctgcatcctttcctcctgacggcgccaccgtgtcgatcaagcctgaaccggaagatcgggagcctaattttgctactattggcctccaagatatcacgcttgatgatgatctgttcacgtccaacaacttcgatttactgcagctgagacccactttctggcccgtgccagctggtcgctatctgagaaacctagaatag

SEQ ID NO: 16392 - DNA, 1770 bp, synthetic construct
  misc_feature 1..1770: note = Description of Artificial Sequence: Synthetic coding sequence
  source 1..1770: mol_type = other DNA
atgtttattggaaccgcggatgaccgctatctgcgccctcacgccttctaccaggtgcacaggattacagggaaaaccgtcgccactgcctcgcaggagataatcatcgctagtacaaaagtgctggaaatcccacttctccctgaaaataacatgagcgcaagcattgactgtgcaggtatactcaagctgaggaatagcgatatcgagctgcgtaaaggtgagacggatattgggagaaaaaacacccgggtgcgcctggtattccgggtgcacatcccgcaaccttctggtaaggtcttgtctcttcagatcgcctccatccccgtcgagtgcagccagcggtcagcacaggagctcccacatatcgagaagtattctattaatagttgttccgtgaacgggggtcacgaaatggttgtgacaggcagcaatttcctacccgagagtaaaattatcttcctcgaaaagggacaggatggcaggccacagtgggaagtggagggcaagatcattcgcgagaaatgtcaaggcgcgcacatcgtgttggaggtgccaccataccataacccagccgtgaccgcagctgtgcaggttcacttctacctatgcaatggtaaaaggaagaagtcccagagccagcgattcacatacacccccgttctcatgaagcaagagcatcgagaagagatcgacttgtcctcagttccaagcctgcctgtcccacacccagcccagactcaaagacctagcagcgattctggctgtagccacgacagcgttctgtccggtcagagatcgctcatttgctccattccccagacctatgctagtatggttacgagctcccatttacctcaattgcagtgccgtgacgagagcgttagtaaggagcaacacatgattccttccccaattgtccaccagccatttcaggtcacacctaccccaccggtgggctcaagttatcagcccatgcagacaaatgtcgtatataacggacccacctgcttgccaataaacgcagcctcctctcaggagttcgattctgtgctgttccaacaagatgcaacactgtcaggcttggtcaatctcggttgccagcccttgagctcaatacccttccattcctccaactctggctctacaggccatctgctggcccacacaccccattcagttcatactttgccccatctccagtccatgggataccactgttcaaacacgggccagcggagtctgtctagcccagtggctgaccagataaccggccagccaagcagccagctgcaacccataacttacgggccctcacatagtggaagcgctaccaccgcctccccagcggccagccacccattggcttctagtcctctcagcggccctccatctccgcagctgcagccaatgccttatcaaagcccaagcagtggaactgcctcatcacctagccccgctacccggatgcacagtggccagcatagcacacaggcccagagcacagggcaggggggtctctcagctcctagcagcctgatctgccattctctgtgtgacccagcaagtttccccccggatggggccacagtgtccataaaacccgaaccagaagatcgtgaacctaattttgccacgatcggactgcaggatatcaccctcgatgacgaccaattcatcagtgacctggagcaccagccaagcggttctgccgagaagtggcctaaccatagtgtcctctcttgtcccgccccattctggagaatttag

SEQ ID NO: 16393 - DNA, 2709 bp, synthetic construct
  misc_feature 1..2709: note = Description of Artificial Sequence: Synthetic coding sequence
  source 1..2709: mol_type = other DNA
atgggcgccgcttcttgcgaggatgaagaactggaattcaagttggtctttggcgaagagaaggaggcccctcctctgggcgctggcggcctgggtgaagagctggattctgaggatgctcctccctgctgcagacttgccctgggggagcctcctccctatggcgctgcacccataggtattcctcggcctcctccaccacgccctggtatgcatagtccgccccctcgccctgcaccttcacccggtacttgggagagtcagcccgcaaggtctgtgagactgggcggcccaggcgggggagctggcggtgccggaggcggcagagttctagagtgcccgtccattcgcattaccagcatcagtccgactcctgagccccccgccgcgctcgaagacaatccagacgcctggggcgacggtagcccacgggactatccaccgccagagggcttcggcggctatagggaggccggagggcagggcggaggtgcgtttttcagtccatctcccggcagttctagccttagctcctggtcgttcttttccgatgcaagcgatgaggccgctctgtatgctgcatgtgatgaagttgaaagcgaactcaacgaggcggccagtaggttcggtctaggcagtcctctgccttcgcctagagcttctcctagaccctggacacctgaggacccgtggagtctctatgggccaagccctggcggcaggggccctgaggattcctggcttctcctttctgctccaggcccgacacccgctagccccaggccggcaagcccatgtggaaagcggcggtactcgtcctcaggcacgcccagttctgccagtccagcactgagccggcgtggttcattgggggaggagggatctgagccaccccccccaccaccactgcctctggcacgggaccccggctcaccaggtccttttgactatgtcggagctccaccagcagagtctattccacagaagacaagaagaacaagctctgaacaggctgtggctctgccacggtcggaggagcctgctagctgcaatggcaagctgcccctcggtgcagaggagagtgttgccccccccgggggaagcaggaaagaagtcgcaggtatggactacctagctgtcccttcccccctggcctggagcaaggcaagaatcggcggccactctcccattttcagaacttcggccttgccaccccttgattggcccctcccaagccagtatgaacagctagaactcagaatagaggtgcagccgagggcccaccaccgcgctcattatgagaccgagggtagccggggagccgtaaaagcagcccctggaggacaccccgtcgtcaaacttctgggctattctgaaaaacccctgactctgcagatgtttattggcaccgctgatgagcgaaacctgcgcccccacgctttctaccaggtccaccggattacaggtaagatggtggctaccgcatcttacgaggccgtggtgtccggcaccaaggtgctcgagatgacgttgctccccgaaaataacatggccgccaacatcgactgtgctggcatactcaaactgaggaatagcgatattgaactcagaaaaggcgaaaccgacatcggccgaaagaacacgcgagttcggctggtattccgtgtgcacgtgcctcagggaggaggaaaggtggtgtccgttcaagctgccagcgtgccaatcgagtgttcgcagcggagcgcgcaagagctccctcaggtggaggcgtactctcctagtgcctgctccgtgcgtggtggggaggagctggtgctcactggtagtaatttcctcccggacagcaaagtcgtctttatcgaacgaggacccgacggcaagctgcagtgggaggaggaagccaccgtgaataggctgcagtccaacgaggtcacactcacactcacagtccctgagtatagtaataagcgcgtgtctaggcccgtgcaggtctacttttacgtgtccaatggacgccgcaaacgcagccccactcagtctttcaggtttctcccagtcatatgtaaagaggaacccctgcctgacagttcactgcgcggctttccgagcgcttcagctacccccttcggcacagacatggacttttcccctcccagacccccgtacccgtcttacccgcatgaggaccccgcctgcgagacgccatacctgtctgagggtttcgggtacggcatgccgcccctttatcctcagacagggcctccaccaagctaccggccagggctcagaatgttccctgagacacggggaactacagggtgtgcacaacctccagcagtgtcctttctccctaggccttttccttcagacccatatggcggacggggaagtagcttttcactgggtctgccattctcgcctcccgcccccttcagaccccctcccctccccgcaagccccccactcgaaggacccttcccaagccaatcggacgtgcaccccctacctgctgaagggtacaataaggtcggccctgggtacggacctggagaaggggcccccgaacaggaaaaatcaagaggcggttactcaagcgggttccgcgactcggtaccgatccagggaattacccttgaagaggttagtgagatcatcggccgcgatctgtccggctttcctgcgccgcccggagaggaaccgcctgcttag

SEQ ID NO: 16394 - DNA, 2895 bp, synthetic construct
  misc_feature 1..2895: note = Description of Artificial Sequence: Synthetic coding sequence
  source 1..2895: mol_type = other DNA
atgatcacaacactgccctccctgctgcccgcttccctcgcttccatatctcaccgggtgactaacctgcctagtaactcactttcacataacccaggcctgtccaagccggatttccccgggaatagctcccccggtcttccaagctcctcttctcccggccgggacctgggagcacccgcagggagcatgggcgctgcgtcctgcgaggatgaagaattggagttcaaactggtcttcggggaggaaaaagaagctccccccctgggcgccggggggcttggcgaagagctcgactctgaagatgcaccaccatgctgtagacttgccttgggggagccccctccatacggagccgctcccatcggcatccccaggccacctcccccaaggcccggaatgcatagtcccccgcctaggcccgcgccatctccaggaacttgggagtctcagccagcccgatcagtgagattgggtggccctggagggggcgctggcggagccgggggggggcgagtactcgagtgcccctcaatcaggatcacctcaatatctccaacccctgaaccccccgccgcactagaggacaacccagacgcctggggggatggctcccctcgggattatccaccccccgagggattcggtgggtatcgggaggctggcggccaaggggggggtgcctttttttccccatctccaggctctagttctctgtcatcatggagctttttctcagacgctagtgacgaagctgcattgtacgccgcttgcgatgaagtggaatcagagctgaacgaggccgccagtagatttggcctcgggtcaccactgccatccccacgggctagccctcgaccttggactccagaggatccctggtccttgtatggaccctctccaggcggaagaggtcccgaggatagttggctcctgttaagtgcaccaggaccaacccccgctagtccaaggccagctagtccctgcgggaaacggaggtactcctcttctgggaccccctcttctgcctcaccagctctgtctcggcgcggttctctcggggaagaggggagcgagcccccaccacccccacccctcccccttgcccgggatcctggttcaccaggcccattcgactatgtgggtgccccccccgcagaatctattcctcagaaaactagaagaacctcatccgagcaagccgtcgcgttacccaggagcgaagagccggcatcttgtaatggtaaactaccgctaggcgccgaggaaagtgtggcccccccaggtgggagccgtaaggaggttgccggaatggattacctcgcggtcccatcgcctctggcgtggagcaaggcgagaatcggtggtcatagccccattttcagaacgtccgccctgcctcccctggactggccactgcccagtcagtacgagcagctggagctcaggatcgaggtgcagccacgagcgcatcatcgtgcccattatgaaacagagggcagtcgtggcgccgtaaaggcggccccaggtgggcatcctgtcgttaaacttctgggttactccgaaaaaccattaacactgcagatgtttataggtacagcggacgaacgcaacctccggccccatgctttctaccaagttcacagaattacaggaaaaatggtggctacagccagctatgaggccgtggtttctgggacaaaggtccttgagatgacactgctgcccgagaataacatggcagccaatattgattgcgccggaatcctgaaactgaggaattcagatattgaattacgaaaaggagagactgatatcggccggaagaacacccgtgtccgtctcgtgttccgcgtgcatgttccccagggcggcggaaaggttgtctccgtgcaggccgcgtctgttccaatcgaatgctcccagagaagcgctcaggagctcccccaagtagaggcctatagtccaagtgcatgctcggtgcgaggcggcgaggagctggtactcactgggagcaatttcctcccggactcaaaagtggtgtttattgaaagaggtccagatggaaagctccaatgggaggaggaggccacggtgaacaggcttcaaagtaacgaagtgaccctcaccctgactgtgcctgagtatagcaacaagcgggtcagccgcccagtccaggtctatttttatgtaagcaatggtagaagaaagcggtccccaactcagagcttccgatttctccccgtcatttgtaaagaggaacccttacccgattccagtcttaggggcttcccatccgcctccgcaacacccttcgggaccgatatggacttttcaccaccacgaccaccatatccctcctacccacacgaggaccccgcatgcgaaaccccctacctgtcagagggttttggctatggcatgccgccactgtatccgcaaaccggacctccaccatcttatagacccggacttagaatgttccccgagactcgggggacaaccggctgcgctcagccgccagctgtatcattcctgccaagaccttttccatccgacccttacgggggccgcggatcttctttctcgctgggcctgcctttttccccaccagccccatttcgcccgccacccctgccagcgtctccacccctggagggcccctttccatcacaatctgatgtgcaccccctacccgctgagggatataacaaggtaggtccaggctacgggcccggagagggagctcccgaacaagagaaatctcgcggggggtactccagtggatttcgggacagcgtgcctattcagggaataaccctggaagagggaggttgtggcactggcggttgtgagtgtgaatgcgtgcaggagatagccttacatgtctgttag

SEQ ID NO: 16395 - DNA, 2670 bp, synthetic construct
  misc_feature 1..2670: note = Description of Artificial Sequence: Synthetic coding sequence
  source 1..2670: mol_type = other DNA
atgcctgcctcaatctctagtatctttcccggcccaaccttacttctgagctgcggttccgaagaactggattcagaggacgctcccccttgctgtcgccttgccctcggagagccacctccctatggagcagcacctatagggataccccgccccccacccccaagaccaggaatgcattctccaccacccagacctgctccaagtccagggacttgggagtcacagcccgcccggtctgtcaggctggggggccccggcggcggcgccggtggcgccggcggaggtagggtgctggagtgcccaagcatccgcatcacttccatatctccaacccccgagccgcccgccgctcttgaagataaccctgacgcctggggagatggctccccaagggactacccgccccccgagggattcggggggtacagagaggcaggcggacaaggcggtggtgcctttttcagccctagccctggtagcagctccctgagttcttggagctttttctctgacgcttcggatgaggctgctttatatgcagcctgcgacgaggtggagtccgagcttaatgaggccgcttctagatttggccttgggtcccctctccccagtcctcgtgcctcaccacggccatggacccctgaggacccatggagtctctatggaccatccccaggcggaagaggccctgaggactcatggctccttctgagtgctcctggccctacacccgcgtccccccgcccagctagtccatgcggtaagcggcggtactctagctcaggtactccttcaagcgctagtcctgcactctcaagaaggggcagtcttggagaggagggaagcgagccccctccgccgccccccttgcctctggctcgagaccctggcagcccaggaccctttgactacgtgggggctccccccgccgagagcattccacaaaagacccggcggacatcctcagagcaggccgtagccctgccccgctctgaagagccagcatcttgcaatggcaagcttccactgggagcagaggagtctgtcgctcccccgggcggctcgcggaaggaggtggccggaatggactacctggccgtaccatcacctttggcgtggtccaaggccaggatcggtggtcacagtcctattttccgaacctctgcattgcctccactggactggccccttccctctcagtatgagcagcttgaactccgcatagaggtgcaaccccgggcacatcatcgcgcacattacgagacagagggctctagaggcgccgtcaaggcggctccgggcggacaccccgtcgtgaaactcctggggtatagcgaaaagccgttaaccctacaaatgtttattgggactgccgatgagcgcaacctccggccccacgccttttaccaggtgcacagaatcaccgggaagatggttgccacagcctcttatgaggcagtggtgtcaggcacaaaggtgctcgagatgacgttattgcccgaaaacaatatggctgctaacattgattgtgccggaatcttaaagctccgtaactcagatattgaacttcgcaagggggagaccgacatcggacgtaagaatactagggtcagattggtgttcagagtgcacgtaccccaaggcggagggaaggtggtgagcgtacaggccgcgtccgtgcctattgagtgctcacaacgaagcgcgcaagaactgcctcaggtggaagcttattctcctagcgcgtgcagcgtccgaggcggagaggaactagtcctgacaggatcaaatttcctacccgatagcaaggtcgtatttatagagaggggacctgacgggaagctgcagtgggaggaagaagctacggtgaatcgccttcagagtaatgaagtcacactgactctaaccgtacccgaatactctaataagcgtgtgtctcgtcccgtccaggtgtacttttatgtcagtaatggacggaggaaacgatcgccaacacaatctttcaggttcctaccagtgatttgtaaagaggaaccactccccgactcctccctgcgcggctttccgagcgcctcggccacccccttcggcactgacatggacttctcccctccccgcccaccttacccctcctatccccacgaagacccagcctgtgagactccgtacctttctgagggctttggctatggtatgccccctctctatccccagacagggccgcctccctcttacaggcccggcctgcggatgttccccgaaacccggggcacaactggatgcgcccagccacctgctgtgagctttttgcctaggccatttccttccgatccctacgggggtcgtggaagttccttctccttgggtttgcccttcagccctcccgcaccctttagacccccaccactgccagcctcacccccactggaaggtcctttccccagtcagtcggacgtacacccacttcccgcagaggggtacaataaggttggccctgggtacggcccaggcgagggcgcacccgagcaggagaagtctcgagggggctattcctccggattccgggactccgtgcctatccaaggaataacactggaggagggagggtgcggtacaggtgggtgcgagtgcgaatgcgtccaggagatcgcactccacgtgtgctag

SEQ ID NO: 16396 - DNA, 2745 bp, synthetic construct
  misc_feature 1..2745: note = Description of Artificial Sequence: Synthetic coding sequence
  source 1..2745: mol_type = other DNA
atgctgtcagggagggacctcggggctccagccggctcaatgggggctgccagttgcgaggacgaggagctggagtttaaactcgtgtttggagaagaaaaggaagcacccccactaggagctggagggttaggcgaggagttggactccgaagatgccccaccctgttgccggctggctctcggagaacctcctccgtatggcgctgccccaatcgggatacccagaccccctccacctcggccaggtatgcattccccaccccctagacctgcacccagtcccgggacttgggagagccaacctgctcgctctgtgcgcctggggggcccaggtggaggggccggcggggctggcggcggccgagtgctggagtgtccaagcatcagaatcacgagcattagccccactccagaacctccagccgctttagaagataatcctgacgcatggggcgatggatcaccacgggattatcccccaccagagggatttggggggtatcgtgaagcaggcggacagggcggcggcgcctttttcagtccgtcccctggttcctcttcactgagttcttggtcattttttagcgatgcctctgatgaagctgccctgtacgctgcttgtgatgaggtcgagagcgagcttaatgaggccgcctcccgctttggattggggtcccccctaccatcccctagggctagtccccgcccatggacgccagaagacccttggagcttgtatggacctagccctggaggccgtggacccgaggacagttggcttctgctatcggcccccggacccacgcctgctagtccgaggcccgcgtcaccgtgcggaaaaaggcggtatagctcgagtggaaccccatcttccgccagcccagcgctgtcacggcgaggaagtctcggtgaagaggggagcgagcccccgccaccgccacctctgcctctcgcgagagatcctggttctccaggcccatttgactatgtcggagctccccccgctgagagcatcccacagaaaacgaggagaaccagctcagagcaggcagtcgcactacctagatccgaagaaccagcaagctgcaatggcaagctacctctcggggccgaggagtccgttgcccctccaggcgggtcccggaaagaagtcgctggcatggactacctagctgtgccttcacccttggcttggtcaaaggcaagaattggcggacacagtcccatattccgaaccagcgctctcccccctttggattggccgcttccaagtcagtacgagcaacttgaactccgcatcgaggtacagccgcgggcccaccaccgagcccattatgagacagaaggcagtaggggtgccgtaaaagccgcaccgggcggtcatcccgtggtcaagcttctcggttattctgagaaacctctgacgctccagatgtttattggtacagccgatgagaggaacctgagacctcacgctttttatcaggtccaccggattaccggaaaaatggtggcaactgcaagttatgaggcggtagtaagcggaactaaggtgctcgagatgaccctgttgcccgagaacaatatggcagcaaacatagactgtgccgggatcttaaaactgcgtaactctgatattgagctgcgaaaaggcgagaccgacattgggcggaaaaatactcgtgtgagactggtatttcgggtgcatgttccacagggaggaggtaaagtcgtcagcgtccaggccgcctctgtgccaatcgaatgttcacagcgatcagcccaggaactcccacaggttgaggcgtactctccgtccgcttgctctgtcagaggcggggaagagctggtgctgacaggctctaattttctccctgattctaaggtcgttttcattgagcgaggccccgacggaaaactccagtgggaagaagaggcgaccgtcaacagactccagtctaacgaagtcacactgacccttaccgtccctgaatacagcaataagagagtttccaggccggtgcaggtgtatttttacgtgtcgaatgggcggcgaaaaagatccccaacgcagtccttccggttcttgcctgtgatctgtaaagaggagccccttcccgatagctccttacgtggattcccctcagcgtcagctacacctttcgggacggatatggatttctcgccgcctcgaccaccttacccctcctatccgcatgaagaccctgcctgtgagacaccctacctgagcgaaggctttggatacggcatgccacccctgtatccacagaccggccctcctccaagctaccggcctggattacggatgttcccagagacccgcggtaccacagggtgcgcacagcctccggccgtatcatttctgccccgaccttttcccagtgacccatacgggggccgggggagcagtttcagtctgggcctgcccttttcccccccggctcctttccgtccaccccccttaccagcatccccccctcttgagggtccgtttccttctcagagtgacgtgcaccccctcccggcagaaggctacaacaaagtgggccctggctacggccctggcgagggtgccccagaacaggaaaagagccgcggaggctattcaagtggattcagagactctgttcctatccagggtatcacactggaagaagggggctgcggtactggcgggtgtgaatgcgaatgcgtgcaagagattgcactgcatgtatgttag

SEQ ID NO: 16397 - DNA, 2802 bp, synthetic construct
  misc_feature 1..2802: note = Description of Artificial Sequence: Synthetic coding sequence
  source 1..2802: mol_type = other DNA
atggcagatggcggggccgattctgccgcccagcgactgcccgaagggccgggaagagtcgctcccggaagagatcttggagctccggctgggagtatgggcgccgccagctgtgaggatgaagagctcgaatttaagctcgtttttggagaggaaaaagaggccccccccttaggcgctggagggctgggggaagagctggatagcgaggacgccccaccctgttgcaggctggcactgggcgagccaccgccttacggcgctgctcccattggaatcccaaggccacccccaccccgccctggaatgcacagtcccccacctcgccctgcccctagcccgggtacttgggaaagccaacccgctaggagcgtaaggttgggaggacccggaggcggtgctgggggtgcgggcgggggccgcgtgctggagtgcccctctatcaggatcacgtcgattagccctaccccagaaccccccgccgctcttgaagataaccccgacgcctggggtgatggttcgccccgtgactacccaccaccagagggatttggcggctacagagaagctggcggccagggcggaggagcctttttcagtccaagtcccggatcatcttctctatctagctggtcctttttctctgacgcatcggacgaagccgcgctgtacgcagcttgcgacgaagtggagtccgagctgaacgaagccgccagtcgatttggactgggatcccctttaccctcgcctcgtgctagccccagaccctggacccccgaggatccctggtccctgtatggtccttcacctggaggcagaggccccgaagattcttggctgcttctatccgcgcctggtccgacccctgcaagtcctcgcccagcttcaccctgcggtaaacgccgttactcgagcagcgggacccccagttcagcgagcccagcactgtcaagaaggggaagcctcggcgaggagggtagtgagcctccacctcctccgcccctgccactggccagggaccccggcagtcctggcccctttgactatgtgggagctcctcccgctgagtccattcctcaaaagaccagaagaactagctcggagcaggcagttgccttgcctagaagtgaagagcctgcttcctgcaatggtaaattgcctctgggtgccgaagaatcagtggccccgcccgggggcagccgcaaggaggttgcagggatggattacttggctgtgccctcaccacttgcctggtcaaaagccagaattggaggtcattcccctatattccgaacctctgccttaccccccctcgattggcctctgcccagtcaatatgaacagctggaacttcgcattgaagtccagcccagggcgcaccatagggcccactacgagactgaaggcagtcgaggggcagtgaaggcagccccaggagggcatcctgttgtgaagttactggggtacagcgaaaagccacttaccctgcagatgttcatcggcactgcggacgaacggaacttacggccccacgcgttttatcaagttcaccgtatcaccggcaagatggtggcaaccgcgtcatacgaggccgttgtgtccggtacaaaagttctcgagatgacccttctgcccgaaaacaacatggcagccaatatcgactgtgcagggatcctcaagcttcgtaatagcgatattgagctgcgtaagggtgaaaccgatattgggcggaaaaacacccgggtgagattggtcttccgggttcacgtgccacagggcggcggcaaagtcgtctccgtccaggcggcaagtgtcccaatcgaatgcagtcagcgatccgcgcaggagctcccacaggtggaagcctactcacccagcgcatgctccgtacggggaggggaggaattggttctgaccggatctaactttctcccggacagcaaagtcgttttcattgaaaggggaccagacgggaaactccaatgggaggaggaagccaccgtcaacaggctgcaatcgaatgaggtgacccttacgcttactgtgccagaatattctaacaagcgggtgtcaaggccagtgcaagtgtatttctatgtgagtaatggacgcaggaaacgcagtcctacccaaagttttagattcctcccagttatctgtaaagaagagcctttgccagacagcagcctgcgcggctttccaagtgcctccgccactccattcggaaccgacatggacttctctcctcctcgccccccttacccatcttacccccacgaggatccagcctgcgagaccccttatctttcagagggcttcgggtacgggatgcctcccctgtacccccagaccggccctcctccaagctatcggcctggcctgagaatgttccctgaaacaaggggaaccacagggtgtgcccagcccccggccgtcagctttctgcccagacctttccccagcgacccttatgggggcagaggcagttcattttcgctgggtctccctttttcacctccggccccctttagacccccccccctccccgcttctccgccattagagggccctttcccgagccagagcgacgttcatcccctaccagcagaaggttataataaggtaggtcccggctacggccccggcgagggagcgccagagcaggagaaaagcaggggtggatattcatctggatttcgcgatagcgtaccaattcaaggaattacgcttgaggagggtgggtgcggcacagggggctgtgaatgcgagtgcgtgcaggaaatcgcacttcatgtatgttag

SEQ ID NO: 16398 - DNA, 2481 bp, synthetic construct
  misc_feature 1..2481: note = Description of Artificial Sequence: Synthetic coding sequence
  source 1..2481: mol_type = other DNA
atggccgacggcggtgccgactcagctgcccagagactgcccgagggccctggccgggtcgcacccggtcgcgacctgggggcacctgcgggcagcatgggtgcagcttcttgtgaggacgaggagttggagttcaaacttgtctttggggaggaaaaagaagccccaccactgggggccggggggctcggggaggagcttgacagcgaggatgcgcccccttgctgtcgcctggccctgggagagcctcctccatacggcgctgccccaattggaataccccggccacctccaccacgacctggcatgcatagtcccccacccaggcccgcaccaagcccaggaacatgggagtcccagcccgcacgcagcgttcgcttggggggtcctggaggcggggccggaggggcgggggggggccgggtactcgagtgcccgagcatcaggatcacaagcatttctccaacacccgaaccaccagctgctttggaagataatcccgacgcatggggcgatggctccccccgtgactacccgcctcctgaggggtttggcgggtatagagaagccggaggccagggtggaggcgcatttttttcgccctcccccggaagcagttccttgtccagttggagttttttctctgatgcctcagacgaagcagcgctctatgccgcctgcgatgaagtcgagtccgaattgaatgaagcagcttctaggttcggactcggctccccactgccctccccgagggcaagccctagaccttggaccccagaagacccttggagcctttacggacccagtccaggcggacgcgggccagaggactcctggctgctgctttcggcgcccggacctacacctgcaagtccccggcccgctagtccatgtgggaagcgcagatatagcagctccgggaccccctctagcgcttctccagctctgtccagacggggatctcttggggaagaggggtccgaacctccacctccacccccactcccactagcacgcgaccccggctcaccaggccctttcgattatgtaggagccccgcccgcggaatccattcctcagaagacacggaggacaagtagcgaacaggccgtggctctgccgcgctccgaggaaccggcttcgtgcaacggaaagttgccgttgggagccgaggaatctgtagccccacctggcgggagtcgcaaagaggtagctggtatggactatttggccgtgccctcgccattggcctggtcaaaggccaggatcgggggccactctcctatatttcggacatccgcactacctccactggattggcccctgccatcccagtacgaacagcttgaactacgcatagaggtgcagcctagggcccaccatcgagctcattacgaaacggaaggctctcgcggagccgtaaaagcagccccaggggggcaccccgtcgtcaaactgctcggatactctgaaaagccccttactctacagatgttcatcggcactgcagatgaacgcaatctgagaccccatgctttctatcaggtccacaggatcacaggaaaaatggtagctactgcttcttacgaggctgtggtgagcgggaccaaagtactggagatgacactcctcccagagaacaacatggcagcaaatattgactgtgcaggaatcctgaagctgcgcaactccgatatcgaactaagaaaaggcgaaacggacattggccgcaagaacacacgagtacgcctcgtgttcagggtgcatgtcccacaaggcggagggaaggtcgtgtccgtgcaggccgcctctgttcctatcgagtgtagccagcggtcagcccaagaattacctcaagtggaggcatacagtccctctgcttgtagtgtgagaggaggggaagagcttgtgctgaccggttctaacttcttgcctgattcgaaggtcgtgtttatcgaaagaggaccagacggcaaactgcagtgggaggaagaagcaacagtgaatagactgcagtccaatgaggtgacccttacccttacagtgcctgagtattctaacaaacgggtgtctcggcctgtgcaggtgtatttctacgtaagcaacggaaggaggaaacggtcacctacccaatccttccgcttcttgccagttatctgcaaagaagaacctcttcccgactcctccctgagaggctttccatcagcatctgctacacccttcgggaccgatatggatttcagtccccctcgccctccctacccaagctatcctcacgaggaccccgcatgcgaaaccccttacctctctgaaggttttggctatggaatgccgcccctgtatcctcagacgggacctccgccttcctatcgcccgggtctgagaatgtttcctgagactaggggcacgactgtgtcagaaataattggtcgtgatctgtctggattcccagccccccccggggaagaaccccctgcttag

SEQ ID NO: 16399 - DNA, 2706 bp, synthetic construct
  misc_feature 1..2706: note = Description of Artificial Sequence: Synthetic coding sequence
  source 1..2706: mol_type = other DNA
atgggtgccgcctcctgtgaggacgaggaactggaatttaagttggtgttcggcgaggagaaagaagcgcccccccttggcgcaggcgggttgggggaggagctggactccgaggacgcacctccctgctgtcgcctagccctgggagagcccccaccatacggtgcagcccccattggcattccacgacctcctccgcccagaccaggaatgcattctcctcctccgcgtccagctccctcacccggaacttgggagtctcagcccgctagatcagtccggcttggagggcctggaggcggagccgggggagcaggtggggggagagtgttggagtgccccagcatccgtatcacctccatcagtcctaccccagagccacccgcggctttggaagacaaccctgatgcctggggagacggcagcccccgcgattatccaccaccagagggcttcgggggatacagagaggccggaggccaggggggaggagctttttttagcccgtctcctgggagttccagcttgagctcttggtcattctttagcgacgctagtgatgaggctgctttatatgccgcttgcgacgaggtggaaagcgaattaaacgaggcagcttcacgtttcggcctaggatctcccctgcctagtccaagagcctctccgagaccatggacacccgaggacccgtggtcactgtatggaccttcacctggcgggcgcggaccagaagatagctggctgttgctttctgcccctggcccgacgcccgcaagcccacgaccagccagcccatgtggcaagaggcgctactccagcagcggaaccccctctagtgccagtcccgctctgtcccggcggggctcattaggggaagagggaagcgagcctcctcctccacctcccctgcctctggcccgggaccccggatcaccaggtccctttgactatgttggtgcccctcctgcggagagcattcctcagaagaccaggcgcacgtcctcagagcaagctgtggcgttacctaggagcgaagagccagcgtcatgcaacggaaagttgccacttggggccgaggaatcggtagctccgcccggagggagtcgcaaggaagtggccggaatggattatcttgctgtccctagccctttggcatggtctaaggctaggatcggcggacattcccctatctttcgcaccagcgctctacctcccctcgactggcctttgccttcccaatacgaacagctggagctgagaatagaggtacagccacgggctcatcatcgggcccattacgaaaccgaagggtcccgtggcgccgtaaaggcagccccaggcggccacccagttgtgaagctcctaggttactcggagaagcccctgactcttcaaatgttcatcggtaccgctgacgaaaggaatctgcgcccccatgcattctatcaggtgcataggatcaccggaaaaatggtggccactgcttcctacgaagctgtggtcagcggcactaaggtcttagaaatgacactcttgccagaaaacaacatggccgccaatattgactgtgccgggatactgaagctgaggaattctgacatcgagttacgaaagggagaaactgacatcgggcgtaaaaatacccgcgtgagactggttttccgggtccatgtaccccagggggggggtaaggtggtctctgtccaggctgcatcagtgccaattgaatgcagtcaaaggtcggctcaggagctgccgcaggttgaagcctattctccttcggcttgtagcgtccgagggggtgaggagctggtcctaacggggtctaatttccttccggactccaaagtcgtgttcatcgagcgcggaccggatggtaagctgcagtgggaagaagaagctaccgtgaaccggctgcagtctaacgaggtgaccctgactctcaccgtgcccgaatacagtaataaacgcgtgagtaggccagtacaggtgtacttttacgtcagtaatggccgcaggaaaagatcgccaacccaaagttttagattcctacctgtgatttgtaaggaagagcccttgccagacagttccctgcgggggtttcccagtgcctctgccaccccctttggcaccgatatggacttttcacccccacgccctccataccctagctatcctcacgaggaccctgcttgtgaaactccctatctgtcggaggggttcggctatggtatgccacctctctaccctcaaaccggaccgcccccttcataccggccaggtttgaggatgtttcccgagacccgtggtactaccggctgcgcgcagccgccggctgtgtcattcttacctaggccttttcccagcgacccttacggggggcgaggctcttccttctccttaggacttcctttctccccacctgccccatttagacctccgccgttgcccgcttctcctccattggagggtccttttccttcccagtcagacgtgcatcccctgccagccgaaggatataacaaagttgggccagggtatgggcccggggagggcgccccagagcaggaaaaatccaggggaggttactcgtcaggattccgtgacagcgtacccatccagggtattaccctggaagagggtggctgtggtacgggaggatgcgaatgcgagtgcgtacaggaaattgccctccacgtgtgttag

SEQ ID NO: 16400 - DNA, 2499 bp, synthetic construct
  misc_feature 1..2499: note = Description of Artificial Sequence: Synthetic coding sequence
  source 1..2499: mol_type = other DNA
atgcactcgccacctcctagaccagcaccctcccctggaacttgggagagtcaacccgcccgatccgtgagactgggcggacctgggggtggagcgggtggcgctggcggaggccgtgttctggagtgtccgtcaatcagaattacgtcaataagtcccaccccagaaccgcccgccgctctggaggacaatcctgatgcatggggcgacggctccccacgtgattatccaccacccgaagggttcggagggtatcgggaggccggaggccaaggcggtggtgcgtttttctcccccagccccggctcttcttcgttgagtagttggtcattcttttccgatgctagcgacgaagccgccctgtacgctgcctgtgacgaggtagaatcagagctaaacgaggccgcatcccggttcggactcgggtcaccgttgccgagcccacgcgcctcaccccggccatggacaccagaggacccctggtcactctacgggccctctcccggaggtcgaggcccagaggactcatggctactgctgtccgccccagggcccacccctgcatctcctcggcccgctagtccgtgtggtaaacgacgctacagttccagcggcacaccttcgtccgcatctcccgctctgtcgagacgtggctccttgggtgaggaggggagcgagcccccgccccccccgccacttcccctcgcccgagatcctggttcccccgggccattcgactatgtcggcgcacctcccgccgaatcaataccacagaagactagacgcacttctagcgaacaagccgttgctctgccgagatccgaagagcccgcatcatgtaacggcaaattacctttaggagcagaggagagcgttgcaccacctggcggcagtcgaaaggaggtggctgggatggactacttagcggtcccatcccccctggcctggtccaaggcccgaattgggggccactccccaattttcagaacttctgcactgccccccctggactggcctttacccagccaatatgagcagttggaactccggatcgaagtacagccccgagcccatcaccgtgctcactacgaaaccgagggcagcagaggtgcagtcaaggccgccccgggcggacatccggtggtcaagctgttgggatactcagaaaagcctctcaccctccagatgttcatcggtactgctgatgaacgaaacctgcgaccacacgcattctatcaagtccaccggatcaccggcaagatggtagccaccgcctcctacgaggccgtggtatctgggacaaaggttttggaaatgacgctgctgcctgagaacaacatggccgctaacattgactgcgctgggatcttgaagctccggaactctgatatcgagctccggaagggagaaacagatatcgggagaaagaacacaagggttcgcctggtgtttcgggtgcatgtgccccagggaggcggaaaagtcgtgagcgtgcaggccgcatctgttcccattgagtgttcacagcgatccgcacaggaactgccccaggtcgaggcatatagcccttcagcctgttctgtcagaggcggagaagagctcgtgctcaccggatccaatttcttgcccgattcgaaagtggtgttcattgagcgggggcctgatggaaagctgcaatgggaggaggaagccaccgtgaatcgcctccagtctaatgaagtaactctcaccctcacagtacctgaatactccaataagcgcgtgtcacggccagtccaggtctacttttacgtgtccaacgggagaaggaagcggagccccacacaaagcttccggttcttgcccgtgatctgtaaggaagaaccgcttcccgattcgagtctccggggcttcccttcagcctctgctacccccttcgggacagatatggatttttctccgcctcggccaccttacccctcttaccctcatgaggatcccgcttgtgagacaccgtacctgtcagagggtttcggatatggtatgcctcctctgtatccccaaacaggccctccaccaagttacagaccaggcctgagaatgtttcccgaaactcgcggcactactggctgcgcccagccccccgcagtgtcctttcttcctaggccattcccgtccgacccatacggcggacgtgggtcttccttttcccttggcctgccgttttcgcctcctgctccattccgccctccaccactgccagcttctccgcccctggaaggcccattcccatcccagtccgacgttcatcctttgcctgccgaaggatacaacaaagtggggccagggtatggtcccggcgagggagcccccgaacaggaaaagagccgcggtggctacagtagcggcttccgggacagtgtccctatccaggggattaccctggaggaggtctccgagatcattggtagggatctctccggctttccagcccccccgggagaagagccacctgcgtag

SEQ ID NO: 16401 - DNA, 2385 bp, synthetic construct
  misc_feature 1..2385: note = Description of Artificial Sequence: Synthetic coding sequence
  source 1..2385: mol_type = other DNA
atgggtgccgccagctgtgaagacgaagagctcgagttcaagttggtttttggcgaagaaaaagaggcaccacctctaggtgccgggggtttgggcgaggaacttgattcggaagacgctccaccctgctgccggttggccctgggcgagccccccccctacggggccgctccgatcggcatccctaggcctcctccacctagaccaggcatgcactctccgcctccccgaccagctccaagcccaggcacatgggagagtcagcctgcacgctcagtgcgcctgggaggacccggcggcggggcaggcggagctggaggggggagagtgctcgagtgtccctctatacgcataacgtctatctcgcctacaccggagcctcccgcagctctcgaggacaatcccgacgcctggggtgatgggagcccacgtgactacccccccccggagggattcggaggctaccgcgaagccggggggcagggaggaggggcattcttctctccgagccctggctcctcatctctcagcagctggtctttcttttccgatgcctccgacgaagcagccttgtacgccgcttgtgatgaggtagagagcgaactgaatgaggccgcgtctcgtttcgggctcggcagtccacttcctagcccaagggccagtccccgaccatggacgcctgaagatccctggtctctctacggcccaagtcctgggggaaggggccccgaggattcatggctgctgctttctgccccaggtcccacacccgcaagccccaggccggcatcgccctgtggcaagaggcgttattcgtcctccggaacccctagttctgcctctcccgccctctcccgtaggggatctctcggggaggaaggctcggagccgccgccgcccccccccctgcctctggcacgggacccggggagtcctggcccttttgactatgtgggcgccccccccgccgagtccatcccgcagaagactcggaggacaagctcagaacaagccgtggctctgccccgatctgaagagcctgcttcttgcaatggaaagctgcctttaggtgcagaggagtccgtcgctccccctggaggctcgagaaaggaagtagccggaatggattatctggccgttcccagccccctcgcctggtccaaggctcgtatcggaggccattcccctatttttcgcacctctgcactgcctccccttgactggccactgcctagccagtacgaacagctggagctgagaattgaagtgcagccccgggcccatcaccgcgcgcattacgagacagagggatccaggggagctgtgaaagcagcaccaggtgggcatcccgtggtcaagctgcttggatacagcgaaaagccgttgacattacagatgttcataggcactgcagacgagcggaacctgcggccacacgcattttaccaagtccatcgcattacagggaaaatggtggccactgcttcctacgaggccgtggtatccggcaccaaggtgctggagatgactctattacccgagaacaatatggccgcgaacattgactgcgctggaattctgaagctccggaactcagacatcgagctgaggaagggggaaactgatattgggagaaaaaataccagagtgcgtctggtgttccgggttcatgtgccccaggggggcggcaaggtcgtaagcgtccaggccgcttccgttcctatcgagtgtagccaacggagcgcgcaagagctccctcaagtggaagcttattctccttccgcctgtagcgtgcgtggtggggaggagcttgttctcacgggatcaaactttcttccggattcgaaggtcgtttttatcgagcggggccccgatggcaagctccagtgggaagaagaggcaactgtgaaccggttgcagagtaatgaggtaaccctgactttaacggtccccgaatactccaataaacgggtctcccgacccgttcaggtgtacttttacgtgtctaacggccgacgcaagaggagtcccacacagagttttaggttcctaccagtcatctgtaaggaagagcctttaccagacagctccctgagaggcttcccttctgccagcgcaactccctttggtaccgacatggactttagcccccccagaccaccatatccatcttaccctcacgaggatcctgcatgcgagacaccatatctgtctgaaggattcggatacgggatgcctcctctgtaccctcaaacgggacctccaccttcatatcgcccagggctgaggatgtttcctgagacacgcggtacaactgtttctgaaattataggtcgagacctgtctggatttcctgccccccccggagaggagcctccggcttag

SEQ ID NO: 16402 - DNA, 2499 bp, synthetic construct
  misc_feature 1..2499: note = Description of Artificial Sequence: Synthetic coding sequence
  source 1..2499: mol_type = other DNA
atgcacagtcctcctcccaggcccgctcctagccctgggacgtgggagtcacaaccagccagatctgtcagattagggggccccggcgggggcgcaggcggggctggaggcggcagggtattggagtgtcctagcataagaatcacctcaatcagccccacaccggagcctcctgccgccctggaggataaccctgacgcttggggagatggttcacccagggactaccctcctcccgagggatttgggggctacagggaagcagggggacaggggggaggagcgttcttctccccaagcccaggcagctcctcattgagtagctggtctttcttctccgacgcttcagatgaggccgccctgtatgccgcttgcgacgaagtcgagtctgaactgaacgaggccgcttcacgtttcggtctgggctcgcccttaccatctccgcgggcaagccctcgcccctggactcccgaagacccatggagtctgtatggcccctccccaggaggacgcggaccggaggactcatggttattgctgtcagcgcctgggcctaccccagcttcccctagaccagctagcccctgcgggaagaggcggtactcatcctcaggaacaccctccagcgctagccctgcactcagtcgccgcgggagtctgggagaagagggctctgagcctccaccaccaccgcctctgcctctcgctcgagaccccggaagtccaggacctttcgactatgtgggtgcgccgcctgctgagagcatcccccagaagacaaggcgcaccagctctgagcaggcagtggccttgccccgctcagaagaacctgccagctgcaacggaaagttgcccctcggggccgaagagtcagttgctccccccggagggagccgaaaggaagtagctggcatggactacctggccgtcccttcccctctggcctggtctaaggcaagaattggcggccattctcctatcttccggacctcagctctcccacccctcgattggccccttccatcacagtacgagcaactggagttgagaattgaagttcaacccagggctcatcacagagctcactacgagaccgaagggtcccggggggctgtgaaggctgcccccggcgggcacccagttgtgaagcttctgggttactctgaaaagccactcacgcttcagatgtttatcggcaccgccgacgagaggaacctcaggccccacgccttttatcaggtccacagaattactggcaaaatggttgcaaccgcctcgtacgaagccgtcgtttctggcaccaaggtcttagaaatgactctcctcccggagaataacatggctgcgaacatagactgtgcaggaatccttaaattgcggaattccgacatagaattgagaaagggggagactgatatcggacgcaagaatacccgggttcgactcgtttttcgcgtgcacgtgccgcaaggtgggggaaaagtggtgagtgtacaggcagcaagcgtgccaatagagtgctctcaacggtccgcccaggagctgccccaagtcgaggcatactccccttccgcgtgttctgtaagggggggcgaggagctcgtcctgaccggctctaattttctaccggattcaaaggttgtgtttattgaacggggaccggacggaaaactgcagtgggaagaggaagccaccgttaacaggctgcaaagtaatgaagtaacactcacacttaccgtgccggagtactccaacaagcgcgtgagcaggccggtgcaagtctacttttacgtgagcaatgggagaagaaaaaggagccccacccaaagtttcagattcctccccgtgatatgcaaagaggagccactacctgactccagtttacgagggtttccctccgcttcggcaacaccttttggaaccgacatggatttctcgccacccagaccaccctacccaagttacccgcacgaagaccctgcgtgcgaaaccccgtacttgtccgaaggctttgggtacggtatgcctcccctgtacccacagactggcccacctccttcttaccgtccgggcttgcgcatgtttccagaaacaagagggactactggctgcgctcaaccacccgcggtgtcattcctaccacggccattcccctctgacccgtacggaggcagaggctcttcctttagcctgggactgcccttctcacctcccgctccctttaggcctccgcctctgccggcctctcctccgcttgagggacctttcccctctcagtccgacgtgcatccacttcccgcagaagggtataacaaggttgggcccggatacggcccgggagaaggagcccctgaacaagagaagtcaagagggggctattcctctggattccgagattctgtgcctatccagggaattaccttggaggaggttagcgagatcatagggagagatttgtccggttttccagcaccccccggcgaagaaccaccagcttag

SEQ ID NO: 16403 - DNA, 990 bp, synthetic construct
  misc_feature 1..990: note = Description of Artificial Sequence: Synthetic coding sequence
  source 1..990: mol_type = other DNA
atgtttattggaaccgctgatgaacggaacctgaggcctcatgccttttaccaggtgcaccgcatcaccggtaaaatggtcgctacagcctcctatgaggctgtggtttctggcacaaaagtattggagatgaccctcttacccgagaacaatatggcagccaacattgattgcgccggaatcctcaaattgcggaactccgacattgaactacgcaagggagagactgatataggcaggaagaatacacgagtacgcttggtttttcgcgtgcacgtgccccagggaggcgggaaggttgtttccgtccaggcggcttccgtcccaatcgaatgctcccagagaagcgcacaagagttgccccaggtggaagcctactcgccctccgcttgcagtgttaggggaggcgaagagctcgtgctgacaggatctaatttcttacccgacagtaaggttgtgttcatagagagagggcccgatggcaaactccagtgggaggaagaagccacggttaataggctgcaatccaatgaggtgaccttgacactcaccgtccccgagtactctaataaaagagtctctcgcccagtacaggtttacttttatgtgtcgaacggccggcggaagcgtagtccaacccaaagttttcgctttcttcccgtcatttgcaaggaagagccgctccctgattcaagtttacgcggatttccatctgcctctgccacaccattcggtaccgacatggatttttccccacctcgccctccttatccttcctacccccacgaggatcccgcctgtgagaccccctatctctccgagggctttggctatgggatgcccccactttatcctcagaccggccctcccccttcataccgcccaggcctccggatgttccccgagacaaggggaactactgtctcagagattatcgggcgtgacctaagtgggtttcccgcgcctcctggtgaggaaccccccgcatag

SEQ ID NO: 16404 - DNA, 2574 bp, synthetic construct
  misc_feature 1..2574: note = Description of Artificial Sequence: Synthetic coding sequence
  source 1..2574: mol_type = other DNA
atgatcacaaccttaccttcactcctgccggcaagcttagcgtctatctcgcatagagtgacaaacttacctagcaactcgctctctcacaatcctggcctcagcaagcccgatttcccaggtaatagctctcctggtcttccttcaagcagtagccccggcagagatctgggagctcctgcagggtccatgggtgccgctagctgcgaagatgaagaactggaattcaagcttgtttttggtgaggagaaagaggccccgccattgggcgcaggcgggcttggcgaagaattagactccgaggacgcccccccttgctgcaggttggcacttggggaaccccccccctatggtgctgcccccatcgggatacctagacccccacctccaaggcctggaatgcatagccctccacccaggcctgccccaagccccggcacctgggaaagccaacccgccaggtctgtccggctcggaggccccggggggggggctggtggagccgggggaggaagagtgctggagtgcccgtctattcgcatcacgtcgatcagcccaacacctgaaccgcccgctgccctagaggataatcctgacgcttggggggacgggtctccccgggattacccccctccggagggttttggcggctacagggaagccggtggacagggagggggcgccttcttctcccctagccctggcagctccagcctgtccagctggagtttcttctccgacgcctccgatgaggccgctctatacgccgcctgcgacgaagtggagtcagaattaaacgaggccgctagccggtttgggttgggttcccctctgcccagccctcgcgcgagcccccgcccctggacaccggaggacccgtggtcactctatgggccttctcctggcggccggggtcccgaagatagttggctgctcctctctgcccctgggcccacaccagcctccccccgacctgcttcgccttgtggaaagcggaggtatagtagctcaggtacccccagctcagcctcccccgctctgagtcggagaggcagtctgggcgaagaagggagtgaaccgcctccacctccacctttgccccttgcccgtgatccaggatcccccggaccatttgattacgtcggggctccaccggctgaatcaattcctcaaaaaacccggcgcacgagtagcgaacaggccgtggcgctgcccagatcagaggaaccagcttcctgcaatggaaagctgccattaggagcagaagaaagcgtggccccccctggtggaagtcggaaggaggtggcaggtatggactatctcgccgtaccctcacctctggcttggtctaaagcccgtattggtggacactcacccatcttcaggacctcggccttgccacccctggactggccactcccctcccagtatgagcagctggaactcaggattgaagtgcagccacgggctcatcatcgggcgcattacgagactgaaggctcccgaggcgccgtcaaggcggctccgggaggccatcctgtcgtaaagctactgggttatagcgagaaacccctgacactgcaaatgttcataggaacagccgatgagcgaaacctgaggccgcacgccttctaccaagtccatagaatcaccggcaaaatggtggccaccgcgagctacgaggcagtcgtaagcgggaccaaagtcctggagatgacccttctccctgagaataacatggctgctaatatagactgcgctgggatccttaagttgcgtaattcggacattgaactgcggaaaggtgaaacagatataggacggaaaaatacccgcgtgagactggtgttccgcgttcacgtcccacaagggggtggaaaggtggtgagtgtccaagcagcctccgttcctattgaatgctctcagcggtccgcgcaggagttgccacaggtcgaagcatacagcccgtcagcttgctcggtgcggggcggtgaagagcttgtcttaacaggaagtaatttcctgcctgatagtaaggttgtcttcattgagagagggcccgatggcaagctgcagtgggaagaggaagctaccgtgaatcggttgcagagcaacgaagtcaccctgaccctcacggtacccgagtatagtaataaaagggtgagccgcccagtgcaggtatacttttatgtttccaatggccgcagaaaacgatcacctacccagtcttttcgttttctgcccgtcatttgtaaggaagagccactgcctgatagctcgctgcgcggttttccaagcgctagcgctacaccatttggcacagatatggatttcagcccacctcgccccccctatccctcctacccccatgaggaccccgcctgtgagacaccatatctgtcggagggctttgggtacggtatgccccccctttatccacaaacaggaccaccgccttcttaccggcctgggcttcggatgttccctgagactagagggaccacggtgtccgaaattataggcagggatctgagcgggttccctgcccccccaggtgaggaaccacccgcctag

SEQ ID NO: 16405 - DNA, 2175 bp, synthetic construct
  misc_feature 1..2175: note = Description of Artificial Sequence: Synthetic coding sequence
  source 1..2175: mol_type = other DNA
atgcacagccctcctcccagacctgcaccctcacctggaacctgggagtcccaacccgcgagatctgttaggctcggagggccaggcggcggtgccggaggagccgggggaggacgtgttttagagtgcccctccatccggatcactagcattagtcccactcctgagcctcctgcagcgctggaggataatcccgacgcctggggcgatggcagtcctagagactatccccctcccgagggatttggcggataccgggaagcaggagggcagggagggggcgcattcttttctccctcccctggcagttctagtctcagcagctggagttttttcagtgatgccagcgatgaggccgccctgtacgctgcctgcgacgaagtagaaagcgagctcaatgaagcggccagccgctttggcctgggctcccctctccctagtcctcgggcatcgccacgaccctggacccccgaagacccttggagtttatatgggccttcacccggcggaagagggcctgaggactcttggctgttactgagtgctccaggccctacacccgcatccccgcgcccggcctctccttgcggtaagcgcaggtactcctccagtggtactccttcaagcgcctccccggcgttgtcacgccgtggctccctcggcgaggaaggctccgaacctccaccacctcctccgctgccgcttgcccgtgatccgggcagtccaggaccctttgactacgtgggagcgcctccagccgagagcattcctcagaagaccaggcgcacatcttcggagcaggccgtggcactcccaagaagcgaggaacctgcctcatgtaatggcaagctaccattgggggccgaggagagcgtagcgccacccggaggttctcggaaagaagtcgctggaatggactacctcgccgtgccctcaccacttgcatggtcaaaggcacggattgggggtcatagccctatctttcggacctccgcccttcctcctctggactggccattgccatctcagtatgaacaactcgagctgagaatcgaagtgcagccacgtgcccaccaccgcgcgcactatgaaaccgaaggaagcaggggcgcggtaaaagccgccccaggcggtcaccccgtggttaagctacttgggtattccgagaagccactgacactgcagatgtttattggaacagccgacgaaaggaacctgaggcctcatgccttctaccaggtccaccgaattacaggcaagatggtcgccacagcctcttatgaggcagtcgtatccggcaccaaggtgttggagatgacgcttttgccggaaaacaacatggccgcgaacatagactgcgctggtatcctgaaactcagaaacagtgacattgagctccggaagggagagactgatatcggtagaaagaacacgcgtgtgaggctggtttttagggttcacgtccctcagggcggcggcaaagtggtatcagtgcaagcggcttctgtgcccatcgaatgttcacaacgcagcgcccaggaattgccacaggtggaggcctacagcccttctgcctgctccgtcagaggaggagaagagttggtgctgacaggcagtaattttctgcctgactccaaggtggttttcatcgaacgaggccccgacggcaagcttcagtgggaagaagaggccaccgttaatcgcctgcaatctaatgaggtaactctgactctgacagtaccagaatactctaacaagcgggttagcaggccagttcaggtctacttctatgtcagtaacggcagaaggaaacggagccccacacagagctttcgtttcctgcccgtgatttgcaaagaggagcccctgccggattcctccctgcgtggctttccatccgcttctgcgactcccttcggcactgatatggacttcagccctcctcgccctccttatccctcctacccacacgaggatcccgcctgtgaaaccccctacctgtccgaaggctttggttatggcatgccacctctgtacccccaaactggtccacctccatcctaccgaccagggttgcggatgttcccggaaacaagaggaacgacagttagcgagattatcgggcgagatttgagtggcttccctgctccaccaggggaggaaccccccgcgtag

SEQ ID NO: 16406 - DNA, 432 bp, synthetic construct
  misc_feature 1..432: note = Description of Artificial Sequence: Synthetic coding sequence
  source 1..432: mol_type = other DNA
atgggggctgcttcctgcgaggatgaagaactcgaatttaagctggtattcggcgaagagaaagaagctcctccacttggggcaggcggcttaggagaagagctcgactccgaagacgcacccccttgctgcaggctggcccttggggaaccccccccttacggtgcggcacccattggaattccgagacccccaccccctcgacccgggatgcacagcccaccccccaggcctgcaccctcgccagggacgtgggagtctcagcctgcgcgatctgtgagactcggcggccccggcggcggagcaggtggagccggcggcggcagggtgctcgagtgtccctctatcaggataacatcaatctcccctacccccgaaccccctgctgccttagaggataatcccgacgcctggggcgacgggtctccgtag

SEQ ID NO: 16407 - DNA, 2424 bp, synthetic construct
  misc_feature 1..2424: note = Description of Artificial Sequence: Synthetic coding sequence
  source 1..2424: mol_type = other DNA
atgctgtctggacgtgatctgggcgcccctgctggcagcatgggtgcagccagttgtgaggacgaggagctcgaatttaagttggtgttcggggaggaaaaggaggctccccctctcggggctggtggcctgggagaagagctggactccgaagatgcccctccgtgttgtagactagccctaggcgagccacccccctacggggcagctcctattggaatcccaagaccgcctcccccaagacccggcatgcacagccctcctccacgtccagcaccaagtcctggcacctgggagtctcaacccgcaagaagcgtcagactgggcggacccggtgggggagcaggaggcgcagggggaggaagagtcctggagtgtccatctattcgtattacatccatctcgcccacccctgagcctcctgctgctctggaggacaatcctgacgcctggggggacggatcccctagggactatccacccccagagggcttcggcggatatagggaagccggcggtcagggtggcggagcattctttagcccttccccaggttcatcaagcttatcaagctggagctttttctctgatgcctcagacgaggcagccctgtacgcagcgtgcgatgaggtagaatcagagctgaacgaggccgcatccaggttcggactgggatcaccactcccttccccaagggcttccccacgaccttggacaccagaggacccttggtcactgtacggcccaagtcccggcggcagaggacctgaggatagctggctgctgctaagcgctcctggcccaacacctgcatctccacggcccgcatcaccctgtggtaaaagacggtactctagttccgggaccccctcgtcagcttcacctgcgttaagtcggcgcggtagcttgggtgaagaggggtctgaaccccccccgcctcctccattgccactcgctagagacccaggctcccccgggccttttgattacgtgggcgcaccgcctgccgagtcaatacctcagaagaccaggcgaacttcttccgagcaggctgttgccttgcctagaagcgaagagcccgcaagctgtaacgggaaactgcctctgggggctgaagagagcgtcgcacctccaggcggctctaggaaggaagtggccggcatggattatctggccgttcctagtccattggcctggagcaaggctagaataggtggacacagtcccatcttcagaaccagtgcactgcctccattggactggccattaccaagccaatatgaacagctagagctgcgcatcgaagtccaaccgagggcacaccatcgggctcactatgagaccgaaggctcaagaggcgccgtgaaagccgccccaggaggccatcccgtggtgaaactgctgggctactctgaaaaaccgttaacactccagatgttcattggcactgccgacgaacgaaatctcagaccccatgcattttatcaagttcatcgtataaccggtaagatggtagccactgccagttacgaggccgtggtctccggtaccaaggtgcttgaaatgacactactgccagagaacaacatggctgctaacatcgactgtgccggaatccttaaactgcgcaacagtgatatcgagctgagaaaaggtgagacagacatcggccgtaaaaacaccagagtgagactcgtatttcgtgtccatgtgccacaggggggcgggaaagtagtgtcagtgcaggctgcgagcgtgcccatcgagtgctctcagagatccgcgcaggaacttccccaagtggaggcttactctccctccgcctgttccgtaaggggtggagaggagctggtgcttacggggagcaactttctgcccgatagcaaagtggtgtttattgaacggggacctgatggaaagctgcagtgggaggaagaagcaaccgtcaatcggctgcagtctaatgaggtgactttgaccttaacagtccccgagtactccaacaagagagtgagcaggccggtacaagtgtatttctacgtcagcaacgggcgcagaaagcgctctccaacccaatctttccggtttctcccagtaatctgtaaggaggaacccctacctgactcaagtctgcgggggtttccatccgcatccgctactccttttggaaccgatatggacttctcgccccctaggcccccatacccatcctacccccacgaagacccagcctgcgagacaccatacctttctgagggctttgggtacggaatgccaccactgtatccgcaaacgggaccccctccgtcctacaggcccggtctgcggatgtttccagagactcgtggcactactgtttctgagatcatcggtcgagatctgagtggattcccagctcctccaggggaagaacctccagcctag

SEQ ID NO: 16408 - DNA, 1311 bp, synthetic construct
  misc_feature 1..1311: note = Description of Artificial Sequence: Synthetic coding sequence
  source 1..1311: mol_type = other DNA
atgttcatcggaactgctgatgagcgcaaccttcgcccccatgccttttatcaggtgcataggatcactggcaaaatggtggccacagccagctatgaggccgtcgtgtcagggactaaggtcctagagatgaccctcctccccgagaacaacatggcagccaacatcgactgtgctgggattctgaagctgaggaactccgacattgagctccgcaagggggagactgacattggacgcaagaataccagagtaaggttggtgttcagagtccatgtgccacaaggaggcggaaaagtggtgagcgtacaggccgctagcgtgccaatcgagtgcagtcagcgcagcgctcaagagctacctcaagtggaggcctattcgccgagtgcttgctcagtccggggcggcgaagaattagttctcacaggatccaacttcctacccgatagcaaggttgtgttcattgagagaggtcccgacggtaagctgcagtgggaagaggaggcaactgttaatcggctccagagcaacgaagtgaccctcacactgaccgtcccagagtatagcaataaaagggtgagtaggccagtgcaggtctacttctatgtttctaatggcaggcgaaagagatcaccaactcagtccttccgattcctcccagttatctgcaaggaagagccccttcccgactcaagccttcgaggatttccgtcagcttccgctactccatttgggacagatatggacttctcccccccaagaccgccataccctagctatccgcatgaggaccctgcttgcgagactccttacctgtcagagggcttcggatacgggatgccccccctgtacccacagacagggcccccccctagctacagacccggccttagaatgtttccagagacgaggggcactactggatgcgcgcaaccacccgccgttagctttttacctcggccattcccatcagatccctacggtggacgtggaagctcgttcagcttgggtctacccttctccccgcccgcaccttttcgccctcccccccttccggctagcccaccactggaagggccgttccctagccagagcgacgtgcaccccctgccagcagaagggtacaataaagtgggccccgggtacggcccaggggagggtgccccggaacaggagaaatctagaggcgggtactcaagcggatttagggactcggtgcctattcaaggaattacccttgaggagggaggatgtggaaccggggggtgcgagtgtgagtgcgtccaggaaatcgccctgcatgtatgttag

SEQ ID NO: 16409 - DNA, 570 bp, synthetic construct
  misc_feature 1..570: note = Description of Artificial Sequence: Synthetic coding sequence
  source 1..570: mol_type = other DNA
atggactttagccctcctagacccccttaccctagctacccccacgaagacccggcatgtgaaacaccttacctgtctgaaggctttggctacggaatgcctcccctttaccctcagactggcccccccccctcatacagacccggtctccggatgttccctgaaacgagagggactacaggatgcgcgcagccccccgctgttagtttcctgcctcggccctttccatccgacccctacggcggccggggctcaagcttttctctcgggctcccctttagccccccagcaccatttcggcctccaccccttcccgctagcccacctctcgagggacccttcccctcacagtctgatgtgcatcctctgccagccgagggttacaataaagtgggaccgggatatgggccaggggagggcgcccctgagcaggagaagagccgaggaggctactcaagtggattcagggatagtgtaccaatccaggggattacacttgaagagggcggctgcggtaccgggggatgtgagtgcgaatgcgtgcaggagattgctctccacgtctgctag

SEQ ID NO: 16410 - DNA, 2673 bp, synthetic construct
  misc_feature 1..2673: note = Description of Artificial Sequence: Synthetic coding sequence
  source 1..2673: mol_type = other DNA
atgcccgcttcaatatcatccattttcccagggccaaccctgctgctctcgtgtggcagcgaagagctggattctgaagatgccccaccctgctgccgactggccctcggcgaaccccccccgtacggcgccgcacccatcggcattccaaggccgcccccaccaaggcccggcatgcactcaccacctccaagaccagccccaagccccgggacatgggagagccagcctgcgaggagcgtccggctgggaggcccaggcgggggcgctggaggcgcaggcggaggccgagtccttgaatgcccttcaatccggattacaagcatatctcccaccccagagccgcctgccgctctggaagacaaccctgatgcctggggtgatggctcaccaagggactaccctcctcccgagggcttcggagggtaccgggaagcgggcggccaggggggtggcgcattcttcagtccgtcccctggaagctcttcattatctagctggtcctttttttctgacgcctccgacgaggccgccctatacgccgcgtgtgacgaggtcgagagcgagttaaacgaagccgcctcacgttttgggctcggatccccactgccctccccccgggcatcgccacggccctggactccggaggacccatggtctctctacggcccatccccaggcgggcgcggccctgaggattcttggcttctactgagcgcacctgggccaacgcccgcatcaccacgccctgcatcaccctgcggaaagagaagatacagcagctccggaacacctagctcagcctcgcccgccctgtcccggagaggctctcttggcgaggagggaagcgaacctccccctcctccacctcttccactggcccgggacccgggctctcctgggccatttgattacgtcggggcccctcccgctgagtccatcccgcaaaaaaccaggcggacaagttcggagcaggccgtagccctgcctcggtcagaagagcccgcctcatgcaacgggaagctgcccctcggagcagaagaatcagtggctcctccaggcgggagtcgcaaagaggtggccggcatggattatctggcagtgccctcacctctggcctggtccaaggctcgcatcggcgggcactcgcctatttttcggacttccgcattaccccccttagactggccactccccagccagtacgagcagttagagttaaggatcgaagtgcaaccaagagcacaccacagagctcattacgagactgaaggtagcaggggggcagtgaaagcagcccccggggggcacccggtcgttaagctgttggggtatagcgagaagcctttgacactacagatgtttattggaaccgctgacgaaagaaaccttaggccccacgcattctatcaggtgcacagaattacgggtaagatggtcgccaccgcatcctatgaggcagtcgtgtctgggaccaaggtgctagaaatgacattgctgccagagaacaacatggctgctaatatcgactgtgcggggattttgaagttgagaaacagcgacatcgagctgagaaaaggggaaactgacatcgggcgaaagaatacccgggtgcggctggtgttccgggtacacgtccctcagggagggggcaaggtcgtgtctgtgcaggctgcctccgtgccaattgagtgctcccagcgctctgcccaagagcttcctcaggtggaagcatattctccttctgcttgctccgtgcgtggcggagaggaattggttctgacaggtagcaacttccttcccgactccaaggtggtgttcattgaacgcggtcccgacggaaaactgcagtgggaggaggaggccactgtaaatagactgcaaagcaacgaagtaaccctgacactgacggtgcccgagtattctaataagcgggtgtcaaggccagtccaggtgtacttttacgtatccaatgggcggagaaaaaggagtccaacccagtcttttagatttctgccggtcatttgtaaggaggagcccttacccgactcctcgcttcgagggttccctagtgcatcagccactcctttcggcacagacatggacttttcacctccccgtcctccatatccctcttacccccatgaagatcctgcctgcgaaactccttacctgtcggaaggctttggctatggcatgcctccgctttaccctcagacaggcccaccgccctcttaccgccctggcctgcgcatgtttcccgagactagaggcactaccgggtgcgcacagcccccggctgtgtcctttctgccacgccccttcccaagtgatccctacgggggccgcggctctagcttttcactcggactaccttttagcccccctgcaccattcaggccacctccactgcccgcctctcccccactcgaaggaccattcccatcacagagtgacgtccaccctctgcctgcagaggggtataacaaggtagggccaggctatggccccggagagggtgcgcctgagcaggagaaatcaagaggtggatatagtagcggatttcgtgattcagtgcccatccaaggcatcactctggaagaggtttccgagatcatcggccgagacctctccggcttccctgctccacccggggaggaacccccagcttag

SEQ ID NO: 16411 - DNA, 2748 bp, synthetic construct
  misc_feature 1..2748: note = Description of Artificial Sequence: Synthetic coding sequence
  source 1..2748: mol_type = other DNA
atgctcagcggccgggatctgggagcgcctgcaggaagtatgggggcggcttcatgcgaggacgaggaactggagtttaaactggtctttggcgaggagaaggaggctcctccactcggggccggcggcttgggtgaggagctcgactcggaagatgcacctccctgttgtagattagcgttgggtgaaccaccaccctatggtgccgctcctattggcatcccaagacctcctccaccacggccaggaatgcactctcctcccccgcgtcccgcgccctcccccggtacctgggaaagccaacctgctagaagcgtgcggctgggggggcccggagggggggccggaggagccggtggtgggagagtcctggagtgcccttccatcagaattaccagcatctcacccacccctgagccgcccgccgcgcttgaagataacccagacgcttggggcgatggctcccctagagactatccgcctccggagggatttggtggttatcgcgaggctggcggtcaaggagggggggcgtttttcagcccctccccgggctcttcctctttgtcctcctggtctttcttcagcgatgcttccgacgaggccgccctatacgccgcgtgcgacgaggtggaaagcgagctgaatgaggctgctagtaggttcggcctaggaagcccgctgcctagcccaagagctagtcccagaccctggaccccagaagatccatggagcctgtatgggcctagcccaggcggccgtggaccggaagatagctggttactgctctcagcaccaggtccaactcccgcatctccccgacctgcgagcccctgtggcaaacgccgctacagttctagcggaacaccaagctcggcttcgccggcgctgtcgcgccgcgggagcctcggagaggaaggatccgagcctccgcctcctccccctctacctctcgcaagagacccgggctcgccgggcccctttgattacgtgggggcgccccctgcggagagcatcccacagaagaccagaagaacaagcagcgaacaagccgtggcactccccaggagcgaagaacctgcctcatgcaacggcaaattgccattaggagccgaagagtccgttgcaccgcctgggggcagcagaaaagaggttgccggaatggattaccttgccgtgccttcgcccctggcatggtcaaaggcccgcatcggcgggcattctcccatcttcaggacatcagcgttgcctcccctggactggccacttcccagtcagtatgaacagctggagttgcgtatcgaggtgcagccacgagcacaccacagagcccactatgaaaccgagggctctagaggcgcagtgaaagcggcgccaggtggccatcccgtcgtgaagctccttggctattccgagaagcccctcacgctgcagatgttcatcggaaccgctgacgagaggaacctgcgacctcatgcattttatcaggtgcatcggataacagggaagatggtcgccactgcctcttacgaagccgttgtcagtggaactaaagtactggagatgaccctgttgcctgagaacaacatggcagcaaacatcgattgcgccggtatcctgaaactgcgtaactcggacatcgagctgcgcaagggagaaactgatatcggtcgtaaaaacacgagggtgcgtctggtatttcgtgtccatgtacctcagggaggagggaaagttgttagtgtccaggccgcttcagtgccaatagagtgcagccagcgttcggcccaggaactccctcaggttgaggcctactcccctagcgcctgcagtgtgagaggcggggaagagttggttctgacaggcagtaatttcctgccagattctaaagtcgtcttcatagaacgcggccccgatggaaaacttcagtgggaggaggaagcaacagtgaaccggcttcagtctaatgaagtcacactaacactgaccgtgccggaatatagtaataagagggtgagcagacctgtgcaggtgtacttctatgtatccaatggcagaagaaagagatcacctactcaatccttccgcttcctgcccgtgatctgcaaggaagaacctctgcccgactcgagtctacgaggctttccttcagcttccgccaccccatttggcaccgatatggacttcagtcctcctcgtcccccctatccttcttatcctcatgaagatcccgcctgcgagaccccctacctgtccgagggttttggctatgggatgcctccattgtatccacagacaggaccaccccccagctacagacccggactgaggatgttccccgaaactagggggaccactggttgcgcgcagccccccgctgtcagctttcttccccgccccttcccatccgatccatatggagggcgaggctcttccttttcactggggctgccttttagtccgccagcacccttcagacctccacctctgcctgctagtcctcccctcgaggggccgtttccgtcccaatctgatgtgcacccactgccagccgagggctacaacaaggtgggacccggttacggacccggagaaggggcgcccgagcaagagaagtctcggggaggttattctagtggtttcagggacagtgtgccaattcagggtatcaccctggaggaggtctccgagataattggacgggatctgagtggcttccccgctcctccaggcgaggagccgcctgcatag

SEQ ID NO: 16412 - DNA, 573 bp, synthetic construct
  misc_feature 1..573: note = Description of Artificial Sequence: Synthetic coding sequence
  source 1..573: mol_type = other DNA
atggacttttcaccccctcgacccccatatccatcatatccccacgaggatccggcctgtgagacaccgtatctgtccgagggatttggatacggtatgcctccactgtacccccagactggccctccgccctcatatcggcctggactgcggatgttcccggaaacgagaggaaccacaggttgcgcccaaccccctgctgttagtttccttccacggccattcccaagcgacccctatggtggacggggcagctccttcagcttgggcctcccattttctccacccgctcctttccgccccccacctctgcctgcaagcccaccactggagggtccgtttcctagccagtctgatgtgcatccactgccggctgagggctataacaaagtgggacctggttacggaccaggcgagggcgcaccggaacaggagaaatctcgagggggatattccagcggcttccgcgattctgttcctatccaggggattactcttgaggaggtgagcgaaataataggcagagacttgtccgggtttcccgctcctcccggcgaggagccgcctgcgtag

SEQ ID NO: 16413 - DNA, 2349 bp, synthetic construct
  misc_feature 1..2349: note = Description of Artificial Sequence: Synthetic coding sequence
  source 1..2349: mol_type = other DNA
atgcctgcatccatatcttcaatctttcccgggcccacgcttctgctcagttgcggctccgaggagttggactccgaggatgcccccccgtgctgtcgcctggctttgggggaaccccctccatacggagcagcaccaatcggaatcccgagaccacctccccccagaccaggtatgcacagcccgccccctcggcctgcccccagtccaggaacttgggaaagtcagcccgcccgttcagttaggctgggaggaccaggcgggggcgctggcggagccgggggcggacgggtgctagagtgtccaagcatccgcataacaagtatctcccctactcccgagcctccagccgccctagaagacaacccagacgcctggggcgatggctctccccgtgactatccccccccagaggggttcggcggctacagagaggccggagggcaaggcggcggggcctttttctctccaagtcccggctcaagcagcctatccagttggtcattctttagcgacgcttcggacgaggccgcactttacgccgcttgtgacgaggtcgagtctgaactcaacgaggccgccagcagatttggactggggtcaccactgccaagccccagggctagccctagaccatggacacccgaggacccatggtctctctacggaccatctcccggcggcaggggtccggaagatagctggttattactgtcagcccccggacccacacccgcttccccccgtccagctagcccctgtggcaaacggagatatagttcctcgggcacgccatcctccgccagtcccgccctttcccgaaggggctcccttggtgaggagggctctgagccaccccctcctcccccactgcctctagcccgggaccctggatcaccaggaccgttcgattacgtcggcgcgcctccagccgaatctatcccccagaaaactagacggacgtcttcagaacaagctgttgcactcccacggagcgaggagccagcctcctgtaatggaaaactgccattaggagccgaggagtccgtagctccacccggtggtagcaggaaggaggttgctggtatggattacttggcagtgcccagccccctggcttggtctaaagcaaggatcgggggccatagtcctattttccgcaccagcgcactccctcctttagactggcccctaccctcccagtatgagcagctggagctgcgaattgaggtgcagcctagggcccatcacagggcgcattacgagaccgaaggaagccggggggcagtgaaagcagccccaggaggacatccagtggtgaagttattaggctattcagagaaacctctcactcttcagatgtttatcgggacagcggacgaacgaaatcttcggcctcatgcgttttatcaagtgcataggatcactggtaaaatggtggccacagcaagctacgaggctgtcgtctcaggcacgaaggtcctggagatgaccttactcccagaaaataacatggccgcgaatattgactgcgccgggatcctgaagctaaggaacagtgacatcgaacttcgcaaaggggaaacggacattggcagaaaaaacacgagagtgaggctagtcttccgagtgcacgtgccgcaaggggggggtaaggtggtttccgtgcaggcagcatcagtaccaattgagtgttcacagaggtctgcccaggagctgcctcaagtcgaggcttactctccctccgcttgctcagtgagaggaggcgaggagctggtgctcacaggaagtaatttcctgccagactctaaggtagttttcatcgagaggggacctgacgggaaactccagtgggaggaggaggctaccgtgaacagattacagtccaacgaggtgacactgacactgacggtgccagaatacagcaataaaagggtgagcaggcccgtccaggtatacttctacgtgtcaaatggaaggcggaagcgcagccccacacagtcctttaggttcttacccgtcatatgtaaagaggagcctttgcccgattcttcactacggggcttcccaagcgctagcgcaactcctttcggcaccgatatggactttagtcccccacgccctccgtacccctcctaccctcatgaagaccctgcctgcgaaaccccatacctgtcagaaggcttcggatacggaatgcctccgctatacccccagaccgggcctcctccctcctacagacctggcctaagaatgttccctgaaactagagggacaacagtgtcagagatcatcgggagggacctcagtgggttccctgcacccccaggcgaggagccacccgcgtag

SEQ ID NO: 16414 - DNA, 2805 bp, synthetic construct
  misc_feature 1..2805: note = Description of Artificial Sequence: Synthetic coding sequence
  source 1..2805: mol_type = other DNA
atggccgacggaggcgctgatagtgcagctcagaggctccccgagggacccggacgggtggctccggggcgggacctgggggccccggcaggtagcatgggcgctgcctcctgcgaggatgaggagctcgagtttaagctcgttttcggggaggagaaggaggcgcccccacttggagccggcgggctgggtgaggaacttgactcagaggacgcccctccatgctgtagactggctttgggggagccaccaccttacggagctgcacccattggcataccacggccacctcccccgcgccccggaatgcacagtccccccccacgccctgctccctcgccagggacttgggaatcgcagccagcgagaagtgtgcgacttggtggcccaggcggcggtgccggaggagcaggcggcgggagagtgctggaatgtccatcaatccgaatcacctcaatcagccctaccccggaaccaccagcagctctggaagataatccagatgcttggggcgacgggtcacctagagattatccacctcccgaaggctttgggggatatagggaagcaggcggacaggggggaggagctttcttttcaccttcacctggaagctcttctctgagctcatggagtttcttcagcgacgcctcagacgaagcagccctgtatgccgcgtgtgatgaagtggagagcgaactcaacgaggcggcctcgagatttggacttgggagtccacttccatcgccccgggctagcccacggccatggacccctgaagacccctggtcgctgtacggacccagcccgggtgggaggggccccgaggatagctggcttctactgagtgcacctgggcccaccccggcatccccacgccctgctagcccctgtggtaagcgccggtatagctcgtccgggacaccctcttcggcctcaccggcattgagccgccgcggtagcctcggcgaggagggatctgagcccccaccaccacctccactgcctcttgcgcgggacccaggctctccgggaccgtttgattacgtgggggcaccacctgcggagtcaataccccagaagacgaggcgcacttcttctgagcaagctgtcgccctcccacgtagcgaggagccagcttcgtgtaacgggaagctgccactgggggccgaggagtcagtggcgccccccggcgggagccggaaggaggtggccggtatggattacctagcagtcccctcaccattggcctggagcaaggcacggatcggtgggcatagtccaatcttcagaacaagcgcactacctcctttggactggccactgccatctcagtacgaacagcttgagctgcgtattgaagttcagccaagagcacatcatagagcccactatgaaacggaaggaagtcgaggcgctgtgaaggccgcccccggcggccaccccgtagtgaagctgcttggatattctgagaagcctctgacactacagatgtttattggtaccgcagatgagcgcaatctacgcccacacgctttttatcaggtccacaggatcaccggcaaaatggtcgcaactgcctcttacgaggctgtcgtttccgggactaaggtgttagagatgaccctgctgcctgagaataacatggcggcaaacatcgactgcgccgggatactgaaactaaggaacagcgatatcgagctgagaaaaggcgaaactgacattggccgtaagaatacgagagttagattagtcttccgagttcatgtcccacagggaggtggtaaggtcgtctcagtccaagctgcatcagtgcctattgagtgtagccagaggtcagcacaggaacttccacaggtcgaggcctatagcccaagcgcttgctcagtccgaggcggcgaagagctggtgctgacagggagtaattttcttcctgacagcaaggtggtgtttatcgaaagggggcccgacggtaagttgcagtgggaagaggaagccacagtcaatcgcctgcaatctaacgaggtcaccctcactctgaccgtccccgagtatagcaataaacgcgtgtcgcgcccagtacaggtctatttttacgtttccaacggccggcggaaacggagccccacacagagctttagatttctgccagttatctgcaaagaggagccactccccgactcttcattacgaggctttccctcagcatctgccactccttttggtaccgatatggatttttcccccccaaggcccccttatccaagctatccccacgaagaccccgcatgcgaaaccccttacctttccgaagggttcggctatggtatgccccctctgtaccctcaaaccggccctccaccttcatataggcccggccttcgaatgtttccggaaacacgggggacaaccggttgcgctcagccccccgccgtttctttcttgcctcggcccttcccaagcgacccatacggcggacgaggatcttcattttctttgggactcccattctctcctccagcaccattcaggcccccacctctcccagcatcccctccgctcgagggacctttcccgtcccagtcagatgtgcatccactgcctgccgaaggatacaacaaggtgggacctggttacggcccaggcgagggagcccctgagcaggagaagagccgaggtggttactctagcggctttcgcgactcggtcccaattcagggcatcacactcgaggaagtgtcagagattattggccgggatctttccgggttccccgcccctcccggggaggagccgcctgcttag

SEQ ID NO: 16415 - DNA, 1314 bp, synthetic construct
  misc_feature 1..1314: note = Description of Artificial Sequence: Synthetic coding sequence
  source 1..1314: mol_type = other DNA
atgttcattggcaccgctgacgagcgaaacctacgcccccacgcattctatcaggtacacagaattactggcaagatggtggcaaccgcttcatacgaggccgtggtctcaggcacaaaagttttagagatgacactgttaccagaaaacaatatggccgctaatattgattgtgccggcatcctgaagctgcggaactcagacatcgagctaagaaaaggagagacagacattggaaggaagaatactcgtgttagacttgtgttccgagtccacgtaccccaggggggaggaaaagtagtgagcgtccaggctgcttcagtacctatagagtgcagtcagcgctccgcccaggagttgccgcaggtcgaagcatactctccttccgcttgctctgttcgcgggggggaagagctggttttgaccggctcaaatttcttacccgacagcaaggtggttttcatcgagcgggggccagacggaaagctccagtgggaggaagaagctaccgtcaaccgccttcagagcaacgaagttaccctgactcttaccgttcctgaatattccaacaagcgggtctctaggccagtgcaggtgtatttttacgtttccaatggaagaaggaagaggagccctacgcagtcttttcgattcctcccggtcatttgcaaggaggaacccctgccagattcatcactcagaggcttccccagcgctagtgccacgccgtttggaacagatatggatttttccccccctcggccgccatacccatcttatcctcacgaggatcctgcatgtgagactccatacctgtccgaaggcttcggctatggaatgccccctctctatccacagacgggtccacccccctcttatcgccctggcctgcggatgtttccagagaccagaggtacaactgggtgcgcacaacctcccgccgtcagtttcctccctcgacccttcccctcagatccttatggaggacgggggagcagtttctcactcggcctcccattttctccccctgcgccttttagaccaccaccccttccagcctcacctcccctggaggggccctttcctagccagtccgacgtccacccgctgcctgcagaaggctataataaggtcggacccgggtatggacccggcgaaggggcaccggaacaggagaaaagtcgcggggggtactcgtccggctttcgggactctgtgccaatccaaggtattactctggaggaagtctcagagatcatcggccgggatctgtccggtttccctgcgcctccaggggaggagccccccgcctag

SEQ ID NO: 16416 - DNA, 2496 bp, synthetic construct
  misc_feature 1..2496: note = Description of Artificial Sequence: Synthetic coding sequence
  source 1..2496: mol_type = other DNA
atgcacagtcccccgccaaggcctgccccatcacccggaacatgggagtcccagcccgctcgcagtgttagactagggggacccggcgggggagccgggggggccggaggcggacgcgtactcgagtgtccttctatcaggataacaagcattagtcccacgccagagcctcctgccgccttagaggataacccagatgcctggggggatgggtcacccagggactatcccccccccgagggtttcggcggataccgggaagcggggggacagggggggggggccttcttttccccttcaccaggcagctccagtctgagttcatggagtttcttctctgatgcaagtgacgaagccgcgctgtatgccgcctgtgatgaagtggaatctgagctaaatgaagcggccagcaggtttggactcggctctccattaccaagcccacgcgcctcccctcgtccatggaccccagaggacccctggagtctgtatgggccatctccagggggtcgcggcccagaggactcatggttgcttctctccgctcccggtcccacacccgcctctcctagaccagcctcaccgtgcggaaagcgtcggtactctagcagcggcactccgtccagcgcctccccagctctgagcaggcgtggttctttgggcgaagaggggtcagagccgcccccaccaccgcccctgcctctggcaagagatcctggatcccccgggccttttgactatgtcggggccccgcctgccgagagcatcccacagaagacacgaagaacttcctccgaacaagctgtggccctgcccaggagcgaggagcctgccagttgtaatgggaaactgcctctgggagctgaggaatctgtggcacctcccggggggtctaggaaagaggtggccggcatggactaccttgctgtgccttcccctctcgcctggtctaaggcacggattgggggtcactccccaatttttcggacctctgcgctgcccccattggattggcctctgccaagtcagtacgagcagctggagctgcgaatcgaggtccagccaagagcacatcacagagcacactacgaaaccgaggggtcaagaggtgcggtgaaggcggccccaggcggacaccctgttgtcaagctgctggggtatagtgagaagcccctgacactgcaaatgttcatcggcactgccgatgagagaaatctgcgaccccacgccttttaccaggtgcatcgcatcacgggtaaaatggtggctacagcctcatacgaggcagtcgtaagtggtacaaaggtcttggagatgacactgctccccgagaacaacatggcggccaacatcgactgtgccggaatcctcaaactgagaaacagtgacatagaactaagaaaaggcgagacagacattgggaggaaaaatactagggtacgactggttttcagagtgcatgtgccccaaggaggaggaaaagttgtgagcgtgcaagccgcaagtgtgccgattgaatgttctcagcgcagtgcgcaagaactccctcaggtcgaggcctactcacccagtgcgtgcagtgtcagagggggggaagagttagtcctcacaggctcgaacttcctgccagattccaaggtggtgtttatcgaacgcggacctgatggtaaactgcagtgggaggaggaggccactgtgaatagactccagtctaatgaggttaccttgactctgaccgtccccgagtactccaacaagcgtgtgagccgccccgttcaggtgtacttctacgtcagcaacggtagacgaaagcggtccccaacgcagtcattccgattcctccctgtcatttgtaaggaggagcccctgcctgacagctcgttgcgggggttcccttcagcctcagcaacaccctttggtaccgatatggattttagcccaccaagacctccctatccctcctatccacatgaagatcctgcctgtgaaactccatatttatctgagggtttcggctatggcatgccgcctctctaccctcaaacaggaccacctccgtcttatcgtccagggctccgtatgttccctgaaacccggggtactacagggtgtgcacagccaccagccgtctccttcctccctcgcccattcccttccgacccttacggtgggcgcgggtctagtttttctctgggcctgcctttcagtcctcctgccccattccgccctcctccattgccagcatcgcctccactggagggcccttttccatcccagtccgacgtgcaccctctgcccgcagaagggtataacaaggtaggccccgggtatggtcctggcgaaggcgcccctgagcaggagaaatctcgtggcggttattccagcggatttcgggactcggtgccaatccagggtattaccttggaagagggggggtgcggcaccggtgggtgcgaatgtgaatgcgtacaggaaatcgcgttgcatgtgtgttag

SEQ ID NO: 16417 - DNA, 249 bp, synthetic construct
  misc_feature 1..249: note = Description of Artificial Sequence: Synthetic coding sequence
  source 1..249: mol_type = other DNA
atggatttctccccccctcggcccccatacccttcctatccccatgaagatcccgcttgcgagaccccctatttgtccgaagggtttggatatggcatgcctcctctatatccccagacaggcccccctcccagctaccggccagggttaagaatgttcccggaaaccaggggtaccacagtgtccgagatcatcggaagagacctgagtggttttcccgccccccccggcgaggaaccaccggcatag

SEQ ID NO: 16418 - DNA, 315 bp, synthetic construct
  misc_feature 1..315: note = Description of Artificial Sequence: Synthetic coding sequence
  source 1..315: mol_type = other DNA
atgtcttctgctgcaagaagcagactgactagggctacccggcaggagatgctcttcctggccctgttgctgctgcctgtcgtggtggcattcgcgcgggccgaggctgaggaagatggggacctccagtgcctgtgcgtgaaaactacttctcaggtgaggccaaggcacataacttctttggaagtcattaaggctggaccccattgccccacagctcagcttattgccacgctgaaaaacgggcggaaaatctgcctggatctacaggcccttctatacaagaagattattaaagagcatttagagagctag

SEQ ID NO: 16419 - DNA, 2907 bp, synthetic construct
  misc_feature 1..2907: note = Description of Artificial Sequence: Synthetic coding sequence
  source 1..2907: mol_type = other DNA
atggctgaagatgatccatacctgggacgcccggaacagatgttccatttggaccccagcttgacgcacaccattttcaatcccgaggtcttccagccccagatggccctgcccactgacggcccctatctgcagatccttgagcagccgaaacaacgcggatttcgctttaggtacgtttgtgaagggcccagccacggtgggctacctggtgcatcttctgagaaaaacaaaaaaagctacccacaagtgaaaatctgcaactacgtcggcccggcaaaagtaatcgttcagctcgttactaatggaaagaatatccatcttcacgcccatagccttgttgggaagcactgtgaagacggtatatgtaccgttaccgcaggacctaaagacatggttgtgggcttcgcaaatcttggcatactgcacgtgacaaaaaagaaggtgttcgaaacactcgaggcccgaatgaccgaggcttgtatcagggggtataacccaggtctgctggtgcaccctgaccttgcctacctccaggccgaaggaggaggtgacagacagctgggggatcgcgaaaaagagttaatccggcaggcagctctccaacaaaccaaggagatggacctctcagtggtgcgactcatgtttacggcatttctaccagatagtacaggttcgtttacgaggcgactggaacctgtggtgagcgacgcaatctacgactcaaaagctcctaacgcttctaacttgaagattgtaaggatggacaggaccgcaggctgtgtcaccggtggcgaggagatctatctgctgtgcgataaagttcagaaagacgacatacaaatcaggttctacgaagaggaagagaacggaggagtctgggagggatttggcgacttcagtcccacagatgtacatagacaatttgccatcgttttcaaaacgccgaaatacaaagatatcaatatcactaaaccggcctctgtattcgtgcagctacgtaggaagtccgacctagaaacttcagagccaaagcctttcctctactaccccgaaattaaggataaggaggaggtacagcgcaaacgccagaagttaatgccgaatttctcagactcctttggcggcggttcaggtgcaggggccggaggtggcgggatgttcgggagcgggggcggggggggcggtactggcagtacaggccctggatattcctttcctcactatgggtttcccacatacggtgggattaccttccatccgggcactaccaagagcaatgcggggatgaagcacgggacaatggatacggagtcaaaaaaagaccccgagggatgcgataagtctgacgataaaaacaccgtgaatctgttcggcaaagtgattgaaacaaccgaacaggatcaggagccttctgaagctacagtaggtaatggagaggtgacgctgacctatgcaacgggtaccaaggaggagtccgccggcgtgcaagacaacctttttcttgagaaggcaatgcagcttgcaaagcgacatgctaatgcgttgttcgactatgcagtgactggcgatgttaagatgcttctggctgtccagcggcacctgaccgctgtgcaggatgagaacggagactccgtactgcacctggccatcattcatctgcattcccagctggttcgagatctgttggaagtgacttccgggctgatctccgacgatattataaacatgcggaatgacctctaccagacccctctgcacctggccgtaatcaccaaacaagaggatgtcgtggaggatttactccgagctggcgccgatctctcactcctcgaccgtcttggaaactccgtgctccatctggccgcgaaagaaggtcatgacaaggtcctcagtatcctgctgaaacacaagaaggctgccttgctcctggaccatcccaatggcgatggactaaatgctatccacctcgccatgatgagcaatagtctgccttgcctgctgctcttggtggccgctggggctgatgtgaacgctcaggagcagaagagtgggcgtaccgctcttcatctggccgttgaacacgataacatctcacttgctggatgcctgttattggagggggatgcacacgttgattcaacaacttacgacggaaccacacctctgcatatcgccgcaggcaggggcagcactaggctcgccgcactgctgaaggccgcgggcgctgacccgctcgtagaaaatttcgaaccactgtacgaccttgatgattcttgggagaatgcaggtgaggatgagggggtcgtgcccgggaccactcccctggacatggcaacatcctggcaagtgtttgacatcctgaatgggaagccttatgagccagaatttacctctgatgacctcctcgctcagggcgatatgaagcagttagctgaggacgtcaagttacagttatacaaactgctcgagatccctgacccagataaaaattgggccacactggcccagaaactgggtctgggtattctcaacaatgcctttcggctttctccagctccaagcaagacactaatggacaactacgaggtgagcggtgggactgtgagggaattagtggaggctctccgtcagatgggttataccgaagccatcgaggtgatacaggccgccagtagtcctgtcaaaaccactagtcaggcccactcactgcccctctctccagcatcaacccggcagcagattgatgagctccgagactcagactccgtttgcgattcaggggtggagacctcctttcggaagttaagctttacagagtcacttacttcaggcgcctctttgctgactttgaataagatgccacacgactatggccaggagggccccctcgaagggaaaatctag

SEQ ID NO: 16420 - DNA, 2907 bp, synthetic construct
  misc_feature 1..2907: note = Description of Artificial Sequence: Synthetic coding sequence
  source 1..2907: mol_type = other DNA
atggccgaggacgatccttatcttggccggccagagcagatgtttcacctggatcctagcctcacacataccatcttcaacccagaggtgttccagccccagatggcactgccgacagacgggccatacctgcaaattctggaacagccaaaacaaaggggcttccggttcagatatgtgtgtgaagggccatcacatggcggactgcctggggctagctccgagaaaaacaaaaagtcctatccccaggtgaaaatatgcaactatgtcggacccgccaaggtgattgtacagcttgtaacgaatggaaaaaatatccatctgcacgcccattccctggttgggaagcactgtgaagatggaatttgcacagtcaccgcagggccaaaggacatggtagtagggttcgccaatttgggcatcttgcacgtgaccaagaagaaggtcttcgaaacgttggaggcaaggatgacagaagcgtgtattaggggctacaatcccggtttgctggtgcatcccgacctcgcctacctgcaggccgaaggcggaggggaccggcagctaggcgaccgcgagaaggagcttatacgccaggccgcactgcaacagaccaaagagatggacctgagcgtagtgcggttgatgttcacggcgttcctccccgactccactggtagctttactaggcggctcgagccagtggtctcagatgcaatctacgacagcaaagcacccaacgcatcaaacttgaagattgtgaggatggataggacagccgggtgcgtaacgggcggcgaagaaatatacctgctctgcgataaggtgcagaaggacgatattcagatccggttctacgaggaagaagagaatggtggggtctgggaggggttcggggattttagcccaacagatgtacatcgccagtttgccatcgtttttaaaacccctaaatataaagatatcaacataactaaacctgcttctgtttttgtgcagctcagaaggaagagtgatctcgaaacgagcgagccaaaacccttcttgtactatcctgagataaaggacaaagaagaggtccagcggaagcgccagaaacttatgcccaatttcagcgactccttcggcggagggtccggtgcgggcgccgggggaggcggaatgttcggcagtggaggtggcggcggcgggacgggatctacgggccccggctatagcttcccacactacggctttcctacttatggcggaattacattccatcccggcactacaaaatctaacgcgggtatgaagcatggtactatggataccgagtcgaaaaaggaccctgaaggatgcgataaaagcgacgataagaatacagtgaacctgtttggcaaggtgatcgaaaccacggagcaggatcaggaaccttctgaggccacggtgggaaacggagaggtgactcttacttatgcgacagggaccaaagaggagtcagcaggcgtgcaggataatctcttcctagaaaaggccatgcagctcgccaaacgccacgctaatgctctttttgactacgccgtcaccggggatgtgaaaatgctcctggccgtccagcggcacctaacagccgtacaggacgaaaatggtgattccgtccttcacttggccattattcatctgcacagtcagctcgtccgcgacctgctagaagtaacaagcgggctgatcagtgatgatattattaacatgcggaacgatttatatcaaacccccttgcatctggcggttattaccaaacaagaggacgtagtggaagacctactccgcgccggggcggatttgtctctccttgatcgcctgggcaacagcgtcctccatctcgctgccaaggagggtcacgacaaagtcctaagcatcctgctcaagcacaagaaggccgcccttctcctcgatcaccctaatggagacgggctgaatgccatccacctagctatgatgtcaaacagtctgccctgtctgttactgctggttgctgcgggagccgatgtgaacgctcaggagcaaaaaagcggccggacagccctccatctagcggtggagcacgataatatctccttggctgggtgccttctcctggagggggatgcacacgtggactccacaacatatgacggcactacacctctgcatattgcagcgggacgcggaagcacccggctcgcagccttgcttaaagcagctggtgcggacccccttgtcgagaacttcgaacctctctacgatttggacgatagttgggagaatgcaggagaggacgaaggggtggtgccaggaacaacccccctggacatggccacaagctggcaagtcttcgatattctgaatggtaaaccctatgagccggaatttacctccgatgacctcctcgctcaaggtgatatgaagcagctggcagaggacgtaaagctgcagctttacaaactgttggaaattccggaccccgataagaactgggccaccctggcccagaagctgggtctgggtatcctaaacaacgccttcaggctgtccccggcaccctcaaagactctcatggacaactacgaagtcagcggcgggacagtccgggagctggtcgaggcattgcgccagatgggctacactgaagcaatcgaggtgatccaggcggcttcaagcccagtgaagacaacctctcaggcccatagcctccccctctctcccgcctccacgcgccaacagatcgatgaactgagagatagtgatagcgtgtgcgattcgggcgtggagacgagttttagaaagctatcctttactgagtcccttacctccggcgcctccctccttaccttgaacaagatgccccacgactatggacaagaagggcctttagaagggaaaatatag

SEQ ID NO: 16421 - DNA, 438 bp, synthetic construct
  misc_feature 1..438: note = Description of Artificial Sequence: Synthetic coding sequence
  source 1..438: mol_type = other DNA
atggccgaggatgacccgtacctcggtcgtcctgagcagatgtttcatctggatccctcgctcacacacacgatcttcaacccagaggtctttcagccccagatggccctgcccaccgccgacggaccttatttgcagatcctggagcagccaaagcaacgaggattcaggtttcgatacgtttgtgagggccctagtcacggggggcttccaggtgcttcaagcgagaaaaataaaaagagctatccccaggtgaaaatttgcaactatgtcggcccggctaaggtgatcgtgcaattagtcactaatggcaagaacattcacctacatgcccattctctagtggggaagcactgtgaagacggaatctgcacagtgaccgcagggccaaaagacatggtggtaggatttgcaaatctggggatcctgcacgtctag

SEQ ID NO: 16422 - DNA, 225 bp, synthetic construct
  misc_feature 1..225: note = Description of Artificial Sequence: Synthetic coding sequence
  source 1..225: mol_type = other DNA
atgaagcgcacaacatcctttagaatggcagaggatgacccatacctgggccggccagaacagatgttccatctcgacccatcacttacacacaccatttttaatcccgaggtttttcagcctcaaatggcgctgcctacagacggcccttatcttcaaatactggagcaaccaaagcagcgaggatttagatttagatatgtttgtgagggacccagtcactag

SEQ ID NO: 16423 - DNA, 1923 bp, synthetic construct
  misc_feature 1..1923: note = Description of Artificial Sequence: Synthetic coding sequence
  source 1..1923: mol_type = other DNA
atggctgcactttacagaccaggcctgagactcaactggcacgggctgtcacccctcgggtggccaagctgccgctcgatacaaacattgcgcgtcctgtctggagatctcgggcagctgccgaccggcatccgagattttgttgaacatagcgccaggctctgtcaacccgagggcatccatatatgcgatgggacggaagccgagaacacagcaacactaacacttttagaacaacagggtttgatccgtaagttacccaaatataacaattgctggctggcgagaactgatccaaaggatgtagccagagtggagagcaagacagtgattgtgaccccaagccagcgagataccgtccagctgcctcctgggggggctcgggggcagttggggaactggatgagccccgctgatttccaacgcgccgtggatgagaggtttcccggttgcatgcagggaaggaccatgtatgtgctccccttcagtatgggacccgtcgggagtcctctcagccggattggggtgcaactcaccgattccgcctatgtggtagcttccatgcgaatcatgacaaggctcggaactccagtgctccaggcacttggcgacggcgatttcgtgaaatgtttacactcagtagggcagcctctaaccggacagggtgagcctgtctcccaatggccctgtaaccccgaaaagacacttattggtcatgttccagaccagcgagaaattatctcctttggaagcgggtacggaggcaactctctgctgggcaaaaaatgtttcgccctgcgcatcgcttccaggcttgctcgcgatgaaggttggttggccgaacatatgctgatcctgggtattacgtccccagcaggtaagaagaggtacgtggccgccgcttttccctccgcatgcgggaagaccaacctggccatgatgaggcccgctctaccgggctggaaagtggagtgcgtgggcgatgatatcgcctggatgaggtttgacagcgagggcagattacgggcgattaatcctgagaacgggttcttcggggtggccccaggcactagtgccaccaccaatcccaacgctatggccacaatccagagcaataccatctttactaacgttgcagagaccagcgacggcggagtctattgggagggaatcgatcaacccctgccaccaggcgtgacagtcaccagctggctggggaagccatggaagcccggtgacaaggaaccctgcgcccaccccaactctcggttttgcgcaccagcaagacagtgccctatcatggatccagcctgggaggctcccgaaggcgttccaatcgacgcaattattttcggcggtagacgtcccaaaggggtacctcttgtttatgaagcgttcaattggagacatggcgtctttgtggggtccgccatgcgcagcgaaagcaccgccgccgctgagcataaaggtaagatcatcatgcatgaccctttcgcaatgagaccgttcttcggctacaatttcggccattatctcgaacattggctgtcaatggaggggagaaaaggggcacaactcccccgaattttccacgtcaactggttccgtcgagacgaagccggacacttcctatggcccggctttggcgagaacgcaagggttctcgactggatctgtagacgactcgaaggggaggacagtgcccgggaaacaccgatcgggctcgtgcctaaggaaggcgccctggacctgtctggactgcgagctatagacactactcagctgttcagcctccccaaagatttttgggaacaggaggtgcgcgacattcgctcctaccttacagagcaggttaatcaggatctgccaaaagaggtgttggcggagttagaagctctggagagaagggtacacaaaatgtag

SEQ ID NO: 16424 - DNA, 3477 bp, synthetic construct
  misc_feature 1..3477: note = Description of Artificial Sequence: Synthetic coding sequence
  source 1..3477: mol_type = other DNA
atgacccacggggaggaattagggagcgacgttcaccaggactcaatagtcctgacatacctggagggtctgctgatgcaccaggccgccggcggatccggtaccgctgtggataagaaatcagctggccacaatgaggaggaccagaattttaatatatccggtagcgcttttcctacatgtcaaagcaacggccccgtactcaacacgcatacctaccagggttctggaatgctgcatcttaaaaaggcacgcctgttgcaaagctccgaggactggaatgctgctaaacgaaagcggctgtcagacagcatcatgaatttgaatgtcaaaaaagaggctctgctcgcggggatggtggattccgtgcctaagggcaaacaggattccaccttactcgcgtcactgctgcagagcttcagcagcagactccagacagtcgcactcagccagcagattcggcagagcttgaaggagcaaggatatgccctctcccacgatagcctcaaggttgaaaaggacctgaggtgctacggtgtggcaagttcccacctcaagactttgttaaaaaagtcaaaggtgaaggatcagaaacctgacacaaacctgccggatgttaccaaaaatctgattagagacaggtttgcggagtccccgcaccatgtaggtcagagtggaactaaagtcatgagtgagcctctgtcttgcgctgccaggctacaggccgtcgcatccatggtcgagaagcgggcatctccagccacaagtccaaagccctccgtcgcatgctcccaactggctctcttgctgagctccgaggcacacctgcagcagtacagtcgtgagcatgccttaaagacccagaacgcaaatcaggccgccagtgagaggctagcggccatggcacgcctacaggaaaacgggcagaaggacgtgggatcataccagctgcccaaagggatgtctagtcacctgaatggtcaggcgcgaactagcagtagtaagcttatggcctcaaaatcttccgctactgtgttccagaatcctatgggcatcatcccatcttcacccaaaaatgcgggctacaagaactctctggagcggaataatatcaaacaggccgccaacaatagcctgttgctgcacttattaaagagccagaccattccaaaaccaatgaacggacacagtcatagtgagaggggaagtattttcgaagagtcctccacccccacaacgatagatgagtacagcgacaacaatccctctttcacagacgactctagcggcgatgagtcctcatatagcaactgcgtccccatagatttgtcttgcaagcacagaacagagaaaagtgagtcagatcaacctgtgagcctggataattttacccagagcctgctgaatacctgggatcctaaggtgccagatgtggatatcaaagaggaccaggatacttctaagaactccaagctaaatagccaccagaaagtcacactgctgcagctgctgctcgggcacaagaacgaagaaaatgtggagaagaacacatcccctcagggcgtgcataacgatgtgagcaagtttaacacacaaaactatgcccgcacctctgtcattgagagtccttcaacaaatcgtacaactccagtgagtacccctccactcctgaccagtagcaaggctggctcaccgatcaatctctcacagcacagcttggtgattaaatggaacagccccccatatgtgtgttccacccagagcgagaagttgaccaacacagcttctaaccactccatggatctgactaagagcaaggaccctcccggcgaaaagccggcgcagaatgaaggtgcacagaacagcgccacctttagcgcctcaaaacttctgcaaaacctggcccagtgtggaatgcaatccagcatgagtgtcgaagaacaacggccaagcaaacagttacttaccggtaacactgacaaaccgataggtatgatcgatagactaaattctcctctgttgagtaacaagacaaacgccgtggaggagaataaagcatttagcagtcagcccaccggacccgaacccggcctctcgggtagtgagattgaaaacctgttggagaggcgtacagtgctgcagcttttgctggggaatcccaacaaaggcaagtccgagaagaaagagaaaaccccgctgagggatgagagcacccaagagcactcagagcgtgctctgagcgagcagattttaatggtgaaaattaaatcagagccatgcgatgacttgcaaatcccaaatactaacgtccatctcagtcacgacgcaaagagcgctccctttctcggaatggctcccgcagtccagcgatcagccccagccctgcctgtgagtgaggatttcaagtctgagcctgtatcccctcaggacttctcatttagcaagaatggcttactgtctcggctgctgcgtcagaatcaggactcatacttggctgatgatagcgaccggagtcatcgaaacaatgaaatggccttgctggagtctaaaaacctgtgcatggtaccgaagaagagaaagctgtatacggaacctctcgagaacccattcaagaaaatgaaaaacaacatcgtggatgccgctaacaaccactcagcaccagaggttctatatggaagcctcctgaaccaggaggagctcaagtttagccgaaacgatttggaattcaaataccccgccggacatggctcagcctcggaatccgagcatcggagttgggcgcgcgagtccaagtctttcaacgtgttgaagcaactgttattaagcgagaattgtgtgcgcgatttgagtccgcataggtccaactcagtggccgattccaaaaagaaggggcacaagaataacgtaacaaactctaaaccagagttctcaatctcttccttgaacggtctgatgtacagctccacacagccctcatcatgcatggataacagaaccttctcatatcccggagtagtgaagacacccgttagcccgactttccctgagcaccttggctgcgctggcagtcgacctgagtccggcctcctgaacggctgcagcatgccttccgagaaagggcccatcaagtgggttattactgacgctgagaagaatgagtatgaaaaggacagccccaggctgacaaagacaaatcctattctgtactacatgttgcagaaaggaggcaactcagtaacgagtagggagacccaggacaaagatatctggagggaagcctcttcagctgaatctgtgtcccaggttactgccaaggaggaactgctccctacagcagaaaccaaggcctccttctttaacctgcgcagcccatacaattcccatatgggtaataacgcgagccgcccccacagtgccaatggtgaggtgtatggactgcttgggagcgtcctgacaatcaagaaggaatctgaatag

SEQ ID NO: 16425 - DNA, 3477 bp, synthetic construct
  misc_feature 1..3477: note = Description of Artificial Sequence: Synthetic coding sequence
  source 1..3477: mol_type = other DNA
atgacccacggtgaggagcttgggtccgatgtgcaccaggactccatcgtgctgacgtacctagaaggtctactcatgcaccaggcagcgggaggaagcgggaccgctgtagacaagaagtctgccggccacaacgaggaagaccagaacttcaacattagcgggagtgcttttccaacatgccagagcaacggaccagtgctgaatacccacacgtaccaggggagtggcatgctccatctcaaaaaggcacggctgttgcaaagctcagaagattggaacgctgcaaagaggaaacgcctatctgacagcattatgaatttgaatgtcaaaaaggaggccctccttgccggaatggtggacagcgtgcccaaagggaagcaagattccactctcctcgcttcactcctacagtccttctcgtccagactacagacagtggctttgtcacagcagattaggcaatccctaaaagagcagggttacgctctctcccacgatagccttaaggtggagaaagaccttagatgctacggagtagctagctcgcacctgaaaacacttctgaagaaatccaaagtgaaggaccaaaaacctgataccaatttgcctgatgtgacgaagaatctgatcagagaccggttcgctgaatcacctcaccacgtcggacagagcggtacaaaagtcatgagtgaacctctgagctgcgcggcccggttgcaggcggtcgcctcaatggttgaaaaaagagcctctcccgctacttctcctaagccaagcgtagcctgctcccaactggcactcctgctctctagcgaagcacatctgcaacagtatagtagggagcatgcccttaagacccagaacgccaaccaggcagccagcgaacgcctggctgccatggcaaggttacaggaaaacgggcagaaggatgtgggctcctatcaactccctaaggggatgtcgtctcacttgaatggccaggcccgaaccagcagtagcaaacttatggcaagcaagtcgtccgctacagtcttccagaaccctatggggatcataccttccagtcccaagaacgcaggctataagaacagcctcgagaggaacaatatcaagcaggcggcgaataacagtcttctactgcatctgctcaagtcacagaccatccccaaaccaatgaatggtcactcgcactcagaacgtgggagcatcttcgaagagagctctaccccgaccacaattgacgagtactctgataacaatccgagtttcaccgatgactcgagcggagatgaaagttcttatagcaactgtgttcctatcgatctgagttgtaaacaccgaacagagaaatcagagtcagaccaaccagtgagccttgacaatttcacacagtcactgcttaatacctgggaccctaaagtgcctgatgtggatatcaaggaggatcaggacacatccaagaatagcaaactcaacagccaccagaaggtgacactcttgcaactcttgctggggcacaagaacgaggaaaacgtagagaaaaacacctcccctcagggcgtgcacaatgacgtgagcaaatttaatacacagaattatgctcgcacgtccgttattgaaagcccttccaccaacagaactactccggtgtctactccgcctctgttaacctcctctaaggccggcagccccattaatctcagccagcatagtctcgtgattaaatggaactctcctccttacgtgtgttcgacgcagtctgagaaactaaccaacactgcctccaaccactcaatggacctgaccaaatcaaaggacccgccaggggaaaaacccgcgcaaaacgagggagctcagaatagtgccaccttctccgcctcgaagttgctgcagaacttggcccagtgcggaatgcagagctcaatgtccgtggaggagcagagacccagtaagcagctgctgacgggaaataccgataagccgattgggatgattgacaggctgaattcacccctgctaagcaacaagaccaatgctgtggaggaaaacaaggcatttagcagtcagcccactggaccggagccagggctgtccgggtccgagattgagaatctgttggagcggcgtactgtgctgcagctgttactgggcaatcctaataagggaaagagtgagaaaaaagagaagaccccactgagggacgaatctacccaagaacatagcgaaagagcccttagcgaacagatccttatggtgaaaataaaatcggaaccctgtgatgacctccaaatccccaacaccaacgtacatttgagccacgacgcaaaatcagcccccttcctgggaatggcaccagccgtccagcggagcgctcctgctttacctgtctcagaggattttaagtccgagccggtaagcccacaggatttctctttttcaaaaaatggcctgctgtcccggctgctgcgccagaaccaagactcctacctcgcagacgattccgacagatcccatcggaacaatgagatggctctgcttgagtccaagaatctatgcatggtcccgaagaaacgaaagttatacacagagcccctggaaaatcctttcaagaaaatgaaaaacaatattgtcgacgcagctaataaccatagcgccccggaggtcctttacggcagcctgctgaaccaggaggaactgaaattctcacggaatgatctggagtttaaataccctgccgggcatggatcagcttcagaatctgagcaccggagttgggcgcgtgagagcaaaagtttcaatgtgctcaaacaactgcttctgtcagaaaattgcgtgagagacttgagtccccatagaagtaattcagtagcagacagtaaaaaaaagggacacaaaaacaatgttacaaacagcaagccggagttctcaatcagcagtttaaacgggcttatgtactcatccactcaaccgtcctcttgtatggataaccgcacctttagctaccccggggttgtcaaaactccagttagccctaccttccccgaacatctgggctgtgctggcagcagaccagaatccgggctactgaacggttgttctatgccttctgagaaaggcccaatcaagtgggtgattacagatgccgaaaaaaatgagtacgagaaagacagccctcggttaactaaaaccaacccgatactttactacatgctgcagaagggaggtaacagtgtgacaagcagagagacgcaagacaaggatatctggcgagaggcgtcgtctgccgagtcagtgtcgcaagtgactgccaaggaggagctattgcctacagctgaaaccaaagcgtctttctttaatcttcggtccccctataactctcatatgggtaacaacgcctcccgaccccatagcgctaatggagaagtctatggcctgctgggtagcgttctgacgattaaaaaagaaagcgaatag

SEQ ID NO: 16426 - DNA, 3477 bp, synthetic construct
  misc_feature 1..3477: note = Description of Artificial Sequence: Synthetic coding sequence
  source 1..3477: mol_type = other DNA
atgactcacggcgaagaactgggctcagatgttcaccaagatagcattgtcttgacctacttagagggactactaatgcatcaggccgcagggggaagtggaaccgccgtggacaagaagtccgctggacacaatgaggaggatcaaaactttaatatttccgggagcgcattccccacatgccagagcaatggacctgtgcttaatacccacacttaccaagggtctggcatgctacatctgaaaaaagcccgccttctccagagcagcgaagactggaacgctgctaagagaaagagactgagtgacagtataatgaatctcaatgttaagaaggaagccctccttgctgggatggtcgactccgtgccaaaagggaagcaggatagtactctgttagcctcactgctacagtcatttagtagcaggctgcaaactgtcgccctgtcccagcaaatcaggcagtccttgaaagaacagggatatgcattaagtcacgattcattaaaggtcgaaaaggatttacgctgctacggggtcgcatcctcccacctgaagacgctgctgaaaaagagcaaagtcaaagaccagaagcccgataccaacctgcccgacgtcactaaaaatctgattcgggacagatttgcagagtcccctcaccacgtggggcaatccggaacaaaggtcatgtctgagcccctgtcctgtgctgccagactgcaggctgtggcctctatggttgaaaagagagcttctccagctacttcccctaagccaagcgtagcctgcagccagctggcgctactgctttcctccgaagctcacttacaacagtatagtcgagaacacgcactgaagacacagaatgctaatcaggccgcctccgagcgattagcggccatggcccggctgcaggaaaacggtcagaaagatgtggggtcctatcagctcccgaaagggatgtcatctcatcttaatggccaggctagaactagtagctccaagttaatggcctctaaaagctccgccacagttttccagaaccccatgggtatcatccccagctctcccaagaatgccggatacaaaaactccttggaaagaaataacatcaagcaggcagccaataactctctcctccttcacctgctgaagtcacagaccatcccaaaaccaatgaacggccactctcactccgagagaggaagtatctttgaggaatcttctaccccgacgaccattgatgagtactcagacaacaacccttcctttaccgacgactccagcggagatgagtccagctactctaattgcgttcccattgatctcagctgcaagcacagaacggaaaagtccgaatccgatcaacctgtcagcctagacaatttcacacagtcgctgctcaatacctgggacccaaaggtgcccgacgtggacataaaagaagaccaggatacctccaagaatagcaagttgaatagccaccaaaaagtgacacttctgcaattgctgttaggccataagaatgaggagaatgttgagaagaacacatcaccccagggcgtacacaacgacgtatcaaaatttaatacccagaattatgcccgcaccagtgttatcgaatctccgtctaccaaccgaacaacccccgtcagcactcctccgttgctcacttctagcaaagctgggtctcccattaatttaagccagcattcattagttattaagtggaattcaccgccgtacgtctgcagtacccagagtgaaaagctaactaacaccgcaagtaaccactcaatggatctcaccaagtctaaggatccacccggtgagaagccagctcagaacgaaggggcgcagaactccgccacgtttagcgctagcaaacttctccagaatctcgctcagtgtggaatgcagtcctctatgagcgtggaggaacagagacctagcaagcagttgctcacgggaaatactgacaaacctatcggcatgatcgaccggcttaacagtcctttgctgagtaacaaaacgaatgccgtggaagagaacaaggccttttcttctcagccaaccggccctgaaccagggctatctgggtcagagatcgagaatctccttgagcggagaacggttctccagctgctcctcggcaatcctaacaagggaaagagtgaaaaaaaagaaaagacgcctctccgtgatgagagcacacaggagcactcagagcgtgccctgtctgagcagatccttatggtgaaaataaagtccgagccttgtgatgatctgcagatacccaataccaacgtgcacctgtcacacgatgctaagagtgcaccctttttaggaatggctcctgcagtgcaacggagcgctccagctttgccagtgtccgaagactttaaatctgagcccgtgtcaccacaggacttcagcttcagcaaaaacggtcttttatcaagactgttacgccaaaatcaggatagttatcttgcggacgacagtgacagaagccaccggaataacgagatggccctcctggagtctaaaaacctctgtatggtacccaagaaacgaaagttgtacacagaaccacttgagaacccatttaagaagatgaagaacaatattgtagacgcagctaacaatcacagcgccccggaggtcctttacggctccctgttgaaccaggaggaactgaagttttctcggaacgacctggagttcaagtaccctgccggccatggctctgcctcggagagcgagcatcggtcttgggccagggaatctaagtcatttaatgttcttaaacagctgctgctgtcagagaactgcgttcgggacctgtctcctcacagatccaatagtgttgccgacagcaaaaagaagggccataagaacaacgtgaccaacagcaagcccgaatttagtatctcctccctgaatggcctgatgtacagttcaactcagccatccagctgtatggacaatcgaacattttcatatcccggcgtcgtgaagacacccgttagtcctaccttccctgagcacctggggtgtgcaggcagtaggcctgagtcaggcctattaaatggctgcagtatgccctccgagaaagggcccatcaagtgggtcatcacagacgccgagaagaatgagtacgaaaaggattctccacgtctgactaagacaaatcctatcttatattacatgctgcagaagggaggaaactcagtcacgagccgagagacgcaggacaaggatatctggcgcgaggctagctctgccgaatctgtaagccaggtgacagctaaggaggaactcctaccaactgcagagacaaaagcctccttctttaacctgcggtctccttataattctcacatgggcaataatgcttcacgcccccactccgccaacggggaggtgtatggcctgctgggatctgtcctcacaattaagaaagagtccgagtag

SEQ ID NO: 16427 - DNA, 201 bp, synthetic construct
  misc_feature 1..201: note = Description of Artificial Sequence: Synthetic coding sequence
  source 1..201: mol_type = other DNA
atgacccacggcgaagagttaggcagcgatgttcatcaagactccatcgtgctgacttaccttgaaggcctgttgatgcaccaggcggccgggggatcaggcaccgccgttgacaaaaaatctgcaggccataatgaggaggaccagaacttcaatataagcggaagcgcattccctacgtgccagagtaacgggccctag

SEQ ID NO: 16428 - DNA, 4176 bp, synthetic construct
  misc_feature 1..4176: note = Description of Artificial Sequence: Synthetic coding sequence
  source 1..4176: mol_type = other DNA
atgccctcgtctttgctcggggccgccatgccagcctccaccagcgcagcggccctgcaggaggcgctggagaacgcaggacgtctcatagatcgacagttacaggaggatagaatgtatcctgacttgagtgagttattgatggtgtcagcgcctaataaccctaccgtctcaggcatgagcgatatggattaccctctccaggggccaggtctgctgtctgtgccaaacctccccgaaatatctagcattcgacgggtgcctcttccgcccgaactggtggagcagttcggccatatgcagtgcaattgtatgatgggcgtatttccgccaatcagtcgggcgtggctcacaattgatagcgatattttcatgtggaactatgaggatggaggtgatctggcgtactttgatggtcttagcgaaactatcctagctgtgggcttggtcaagccaaaagccggaatattccaaccgcatgtcagacacctcttggtgcttgcaacaccggtggacattgtcatcttagggctgtcctacgcgaacctgcagactggctccggcgtactaaacgacagcctctccggcggcatgcaactcctgccagatcctctgtacagcctcccaaccgacaacacatacctcctaacaatcactagcacagataacggacgtattttcctggccggaaaagatggctgtctttatgaagtcgcttatcaggctgaagcggggtggtttagccagcgctgccgcaagataaaccattctaaatcaagcttatcctttctcgtccccagcctcctgcagttcacatttagcgaagatgaccccatcctccagatcgctattgacaatagtcggaacatactgtatacaagatctgaaaagggcgttatccaagtttacgacctggggcaggacggccagggcatgagtcgggtggccagcgttagccagaacgcgatcgtctcggcggcaggcaatatagctcgcacaattgatagaagtgtgttcaagccgattgtccagattgccgtcatcgaaaattcggagtccctggactgccagttgctagccgtcacccacgctggagtgcgactctatttctccacctgtccattccgccaacccctggctcgacccaacacacttaccctggtgcacgttagactgccaccagggttcagcgcgagttcaactgtggaaaagcccagtaaagtgcacagggctctgtatagtaaggggatcctcttgatggccgctagcgagaacgaggataatgatattttatggtgcgtgaaccacgacaccttcccttttcagaaacccatgatggagactcagatgaccgccggcgtagacggccatagttgggccctgtcggccatcgatgagctgaaggtagacaaaatcataacacctttaaataaagatcacatcccaatcacagacagtcccgtagtggttcagcagcacatgctgccacctaagaaattcgttctgctcagcgctcaggggagcctgatgtttcacaaattgcggcccgtggatcaattgagacacttgcttgtatcgaatgtcggcggggatggtgaggagatcgaaagattctttaaattacatcaagaagaccaggcatgtgcgacatgcctgatcctcgcttgctctacagctgcttgtgatagagaggtctccgcctgggccacacgcgccttttttcgatatgggggtgaagcccagatgcggtttccgacaacattacctccaccctccaacgtgggacctatacttgggagtccagtctatagttctagccccgtccccagcggcagcccttacccaaatccctcctttctgggaactcctagtcatgggatccaacccccagccatgtctacgccagtctgcgccctgggaaacccggccactcaggctacaaatatgtcctgcgttacaggtcctgaaattgtttatagcggtaagcataacggaatttgtatttatttcagcaggattatgggtaacatatgggatgcctccctggtggtggagcgaatcttcaaaagtggaaatcgggaaatcactgccattgagtccagtgtcccctgccagctccttgagagtgtgttgcaggagctaaagggtctgcaggagtttctagatcgcaattcccagtttgcaggtgggcctctcggaaaccctaacactacagccaaggtgcagcagaggctcataggatttatgaggccagaaaacgggaatcctcagcagatgcagcaggagctacaaagaaagtttcatgaggctcagctgtccgagaaaattagcctacaggcaatccaacagctggtgagaaagtcttaccaggccttggccctatggaaactcctgtgcgagcatcagtttacaatcatcgtagccgaattacagaaagaactccaggaacaactcaagataactacattcaaagatttggtcatccgcgacaaagagctgaccggtgccctgatagcatcattgattaactgctacatacgtgataatgcagcggtagacggaatctcccttcatcttcaggacatatgtcccctgttgtacagcactgacgacgctatttgctcaaaggcgaatgaattgctgcagaggagccgccaagtgcagaacaaaacagagaaggaacgtatgctgagggaatcactcaaagagtatcagaaaatatccaatcaggtcgacctgtcgaacgtgtgtgcccagtaccgacaagtacgcttttacgagggcgtggtggagcttagcttaacggccgccgaaaaaaaggatcctcagggcttaggactacatttttacaaacacggtgagccggaagaggacattgtggggctgcaggcgttccaagaacgactgaacagctacaagtgtattaccgacaccctgcaagaattggtaaaccagagcaaggcagcgccacagagcccttctgtcccaaaaaaaccgggaccccccgtgctgtcatcagatcctaatatgctctccaatgaggaggctggacatcatttcgagcaaatgctcaagctgtcacaaagaagcaaggatgagttgttttctattgccctgtacaattggctcattcaagtagacctggcagacaagctgctgcaagtcgcaagccctttccttgagccccatctcgtccgtatggcaaaggttgaccagaacagagtccgatacatggacctcctttggaggtattacgaaaaaaaccgctcattttctaacgccgctcgcgtcctgagccgcctcgcagacatgcattccactgaaatctctttgcaacaacgcctggagtatatcgctcgagcgatcctgagtgcgaagagtagcactgcgatctcaagcatagctgcagacggggagttcctccatgaacttgaggaaaaaatggaggtggcaaggattcaactccagattcaggagacattgcagcgacagtatagccaccattcatccgtccaagatgcggtgtctcagctggatagcgagctcatggacatcaccaagctctacggggaattcgccgatcccttcaaactcgcagagtgtaagctcgcaattatacactgcgccgggtacagcgaccctatactggtacagactttgtggcaggatattatagagaaggagcttagtgacagcgttacgctctcctcgtcagatcggatgcacgctttaagtctgaagattgtgcttctgggtaagatttacgccggaacacctaggtttttccccttagattttatcgtccagtttctggagcagcaggtgtgtaccctgaattgggacgttggcttcgtcattcaaaccatgaacgaaataggcgtcccattaccacgtctgctcgaagtttacgatcagctctttaaatctcgggacccgttttggaatcgaatgaaaaagccccttcacttattggattgtatccatgttcttcttattaggtatgtagagaaccccagccaggttctgaactgcgaacgtaggcgcttcactaatctctgtctagacgccgtgtgtggatacttggtggagctgcaaagcatgtcaagtagcgtagcggtacaggcaatcaccggcaattttaagagcctccaagccaagttagaacggttgcactag

SEQ ID NO: 16429 - DNA, 2334 bp, synthetic construct
  misc_feature 1..2334: note = Description of Artificial Sequence: Synthetic coding sequence
  source 1..2334: mol_type = other DNA
atggattccaaggagtctttgacccctgggcgggaagagaacccttctagtgtgctggcccaagagcgaggcgatgtgatggacttctacaagactttgcgcgggggggctacagtgaaggtttccgcctcaagcccttccctcgctgtggcctcccagtctgactctaaacaacggaggctgttggtggacttcccaaaggggtcggtgtcaaacgctcagcagccagacctttctaaggctgtgtcgctgtccatgggcctttacatgggggaaacagaaactaaggtgatgggtaacgacctgggcttcccccagcagggccagatatccctgagctccggtgagactgacctaaaacttttggaggagtctattgccaaccttaataggagtacatcagtgccggagaatcctaaaagctccgcatccacggccgtatcagccgctcctaccgagaaggagtttccaaagacccattcagatgtatcctccgagcagcaacaccttaaaggccagaccgggactaatggcggaaacgtgaaactgtacaccacagatcaatcaactttcgacatcctccaggaccttgagttttcaagcggtagtcccggcaaggagactaatgagtctccttggagatcagacttgctcattgatgaaaactgtctgttgtccccactcgcgggggaggatgactcttttctgctagagggaaactctaacgaggattgcaagccattgatcctgcctgacacgaagccgaagattaaggataacggcgatctggtcctgtcctcaccctcaaatgtgacattgcctcaagtgaaaaccgaaaaagaagattttattgagctgtgcactcccggagtgatcaaacaggagaagctagggacagtatattgccaggcgtcattcccgggggccaatatcataggcaacaagatgtccgctatcagtgtccatggagtctcgacatcaggaggccagatgtaccattacgacatgaacacagcaagcttaagtcaacagcaggaccagaagcctatttttaacgtcattccgccaatcccagttggctctgaaaattggaatagatgccaggggtctggcgacgacaatttgacatccctcgggactctcaacttccctggtcgtactgtgttctcaaatggatattcttccccctctatgcggccagatgtgtccagcccccccagctcctcatctaccgctactactggccccccacccaaactatgcctggtctgtagtgatgaggcctccggatgtcattacggggtcttaacatgtggatcatgcaaggtgttttttaaaagagcagtagagggccagcataactatttatgtgccggcagaaacgactgtatcatcgacaagattcgccgtaagaactgtccggcatgccgctatcgtaagtgtctacaagctggaatgaacctggaggcacggaaaacaaaaaagaagataaaaggcatacaacaagcaactacaggcgtctctcaggaaactagcgagaaccctggaaataaaactattgtgcccgctacgttacctcagctaacacctacactagtgagcctcctcgaggtaatcgagccagaagtcctctacgccgggtatgattcttcagtcccagattcaacatggcgcataatgactacactcaatatgctgggggggcgccaggtgatcgcagccgtgaagtgggcgaaagccattcccggtttccggaacctgcacctggatgaccagatgaccttactccagtactcctggatgtttttgatggcattcgccctggggtggaggtcatatcgacagtcctctgcgaacttgttatgtttcgctcctgatttgataattaatgaacagcgtatgaccctcccttgcatgtatgatcaatgtaaacacatgctctatgtgagcagtgagttgcaccgcctgcaagtaagttacgaagagtacctgtgcatgaaaaccctactgctgctctctagcgtccccaaggacggcctgaagtcacaagaactgttcgatgaaatcagaatgacttacattaaggagctggggaaggccatcgtgaagcgggaggggaacagcagtcagaactggcagcgattttaccagcttacaaagctgctggactcgatgcacgaggtcgtcgagaacctgctgaactattgttttcagacattcttagacaagacaatgagtattgaattccccgagatgctagccgagattatcaccaatcagatcccgaagtacagcaatggcaatatcaagaagctgttattccaccaaaagtag

SEQ ID NO: 16430 - DNA, 1782 bp, synthetic construct
  misc_feature 1..1782: note = Description of Artificial Sequence: Synthetic coding sequence
  source 1..1782: mol_type = other DNA
atggactccaaggagtccctcacccccggccgagaagaaaatccatcctctgtcctggcccaggagcgtggtgatgtgatggatttctacaaaacgctccggggcggtgctacagtaaaggtaagcgccagcagcccatcactggccgtggcgagccaatcagacagcaaacagcgacggctcttagtagactttccgaaggggtctgtgagcaatgcacagcagcccgacctgtccaaggctgtgagtcttagtatggggctctatatgggggaaaccgaaacaaaggtgatgggcaatgacctcggttttccccagcaagggcagatctctctatcgagcggggagaccgatctgaaattgctagaagagagtatcgctaatctcaacagaagcacatcagtgccggaaaatcctaaatcttccgccagtaccgctgtgagtgctgccccaactgagaaagagtttccaaaaacacactcagacgtaagttcggagcagcagcatctaaaagggcagaccggtaccaatggcggcaacgtgaaattgtatacgaccgatcagtccacatttgacatcttacaagacctggagttctcttctggttcccctggcaaggagaccaacgagtccccttggcgcagcgatctattgattgacgagaattgcctactctcccctctggctggcgaggatgactcattcctgttggaaggaaactctaatgaggattgtaagccactgattctcccagacacaaagcctaaaataaaggacaacggagatctggtcctgtcaagtccctcaaacgtgacgctccctcaagttaagacagagaaagaagatttcattgaattatgtactccaggtgttatcaagcaggagaaattaggtactgtgtattgccaggcctcctttcccggcgctaacattatagggaacaagatgagcgctatctctgtacatggggtctcgacctcaggggggcagatgtaccattatgatatgaatacggcctctctgtcgcagcagcaggatcagaaacccatctttaacgttatccccccaattcctgtgggatccgaaaactggaaccgctgtcagggttctggggacgacaacctgacaagtctcggcacactaaactttcccggccgaaccgtcttcagtaatgggtactcatctccatctatgaggcccgacgtgagcagcccacccagctcttcaagtaccgccactacaggacccccccccaaactctgtcttgtgtgtagcgacgaggcatctggctgccattacggagtactaacttgcggctcctgtaaagtttttttcaagcgcgcagtggagggacaacacaattacctctgcgctgggcgtaacgactgcatcattgacaaaatccgacgaaaaaattgtcccgcctgcagatatcgcaaatgtctgcaggcagggatgaacctcgaggtggttcccaaggatggactgaagtcgcaggagttgttcgatgaaataaggatgacatatattaaagagctgggcaaagccattgtcaagagagagggtaatagtagccagaactggcagagattctaccagctgaccaaactgctagactcaatgcatgaggtagtggagaatcttctgaactattgctttcagacctttctggataaaacaatgtctatcgagttccccgagatgctggctgagattataactaaccagataccaaagtactccaatggcaatatcaaaaagcttctatttcatcagaagtag

SEQ ID NO: 16431 - DNA, 2334 bp, synthetic construct
  misc_feature 1..2334: note = Description of Artificial Sequence: Synthetic coding sequence
  source 1..2334: mol_type = other DNA
atggattcaaaggaaagcctcactccaggtcgcgaggagaacccgagctccgtcctcgctcaggaacgaggggacgtgatggacttttataaaacgctgagggggggggcaaccgttaaggtatcagcttcaagcccatctctggccgttgcaagccaaagcgactccaagcaaaggcgtctgctggtggacttccccaagggcagtgttagcaatgctcaacaaccagatctcagcaaagctgtctcgctgtcaatgggactgtacatgggagagactgaaactaaagtgatgggtaatgatctgggatttcctcagcaggggcagatctctctgagctcaggagagactgacttgaaactgttagaggagtcgatcgctaatttaaacaggagtacttctgtgcccgaaaaccccaaatctagcgctagtactgctgtttcggcagcgcctaccgaaaaggagtttcccaaaacacactccgacgtttcttctgaacaacagcatctgaaaggccagacagggactaacgggggcaatgtcaagctgtatactaccgaccagtccacgttcgacattctgcaagatcttgaattcagctccggctcccctgggaaagagacgaacgaatctccctggaggtccgacttgttgatcgatgaaaattgtcttttaagtcccctggctggggaggacgacagctttctgttggaagggaacagcaacgaagactgcaagcctctaatcctccccgatacaaagcccaagattaaagataatggtgatctcgtgctgtcttccccgtccaatgtgaccctccctcaggtgaagaccgaaaaagaagacttcattgagctgtgcacacctggagtgataaagcaagaaaagctgggcacagtctattgccaggctagcttccctggcgctaatattattgggaacaaaatgtccgcaatatcggtgcacggggtcagtacctcaggcggacagatgtaccactacgatatgaacacagcctccctatcgcagcagcaggatcagaagccgattttcaatgtaattccacccatccctgtcgggagcgaaaattggaaccgttgtcaagggtcaggcgacgataacctcacaagtctcggcacacttaactttccaggaagaacagtgttcagtaatggatactccagcccctctatgcgccccgatgtgagcagtcctcccagctccagtagcacagcgacgactggacccccgcccaagctgtgcctcgtgtgcagtgacgaggcatctggctgccattacggagtcttaacgtgtggctcatgtaaggtgtttttcaagcgagccgtagagggacagcataactacttgtgcgccggcaggaatgattgtatcattgataagatacggcggaagaactgtcccgcttgtcgttataggaagtgtctgcaagccgggatgaatctagaagcccgaaaaacaaaaaagaagatcaagggtatccagcaggcaacaaccggagtgagtcaggagacctccgaaaatccgggaaacaagacaatagtgcctgctacactgccccaacttacacctactttggtgtctttgttggaagtcattgagcctgaagtgctgtatgccgggtacgactcatcagtgcccgattcaacgtggaggattatgactacactgaacatgctgggaggccgccaggttatcgccgccgtcaagtgggcgaaggctattcctggcttccgcaacctccacctggatgatcagatgacccttctgcagtactcatggatgttcctaatggcctttgcacttgggtggcgatcctaccgacagagctctgcgaacctgctttgttttgctcctgatctgataatcaatgagcagcgaatgactcttccttgcatgtatgatcagtgcaaacacatgctgtatgtgagtagtgaattgcatagactgcaggtcagttatgaagaatatctgtgtatgaagacactgcttttgttaagttccgtacctaaggatggcttaaaaagccaggagctgttcgatgagatcagaatgacttacatcaaggagttgggaaaggcaatagtgaaacgagaaggaaactcttctcaaaattggcagcgattctaccagctgacaaagctgctggattctatgcacgaggttgttgaaaatttgctaaattactgctttcagaccttccttgataagactatgtctatcgaatttcccgagatgcttgccgaaattatcaccaaccagattcctaagtactccaatggcaacatcaaaaagctgcttttccatcagaagtag

SEQ ID NO: 16432 - DNA, 2337 bp, synthetic construct
  misc_feature 1..2337: note = Description of Artificial Sequence: Synthetic coding sequence
  source 1..2337: mol_type = other DNA
atggattcaaaagagagtttgacacctggaagggaagagaacccttccagcgtgttggcccaggagcgaggcgacgtgatggatttttacaagactttgcgagggggagctacagtgaaggtctcagccagttccccaagtctggcagtggccagccagtctgacagcaagcaacggcgattactggtagatttccccaaaggcagcgtcagtaacgctcaacagcctgatctgtcgaaagccgtcagcttgagcatgggcctgtatatgggcgaaaccgagacaaaggttatgggtaatgacctgggcttcccacagcagggccagatcagcttgagttctggggaaaccgacctaaagttgctggaggagtccattgctaacctaaatcgaagcacatccgtcccagaaaatcccaaaagctctgctagcaccgccgtgtccgctgctcccaccgagaaagaattcccaaagacacactccgatgtgtcctcggagcagcaacatctcaagggtcagacaggaaccaatggaggcaatgttaagctgtatacaaccgaccagagcacctttgacatccttcaggatctggagttcagttctgggtccccggggaaggaaactaatgaaagcccttggaggagcgacctgttgatcgatgaaaattgtctactctccccgcttgctggagaagacgattcttttctcctggagggcaatagtaatgaggactgcaaacccctgatcctgccagacacaaaacctaagattaaggataacggagacctggtgctcagctcgccatccaatgttacccttccacaagtaaaaaccgagaaggaggatttcatcgagctgtgcacccccggagtaatcaagcaggagaagctgggtacagtttactgtcaagccagtttcccaggcgctaacatcataggtaataaaatgtccgcaatttcagtgcatggtgtttctacctccgggggccaaatgtatcattatgacatgaacacagcttccttatcccaacaacaggaccaaaaacctatattcaacgtgatcccgcctattcctgtcggcagtgagaactggaatcgctgtcagggctccggcgacgacaacctgactagcttaggcacattgaacttcccgggacgcacagtgttttccaacggttactcaagcccttcgatgaggccagacgtgtcttcccctcccagtagctcctccacagctacgacaggccctcccccaaaactgtgcctggtgtgttccgatgaagctagcggatgccattacggtgtgctgacatgcggtagctgcaaagtcttctttaaaagagccgtagaagggcgtcagcacaattatctttgcgcaggcagaaatgactgtatcatcgataagatcagacggaagaactgtccggcgtgccggtacagaaaatgcttgcaagctggcatgaatctcgaggcacgcaagacgaagaaaaaaattaagggaattcagcaggcaactactggagtgtcacaagaaacctctgaaaatccagggaataagactatagtaccagctaccctacctcaattaacgccaaccctggtttcactgctcgaggtcattgaacccgaagtgttgtatgccgggtacgatagctcagtgccggactcaacctggagaattatgacaacactgaatatgctgggaggtcggcaggttatcgcggccgttaaatgggcaaaagccattcctggcttcagaaatctgcaccttgacgaccaaatgacactgctgcaatacagttggatgttcttaatggcctttgctctgggttggcgctcctaccgccaatcctctgcaaacctgctttgtttcgcccctgacctcattatcaacgaacagagaatgacgctgccttgtatgtacgaccagtgcaagcacatgctctacgttagctctgagctgcataggctgcaggtctcgtatgaggagtatctgtgtatgaaaaccctactccttctctcctctgtccccaaagacggcctgaaatcccaggaattgtttgatgagattaggatgacttacattaaggagctcggcaaagcaattgtaaagcgagaaggcaatagctcccagaattggcagagattctaccagctgaccaaactgctagactcaatgcatgaggtggtggagaacctgctgaattattgtttccagaccttcctcgataaaaccatgagtatcgagtttcccgaaatgttggcggaaattattacgaaccaaatccccaaatattcaaatgggaacatcaagaagttgttatttcatcagaaatag

SEQ ID NO: 16433 - DNA, 2229 bp, synthetic construct
  misc_feature 1..2229: note = Description of Artificial Sequence: Synthetic coding sequence
  source 1..2229: mol_type = other DNA
atggactcaaaagagagcctgaccccaggtcgagaagagaaccccagcagtgtcctggcccaggagcgcggcgatgtgatggatttttataaaacccttcgcgggggcgcaactgttaaagtgagcgcctcgtccccctctttggccgtagcaagtcagtctgacagcaagcagcgaaggctgttggtggacttccccaaaggctcagtgagcaatgctcagcagcccgacctgtccaaagctgtgtcactgtcaatggggctctacatgggagagaccgagaccaaggtgatggggaacgatttggggttcccccagcaaggtcaaatttcactgtccagcggtgagacagaccttaaactgctagaggaatctatcgcaaacctgaaccggagcaccagtgtccccgaaaaccctaaatctagtgcctctacggccgtttcggccgcgcctaccgagaaagaattccccaaaacccactcagatgtgtcaagcgagcagcagcacctgaaaggtcagacaggaactaatggcggcaacgtgaagctgtacacaactgatcagtcaactttcgacatcctccaagatcttgagttcagctcgggctcccccggcaaggaaacaaatgagagcccctggcggtccgatcttctgattgatgaaaactgcctgttgagccctctggctggcgaggatgattcttttcttctggaaggtaattctaacgaggattgtaagcctctcatcctgcccgacaccaagccaaaaataaaagataacggtgacctggtcctcagctctccctcaaatgtaacactgcctcaggttaaaacagaaaaggaggacttcattgagctgtgtacccccggcgtcatcaagcaggagaagcttgggaccgtgtactgccaggcatccttccctggagctaatattatcggaaacaaaatgtcggcaatctcggttcacggagtcagtacaagtggtggtcaaatgtatcactatgatatgaataccgcttccttgtctcagcaacaggatcaaaagccaatattcaatgtgattccaccaattccagtggggtcggaaaactggaaccgttgtcagggttctggcgacgataacctcacctcactgggcacacttaacttccctggcagaactgtcttcagcaacggatattcatcacctagcatgaggccagacgtgtccagccctccaagcagcagttcaactgcgactactgggccaccccccaagctctgtcttgtttgcagcgacgaggcctccggctgtcactacggggtgctcacttgtggtagctgcaaagtcttcttcaagagagctgtggaaggtcagcacaactatctgtgtgccggacgcaacgattgcataattgataagatcagacgcaagaactgcccggcttgtagataccgaaagtgcctgcaggccgggatgaatttagaggctcgaaagacaaaaaaaaaaataaaaggcattcaacaggctaccactggagtcagccaggaaactagcgagaatcctggcaacaagacaatcgtccctgcgaccctgcctcagctgacccccacactagtctccctgctggaggtgatcgagcccgaagtactatatgccggttatgatagcagcgtcccagatagtacctggcggattatgacgaccctcaacatgctgggaggacgccaggtaatcgcagcagtcaagtgggccaaagccatacctgggtttagaaacctgcatctggacgaccagatgactcttctgcaatacagctggatgttcctgatggccttcgctttgggctggcgcagctaccgccagtcctctgcaaatctgctgtgcttcgcgcctgatttgataatcaacgagcaaagaatgaccctcccttgtatgtacgaccaatgcaaacatatgttatacgtgtcatctgagctgcatcgcttacaggtgagctacgaggaatacctgtgcatgaaaactttgcttctgctcagctcggtcccgaaagacggactgaaaagccaagagcttttcgacgaaattagaatgacctacataaaagagttaggaaaagcaattgtgaagagagaagggaacagcagccagaattggcaacgattttatcagctgactaagctactggattccatgcacgaaaatgtgatgtggctgaagcctgagagtacctcacatactctcatctag

SEQ ID NO: 16434 - DNA, 1143 bp, synthetic construct
  misc_feature 1..1143: note = Description of Artificial Sequence: Synthetic coding sequence
  source 1..1143: mol_type = other DNA
atgcggccggacgtttcctctccaccttcttccagcagcacagcaacaactgggccaccccccaagctctgtctggtttgcagtgacgaggcgagcggctgtcattacggtgtcttaacatgcggttcatgtaaagtatttttcaagcgtgcggtggagggccagcacaattacttgtgtgcgggaagaaatgactgcataatcgacaagatacgcaggaaaaactgccccgcctgcaggtacaggaaatgcttacaggctggtatgaacctggaagcacgcaagacgaaaaaaaaaatcaagggcatacagcaagcgaccacaggagtctcccaggaaacgtctgaaaaccccggcaacaaaaccatcgtgccggcaacgctgcctcagctgacacctaccctggtgtccctgctggaggtcatcgaacccgaggttctgtacgcaggatacgattcaagcgttccagatagcacctggcggattatgactaccctgaacatgctgggcggccggcaagtgatagccgcagttaagtgggctaaagctatccctgggtttcggaacttacacctcgatgaccagatgaccttgctccagtattcttggatgtttcttatggcttttgcccttgggtggagaagttaccgtcaatcttctgcaaacttgctgtgctttgcacccgacctgattatcaacgagcagcgaatgactctgccatgtatgtacgatcagtgcaagcatatgttatacgtgagcagcgagctgcatcgtctgcaagtgtcgtacgaagagtacctgtgcatgaaaaccctgctgctgttgtcatccgtccctaaagatggactcaagagccaagagctctttgatgaaatccggatgacatatatcaaggagctcggaaaggcaattgtcaagagggaaggtaacagctcccagaattggcagaggttctaccaactcacaaaacttctggactctatgcacgaagtggtggaaaatcttcttaactattgctttcagacattcttggataagaccatgtccatcgaattcccagaaatgctggctgagatcatcacaaaccagatccccaagtacagcaacggcaacatcaaaaagctgttgtttcaccagaaatag

SEQ ID NO: 16435 - DNA, 2256 bp, synthetic construct
  misc_feature 1..2256: note = Description of Artificial Sequence: Synthetic coding sequence
  source 1..2256: mol_type = other DNA
atggattcaaaggagtccttaacacctggaagggaggaaaacccttcaagcgtgctggctcaggaaaggggggatgtgatggatttttacaaaaccctgcgcggtggcgcaactgtcaaggtgtccgctagtagcccaagtcttgctgtggcgtctcaaagcgattctaaacagcggcggctgctggtggatttcccaaaaggcagcgtgtcaaacgcacagcagccagatctatccaaggccgtatctctcagtatgggactgtatatgggcgagactgagactaaggtgatgggaaatgatctcggctttccccagcaggggcagatctctttgagcagcggcgaaaccgacctgaaactgttggaagagagtattgccaatctgaacaggtcaacatccgtcccagagaacccaaaaagtagcgcctcgacagcagtgagtgctgctccaaccgaaaaagagtttcccaaaacgcactctgacgtatcttctgagcagcagcacctgaaaggtcagactggtaccaatggcggaaacgtaaaactatatactaccgatcaaagtaccttcgacatattgcaggaccttgagttctcgtcaggaagcccgggcaaggagactaatgagtccccctggcgcagcgatctgctgattgatgagaactgtctgctctctcctttggccggagaagacgacagttttctgctcgaaggaaactccaacgaggactgcaaaccacttatactgcccgacaccaagcccaagataaaggacaacggcgacctggtcctgtcgtcgccctctaacgtgacacttccacaggtgaagacagagaaggaagatttcatagaactttgtactcctggagtcatcaaacaggaaaagcttggtaccgtctattgtcaggcctccttccctggggcaaatatcatagcgtctctctctcagcagcaggatcagaaaccaatctttaacgtgatccctccaatacccgtcggctccgaaaactggaaccgatgccagggctccggagacgataacttaacaagcctgggcacactcaatttccctgggcgcacagtttttagcaatgggtacagctctccctccatgcgacccgacgtctctagccccccgtccagctccagtacagcgactacagggccacctcccaagctgtgcttagtttgttccgatgaagcgtctgggtgtcactatggagtgctcacctgcggttcctgcaaggtgttcttcaagcgcgccgtggagggccagcataattacttgtgtgcaggaaggaacgattgtatcattgacaaaatacgccggaaaaactgccccgcttgtaggtaccggaagtgtcttcaggctggaatgaacctggaagccagaaaaactaaaaagaagattaagggtattcagcaggctacaacaggagtgtcccaggaaacatctgaaaacccagggaacaaaaccatagttccagcaactttgccccagctcacccctacactcgttagtctgctcgaggtgatcgaacccgaggtactctatgccggatacgactcctccgttcctgattctacctggcgcatcatgacaaccttaaatatgttaggaggacgccaggtgatagcagccgtgaagtgggccaaagcgataccagggttcagaaatctgcaccttgatgatcagatgactctgctccagtactcctggatgtttttaatggcctttgccctcggctggcggagctatagacagagctcagcaaatcttctgtgcttcgcacctgacctcataattaatgaacaaagaatgactttgccttgtatgtatgaccaatgtaagcatatgctgtatgtttcctcagaattgcatcgcctacaagtctcctacgaggagtacctatgtatgaaaactctgctcctcttatcctcagtccccaaggatggtctgaaatctcaggagctgtttgatgaaattaggatgacctacattaaggaactgggtaaggccattgtgaagcgcgagggtaactcctcacagaattggcagcgcttctaccagctgacaaagctgctcgacagcatgcatgaagtggtcgagaatcttctaaactactgtttccaaacattccttgataagacaatgagcatcgagtttccagagatgctcgccgaaatcattacaaatcagattcctaagtatagcaatggcaatattaagaagcttcttttccaccagaaatag

SEQ ID NO: 16436 - DNA, 435 bp, synthetic construct
  misc_feature 1..435: note = Description of Artificial Sequence: Synthetic coding sequence
  source 1..435: mol_type = other DNA
atggactcaaaggaatcactgactcctggccgcgaggagaacccctctagcgtccttgctcaggaaagaggggacgtcatggatttttataagacgcttaggggtggtgctaccgtcaaagtcagtgccagctcaccctcactggccgtcgccagccagagcgattctaaacagaggcgcctcttggtggactttcccaagggcagtgtcagcaatgcgcagcaacctgacctgagcaaggctgtcagtctgtccatggggctgtatatgggtgaaacggaaactaaggtaatgggcaatgatctgggtttccctcagcagggccaaatttcactgtcctccggcgagaccgaccttaagctgctggaggagagcatcgccaacctcaacaggtctacttcagtgccagaaaaccctaagagctccgcaagttag

SEQ ID NO: 16437 - DNA, 438 bp, synthetic construct
  misc_feature 1..438: note = Description of Artificial Sequence: Synthetic coding sequence
  source 1..438: mol_type = other DNA
atggacagtaaagagagcctaacaccaggaagggaggagaaccctagctccgtgttagctcaggaacggggcgacgtgatggacttttacaagactctcagggggggtgccacggtgaaggtgagcgcaagcagccccagcctcgcggttgcatcccagagcgactccaaacaacggcggctactggtggacttcccgaaggggagcgtgtcaaacgcccagcagcccgatctcagtaaggccgtaagccttagcatgggactctatatgggggagaccgaaactaaggtcatgggcaatgatctggggttcccccaacagggacagattagcctctcctcgggggagactgatctgaaattactcgaagaaagcattgctaatctcaataggtcaacatccgtcccggagaatcctaaaagtagcgccagtacttag

SEQ ID NO: 16438 - DNA, 2334 bp, synthetic construct
  misc_feature 1..2334: note = Description of Artificial Sequence: Synthetic coding sequence
  source 1..2334: mol_type = other DNA
atggattccaaagagagcctgacgccaggtagggaggagaatcctagctccgtcctagcccaggagagaggagacgtgatggacttctataaaacactgcgggggggggccactgtcaaggtctccgcctcttcaccaagcctggccgtggcctctcagtcggacagcaaacagcgtagattgttagtcgatttccccaaaggttccgtctctaacgcccagcagcctgatctgtcgaaggctgtttcactgtccatggggctgtacatgggcgagactgagaccaaggtgatgggtaacgatctaggtttcccgcagcaaggacaaatctccctgtcttccggcgagacagatctaaagttgctggaggagtcaatcgcaaatctgaatcgcagtacttccgtccctgaaaatccaaagtcctcagccagcactgccgtgtctgctgccccaactgagaaggaatttcccaagacacatagcgatgtgtcttctgaacagcagcatctaaagggccaaaccggcaccaacggcgggaacgtcaagctttacaccactgaccaatctacctttgacatactccaagatctggaattctcgagtggaagcccaggtaaggaaactaacgagagcccttggcggtctgatttgctgatcgacgaaaactgtttgctttctccgctggcgggcgaggatgactctttcctgttggagggtaacagcaatgaggactgcaagcccctgattctgcctgatacaaagcctaaaatcaaagacaacggagatctcgtgctcagttccccatcaaacgtaactctgccccaagtcaaaaccgaaaaggaggattttattgagctttgtactccgggggttatcaaacaggagaagttaggtaccgtgtactgccaggcgtccttccctggtgccaatatcatcggcaacaaaatgtcagctatcagtgtgcatggcgtatcaacttctggtggacagatgtaccattacgacatgaatactgccagcctgtctcagcagcaggaccagaagcccatctttaacgtaattccacctattcctgttgggagcgaaaactggaaccgttgccaggggtcaggcgacgacaacttaactagcctcggcactctgaacttccccggtcgcaccgttttctccaatgggtacagcagtccctctatgcgccctgacgtgtccagtcccccatcctccagctcaactgctaccaccgggcccccccctaagctgtgtctggtgtgtagtgacgaggctagcggatgccactatggagttttgacttgtggcagttgtaaggtgttttttaaaagagcagtagagggccaacacaattatctgtgcgccggaaggaatgattgcattatcgacaaaattcggagaaaaaactgtccggcttgcagataccgcaaatgccttcaagctggcatgaacctggaagctcgcaagactaagaagaaaattaaaggtatccagcaagctacgacaggggtgtctcaggagaccagcgaaaaccccggtaacaagactatcgtgcccgctactttgcctcagctgactcccaccttggtaagccttctggaagttatcgaacctgaggtactctatgccggttacgattcttcagtcccagacagtacctggcggatcatgacaacgttaaatatgctgggtggcaggcaagtcatcgcagctgtgaagtgggccaaggccattccagggttcaggaatcttcacctcgacgaccaaatgaccctcctacaatattcatggatgttcctgatggcttttgcactcggctggagaagctaccggcagtcctctgccaatctgctgtgttttgctcccgaccttataatcaacgagcagagaatgacgctgccatgtatgtatgatcagtgcaagcacatgctgtatgtgtcatccgagctgcacaggctccaggtttcttatgaagagtatctgtgcatgaaaacattgttgctcttgagctccgttcccaaggatgggcttaagtcccaggaactttttgacgaaatcagaatgacatacattaaggagcttggaaaggcaatcgtgaagcgggaggggaatagttctcagaactggcagcgcttttaccaactgacaaaactgctggactccatgcacgaggttgtggaaaacttgcttaactattgttttcagaccttcctcgacaaaacgatgtccattgagttcccagaaatgctagccgaaatcataaccaaccagatccctaagtattcgaatggtaatatcaagaagctgctgttccatcaaaaatag

SEQ ID NO: 16439 - DNA, 2337 bp, synthetic construct
  misc_feature 1..2337: note = Description of Artificial Sequence: Synthetic coding sequence
  source 1..2337: mol_type = other DNA
atggatagcaaagagtccttaacaccgggcagggaagagaatccttcttccgtgctcgcccaagagaggggcgacgttatggatttctacaaaaccctccgcggcggggccacggtcaaagtgtcagcttccagtccttcgctagccgtcgccagccaaagcgatagtaagcagcggcgcttgctggtagattttcccaaaggatcagtgagtaacgcgcaacagccagacctgagcaaagctgtctcactgtccatgggcctctacatgggcgagaccgaaaccaaggttatgggaaatgatctgggctttcctcaacaaggccagatttctctgtcgagcggggagaccgacctgaaacttctggaggaaagcatcgcgaaccttaacaggtctacttcagtccctgaaaatcccaagtcaagtgcatctacagccgtctccgcggccccaaccgagaaggagtttcccaaaactcatagtgacgtcagttctgagcaacagcatcttaagggacaaaccggcaccaatgggggcaatgtaaaactgtacacaacagaccagagcactttcgatattttacaagacctggagttttcctccggctccccaggcaaagagactaatgaatctccatggcgctcagacctgctgatagacgaaaattgccttctgagcccactggcaggtgaagatgacagcttcttgttggagggaaacagtaacgaagactgcaagcccctgatactgcccgatactaagcccaaaattaaggataacggcgatctcgtgctgtcgagcccctctaatgtaacgcttccacaggtgaaaacagagaaggaggacttcattgaactgtgcacccctggggtgatcaagcaagagaaacttggaaccgtgtactgccaagccagtttccccggggccaacattatcggcaataagatgtcagcaatttctgtgcatggcgtaagcacctctggcggtcaaatgtatcactatgacatgaatacagcttccctatcgcagcagcaggaccagaaacctatatttaatgtgattcctccaatccctgtgggttccgaaaactggaaccgctgccaggggtcaggagacgataatctaacatcgctgggcacactgaacttccccggtaggaccgttttctccaacggttacagcagccctagtatgcgaccagatgtgtcttcccctcccagtagctcgtctaccgccaccactgggcctccaccgaagctatgcctggtatgcagcgatgaggcgtccggatgtcactacggagtgctgacttgcggatcctgtaaagtcttctttaagcgcgctgtggagggacgccaacataattatctgtgcgccggacgcaacgactgtattatagataagatccgacggaaaaactgcccagcatgtagatatagaaagtgcctgcaggctggcatgaatttggaggcgaggaaaaccaagaagaagattaaaggcatccagcaagcaaccacaggagtgagccaagaaacgagtgaaaatcccggcaacaaaaccatcgtgcctgccaccctgccccagttgacccctactttggtgtctctcttggaagtgatagaaccagaggtgctgtatgccggatatgacagtagcgtcccagatagcacatggaggatcatgacaacactcaatatgcttgggggcagacaggttatcgccgccgttaagtgggcaaaggctatccccgggttccgcaatctgcacctcgatgaccaaatgaccttgctgcagtattcctggatgtttttaatggcattcgcgctcgggtggaggtcctacagacaatcatcagccaacctgctctgcttcgcccctgatctaatcattaatgaacagcgcatgacgctgccttgcatgtatgaccagtgcaaacacatgctgtatgtgagcagtgaattgcatcggttgcaggtaagctatgaggagtacctgtgtatgaaaacactgcttctgctgtcctctgtgccaaaagacggactgaagtcacaggagctgttcgatgagatccgtatgacttacattaaagagttaggaaaggcaattgtgaagagggaggggaatagttctcagaactggcagcggttctaccagctgaccaagctcttagactctatgcatgaagtagtggaaaaccttcttaattattgctttcagacattccttgataagactatgtctatagaattcccagaaatgctagcagagatcattaccaaccaaatccctaaatactccaacgggaacatcaaaaagcttctgttccaccagaaatag

SEQ ID NO: 16440 - DNA, 438 bp, synthetic construct
  misc_feature 1..438: note = Description of Artificial Sequence: Synthetic coding sequence
  source 1..438: mol_type = other DNA
atggatagcaaggagtcattaacgcctgggagagaagaaaatcccagtagcgtgctagcccaggaaagaggagacgtgatggacttctataaaacactgcgcggtggagccactgtcaaagtgagcgcttctagcccaagcctggcggtcgcaagccagtctgattctaagcagaggcgcctccttgtcgatttcccgaaaggtagcgtgagcaacgcccagcaaccagacctgagcaaagctgtgtctctttccatgggcctgtatatgggtgaaactgaaaccaaggttatggggaacgatcttggtttcccacagcagggacagatcagtctctccagcggcgaaactgatctcaaactgctggaggaatctatagccaacctgaaccgtagcaccagcgtgcctgagaacccgaaaagcagcgccagcacgtag

SEQ ID NO: 16441 - DNA, 438 bp, synthetic construct
  misc_feature 1..438: note = Description of Artificial Sequence: Synthetic coding sequence
  source 1..438: mol_type = other DNA
atggacagtaaggagagcttgaccccggggagagaagagaatccttcatcggtgcttgcacaagagcggggtgatgttatggacttttataagactctgcgtgggggggccaccgttaaggtgagtgctagctcaccctccttggccgtggcaagccagtccgattccaaacaacgcaggctccttgttgatttcccaaaaggttctgtttcaaatgcgcaacaaccagatctaagtaaagcagtgtcactctccatggggctttatatgggtgagaccgaaaccaaggtaatgggaaacgatttgggcttccctcagcaaggtcaaatctcactgtcctcgggcgagactgatctaaagttgttggaggagagcatagccaacctgaatcgtagcacctccgtacctgagaacccaaagtccagcgcaagtacttag

SEQ ID NO: 16442 - DNA, 438 bp, synthetic construct
  misc_feature 1..438: note = Description of Artificial Sequence: Synthetic coding sequence
  source 1..438: mol_type = other DNA
atggactccaaggagagtctgaccccgggacgagaggaaaatccttccagcgtcctggcccaggaaagaggggacgttatggacttttacaagacactaaggggaggggccactgtcaaggtgagtgcttccagcccctcactcgctgttgccagccaatctgattcaaaacagcggagactgcttgtggatttccctaagggaagcgtctccaacgcccaacagcccgacctgtcaaaggcagtgtctctgtcaatgggtttgtatatgggagagactgaaacaaaggttatgggtaacgatttggggtttccacagcagggtcagatctcactttcaagcggcgaaactgatctgaaactcctggaggagtcaatagctaatttgaaccggagcacaagcgtccccgagaatcctaagtcctcagcttctacttag

SEQ ID NO: 16443 - DNA, 1914 bp, synthetic construct
  misc_feature 1..1914: note = Description of Artificial Sequence: Synthetic coding sequence
  source 1..1914: mol_type = other DNA
atgcacgattcaattcgcttcggaaatgtggacatgccatgcgtgcaggctcagtacagccccagtcccccaggatcttcatacgctgcccaaacctacagttctgagtacacaactgagattatgaacccggactatacaaaactgacaatggacttaggttctacagaaatcactgctacagccaccaccagcctcccatccatttccaccttcgtggagggatacagcagcaactatgaactgaagcccagctgcgtgtatcaaatgcagaggcctctgattaaagtggaagagggaagggccccttcataccaccaccaccatcaccaccatcatcatcaccaccatcaccaccagcagcagcatcagcaaccctcgatcccacccgcctccagtccagaagatgaggtgctgccgagtacatctatgtatttcaaacaatctccaccaagtacaccgaccaccccagcttttccccctcaggccggagccctgtgggatgaagcactcccaagtgctcccggctgcattgccccaggcccactgctggacccgcctatgaaagcagttcctacagtggctggagcccgctttcctctgttccattttaaaccatcccccccgcaccctcccgcaccatctcctgccggagggcatcacctggggtacgaccctacagccgccgcggctctatctctaccactgggagctgcagcagccgctgggtcacaggcggcagcgctggaaagccatccttatggcctacctctggccaagagagccgccccattagctttccccccgcttggcctaactccttcgcccacagcatctagtctgcttggcgaatccccatcactgccgagtccaccttccagaagctcttcctctggtgaggggacatgtgctgtgtgcggagacaatgccgcttgtcaacactacggagtaaggacttgcgagggctgtaaagggttttttaaaagaacagtccagaagaatgctaagtatgtttgccttgccaataaaaactgtccagtggataagaggagacggaatcggtgtcaatactgccgctttcagaagtgtctctctgtaggaatggtcaaagaggtggtgcgaaccgattcactgaaggggaggcggggccggctgccaagcaaaccaaaatccccattacagcaggagcccagccaaccatcacctccaagccccccaatctgtatgatgaatgctttagtacgcgcactaaccgactctacccctcgtgatctggactactcgcggtattgtcccacggatcaagcggccgcggggacggacgctgagcatgtgcagcagttctataacttgctgaccgcttcaatcgatgtgtcaagatcctgggcagaaaaaattcccggtttcactgacctgcccaaggaggaccagacactgctcatcgagagcgctttcctcgagttattcgtcttgcggctatctatcagaagcaacaccgccgaggacaaattcgtattctgtaacggcctggtgctgcatcggctgcaatgcctcagagggttcggcgaatggctggactccatcaaagacttctcactcaaccttcaaagtcttaaccttgatattcaagctctcgcttgcttatcagcacttagcatgataaccgaaaggcatgggctgaaggaacccaagcgcgtcgaggaactttgcaataaaataacaagctccttaaaggaccaccagagcaaaggccaggccctggaacccactgagagtaaagttttaggcgccctggtggagctgcggaagatctgtactctgggcctgcagaggatcttttatctaaagttggaggatttggtgagccccccatcgatcattgataagttgtttctggacactctgccattctag

SEQ ID NO: 16444 - DNA, 1332 bp, synthetic construct
  misc_feature 1..1332: note = Description of Artificial Sequence: Synthetic coding sequence
  source 1..1332: mol_type = other DNA
atgccatgcgtacaggcacagtattctccgtcccccccaggaagttcttacgcagcccagacttactccagtgaatataccacagagatcatgaaccccgactacacgaagctaaccatggatcttgggtcaaccgaaatcacagctacagccactactagcctgccgtcaatttcaaccttcgtggagggctactcctctaattacgaactgaagccctcgtgcgtgtaccagatgcaacggccactgatcaaggtcgaagaaggaagggcaccaagttatcatcaccaccaccaccaccaccatcaccatcaccaccaccatcaacagcaacaccagcagccaagtatccctccggcaagctcccctgaggatgaggtgttgccctcaacttcaatgtatttcaagcagtccccaccgtccacgccaaccacaccggctttcccgccgcaggccggtgccctgtgggatgaagccctcccgagtgcccccgggtgcatcgccccaggacctttgctagatcccccaatgaaggctgtgcctacagttgccggcgcacgattcccccttttccacttcaagccgagtcctccccatccgccggctccctcaccagccggcgggcaccacctggggtacgacccaacagctgctgccgccctgtcgctgcccctgggcgccgccgctgccgctgggtctcaagccgctgcactcgagagtcatccttatggccttcccttagccaaaagggcagctcctctggccttcccccccttgggattgaccccgtcacctactgcctcatctctgctcggggaaagcccttctctaccgagccctccatccaggagctctagcagtggcgagggaacatgcgctgtctgtggagacaacgctgcatgccaacactacggcgtgcggacttgtgaaggctgcaaagggtttttcaagcgaacagtccagaaaaacgcgaagtacgtgtgcctcgcaaataaaaactgccccgtggacaaacggaggcgcaataggtgccagtactgtaggttccagaagtgcctgtcagttgggatggtgaaagaggtcgtccgaactgactccctgaagggcaggaggggacggctgccttctaaacccaaatctcccttgcagcaggaacctagccagccttctcccccttctcccccaatttgtatgatgaacgctctggtgcgggctctgactgatagcacgccgcgggacttggactactctcgggtctcatttatgatctcctgcttccagatgaacgatcagggcctgtatctttggctgttggtcatcagggtcgactag

SEQ ID NO: 16445 - DNA, 894 bp, synthetic construct
  misc_feature 1..894: note = Description of Artificial Sequence: Synthetic coding sequence
  source 1..894: mol_type = other DNA
atgaaagcggtccccactgtggccggcgcccgattccccctgttccacttcaaacctagccccccacatccccctgcaccatccccagcgggaggacatcatctcggttatgatccaactgctgccgccgccctgtctctgccactcggcgccgccgcggcagctggtagccaggctgctgcactcgaatctcatccttacgggttaccactggctaagcgcgctgctccgctggccttccctcctctcggattaacgccatcccccactgcatccagcttgttgggcgaatcgccctccttgccaagccctccctcccggtctagcagttcaggggaggggacatgtgctgtctgcggagataacgcagcctgccagcattatggtgttagaacctgtgagggatgtaaagggttcttcaagagaacagtccagaaaaacgctaagtatgtctgcttagctaacaagaattgtccggttgacaaaagacgacgcaatcggtgccagtactgtcgctttcaaaagtgtctcagcgttggaatggtgaaagaagttgtgcgtactgatagtctgaaaggtcgccggggacgattacccagcaagcccaagtctcccctgcagcaggaacccagccaaccatcccccccttctcccccaatctgcatgatgaatgcactcgtgagagccttaacagattccactccccgagaccttgattactcaagggtttctttcatgatctcttgcttccagatgaacgaccagggcctttatctctggctactcgtgatacgagtgctggactcttttcacacattctccatctttttagcatcattctctaacagcgtacatcccctgcagcaaatcatcttcgccctattaaacctgtag

SEQ ID NO: 16446 - DNA, 1881 bp, synthetic construct
  misc_feature 1..1881: note = Description of Artificial Sequence: Synthetic coding sequence
  source 1..1881: mol_type = other DNA
atgccctgtgtacaagcgcaatactcaccgtctccccccggaagtagctatgctgctcagacttattcttcagaatatacgacagaaatcatgaacccggattacacgaagctgaccatggatctcggatctaccgagatcaccgcaacagcgaccacgtcacttccatcaatttctacctttgtcgaaggatactcatctaactatgagctaaagccatcatgcgtgtaccagatgcagaggcctcttattaaggtcgaggagggtcgcgctccgagttatcaccatcatcaccaccaccatcaccatcatcatcaccatcatcagcaacaacaccagcagccatctataccccccgcgagctcccctgaggatgaagtgttgcccagcaccagcatgtactttaagcagtctccccccagtacgcctacgacaccggccttccccccacaggctggggccctgtgggacgaagcattaccaagcgcccccggctgtattgcgcccggcccgttgcttgacccccctatgaaagcagtacctacagtggctggggctcgtttccctctctttcacttcaagcccagccccccacatccccccgcgccttctcccgcaggcggccaccaccttggatacgacccgacggctgcggctgctttgagcttaccactgggggctgctgccgcagctgggtcacaggcagccgccctggagagtcacccttacggactgcctctggccaaaagggctgcaccactcgcctttccaccactgggcctcacccccagccccacagcctcgtccctgctgggggaatcaccaagcctgccctcccctccatcacggagttcctcatccggagagggaacttgcgcagtctgtggcgacaatgctgcttgtcagcattatggcgtgagaacatgcgaaggatgcaaagggttcttcaaaagaacagtgcaaaagaacgcaaaatatgtgtgcctggccaataagaactgtcctgtagataagcgccgcagaaatagatgtcagtattgtaggtttcagaaatgtctgagcgtgggaatggtgaaagaagtcgtgagaactgactcactcaaaggcagacgggggcggttgccctctaagccgaaatcacccctgcaacaggagcccagccagccctcacccccaagtcctcctatttgcatgatgaatgcgcttgttcgcgccctgaccgactcaaccccgagagatctggattacagcaggtactgtcccaccgatcaggccgcagctgggactgacgcggagcacgtccaacagttttacaatttgctgaccgcttcaatagacgtatcccgcagttgggccgaaaagataccagggtttactgatttacccaaggaggaccagaccttactgatcgagtcagcttttctggagctctttgtactgcggttgtctatccggtccaacaccgccgaggataaatttgtgttttgtaacggattggtgctgcaccgactccagtgtctgagggggtttggcgagtggctggattcaataaaggacttttcactaaatttgcagagtctgaatctggatatacaggctctagcctgtctgagcgccctgagcatgatcaccgagaggcatgggctgaaggaacctaaaagggtggaggagctgtgtaacaagattacaagttcactcaaagaccatcagtctaaaggacaagcccttgagcctacagaatccaaggtgctcggcgctctcgttgaacttagaaagatctgtaccctgggactgcagaggatcttctatctgaagctcgaggacctggtctctccaccgagcataatagacaagctgttcctggataccttaccattctag

SEQ ID NO: 16447 - DNA, 627 bp, synthetic construct
  misc_feature 1..627: note = Description of Artificial Sequence: Synthetic coding sequence
  source 1..627: mol_type = other DNA
atggggaacgcccaggaaagacccagtgagactatagaccgagaaagaaaacgtctcgttgagacactgcaggcggattctggcctgttactggatgcgttactggcacgtggggtccttaccgggccggaatacgaagccctggatgcgctccctgatgctgaaaggcgagtgcgcaggttgctgctgttagtccaggggaaaggagaggcggcttgtcaggaacttctgcgctgtgctcagcgtaccgcaggcgcccccgatcccgcttgggattggcagcacgtgggacccggataccgcgatcgcagttacgatcctccatgtcctggccattggacccccgaggcaccaggtagcggcaccacctgtcctggcctcccccgggcaagcgatcccgatgaggcaggtgggccggagggaagcgaggctgtacaaagcgggacaccagaggaaccagagcccgagctcgaggcagaggcatccaaggaagccgagcctgagcctgaacctgagcccgaactggaaccagaggcagaggcagagccggaaccggaacttgagcccgagccagatcctgagccagagcctgattttgaagaaagagacgaaagcgaagatagctag

SEQ ID NO: 16448 - DNA, 627 bp, synthetic construct
  misc_feature 1..627: note = Description of Artificial Sequence: Synthetic coding sequence
  source 1..627: mol_type = other DNA
atggggaatgctcaggagagaccttccgagacgattgacagagagcgtaagcgattggtagaaacactacaggccgactccgggctgctcctggacgccctgttggctcgtggcgtcctcactggccctgagtacgaagcattggatgctctgcccgatgccgagcgacgcgttagacggctgcttttactggtgcaaggaaaaggggaggccgcctgtcaagagctactaagatgtgctcagcgcaccgctggagcgccagatcctgcatgggactggcagcacgttggcccgggctaccgtgataggtcttatgacccgccttgccctggtcactggacccccgaagctcccggttctggaacaacctgccctggtctgcctcgagcctctgacccagacgaggcgggaggccccgagggaagcgaggcagtccagtcaggtactccagaggagccggagcccgagttagaggccgaggcaagcaaggaggccgagcccgagccggagcctgaacctgagctcgaaccagaggccgaagctgaacctgaacccgaactggaacctgagcctgaccccgaaccagaacctgacttcgaggaacgcgatgaatccgaagattcctag

SEQ ID NO: 16449 - DNA, 2133 bp, synthetic construct
  misc_feature 1..2133: note = Description of Artificial Sequence: Synthetic coding sequence
  source 1..2133: mol_type = other DNA
atggtcaaacttgcaaaggcagggaaaaaccaaggggaccctaagaagatggcacctcccccgaaagaagttgaggaggatagcgaggatgaagaaatgagtgaggacgaggaggatgacagctccggggaggaggtagtaattcctcagaagaaggggaaaaaagcagctgctaccagtgctaaaaaagtggtcgtttcaccaacaaagaaggtggctgtcgctacccccgccaaaaaggccgcagttacccccggaaagaaggctgctgccacccccgccaagaaaaccgtcactccagccaaagccgtaactacccccggcaagaagggcgcgacccccggtaaggccctggtggctacaccaggcaagaagggggctgcaatcccagccaagggcgccaagaacggcaaaaacgccaagaaggaggacagcgatgaagaggaggatgatgatagcgaagaggacgaagaggatgatgaagatgaggacgaggacgaggatgagatcgagcccgccgccatgaaagccgccgccgcagccccagctagcgaggacgaggatgacgaagatgatgaagacgacgaagacgacgacgacgacgaagaggacgactccgaagaggaggcgatggagacaactccagcaaaaggtaaaaaggccgcaaaagtagtgccggtcaaagccaagaatgtagctgaagacgaagatgaggaagaggatgacgaagatgaggacgacgatgacgatgaagatgatgaggacgatgatgatgaggatgatgaagaagaagaagaggaggaggaggaagagcccgtgaaggaagctccgggaaaaaggaaaaaagaaatggccaagcagaaagcggcaccggaggcgaagaagcagaaggtcgaaggtaccgaaccaacaacggcttttaatctcttcgtggggaacctcaacttcaataagagcgctccagaattgaagaccggaatctcagacgtgtttgcaaagaatgaccttgctgtcgtggacgtgaggattggcatgactagaaagttcggctacgtggacttcgagagtgccgaagatctcgaaaaagctttggaactgaccggcctaaaagtcttcggtaatgagatcaagctggagaagcctaagggtaaggactccaagaaggagcgggacgctcgaactttgctggcaaagaacctcccttacaaagttacacaggatgagttaaaggaggtttttgaggatgcagcagagataaggctggtctcaaaggacggcaaatcaaagggaatcgcctatatcgagtttaaaacagaagctgatgcagaaaagacgtttgaagagaagcagggtaccgagatcgatggccgttcaatttctctgtattacaccggcgaaaaagggcagaaccaagattacaggggggggaagaactcaacttggagtggtgagtctaagactctggttctgtctaatctgagttactctgccacagaagagaccttacaggaagtgttcgaaaaggcaaccttcataaaggtcccccagaatcagaacggcaagtctaaggggtacgcttttatagaatttgcctcttttgaagatgctaaggaagccctcaatagctgtaataagagggagatcgaaggtcgcgctattagattggagctccagggacctagagggagccccaatgccaggtcccagccatctaagaccctgttcgttaagggcctatctgaggataccaccgaagagacattgaaggagtcttttgacggaagcgtgagagctaggattgtgactgaccgagagacaggatcttcaaaaggcttcggattcgtcgactttaactccgaggaggacgctaaagccgccaaagaggccatggaggacggcgaaatcgacgggaataaggtcacgctcgactgggcaaagccaaagggcgagggcggatttggtggaaggggaggcggcagagggggatttggcgggagaggggggggtcgaggcggacgcgggggcttcggcggcaggggcagagggggcttcggtggccgaggcggctttagaggagggcgtggtggcggcggggatcacaagccccaaggtaagaaaacgaagtttgaatag

SEQ ID NO: 16450 - DNA, 1449 bp, synthetic construct
  misc_feature 1..1449: note = Description of Artificial Sequence: Synthetic coding sequence
  source 1..1449: mol_type = other DNA
atggttaaattagcaaaggctgggaagaaccagggggatcctaaaaaaatggcccctccccccaaggaagtggaggaggatagtgaggatgaggaaatgtctgaggatgaggaggatgattcgtcaggggaagaagtggtcataccacagaagaagggcaaaaaggccgcagctacatctgcgaagaaggtggtcgtgtctcctaccaaaaaggttgcagtggccacacccgctaagaaagctgctgttacacctgggaaaaaggcagccgccaccccagcgaaaaagaccgttacccctgccaaagcagtgacgactcccggtaagaagggagctactcctgggaaggctctggtcgccactcccggtaaaaaaggtgcggctatacctgccaaaggcgcaaagaacgggaagaacgcaaagaaggaggacagcgacgaagaagaggatgatgattctgaggaggatgaagaggacgatgaggacgaggacgaagacgaggatgagatcgaaccggcggcaatgaaggccgcagctgccgcccccgctagcgaggacgaagacgatgaagacgacgaagacgacgaggacggcaagtccaagggaattgcatacattgagttcaaaacagaagcggatgctgaaaaaaccttcgaagagaagcaaggcaccgaaatcgacggacgaagcatcagcctctattatacaggggaaaagggccaaaatcaagactacagaggtggtaagaacagcacttggtccggggaatccaagacactggttttatctaatctttcctactccgctacagaagagaccctgcaggaggttttcgagaaggccactttcatcaaggtgcctcagaaccagaacggtaaaagtaagggatatgcctttatcgagttcgctagttttgaggatgctaaggaagccttgaactcgtgtaataaaagggaaatcgagggtcgagccatcagactggagttgcaaggcccccgcgggtctcccaatgcccggagccagccaagcaagactctcttcgtgaaggggctttcagaggacaccaccgaagaaactcttaaggaatccttcgatgggagcgtgagagctaggattgtcacagacagagagaccggaagttctaagggtttcgggttcgtggatttcaattccgaggaagatgcaaaggccgccaaggaggccatggaggacggcgagattgacgggaacaaggttactttggactgggcgaaacccaagggtgagggaggctttggtggtcgcggcggaggacgcggtggtttcgggggcaggggcgggggccgcggaggcagaggagggttcggggggcgcggccgcggcggcttcgggggacgagggggatttcggggtggtcgcgggggtggtggggatcacaaaccacaaggcaaaaaaaccaagttcgagtag

SEQ ID NO: 16451 - DNA, 1809 bp, synthetic construct
  misc_feature 1..1809: note = Description of Artificial Sequence: Synthetic coding sequence
  source 1..1809: mol_type = other DNA
atggtgaaattggccaaggcgggaaaaaaccagggcgatcctaagaagatggccccaccacctaaggaagtggaagaagactccgaagacgaagagatgtcagaggatgaggaggatgattcttcaggcgaggaattgaacgacgatttttatcaaactacaatgcacaccctttggaagaagggtaagaaggcagcagccacatccgctatacctgctaaaggcgccaaaaatggtaaaaacgcaaaaaaggaggacagcgatgaggaagaggacgatgactctgaggaagatgaggaagacgatgaggacgaagacgaggacgaggatgaaatcgagcctgcagcaatgaaggctgcagcagcagcgcctgcctccgaggatgaggatgacgaggacgacgaggatgacgaagatgatgatgatgacgaagaagacgacgacgacgatgaagacgacgaggaggaggaggaagaggaggaagaagagcctgtgaaagaagcccccgggaaaaggaaaaaggaaatggctaaacagaaagcagcacccgaagcgaaaaagcagaaagtagagggcacagaacctaccaccgcctttaacctgtttgtcggaaatcttaattttaataagtctgctcccgaactaaaaactggcatttcagacgtgttcgccaaaaacgacttggcggtggtcgacgttagaatcggtatgaccagaaaattcggctatgtggacttcgaaagcgcagaggacctcgagaaggcactggagctgaccgggctgaaggtgttcggaaatgaaataaagttggagaagcctaaaggcaaagattccaaaaaggagcgggacgcgagaacacttctagccaaaaacctgccctataaggtcacacaggatgagctcaaagaagtatttgaggatgctgcagagattcgcttagtcagtaaagatggaaaatccaaggggatcgcctacatcgagttcaagacagaggcggacgccgaaaaaacgtttgaagaaaaacagggcacagagattgatggccgaagcatttccctctactatacaggcgagaaaggtcagaaccaagactatcggggcggcaaaaattctacgtggtccggagagagcaagacgcttgtgctctcaaatctgtcctactctgcaactgaagaaacgctacaggaagttttcgagaaggccacctttataaaggtgccacaaaatcagaacggtaaaagtaagggctacgcttttatagaattcgcttcatttgaggacgctaaagaagcgctgaactcttgcaacaaacgcgagatagaaggccgggccatcaggctggaattacaagggcctagaggctcacccaatgcccggagccaaccatccaaaaccctgttcgtcaagggcctcagtgaggacacaacggaggagactctaaaagagagttttgatggaagtgtgagagccagaatcgtgactgaccgcgaaacggggagctctaagggatttggctttgtggatttcaacagcgaagaggacgcgaaggctgctaaggaagctatggaggatggggaaatcgatggtaacaaggtcaccctagactgggccaaacccaaaggcgaaggtggcttcgggggccggggtggaggaagaggaggattcggtggacggggtggcggccgggggggtagaggagggtttggcggccgaggacggggcggatttggagggagaggagggtttcgcgggggccgaggcggagggggggaccataaacctcaagggaagaagacaaagtttgagtag

SEQ ID NO: 16452 - DNA, 885 bp, synthetic construct
  misc_feature 1..885: note = Description of Artificial Sequence: Synthetic coding sequence
  source 1..885: mol_type = other DNA
atggaggatagtatggatatggacatgtccccattgcgcccgcagaattacctttttggatgcgagctgaaggccgacaaagactatcactttaaagtggacaacgatgaaaacgaacaccagttgagcttaagaacagtgtccctcggggctggagcaaaagacgagctgcacattgtggaggccgaggcgatgaactatgaaggctccccgatcaaagtgactctcgccaccctcaagatgagtgtgcagcctacagtttcactgggagggtttgaaattactccccctgtagtcctgcgactgaagtgcggctctggaccagtccatatttccggccagcacctggttgccgtggaagaagacgccgagagcgaggacgaggaagaggaagacgtgaagctcctctctatctccggcaaacgcagcgcccctggaggaggatcgaaagtgccacaaaagaaggtgaagctggccgctgacgaggatgatgatgacgatgatgaggaggacgatgatgaggatgatgacgacgacgattttgacgacgaggaggctgaggagaaagctcccgttaagaagagcatcagggacacaccagctaaaaatgcccagaaatctaatcagaatgggaaggattccaagccttcttccacaccgagatccaagggacaggagtcctttaagaagcaggaaaaaaccccgaaaacgcctaaaggtccatcttcagtcgaggatatcaaagccaagatgcaggccagcatcgagaaggggggctctctccctaaagtggaggcaaagttcatcaactacgtgaagaactgttttcggatgactgaccaagaggcaatccaagatctgtggcaatggcgcaagagcctgtag

SEQ ID NO: 16453 - DNA, 798 bp, synthetic construct
  misc_feature 1..798: note = Description of Artificial Sequence: Synthetic coding sequence
  source 1..798: mol_type = other DNA
atggaggactccatggacatggatatgtcgccccttaggccacagaattacctgttcgggtgtgaactcaaagccgataaggactaccacttcaaggtggataacgatgaaaatgaacatcagctgtccctgcgcactgtttctctcggcgccggagccaaagatgagctgcacattgttgaggccgaagcaatgaactatgagggctcccctatcaaggtcacactggccaccctgaagatgtcagtgcaacctactgtttcacttggaggctttgagataactccccctgttgtactgcggctgaagtgtgggtctggacccgttcacatctctgggcagcacctagtcgcagttgaggaggacgctgagagcgaagacgaagaagaagaagatgtgaagttgctgtcgataagcggcaagcggtctgccccagggggcggaagcaaggtgccacagaagaaagttaagctcgccgcggatgaggatgatgatgacgacgatgaggaagatgatgacgaagatgacgatgatgatgacttcgacgacgaggaagccgaagagaaggcccctgttaagaagggccaggagtcctttaagaagcaagagaagacgccaaagacacccaaagggcctagcagtgtcgaggacatcaaggcaaagatgcaagccagtatcgagaaagggggttccttgccaaaggtggaggcgaagttcatcaactatgtgaaaaactgctttcgaatgacagatcaggaggccatccaagatctctggcaatggcggaagagcctctag

SEQ ID NO: 16454 - DNA, 780 bp, synthetic construct
  misc_feature 1..780: note = Description of Artificial Sequence: Synthetic coding sequence
  source 1..780: mol_type = other DNA
atggaggattccatggacatggacatgtcccctctccgaccacagaactatctgtttggatgtgagctgaaagccgacaaggactaccatttcaaagtggacaatgatgagaatgaacaccagctatcactgaggacagtcagcctgggagcgggggccaaagacgaactgcacattgtagaagccgaggctatgaactacgaagggtctcctataaaggtgaccttagccactttgaagatgtccgtgcaacccaccgtctcattgggaggattcgagattacgcctccagtggtacttcgcctgaagtgcggctccgggcccgtccacatttccggccagcacttagtggctgtcgaggaggatgccgaatcagaggatgaggaggaggaagatgtcaagttgttgtcaatctctgggaaacggtctgctcccggaggcggatcaaaagtcccacaaaaaaaggtcaagctcgcagctgatgaggacgatgacgatgacgacgaggaagacgatgacgaggacgacgacgacgacgacttcgacgatgaggaggcagaggagaaggctcccgtgaaaaagtctattagagatacaccggcaaagaatgctcagaaaagcaatcagaatgggaaagatagcaagccttcaagcacccctaggtcaaagggacaggaaagcttcaagaaacaggaaaagactcctaaaactcctaagggaccatcatcggtggaggatatcaaggccaaaatgcaagcttcaatcgagaaggctcattag

SEQ ID NO: 16455 - DNA, 885 bp, synthetic construct
  misc_feature 1..885: note = Description of Artificial Sequence: Synthetic coding sequence
  source 1..885: mol_type = other DNA
atggaagattccatggacatggatatgagccccctccggccccagaactatctcttcggttgcgagctgaaagccgacaaggattaccattttaaagtggacaacgacgagaatgagcatcagctgtcattaaggacagtgagtctaggagccggagctaaggatgagctccacatcgtcgaggccgaggcaatgaactacgaaggctcacctattaaagtaactcttgccaccctgaagatgtccgtccagcccaccgtctctctcggcgggttcgaaatcacccctcccgtcgtgctccgcctgaagtgtggctcgggacccgtgcacatttccggacagcacttggtcgctgttgaggaggacgctgagagcgaggacgaagaggaggaagacgtaaagctgctgtctatctcggggaagagatcagcccccggcgggggatccaaggtgccccagaagaaagtgaagctggccgcggacgaggatgacgacgatgatgatgaagaggacgatgacgaagatgacgatgacgacgatttcgatgatgaagaagccgaggaaaaggcacccgttaaaaaaagcatacgggatacccctgccaaaaatgcacaaaaatccaatcagaatgggaaggacagcaagccaagtagcacccctcggagtaagggccaggagagctttaagaagcaagagaaaacccccaaaacaccaaagggcccttcgtctgtggaggacattaaggctaaaatgcaggccagcatagagaaaggggggtcacttccgaaggtcgaggcaaagtttatcaattacgtcaagaactgtttccggatgactgaccaggaggcgattcaggacttgtggcagtggcgcaagtcgctctag

SEQ ID NO: 16456 - DNA, 867 bp, synthetic construct
  misc_feature 1..867: note = Description of Artificial Sequence: Synthetic coding sequence
  source 1..867: mol_type = other DNA
atgaaggatagaacccaagagctacggaccgcaaaagacagtgatgatgatgacgacgttgcagtgacggtggacagggaccgttttatggacgaattcttcgaacaggtagaggaaatacggggttttatcgacaagatcgctgagaatgtggaggaagtaaaacggaagcactctgccattttagcctctcccaatccagacgagaagactaaggaggagcttgaagaattgatgtcagacattaaaaagacggcgaacaaagtgcgaagcaaattgaagtccatcgaacaatctatcgaacaggaagagggtctgaaccgctcaagcgctgacctgcggattagaaaaacgcagcattccacgcttagccgcaaattcgttgaagttatgtctgaatacaatgcgacccaatctgactatagggaaaggtgtaaggggagaatccagcgacagctagagatcactggccggacaacgaccagcgaggaactggaggacatgctggagagcggcaacccagcaatctttgctagtggtattattatggactccagcatttccaagcaagccctcagtgaaattgaaacccgacactcagagattatcaagctggagaattctattagagaactgcacgacatgtttatggacatggctatgctggttgagtcccagggcgaaatgattgacagaatcgagtacaacgtcgagcacgcggtcgactatgtcgaacgagctgtctccgatacgaaaaaagctgttaagtatcagagcaaagcccgccggaaaaagataatgattatcatatgctgcgtaatcctgggcattgtgattgcatccaccgtgggcggtatctttgcttag

SEQ ID NO: 16457 - DNA, 183 bp, synthetic construct
  misc_feature 1..183: note = Description of Artificial Sequence: Synthetic coding sequence
  source 1..183: mol_type = other DNA
atggaagagcaggggcacagcgagatggagattatcccctccgaatcccatccacatatacagctgctcaaatccaatagggagctgcttgtaactcacattaggaatacgcagtgtctggtcgacaatctgttgaagaacgactacttttctgctgaagacgctgagattgtttgcgcctag

SEQ ID NO: 16458 - DNA, 183 bp, synthetic construct
  misc_feature 1..183: note = Description of Artificial Sequence: Synthetic coding sequence
  source 1..183: mol_type = other DNA
atggaggagcagggtcatagcgagatggagattatcccttctgagtcgcatccgcacattcagctgcttaaaagcaatcgcgagctgctggttacacacattcggaacacacagtgcttggtcgataatctcctgaagaatgactacttttctgccgaagatgccgaaatagtatgcgcatag

SEQ ID NO: 16459 - DNA, 138 bp, synthetic construct
  misc_feature 1..138: note = Description of Artificial Sequence: Synthetic coding sequence
  source 1..138: mol_type = other DNA
atggaggagcaggggcatagtgagatggagattattcctagtgaaagtcacccacatatacagctgctcaagagcaaccgagagttgcttgtgacccacataagaaatacacaatgcctcgttgacaacttgctgtag

SEQ ID NO: 16460 - DNA, 183 bp, synthetic construct
  misc_feature 1..183: note = Description of Artificial Sequence: Synthetic coding sequence
  source 1..183: mol_type = other DNA
atggaggagcagggccatagtgaaatggagattataccctctgaatctcacccccacatccagcttttgaaatccaatagagagttgctcgtaacccacatccgcaatacccagtgtctggtggacaaccttctcaagaatgactatttctccgcagaggacgctgaaatcgtttgcgcctag

SEQ ID NO: 16461 - DNA, 750 bp, synthetic construct
  misc_feature 1..750: note = Description of Artificial Sequence: Synthetic coding sequence
  source 1..750: mol_type = other DNA
atggaggagcagggacattccgagatggagattattcccagtgaaagccacccacacatccaactcttgaagtcaaatcgagagctcctggtaacccatattagaaacacccagtgtcttgtggataatctgctgaagaacgattatttcagcgctgaagatgctgagatcgtttgcgcctgtccaacccaacctgataaagtgcgcaagatcctcgacctggtccagtctaaaggcgaggaagtgagcgagttttttctgtacctgttgcaacagctggcggacgcatacgtggatctcagaccctggttgctggagatcggatttagtcctagcttgctcacccaaagcaaggtggtcgtcaacacagaccctgtgtcccgctatacccaacagttacgccaccacttagggcgggacagcaagttcgtgctgtgttacgcacagaaagaagagctcctactggaagaaatttatatggataccatcatggagctcgtggggtttagcaacgaatcgttggggtcactgaactcactggcgtgtctgttggatcacacaaccggcatcctcaatgaacaagcagccagcaggaaagtgacaggttgcgtgtgccgaacatgttccagttctacgactgcaacccagtcggggacaccccgacgttgtctgccctcatgctgtgctagccctacctggcccagctctcccagcatggcttggacatcctgcacacgtacctggacctag

SEQ ID NO: 16462 - DNA, 2340 bp, synthetic construct
  misc_feature 1..2340: note = Description of Artificial Sequence: Synthetic coding sequence
  source 1..2340: mol_type = other DNA
atggaggaacaggggcacagcgaaatggaaatcattccctctgaatcccatcctcatatccagttgctcaagtcgaatcgggaactgttggtgactcacatccggaacacacagtgtctggtcgacaacctgctgaaaaatgactatttcagcgccgaagacgcggaaattgtttgcgcctgcccaacccagcccgataaagtacggaagatccttgatcttgtccagtccaagggtgaggaagtttccgaatttttcctgtacctcctgcagcaactcgctgacgcatacgtcgatctaagaccatggttattggaaatcggatttagcccaagcctgttaacgcaaagtaaggtggtagtgaatactgatccggtgtcacggtacacacagcagctgcgtcaccatctcgggcgcgacagcaagtttgtgctctgctacgcacagaaggaggagctgctcctggaagaaatatatatggacacaattatggagctagttggtttttctaatgagagccttggcagcctgaacagcttggcctgtctcttggaccatacgaccggcatcttaaacgaacagggggagaccatcttcattctgggcgacgcaggcgtgggtaaatctatgctcctgcagagactgcaaagcctctgggcaactggccgactcgacgccggggtcaagtttttctttcacttccgctgccgaatgttctcatgttttaaggaatctgatagattgtgcctgcaagacctgctatttaaacattactgttatccagagagagatcccgaagaagtgttcgcctttctgctgcgatttccccacgttgcccttttcaccttcgatgggctcgacgagctgcacagcgatttggacctaagccgagttccagattcttcttgtccctgggaaccagctcacccgctggtacttctggctaacctgcttagcggcaaattgttgaaaggtgcctcgaaactgttgacagctagaacggggatagaagtgccccggcaattccttcgaaagaaggtgctcctccgggggttttctccgagccatttacgtgcctacgcaagaagaatgtttcccgagagagccctgcaggatcgcctccttagtcagttggaggctaaccctaatttatgctccctgtgttcagtcccactgttctgttggatcatctttcggtgttttcagcatttcagagcagccttcgaaggaagcccccaattaccagattgcaccatgaccctaactgatgtgttcttgcttgtcaccgaggtgcacctgaatcgcatgcaaccctctagcctggtgcaacgtaataccaggtccccagtggagaccctccacgcaggccgggacacactatgttctttgggccaggtggcacacagggggatggagaagtctctcttcgtgtttacccaggaggaagttcaagcctccggactgcaggagcgcgacatgcagctgggctttctccgagcacttcccgagttggggcctggtggcgaccagcaaagctatgagttttttcaccttactctgcaagctttctttaccgcgtttttcttagttctcgacgatcgtgtggggacccaagagttactgagattctttcaagaatggatgccacccgctggtgcggcaacaacaagttgttaccccccattcctgccctttcaatgcctgcaggggtccggcccagcgcgggaggatttattcaagaacaaggatcatttccagttcaccaatttattcctgtgcggactactgtcaaaagctaaacagaaactcctgcgccacctggtgcccgcagctgccctgagacgcaaacgcaaggctctatgggcccacctcttttcctccctgcgtggatatctaaaatcccttccaagagtgcaggtcgaaagctttaatcaggtgcaagccatgcccacgtttatatggatgctacggtgcatttacgaaacacagagccagaaggtcgggcagttagccgcaagagggatttgcgccaattacctgaagctgacttattgtaatgcgtgtagtgcggactgttctgccttgtcttttgtcctgcatcacttcccaaagcgtctggcattggacttggataacaacaacctgaacgactacggagtccgggagctgcaaccttgcttttctagactgacggtgctgcggctgtctgtgaatcaaattactgacggcggggtgaaggttctatccgaggaattgacaaagtataaaattgtgacctatctcggattatggaaaagcgtggatactatttgctttaagaaacagggcctgctgaaatag

SEQ ID NO: 16463 - DNA, 495 bp, synthetic construct
  misc_feature 1..495: note = Description of Artificial Sequence: Synthetic coding sequence
  source 1..495: mol_type = other DNA
atgaagtgcaaaccaaatcagaccagaacctatgacccagagggattcaagaagcgagcagcttgtttgtgctttaggtccgaacgggaggacgaggtcctgcttgtttcatcttccagatatccagacagatggatcgtcccgggcggaggaatggagccagaggaggagcccggtggggcagccgtgagagaggtgtatgaggaggctggggtgaaagggaaactgggtagactactgggggtgttcgagcagaaccaggacagaaagcatagaacctacgtctatgtgctcaccgtgaccgaacttcttgaggattgggaggattccgtctccatcggccgcaagagggagtggtttaaggttgaagacgcgattaaggtccttcagtgccataaaccggttcatgccgagtatctcgaaaaactgaagctgggcgggagtccaaccaatggcaacagtatggctccatcatcgcctgactccgatccttag

SEQ ID NO: 16464 - DNA, 792 bp, synthetic construct
  misc_feature 1..792: note = Description of Artificial Sequence: Synthetic coding sequence
  source 1..792: mol_type = other DNA
atgagtctctattgcggcattgcctgtaggagaaaatttttctggtgctacaggttgctcagcacttatgtgaccaagactaggtatttgtttgaactgaaggaggatgacgacgcctgtaagaaagcccagcaaaccggagccttctacctgtttcacagcttagcacccctgctgcaaacttcagcccaccagtatttggctccacggcactctcttcttgaactggagaggctgctgggaaagttcggccaggacgcacagagaatcgaggactctgtcctgatagggtgttctgagcagcaggaggcctggtttgcactcgatctggggttggattcctctttctcaatctccgcaagtttgcataaaccagagatggagactgagctaaagggatcattcattgaactccgtaaggccctgtttcagttgaacgcgcgagacgcgtctctgttgtccacggcccaggccctgcttcgttggcatgacgcccaccaattttgttcccgaagcgggcagcctaccaagaagaacgtggccggatccaaaagagtgtgtccttcgaacaatattatctactaccctcaaattcaggtgaatctcagagagctggagaccgcagcttggttttcacacgatgaagtggcaaccgcattgaagagaaaggggccttacacccagcagcagaacggtactttcccattttggcttcccccaaaactggctattagtcatcagctgattaaggaatgggtagaaaaacagacgtgcagctcactgccagcctag

SEQ ID NO: 16465 - DNA, 1059 bp, synthetic construct
  misc_feature 1..1059: note = Description of Artificial Sequence: Synthetic coding sequence
  source 1..1059: mol_type = other DNA
atgtctttgtattgcggaatcgcatgtaggcggaaattcttttggtgttatcgcttgcttagtacctacgtgactaagacgcgttatctgtttgaactgaaagaggacgatgacgcttgcaaaaaagcacaacaaactggtgccttttatctgttccatagtcttgcacccctgctccaaacaagtgcccaccaatacttggcacctcgccactcgctgctcgagctggagcgactcctgggcaagttcggccaagacgcccagaggatagaagattccgtgctcattggctgttctgaacagcaagaagcatggtttgcgcttgatctggggttagattcgtccttctccatcagcgcatccctccacaagccagaaatggaaaccgaacttaagggatctttcatcgaactgagaaaggctctttttcagctcaatgcccgggacgcctcactgctctccacagcgcaggctcttttgcgctggcacgacgcccatcaattctgctctcgctctggccaacccacaaaaaagaatgtcgccggaagcaaaagagtgtgtccctctaacaacatcatctactacccacagatggcacctgtcgctatcacattggtctctgacggcacacgatgcctccttgcccggcagtccagttttcctaagggcatgtatagcgcacttgccggtttctgtgatattggtgaaagcgtggaggagaccatcaggagagaagtagccgaggaagtgggactggaagtagagtcactgcagtattacgccagtcagcattggccatttccgtctggaagcctcatgattgcctgccatgctaccgtgaaaccaggacagacggaaattcaggtcaacctgcgtgagctggagaccgctgcatggtttagtcatgacgaggtagcaactgcactaaaaaggaagggcccttacactcagcaacagaatggaacattccccttctggctgccacctaagctcgcgatctcacaccagctaattaaggagtgggtggagaaacagacttgttcatctctacccgcttag

SEQ ID NO: 16466 - DNA, 708 bp, synthetic construct
  misc_feature 1..708: note = Description of Artificial Sequence: Synthetic coding sequence
  source 1..708: mol_type = other DNA
atgtccctctactgtgggatcgcctgtcgtaggaaattcttttggtgctaccgcttactctcaacttacgtgacgaagacacggtacctctttgaattaaaagaagacgatgatgcatgcaagaaggcccagcagacaggagctttctacctgttccactctctcgcacccctcctgcaaaccagcgctcatcagtatctggcaccgaggcattccctcctcgaactggagcgccttctggggaaatttggtcaggacgcacagcgtatcgaagatagtgtgctcattgggtgttcagagcagcaggaagcttggttcgctctggatctcggtcttgatagcagtttctctataagtgcatctctccacaaacctgaaatggagactgaactgaagggatcatttatcgaacttagaaaggccctatttcagcttaacgccagggatgcctccctgttgtctaccgcccaagctctgttacgttggcatgacgcccaccagttctgttcccgctcagggcagcctactaagaaaaacgttgcaggctccaagcgggtgtgtccatcgaacaacattatttactaccctcaggtaaaagtgtggaaacggccctcagcagaaaagctgcagaagcgctgggactggaggtggaaagcttgcagcacaatgcatccctcaataggcccaagcttagttgcccattcctag

SEQ ID NO: 16467 - DNA, 468 bp, synthetic construct
  misc_feature 1..468: note = Description of Artificial Sequence: Synthetic coding sequence
  source 1..468: mol_type = other DNA
atggcccctgtagccattacgctggtgtcagatggtactaggtgcctccttgcccggcagtcttccttcccaaaaggtatgtacagtgctctggccggtttctgtgacataggggaatctgtagaagaaacgatccgtagagaagtggctgaggaggtgggattggaagtggaaagcctgcaatactacgcctctcagcattggccgttcccctctgggagcttgatgattgcttgccatgccactgtgaaacccggccagacagagattcaggtcaatctgcgtgaactggagacagctgcatggtttagccacgacgaagtggcaaccgcactcaaacgcaagggaccttacactcagcagcagaatgggaccttccctttctggctgccccctaaactagctatcagccaccaactgatcaaggagtgggtggagaagcaaacttgttcctccttgcctgcttag

SEQ ID NO: 16468 - DNA, 681 bp, synthetic construct
  misc_feature 1..681: note = Description of Artificial Sequence: Synthetic coding sequence
  source 1..681: mol_type = other DNA
atggagaccgagttgaagggaagttttatagagctcaggaaggctctgttccagcttaacgctagagacgcctctctcctttcaactgcgcaagccctgctacggtggcacgatgcccaccagttctgctcacggtcaggccagcccaccaaaaaaaatgtagccggctccaagcgggtctgtccatcgaacaacatcatttattaccctcagatggcccctgtagccataacgctggtctccgacgggactcgctgtctgttggctagacaaagttcgtttcccaaaggtatgtacagcgctctcgctggcttctgcgacatcggcgaatcagtggaggaaactatccggcgagaggtggctgaggaagtgggactggaggtggagagtctgcaatactacgcaagccagcactggccgttcccatcaggatcccttatgatcgcgtgccatgccaccgtaaagcctggccagacagaaattcaggtgaaccttagagagttagaaacggcagcctggttcagtcacgacgaagttgccaccgccttgaaaaggaagggcccctacacacagcagcagaacgggactttcccattctggctacctcccaaattggctatttctcaccagttaataaaagagtgggtcgagaaacaaacttgctcttccttacccgcctag

SEQ ID NO: 16469 - DNA, 717 bp, synthetic construct
  misc_feature 1..717: note = Description of Artificial Sequence: Synthetic coding sequence
  source 1..717: mol_type = other DNA
atgctgggacagccagcaccactggagagatttgccagcagaaggccccaggtcctggccgtgcgaacagtttgcgatcttgtgttagggaagatggataaggactgcgaaatgaagagaaccaccctagacagtccattgggaaagctggagcttagcggctgcgagcagggactccatgaaataaagctcctgggcaagggtaccagcgctgccgatgctgtcgaggtccctgcgcctgctgccgtgttgggcgggcctgaacccctgatgcagtgtaccgcatggctgaacgcttacttccaccagccagaggctatagaggaatttcccgtccccgcccttcatcaccccgtgtttcagcaggagagcttcactaggcaggtgctgtggaagcttctaaaggttgttaaatttggggaggtgatcagttatcagcagctcgccgccctcgccggcaaccctaaggccgctcgcgccgtaggcggggcaatgcgtggcaatcctgtgcccatcctcataccatgtcatagggtagtgtgttccagtggggctgtgggtaattacagcgggggactagccgtgaaagaatggctactggcacatgaagggcatcggcttggcaaacccgggctgggaggcagctccgggctggctggagcctggctgaaaggggccggtgcaacttcaggaagcccgccagctggccgcaactag

SEQ ID NO: 16470 - DNA, 1569 bp, synthetic construct
  misc_feature 1..1569: note = Description of Artificial Sequence: Synthetic coding sequence
  source 1..1569: mol_type = other DNA
atgagcagtcggccactggagagccccccaccttataggccagacgagttcaagccaaatcactacgcccctagtaacgatatctatggcggagagatgcacgtgcggccgatgctgagtcaaccggcatattcattttacccagaagacgagatcctccacttttacaagtggacctccccccctggcgtcattcgcattcttagcatgctgatcattgtgatgtgcattgcgatctttgcttgcgtggcttcaaccctggcttgggatcgtgggtacggcacaagcttactgggtggtagcgtcgggtatccctacggaggcagcgggtttggaagttacggctcaggttatgggtatggttatggctatggatatggctatggaggatataccgacccaagggcggcaaaaggattcatgctggctatggcagctttttgttttatcgctgccttggtcatctttgttacctcggtgataagatcagaaatgagtcggacgaggaggtattacctttcggttattatcgtatccgctatcttgggtatcatggtgtttatagctacgattgtctacataatgggagtaaaccctacagcccagtccagcggttcactgtacggatctcagatatacgcactctgcaaccagttttacacccctgccgccaccggtctttacgtggatcagtacctctatcattactgtgtggttgacccccaggaggccatagctattgtcttggggtttatgattattgtggcctttgccctcattatcttttttgccgttaagactagacgcaaaatggatcgctacgataaaagtaacattctgtgggacaaagagcacatttacgatgagcagcccccaaatgtagaggaatgggtaaagaacgtgagcgccggaacccaggacgtaccatcacctccatcggactacgtggaacgagtggattcgcccatggcttactcatcaaatggaaaagtgaacgacaaacgtttttatcccgagtctagctacaagtcaacacccgtgcccgaggtcgtgcaagagctccccttgacgagtcctgtagatgactttaggcaaccccgatactccagtggcgggaattttgagacacccagtaaaagagcaccagcaaagggcagagccggtcggtccaagaggactgaacaggatcactacgagacagactacaccaccggcggggagtcttgtgatgagttggaagaggactggattcgggagtacccaccgataacatcagatcagcagagacaactgtataagcgaaactttgacacagggctgcaggagtataagagtctccagtctgaactggatgagatcaacaaagagctgtcccggctggacaaagagctggacgactatagagaggagtcagaggagtatatggcggccgccgacgagtataacagactcaagcaggtgaagggcagcgccgattacaaatcgaaaaaaaaccactgcaagcaacttaagagtaagttgagccatataaaaaagatggtgggtgattatgaccgccagaagacctag

SEQ ID NO: 16471 - DNA, 1407 bp, synthetic construct
  misc_feature 1..1407: note = Description of Artificial Sequence: Synthetic coding sequence
  source 1..1407: mol_type = other DNA
atgagctcccgccccctcgaatcacccccgccataccgaccagatgagtttaaaccaaaccactacgcaccatcaaacgatatatacggcggtgaaatgcatgtcagacctatgctgagtcagcccgcctacagcttttacccagaagacgagattctgcacttttacaagtggactagtccccctggggtgatcagaatcctcagcatgctgataattgtcatgtgtatagcgatcttcgcttgtgtggcgtccacccttgcgtgggatcgggggtatggaacctccctgctgggaggcagcgttggatacccgtatggcgggagtggttttggttcgtacggatcggggtatggctatggctacggctacggctacgggtacggtggctatacagatccccgtgccgccaagggttttatgctggcgatggccgccttctgcttcattgccgctctggtcatcttcgtcacctctgttatcagatcagaaatgtcacgcacaagaagatattaccttagcgtcatcattgtttctgccattctgggaatcatggttttcattgctacaatagtctacattatgggtgtcaatcctaccgcgcaaagttccggcagtctgtatggctcccagatctatgccctctgtaaccaattttatacacccgccgccactggactgtacgtggatcagtatctctaccattactgcgtggtcgacccacaggaagtgaagaacgtgtctgcaggaacacaagatgtgcctagtccccccagcgactatgttgagcgagtcgacagcccgatggcctacagttcaaacgggaaagttaatgataagcgcttctatcccgagagctcctataaaagcactccggtacctgaggtggtgcaggagctgccacttactagtccagtggatgacttcagacagccacgttattcaagcggcggcaacttcgaaacaccaagtaagcgcgcacccgctaaaggcagggcaggtcggtcaaaaaggactgagcaagaccactatgaaactgattacaccaccggaggtgagtcctgtgacgagctggaagaggattggattagggaatacccacccatcacctccgaccagcagaggcagctctacaaacgaaattttgacactggtttgcaggagtacaaatcccttcaaagtgaacttgacgaaatcaacaaagagctatccaggcttgacaaggaactggatgattatcgcgaggagagcgaagaatacatggctgccgctgatgaatataataggctgaagcaggtcaaggggtcagcagactataaaagcaaaaagaaccactgtaagcagctcaagagcaagctgtcacatattaaaaagatggtgggagactatgatcgacagaagacttag

SEQ ID NO: 16472 - DNA, 1569 bp, synthetic construct
  misc_feature 1..1569: note = Description of Artificial Sequence: Synthetic coding sequence
  source 1..1569: mol_type = other DNA
atgagcagtaggcctctggagtccccccccccttacagacccgatgaattcaaacctaatcattatgcgccttcaaacgatatttatggcggtgagatgcacgtcaggccaatgttgtctcagccggcgtactctttttaccctgaagacgaaatcctgcacttttacaagtggactagccctccgggggtgattagaattctttcaatgctgattatcgtaatgtgcatcgccatttttgcttgcgtagccagcacccttgcttgggaccggggctacggaacgtcactgctgggcggcagcgtgggctatccttatggcgggagtgggttcggcagctatggctctggctacggttacggatatggatacggatatgggtatggggggtatacagatccaagagccgctaagggcttcatgttagctatggctgccttttgttttatcgccgctttggtcattttcgtgacctctgtcattcggagcgagatgtcaaggaccagacgctattacctttcagtgataatagtgtctgccattctggggatcatggtcttcattgccacgattgtgtacatcatgggcgtgaatcctaccgcccaatcctctgggagcctttacggcagccagatctatgcactgtgtaaccagttctatacccccgccgccaccggcctgtacgtggatcaatacttgtaccactactgcgtggtggatcctcaggaagcgattgccatcgtgctggggttcatgattattgtagcttttgcccttatcattttttttgcggtgaaaacgaggcgcaagatggaccgctacgataaaagtaatatactctgggataaagaacatatttatgacgagcaaccacccaatgtggaggaatgggtgaaaaatgtgtctgccggcacccaggacgtgcctagcccgccgtcagattacgttgaacgcgtggactctcctatggcctattcaagcaacgggaaggtcaacgataagcgtttttaccctgagtcatcatacaaaagtacgccagtcccggaagtagttcaggaactcccacttacttctcctgtcgacgattttaggcaacctaggtacagcagtgggggaaattttgagacaccttcaaagagggcaccagctaaggggcgcgccgggcggagtaaacgcaccgagcaagatcattatgaaaccgactacacaactggaggggaaagttgtgacgagctggaagaagactggattcgcgagtatccacccattactagcgaccagcagaggcaactgtacaagaggaactttgatactggactgcaagaatacaagtcactgcagagcgagctggacgagatcaacaaggagctgtctaggctggataaagagttagacgattaccgagaagaatccgaggaatatatggccgctgcagacgagtacaacagactcaaacaagtaaagggttccgcagactataagtccaagaaaaaccattgcaagcagcttaaaagtaaattgagtcacatcaaaaagatggtcggggactacgatcgtcaaaaaacctag

SEQ ID NO: 16473 - DNA, 816 bp, synthetic construct
  misc_feature 1..816: note = Description of Artificial Sequence: Synthetic coding sequence
  source 1..816: mol_type = other DNA
atgataattgtggcattcgcattgattatcttctttgccgtgaaaacgaggcgaaaaatggaccgatatgataagtcaaatatcctgtgggacaaggagcatatatacgacgaacagccccccaacgtggaggagtgggtgaagaatgtctctgccggaacacaggacgtcccgtcaccaccctcagactatgttgagcgagttgacagtcccatggcctactcttctaacggcaaagtaaacgacaagaggttctatcctgaaagcagttataagtctacacccgtccccgaggtggtgcaggagttgccactgaccagccctgtcgacgactttcgccagccgaggtactcctccggggggaatttcgagactcctagcaagagggctcccgctaaagggagggctgggcgctccaagagaacagagcaggatcactatgagacagactatacgacgggcggtgaatcatgtgacgagttagaggaggactggattcgcgagtacccacccattacgagcgaccagcaaagacagttgtacaagcgtaattttgatacaggcctccaagagtataagtccctgcagagtgagctggacgaaatcaacaaggagctctcgcggcttgataaggagcttgacgattaccgtgaggaaagcgaggagtacatggcagctgctgatgagtataataggctgaagcaagtaaagggctccgccgactataagtcaaaaaagaaccactgcaagcagctgaaatctaaattgagccacattaagaagatggtcggagattatgatagacagaaaacatag

SEQ ID NO: 16474 - DNA, 603 bp, synthetic construct
  misc_feature 1..603: note = Description of Artificial Sequence: Synthetic coding sequence
  source 1..603: mol_type = other DNA
atggcctacagttcaaacgggaaagtgaatgacaaaaggttttaccctgaatccagctacaaatctacccccgtgccagaagtggtccaggaactcccactgacgtctcctgtagatgactttcgccaacctaggtactcgtctggcggaaatttcgagacgccatccaaacgtgctcccgctaaaggaagggctggccggtctaagcggactgagcaggaccattacgagactgactacaccacgggtggtgaatcctgcgacgagctcgaagaagattggatccgggagtatcctcccatcacctccgaccagcaaagacagttgtacaagcgaaatttcgacaccggtctgcaggaatacaaaagtctgcagagtgaactggacgagatcaacaaggagctcagtagattggataaggaactggatgattatcgtgaggaatcagaggaatacatggccgctgccgacgagtacaacaggctgaagcaggtgaagggcagtgcagattacaaatccaagaagaatcattgcaaacagctgaagtctaagctgagccacatcaagaagatggtgggagactacgaccggcaaaaaacatag

SEQ ID NO: 16475 - DNA, 3114 bp, synthetic construct
  misc_feature 1..3114: note = Description of Artificial Sequence: Synthetic coding sequence
  source 1..3114: mol_type = other DNA
atgtggagatgcggcggacggcagggtctctgtgtgctcaggcgactgtcgggcggacatgctcaccaccgcgcatggagatggaactccaacagggcctgtgaaagggcactgcagtataagctcggcgataaaatacatggatttacggtcaaccaggtcacaagcgttccggagctgttcctcaccgccgtaaaactgacccacgacgacaccggggcaaggtacttgcatttagctagagaagataccaataatctcttttcagtgcagtttaggaccaccccgatggatagcacaggggtcccgcacatactcgaacatactgtcttgtgcgggtctcagaagtatccctgtcgagacccattttttaaaatgcttaatcggagccttagtacatttatgaacgcattcactgcgagcgactacacactctatcccttctcaacccaaaatccaaaggattttcagaatttactcagcgtctaccttgacgccacttttttcccatgcctgagggagctggatttttggcaggaagggtggcgattggaacacgagaatcctagtgatccccaaaccccgttggtattcaagggcgtcgtgtttaatgaaatgaagggcgcttttgtaaacaacgaacgtattttctcgcagcatctgcagaacaggctcttgccagaccacacctactctgtggttagcggcggagacccgctgtgcattcccgaacttacgtgggagcagttgaaacagttccatgctactcactaccacccaagtaacgcgcggtttttcacctatggtaatttccctctcgagcagcacctgaagcagatccatgaggaggcattgagcaaatttcagaaaatcgagccaagcacagtggtgcctgcgcagacaccatgggataagccccgagagttccagatcacctgtggccctgacagtttcgcaacggaccctagcaaacagactaccatctcggtgtcctttttactgccagatataacagacaccttcgaagcttttacgcttagtctgctgtcctcactgttgacatccggcccaaactcccctttctataaagccttgatagagtcaggcctcgggaccgacttttcaccagacgtcggttacaacggctacacacgtgaggcctacttctcagttggccttcaaggcatcgcagaaaaggacatcgagacagtacgctctctaatagatagaacaatcgatgaggtcgtggaaaaaggcttcgaagatgataggattgaggccctcttgcacaaaattgaaattcaaatgaaacaccaaagcacttctttcgggctcatgcttacgtcttacatcgctagttgttggaaccacgacggcgatccggtcgaattgctcaagcttggcaaccagctcgccaagttcaggcaatgcctgcaagagaaccccaagttcctgcaggagaaggttaaacaatactttaagaacaaccagcacaaactgaccttgagcatgagacccgacgataaataccacgagaaacaggcccaggtcgaggcaaccaaactaaaacagaaagtggaggccctctccccaggagatagacaacagatatatgaaaaaggtctggagttgcgatcccaacagagcaaacctcaggatgcgtcatgcctcccggccttgaaggtctccgacattgagccaactatccccgtgacggaactcgacgtggtgcttaccgccggtgatatccctgtgcaatattgtgcccaacctacaaacgggatggtctactttcgggcctttagtagcctcaacacactccccgaagaactgcgaccttatgtgcctctgttctgtagtgtgctcaccaagttgggctgcggcctgttggattaccgggagcaggcacagcagattgagctcaagaccggcggtatgtctgcctctcctcatgtgctgcccgacgactcacacatggacacatacgagcaaggtgtgctattctcatccctttgtctcgaccgtaatcttccggacatgatgcagctgtggtccgaaatctttaataacccatgcttcgaagaagaagagcacttcaaagtcctggtgaaaatgacagcccaggaactggcaaacgggattcccgacagtggacatctctacgccagcattcgagctggacggacgctcacacctgctggagatctacaggagacgtttagcgggatggaccaggtgcgtctgatgaaacggatcgcagagatgacagacatcaaacctattttaagaaagctccctcgcatcaaaaaacatttgctgaacggcgataacatgagatgctcagtgaacgccacgcctcagcagatgccgcagacggagaaagcagtggaagattttcttagatcaataggcaggagtaagaaggagagacgacccgttagaccccacactgtggagaaaccagtaccctcatccagcggcggggacgcgcatgtgccccatggctctcaggtcataaggaagttggtcatggagccgacctttaaaccatggcagatgaaaacgcactttctgatgccttttcccgtgaattatgtgggcgagtgcatccgaacagtcccctatacagacccagaccacgcttctcttaaaatccttgctcggctgatgacagccaagttcctgcacacagagattcgggagaagggtggtgcctatggcggtggcgccaagctgagtcacaatggaatcttcaccctatactcctatcgggacccgaacaccatagagacactgcagtcgtttgggaaagcagttgactgggcgaagtcagggaagttcactcagcaggatatcgacgaagcaaagctcagcgtgttttctaccgtggacgcccccgtggctcctagcgataaggggatggaccattttttgtacggacttagcgatgaaatgaagcaggctcaccgagaacagttattcgcagtcagccacgacaagctgctcgcagtgagtgatagatacctcggaacgggaaaaagcacacatggtctcgctattctaggccctgaaaatccgaaaatcgccaaggacccctcttggatcatacagtag

SEQ ID NO: 16476 - DNA, 1107 bp, synthetic construct
  misc_feature 1..1107: note = Description of Artificial Sequence: Synthetic coding sequence
  source 1..1107: mol_type = other DNA
atgcagccaggctcatctcgctgcgaagaggagaccccttctctgctttggggcctggatcccgtcttcctggcttttgctaaactttacattagggacattcttgatatgaaagagtctcgccaggtgcccggcgtgttcctgtataacggccatccgatcaaacaggtggacgtcctggggacagtcatcggtgtgagagagagagatgcattttacagttacggtgtggacgatagtactggcgtcattaactgcatttgctggaagaagctgaatacagaatccgtaagcgctgctcctagcgccgctagagagctgtcccttaccagccagctgaagaaattgcaggagacgatagaacagaagacaaagattgagattggcgacacaatccgcgtgagagggagcataagaacctacagggaggaaagggaaattcatgccactacatactacaaggtcgacgatccagtgtggaacatccaaattgcccgcatgttagagttgccaacgatctatcggaaagtttacgatcagcccttccattcgagtgccctcgagaaggaagaggctctgtcgaaccccggtgcgctggacctcccaagcctcacatctctgctgtctgagaaggctaaggagttcctgatggaaaacagggtccagagcttttaccaacaagagctcgagatggtcgagtctctcttatcactagcaaaccaacccgtgattcatagcgcttcaagtgaccaggtgaacttcaagaaagacacaactagtaaagcgattcattctatattcaagaatgcaattcagcttctccaggagaagggcctcgtgttccagaaggatgatggcttcgataacctgtattatgtgacaagggaagataaagacctccaccgcaagatccatcggataatccagcaggattgtcagaaaccgaaccatatggaaaagggatgtcattttctccacatactggcctgtgcccgactttcaattagacctggactttctgaggcagtcttgcagcaggtgctggaattgctggaagaccagtccgacattgttagtaccatggagcactattacacggcattctag

SEQ ID NO: 16477 - DNA, 1038 bp, synthetic construct
  misc_feature 1..1038: note = Description of Artificial Sequence: Synthetic coding sequence
  source 1..1038: mol_type = other DNA
atgggggtctgtggatatctgtttctgccctggaagtgccttgtggtggtttccctgcgcctattgtttctcgtgccgaccggcgttccagtgcgctccggcgacgcaaccttcccgaaggcaatggacaatgttaccgttcgacagggagagtctgccacccttaggtgcactatagacgatcgcgtgacccgtgtagcctggctgaaccggtctaccatactctatgcagggaacgataaatggagtatcgacccgcgggttatcatccttgtcaatacaccaacccaatatagcatcatgatccagaacgttgacgtttacgacgaaggcccatacacttgttccgttcagactgacaaccaccccaaaactagccgtgtgcaccttatcgtgcaggtgcccccgcagatcatgaatatctcttcagatattacagtcaatgagggcagctcagtgaccctactctgcctagcaatcgggaggcctgagcccacagtgacatggagacacctctctgtgaaggaaggacagggatttgtgtccgaagacgagtatctggagatcagcgacattaagagagatcagagcggtgagtacgagtgttcagccctcaacgacgtggcggccccagatgttcgcaaggtcaagattactgtcaattaccctccctatatttccaaagccaagaacaccggcgtttcagtggggcaaaagggaatcttgtcttgtgaggcctctgccgttcctatggcagaattccagtggttcaaagaggaaacaaggctcgccaccggcctggacggaatgcggatcgaaaacaagggaagaatgagtaccctgactttctttaatgtatcagagaaagactatgggaactacacgtgtgtggccacgaataaattgggcaatacgaacgccagtattacactgtacgggcccggtgccgtgattgacggcgtgaacagcgcaagcagggccctagcttgcctgtggctatcaggcaccctgcttgcgcacttctttattaaattttag

SEQ ID NO: 16478 - DNA, 939 bp, synthetic construct
  misc_feature 1..939: note = Description of Artificial Sequence: Synthetic coding sequence
  source 1..939: mol_type = other DNA
atgtaccaccctgcctactgggtagtgtttagtgctactactgccttgctgttcatacccggagtgcccgtacgttccggcgatgcgacatttcctaaagccatggacaacgttaccgtccggcaaggcgaaagcgccaccctgcgctgtacaattgatgaccgagtgacaagggtggcatggctgaaccgctccacaattatgatccagaacgtcgacgtctacgatgagggcccctacacgtgttctgtacagactgataatcaccccaagacctctcgggtgcacctgattgtgcaggtgcccccccagatcatgaatatcagctccgacatcacagtaaatgaagggagtagtgtcacgctgctctgcttggctataggccgcccagagcccactgtgacatggagacacttgtccgtgaaagagggtcaggggtttgtttctgaggacgaatacttggagatttccgacattaaacgcgaccagagcggtgagtacgagtgttctgcattaaatgatgtggccgctccagacgtgcgtaaggtgaaaatcaccgtcaattatccaccttacatctctaaggcaaagaatacaggggtttccgtgggtcaaaaagggatcctcagctgcgaagcctctgctgtaccgatggccgaattccagtggttcaaagaggagaccagacttgctaccggcctggacggcatgcggattgagaacaaaggcagaatgagtaccctgacctttttcaatgtctctgaaaaggactatgggaactatacatgtgtggccacgaacaaactgggaaacactaacgcttccatcaccctgtatgggccaggtgctgtgatcgatggcgtgaattctgctagcagagccttggcttgtctctggctttcaggaactttgcttgcccacttctttatcaagttctag

SEQ ID NO: 16479 - DNA, 1017 bp, synthetic construct
  misc_feature 1..1017: note = Description of Artificial Sequence: Synthetic coding sequence
  source 1..1017: mol_type = other DNA
atgtaccatcctgcctactgggtggtcttctcagctaccaccgctttactttttataccgggcgtacctgtgaggtccggagatgcaacttttccgaaggccatggataacgtgacagtgcggcagggtgaatcagcaacactgcgctgcactatagacgatagggttactcgcgtggcctggctgaacagatctaccatactctacgccggaaatgataagtggtcgattgatcccagagtgattatcttggtgaacactcccacccagtactctattatgatccagaatgtcgacgtgtacgatgaaggtccatatacctgttcagtgcaaactgataatcatcccaaaacatctagggtgcatttaatcgtgcaggtgccaccacagatcatgaacatcagctcagatataactgtcaacgaaggatcttccgtaaccctgctgtgtcttgctatcggacgtccggaacctaccgtgacctggcggcacttgtccgtgaaggaagggcaaggtttcgtaagcgaagatgagtatttggaaatcagtgacattaagagagaccaatccggtgaatatgagtgcagtgccctcaacgatgtagcagccccagacgtgagaaaagtcaaaattactgtgaactaccccccatacatctctaaagccaagaacacaggagtaagtgtcggacaaaaaggaatcctttcttgcgaagcaagcgccgtccccatggctgaattccaatggttcaaggaagaaactaggttggccacaggcctcgatggcatgcgcattgagaacaaggggcggatgagcactttaacattcttcaatgtgtccgagaaggactatggaaactatacctgtgtcgctacaaataaactcggcaacaccaacgcttccatcaccctgtatggcccaggcgctgtgattgacggggttaactccgcttctagagcattagcctgcctgtggctctccgggactctgctcgcccatttcttcatcaagttttag

SEQ ID NO: 16480 - DNA, 1065 bp, synthetic construct
  misc_feature 1..1065: note = Description of Artificial Sequence: Synthetic coding sequence
  source 1..1065: mol_type = other DNA
atgggggtgtgcggctatttgtttctgccctggaagtgtcttgtcgtcgtaagcctcaggctgctgtttctggtgcccacgggagtacctgtcagaagtggggacgcaacattccccaaggccatggacaacgtgactgtgcggcagggagaaagcgcaacgctgcgttgcacaattgatgaccgggttacaagggtggcctggctgaatagatccacaattctctacgctggcaatgataagtggtctatcgacccacgcgtcatcatactcgtgaacacgcctacacaatattctatcatgatacagaatgtcgatgtgtacgatgaaggtccatacacttgttccgttcagacagacaaccacccaaaaacaagccgggtccacttgatcgtgcaggtccccccacaaattatgaacatctcctctgatatcaccgtgaacgaaggcagctcggtgaccctgctgtgtctggcaatagggagacctgaacccacagttacatggagacatttatccgtcaaggaggggcaagggttcgtcagtgaggatgaatatctggagatctctgatattaaacgcgaccagtccggggagtacgagtgctcagcgctgaatgatgtcgccgcccccgatgtgcgaaaagtaaaaattaccgtgaattatcccccctatatttctaaagcaaaaaacacaggtgtcagcgtgggccagaaaggcatactgtcttgtgaagcctccgccgtgcccatggccgagtttcaatggttcaaggaggaaactaggctggccacagggctggatggaatgagaattgagaacaaaggacgcatgtctaccctgactttctttaacgtatcagagaaagactatggtaattacacttgcgttgcaactaataagctggggaacactaatgcatctatcactctctatgagattagtccctcctccgcagtggccggccctggggcagtcattgatggagtaaacagtgcctcgcgcgctctagcttgcctatggctgtctgggacacttttggctcacttctttataaaattctag

SEQ ID NO: 16481 - DNA, 1662 bp, synthetic construct
  misc_feature 1..1662: note = Description of Artificial Sequence: Synthetic coding sequence
  source 1..1662: mol_type = other DNA
atgtccaataacggccttgacattcaagataaacctcccgctccacctatgagaaacacttccaccatgatcggagccggttccaaagacgctggaaccctgaatcacggaagcaagcccttaccacctaaccccgaagaaaaaaagaagaaggatagattttataggagcattttgccgggcgataagacaaacaagaaaaaggaaaaagaacgacccgaaattagtctaccttccgactttgaacacacaatccacgtggggttcgatgcggttaccggtgagtttacaggaatgcctgagcagtgggcacggcttctgcagacctcgaatataaccaagtccgaacaaaaaaagaatcctcaggccgttttagatgttctagagttttacaattcgaaaaaaaccagcaactctcagaaatacatgtcttttaccgataaatccgccgaagactacaactccagtaacgcacttaatgtgaaggctgtgagcgagacgccagccgtgcctcccgtgtctgaagacgaagacgatgacgacgacgacgctaccccgcccccagttatagctccaaggccggagcacaccaaaagcgtgtatacccggtccgtcatcgagccattgcccgtgacccctacacgggatgtggcgaccagccctatctcccccacggagaacaacaccactccacctgatgctctgacgaggaataccgaaaaacaaaagaaaaagccaaagatgtcggacgaggaaattctggagaaactcaggagcatcgtcagtgttggtgacccaaagaagaaatatacacgattcgaaaagataggccagggcgcttcagggaccgtgtacacagccatggacgtggccacaggacaggaggtggcaattaaacagatgaatcttcagcagcagccgaaaaaagagcttattattaatgagatccttgtgatgagagaaaataaaaaccccaatatagtgaactacctcgattcttatctggttggcgatgagctgtgggtggtcatggagtatctggctggtggatcactgaccgatgtggtcacagagacttgcatggatgagggacaaatcgcggctgtgtgcagagagtgcctgcaagctcttgaattcctacatagcaaccaggttatccatcgcgacatcaagtccgataatatcttgcttggaatggatggatctgtgaaactaactgatttcggattctgcgcacaaatcaccccggagcagagtaagagatctacaatggtcgggacaccctactggatggccccagaggtggtgacccggaaggcctacggacccaaagttgatatctggagtctgggaattatggcaatcgaaatgattgaaggggaaccgccttacttgaatgagaacccactaagagcactctacttgatcgcaaccaatggcacacctgagctccagaatcccgaaaagctgtcagctatcttccgggacttcctcaatcgctgtcttgaaatggatgttgaaaagcggggctcagctaaagaattgttgcaggttaggaagctacggtttcaggttttctcaaacttcagcatgatagctgcgagcatcccagaggactgccaggcacctctccagccccacagtaccgactgctgcagttag

SEQ ID NO: 16482 - DNA, 1638 bp, synthetic construct
  misc_feature 1..1638: note = Description of Artificial Sequence: Synthetic coding sequence
  source 1..1638: mol_type = other DNA
atgtcaaacaatggattggatattcaggataagcctccagcaccgcctatgcgaaatacgtcgactatgattggcgcggggtctaaggacgcggggacattaaaccacggaagtaaacctcttccaccaaacccagaagaaaagaaaaagaaggaccgtttctataggtctatacttcctggggacaaaacaaacaagaagaaggaaaaggaaagaccggaaataagcctgccttcagatttcgagcacacgatccatgtgggattcgacgcagttaccggggagttcacaggtatgccagagcaatgggccaggttgcttcagaccagtaatattactaaatctgagcagaagaagaatccccaggcagttttggacgtcctggaattctataattccaagaagacatcaaacagccaaaagtatatgagctttactgacaagtccgctgaggactacaactcttccaacgccctgaacgttaaggcagtgtcagagacccccgcagtcccccccgtgtctgaggacgaggatgacgatgacgacgacgccacccctccgcctgtgatagctccgcgtccagaacacaccaagtccgtgtatactcggagcgtgatcgagccactcccagtaaccccgactcgggacgtcgctacttccccaatcagccctaccgaaaacaatacaactcctcccgacgctctgacaaggaacactgaaaaacagaaaaaaaaaccgaagatgagcgacgaagagatcttggagaagttgcggtccattgtgagtgtgggtgaccccaagaagaagtatacacgcttcgaaaagattggtcagggagcgagtggcacggtttacacggccatggatgtcgctacgggccaggaggtcgcaattaagcagatgaacctccagcagcagccaaagaaggagctgatcatcaacgagatcctggtgatgagagaaaataagaatccaaatatcgtgaattacttggactcgtacctggtcggtgatgagctgtgggtggttatggagtacctggcaggcgggagtctgaccgacgtagtgactgaaacctgcatggacgaaggccaaatcgcagctgtctgtagagaatgtctccaggctttggagttcttgcattctaatcaggtgatccaccgcgacattaagtcagacaatatccttttgggcatggatggaagcgtgaaattgacagactttgggttctgcgcccagattactcctgaacagtccaagcgctctaccatggtaggcacaccatattggatggccccagaagtggtgaccaggaaagcctatggacccaaagtcgacatttggagtttagggattatggccatagagatgattgagggcgagccaccctatctcaatgaaaatccattgagagctctctatctgatcgccaccaatggaacaccagaactccaaaacccagaaaaactgtctgctatattccgggattttctgaatagatgccttgagatggatgtcgaaaaacggggttctgctaaggagctgctgcagcaccaattcctaaagattgcgaaaccgctcagctctcttactccactgatcgccgccgccaaggaggcaacaaaaaataatcactag

SEQ ID NO: 16483 - DNA, 300 bp, synthetic construct
  misc_feature 1..300: note = Description of Artificial Sequence: Synthetic coding sequence
  source 1..300: mol_type = other DNA
atgtccaataatggactggatattcaggataagcctcccgcaccacccatgcggaacaccagtactatgattggggcggggagcaaggacgcagggaccctgaatcacggcagcaaaccattgccccccaaccccgaggagaagaaaaaaaaggatcggttttataggtcaatacttcccggcgacaagactaacaagaagaaggagaaggagcggcctgagatcagtctgcccagtgatttcgagcatactatccatgtgggattcgatgcagtgacgggagagttcaccgggatgtag

SEQ ID NO: 16484 - DNA, 81 bp, synthetic construct
  misc_feature 1..81: note = Description of Artificial Sequence: Synthetic coding sequence
  source 1..81: mol_type = other DNA
atgtcaaacaatggtctggacattcaggacaagccaccagctcctccaatgagaaacacctctaccatgattggggcatag

SEQ ID NO: 16485 - DNA, 270 bp, synthetic construct
  misc_feature 1..270: note = Description of Artificial Sequence: Synthetic coding sequence
  source 1..270: mol_type = other DNA
atgtccaacaacggcctggacatccaagacaaaccccctgctccgccgatgaggaatacaagcacgatgatcggcgccggtagcaaagacgcaggcactttaaaccacggctcgaagcctctccctcccaatcctgaggaaaagaaaaaaaaggaccgcttctaccggagcatcctgcccggagacaaaactaacaagaaaaaagagaaggagcgacccgagataagcctgcctagtgacttcgagcataccattcacgtgggcttctag

SEQ ID NO: 16486 - DNA, 192 bp, synthetic construct
  misc_feature 1..192: note = Description of Artificial Sequence: Synthetic coding sequence
  source 1..192: mol_type = other DNA
atgtctaacaatgggctcgatatccaggataagccacctgcccccccaatgcggaatacctcaacaatgattggcgccggaagcaaggacgcgggtacgttgaaccacggctccaaacccctcccaccaaacccagaggaaaagaagaagaaagacaggttttaccggagtatactcccgggcgacaagtag

SEQ ID NO: 16487 - DNA, 321 bp, synthetic construct
  misc_feature 1..321: note = Description of Artificial Sequence: Synthetic coding sequence
  source 1..321: mol_type = other DNA
atgtcaaacaatggattagacattcaggataaacctcctgcccctccgatgaggaacacaagcacgatgattggggccggaagcaaggacgcaggtactctcaaccacgggtcaaagcctttgcctcctaaccccgaagaaaagaaaaaaaaggatagattctaccggtccattttgccaggggacaagaccaacaaaaaaaaagaaaaagaacgccctgagatcagtcttccatctgattttgaacacacaatacacgtggggttcgatgcggtcaccggagagtttacggggatgcctgagcagtgggctcggctttag

SEQ ID NO: 16488 - DNA, 1569 bp, synthetic construct
  misc_feature 1..1569: note = Description of Artificial Sequence: Synthetic coding sequence
  source 1..1569: mol_type = other DNA
atgtcaaacaacggcttggacatccaggataaacctccggcaccgcccatgcgcaataccagtacaatgatcggcgcaggctccaaggatgcgggcacactcaaccatggatcaaaacctttgccccccaatcctgaagaaaagaaaaaaaaggataggttctatcggtccatactcccaggagacaagaccaacaagaaaaaagaaaaggaacggcctgagatcagcttgccatcagacttcgagcacacgatccatgtgggttttgatgccgttaccggcgagttcaccgggatgccagagcagtgggctcggctactgcagacttccaatattaccaagagtgaacagaagaaaaatcctcaggcagttctcgatgtgttggagttttacaatagcaaaaagaccagcaattcccagaaatatatgtccttcactgacaagagcgctgaggactacaacagctccaatgcactgaatgtgaaggccgtgagcgagacccccgctgtccctcccgtgtccgaagacgaggatgacgatgatgatgacgccacgcccccaccagtgatcgccccgaggcccgaacacaccaagtccgtctatacacgatcagtcatcgagcctcttcctgtgactccaactcgcgacgtggctacttcgcccatctcacccacagagaataacaccacccccccagacgctctcaccagaaacacagagaagcagaagaaaaaacctaaaatgagcgacgaggaaattctggagaagctgaggagcattgtgagtgtgggcgatcctaagaaaaaatataccaggtttgaaaagattgggcagggcgcaagtgggaccgtgtacaccgctatggatgtggcgacagggcaggaggtggcaattaagcagatgaacctccaacagcaacccaaaaaagagctgataatcaacgaaatactggtgatgcgggagaataagaatccaaacattgtcaattacctcgactcatatcttgtgggggacgagctgtgggttgtgatggaatatttagcaggggggtcacttacggacgtcgtgacagaaacctgcatggatgagggacagatagccgccgtgtgccgcgagtgcctgcaagccctcgagtttctgcatagcaaccaagtgatccatagagacatcaaatcagacaacatcttgctgggtatggatggttccgtaaagttaaccgacttcggtttctgcgcccagattacccccgagcaaagtaagcgtagcactatggttggcaccccttattggatggctcccgaggtcgtcactagaaaagcctacggacctaaagtggacatttggtcgttaggaattatggcaatcgagatgattgagggggagccaccctatttgaacgagaatcctctgagagctctctacctgatcgctacaaatggcacccccgaactccagaaccctgaaaaactttcagccatcttccgcgacttcctgaaccgctgtcttgaaatggatgtcgaaaagagagggagtgctaaggagctcttgcagcattcctccagactgtag

SEQ ID NO: 16489 - DNA, 1317 bp, synthetic construct
  misc_feature 1..1317: note = Description of Artificial Sequence: Synthetic coding sequence
  source 1..1317: mol_type = other DNA
atgttcggaaaacgcaagaaacgggtggagataagcgccccatcaaacttcgagcaccgtgtgcataccggtttcgaccaacacgagcagaaatttacagggctgcctaggcagtggcagtccttaatcgaagagagcgctcggcggcctaaaccactcgttgaccctgcctgcattacttcgattcagcccggagccccgaaaggggagccacatgatgttgcacccaatggcccctctgcaggaggcctggccatcccccagtctagctcatcaagttcacgcccaccgaccagggcaagaggtgcaccctcgcctggggtgttaggacctcatgcctccgaaccccaactggcgcctccagcctgcacgccggctgcccccgctgtgcctggacctccaggcccaagatcccctcagagggagccacaacgcgttagtcatgaacagtttagagccgcgctgcagctggtcgttgaccccggagatccgaggagttaccttgataattttattaagatcggcgaggggtcgacagggattgtatgcatcgctactgtgagatcaagcggaaagctggtggccgtgaaaaagatggacctgcgcaaacagcaacgtcgcgagctccttttcaacgaggtggtcattatgagagactatcaacatgaaaatgtggtagagatgtacaactcatatctggtcggggatgagttgtgggtcgtcatggagtttctcgaaggcggagccctcaccgacatagtgactcatactaggatgaatgaggagcagatcgcagcggtctgcctagctgtcctgcaagccctcagtgtcttgcatgcgcaaggagtgattcatcgggacatcaagagcgattccattctgctcacacacgacggcagggtcaagctatctgattttggtttctgtgcccaggtcagtaaggaggtaccccgccggaagagccttgttggtacgccatactggatggcacccgaacttatctctcgactgccttatggcccagaagtggatatctggagtctcggcataatggttatcgaaatggtcgatggcgagcctccttattttaatgagccgcctcttaaggctatgaaaatgatccgcgataatcttcccccacggcttaagaatctacataaggtgtcgccatctctgaaaggttttctggatcgcctgttggtgcgagatcccgctcaaagagccacggccgctgaactcctgaagcaccctttccttgctaaggccggcccacctgcctctattgttcccctgatgcgacagaaccgcaccagatag

SEQ ID NO: 16490 - DNA, 1776 bp, synthetic construct
  misc_feature 1..1776: note = Description of Artificial Sequence: Synthetic coding sequence
  source 1..1776: mol_type = other DNA
atgtttggaaaacggaaaaaacgggtcgagattagtgccccttctaattttgaacacagagtgcacactggcttcgaccagcatgaacaaaagttcaccgggctcccgcggcagtggcagtccctgattgaggagagcgccaggagacccaagcctctggtggatcctgcgtgtatcacctccatccaacccggagcaccgaaaacgatcgtacgcgggagcaagggagccaaggatggagcccttacgctgctcctcgatgaattcgaaaacatgagtgtcactagaagcaactccctccgccgggactctcccccaccaccagctcgggcccgccaggaaaacggcatgcccgaagagcctgcaacgactgctagaggcgggcccggcaaagctgggtcaagggggcgtttcgcagggcattccgaggctggtggaggcagcggggaccgccgacgcgcaggaccggagaagagaccaaagagtagtagagagggttccggcggtccgcaggagagttcgcgtgacaagcgccccctgtcaggcccagacgtcgggactcctcagcctgcaggattagcctctggcgcaaaactggctgctggtcgacccttcaacacctacccacgggcagataccgaccatcctagtcgtggcgctcagggtgaaccccatgacgtggcaccgaacggaccctccgcaggtggcctggccatccctcagtcttcctcatcttcctcccgccccccaacacgcgctcgtggtgctccaagcccaggcgtcctaggtcctcatgcctcagaacctcagctcgccccaccggcttgtactcccgccgcccctgcagtgccgggccctccgggccctcggagtccacagcgggaaccccagagggtgtcccatgaacaattcagagctgctcttcagctggtggtcgacccaggcgatccgagaagttatctcgacaacttcatcaagattggagaaggatctaccggcatcgtatgcatcgccacagtcaggagtagcgggaaattagtggccgtcaaaaagatggacctacgtaagcagcagcgccgggaactgttatttaacgaggtcgtgatcatgagggattaccagcatgaaaatgtcgtagagatgtataactcatacttagtcggcgacgagttgtgggtggtgatggagttcttggaggggggagctctcactgacatagtgacacacactagaatgaatgaggagcagattgccgcagtttgcctggcagtcctccaggcattgtccgtgctgcatgcccaaggggtgattcatcgcgacatcaaaagtgactctatccttctgacacacgatggacgggtgaagctgagcgatttcggattctgtgcgcaggtgagcaaagaggtccctaggaggaagagcttagtggggacaccctattggatggccccggagctgatcagcaggctcccctatgggccagaggtggacatttggagcctgggaataatggtgatcgaaatggtggatggcgagcctccatacttcaacgagccacccctgaaagcaatgaaaatgatacgggacaatctgccaccaaggctgaagaatttgcacaaggtgtctcccagtctgaagggattcctggaccgcctgttagtgagggacccagcacagagagccacggccgctgagctcctgaagcaccctttcctggccaaggctggtccacccgcttccatcgtacccctgatgcgccaaaacaggacccgctag

SEQ ID NO: 16491 - DNA, 1188 bp, synthetic construct
  misc_feature 1..1188: note = Description of Artificial Sequence: Synthetic coding sequence
  source 1..1188: mol_type = other DNA
atgggctgtcaacggtcccgtccattcaatacctacccaagggcagacacagatcacccttcgaggggggcccaaggcgagcctcatgatgtcgcacctaatgggccctctgcagggggactggcaattccccagtcttcaagttcgtcaagccgcccacccacccgggcccggggtgcgcccagtcctggagtcctgggccctcacgccagcgagcctcaattggcccctccagcctgcacaccagctgctcccgccgtacctgggcctcctggccctaggtcccctcagcgggagccacagcgcgtatcacacgaacagttccgggctgctctgcagctggtcgtagaccctggcgacccccggtcttatctcgacaacttcatcaagattggtgagggctcaaccggaattgtgtgcatcgctactgttagatcctccgggaaattggtcgcagtgaaaaaaatggatctgcgaaagcagcagcggcgagagcttttgtttaacgaggtcgtaatcatgcgagactatcagcacgaaaacgtcgtcgagatgtacaacagctacttggtcggcgatgagctgtgggtggttatggagttcctagaagggggggccttgaccgatattgtgacgcacaccaggatgaacgaggagcaaattgcagcagtatgccttgctgtcctccaggcattgtctgtgctgcatgcccagggtgtgatccatcgggacatcaaaagcgacagcatattgctgacacacgatggtcgggtcaagctttctgactttggcttctgcgcccaggtaagtaaggaagtcccccgccggaagtccctcgttggaaccccatactggatggccccagagttgatttccaggctgccctatggaccagaggtggacatctggtctctgggcatcatggtcatcgagatggtagatggcgaacctccttacttcaacgagccgcccctgaaggctatgaagatgattcgggataacctgccacctagactgaaaaatctgcataaggtgtctcccagcttaaagggcttcctggatcgcctgctggttcgggatcctgctcagagggccacagctgccgaacttttgaagcatcctttcctggctaaggctgggccacctgcaagcatagtcccgcttatgcggcagaatagaactagatag

SEQ ID NO: 16492 - DNA, 1776 bp, synthetic construct
  misc_feature 1..1776: note = Description of Artificial Sequence: Synthetic coding sequence
  source 1..1776: mol_type = other DNA
atgttcggtaaacgtaagaagagagtcgaaatcagcgctccaagcaactttgagcaccgggtacacactggctttgatcagcacgagcagaaatttaccggactcccacgccagtggcagagtctgatcgaggagtccgcgcggcgccccaagcctttagttgacccggcttgcattacctccatacaacctggagcccctaaaactatagtgagggggagtaagggagccaaggatggggcactgactctattgctcgatgagttcgaaaacatgtctgtgactaggagtaatagcctccgtagggattccccaccccctcccgcacgtgctagacaggaaaacggtatgcccgaggaacctgcaaccacagccagaggtggaccgggcaaggctggcagcaggggcaggtttgcaggtcacagcgaagcggggggcggatctggcgatcggagaagggctggcccggagaaacggccaaagagctccagggaaggctctggcggccctcaagaatcttctcgtgataaacgaccattatctgggccggatgtggggacaccacagccagctggcctcgccagtggcgccaagctggctgccgggagaccttttaacacgtacccacgcgcggataccgatcatccaagtcgaggagcccagggcgagccccacgacgtagcacccaatggaccgagcgcaggtgggctagccattcctcaatcgtcaagttcctcatcacgtccaccaacccgggctcgaggagccccatcccctggcgtgctggggcctcacgccagtgagcctcagttagcccccccagcttgtacaccagccgcacctgccgttcccggaccgccgggtcctcgcagcccacagagggagccacagcgggtgtcacacgagcagttccgagcagccctgcagctggtggtggatccaggcgacccacggtcctatcttgataattttatcaaaattggagaggggtcaaccggcatagtgtgtatcgcgaccgtccggtcctcagggaagctggtggccgtgaagaagatggatctccggaagcagcaaaggcgggagctgttgttcaatgaggttgtcatcatgcgggattatcagcacgagaatgtggtggaaatgtataacagctatctagtgggggacgagctttgggtcgtcatggaattcctcgaggggggcgcgctaacagatatcgtgacacatacccgaatgaatgaggagcagatcgccgcggtgtgtctagctgtgctgcaggccctttctgtactgcacgctcagggcgtgattcacagggatattaagtcagactccattttacttacacatgacggcagggtgaaattgagtgacttcggattttgtgctcaggttagcaaagaggtgcctcgaagaaaatccctggtcgggactccctactggatggctccggaactgatatcacggctgccctatggccccgaggtggatatttggagcctcggcataatggtaatcgaaatggtcgatggggagccgccctattttaacgaacctcccctgaaggccatgaagatgatccgagataatctgccaccacgcctgaaaaatctgcacaaggtgagtccgagtctcaaaggctttctggataggctgctggtccgagacccagcccagcgtgcgacagctgccgagttgctgaagcaccccttcctggctaaagccggtcctccagcctcaattgtccccctgatgcggcagaaccgaacaaggtag

SEQ ID NO: 16493 - DNA, 1776 bp, synthetic construct
  misc_feature 1..1776: note = Description of Artificial Sequence: Synthetic coding sequence
  source 1..1776: mol_type = other DNA
atgttcggcaagagaaagaagagagtagagatctcagccccctctaacttcgagcaccgggtccataccggttttgaccagcatgaacagaagttcaccggactgcctcggcagtggcaatctctgatagaggagtccgcccgtagacccaagcccttagtggaccctgcctgtatcaccagcatccagcccggcgcaccaaagacaatcgtccgcggatctaagggggctaaggacggcgccctcacactgctgttggacgaattcgaaaatatgtccgtgacacggtccaattctctccgtagggatagtcctccacctcccgcccgcgcgagacaggagaacggcatgcctgaggagcctgccacgaccgctcgcggaggacctggcaaggctgggagtcgggggagattcgccggccattctgaagctggcggaggcagcggtgacaggcggagggctggcccggaaaagaggccaaaatcttcgcgtgaaggttcgggcgggccacaggaaagttcacgagacaaacgacctctatccggacctgatgttggcacaccccagccggctggcttagcaagcggagcgaaactggcggcgggtcgccccttcaacacttacccaagggccgacacagatcatccttctcggggggctcagggcgagccccatgacgttgctccgaatggcccctctgcaggagggctggcaatccctcagtcatccagctcttcgtcacggcccccaacacgggcacgcggagccccttccccaggtgtactgggtcctcacgctagcgaaccgcagctagcaccacccgcctgcacccccgcggccccagccgtgcccgggcccccaggccctaggtcccctcagagggaacctcaaagggtgtcccatgaacaatttagagcagccctacagctggtcgttgatcctggcgacccaagaagttacttggacaattttattaagatcggagagggaagtacaggaattgtttgtattgcgacggtacggtcgtctggcaagctcgtagctgtgaagaaaatggatcttcgaaaacagcaacggagggaactattatttaacgaggtcgtgattatgagagactaccagcacgaaaatgtcgtggaaatgtacaatagctacctggtgggcgacgaactctgggtagtgatggagtttctcgaggggggggccttaaccgacattgtgactcacacccgcatgaatgaggagcaaattgctgcagtatgcctggccgttctgcaggcactgtccgtactccatgcacagggggtgatccacagagacattaaatccgattctatcctccttacgcacgatggaagggtaaaactatcagatttcgggttttgcgcacaagtgtctaaggaagtgccccgacgaaagtcgctggttggtaccccatactggatggccccagagctgatttcccgacttccctatggacctgaggtggacatctggagcctgggaattatggttattgaaatggttgatggggagcccccatactttaatgaaccacccttgaaagcaatgaagatgattagggataatctgcccccacgcttaaaaaatctccacaaagtgtcacccagcctgaaggggtttctggataggttgttggtccgggaccctgcacagagagctacagctgcggagctgcttaaacatccgttcctcgccaaagctggccctccagcgagcatcgtaccccttatgcgtcagaacaggacaagatag

SEQ ID NO: 16494 - DNA, 1044 bp, synthetic construct
  misc_feature 1..1044: note = Description of Artificial Sequence: Synthetic coding sequence
  source 1..1044: mol_type = other DNA
atgacttggccgctcacgggtcaccaaagaggcgcctggccatccccgtctccaccaccgccgccacccggtctccccccagaaccggaagttccgccggccttggagtgctgggatcctaccccccaaagtccaaggtccccccagcgggagcctcaaagggttagccacgagcaattccgcgctgccctccagttggtcgttgatcccggagatccccgatcctacttagataacttcataaagattggcgaggggagcactgggatcgtctgcattgccaccgtcagaagcagcgggaaactggttgcagtaaaaaaaatggaccttagaaagcagcagcgccgggagcttttgttcaacgaagtggtgatcatgcgagactatcagcacgagaatgtcgtcgagatgtacaactcatatcttgtaggcgacgagctttgggtcgttatggaattcctcgaaggcggcgctttgaccgatatcgtgacccacactcgaatgaatgaggagcagatagccgccgtctgtttggctgtacttcaggccctgagtgtgctccacgcccagggagtgattcatagagatatcaagtccgattccattctgctgacccacgacggccgtgtcaaactgagcgactttggcttctgcgcgcaagtgtcgaaggaggtcccaaggcgcaagtctctggtaggtacgccctactggatggctcctgagctgataagcaggttaccatatgggccggaggtggatatctggagtctcggaattatggttatagaaatggtcgatggcgaacctccttacttcaatgagccgcccctcaaagctatgaagatgatcagggataacctgcccccaagactcaagaatttacataaggtttctccttcattgaaaggcttcctggaccggctactcgttagggatccagcacagcgtgcgactgcggcagaactgctcaagcacccttttttagcgaaggcagggcccccggcctctatcgtgccattaatgaggcagaacagaaccaggtag

SEQ ID NO: 16495 - DNA, 1776 bp, synthetic construct
  misc_feature 1..1776: note = Description of Artificial Sequence: Synthetic coding sequence
  source 1..1776: mol_type = other DNA
atgttcggcaagcgtaagaaaagggttgagataagcgctcccagtaacttcgagcatcgggtgcacacaggcttcgatcagcatgaacagaagttcacaggactgcccagacagtggcagtcgctgatcgaggagagcgctcgaagacccaagccccttgttgatcctgcttgtatcaccagtatccagcccggcgcacccaagacgatcgtgaggggatcaaaaggagctaaagacggtgccttgacgttgcttcttgacgagtttgaaaatatgtcggtcactcgatccaattctctgaggcgggatagtccacccccccctgcgcgtgcaagacaggaaaacggtatgcccgaagagcccgcgaccaccgcacgagggggcccaggaaaagcaggatctcgaggaagattcgccggccacagtgaagccggagggggcagcggggatcggaggagggcaggtccagagaagcggcctaagtcgagccgcgagggcagcggtggccctcaggaaagtagccgggacaaacgtcctttaagtgggccagatgtaggaactcctcaacccgccggtcttgctagcggcgccaagctggcagcgggccgtcctttcaacacgtacccaagggccgacaccgatcatccgagtaggggtgcccaaggggagccacacgacgtcgcgccaaatggccccagcgctgggggactggcaattccccaaagttcgagtagctcctctaggccgcccaccagggccagaggtgccccgtcacccggagtgctgggaccccacgcaagcgagccacagctggcaccccctgcatgcacgcccgcagccccagctgtgccaggtcctcccgggcctcgaagcccccagcgcgaaccgcagagagtaagccatgagcagttcagggcagcgctgcagctcgtcgttgaccccggcgaccctagatcctacctggacaacttcatcaagattggcgagggatcaactggcatcgtttgcatagctacagttcggtcttctggtaagctcgttgcggtaaagaagatggatctgcggaaacagcagcggcgcgaactactattcaacgaggtcgtaatcatgagggattaccagcatgagaatgtggtggagatgtacaattcctatcttgtgggagatgagctgtgggtagttatggagttcctggaggggggcgccctgacggacattgttacccacaccaggatgaacgaggagcaaatcgccgctgtctgcctggccgtcctgcaggctctgtccgttctccatgcccaaggggttatacacagagacatcaagagtgattccattctcctgacccatgatggcagggtgaagctgagtgacttcggattctgcgcacaagtctccaaagaggtacctaggcgaaaaagtttagtcgggacaccttactggatggcgcctgagctaatcagccggctgccatacggccctgaagtcgatatatggtcccttggtatcatggtaatcgagatggtggacggtgagcccccctacttcaacgagccaccgctgaaggcaatgaaaatgatcagggacaacctgccgccgagacttaagaacctgcacaaagtttcaccatctcttaaggggttcctcgacagactgctcgtgagagatcccgcgcagagggccaccgccgcggaactgcttaagcatccgttcttagcgaaagccggcccacccgccagtatcgtgccactgatgaggcagaaccggactcggtag

SEQ ID NO: 16496 - DNA, 1317 bp, synthetic construct
  misc_feature 1..1317: note = Description of Artificial Sequence: Synthetic coding sequence
  source 1..1317: mol_type = other DNA
atgttcggcaagcgaaagaagagagtcgagatttcggcaccttctaacttcgagcaccgtgtacacaccggattcgaccagcacgagcagaaattcaccgggctgccgcggcagtggcagagtcttatcgaggaatccgcccgcagacccaaacccctggtcgaccctgcctgcatcacgagtattcagccaggcgcccctaagggcgagccccatgacgtggcaccaaatggaccatccgctggcgggctggccatcccacagagcagttcatccagcagtaggcctcctacaagagctcgcggagccccgagccctggtgtcttggggccgcatgccagtgagccgcagctggcccctcctgcctgtacccctgccgccccagccgtgccaggaccgccgggccccaggtcaccgcagcgggaacctcagagagtgtctcacgaacagttccgagcggctctccagctggtggtcgacccgggggatccaaggtcctacttggacaatttcatcaaaatcggggagggatctactggcatcgtgtgcatcgccactgttcgatcatcggggaagctcgtggctgtgaagaaaatggatctgcggaaacagcagaggagggaactcttatttaatgaggtggtgataatgcgggattatcagcacgagaacgtggtggagatgtacaacagctacctcgtaggagatgagctgtgggtagttatggagtttttggaaggaggggccctcactgacatcgtcacacacaccaggatgaatgaggaacaaatagcggctgtgtgccttgcagtgctgcaggcattgtcagtcctgcatgcacaaggcgtgatccatagagacatcaaatccgattctatattactcacgcacgacggtagagttaaactcagcgactttgggttctgcgcccaagtgtcgaaggaggttccaagacgaaaaagcctagtcggcactccttactggatggcacctgaattaatcagcaggctgccatatggacctgaggtggatatttggtccttagggatcatggtgattgagatggtggacggcgagcctccctacttcaacgagcctccgctgaaggctatgaagatgatccgggataacttgcccccacgcctcaagaatttgcacaaggtgagtccaagtctaaaaggcttcctggaccgcctgttggtgagggatccagcccagagggcaactgccgcagagctcctgaagcacccctttctggctaaggcgggcccccccgcctcaatcgtgcccctgatgaggcagaacagaacaagatag

SEQ ID NO: 16497 - DNA, 1458 bp, synthetic construct
  misc_feature 1..1458: note = Description of Artificial Sequence: Synthetic coding sequence
  source 1..1458: mol_type = other DNA
atggcccccacaatacagacacaggcacagcgagaagatggccacagatctggggtggtttgcagagttaagtattgtaattctctgccagacatccccttcgatcctaaatttatcacttatccattcgatcagaatcgctttgtccaatacaaagctacatctctcgagaagcagcataaacacgatttgcttaccgagcccgacttgggcgttaccatcgacctaattaacccagatacataccgcattgaccctaatgtcctgctggaccccgccgacgagaagctgctggaggaggaaatccaggcacctacaagttccaaacgcagtcagcagcatgcaaaggttgttccctggatgcggaaaaccgaatatatctcaaccgagtttaataggtacggtatcagtaatgagaagccggaagttaagataggagtaagcgtgaagcaacaatttaccgaggaagagatttacaaagaccgagattcccaaattacagccatcgagaaaacctttgaagacgcccagaagagcataagccagcactatagtaagccccgagtaacgcctgtggaggtcatgcccgtgttccccgatttcaaaatgtggatcaacccctgtgcacaggtcatctttgatagtgaccccgcccctaaggataccagcggggccgccgctttggagatgatgagccaggccatgattcggggcatgatggatgaggagggaaatcagttcgtcgcctactttctgccagttgaggagacacttaaaaaacgaaagagagaccaggaagaagagatggattatgcgcctgacgatgtatacgactacaaaatcgcgcgtgaatacaactggaatgtgaagaataaggcaagtaaaggatacgaggaaaactatttctttattttccgagagggtgacggagtctactataacgaactggagactagagtcaggctgagcaaacgccgtgctaaggcaggtgtgcaatctgggaccaacgcactgctcgtggtcaagcaccgagacatgaatgaaaaagaattggaggctcaggaggcccgaaaggctcagttggagaatcatgagcccgaagaggaggaagaggaggagatggagacggaagagaaagaggctggaggtagcgttatgcttatattaaggactatgccgaccctaatgatgcggaccgaggatcggcctaaagtggcagtgacaatgattcagacagccgcggccatgggcgtggcgagtggtgccggggcgactgccgcggcaccggttccctcccctgtagccgcatcaacacgcccaaggcggatggccgttaaactccagctgctaatccctgtgaaactgatcgtcacagtaacggagtcccagggcattcaaggttggtttcggcaccattactgcgaacagcaaagcacgttcctggtggtttgcctgtag

SEQ ID NO: 16498 - DNA, 873 bp, synthetic construct
  misc_feature 1..873: note = Description of Artificial Sequence: Synthetic coding sequence
  source 1..873: mol_type = other DNA
atggggcacccaccactcctaccactgcttttgctcctgcatacctgtgtgccggcctcatggggattgcgttgcatgcagtgcaagactaacggagactgtagggttgaggaatgtgccctgggtcaggatctctgcagaactacaatcgtccggctatgggaagagggggaagaattggaacttgttgaaaagtcctgtactcactctgaaaagaccaataggaccttgagctatcgtacaggattaaaaatcacgtcactgaccgaagtggtttgtgggctggatctctgtaatcagggcaatagtggccgggccgtgacgtattccagatctcggtatcttgagtgcattagttgcgggagtagcgatatgtcttgtgagagaggccggcaccagtctctgcaatgtaggtcccccgaggagcaatgtttagacgtggtgacgcattggatccaagagggcgaagaagttctggagctggaaaacctcccccagaacgggagacagtgttatagctgtaaaggaaattcgacacacggctgcagcagcgaggaaactttcctaatcgattgtcgagggccaatgaatcaatgcctagtcgcgactggcacccacgaacctaagaatcagtcatatatggtcaggggttgtgcaacagccagcatgtgccagcatgcacatctcggggacgcgttctcaatgaatcacatcgacgtgagttgctgcactaagagcggatgtaatcaccccgacctagatgtccagtaccgctctggcgccgctccacagcctggcccagcccacctgtcgctcaccatcaccttgctgatgacagcccgtctctggggtggcacattgttgtggacatag

SEQ ID NO: 16499 - DNA, 1596 bp, synthetic construct
  misc_feature 1..1596: note = Description of Artificial Sequence: Synthetic coding sequence
  source 1..1596: mol_type = other DNA
atggcgccaacaatccagactcaggcccagagagaagacggccacagaccaaacagccatcgtacactgcctgagcggtcaggcgttgtgtgccgcgttaaatattgtaactccctgccggatatccctttcgatccaaaattcatcacatacccctttgatcaaaaccggttcgtgcagtataaggctacaagcctggagaagcaacataagcatgacctcctcactgagcccgaccttggagtgactattgatctcattaatcccgacacctacaggattgaccccaatgttttgctggaccctgctgatgaaaagctgcttgaagaagagatccaggctccgacctccagcaagaggtcccagcagcacgcgaaggtagtgccatggatgcggaaaacagaatatatatctactgaatttaaccggtacggtatctccaatgagaaaccagaagttaaaatcggagtgagcgtgaagcaacagttcactgaggaagagatatacaaagaccgtgacagtcaaattacagcaatcgaaaagacattcgaggacgcccaaaagtccatctcgcagcactatagcaagcccagagtgacgcctgtcgaggtcatgccggtctttccagatttcaagatgtggatcaacccatgcgctcaagtgatattcgatagcgatccagccccaaaggacaccagtggagctgcagccctagaaatgatgtctcaggccatgatccgagggatgatggacgaagagggaaatcagttcgtggcttacttcttgcccgtggaggagacgctgaaaaaacgcaaaagggaccaagaagaagaaatggactatgctcctgacgatgtttatgactataagatcgccagagagtacaactggaacgtcaagaacaaagcatctaagggttacgaggagaactatttttttattttccgggaaggggatggagtttattataatgagttggaaacacgcgttcgcctttccaagcgacgagctaaagcaggagttcaatcgggaacaaacgcactgctggtggtgaagcatagggacatgaatgagaaagaattggaagctcaggaggcacggaaggcacagcttgagaaccacgagccggaggaggaggaggaggaagaaatggagactgaagagaaagaggcaggcgggtcagacgaagagcaggagaaaggatcctcaagcgaaaaagaaggatccgaggacgagcacagcgggagcgaatccgaacgtgaagaaggggaccgagatgaggcctcagacaagtccggctctggcgaagatgagagctccgaggacgaagcaagagccgctcgcgataaggaagaaatctttggctccgatgctgattctgaggatgacgccgatagtgatgatgaagacagggggcaggcgcaaggtggttccgataatgatagcgatagtggctctaacggcggaggacagcggagccgcagtcatagcagatctgccagccctttcccgtctggctccgagcactccgcacaagaggacgggagtgaggccgctgcctctgatagcagtgaagccgattccgacagcgactag

SEQ ID NO: 16500 - DNA, 867 bp, synthetic construct
  misc_feature 1..867: note = Description of Artificial Sequence: Synthetic coding sequence
  source 1..867: mol_type = other DNA
atggctacgggacccattccaacagggctatgtctgcgtgggcttgagtggagtgccgaaagcagtaccgccatcgcctcattaatttccccttctacgccttctagtagccccacaccatcgacaagaactgttttactggaccctgcagacgaaaagctgttggaagaggagattcaggcccctaccagttctaagcggagccagcagcatgctaaggtagtgccatggatgcgcaagactgagtacattagtaccgagtttaatcgctacggcatctcaaatgaaaaaccagaagtcaagatcggagtgtcagttaagcagcaattcactgaggaggagatctacaaggacagagactcccaaattacagcaatagaaaaaactttcgaggacgcccagaaatctattagtcaacattattcaaaacctcgggtcacgccagtcgaggttatgcctgtattccctgacttcaaaatgtggattaacccctgcgcacaagtgatcttcgactctgaccctgcccctaaagacactagcggcgcggcagccctggaaatgatgagtcaggctatgatccgcggaatgatggatgaggagggcaaccaatttgtggcatatttcctccccgtagaagagactctcaagaagagaaagagagatcaggaagaggaaatggattacgcccccgatgatgtctacgattataagatagcccgggagtacaactggaacgttaagaataaagcaagcaagggctatgaggaaaactattttttcatttttcgcgaaggcgatggggtatactataacgagcttgagacctctatccaatattcccacatgctctacaacctggtggcgtag

SEQ ID NO: 16501 - DNA, 1176 bp, synthetic construct
  misc_feature 1..1176: note = Description of Artificial Sequence: Synthetic coding sequence
  source 1..1176: mol_type = other DNA
atggatcttgagaagaattatcctacgccccggacttctcggacgggccacggaggagttaatcagctggggggagtgttcgtgaatggacggccactgccagacgtggtgaggcaaagaattgtcgagctggcccaccaaggagtgaggccctgtgacatttcccgtcaactgagagtctctcatggttgtgtttcaaaaatccttggacgctactacgagaccggaagcatcaagcctggcgtcatcggcggaagtaagccaaaagttgccacgccaaaggtcgtggagaaaatcgctgaatataagcgccagaatccaacaatgtttgcttgggagattcgggatcgtctgttagccgagagagtgtgtgataacgataccgtaccctcagtgagctccatcaaccgtataatcagaactaaggtgcaacagccaccaaaccaacccgtgcccgcttctagccattccatagttagtactggctccgtgacacaagtctcctccgtcagtacagacagcgccggctcctcatattctatcagcggaatccttgggatcactagcccgtccgccgataccaacaagcggaagagggacgagggcatccaagaaagccccgtgccaaacggccacagtctgccgggaagggattttcttcggaagcaaatgcggggggacctgtttacccagcagcaattagaagttctggatcgcgtctttgaacgtcagcattacagcgacatattcaccaccactgagccgatcaagcctgagcaaacaaccgaatactccgcaatggctagtcttgccggtggcctggacgacatgaaagcaaatctcgcaagccctactccagccgacatcggcagctccgtgcccggaccccagtcttaccccatcgtgacgggccgggacctcgccagcactactctgcccgggtacccgccgcatgtccctcctgctggacagggctcatactccgctcccaccctgactggaatggtccccggaagcgagtttagcgggagcccatactctcacccacagtacagttcctataatgattcctggaggttccccaatccgggacttcttggcagcccttattattactctgccgcagccagaggtgctgcacctcccgcggctgctactgcctatgatagacactag

SEQ ID NO: 16502 - DNA, 867 bp, synthetic construct
  misc_feature 1..867: note = Description of Artificial Sequence: Synthetic coding sequence
  source 1..867: mol_type = other DNA
atggacttagaaaagaactatccaacaccgcgaacttcgaggaccggacatggcggagtgaaccaactcgggggggtgtttgtcaatggtcgacccctccctgacgtggtgcgccagaggattgtggaactggcacatcaaggggtaaggccgtgcgacatttcccgccaattgagagtgtcacacggttgtgtcagcaagattttagggaggtattacgagaccggcagcattaagcccggggtgatcggcggctctaaacccaaagtggccactcctaaggttgtcgagaaaatcgcggaatataaacgccagaacccgacgatgttcgcttgggagattagggacaggcttttagccgaacgagtgtgtgataatgacaccgtcccctccgttagttcaattaatcgtatcatacgaacgaaagtccagcagccacctaaccagcccgttcctgcctcatcccatagtatagtgtctactggctcggtcacccaggttagctcggtcagcaccgacagcgcgggctcttcttactctatttcgggcattctcggcatcacttcaccctctgctgatacaaacaaacggaagcgggacgaggggattcaagagtcgccagttccaaatggacatagtcttcctggtagagacttcctcaggaagcaaatgcgaggcgatctgttcacccagcaacaacttgaagttctcgacagggtcttcgaaaggcagcactattctgacatattcaccaccaccgagcccatcaagccggaacaggccgtaacatggcgcgcacgtcccagccccggaactctgcatacctcccccccccttgacagggccgcaacgcagcaccggcggtag

SEQ ID NO: 16503 - DNA, 987 bp, synthetic construct
  misc_feature 1..987: note = Description of Artificial Sequence: Synthetic coding sequence
  source 1..987: mol_type = other DNA
atggatctggaaaagaactacccgactccacggacctcccgaacgggccatgggggggtgaaccagcttggcggcgtgttcgtgaatggacgcccccttcctgatgtcgtcagacagcgaatagtggagctcgcgcaccaaggagtgcggccgtgcgatattagtcgtcaactccgcgtgtcgcatgggtgtgtgtcaaagatcctgggcagatattatgagactggctctatcaaacctggcgtgatagggggcagcaagcctaaggtcgccacgccaaaggtcgtggagaagatagccgagtacaaaaggcagaaccctaccatgttcgcatgggagatccgagaccggttgctggccgaaagggtctgcgacaacgatactgtgccttccgtgagcagcattaaccgaattattcgaaccaaagtgcaacagccccccaaccagccggtgccggcaagttcacactccattgtcagcacaggctctgtcacacaggtgtcatctgtgtccactgatagtgctggaagctcttacagtatctcaggcattcttggcattactagcccaagtgccgatacaaacaagcgtaaacgcgacgaaggcattcaggagtccccagtacctaatggccacagtcttccaggccgggatttccttagaaagcagatgcgcggcgacctctttacacaacagcagctagaggtactggatagggtcttcgagcggcagcactattccgatattttcactaccactgagcctatcaagccagagcagaccacagagtattctgccatggcgagcttagctggaggcctggacgacatgaaggcaaatctggccagtcctacccctgccgatataggaagcagtgtgccaggcccacagtcttaccctattgtcacgggcagcccctattactattctgccgccgcccgaggagccgccccccccgccgcggccactgcttacgatcggcactag

SEQ ID NO: 16504 - DNA, 909 bp, synthetic construct
  misc_feature 1..909: note = Description of Artificial Sequence: Synthetic coding sequence
  source 1..909: mol_type = other DNA
atgttcgcatgggagattcgagacagattacttgccgagagggtgtgcgacaacgatactgtcccgtcagtatcaagcatcaaccggataatcagaactaaggtccagcagccaccaaatcagcccgtgcctgcttcctcccattcaattgtgagcactgggtcggtgacccaggtgagttcggtgagcaccgactccgctggcagcagctactctattagcggaatcctcggtataacatctccgtctgccgatacaaataagcgcaagcgagatgaaggcatacaggaaagcccagttccaaacggacattccctgcctgggagggattttctgaggaaacaaatgaggggtgatctctttacacagcagcagctggaggttttggatagagtgttcgaacgccagcactattctgacatctttacgacgacagagcccataaagccagaacagtggtgtcccgtgttgatgaggcaatacctggttcaacctcaagccgtgctgtttcagactaccgagtattcagccatggcctccttggcaggagggctggacgatatgaaggcaaacctagcgtcccctactccagcagacatcgggagtagcgtcccaggacctcagagttacccgatcgtcacgggcagggatctcgcttctaccacactccccgggtacccccctcacgtacccccggccgggcagggctcctatagcgcacccaccttgactggcatggtgccagggtccgagttctctgggagcccctactctcacccccagtacagcagttacaatgacagttggagattccccaaccccggcttgctgggctctccgtactattactctgctgcggcaaggggcgccgcaccaccagccgccgcaacagcctacgatcggcattag

SEQ ID NO: 16505 - DNA, 1074 bp, synthetic construct
  misc_feature 1..1074: note = Description of Artificial Sequence: Synthetic coding sequence
  source 1..1074: mol_type = other DNA
atggatcttgagaagaactatccaaccccgcgcacgtcaagaactggacacggcggcgtaaaccaacttggcggagtgtttgtaaacggacgaccactccctgacgtggttaggcaacggattgtcgaactcgctcaccagggggttcgcccatgtgacatcagccgtcagctgagggtgtcccacggatgtgtgtctaagatattagggcgatactatgaaacagggtccattaagcccggcgtaatcggggggtctaagccaaaggtcgcaacacctaaggtggtagagaaaatagcagagtacaaacggcaaaaccccactatgttcgcatgggaaattcgggaccgcctgttagcagagcgtgtgtgtgataatgacacggtaccatctgtgagcagcatcaacaggattatccggacaaaggtgcagcaaccgcctaatcaacctgtaccagctagttcgcactctatagtatcgactggatcagttacacaagttagttccgtctccactgattctgccggaagctcatatagcattagtggtatcttgggcattacctctccttctgcagacacaaacaaaaggaaaagagatgaggggatccaggagtccccagtgcccaatggtcattctttacctggccgggactttttgagaaagcaaatgcggggtgacctctttacacagcagcagctcgaagtcctggatagagtgttcgaaagacagcattattcagatatcttcacaactacggagccaattaagccagagcagactactgagtattccgccatggctagcttggcgggcggtctggatgatatgaaggccaacctagcctctccgacacccgcggacattgggagcagcgtccctgggcctcagtcctacccaatcgtgacagggagtgaattttctggatcaccgtactcacacccacagtacagctcctataatgatagctggcggtttcccaacccgggcctgctcggctcaccctattactattccgccgcggcacgcggcgctgcgccccccgctgcggccactgcatacgaccgacactag

SEQ ID NO: 16506 - DNA, 1089 bp, synthetic construct
  misc_feature 1..1089: note = Description of Artificial Sequence: Synthetic coding sequence
  source 1..1089: mol_type = other DNA
atggatttagaaaaaaactaccccacgcctcgaacatcacgcaccggtcatggtggcgtcaatcaacttggcggagtgtttgtaaacggacgccccttgcccgatgttgtgcgtcaacggatcgtcgagctcgcccatcagggcgtgcggccatgtgatattagccgacagctacgagtatcgcacgggtgtgtgagtaaaatcctgggcagatactatgaaacaggttccattaagcccggagtcatcggcggatccaagccaaaagtcgccactccaaaggtggttgaaaaaatagccgagtataagagacagaatccgacaatgttcgcgtgggagattcgagatcgcctgctggccgaacgtgtgtgtgacaatgatactgtgcccagcgtcagcagcatcaaccgaattatccgcaccaaagtgcagcagccccccaatcagccagttcctgctagctcccatagcatcgtctctaccggcagcgtgacacaagtgtctagcgtcagtacagactccgctggctcctcatattcgatctccggaattctgggcatcacaagcccctctgcagacacaaataaaaggaaacgggatgaggggattcaggaatctccagtcccaaacggccactccctgcccggacgggactttctaaggaagcagatgcggggcgaccttttcacccaacagcagctggaggtgctcgatagagttttcgagcggcaacactactcagatatcttcacaacaactgaacctattaagcctgagcagactacagagtacagcgctatggcttccttggctgggggtctagatgacatgaaagcaaacctggcctcgcccacacccgctgacatcggaagcagcgtacccgggccccagagctatcccattgtcacaggaagggaccttgcaagcacaacgttgccaggttaccctccacacgtgccccccgccggtcagggcagctatagcgcccccacactcacgggaatggtgcctggcagcccttactactattcggccgccgcgagaggggccgcgccacccgcggcggccaccgcctacgacagacactag

SEQ ID NO: 16507 - DNA, 1047 bp, synthetic construct
  misc_feature 1..1047: note = Description of Artificial Sequence: Synthetic coding sequence
  source 1..1047: mol_type = other DNA
atggacctggagaaaaactaccctacccccagaacatcaagaactggacacggcggcgtgaaccagctaggaggagtattcgtgaatggtcgcccgctgcccgacgtcgtgcggcagagaattgtggaactggcccaccaaggcgttcgcccttgtgacatttcccggcagttgcgtgtcagccacggctgcgtgtctaaaatcctggggagatattacgagaccggctccattaagcctggagtcattggcggctccaagcctaaggtcgctacacctaaagtggtggagaagatcgcagaatacaaacgtcagaaccccaccatgttcgcatgggagatccgcgacagattacttgctgagagggtgtgtgacaacgacaccgtgccatccgtcagttcaattaatcgcatcattagaaccaaagtgcagcaacccccaaaccaacccgtacccgcttctagtcattcaattggtattcaagagtctccagtccccaatggacattctctccccggacgtgacttcttaagaaagcagatgagaggtgacctgttcacgcagcagcagctggaagtgcttgatagggtcttcgaaagacaacactatagcgacattttcacaacaacggagccaattaaaccagagcagacgaccgaatactcagccatggcaagcctcgcgggtggactggatgatatgaaggcgaatttagcctcacccactcctgcagatataggttcgtctgtacccggccctcagtcttaccctatcgtgacaggtagggatctggcctccacgactctgccaggctatccaccacacgtcccgcccgccggacaaggctcttacagtgcccccaccttaactggaatggtgccagggagtgagttctctggttcaccttacagtcatccacagtattcctcatacaacgattcctggagatttccaaaccccggtctgctgggtagtccctattactatagcgcagcggcaagaggagccgctcccccagccgccgctacggcctatgatcgacattag

SEQ ID NO: 16508 - DNA, 876 bp, synthetic construct
  misc_feature 1..876: note = Description of Artificial Sequence: Synthetic coding sequence
  source 1..876: mol_type = other DNA
atggatcttgagaagaattatccaacaccgcggacttcacggaccggtcacggtggagtcaaccagctagggggagtgtttgtgaacggccgtccactgccagacgtggtacggcagcgcatcgtggagcttgctcatcaaggagtgagaccatgcgacatcagtagacaactccgtgttagccacggttgcgtctccaaaattcttggaagaatcatccgaacaaaagtccagcaaccccccaaccagcccgtaccggcatcatcccacagcatagtgagcacaggctcagtgacgcaggtcagctcagtatccaccgatagcgctggttcatcctattccatctccggcatcttgggcattacgtcaccaagtgctgataccaacaaaaggaagcgcgacgagggaatccaggagtcccccgtccctaacggacatagtttgccggggagagactttctgagaaaacagatgagaggggatctcttcacacaacagcagctcgaggtgctagacagagtgtttgagcgacaacactactccgatatctttactaccaccgagccaatcaagcccgaacagaccacggaatactcagctatggcttcccttgcgggaggccttgacgatatgaaggccaacttggccagcccaactccagcagacatcgggtcttccgtccctgggcctcagtcttaccccatcgtcactggatcagagttctcgggttccccctactcccacccccagtattcctcctataacgacagttggcggttccctaatcccggattactcggcagcccctactattactctgccgcggcgcggggagcagcgccaccagctgccgctactgcctacgatcgccattag

SEQ ID NO: 16509 - DNA, 960 bp, synthetic construct
  misc_feature 1..960: note = Description of Artificial Sequence: Synthetic coding sequence
  source 1..960: mol_type = other DNA
atggacttggaaaagaattaccccacaccccggacatccaggactggccacggcggtgtaaatcagctcgggggtgtgttcgttaatggcagacccctgccagatgtcgttaggcagcggatcgtggagctggcacaccaaggagtgagaccttgcgacatcagccggcagttgagggtcagtcacggctgtgtgtcaaaaattctcgggcggtattatgagaccgggagtataaaacctggggttattggagggtctaagccaaaagttgccacgccaaaggtggtcgagaagatcgctgagtacaagcgacaaaaccccaccatgtttgcgtgggaaatacgcgataggctactggcagaacgtgtctgcgacaatgacacggtgcccagtgtttccagtatcaaccgaattatcaggactaaagtgcagcagccacccaatcaaccagtgcccgcctcatcccattctatcggcatccaagaatccccagtcccgaacgggcactccctgcccggcagggacttcctaagaaaacaaatgagaggcgatctcttcacccagcagcagctggaggtcttggatcgcgtattcgagagacagcactattcagacatcttcactacaacagagccaatcaaaccagagcagacaactgaatacagcgccatggcttctttagcagggggtctggacgatatgaaggctaatctggctagtcccacacccgccgacatcggaagcagcgtgccgggaccacaatcatacccaatcgtgaccgggagagacctggcctcaactacactcccaggctatccaccgcacgtcccgccagcaggtcaggggagctattcggcgcctacactaaccgggatggtaccaggtagcccgtattattactctgcagcagcaagaggggctgcgccaccagctgcagcgaccgcatacgatcggcactag

SEQ ID NO: 16510 - DNA, 852 bp, synthetic construct
  misc_feature 1..852: note = Description of Artificial Sequence: Synthetic coding sequence
  source 1..852: mol_type = other DNA
atgttcgcctgggagatcagagaccgactgctggcagagcgcgtctgcgacaacgacaccgtccccagtgtatcctcgatcaaccgtatcatccggacaaaggtgcagcagccgcctaatcagcccgtacccgcctccagccacagcattgtgagcacgggttcagtcacacaagtcagctctgtgtcaactgattccgccggctctagctattccatttcaggaattctgggaatcacctccccatcggcggacacaaataagcgaaaacgcgatgagggaatacaggagtcacccgtgcccaacggacactccttacccgggagagattttttgaggaagcagatgcgcggtgacctgtttacacagcagcaactcgaagttttagatagggtttttgagcggcaacattactcggacatttttacaaccacagagcccattaagcccgagcagaccacagagtattcagctatggcatccttggcaggaggcctggatgacatgaaggccaatttagcctctccgactcctgctgatatcggaagttccgtgccgggcccccagagttatccaatcgtaactgggagagatctcgcatctaccacactccctggttatccgcctcatgtcccgccagcaggccagggcagctattcagctcccacactgaccggaatggtcccaggcagtgagttttcgggaagcccctatagtcacccacagtactcttcttataacgactcctggcgattccccaatccagggctgctgggatctccttattactattctgctgcagcacgtggggctgctccacccgctgctgctacggcatatgataggcattag

SEQ ID NO: 16511 - DNA, 924 bp, synthetic construct
  misc_feature 1..924: note = Description of Artificial Sequence: Synthetic coding sequence
  source 1..924: mol_type = other DNA
atggatctggaaaagaattacccaactccacgaactagccgaaccgggcatggaggggtgaaccaactcgggggcgtgttcgtaaacggtcgccccctgccagacgtagtgcgtcagaggatagtggagctggcacatcagggcgtgagaccctgcgacatcagtcgacagcttcgcgtgtcacacggctgcgtgtctaagatcctgggccggtattacgagacgggctctatcaaacctggagtcatcggtggatcaaagcctaaagtggctacccccaaagtggtagaaaagattgccgaatataagaggcagaatcctacaatgttcgcctgggagattagagatcgactgctggccgagcgcgtgtgcgacaacgacactgttcccagtgtgtcctctataaacagaattatccggaccaaggtgcaacagccacccaaccagccggtccccgccagctcacatagtatagtcagtacaggcagtgtgacccaggtctcgtcagtgtccaccgattccgccggtagcagttacagcatttccggaatactggggattacttcaccaagtgccgacacaaacaaaagaaagcgggacgaaggtattcaagaaagtccagtccccaatggccacagtctgcctgggagggatttcctgagaaaacagatgcggggcgacctgttcacccagcaacaactggaagtgttggatagagtttttgagcgtcagcactactccgacatctttacgaccaccgaaccgataaagcccgagcaatggtgccctgtgctgatgcgccagtacttagtccagccacaggcagttcttttccaggccgtcacatggagagcccggccctcccccgggacacttcacaccagtcccccattggatcgggccgccacacagcaccgcaggtag

SEQ ID NO: 16512 - DNA, 1197 bp, synthetic construct
  misc_feature 1..1197: note = Description of Artificial Sequence: Synthetic coding sequence
  source 1..1197: mol_type = other DNA
atgccccacaatagcatccggagtggccacggcggcctgaaccagttgggtggggccttcgtaaacggtcgccctctccccgaggtagtgagacagagaattgtggatctggcccaccagggcgtgcgaccctgtgatatcagccgacagttgcgtgtaagccacggttgcgtgagtaagatcctgggtcgctattatgagacagggtcaatcaggcccggcgtgatcggcggctccaagcctaaagtagccacccctaaggttgttgaaaaaattggagactacaagcgacagaacccaaccatgttcgcttgggaaatcagggaccggctgctggccgagggggtatgtgataacgacactgtaccctccgtttcatctataaacaggataattcgaacaaaggtacagcagccctttaatttacctatggacagctgtgtggccaccaaaagcttatctcctgggcacaccctgatcccatcgtccgccgtaactccccctgagagtccacagtcagattccctgggctcaacatattccattaacgggctcttaggaatagcccaacccggttcagataaacgaaaaatggacgatagcgatcaagattcttgccgcttgagcatcgatagtcagtcatccagcagcgggccgcgtaagcatctgcgcaccgatgccttcagccaacaccatctggagccgctagaatgtcccttcgagaggcaacactatcccgaggcgtatgccagcccaagccacactaagggcgaacaaggactgtaccccctccctctcctcaatagcactctggacgacggaaaggccacgctgacgccaagcaacacccctctgggccgtaatctctctactcaccagacttaccctgtcgtagccgcgccccccttttggatttgcagcaagagcgcccccgggtcccggcccagcatgccatttcccatgttacccccctgcactggaagtagccgggccaggccaagcagccaaggagagaggtggtggggacctcgatgtccagatacacatccgactagccccccagcggaccgggccgctatgccacccctgccctcgcaggcatggtggcaagaagtcaatacgctggccatgccaatggcgacccctcctaccccgccaaccgcgcggcccggcgcctctccaacaccagcatgctag

SEQ ID NO: 16513 - DNA, 966 bp, synthetic construct
  misc_feature 1..966: note = Description of Artificial Sequence: Synthetic coding sequence
  source 1..966: mol_type = other DNA
atgccccacaatagtattcggtcgggacatgggggtttgaaccagctgggaggcgctttcgtgaacggcagacctctacccgaagttgtgagacagagaatcgttgacttggcccatcaaggcgtgcgaccctgcgacatctcccgacaacttagggtcagccacggatgtgtgtccaaaattctggggcgatactatgaaactggaagcatccgtcctggtgtgatcggggggtccaagccaaaagtggctactccgaaggtggtcgaaaagattggagactataagagacagaaccccacaatgtttgcctgggagatccgcgatcgactcctggcagagggcgtgtgtgacaatgacacagtcccatctgtgagttccatcaatcgcatcatccggactaaggttcagcagccattcaatcttcccatggattcttgcgtggccacaaagtctttgagccccggccataccctgatacctagcagtgccgtgaccccacccgagagtccacagtccgatagtctgggatcgacatactctattaacggcctgcttggcattgctcaaccaggttccgataagcggaagatggacgacagtgatcaggacagttgtagactgagcattgacagtcagtcaagttctagcgggcctaggaaacatcttcgtacagacgctttctcacagcaccacctcgaacccctcgagtgtccctttgagcgacaacactacccagaagcttacgcaagcccctctcacacaaaaggcgagcagggcgagcggtggtggggtcctcggtgtccggacacccatcctaccagtccaccagccgatagagctgccatgccaccattgcccagtcaggcgtggtggcaagaggtgaacactcttgcaatgcctatggccaccccccccacaccccctacagcccggcccggcgcctcacccaccccagcttgttag

SEQ ID NO: 16514 - DNA, 1197 bp, synthetic construct
  misc_feature 1..1197: note = Description of Artificial Sequence: Synthetic coding sequence
  source 1..1197: mol_type = other DNA
atgcctcataatagcattcggagcggacacggcgggcttaatcaattgggtggtgccttcgtgaatggaaggccactgcctgaggtggtgcgacaacgcatcgttgatctcgcccaccaaggtgttcggccatgcgacatttctcggcagctgagagtcagccacggctgcgtgagtaagattctgggccggtactacgagacaggctctattcgccctggcgtgatcgggggctcaaaacccaaagttgctacccccaaggtcgtcgagaagattggggattataagcgacagaaccctacgatgtttgcctgggaaatccgcgaccggcttttagcagagggagtgtgcgacaacgatacagtaccctctgtcagctcaattaatcgtatcatcagaacaaaggttcaacaacctttcaacctgccaatggactcgtgtgttgctacaaaatctctgagcccaggccacactctcatcccgtcctccgctgtgacccctcctgaatcaccgcagtcagactccctgggctccacatattctatcaatgggctgctcggcatcgcccagccaggctcagacaaaaggaagatggatgattcagatcaagacagttgccggctgagtatcgactctcagtcgtcttccagtggacccagaaaacacttaagaaccgatgcattttcccagcaccacctggagccgcttgagtgtccgtttgagagacagcactatccagaggcttatgcctcgccatcccatacaaaaggtgagcagggtctgtacccactcccccttctgaattccactcttgacgatggcaaggccaccctgaccccaagtaacacacctctgggcaggaatctctccacccaccagacttatcccgtggtggcggcccctcccttctggatttgtagtaagagtgccccagggtcacggccttccatgcccttccccatgctacccccctgtacagggtcctctagagcacgcccttcttctcagggagaaaggtggtggggacctcggtgccccgatactcacccaaccagccctcccgctgatagagcggctatgccacccctacccagtcaggcatggtggcaagaggtaaacaccctggcaatgccaatggcgaccccccctaccccacctacagccaggccgggggcgtcccccaccccggcctgctag

SEQ ID NO: 16515 - DNA, 864 bp, synthetic construct
  misc_feature 1..864: note = Description of Artificial Sequence: Synthetic coding sequence
  source 1..864: mol_type = other DNA
atgcctcacaactctattcgcagcggacatgggggactgaaccaactgggaggagcctttgtcaatgggagacccttgccagaggtggtgaggcagcgaatcgttgatctagcgcaccaaggggtaagaccatgtgacattagtcgtcagttgagagtgtcccacggttgtgttagcaaaatcctgggcagatactatgaaaccggctcgatccgaccaggcgtcatcggtggatctaagccgaaggtggccaccccaaaggtggtggagaaaatcggggattataaacggcagaatcctaccatgtttgcctgggagattagggatcggctccttgcagagggggtctgtgacaatgataccgtaccctcagtttctagcatcaacagaatcattaggacaaaggtgcagcaaccttttaatcttcccatggattcatgtgttgcaacaaagtcactgagtccaggccacaccctcatcccgagttctgccgtcaccccacctgagtcaccacaaagcgatagcttgggttctacatattctatcaatggactgttgggcatcgcccagcctggtagcgataaaagaaagatggatgacagtgatcaggactcttgtaggctgtccattgatagccaatcctcgagttctgggcccagaaagcatctgcgcacagatgccttcagtcaacatcatttggagccccttgaatgcccctttgagcggcagcactacccggaggcctatgcatctcccagccacactaaaggcgagcaagaagtgaacacgctggctatgcctatggctacgccgcccacccctcctacagccagaccgggcgcgtccccaaccccagcctgttag

SEQ ID NO: 16516 - DNA, 1353 bp, synthetic construct
  misc_feature 1..1353: note = Description of Artificial Sequence: Synthetic coding sequence
  source 1..1353: mol_type = other DNA
atgccgcacaactccatcaggtcagggcacggaggcctaaatcagttggggggcgcttttgtcaacggccgcccgctgcctgaagtggtgcgccagcggattgtcgacctggcacaccaaggagtccgcccctgcgatatttcccgtcagctgcgcgtgagccacggatgtgtgagcaagatcttggggcgatattatgagacagggagtattcggcctggtgttatcggtgggagtaagcctaaggtggcaacaccaaaggtagtcgaaaagatcggagactataaacggcagaatcctaccatgttcgcttgggagattcgcgatcgactgctggccgagggcgtgtgtgataatgataccgtcccctccgtgtcaagtatcaatcgtataatccgcaccaaagtacagcaaccgtttaacttgcccatggactcctgtgttgcaacaaagagtctgagccccgggcatacactgatacccagttctgctgtaacgccacccgagagcccacagagcgactctttaggctctacatattctatcaacggcctcctaggtattgcgcagcctggatccgacaagagaaaaatggatgacagcgaccaggactcttgtcgccttagcatcgatagccaaagctcatcgtctggtccaagaaagcaccttcggactgatgcttttagccagcatcacctggagccccttgagtgtcctttcgaacgccaacattaccctgaagcctacgctagccccagtcatactaagggagagcaggggttgtacccgttacctctcttaaactctacactcgatgacggcaaggccactctgacgccctcgaacaccccacttggacgaaacctgagtacacatcagacctaccccgtggttgcagaccctcactctccttttgctatcaagcaagaaacccctgaagtgtcctcaagttcatccactccaagcagcttgagctccagcgcttttttggaccttcagcaggtgggaagtggagttccaccttttaatgcatttccccacgctgcaagcgtttacggccagttcacagggcaagcattactgagcgggcgcgagatggtgggaccgacacttcctggctaccccccgcacatcccaacctccggccaaggttcatatgcctcaagcgcgatcgccggcatggtggcaggtagcgagtactccggtaacgcctacggtcacactccctactcctcatacagcgaggcctggcgattcccaaacagctccctcttatcgtccccatactactacagcagcactagccgcccttctgctccaccaacaactgccaccgccttcgaccacctctag

SEQ ID NO: 16517 - DNA, 570 bp, synthetic construct
  misc_feature 1..570: note = Description of Artificial Sequence: Synthetic coding sequence
  source 1..570: mol_type = other DNA
atggcttctaaacgagctctggtgatactggccaaaggtgccgaggaaatggagactgtgattcctgtggatgtcatgcggcgggccggtataaaagtgactgttgccggactggcgggcaaggacccagttcagtgctctcgggacgtcgttatctgtccagacgcatccctagaggacgccaagaaggaagggccctatgatgtggttgttttgccaggagggaacctgggggcacagaacctcagcgaatccgctgcggtgaaggagatcctcaaggagcaagagaataggaaagggctcatagctgccatatgtgccgggcccaccgctctgctcgcacacgagattggcttcgggagtaaggtgaccacccacccactggctaaagacaagatgatgaatggcggtcattacacatattctgagaaccgcgtggaaaaagacggtctgatactgacatctaggggacctggaactagttttgagttcgcattggctatcgtggaagcattgaatgggaaagaggtggcggcccaggtaaaggccccactcgtgcttaaagattag

SEQ ID NO: 16518 - DNA, 570 bp, synthetic construct
  misc_feature 1..570: note = Description of Artificial Sequence: Synthetic coding sequence
  source 1..570: mol_type = other DNA
atggcaagcaagcgggccctggtaatactggccaagggcgccgaagagatggagacagtcatacccgtggatgtgatgcggcgagcaggaataaaggtgacggtcgcagggctagctggcaaggatcccgtacagtgctctcgcgacgtggttatttgccctgacgcttccctcgaggacgccaaaaaagaaggtccgtacgacgtagtggtcctgcccgggggaaacctgggggctcagaacctcagtgaatcagccgcagttaaagaaatcctcaaggaacaggagaatcggaaaggcctgatcgcagccatctgcgccggccctaccgccctcttggcccacgagatcggattcggatcaaaggtgactacacacccacttgctaaagacaaaatgatgaatgggggtcattacacctacagcgagaacagagtggagaaagacggcctcatcttgacctcccggggccctggcaccagctttgagtttgctctggctatcgttgaggcattgaatggaaaggaggtggctgctcaggttaaggcgccattagtgcttaaagattag

SEQ ID NO: 16519 - DNA, 570 bp, synthetic construct
  misc_feature 1..570: note = Description of Artificial Sequence: Synthetic coding sequence
  source 1..570: mol_type = other DNA
atggcgtccaagcgcgctctagtgattctggccaagggtgcagaggagatggaaacagttatacccgtggatgtcatgaggcgggccggcatcaaggtgaccgtggcaggactagcgggaaaggatcccgtccagtgctctagagatgtcgtcatctgtccagacgcctctctggaagacgccaagaaggaaggaccctatgatgtggtagtcctcccgggtggtaacctcggggcccagaacctctcagagtccgcagcggtcaaagagatcttaaaggaacaagaaaatagaaaaggtctgatagccgctatatgtgctggtcctactgccctgttggctcacgagataggttttggctcaaaagtgactactcacccattggccaaggacaagatgatgaatggtggacactatacttattccgagaacagggtggagaaagacggcttgattcttacctccagaggcccaggaactagctttgagttcgcgctcgccattgtggaagcactcaatggcaaggaagtggcggctcaagttaaggcccccctcgtgctcaaggattag

SEQ ID NO: 16520 - DNA, 570 bp, synthetic construct
  misc_feature 1..570: note = Description of Artificial Sequence: Synthetic coding sequence
  source 1..570: mol_type = other DNA
atggcttcaaaacgggctctcgttattttagctaagggggcagaggagatggagaccgttattccagtggatgtgatgcggagagctggcatcaaggtaaccgtcgccggtctggccggtaaggatcctgtgcagtgctccagagacgttgtgatctgcccggatgcaagtctggaggacgctaagaaggagggaccatatgacgtggtcgtgctcccagggggaaatctgggggcacaaaacctatccgaatcagcagcagtgaaggagattctgaaggaacaggagaaccgaaaaggactaatagcggctatctgcgcaggccccaccgccctcctggctcacgaaatagggtttggatccaaagtgacaactcatcccctggcaaaggacaagatgatgaatggaggccactacacctactccgagaacagagtggagaaagacggacttatcctgactagcagagggcccggcacgagctttgagttcgccctggctatcgttgaagccctgaacggcaaggaagtagccgcacaggtgaaagctcccttggttttgaaagactag

SEQ ID NO: 16521 - DNA, 3561 bp, synthetic construct
  misc_feature 1..3561: note = Description of Artificial Sequence: Synthetic coding sequence
  source 1..3561: mol_type = other DNA
atggatgagcccccaggaaaacccctgtcctgtgaggagaaggagaaactcaaagagaaactggcgtttctcaaaagggagtactctaagacacttgccaggctgcagagggcccaacgtgcagaaaaaattaaacacagcattaagaaaaccgttgaagagcaggactgtctgtctcagcaggacctgagtccccaactgaaacattcggagccgaagaacaagatttgtgtatacgataagctccacattaaaacccatctggatgaagagaccggcgagaaaactagtattaccctggatgtgggccccgagagcttcaacccaggcgacggtcccggtgggttgcctattcagcgaactgatgatactcaggagcatttcccgcatcgggtcagcgaccccagtggggagcagaaacagaagctccctagccgtcgcaaaaagcagcagaagcgcacttttataagtcaggagagagattgtgtctttggcacggatagcctgcgcctgtcaggcaagagactgaaagagcaggaggagatctcttctaagaacccggcccgctcgcccgttactgaaattcgtactcacttactatcactgaagtccgaactgccagatagcccagaaccagttactgagatcaatgaggattcagtactaatacccccgacggctcagcctgagaaaggggttgacacatttctccgccgccccaattttactcgtgcaactaccgtgccattacagaccctttctgacagtggctccagtcaacacctggaacatatccctcccaagggttctagcgagctcacaacgcacgacctgaaaaatatcagatttacttcacctgtgagtttggaagctcagggtaagaaaatgacagtgtctaccgacaacctgctcgttaataaagcgatctccaagtcaggtcagcttcctacctcatctaacctagaagccaacatttcctgctctctgaatgagctcacctataataacctcccagccaacgaaaaccagaacctaaaagaacaaaaccagacggagaaaagccttaaaagtccctcagatacactcgacggaagaaacgaaaatctgcaggaatcagagatattgagccagcccaagagcctgagcctcgaagccacaagccccttatctgcagaaaagcactcatgtaccgttccagaaggactgctttttccagccgaatactacgtcagaaccacccgctcaatgtccaattgtcaaagaaaagtggccgtggaagcagtgatacagtctcacctcgacgttaagaaaaagggattcaaaaataaaaacaaagacgccagtaagaacttgaatctttcgaacgaagaaactgatcagtctgaaatacgaatgagcggaacctgtacaggacagccctcctccaggacctctcagaagctcctgagcctaactaaggtgtcatcccccgccggaccaactgaggataatgatctctcaaggaaggctgtcgcacaagctcccggccggagatatacaggaaaaagaaaatctgcttgtactccagcctccgaccactgcgagcctttgctaccaacttccagtctgtctatcgtgaataggagtaaggaggaagttacaagccataaatatcagcacgaaaagttattcatccaggtcaaggggaaaaaatcacggcaccaaaaagaagatagcttgtcatggtccaactcagcatatctgtctctagacgatgacgctttcaccgcgccatttcatcgcgacggcatgcttagtctgaaacagctgctttctttcttgagcatcaccgacttccagttgcccgatgaagattttgggcccctgaaattagagaaagtcaagtcttgtagtgaaaagcccgtcgagcctttcgaaagcaagatgttcggcgagcgccatctgaaggaagggagctgcatctttccagaagagctgtcccctaagcgaatggacaccgagatggaggacctggaggaggacctaattgtcctgcccggcaaatcccaccctaaaaggccgaacagccagagccagcacaccaagaccggtttgtcaagctccattctcttgtatacacccctgaataccgtagcaccggacgataacgacagacccactactgacatgtgcagccccgcatttcccattctcggaacgaccccagctttcggaccccagggcagctatgagaaagcctctaccgaggtcgcgggccgcacatgttgcacccctcagctggcccacctgaaggacagcgtgtgcttagctagcgacacgaaacagtttgattctagcgggtcacccgccaaaccccataccaccctgcaagttagcggtcggcagggccagcccacatgtgattgcgactccgtccccccaggcactcccccacccatcgagagcttcacttttaaagagaatcaactgtgtaggaatacttgccaggagctgcacaagcattccgtggagcagactgaaaccgccgagctccccgcatccgactctattaaccccggcaatctgcagttagtcagtgaactgaagaatccatctgggtcctgttctgttgacgtctccgcaatgttttgggaaagggctggttgtaaggagccttgcataattacagcttgcgaggacgtagtcagtttgtggaaggcgctggacgcatggcaatgggaaaaactgtatacatggcacttcgccgaggtaccagtcctccaaatcgtcccagtgccggacgtctataatctcgtgtgtgtcgccttaggcaacctagagattcgagagatcagggctctgttttgttcctcagatgacgagagcgagaagcaggtcctccttaaatcagggaatatcaaagccgtgttaggtctaacgaaacggagactagtgtctagctcaggcacactcagtgaccagcaagtggaggtgatgaccttcgcggaagacggcggaggaaaagagaatcaattcctcatgcctcccgaggagaccattctgacctttgcagaagtgcagggcatgcaggaggctctgctggggacaaccatcatgaacaatatcgtaatctggaatctgaagacagggcagctgttgaaaaagatgcacatcgatgattcttatcaagcctcagtgtgtcataaggcctactcggagatgggactcttattcatagtcctgtcccacccctgtgccaaggaaagcgagagtctccgatcccccgtcttccagctgatcgtgatcaacccaaaaaccaccttatcagtgggcgtgatgttgtactgcctcccacccggacaggctggacggttcctagaaggagatgtcaaagaccactgcgcggccgccatattaactagcggtaccatcgcaatctgggacttgctgctgggccaatgcaccgccttgttaccacctgtctctgaccagcactggtctttcgtgaagtggtccggcaccgacagccatctactggccggtcagaaggacggcaacattttcgtctatcactattcttag

SEQ ID NO: 16522 - DNA, 4344 bp, synthetic construct
  misc_feature 1..4344: note = Description of Artificial Sequence: Synthetic coding sequence
  source 1..4344: mol_type = other DNA
atggcttcagctggaaacgctgccgagcctcaggatcgaggcggcgggggtagcggatgtattggtgcccccgggagaccagctggcggaggaagaaggaggcgtactggcggcttacgcagagcagccgcccccgatcgggattatttgcaccggccctcatactgcgatgcagctttcgcgttagaacagatttctaagggtaaagctacaggacgcaaggcacccctttggctgagggccaaatttcaacgtctgctcttcaagctgggttgttacatccagaaaaactgtgggaagttcctggtcgttggcctcctgattttcggcgctttcgctgtggggctgaaggctgcaaatcttgagactaatgtcgaggaactgtgggtggaggtgggaggtcgggttagtagagagctgaattacactcgacagaagataggagaggaggcaatgtttaacccacagctaatgatccaaacgcctaaagaggaaggcgctaacgtgctgacgaccgaggcccttttgcagcacttggacagcgctctccaagcatcccgcgtgcatgtgtatatgtacaaccgccaatggaaactcgagcacctctgttataagtcaggggagttaattactgaaacgggctacatggatcagattattgaatacttatacccctgtctgataataacacctctagactgtttttgggaaggagcgaagttacaatccgggaccgcctacctgcttggtaagccacccctgagatggactaatttcgaccccttagaattcctcgaagagttgaaaaagattaattaccaggtcgattcctgggaagagatgttgaacaaagctgaggtgggccatggctacatggacagaccatgcctgaacccagccgatcctgactgtcctgctaccgctcctaacaagaactctacaaagcctctggatatggctctggtccttaatggtggttgccatggactgagtagaaagtatatgcactggcaagaggagctcattgtgggcgggaccgtcaagaacagcaccggcaaattggtgagcgcccatgctctacagacgatgttccagctgatgacacccaagcagatgtatgagcattttaagggttatgagtatgtgagccatattaactggaacgaggataaggctgctgccattttggaggcatggcagcggacttacgtagaagtcgttcaccagtccgtggcccagaattcaactcagaaggtgttgagtttcacaacaacgaccctggatgacatcctcaaatcattcagcgatgtgagtgttattcgtgtggcttctggctacctgctgatgttggcctatgcttgtttgacaatgctcaggtgggattgttcaaagtcacagggggctgtggggctcgctggcgtcctgctggtcgccctctccgtggccgcgggccttgggttgtgctcattgataggaatttctttcaacgctgcgacaacacaggtgctgccctttctcgctctgggtgtaggggtagacgacgttttcctattagcacacgctttcagtgaaacaggtcagaacaaacgaattccatttgaggacagaactggggagtgcctcaaacgcaccggcgccagcgtggccctgacaagcatcagcaatgtcacagctttttttatggccgctttgataccaattcccgcactccgggcattttccctccaggccgccgtagtggtcgtgttcaacttcgcgatggttctcctgatctttcctgcaattttgagcatggatctctacagacgagaagatcgccgtctggacattttttgttgtttcacatccccctgtgtgagtcgagtgattcaggttgagccccaggcatacaccgacactcacgataacaccaggtacagcccaccccctccgtattcatcccactctttcgcgcatgaaactcagatcacaatgcagtccacagtccagctccggacagagtacgacccccatacccacgtctattacactaccgccgagccaagatccgagatcagcgtacagcccgtgaccgtgacccaggatactctatcgtgccagtcacccgaatccactagttccaccagagatctattgtcacagttcagcgactcatctttacattgcttggaacctccgtgtacaaaatggacgcttagttccttcgccgaaaaacactacgctcccttcctcctgaagccgaaggccaaggtggtggtgatttttctgttcctcgggttgctgggtgtgtcattgtatgggactactagggtaagggatggtcttgaccttaccgacattgtccctagggaaacccgagaatatgactttatcgccgctcagttcaaatacttctcattttataatatgtatattgtgacccagaaagctgattatccaaacatccagcacctcctgtatgatctccacaggtcttttagtaacgttaagtacgtgatgctggaagagaacaaacaactgcccaagatgtggctccactactttcgggactggttacaagggctgcaggatgccttcgatagcgactgggagaccggcaaaataatgcctaacaactataaaaatggttcagacgacggagtgctggcctataagctcctcgtacagacggggtcaagagacaaaccaattgacatctcacagcttactaaacagaggctcgtagatgctgacgggataattaatccgtcggccttttacatttaccttacagcttgggtgtcaaacgatccagtagcttacgcagcatctcaggctaatatccggccgcaccggcctgagtgggtgcacgataaagctgattacatgccggaaacgagacttcgtatccctgcagctgagcctatcgagtatgcccagtttcccttctatctcaacggtctgagagataccagcgattttgtggaagcgattgagaaagtgcgtaccatttgcagcaactacacaagcctgggactgagttcctacccaaacggctatcctttcctgttctgggaacagtacatcggtctgcgccactggcttctgctctttatttcggtggtgctggcctgcacattcctcgtttgcgccgtgtttctgcttaacccttggactgccgggattatagttatggtgctggccttgatgactgttgagctgttcggcatgatgggactcataggaatcaaactcagcgctgtgcctgtggttattttaatcgcctcagtcggaattggtgtggagttcacagtgcacgtggccctagcctttctgactgctatcggcgacaagaacaggcgagctgtcctagcattggagcacatgttcgctcctgttctggatggagctgtttccaccttgctcggggttctgatgctggctggctcagagtttgacttcatcgtacggtatttcttcgcggtcctggccattctgaccatccttggtgtcctcaacggtttggtgcttcttcccgttctgcttagcttctttggcccctatccagaggtgagccctgccaatggacttaacaggctcccaaccccatctccagagccgcccccttcggtcgtgcgcttcgcaatgcccccagggcatacccattctggctccgatagttcggactcggaatacagtagccagacaaccgtgtccggactaagcgaggagctaaggcattacgaggcccagcaaggtgctggtgggccagcccaccaagtcatagtggaggccaccgaaaatccagtctttgcccattctaccgttgttcatccggaaagcaggcaccatccccccagtaatcctcgtcaacagcctcatttggattctggctccctgcctcccggccgtcaggggcagcaacctaggcgggacccccctagagagggtctatggccccccccttatcgtccaagacgagatgctttcgaaattagcaccgaaggtcacagcggcccctctaaccgggcacgttggggccctcggggggctaggtcgcacaatccgagaaaccctgcctctacagccatgggttcttctgttccaggatattgccagcctattaccaccgtgaccgcttcagcaagcgtcaccgtggctgtgcacccaccccccgtgcccggccctggacggaacccgcgagggggcctgtgccccggctaccctgaaacagatcacggcttgttcgaggacccccacgtgccattccacgttaggtgcgagcggcgcgacagcaaggttgaagttattgaactgcaggacgtcgagtgcgaagagaggccccgaggtagcagttcgaactag

SEQ ID NO: 16523 - DNA, 1059 bp, synthetic construct
  misc_feature 1..1059: note = Description of Artificial Sequence: Synthetic coding sequence
  source 1..1059: mol_type = other DNA
aaggcggaagtgggccatggatacatggatagaccatgtctcaatcctgccgatcccgattgcccagctacggctccaaataagaactccacgaaacccctggacatggccctcgtattgaacggaggatgccacggtctttctagaaagtacatgcactggcaggaggaactgatcgttgggggcactgttaagaacagtactggcaaactggtgtctgcccacgccctgcagactatgtttcagctgatgacaccgaagcagatgtatgagcatttcaaggggtatgaatatgtctcacacattaactggaacgaggataaagcagccgcaatcctggaggcctggcagcgcacttacgttgaagtagttcatcagtctgtggcccagaactctacacagaaggtattgtccttcacaaccaccaccctcgatgacattttaaaaagctttagcgatgtgtcagtcatcagggtcgccagtggctacctgcttatggtcctccccttcttggccctcggggtcggagttgatgacgttttcctactcgctcatgccttttcagaaactggccaaaacaaacggatccccttcgaggaccgcacaggcgagtgcttgaaacgtaccggcgctagcgtggctcttacatctattagcaacgtgaccgcctttttcatggctgctttaatccccatccccgccctgagagcattctctttgcaggcagcagtggtagtcgtgttcaatttcgccatggtgctgctgatttttcctgccatcctgagtatggacctgtatcggagagaagatagaagattggatattttctgttgcttcacaagcccctgcgtgtcccgggtgatccaagtggagccacaggcatatactgacactcacgacaacacaaggtactccccgccacctccctactcctcgcactcctttgcgcacgagactcagatcaccatgcaatctacggttcagctgcggacagagtacgatccccacactcacgtctattataccaccgcagagccccgctcagaaatctccgtgtag

SEQ ID NO: 16524 - DNA, 4341 bp, synthetic construct
  misc_feature 1..4341: note = Description of Artificial Sequence: Synthetic coding sequence
  source 1..4341: mol_type = other DNA
atggagctgcttaatcgaaaccggcttgtgatcgtcagcccaagatgtactccacccaaagcctcaggaggtccagcccggcggggattctacaccttccgcagtttctgtaaggacggcggcggcggagaggaagaagaagagaatggtggagaagaaaaggacgatcgcggcgacaaagaaactcggtcagataagggtaaggctaccggacgaaaagccccgctgtggctgagagccaagtttcagcgacttctattcaaactgggatgctacatccagaagaactgcgggaaattcctcgtggtgggtttattgatcttcggagccttcgccgtaggattgaaagccgcaaacctagaaacaaatgtggaagagctatgggtcgaggtaggcggccgggttagtcgtgaattaaattatacccgccagaagataggagaagaggccatgtttaacccccagctcatgatacagacacctaaagaggagggagcaaatgtgttaaccaccgaggccctgctccagcacttagacagcgccctccaggcctctagggtgcacgtgtacatgtacaatcgacagtggaagctggagcacctgtgttacaagtctggagagttgataactgagacgggctatatggaccaaatcattgagtacctctacccctgcctcatcatcacccccttggactgcttctgggagggagcaaagctgcagtccgggactgcctatctgttagggaagccgcccttgcgatggacgaatttcgatcccctcgagtttctggaggagctcaagaaaatcaactatcaggttgatagttgggaggaaatgttgaataaggcggaagttgggcatggatatatggatcgcccctgcttaaatccagcggatccagactgcccggcgaccgctcctaataagaacagcactaagccactcgacatggcgctcgttcttaacgggggatgtcatggactgagccggaaatacatgcactggcaggaggaactcatcgtaggggggaccgtcaagaactcgaccgggaagttggtgagcgcgcatgccctgcagacaatgttccagctgatgacccctaagcagatgtacgagcatttcaagggctacgaatatgtttcacacatcaattggaatgaagataaagctgcggccatccttgaggcttggcaaaggacctatgtggaagtggtgcatcagagtgtggcccagaatagcacgcaaaaggtgctgagttttaccaccaccactctcgatgatatactgaagtctttctccgacgtgagtgtgatcagagttgccagcggctacctactcatgctggcttacgcttgcctgaccatgctgagatgggactgcagcaagtctcagggtgccgtgggtctggccggagtgttgctggttgcactcagtgtggcagcaggcctggggttgtgtagcctgattggcatatcctttaacgcagctacaactcaggtgctcccctttcttgccttgggtgtgggcgtagacgatgtgttcctgctggcccacgcattctccgaaaccggccagaacaaacggattccgtttgaagacagaacgggtgagtgtttgaaacggactggagcttcagtggccctcaccagcatatcaaatgtgaccgctttttttatggcagcacttattccgatcccagccctccgggccttttctctgcaagccgccgtggtcgtggtgtttaattttgcaatggtccttttaatttttcctgctatcctgtccatggacttgtacagaagggaggatcgcagactagacatcttctgttgtttcacatctccatgcgtctcaagggtgatccaggtagagcctcaggcatatacggatactcatgataatactagatacagtcctcccccgccgtactcttctcatagtttcgcccacgaaacacagatcacaatgcagagcactgtgcagctgcgtaccgagtacgacccccacacccacgtttactacactacagccgaaccacgttccgagatctctgtacagcctgtcactgtgacccaggatactctgtcctgtcaatcaccagaatctacttccagcacccgggacctcttgagccaatttagcgacagcagccttcactgcttagaacctccatgtacgaagtggaccctttcatcattcgccgagaagcactacgccccttttctcctgaagccgaaggccaaggttgtagtcatctttctgtttttgggcctgctgggggtttccctatacggtacaaccagggtcagggatggtctcgacctcacagacatcgtgcccagagaaactagagagtatgatttcatcgccgctcagttcaagtatttttccttttataacatgtacatcgtgacacaaaaagctgattatcctaatattcagcatctgctgtatgacctgcataggagcttctccaatgtcaagtatgtgatgctggaggagaataagcagctcccaaagatgtggctccactactttcgagattggttacaaggattgcaggatgcattcgactcggactgggaaacaggcaaaattatgcccaacaattacaaaaatgggagtgacgacggagtcctggcctacaaactgttggtacagactggtagcagggacaaacccatagacatttcacagctgactaagcagaggctcgttgatgcagacggcataatcaatccatctgcattttacatctatttgacggcctgggtttccaatgatccagtggcctatgccgcttctcaagccaacatccgcccccataggcccgaatgggtacatgataaggcagactacatgcccgaaaccagattgcggataccagctgccgaaccaatcgagtatgctcagttcccattttatctgaacgggctgcgtgacaccagcgacttcgttgaggctattgagaaagtgagaaccatatgctcgaactacacttccttgggactgtcctcataccccaatgggtacccttttctgttttgggagcagtacattggccttcgccactggctgctgctatttatctcagtggtgcttgcttgtacattcctggtgtgtgcagtgtttctgcttaacccatggacagcgggcatcatcgttatggtgctagccctcatgacggtggagctcttcgggatgatggggctgatcggtattaaactatcagccgtcccagtcgtgatccttatagcctcagttggcatcggtgttgaatttacagtacatgtggccttggcatttttgacagccataggtgataagaatagaagagcagttctggccctggagcacatgttcgctccagtcttagacggagcggtctccaccttactgggagtcctaatgctcgcaggttcagaatttgattttatcgtccgctacttctttgctgtgcttgcaattttgaccatacttggcgtccttaatggcctggttctcttgccggtgctgctctcgttctttggaccttatccagaggtgtctccagctaatggcctcaatcgactgcctacccccagtcccgagccacccccatccgtggttagatttgccatgccccctgggcacacccactcaggatcagattcaagtgacagtgaatattcgtctcagactactgtatctggtttatccgaggaactgcgccattatgaagcgcagcaaggggccggagggcctgctcaccaggttatcgtggaagcaactgagaacccggtgttcgcacacagtacggttgttcaccctgaatcacgccaccaccccccgtccaacccccgccaacagccacacctcgacagcggatctctccctcctggtcggcaaggacagcaaccaagacgagatccaccacgagaaggactgtggcctccgccttaccgcccccgcagagacgccttcgagatctcaaccgaaggacactctggccctagcaaccgcgctcgctggggtcctcggggcgcgcgcagccacaacccacgaaaccctgccagtactgcgatggggtcttctgtacctgggtattgccagccgatcactacagtgaccgcctccgcatctgttacggtggcagtgcatccaccacctgtcccagggcctggccgaaacccacggggaggattgtgcccggggtacccagaaacagatcacggcctctttgaggaccctcacgtgcctttccatgttaggtgcgaacggcgggatagcaaggtggaggtgattgagctccaggacgtagaatgcgaagaacggcctagaggctcatcaagcaactag

SEQ ID NO: 16525 - DNA, 1758 bp, synthetic construct
  misc_feature 1..1758: note = Description of Artificial Sequence: Synthetic coding sequence
  source 1..1758: mol_type = other DNA
ccatgccgaaaaagttcagccctgaacagccctaaagctgccgtggtcgtggtcttcaatttcgctatggtcctactgatttttcctgctattctctccatggatctttatcgtcgcgaagacagacgacttgacatcttctgttgcttcacatccccatgtgtctctcgggtgatccaagtggaacctcaggcctacacagacactcatgataacacgagatattctccacctccaccctatagtagccactcctttgctcatgagactcaaatcaccatgcagtccacagtgcagttgcgcacagagtacgacccacatacgcacgtttattatacaaccgccgaaccaaggagcgaaattagtgtgcagccagtgactgtgacgcaagacactctcagctgccagagcccagagagtacgtcaagcacccgcgacttactgtcccagttttccgacagctcactccattgcctcgaacccccatgcacaaaatggaccctgtccagtttcgctgagaagcactatgccccttttcttctcaaaccaaaagctaaggtggttgtaatctttctgttccttggactgctcggtgtgtccctgtatggtactacacgtgtgcgggatggcttggatctgacagacattgtccctcgtgagaccagggaatacgactttatcgcagcccagtttaagtacttttcattttacaatatgtacatagttacacagaaggcggactaccccaacatccaacaccttctgtacgatttgcataggtctttttctaacgtgaaatacgtgatgctcgaggaaaacaaacagctaccaaagatgtggctgcactatttcagggattggttgcaggggctccaggatgcctttgattcagattgggaaaccggcaagattatgcctaacaattataagaatggttccgacgatggggtcctagcgtacaagcttctagtgcagactggtagcagagataaaccaattgatattagtcagttgacaaagcagcgattagttgacgccgacggaataataaatccctctgcgttttatatctaccttactgcctgggtctcaaatgaccctgtagcatacgctgcgtcacaggcaaacatcagaccacaccgacctgagtgggtgcatgataaagcggactatatgcctgagactaggctgaggataccagcagcagaaccaatcgagtacgcccaattccccttttacctgaatggtctacgtgacacttcagattttgtggaggccattgagaaggtgaggaccatatgcagcaactacacgtcccttggcctgtccagttaccctaacggctaccccttcttattttgggaacagtatattggtctccggcattggctgctacttttcatctcagtggtactagcttgtaccttcctggtgtgcgcagtgttcctgttgaatccctggaccgccggcatcatcgttatggtgcttgccctgatgaccgttgagctgtttggcatgatgggcctcattggaattaaactaagcgccgtgcccgtggtcattttgatcgcctcagtgggaattggcgtggaattcactgtgcacgtagcactggcatttctgacagctattggcgataagaaccgccgcgccgtgctggctctcgaacatatgttcgcccctgttctcgacggcgcagtgagcaccctgctgggagtattgatgctggcaggatccgagtttgatttcattgtctag

SEQ ID NO: 16526 - DNA, 729 bp, synthetic construct
  misc_feature 1..729: note = Description of Artificial Sequence: Synthetic coding sequence
  source 1..729: mol_type = other DNA
atgccccctggtcacacgcattcaggttcagattcttcagactccgagtactcgtctcagactaccgtctcgggattatcggaagagctgcgtcactatgaagcccagcagggcgccggcgggccagcacatcaggttatcgtggaagcaacggaaaatcccgttttcgcacatagtaccgtagtgcacccggagtcgagacatcatcccccatccaatcccaggcagcagcctcacctggacagtggatccctccctccgggccgtcaaggacagcaaccacgccgcgacccgccgcgagaaggactttggcctccaccttatcggccccgccgggacgcctttgagatatctactgagggccactctgggccatccaaccgggcacgatgggggccgaggggcgctagatctcacaaccctcgtaatcctgcttcaaccgcaatgggctccagcgtgcctggctactgccaacccattactacagttaccgcatctgcctcggtgaccgtagccgtgcatcccccgcccgttcccggccctgggaggaacccgcggggggggctctgccccggctatcctgaaacggatcacgggctgtttgaggacccaacctgtctgtcgacctcaggtgtgagaggaggaatccggcgctggaaaagcctcagctgtaggacatggaacgccaggcggggccccggagaagccgcccctaccgaaggggattag

SEQ ID NO: 16527 - DNA, 1461 bp, synthetic construct
  misc_feature 1..1461: note = Description of Artificial Sequence: Synthetic coding sequence
  source 1..1461: mol_type = other DNA
ggcaaggccactgggcgcaaagcaccgctgtggctccgtgccaagtttcagcgcttactctttaaactgggttgttacatacaaaagaactgtggcaagtttctcgttgtgggacttctgatcttcggcgcattcgccgtcggcttgaaagcagcgaacctcgaaaccaatgtcgaggaactgtgggtggaggtgggcgggagagtttcacgcgagttgaattatactcgacaaaagataggggaggaggctatgtttaatcctcaattgatgatccagaccccaaaagaggagggcgccaacgtgcttactaccgaggctttgctgcaacatctggacagcgccttacaagcctcgcgcgttcacgtgtatatgtacaaccggggtaaaccccccctgcgttggaccaactttgatcctctcgagtttcttgaggaactgaagaagattaactaccaggttgactcatgggaagaaatgcttaataaggccgaggtcggacacggctacatggatcgcccctgcttgaatccagcagatcccgactgtccagctacagctccaaacaagaacagcactaaacccctcgatatggcacttgtcttgaatggtggctgccatgggctgtctagaaagtatatgcactggcaagaggagcttatcgtaggcggcactgtgaagaatagcaccggaaaacttgtgtctgcccacgccctccagaccatgtttcagctcatgactcccaagcagatgtacgaacactttaaaggttacgaatatgtgagtcacatcaactggaatgaagacaaggccgcagctatcctcgaagcttggcagcgtacctacgtggaagtggtgcaccagagcgtggcccagaattccacccaaaaagttctctctttcacgacgactacgctggacgatatcctaaagtccttttcagatgtctccgttattagggtggcctccggatacctactcatgctggcctatgcatgcctgacaatgctgaggtgggattgtagtaagtcccaaggagcagtggggttagcaggagtccttttggtggccctctcagtcgctgctggactaggtctctgtagcctgattgggatttcgttcaatgcggccactacacaggtgttaccctttttggctctcggcgtcggtgtcgacgatgtgttcctcctggcacatgcgttctctgagaccggtcagaacaaacggattcccttcgaagacagaacgggtgagtgcttgaaacgtactggagcttccgtggccctgacctcgattagcaatgtgaccgccttttttatggccgccttaataccaattccagctttgcgtgccttcagcttacaatacattctgatggcccacagaggcaggctgagtttcaatgacaccctctggtgcggaggcttgaaatcatatatgagattcccatacgaggagtag

SEQ ID NO: 16528 - DNA, 3891 bp, synthetic construct
  misc_feature 1..3891: note = Description of Artificial Sequence: Synthetic coding sequence
  source 1..3891: mol_type = other DNA
atgtttaatccacagctgatgatccaaacacccaaagaggaaggtgctaacgttctgacaactgaagccctgctccagcatttggatagcgcactccaggcttccagagtgcatgtgtatatgtacaatcgccagtggaagctggaacatttgtgctataagtcaggtgagctgattactgaaacggggtatatggaccaaataatcgaatatctgtacccatgtctcatcatcacccccctcgactgcttctgggaaggggcaaagctacagtcagggacggcctacttactgggaaagccccctctcagatggacaaacttcgaccctctggaatttcttgaagagctcaaaaagatcaattatcaggtggactcatgggaagagatgctgaacaaggccgaggtgggccacggctacatggacagaccctgtttgaatcccgctgaccctgactgcccggcaactgcccctaacaaaaatagcaccaaaccactcgacatggctctggtgctgaatgggggatgtcacggcctgagccgaaaatacatgcactggcaagaagagctcatagtcggtggaactgtcaaaaacagtaccgggaagctggtttccgctcacgccctgcaaacaatgtttcagctgatgacccctaagcagatgtatgagcacttcaagggttacgagtacgtgtcccacataaattggaacgaagataaagccgcagcgatacttgaagcctggcagagaacttatgtcgaggtggtgcaccagtctgtggcgcagaattcaacgcagaaagtactgagcttcaccaccaccacccttgatgatattctgaagtcattttcagatgtgagcgttattcgagtggccagcggatacctgttgatgctggcctatgcatgccttaccatgcttaggtgggattgttcgaaatctcaaggagccgttggtctggctggcgtgctattggtcgccctgtccgttgccgcagggctcggactatgctccctgatcggcattagcttcaacgcggccacaacgcaggtccttcccttcttagcccttggtgttggcgtagacgacgtgttcctgctagcacacgctttcagcgaaacaggacagaataagaggataccctttgaagatcgtacaggggaatgcctgaaaagaaccggcgcatcagtcgccctcacttcaatttccaacgtgacggccttctttatggccgcactcatccccatcccagcacttagagctttttccctccaggccgccgtggtggtggtgttcaattttgccatggtcctactgatcttccctgcgatactatctatggacttgtaccgccgcgaggatcgtagattagacattttttgctgtttcacatcgccctgcgtgagtagagtgatacaggtcgagcctcaggcatacaccgatacgcacgataacacgagatatagcccaccgcctccatattcttcacacagcttcgcccacgagactcagattactatgcagagtacagtgcagctcagaacagagtacgatccccacacacatgtctactacacgactgccgagccccgatccgagatttcggtgcagcctgtgaccgttactcaggacactctgagctgtcagagcccagagtccaccagctctacgcgggacctcctgtcacagttttccgattcgagcctacattgcctcgagccgccctgcaccaagtggactctgagcagcttcgcagagaagcactacgcacccttcctgctgaagccaaaggctaaggtggtcgtgatctttctttttctaggcctgctgggggtgagtttatacggcacgaccagagtccgggacggcctggatctcacagacatcgtgccccgagaaacgcgcgagtacgactttatcgccgcccagtttaagtacttttccttctataacatgtacattgtaacacagaaggccgactaccccaatattcaacacctgttgtatgatttacaccgctcgttttcaaacgtcaagtacgtaatgctggaggagaataaacagctgccaaagatgtggctccattacttcagggactggctccagggactacaggatgcgtttgactcagactgggaaacagggaagataatgcccaacaattacaaaaacgggtccgacgacggagttctggcgtataagttgttagtccagacagggtctagagacaagcccatcgatatatctcagttgaccaagcagcgccttgttgacgctgatggcataattaacccatccgcattctatatttacctaacagcctgggtgtctaatgaccctgttgcttacgccgcgagccaagccaacattagacctcacagacccgaatgggtacacgacaaagctgattacatgcctgaaaccagactgcgcattcccgccgccgagcccattgaatacgctcaatttcccttctatctgaatggtctccgtgacacgtctgactttgtcgaagccattgagaaagtgcggaccatttgctccaactatacttctctcggattgtccagctaccccaatggctacccttttctgttttgggagcagtatattgggctgcgccactggctgctcctattcattagtgtcgtgctcgcttgtacattcctggtctgcgctgtgttcctactgaacccgtggaccgcgggtataatagtcatggtgctggcactcatgaccgtggagttgttcggcatgatgggcctgatcggaatcaagctttcagctgtgccggtagtgattttgatcgcttctgtgggcatcggcgtggaattcaccgtccacgtagctctggcctttcttaccgctatcggagacaaaaacaggagagcggtgctggcactagaacatatgttcgcccccgtcctcgacggtgccgtctcaacactgctgggagtgttgatgttggccggctcagagttcgatttcattgtgagatatttttttgcagttctggcaatactcactattctgggtgtcctaaacgggctcgtactgctccctgtgctcctctcattttttggtccctaccctgaggtgtccccggccaacggcttgaatagactccctacaccttctcctgaaccacctccgagcgtggtgcggtttgctatgccacctgggcatacccattcgggcagtgatagctccgactcggagtatagctctcagactacagtttctgggctgagtgaggaactgcgccattacgaagctcaacaaggtgcgggaggccctgcgcatcaagtgatagtagaggcaacagaaaatcctgtcttcgctcattcaactgtggttcatcccgaatcgcgacatcaccccccgtccaacccccgtcagcagccgcacctggacagtggtagtttacctcctggacgccagggacagcagcccagaagggaccctcccagagagggtttgtggcctcctccctaccgcccccggcgcgatgcattcgagatctccactgaggggcattccggacctagtaatcgcgcacgatggggcccacgcggtgctcgctctcacaatccccgaaatcctgcgtctactgcaatggggagcagtgtgcccgggtattgccaacccattacaactgttacagcaagtgcaagcgtcactgtagccgtgcatcccccacccgtgcctggcccagggagaaatccccgcggcggcctatgccctggataccctgaaacggaccatgggctgtttgaggacccccacgtcccttttcacgtgcgatgtgaacgtagagacagcaaggtcgaggtgatcgaactgcaagacgtggagtgtgaggagcgaccacgtggtagcagctcaaattag

SEQ ID NO: 16529 - DNA, 3891 bp, synthetic construct
  misc_feature 1..3891: note = Description of Artificial Sequence: Synthetic coding sequence
  source 1..3891: mol_type = other DNA
atgtttaacccccagctaatgattcagacgcccaaggaggaaggtgcaaacgttcttacaacagaggcactcctacaacacttggacagcgctcttcaggctagcagagtgcatgtgtatatgtacaacagacagtggaaactggagcatttatgttacaaaagcggggaactgattaccgaaacaggatacatggaccagatcattgagtacttatatccctgcctgattattacaccactggattgtttttgggaaggggccaaattgcagagtggcacagcatatctgctgggcaagccgcctctgcgctggaccaactttgatccattagaatttctggaggagttgaagaaaattaattaccaggttgacagctgggaggagatgttgaataaagccgaggtgggtcacggttacatggaccggccatgtcttaatccagccgatccagattgtccagctacggcccccaataaaaacagcactaaaccactagatatggccctggttctgaacggcggctgccacggactttcaaggaagtatatgcattggcaggaagagctgatcgtcggcggcactgtcaagaactcgacaggcaagcttgtgtcagctcacgcactgcagactatgtttcagctcatgacaccgaagcaaatgtacgagcacttcaaagggtatgagtatgttagtcatatcaactggaatgaggacaaagcagctgcaattttagaggcctggcagaggacgtatgtagaagttgttcatcagagtgttgcccaaaatagcacacagaaggtattatcattcacgaccactacactcgatgatattcttaagagctttagtgatgtttctgtcatcagagtggcctccggctatcttctgatgctcgcttatgcttgcctcacaatgttacggtgggattgtagcaagagtcagggggccgtgggtctggctggggtacttttagttgcattgtcagttgccgccggcttgggcctttgttcactgatcggaatttctttcaacgctgctaccacacaagttctgccattcctggcccttggagttggtgtggatgacgtgttcctgctggctcatgcctttagcgaaacaggacagaacaagcggatccctttcgaggaccggacaggggagtgcctcaagcggaccggcgcctcagtggcactgacatcgatcagcaacgtgaccgcgttttttatggcagccctgatccctatccctgccctcagagctttttcccttcaagccgccgtggtggtggtcttcaattttgctatggtgctcctgatttttcccgcaattctctcaatggacttgtatcggcgcgaggatcgtcggctagatatcttttgctgttttaccagtccttgtgtttcccgagttatccaggtggagccacaggcatacacagacactcacgacaacacaagatattcccccccgcccccatattccagtcactctttcgctcatgaaacacagattacgatgcagagcacggtccaactgagaaccgagtacgatccccacacacacgtgtactacactactgcggagcctagatctgaaataagcgttcagcccgtgaccgtaacccaagacacgctaagctgccagtcgcctgaaagcacctcctccacgagggatctgcttagtcaattttcagactcctctctgcactgcctagaacccccatgtacaaaatggacactatcgtctttcgcagaaaagcattatgcccccttccttttgaagccgaaggccaaggttgtagtgatcttcctctttctgggcctattgggggtctccctgtacggaacaacaagagttcgcgacggtctagacctgactgatatcgtacctagagagactagagaatacgattttattgcagcccagttcaagtacttcagtttttataacatgtacatcgtgacccagaaggctgactacccgaacatacaacacttactctacgacttacaccgaagtttcagcaatgtgaagtatgtcatgctggaagaaaacaaacagctgcccaaaatgtggctccattattttcgcgattggctgcaagggctgcaggatgcctttgacagcgactgggagactggtaagattatgccgaacaattacaagaatggtagcgatgatggagtccttgcctataaactgctagtgcaaacagggtcaagagacaagccaatagatatttcgcagctcaccaaacaacggctggtggacgccgatggaatcatcaatcctagtgccttctacatttacctgacggcctgggtctcaaatgaccctgtcgcatacgcagcaagccaggcgaatatccgccctcatcgtcctgagtgggtccacgataaggcagattatatgcccgaaacacggctgcgtattcccgcagctgaaccgattgaatatgcgcagtttcccttttatttaaatggactgagagacactagtgacttcgtcgaggctatagagaaagtgaggaccatctgctccaactatacatccctgggactgtcctcctatcccaacggttatccatttctattctgggagcagtacattggcctcagacattggttactgctctttatttcagtggttctggcctgtacttttctggtctgcgctgtgtttttgcttaacccttggacggccggcattattgtgatggtgcttgccttgatgaccgtggaactattcggaatgatggggcttattgggataaagctaagtgccgttccggttgtgatcctgatcgccagtgttggcatcggcgtggagtttactgtgcatgtggccctggcgtttttgaccgcaatcggcgacaaaaacagaagagcggtgctcgctcttgagcacatgtttgccccagtcctggacggcgcagtgtccacactcctaggggtcctgatgctggctggaagcgagttcgacttcatagtgcggtatttctttgccgtactcgccattttaaccatactgggagtgctcaatgggttggtgctattgcccgtgctgctctctttctttggtccatatcctgaggtcagtcccgccaacggactaaatcgtttgcccacccccagtcctgagccccctccgagtgtggttcgatttgcaatgcccccaggccacacacatagtggatctgattcatcggattcagagtactccagccaaaccaccgtgagcggcttaagtgaagaactgaggcactatgaggcccagcagggcgcaggcggacccgcccaccaagtcatcgttgaagcgacggagaacccggtttttgcccactctaccgtggtgcaccccgagagccggcaccacccaccaagcaacccaagacagcagccccatttggactccggcagtttaccacccggcagacaggggcagcagccacgacgcgatccgccgcgcgaggggctttggcctccaccatatcggcccagaagggacgcttttgaaatatcaacagagggccactcaggaccttcgaacagggcacggtggggccccaggggtgctcggtcccataatcccaggaatccggcgagcacagccatggggtcaagcgtgcccggctactgtcaaccgatcaccaccgtaactgcatctgcatccgtaacagttgccgtgcatcccccacctgttccggggcctgggcggaatccccggggcggactgtgtcctggatatcccgagaccgatcatggcctatttgaggacccccatgtgccattccatgtgcggtgtgagcgtagggattcaaaggttgaagttatcgagctacaagacgttgagtgcgaggagagacctcggggctcatccagcaattag

SEQ ID NO: 16530 - DNA, 3891 bp, synthetic construct
  misc_feature 1..3891: note = Description of Artificial Sequence: Synthetic coding sequence
  source 1..3891: mol_type = other DNA
atgttcaatccacagttgatgattcagacacctaaagaagaaggagccaatgttctcacaacggaggcgctgctgcaacatttggacagtgccctgcaggcgtccagagtgcacgtgtatatgtacaataggcagtggaaactggaacacttatgctacaagtccggggaactgatcacggaaacaggctatatggaccaaatcatagagtatctgtacccttgccttatcattacacctttggattgcttctgggagggcgctaaacttcagtccggcactgcctaccttctgggcaaacctccccttaggtggactaactttgaccctctggaattcctagaagaactgaagaagatcaactatcaggtcgatagctgggaagagatgctgaataaagccgaagtgggccatggttacatggaccgcccctgtctgaatcccgctgatcctgattgcccggctacagctcctaataaaaattccactaaaccattagacatggctcttgtattaaacggtggatgccacggtttaagccggaagtacatgcactggcaagaagaacttatagttggcggaaccgtgaagaactcaacagggaaactggtctctgcccatgctctccaaacgatgtttcagttgatgaccccgaagcagatgtacgaacattttaagggctacgaatacgtaagtcatattaattggaacgaggataaagccgctgccattctcgaagcgtggcagaggacatacgtagaagtggttcaccaaagcgtggcacagaactccacacagaaggtgcttagttttaccacaaccaccctcgacgatattcttaaaagcttctccgatgtatccgtcattcgcgtggcctcaggatacctcctgatgctcgcttacgcatgtctcacaatgctacgctgggattgcagcaagagccagggcgcagtcggtctggccggagtgctgctcgtcgccctgagcgtagcggccgggctgggtttatgctcccttatcggtattagctttaacgcagctaccacccaggtcctgccatttcttgccctgggagtgggggtagacgatgtatttttactcgcccatgcgtttagtgaaacaggccagaataagcgcatcccgtttgaagacaggaccggcgagtgtctcaagaggacaggagcaagtgtcgccttaacctcgatttcgaatgtcacagccttttttatggctgccctgattcctatccctgccctccgcgctttctccctacaagctgcagtcgtagtggtattcaattttgccatggtgctcctgatatttccagctatccttagtatggatctttaccgtcgcgaggatcggcggctcgatatcttctgttgttttacaagcccatgcgtctctagagtcatacaggttgagccccaggcatacaccgatacccacgataacaccaggtacagtcccccacccccctactcttcccactcttttgcccacgagacgcaaattacgatgcagagcaccgtacagctgcgaacagaatacgatccccacacacacgtgtactacacaacagccgagcctcgctccgaaattagcgtgcagcccgtgactgtgactcaggacaccctgtcctgtcagtctcctgaaagcacatcttccacccgggatctcctttcacagttttcagactctagcctccattgcctggagcccccgtgtaccaagtggacgctgtcttccttcgctgaaaagcactatgcaccttttttgctcaaacccaaggccaaggtggtggtgatatttttgttcttaggcctcctgggggtgtccctttacggtacaacacgcgtgagggatggactggacttgactgacattgtacctcgggagacccgggaatacgattttattgcagcccaattcaaatacttctcattttacaatatgtacatcgtaacccagaaagccgattacccgaatatccagcaccttctctatgatctacaccggtccttcagtaatgtaaagtacgtgatgcttgaagagaacaaacagctccccaagatgtggctgcattacttccgcgattggcttcagggtctgcaggatgcgtttgactctgactgggagaccggcaaaatcatgccaaataactacaagaatggtagcgacgatggagttctagcttataaacttctggtgcagacaggatcccgagacaagccgatcgatatttcacaactgacaaaacagcgcctcgtcgacgccgatggcatcatcaaccctagtgcgttttacatctaccttaccgcgtgggtgtctaacgaccctgttgcatatgctgcttcacaggcaaatatcaggccgcataggcccgagtgggtgcatgataaagctgattatatgcccgaaacccggcttagaatcccggcagcagaacctattgagtacgcacagtttcccttttacttaaacggattaagagacacatccgatttcgtcgaggccattgagaaggtccgaaccatctgctctaattacacatctctcggcctatcctcttatcctaatggctatcccttcctcttctgggagcagtatattgggcttaggcactggctgctgctattcatctccgtagtgctggcttgcacattcctcgtctgcgctgtattcctgctgaacccctggaccgcaggcatcattgtgatggtcctggctttaatgaccgtagaactatttgggatgatgggccttataggaatcaagctcagtgccgtgcctgtcgtgatcttgatcgccagtgtggggatcggggttgagtttaccgtgcacgttgccctggcatttctgacggcaattggtgataaaaaccgacgagcagtgcttgctctcgaacacatgtttgccccagtccttgacggcgctgtgagcaccctacttggtgttttaatgctggccgggagtgagtttgacttcattgtgcggtacttcttcgctgtactcgctattctgactatcctgggcgtgctcaacggcttggtattactacctgtgctgttatccttttttggcccatatcctgaagtctctcctgccaacggactgaacagactgcctaccccttccccagaaccaccaccctccgtggtgaggttcgccatgccgccgggccacactcattccggcagcgattcttctgactcagaatattcctcgcagacgacagtgtccggtctgtccgaagagctgagacactacgaggcccagcagggggcaggcgggcctgcacaccaggtgatcgtggaagcaactgaaaatcccgtattcgcacatagcaccgtggtgcatcctgaatctcgacaccatccaccttctaaccctcgccagcaaccccacctggactccggctctttgccaccgggacgacaaggccaacagccccgtcgggaccccccccgggagggtctctggccccctccctaccgcccacggcgcgatgcttttgagatctccaccgaaggtcacagcggaccatcgaatcgtgcccgctggggacccagaggcgctcgttcccacaatccaagaaacccagcctcgacagcaatgggaagttctgtccccggctactgccaaccgatcaccactgtgactgcatccgcgagcgtcacagtggccgtgcaccccccacctgtgccaggcccgggcaggaacccccgcggaggcctctgtcccgggtatccagaaactgaccacggcctgtttgaggacccccatgtgccattccacgtgagatgcgagcggcgcgactcgaaggtggaagtaatcgagctgcaggacgtagaatgtgaagaacggccgcgcggtagcagcagtaattag

SEQ ID NO: 16531 - DNA, 4146 bp, synthetic construct
  misc_feature 1..4146: note = Description of Artificial Sequence: Synthetic coding sequence
  source 1..4146: mol_type = other DNA
atgggtaaggcaactggtcgcaaggcaccattgtggcttcgagccaagtttcagcgcctactcttcaagctcggatgctacatccagaaaaactgcggcaagtttcttgtcgtcggactgctgatcttcggcgcctttgctgtgggactcaaagccgctaatctcgagactaacgttgaggaactgtgggtggaagtcggagggagagtgtctcgtgagcttaactacactaggcaaaagattggggaagaagccatgttcaatccacagttaatgatccagacaccaaaagaggagggcgccaatgtgcttacaacagaagccctgctgcagcacttagactccgcgctgcaggcgagccgtgtgcatgtctatatgtataatcgccagtggaagctcgaacatctatgctacaagagtggggagctgatcaccgagaccggatacatggaccagatcatagagtatttgtatccttgtctaattatcacccccctggactgcttttgggagggcgccaaactccagtcaggtacggcgtatctactgggaaaacctcccctgcgctggactaacttcgatcctctggagtttctagaggagttgaagaaaatcaactatcaagttgatagttgggaagaaatgctgaataaggcggaggtaggccatggatacatggacaggccttgtctaaatccagcagacccggattgccccgctaccgcccccaataaaaattctacaaaaccattggacatggccctggttctaaatggaggttgccatgggctgagccgtaagtacatgcattggcaggaagaattaattgtaggaggaaccgttaaaaacagtactggaaagctggttagtgcccacgctctgcagacaatgtttcagctgatgactcccaaacagatgtacgaacatttcaagggctacgagtacgtttctcatatcaactggaacgaggacaaggctgcagccatcctggaggcatggcaaagaacctatgttgaggtcgtgcatcagtcggttgcccaaaactctacgcagaaggttctgagcttcacaaccactacgttggatgacatcttgaagtcttttagtgatgtaagcgtaattcgggtcgcatcgggctatcttctgatgctggcctacgcgtgtctcaccatgttgaggtgggactgttctaaatctcaaggcgccgtcggactggccggggtgcttctcgtcgcgctctctgtggcagctgggttaggactatgctcactcattggtattagcttcaatgctgctaccacccaggttctgccatttctggcactcggtgttggagtggatgatgtgtttttgctggcgcacgcctttagcgaaaccggccaaaataaaaggattccgttcgaagaccgaacgggtgagtgcttgaaaaggacgggggcttcggttgcgctgacttcaatctccaacgttaccgccttctttatggccgcactcattcccatccctgcacttagggcctttagcctgcaggcagccgtcgtcgtcgtgtttaatttcgccatggtcctcctgatttttcccgcgatcctttcaatggacctgtaccgtcgggaagaccgccgtctcgacatcttttgttgctttacctccccctgcgtgtcccgcgtgatacaggtggagccacaagcttatactgatacccatgataacacaaggtattcccctcctccaccatacagtagtcatagctttgcacatgaaactcagattaccatgcagagtacagttcagcttcggacggagtacgaccctcatactcacgtgtactatactactgcggaaccacgcagcgagatcagtgtgcagccagtaactgtaacgcaggacacactgtcgtgtcagtcaccagagtccacctcatctaccagggacctgctgagccagttctcagatagctccctacattgtctggaaccaccttgcaccaaatggaccctgtcttcatttgccgaaaaacattacgctccattcctcctaaagcctaaggccaaggtggtggtcattttcctgttcctgggcctgctcggcgtgtccctttacggcactactagggtaagggatggcctagatttgacagacatcgtgccacgcgaaacccgcgagtacgatttcatcgccgcacagttcaaatatttttcattctataatatgtacattgtaacccagaaagccgactacccgaatattcagcatttgctctacgaccttcacagaagttttagcaatgtcaaatatgtgatgctcgaagaaaacaagcagctgcccaagatgtggctccactacttccgagactggttgcagggcctccaggatgcattcgactccgattgggaaacaggaaagatcatgcccaataattacaagaatggttcggatgatggtgtgctcgcctacaaattgctggtgcaaactggatcgcgcgataagcccattgatatcagccagctcactaagcagcgtctggtggatgccgacggtataatcaatcccagtgctttttacatttatctcaccgcctgggtatccaatgatcctgtggcgtacgcagctagccaggctaacatcagacctcacagaccagaatgggtccatgataaagcagactatatgcccgagaccaggctgcgaatccctgccgcagagcctatcgaatatgcccaatttccattttacctgaatggactgagggatacttctgatttcgtggaggcgatcgaaaaagtgcgaacaatctgttctaactacacatctttgggtttaagcagttatccaaacggatatccttttctgttctgggagcaatacattggtcttagacattggctactgcttttcatctctgtggttcttgcgtgcacctttctcgtgtgtgccgtctttcttcttaatccttggaccgctggtatcattgtgatggtgctggcgctgatgacagtggagcttttcgggatgatgggactgattggaataaagctgtcagccgtccctgtggttatcctgattgcctccgttggaatcggcgtggaatttaccgttcacgttgccttagcttttttgaccgccatcggagataagaacaggagggctgtgcttgcacttgaacatatgtttgctcctgtgctggatggcgcagtgtcaacactcctcggcgtgctgatgctcgccggaagcgagttcgactttatcgtgcgatactttttcgccgttctggcgattctgactattctgggcgttctgaatggactcgtcttacttccagtactacttagttttttcgggccatatccagaggtgagtcctgccaacgggttgaatagacttcccaccccctctcccgagcctccaccctctgtggtgaggttcgccatgccaccaggtcacacacatagcggcagtgattcctcagactcagagtatagttcacaaacaaccgtctctggactgtccgaggagctacgccactacgaagcgcagcaaggggccggggggcctgcccatcaggtgattgtggaagcgactgagaaccctgtttttgcccattcaaccgtggtgcatccggaatcccgccatcatcctccatcaaatccacggcaacagccccacttggactctgggtcactcccacccggtcggcagggtcagcagcccaggcgcgacccgccacgagagggcctgtggcctcctccttatcgaccccggcgggatgcttttgagatctcaacagagggccattctggtccctctaacagggctcgatggggcccccggggcgcccgatcacataaccccagaaaccccgcttctacagcgatgggctcaagcgttcccggttactgtcagccaatcactacagtcactgcaagcgcctcagttactgttgccgtgcatccccccccagtcccaggccccggacgaaatcctcggggggggctctgtcccgggtaccctgaaacagaccacggtttgtttgaagacccacacgtacctttccacgtccggtgcgaaaggagagattcgaaggtggaagtgatcgagttacaggatgtcgaatgtgaagagcgtccccgcggttccagtagcaattag

SEQ ID NO: 16532 - DNA, 4146 bp, synthetic construct
  misc_feature 1..4146: note = Description of Artificial Sequence: Synthetic coding sequence
  source 1..4146: mol_type = other DNA
atgggcaaagctacaggccgcaaggcacccttatggctgcgcgcaaaatttcaaaggctgctcttcaaactcgggtgttatattcagaagaactgtggcaagtttctggtggtgggtcttttaatctttggcgctttcgcggtgggcctcaaagctgccaacctggaaactaacgtcgaggaactgtgggtagaggtgggcggccgggttagtagggagctgaattacacccggcaaaaaattggggaggaggccatgttcaacccacagttaatgattcagacccccaaggaagagggggcaaatgtcttgactaccgaggcccttcttcagcacctggattcggctctccaggccagccgggtacacgtgtatatgtacaatcgacagtggaaactggaacacttgtgttacaagtctggggagctgattacggaaaccggatatatggatcagattatagagtacctttacccgtgcctcattattacgcctttggattgcttttgggagggtgcaaaactgcagtccggcacagcgtacctcctggggaaaccacccttaaggtggaccaattttgacccgctggaattcttggaggagctgaagaagatcaactatcaggtcgattcatgggaggaaatgctgaataaagctgaagtcggccacggatacatggaccgcccatgtctgaatccagcagaccctgattgtccagctacagctcctaataagaacagtacaaaacccttggacatggcccttgtgctgaacggcggctgtcatggcctgagtaggaaatacatgcattggcaggaggagctgattgtcggaggcactgttaagaattctactggaaaattggtgtcggcccacgcactgcaaacaatgttccaactaatgacgcccaagcagatgtatgaacattttaaaggttatgaatacgtcagccacatcaactggaatgaggataaagccgcagcaatcctggaggcctggcagaggacttacgtcgaagtggttcatcagagcgtcgcccagaacagcacacagaaggtcctttcatttaccaccacaactctggacgacattctcaaatcctttagtgacgtgagcgtgatcagagtcgccagtggctatcttctgatgcttgcatacgcctgtctgacaatgttgcggtgggattgctcgaagagccaaggggcagtcggcctcgctggggttcttttagtcgcgctgtccgtcgccgcagggctggggctgtgttcactgatcggtatttcattcaatgccgctacaacacaggttttaccatttttggcgctgggagtcggagttgacgacgtgtttctgctggcacatgccttttcggaaaccgggcagaacaaacggatccccttcgaggatagaaccggcgagtgtctgaagcggaccggggcatcagtcgcattgacgtcaatctctaacgtgaccgctttctttatggctgccctcattcccatccctgcccttagggccttttcactacaggctgcagttgtggttgtctttaatttcgcaatggtcctcctgatcttccccgctatccttagcatggatctttaccgccgggaagatagacgtctcgatatcttctgctgctttactagtccctgcgtcagccgcgtgatccaggtggagccccaagcatataccgatacccacgacaataccagatacagcccacctcccccttatagctcccacagctttgctcatgagacgcagattactatgcaatccaccgtgcagctaaggactgagtacgatcctcacacacacgtatactacaccactgcagagcccaggagtgagatctcagttcagcccgtcacggtcacccaggacaccctgtcttgtcagtcccccgaaagcacatcatccacgcgagatctcctgagtcagttctcagattcttccctgcattgtttagagccaccctgtaccaaatggactctctcttcattcgcagagaagcactacgcacccttcttacttaaaccaaaagcaaaggtggtcgtcatcttcctgttcttaggtctcctgggtgtctcactgtacggaaccacgcgcgtccgggacggcctcgaccttaccgacatagtgccccgggagaccagggagtacgatttcattgcggcgcagttcaagtacttctctttttacaacatgtacatcgttacacagaaagcagactaccccaacatacagcatctgctttacgacctgcataggtccttctccaatgtcaaatacgtgatgctggaagagaacaagcagctgcctaaaatgtggttgcactattttagagactggctccaggggctccaggatgctttcgactctgactgggagaccggaaagataatgccgaacaactacaaaaatggaagtgacgacggagtcctggcgtacaaactgctcgtacaaaccggatctagggataaaccaatcgatattagtcagcttacgaagcagaggctggtcgacgccgatggcattataaatccatcagctttttacatctacctgacggcctgggtgagtaacgaccccgtcgcatacgccgccagccaagcaaatattcgtccccatcgacccgagtgggtccacgataaggctgattatatgcctgagacccgcttacgaattcctgcagccgagcctatagaatacgcccagtttcctttctacctgaatgggctcagggatacttccgattttgtcgaagccattgaaaaggtgcggacaatttgctccaactacactagccttggactcagcagctatcccaacggatatccctttctgttttgggagcaatatatcggattgcgccactggctactgctcttcatctcagtagtgctggcctgcaccttccttgtttgtgctgtgtttctccttaacccttggacagccggaatcattgtgatggttctggccctgatgaccgtcgaactttttgggatgatggggctaatcggtataaaactttccgcggtaccagtcgtcattctgatcgcaagtgtgggaatcggagtggagttcacagtacacgtcgccctggccttccttacagccataggagataaaaatcggagggctgtgctggcactcgagcacatgtttgcacccgtactggatggggccgtaagtactctgctgggcgtgcttatgctggcaggctccgagttcgatttcattgtgcgctactttttcgcagtgctagcaattttgacgatcctgggggtcttgaatggactggtactcctgccagtcctgttgagcttttttgggccatatcccgaggtgtccccagcgaacggtctgaatagactccccaccccgagtccagagccacctcccagcgtcgtgcgcttcgctatgcctcctgggcatacgcactctggttccgattcatccgactcagagtatagtagccaaaccacagtgagcggactctccgaggagctgaggcactatgaagcccagcagggggctggcggaccagctcaccaggtgattgtcgaggcaactgaaaatccagtgttcgcacattcaaccgtagttcatcccgagtcccgacaccatcccccgagcaatcctagacagcagcctcatctggattccgggagtctaccaccggggagacaaggccagcagccacggcgggatccccctcgggagggcctttggccgcccccatatcggccgcgacgcgacgcttttgagataagtaccgagggtcacagtgggcctagcaatagagcacgctgggggccacgcggcgcacgcagccacaacccccgtaatcccgccagcactgcaatgggtagtagcgtcccagggtactgtcagcccatcactacagtcacggctagtgcttcagtcaccgtcgctgtgcatccaccacccgttcccggaccagggagaaatccacgaggtggcctctgcccgggatatccagagacagaccacggcctatttgaagatccccatgttccctttcatgtccggtgcgaacggcgggacagtaaggtcgaggtcatcgagctgcaagatgtagagtgtgaagaacggccccgggggagtagttccaactag

SEQ ID NO: 16533 - DNA, 255 bp, synthetic construct
  misc_feature 1..255: note = Description of Artificial Sequence: Synthetic coding sequence
  source 1..255: mol_type = other DNA
atgggcaaggctactggcagaaaagcacctttgtggctacgcgcaaaatttcagaggctgttgttcaagctcgggtgttacattcaaaagaattgcggtaagtttctcgttgtagggttactgatcttcggagcctttgcagtggggctgaaggcagcaaacctggagacaaacgtggaagaactgtgggtcgaagaggttaatctgctgtgtggggggcagacttcgactctgtggaacagctggaagtcttag

SEQ ID NO: 16534 - DNA, 525 bp, synthetic construct
  misc_feature 1..525: note = Description of Artificial Sequence: Synthetic coding sequence
  source 1..525: mol_type = other DNA
atgtttaacccccagttgatgattcaaacacccaaagaggaaggagccaacgtactgactacagaagctctcctgcagcatctcgacagcgccttacaggccagcagggtgcacgtgtatatgtacaaccggcagtggaagctcgaacatctgtgctacaagtccggcgaattaattactgagacaggctacatggaccagattatcgaatatctttacccatgtctgataatcacccctctggactgtttctgggaaggcgccaaattacagtcagggacggcctatctgttaggaaagccccccctccgttggacgaacttcgaccctctcgagtttctggaggagcttaaaaaaatcaactatcaggttgatagctgggaggagatgcttaacaaagctgaggtaggccatggctatatggacagaccttgtctgaatccagccgacccagattgtcctgccactgcacccaataaaaactcaaccaaacccctggacatggccctcgtactcaatgggtag

SEQ ID NO: 16535 - DNA, 525 bp, synthetic construct
  misc_feature 1..525: note = Description of Artificial Sequence: Synthetic coding sequence
  source 1..525: mol_type = other DNA
atgttcaacccccagctgatgatccagacccccaaagaagagggcgcaaacgtcctcacaactgaggctttactccagcatctggattctgctctccaggcttctagagttcacgtttacatgtacaaccgccaatggaaattggagcacctttgttataagtctggggaattgataaccgaaaccggctacatggaccaaatcattgagtatctctacccctgtctgatcataactccgctggactgcttttgggagggcgccaagttgcagtccggcacagcctacctgctgggcaaacctcccctgaggtggaccaacttcgacccgctagaatttttagaggagcttaagaagatcaactaccaggtggactcatgggaagagatgctgaacaaagccgaggtgggtcacggatacatggatagaccttgccttaatcccgcggacccagattgccccgccactgcgcccaacaaaaatagcacaaagcctctggatatggcgctggtgctgaacgggtag

SEQ ID NO: 16536 - DNA, 279 bp, synthetic construct
  misc_feature 1..279: note = Description of Artificial Sequence: Synthetic coding sequence
  source 1..279: mol_type = other DNA
atgttcaatccccagctgatgatacagaccccaaaggaggagggggccaacgtcctcaccacagaagcactgctccagcacctcgattcggctctacaggcgtcgcgtgtgcacgtgtatatgtataatcgacaatggaaactggagcacctgtgctacaagagtggcgagctcatcactgagacgggttacatggatcaaatcattgagtacttgtacccttgtctaatcattacaccccttgattgtttctgggagggcgccaaactccaaagttag

SEQ ID NO: 16537 - DNA, 525 bp, synthetic construct
  misc_feature 1..525: note = Description of Artificial Sequence: Synthetic coding sequence
  source 1..525: mol_type = other DNA
atgtttaatccccagttaatgattcagacccccaaagaggaaggcgctaatgtcctgacaacggaagcgctgcttcaacacctggattctgccctgcaagctagccgagtgcatgtttacatgtataatcgacagtggaaactcgaacatctgtgttacaaatccggcgagttgattacagaaactggctatatggaccagattattgaatacttatacccctgtcttattataactcccctcgattgtttttgggaaggggcgaagttgcagagcggtactgcttacctgcttggaaagcccccactacgctggactaacttcgatcctctggagtttctggaggaactgaaaaaaatcaattaccaagttgactcttgggaggagatgctcaacaaggccgaagttggtcacggatacatggaccgaccctgcctgaaccccgctgatcctgactgcccagccacggcgcctaacaaaaactcaaccaagcctctggacatggcactcgtgctgaacggctag

SEQ ID NO: 16538 - DNA, 525 bp, synthetic construct
  misc_feature 1..525: note = Description of Artificial Sequence: Synthetic coding sequence
  source 1..525: mol_type = other DNA
atgtttaacccccagctcatgattcagaccccaaaggaggaaggcgctaatgttcttaccacagaggctctattacagcacctagattcagcgttgcaggcctccagggtgcatgtatacatgtataaccggcagtggaagctcgaacacctgtgttacaaatccggcgaactgatcacagagaccggatatatggatcagatcatcgaatacctgtatccctgcctgattatcacacccctagactgcttttgggagggagccaagctacagagcggtaccgcttacctgctgggcaagcccccactgcgctggacaaattttgatccactcgagttccttgaagaactgaagaagataaactaccaggttgactcttgggaggaaatgctgaataaggcagaagtggggcacgggtacatggaccggccatgcctgaatcccgcggacccagattgcccagcaacggcccctaataagaacagtaccaagccactggatatggccctggtgttgaatgggtag

SEQ ID NO: 16539 - DNA, 954 bp, synthetic construct
  misc_feature 1..954: note = Description of Artificial Sequence: Synthetic coding sequence
  source 1..954: mol_type = other DNA
atgccccgagaggaccgggctacatggaagtcgaattacttcctaaagatcattcagcttctcgatgattatcctaaatgttttatagtaggcgcagataacgtgggaagcaagcaaatgcagcaaatccggatgtcacttcggggcaaggctgtggtactgatgggaaagaatacgatgatgagaaaagccatccgcgggcacctggagaataatccggcccttgagaagctgctgccacacattagaggtaacgtgggattcgtttttacaaaagaggatttgaccgagattagggatatgctcttggcaaacaaggtgcccgctgcagccagggccggagccatcgccccttgtgaagtgaccgtacctgcacaaaataccggccttgggccggagaagacctcgttctttcaagcacttggaattaccaccaagataagccggggaaccatcgaaatccttagcgatgtgcagctgattaagacaggagacaaggtgggcgccagtgaagctaccttattaaacatgttgaatatcagccctttctcttttggcctcgtgatacagcaagtcttcgataacgggagcatatacaatccagaggtgctggatattactgaggaaactttacattcccgctttcttgagggtgtccggaatgtcgcgtctgtgtgcctccagatcggctacccaactgtcgctagcgtgccgcactccatcattaacggctacaaaagagtactggccctctctgttgaaactgattatacattcccactcgccgagaaggtgaaggcattcctggcagaccccagcgcctttgtggcggccgcccctgtcgcggcagctaccacagcggcacccgctgccgccgcggcgcctgccaaagttgaggcgaaggaagagtcggaggagtctgacgaggacatgggatttgggctgtttgattag

SEQ ID NO: 16540 - DNA, 1818 bp, synthetic construct
  misc_feature 1..1818: note = Description of Artificial Sequence: Synthetic coding sequence
  source 1..1818: mol_type = other DNA
atggatgacctagacgccctgctcgctgacctggaatcaactacgtctcatatctccaagcgtcctgtattcctctctgaggagacgccatactcctaccctaccgggaatcacacctatcaggagatcgccgtacccccacccgtgcccccgcctccctcatcggaggccctgaatggaactatcttggacccactcgatcagtggcagccctccagctcccgtttcatccaccagcagcctcagtctagttccccggtgtacgggagctcagccaagacaagctccgtttccaatccccaggactcagttggatccccttgtagcagagtgggcgaggaggagcacgtgtattctttccccaacaagcagaaatctgcagaaccatcccccaccgttatgagcacgagcctcggctcgaacctgtcagaactggatcggctactgctggagctgaatgccgtacagcacaacccccccggtttccctgccgatgaggcgaattcctctccaccgctgcccggagccctgagccctctgtatggagtgccagagaccaattctccactgggcgggaaagccggacccctgactaaggagaaacccaagcgcaatgggggccgaggcctcgaggacgtccggcctagtgtggagagcttactggatgagctggagtcttccgttccatcgccggtgcccgccatcaccgtgaaccagggggagatgagctctccacagagagtgacgagcacacagcagcaaacgagaatctccgcctcttctgcgaccagagagctagacgaacttatggcctcgctaagcgattttaagggaagctggcctctggaggaagtggtgttactcgtttctattagctcctctgtgcaggagggagaaaagtatccccacccttgcgcagcccgccatcggacaccctcactccgatccccagatcagccacctccgtgcccccagtttatggcgcagggaaaaaccggatcatctagtccgcccgggggtccgccgaaacctggctctcagctggattccatgctgggttcccttcagtctgatctgaacaaactcggggtggccacagtagccaagggcgtctgcggcgcctgcaagaagcctatcgccggacaagtggtcaccgctatgggtaaaacctggcatcctgagcacttcgtgtgcacccactgtcaggaagagatcgggtctcgcaatttcttcgaacgggacggccagccttactgcgaaaaggactatcataatcttttctctcctagatgctactattgtaatggtcctattctggataaggttgttacagcactggacaggacctggcacccggagcacttcttctgtgcacagtgcggggccttttttggccctgaagggtttcacgaaaaagacggaaaggcctattgtcgaaaggattacttcgacatgttcgccccaaagtgtgggggttgcgcccgggccattctggagaattatatttctgctctgaataccctttggcatcccgaatgctttgtatgtcgcgagtgtttcacacccttcgtgaacggcagttttttcgagcatgatgggcagccctattgcgaagtccattaccacgaaaggagagggtcactttgttcaggctgtcagaagccgattacgggacgttgcattactgcaatggccaaaaagttccatcctgaacattttgtttgcgcattctgtctgaaacaacttaataaggggacttttaaagagcaaaacgataagccgtactgccagaactgttttttgaaactgttttgctag

SEQ ID NO: 16541 - DNA, 702 bp, synthetic construct
  misc_feature 1..702: note = Description of Artificial Sequence: Synthetic coding sequence
  source 1..702: mol_type = other DNA
atgggaaaaacatggcatcctgagcattttgtgtgcactcactgtcaggaagaaataggcagtaggaatttcttcgagagagacggacagccttactgcgagaaggactatcataacctgttttcccctcgctgttattattgcaacggacctatactggataaggtagtgaccgcgctggatcggacatggcacccagaacatttcttttgcgcccaatgtggtgctttctttgggcccgagggtttccacgaaaaggacggtaaagcttactgccggaaagattacttcgacatgttcgcgccaaagtgcggggggtgcgctagagctattctggaaaactatatatctgccctgaacaccctctggcatcctgaatgttttgtgtgtcgcgagtgcttcacccctttcgtcaatgggagctttttcgaacacgacggacagccatactgtgaagtgcactatcacgagcgccggggttccctatgtagcggctgccagaagccaatcaccggccgttgcatcacggccatggcaaaaaagtttcatcctgatccttgcacctcacctcgtacaggtttggcatcgactccacattggagtcatttgttcctgatctttcaacagtgcagtcgcggggcaggcaagggcaggcaaggccttctcggctctctgtttatcctcatccccccgcccacgtag

SEQ ID NO: 16542 - DNA, 1212 bp, synthetic construct
  misc_feature 1..1212: note = Description of Artificial Sequence: Synthetic coding sequence
  source 1..1212: mol_type = other DNA
atgtccgctccttccagcaccggacctcagtactgtcccggtcttccctctaggaaagaggccactcccgagggacgtccagagacctgcctcctcccatcatcgccccaagcccagcgccccatacaaggcctggagcaacgcgccgacggcgaaagatgttgggctgcagggtggccgagggacggcggccggtcctctcctgggggccaggacgaaggaggcggatcatggccacttgaggaggtggtccttttggtttctatatcttcaagcgtgcaggagggtgagaaatatcctcatccttgtgcagctaggcaccggacaccctccttgcgaagtcccgatcaacccccaccttgtccccagttcatggctcagggtaagacaggttcaagttcacctcccgggggcccccctaaacccggcagccaattggattcaatgctgggctcattacagagtgacctcaataagcttggggtggctactgttgcaaaaggcgtgtgcggagcatgcaaaaagcctatagctggccaggtggtaactgccatggggaagacatggcaccccgaacatttcgtgtgtacccattgtcaggaggaaattggcagccggaatttcttcgagcgagacggccagccttattgcgagaaggactatcacaatttatttagtccgcggtgctactattgtaatggccctatattggataaggtggtgactgctctggatcgcacttggcacccagagcactttttctgtgcccagtgtggcgcgttctttggcccagaaggatttcacgaaaaagatggaaaagcctattgcaggaaagactacttcgatatgtttgccccaaagtgcggaggatgtgctagagctattctcgaaaactacatcagcgcactaaacacactgtggcatcccgaatgttttgtctgtagagaatgcttcacaccttttgtgaacgggtccttctttgagcacgatggccagccctattgtgaagtccattaccacgaacgcagggggtcactttgctccgggtgtcaaaaacctatcaccggacgctgtatcacggccatggctaagaagttccaccccgagcactttgtgtgcgccttttgcctcaagcagcttaataaaggcacttttaaggagcagaacgacaaaccttattgtcagaattgtttcttaaaattgttttgttag

SEQ ID NO: 16543 - DNA, 1674 bp, synthetic construct
  misc_feature 1..1674: note = Description of Artificial Sequence: Synthetic coding sequence
  source 1..1674: mol_type = other DNA
atggatgacttagacgcactgttagccgatttggagtcaacgacaagtcatataagcaagcgacccgtcttcctgagtgaggaaaccccatattcttaccccaccggaaaccacacataccaggagattgcagtgcccccaccggtgcctccaccacctagctcagaggcccttaacggtaccatattggatcctttggaccaatggcagccgtccagttctcgatttatacaccaacaaccccagtcctcgagccctgtctacgggtccagcgctaaaacatcatccgtatctaatccccaggacagcgtcggaagtccctgcagccgtgtgggggaggaggagcacgtatatagtttccccaacaagcagaaaagcgctgaaccctctccaacagtcatgagcacttctctggggagcaatctgtccgagctggaccggcttttgcttgaattaaacgctgtgcagcataaccctcccggatttccggcggacgaagctaacagcagccccccactccccggagcgctgtctcctctgtacggggtgcccgagacaaacagtccattgggaggaaaggccggtcccctcacaaaggagaaacccaagagaaatggaggcagaggactcgaagacgtgagaccctccgtggaatcactgctagatgaactggagagctctgtcccaagccccgttccggctatcactgtgaaccaaggcgagatgagcagcccacagcgggtcacgagtacccagcagcagactcgcatctctgccagctctgccacacgcgagttagatgagcttatggccagcctgagcgacttcaaattcatggcacagggaaaaacaggctcctcatcaccaccgggcgggcctcccaagccaggcagccagctggacagcatgctgggcagtcttcagtctgacctgaacaagctaggcgtggcgacagtggccaagggagtgtgtggcgcctgcaagaagcctatcgctggacaggttgtcaccgctatggggaaaacttggcatccagagcatttcgtttgcacacattgtcaggaagagattggctctagaaactttttcgagagggacggtcaaccttactgtgagaaagattatcataatctgtttagcccccggtgttactattgcaacggacctatcctagacaaagtggtcacagcccttgaccgaacgtggcacccagagcactttttttgcgcacaatgcggagccttttttgggccagagggtttccatgaaaaagatgggaaggcctactgcaggaaggactactttgacatgtttgctccgaagtgtggaggatgcgctagagccattctggagaactacatttcagccctaaacactctttggcaccccgagtgcttcgtgtgcagggagtgcttcactcctttcgtgaacggtagcttttttgagcacgacgggcagccatattgtgaggtgcattaccacgagaggagagggtctctgtgtagcggctgtcagaagcctatcaccggtagatgtatcactgcaatggccaaaaagtttcaccctgagcacttcgtgtgtgcgttttgtttgaagcaactgaataagggaaccttcaaggaacaaaatgataaaccttactgccagaactgttttctgaaactattttgttag

SEQ ID NO: 16544 - DNA, 1275 bp, synthetic construct
  misc_feature 1..1275: note = Description of Artificial Sequence: Synthetic coding sequence
  source 1..1275: mol_type = other DNA
atgagtacgagtctagggtctaacctttctgagcttgacaggctgttactggagctcaacgccgtgcagcataaccctccgggcttccctgcagatgaggccaatagtagtccccccctgcccggagcattatctcccctatacggggtgcctgaaaccaattctcctcttggagggaaggcgggtccactgacaaaagagaaacctaagaggaatggcgggcgtggcctggaagatgtgcggccgtctgtggaaagcctgctggacgagctcgagtcatctgtgcccagcccagttcctgcaatcaccgttaaccagggcgagatgtcatcacctcagcgtgtaacttcgacccagcagcagacccgcatctctgcaagttcggccacacgcgagctggacgagctgatggcttcattgagcgacttcaaatttatggcccaaggaaaaaccggctcaagcagccctcccggtggcccaccaaagccaggaagccagctggactccatgctgggttcgctgcagtcagacctgaacaagttgggggtggccacagtggccaaaggcgtttgtggagcttgtaagaagcccattgctggtcaggttgtgactgcaatgggaaagacttggcatcccgagcactttgtgtgtacacattgccaggaagaaatcgggtccaggaatttctttgagcgcgatggccagccgtattgcgagaaggactatcataatctgttctccccacggtgctattattgcaacggccccatacttgacaaggtagtgacagccctagacagaacctggcaccctgaacattttttctgcgctcagtgcggcgcgtttttcggtcctgagggtttccacgagaaggacgggaaagcctattgccgcaaggattacttcgatatgttcgcccccaaatgtggcggctgcgccagagctattcttgaaaattacatatctgcgttaaatacactttggcacccagagtgcttcgtatgccgagaatgttttacgccctttgtgaacgggagcttcttcgaacacgatggccagccctactgtgaggttcactatcacgagagacgcgggtcgttgtgcagtggatgccagaagcccattacaggcagatgcatcaccgcgatggcaaagaagttccaccccgaacacttcgtgtgcgctttttgcctgaagcagctgaacaagggaacttttaaggagcagaacgataaaccctattgccagaattgttttctaaaactcttttgctag

SEQ ID NO: 16545 - DNA, 951 bp, synthetic construct
  misc_feature 1..951: note = Description of Artificial Sequence: Synthetic coding sequence
  source 1..951: mol_type = other DNA
atgagctcgcctcagcgcgtgacctccacccagcaacagacgaggatctctgccagcagcgccacccgggaattggacgagcttatggcatcgctgtctgactttaaattcatggcgcagggaaaaactggatcgagttctccacccggcggcccgcccaagccgggttcgcagctggattctatgctaggaagcctgcaaagtgacttgaataagctcggcgtggccacagtggccaagggcgtgtgtggagcatgcaaaaagcccattgcaggccaggtcgtgaccgccatggggaagacgtggcatccagaacacttcgtttgcacccattgccaagaggagatcggtagtcgtaacttctttgaaagggatggacaaccttattgtgagaaagattaccacaatttattttcacctcggtgctattattgtaatggtccgattcttgataaagttgtcacagccctcgataggacttggcatccagagcactttttttgtgcccagtgtggggccttcttcgggcctgaaggatttcacgaaaaagatggaaaagcatattgccggaaggactacttcgacatgttcgcgccaaaatgtggaggttgcgctagggcaattttggagaattatattagcgcccttaacactctgtggcacccagaatgtttcgtatgcagagagtgctttacccccttcgtgaatggatccttttttgagcacgacggccaaccttattgcgaggtgcattaccatgagagacgaggatctctctgctccggatgccagaagcccatcactggtcggtgcattactgccatggcaaagaagtttcatcctgaacattttgtgtgtgccttctgtctgaaacagttgaacaagggcacctttaaagaacaaaatgacaagccctattgtcagaactgcttcttaaagctgttttgttag

SEQ ID NO: 16546 - DNA, 993 bp, synthetic construct
  misc_feature 1..993: note = Description of Artificial Sequence: Synthetic coding sequence
  source 1..993: mol_type = other DNA
atgccacactccgtgactttgcgaggtccttctccatgggggttccgcctcgtaggaggccgcgatttttctgcccctttgacaatttctcgagtgcacgctggatcaaaggctgctctcgcagcattgtgcccaggagaccttattcaggctatcaatggtgaatcaaccgagctgatgactcatctcgaagctcaaaatcggatcaaagggtgccatgatcatctaactctgtctgtgagccgacctgaaggccggtcctggccctctgccccagacgattcaaaggcccaggctcacagaatacacattgatcccgagatccaagatggatctcccacaacaagccgaagaccctcaggcaccggcacaggaccagaagatggtcgcccatcactgggcagcccatatgggcagcccccccgctttcccgtgccacacaacggttccagcgaagcgacattgcctgcccagatgtcaacgttgcacgtgagtccgcccccttcggcggatccagcgcggggactgccgagatctagagactgtagggtcgacttaggaagcgaggtttatcgaatgctgagagaaccagctgagcccgtggctgccgagccaaaacagtccggttcattccgatatctgcagggaatgctggaagccggagaaggaggggattggccggggccaggaggccctcgcaatctgaagccaacagccagcaaactgggcgccccactttccggtctccaagggcttccagagtgcacccgctgcgggcatgggatcgtgggaaccattgtgaaagcccgggataaactgtaccacccagagtgttttatgtgcagcgattgtgggcttaacctgaagcagagaggctatttctttctggatgagaggctgtattgtgagagccacgctaaagcccgcgtgaaaccgccagagggctacgatgtggtggccgtgtatcctaacgctaaggtagagttggtgtag

SEQ ID NO: 16547 - DNA, 741 bp, synthetic construct
  misc_feature 1..741: note = Description of Artificial Sequence: Synthetic coding sequence
  source 1..741: mol_type = other DNA
atgccccattctgtgacgctacggggtccgtcaccatgggggtttcgcctcgtgggaggcagagactttagtgcgcctttgactatcagcagagtgcacgctggaagcaaggccgctctggcggcgctgtgtcctggggatctcatccaggcaatcaatggagaatctacagagttaatgactcatcttgaggcccaaaaccgtattaagggctgtcacgaccacctgactctctccgtgtcacgcccggaaggccgatcttggcctagtgccccagacgactctaaggcccaagcccacaggattcatattgaccctgagatccaggatggcagtccaaccacttctagacgacctagcgggaccgggaccggaccggaggatggaagacccagcctgggatcaccgtatgggcagcctcctcggttcccggtcccgcacaatgggagctcagaagcgacactgccggcccagatgagcactctacacgtgtcccctcctcccagcgccgaccctgctcgcggactacctcggagcagagactgtagagtggatttaggatcagaagtgtatcggatgctcagagaaccggccgaacctgtcgccgctgaaccaaaacagtccgggtctttcagatacctgcaagggatgctggaggcgggagagggaggggcaccttcctccaggcacggaacgtcgagcacaattccctctgcttcttgtgcagttaccgcagcttag

SEQ ID NO: 16548 - DNA, 1791 bp, synthetic construct
  misc_feature 1..1791: note = Description of Artificial Sequence: Synthetic coding sequence
  source 1..1791: mol_type = other DNA
atgagtaattatagcgtgagtctggtgggtcccgcgccctgggggttcaggctgcagggtggtaaagattttaatatgccactgaccatctcctcacttaaggacggaggcaaggccgcccaagccaacgtccgcatcggggatgttgtattaagtattgatggaatcaacgcacagggcatgacccatctggaagcacagaacaaaatcaagggatgtacaggatcattgaacatgaccctccagagagcaagcgctgctcctaaaccggaacccgtgcccgttcagaagggagaacccaaagaagtcgtgaaacccgtgcccatcacgagtcccgccgtgtccaaggtaacatctactaacaatatggcctataataaggccccacggcccttcggatctgtttctagcccaaaagttactagtattcccagcccgtcttcagcctttacgcctgcccacgctacaactagttcacatgcttccccatcgcctgtcgcggccgtaaccccaccgctgtttgccgctagtggcctgcacgcgaacgctaacctctcggctgatcagagcccttccgccctcagcgccgggaaaacagcggtcaatgtgcctcgacaacccactgtgacttctgtatgttctgagacatcccaggagttggccgaggggcagcgccgtggatcccagggtgactctaagcagcagaacggtcccccacgcaaacatatcgtggagagatacacagaattttatcacgtcccaacacacagcgatgcgagtaaaaaaagactaattgaagatacggaagactggaggcccagaacaggaacgacccagtctaggagttttcgaatcctggcgcaaataacaggaaccgagcacctcaaagaatctgaggctgacaacaccaaaaaggctaacaatagccaagagcccagcccacagctggcctcatccgtggcaagtacaagaagtatgcctgaaagcctggattctccaacatctggtcggcctggtgttaccagccttaccgccgccgcagcttttaagcctgtcggaagcaccggcgtcattaagagtccatcatggcagaggccaaatcaaggcgtgccctccactggcagaatctccaatagtgccacatactcaggaagcgtggccccggcaaattcagccttaggtcagacacagcccagcgaccaggatacgctggtgcagagggctgaacacatacccgcaggcaagaggacacctatgtgtgcacactgcaatcaggtaatccgcggccccttcttggtggccctgggtaagtcctggcatcctgaagaattcaattgtgcacattgcaaaaatacaatggcctatatcggatttgtcgaggagaaaggcgccctgtattgtgaattgtgctacgagaaatttttcgcccctgagtgcggccggtgccagcggaaaattctgggtgaggtcattagcgccctgaagcaaacatggcacgtttcctgcttcgtgtgcgtggcatgcgggaagcccattcggaacaatgtctttcatctggaggatggagagccctactgcgaaacagattactacgccctgttcggtaccatatgtcatggctgcgagttcccaattgaggctggagatatgtttttagaagccctcgggtacacatggcatgacacatgtttcgtatgttcggtgtgttgtgaaagcctagagggacaaaccttttttagcaagaaggataaacctctgtgtaaaaaacatgcccattcggttaacttctag

SEQ ID NO: 16549 - DNA, 645 bp, synthetic construct
  misc_feature 1..645: note = Description of Artificial Sequence: Synthetic coding sequence
  source 1..645: mol_type = other DNA
atgtcaaactatagcgtgtctctggtgggaccagccccgtgggggttcaggcttcaggggggcaaggacttcaacatgccattaactatcagctccctgaaagacggaggcaaggcggcccaggcaaacgtgagaattggcgatgtcgtgttatctattgatgggatcaacgcccagggcatgactcatcttgaggcgcaaaataagatcaaggggtgtacaggtagcctaaatatgactctgcagcgtgcttctgcagcccctaagcccgagcctgtgcccgttcagaaaaagacacaggtaactaacaaccccggcacagtcaaaatccctccgaaacgtcccccccggaagcatattgtggagaggtatacggaattttaccacgtccctactcacagcgacgcatccaaaaaacgcctgatcgaggacacagaagactggcggcctcgtaccggaactacgcagagtaggtcctttcggatcctagcacagatcaccgggacagagcaccttaaagagtccgaggctgacaacaccaagaaagccaaagagaagatacctctgcatgtgttctcccccaaatacaccaaactgcgcgattggcatcatgaggtatcagcgagagcgcttaacgtccagtag

SEQ ID NO: 16550 - DNA, 705 bp, synthetic construct
  misc_feature 1..705: note = Description of Artificial Sequence: Synthetic coding sequence
  source 1..705: mol_type = other DNA
atgagcaactatagtgttagcctggtggggcccgcgccctggggatttagattgcagggcggaaaggactttaacatgccactaacgatatcctccttgaaagacggtggtaaagcggctcaagcaaatgtgagaatcggagacgtcgtactctcaattgacggaattaacgcccaaggaatgacacacctggaggctcaaaacaagataaagggatgcactgggagtttgaacatgaccctccaacgagcttccgcagcacccaaacccgagcctgtaccagtccagaaacctactgtgacgagcgtgtgtagtgagacctcccaagagctcgctgagggccaacggagggggagtcagggcgacagtaagcagcaaaatggcaagattcctccaaaacgccctcctcgaaagcacatcgtcgaacgatacaccgaattttatcatgtgcccactcattccgacgcctcaaagaagcgcttgattgaggacacggaagactggagaccaagaacggggaccacacagtctcgctcatttcgcattcttgcccaaattacaggcacagagcatttaaaggaatcggaggctgacaataccaagaaggcgaaggaaaagattccgcttcacgtgttctcaccaaagtacactaaactgcgcgattggcaccacgaggtatctgcaagagccctgaatgtgcagtag

SEQ ID NO: 16551 - DNA, 1464 bp, synthetic construct
  misc_feature 1..1464: note = Description of Artificial Sequence: Synthetic coding sequence
  source 1..1464: mol_type = other DNA
atgtccaactacagcgttagtctcgtggggcctgccccatgggggttcagactccagggaggaaaggattttaatatgccactgaccatttcttcattgaaggatggaggtaaggctgcccaggctaacgttaggatcggcgatgtcgttttaagcatcgacggcatcaatgctcaggggatgacccacctcgaggctcagaataaaatcaaaggttgcacaggatccttaaatatgactctccagcgagcttccgccgcacctaagccggaaccagtccccgtgcaaaaaccaacggtcaccagtgtgtgcagcgaaacttcacaggagttagccgagggtcagcgcagaggttcacagggcgatagcaagcagcagaacggaccgccgagaaagcacattgtcgaacgctacactgaattttaccatgttcccactcatagtgatgcatccaaaaagaggctaatcgaggacactgaagattggaggccacggactggcactacacagagccggagttttcgcattctcgctcaaatcacgggcactgagcacctgaaggagtcagaagcagataatacaaaaaaagcaaacaatagtcaggagccttccccccagctcgctagttccgtggcttctactcgctccatgcctgaatccctggattcccctacttctggcaggcctggagtgacatcgctgacagccgctgctgccttcaagcccgttggcagcaccggtgtgattaaatcgccatcttggcagcgaccgaatcagggcgtccctagcaccggacgtatctcaaattctgccacttattccggcagtgttgcccccgccaactccgcactgggccagacacagcccagtgatcaggacactttagtgcagcgcgcagaacatattccagccgggaaacgcactcccatgtgtgcacactgtaaccaggtcatccggggcccttttttggttgcgctgggaaagtcatggcacccggaagagttcaactgcgcgcattgtaagaatactatggcctatatcggattcgtcgaagagaagggtgccctttactgcgagctatgctacgagaaatttttcgcccccgagtgcgggaggtgccagcgcaagattctaggagaggtcatctctgcactaaagcaaacttggcatgtgagttgcttcgtgtgcgttgcctgcggaaagcctatcaggaacaacgtgttccacttggaagacggtgagccttattgtgagacagattattacgccctgttcggcacaatctgtcacggatgcgagtttccaatcgaagccggcgacatgtttttagaggccttgggctacacttggcacgacacctgtttcgtgtgttctgtgtgctgtgaaagcctggaaggccagaccttcttcagtaagaaagataagcccctctgtaaaaagcatgctcattcggtaaacttttag

SEQ ID NO: 16552 - DNA, 705 bp, synthetic construct
  misc_feature 1..705: note = Description of Artificial Sequence: Synthetic coding sequence
  source 1..705: mol_type = other DNA
atgtccaattactccgtgagcctagtagggccagccccatggggcttcagactccaaggaggaaaagattttaatatgcctctgaccatctccagcttgaaggatggagggaaagctgctcaggccaacgtccggattggagatgtagtgctctccattgacggaatcaatgcccagggcatgacgcatctggaagcacaaaacaaaataaagggctgcaccgggtcattgaacatgactttgcaaagggctagcgccgctcccaaaccagaacccgtcccagtgcagaaacctacggtcaccagcgtgtgctcagaaacgtcgcaggaactggcagagggccagagacgcggatcccagggcgactctaaacagcagaatggcccggttccacgcaaaatacccccccgcaaacatattgtggagcgctacacagaattctaccacgtccctactcactcagacgcttctaaaaagagattgattgaggacactgaggactggcgaccacgtaccggcaccacccagagcaggagttttcgtattttggcacagattaccgggacagagcacctgaaggaatctgaagcagacaataccaagaaagctaaagaaaagatacccctacacgtgttctcacccaagtacacaaaactgagggactggcatcatgaagtgtccgccagggctctgaatgtgcagtag

SEQ ID NO: 16553 - DNA, 645 bp, synthetic construct
  misc_feature 1..645: note = Description of Artificial Sequence: Synthetic coding sequence
  source 1..645: mol_type = other DNA
atgtcaaattatagtgtgagtctggtggggccggccccatggggctttaggctccagggggggaaggactttaacatgccactgacaatatcctcacttaaagacgggggtaaagccgctcaagccaatgtccggattggcgacgttgttctctcgattgacggcataaacgcccagggcatgacgcacttggaagcccagaataagattaaaggatgtaccgggtctctcaatatgactctccaacgagcctcagctgcaccgaagcccgagccagtgcccgtccagaaggtaacacaaaagcgcgagtcaagaagcagtcggcgaaccgcgcctggcttaccaccacggaaacatattgtcgaaagatataccgaattctaccacgttcctacacactccgatgcgtctaaaaagcggctgatagaagacacagaagattggagaccccgaacaggcaccacacagagcaggagtttccggattctggcccagattactgggaccgaacacctcaaggagtctgaggcggacaacaccaagaaagcaaaggagaagatacccctgcatgtattttcgcccaagtatacgaagctgagagactggcatcatgaagtcagcgcgagggcactgaatgtgcagtag

SEQ ID NO: 16554 - DNA, 1425 bp, synthetic construct
  misc_feature 1..1425: note = Description of Artificial Sequence: Synthetic coding sequence
  source 1..1425: mol_type = other DNA
atggcctacaacaaggctcctcggcccttcggcagtgtgtcaagccccaaggtgacttccatcccaagcccatcctccgcctttacacccgcacacgccacaacctcctcacacgctagcccgagtcccgtagctgcagtcacaccccctctgttcgctgcttcagggttacatgccaatgccaacttgagcgctgatcagtctccctccgctctgagtgccggaaaaactgctgtcaacgtgccccgccagcccacggtgacttccgtgtgttctgagacatcacaagaattagcagaaggacagcgtagggggtcacagggcgactctaagcagcagaatggtcccccacgaaaacatattgtggagcgttacacagaattttatcatgtgcccacacactccgacgctagcaagaagcgtctgattgaagacactgaagactggcgacctcggactggcacaacacaaagtcgttcctttcggattctagctcagattaccggcacagaacatcttaaggaaagcgaagctgacaacaccaaaaaagcaaataacagccaggaaccctccccgcagctggccagtagtgtagcaagcacccggtccatgcctgagtcattggactcccccacttctgggaggcccggagtcacaagtctgaccgccgccgccgctttcaagccagtggggagcacgggggtgatcaagagtcccagctggcagcgtcccaatcaaggagtaccttctaccgggcgaatctctaatagcgctacatattctgggtctgtagcacccgcgaactcggctctggggcagacacagccgtcggatcaggatacactggtgcagagagccgagcatattcccgccggcaaaaggacacctatgtgtgcgcactgcaaccaagtaataaggggacccttcctcgtggccttggggaagtcctggcaccctgaggaattcaactgtgcacactgtaagaacaccatggcgtacattggtttcgtggaggagaagggggccctgtactgtgaactgtgctatgagaagtttttcgcccccgagtgtggccgatgtcagaggaagatcctgggagaagttatctctgctctgaaacagacgtggcacgtgtcatgttttgtgtgtgtggcctgtggaaagccaatccgcaacaacgtcttccatctcgaagatggcgagccctactgtgaaaccgattattatgccctttttggcaccatttgtcatgggtgtgagtttcctatcgaggccggggacatgtttctggaggcgttagggtatacctggcacgacacttgctttgtgtgttctgtttgctgcgaatccctcgaaggacaaacgtttttctcgaagaaggataaacccctgtgtaagaagcacgcacattctgtgaatttctag

SEQ ID NO: 16555 - DNA, 411 bp, synthetic construct
  misc_feature 1..411: note = Description of Artificial Sequence: Synthetic coding sequence
  source 1..411: mol_type = other DNA
atgtccaactattccgtgtctctagtcggacctgctccttgggggttcagactgcagggtggaaaggatttcaatatgccactgactattagctctgccggggttcagtggagaaacctcgggtctcctcagccgcctagtcccgagttcaaaaggttttcttgcctgtcactgccgtccagttgggactatagacacgtgcctccaaggctggcaaacttcgtgtttttggtagagacgaagtttccatacgtcggtcaggccgggctggagctccccacatccggtgacttgcctacttcagctagccagagcgctaagataacgggcgtcagccatcgggcgtggcccactcttttttatactctgctgttttttgccaccatatatccagagatcatactgtactag

SEQ ID NO: 16556 - DNA, 669 bp, synthetic construct
  misc_feature 1..669: note = Description of Artificial Sequence: Synthetic coding sequence
  source 1..669: mol_type = other DNA
atggacagcttcaaagtagttctggagggtccagcaccctggggttttagactgcaaggaggcaaagattttaatgtaccgctgtcgatatctcggttgacacccggcggaaaagcggcgcaggccggcgtggcggtgggcgactgggtgctgtccatagacggtgagaatgctggaagtctgacgcatatcgaagcccaaaacaaaattcgtgcgtgcggagaaagactttcccttgggctgtcccgggcacagccggtccaaagtaaacctcagaaggcttcagcacctgctgccgatcctccccggtacacattcgcgccaagtgtttcccttaacaaaaccgctaggccctttggcgctccaccacccgccgactccgcgccacagcaaaacggccagcctttgcgccctcttgttcccgatgcatctaagcagagattgatggaaaacaccgaagattggcggccaaggccaggtacaggtcagagtcggtcttttcgaattctggcgcatctgacaggtaccgagtttatgcaggatcctgatgaggaacatctgaaaaaatcacgcgagaagtacgttttggagctgcagagtccaagatacactcggctgagggactggcaccaccaacgatcagctcacgtattgaatgtgcagtcgtag

SEQ ID NO: 16557 - DNA, 1374 bp, synthetic construct
  misc_feature 1..1374: note = Description of Artificial Sequence: Synthetic coding sequence
  source 1..1374: mol_type = other DNA
atggacagtttcaaagtggtgctcgagggacctgcaccttggggtttcaggctacagggaggtaaagacttcaatgtgcctctgagcatctctaggttgactcctgggggaaaagcagcccaggcaggtgtggccgtgggtgattgggtcctgagtatagacggggaaaatgcgggtagcctcactcacatcgaggctcaaaacaaaatcagagcttgtggagaacgactgtccctgggcctatctcgggctcaacctgtccagagtaagcctcagaaagcttccgcaccggctgccgacccacctcggtatacctttgcccccagcgtgagcttaaacaaaacggcccgaccgttcggcgctcctccccccgccgattccgccccacagcaaaatggtcagcccctgcgccctcttgtacctgacgcaagtaagcaaaggcttatggagaatacggaggattggcgccctcgacctgggacaggtcagtcgagaagcttccgcatcctggcccacctgactggcactgagttcatgcaggatcctgacgaggagcacctaaagaaaagtagccaagtgccaaggaccgaggcacctgcacccgcttcttccacccctcaggaaccctggcctggacccacggcaccctccccaacaagtaggcctccgtgggcagtcgatcccgcgtttgccgagcggtacgcgcctgacaaaacctccacagtgctcacccgccacagccaacccgcaaccccaacgcccctccagtctcggacatctattgtgcaagctgctgctggaggggtgcctggcgggggcagtaacaacgggaaaacccctgtgtgccaccaatgccacaaggtgattagaggcaggtacctagttgctctggggcacgcatatcacccagaagagttcgtctgctcccaatgtggcaaggtgctggaagaggggggcttctttgaagagaagggggccatcttttgcccaccttgctacgatgtccggtacgcacctagctgtgcgaaatgtaaaaaaaagatcaccggggagatcatgcacgccctcaaaatgacatggcacgtgcattgcttcacgtgtgccgcctgcaaaactcctattcggaacagagctttctacatggaagaaggagtcccttactgcgaacgcgactatgagaaaatgtttggcaccaaatgtcatgggtgtgacttcaagattgacgccggagatcgctttcttgaggctctgggattttcttggcacgatacctgctttgtttgcgctatctgtcagatcaacctggagggaaaaaccttctattcaaaaaaggaccggcctttgtgtaagtcccacgccttttctcacgtgtag

SEQ ID NO: 16558 - DNA, 864 bp, synthetic construct
  misc_feature 1..864: note = Description of Artificial Sequence: Synthetic coding sequence
  source 1..864: mol_type = other DNA
atggattcattcaaggtcgtactggaagggccagcaccgtggggttttagactacagggcggcaaggactttaatgtaccactcagtattagccggctcacccccggaggaaaggctgcccaagcaggcgtcgccgtaggagactgggtattgtccatagacggagagaatgcaggtagcctaacacacattgaagcacagaataaaatccgcgcatgtggagaaaggctgtcgcttggcttatccagggcccaaccagtccagagcaaacctcagaaggctagcgccccggccgcagatccacctcgatacacgtttgcgccatccgtgtcactcaataagacagcaagacctttcggagcccctcccccagctgatagcgccccgcagcagaacggtcagcctctaagaccgctagttcccgatgcatccaagcagcggctgatggagaacaccgaggactggcgcccccgacccgggaccggccagagcagatctttccggatattggcgcacctgaccggaacagagttcatgcaagaccccgacgaggagcacctaaaaaagtcccgaccttacaggcctcagccttaccagcctccagcacttgggtgcgggccgtgtgtctgcagagctctttgcccagggcagaacgagcactctgcggatcccgcccagcctgctggccatgctcatgccgctgccgagcctcacttgcactgtgccggctcatgccgaaggggcgctcgtcgcggacagcaacagcgacaggacagtcgcgtctcaccagtgccacaggggcatcccggaccattacccggcggggccgggcctcgggttcctccagggggggtgtgtgtgtag

SEQ ID NO: 16559 - DNA, 1272 bp, synthetic construct
  misc_feature 1..1272: note = Description of Artificial Sequence: Synthetic coding sequence
  source 1..1272: mol_type = other DNA
atggactcgtttaaggtagtcttggagggacccgccccatgggggttcagactgcagggtggcaaggactttaatgtacccctgtctatctcacgcttgacaccgggaggcaaagcggcccaggccggggtagctgttggggattgggtgctgtcaatcgacggcgagaatgcaggctcattgacccatatcgaagctcagaacaaaattcgagcgtgtggcgaacggctcagcctcggcctgagtcgcgcacagcccgtccagtcgaaaccgcagaaggtgcaaactccagacaaacagcccttgaggccgctggtccccgacgcgagtaaacagcggctgatggagaataccgaagactggcgcccaagaccaggcacagggcagagccgttccttccgcatcctggcccatcttacaggcactgagtttatgcaggacccggatgaggaacacttgaagaaaagctcccaggtgccaaggaccgaggcacccgcaccagcttcctcaacacctcaggagccttggcccgggcctaccgctccatcacctactagtagaccaccttgggctgtcgatcccgccttcgcggaacggtatgctcctgacaagacaagtaccgtcctcacaaggcattcccagcccgctacacctacaccactgcagtctcgcacttctatcgtgcaagcagcagccggcggcgtgcccggcggcggctctaataatggcaagacccccgtgtgtcaccagtgtcacaaggtgatccggggaagatacctcgtggccctcgggcacgcttatcaccccgaagaatttgtttgttcccagtgtggaaaggtcctggaggagggtggattcttcgaggaaaaaggggccatcttctgcccaccttgctatgacgttaggtacgcaccctcgtgcgccaagtgtaaaaagaaaattactggcgagattatgcatgctctgaaaatgacctggcacgtgcattgttttacctgtgcagcatgcaagactccgatccgtaaccgcgccttctatatggaagaaggggtcccatattgcgaacgtgattatgaaaaaatgttcggcacgaagtgccacggatgcgacttcaagatcgacgcgggcgaccgatttctggaggccctgggatttagctggcacgatacgtgcttcgtctgcgctatttgtcagatcaatcttgagggaaagaccttttactccaagaaagaccgaccgctatgtaaatcacacgcatttagtcacgtgtag

SEQ ID NO: 16560 - DNA, 522 bp, synthetic construct
  misc_feature 1..522: note = Description of Artificial Sequence: Synthetic coding sequence
  source 1..522: mol_type = other DNA
atggacagctttaaagtagttctcgaaggtcctgctccctggggattccgcctgcaaggcgggaaagacttcaatgtgccccttagtatctcccggctcactcccgggggtaaggcggcacaggccggagtagctgtaggcgattgggtgctgagtatcgatggagagaacgctggcagtttaactcatatcgaggcccagaacaagatccgggcttgtggcgagcgattgtcccttggcctgtctagagcccagcccgtccagagtaaacctcagaaagccagcgcccctgctgccgatccccccaggtatacctttgctccatcggtgtctctcaataagactgccaggccttttggcgcaccgccacctgcggacagtgcacctcagcagaacgggcagcctttacgccccctggtgcctgacgcctccaagcagagattaatggagaacacagaggattggagaccaagaccggggacagggcagtcccggagcttcaggattttagcccacctctag

SEQ ID NO: 16561 - DNA, 273 bp, synthetic construct
  misc_feature 1..273: note = Description of Artificial Sequence: Synthetic coding sequence
  source 1..273: mol_type = other DNA
atggacagcttcaaggtggtgctagaagggcctgcgccttggggtttcaggttgcagggcggaaaggacttcaacgtacccctctctatttcaagactcactcctgggggcaaagctgcccaggctggtgtagctgttggagactgggtgttgagcattgacggagaaaatgccggaagcctcacccacatcgaagcacaaaataagatcagggcttgtggcgaaaggttgagtcttggcttgtcacgggctcagcccgttcagagtaagtag

SEQ ID NO: 16562 - DNA, 492 bp, synthetic construct
  misc_feature 1..492: note = Description of Artificial Sequence: Synthetic coding sequence
  source 1..492: mol_type = other DNA
atggccgacgaggagaagttgccacctgggtgggagaaacgaatgtctagatctagtgggagggtctattacttcaatcatattacgaatgcaagccagtgggagcggccctccggcaattccagctccgggggaaagaatggacagggtgaaccagcccgagtgaggtgtagtcatcttcttgtgaaacactctcagtcccgaaggccctcgagctggaggcaggaaaagattactagaacaaaggaagaggccctggaactgattaacggttatatccagaagataaagtctggggaagaggatttcgagtcactggcatcccagtttagtgattgctctagtgcaaaagctcgtggcgatcttggggccttcagcaggggacagatgcagaagccctttgaggatgcaagctttgcgctgagaacaggcgaaatgagcggccccgtcttcacagactcaggtatacatattattctgaggaccgaatag

SEQ ID NO: 16563 - DNA, 138 bp, synthetic construct
  misc_feature 1..138: note = Description of Artificial Sequence: Synthetic coding sequence
  source 1..138: mol_type = other DNA
atgcagaaacctttcgaggatgcttcttttgctctgcgaacaggcgagatgtctgggccagtatttactgattcggggattcatatcatcctcaggacggagtgttggcggcagacaagaggcccgaactgtttctag

SEQ ID NO: 16564 - DNA, 438 bp, synthetic construct
  misc_feature 1..438: note = Description of Artificial Sequence: Synthetic coding sequence
  source 1..438: mol_type = other DNA
atggcagatgaggagaagctccccccagggtgggaaaaaagaatgtcgcggtcttccgggagagtctactatttcaatcacattaccaacgcttcccagtgggagagacctagcggaaactcctcttccggaggaaagaatggccagggcgagccagcgagggtccggtgttcacatctgttggtgaagcactcccagtcccgtaggccttcttcatggcgtcaggaaaagatcacacggaccaaggaggaagccctcgagttgataaatggatatattcagaagatcaagagcggggaagaagatttcgagtccctcgccagccagttttctgactgtagcagtgccaaagcacggggagatttgggcgccttctcacgaggcgcccagggcatggggcttaccaggctaggggacccataccaccccgagggatag

SEQ ID NO: 16565 - DNA, 561 bp, synthetic construct
  misc_feature 1..561: note = Description of Artificial Sequence: Synthetic coding sequence
  source 1..561: mol_type = other DNA
atgacgatggtggacacagaaatgcctttctggcctaccaacttcggtatcagctctgtggaccttagtgttatggaggaccactcccatagctttgatataaaaccatttaccacagtggattttagctcaataagcacaccccactatgaagacattcctttcaccagaacagaccccgtcgtggctgactacaagtacgatttaaagctccaagaataccaaagcgctataaaggtggagcccgcatccccaccctattacagtgaaaagacacagctttacaacaagccgcacgaggagccatccaacagccttatggccatcgaatgtcgtgtgtgcggcgacaaagcttcaggattccactacggcgtccatgcctgcgagggctgcaagggtttcttcagaaggacgatccggctgaagctcatctatgataggtgtgatctcaattgccgaatccacaagaagtcaagaaacaagtgccagtactgtaggtttcaaaagtgcctagctgttggtatgagtcacaatgaggagctgcagaaggatagttactag

SEQ ID NO: 16566 - DNA, 1752 bp, synthetic construct
  misc_feature 1..1752: note = Description of Artificial Sequence: Synthetic coding sequence
  source 1..1752: mol_type = other DNA
atgggcgggctcgagaaaaagaagtatgaacgtgggtcagccaccaattacatcactcgcaataaagccaggaagaagttacagctcagtctggccgactttcgtcgactctgtatcttaaaaggcatatacccgcatgaacccaagcacaagaaaaaagtaaacaagggttccacagctgctcggacattttacctgataaaggacattaggttccttcttcatgaacccattgtcaacaaatttagggaatacaaggtgtttgtgagaaagctgaggaaggcctatgggaaatccgagtggaacaccgtggagcgcctcaaggacaataagccaaattacaagcttgatcatatcattaaagagaggtatccaacgtttattgacgcactgagagacctggacgatgctcttagcatgtgttttttgttctccacgttcccgcgaaccggaaaatgtcacgtgcagactatccaactatgcagacggctcactgtggagttcatgcactatatcatagcagctcgtgccctccgcaaggtgttcctttccatcaaaggcatttactaccaagccgaagtgctgggtcaacctatcgtttggattactccgtacgccttcagccatgaccatcctacagacgtagactaccgagtgatggccaccttcactgaattctataccacactactcggctttgtcaactttcgtctctaccagctattgaacttgcactacccaccaaaactggaaggccaagcgcaggccgaggcaaaagcgggggaggggacttacgccctggatagcgagagctgcatggagaaactcgccgccctgagcgcttccctggcacgggttgtagtgcctgcaacagaggaggaagcagaagtggatgaattccctaccgatggagaggaggaccgacggaaggagctggaagcacaagagaagcataagaagcttttcgaaggcctgaaatttttcctgaatagggaggtcccgcgagaagctttggcctttatcattcgctcatttggcggggaagttagctgggataagtctctctgcattggggccacctacgatgtgacagactcacggattacacaccaaatcgtagaccgcccagggcagcaaacctctgtcatcggaaggtgctacgtccagccacagtgggtgtttgattctgtcaatgctaggctgcttctgcctgtggctgagtacttttcaggcgtgcagctacccccgcacctgtcacccttcgttacagaaaaggagggggactacgttccccctgaaaaactgaaactgctggccttgcagagaggggaagatcccggcaatttgaacgagagtgaggaagaggaagaagaagatgataacaacgagggcgacggggatgaggagggggagaacgaggaggaggaagaggatgctgaagcagggtcagagaaggaagaggaagcccgactggcagccttagaagagcagcgaatggaaggcaagaagccgagggtcatggccggaacactgaagcttgaagataagcaacggctcgcccaagaagaagagtcagaagctaagcggttagctattatgatgatgaagaagcgggagaagtacctgtaccagaaaatcatgtttgggaaaagacgaaagatccgggaggcaaataaactggccgaaaagcgcaaagcccacgacgaggcggtgcgcagtgaaaagaaagcaaaaaaggccagaccagaatag

SEQ ID NO: 16567 - DNA, 1767 bp, synthetic construct
  misc_feature 1..1767: note = Description of Artificial Sequence: Synthetic coding sequence
  source 1..1767: mol_type = other DNA
atgggaggtctggagaaaaagaaatacgaaagaggcagcgccacaaattatatcacccgcaataaagcgaggaagaagcttcagctcagcctggcggatttcaggcgcctctgcatcctgaagggaatctacccgcatgagcctaaacacaaaaagaaggtgaacaaaggatccacggccgcccggaccttttatttgatcaaggatatcagatttctcctccacgagccaatcgtgaataagtttcgcgaatataaagtgttcgtgcggaagctgagaaaagcttatggaaaaagcgagtggaatacagtagaacgtctgaaggataacaaacccaattataaactcgaccacattataaaggagaggtatcctaccttcatagacgcgcttagagatcttgacgacgcgctaagcatgtgttttctgttctccacattcccacgcaccggaaaatgccacgtccagaccatccagctgtgccgtcgactgacagtcgagtttatgcattacatcatcgccgcacgcgcgttgcgcaaagtgttcctctctatcaaaggtatatactaccaggcagaagtgttggggcagccaatcgtgtggattaccccctacgcattctcccatgaccacccgacggacgttgactatagagtgatggccaccttcacggagttttatacaactctgctaggattcgtgaatttcaggctgtaccaactgttgaatctgcactatccacctaagctggagggtcaagcccaggcggaggccaaagccggcgaaggaacgtatgcactcgattctgaatcctgtatggagaaactagctgcactttccgcttccctggctcgggttgtggtgcccgcaaccgaagaggaggctgaggtcgacgaatttcctacggatggggaaatgtctgcccaggaagaggataggcgcaaggagctggaggctcaggagaagcacaaaaagcttttcgaaggactgaaatttttcctgaaccgagaggtccctcgcgaggctctagcctttattatccgtagcttcggaggggaagtgtcttgggataaatcgctgtgcattggagccacatacgacgttaccgactcacggatcacacaccagatagtagatcgacccggacagcaaacctcagtaatagggcggtgctacgttcagccacagtgggtcttcgacagcgttaatgccaggcttctgctgcctgtggctgagtatttcagcggtgtgcagctccccccccatctaagtccctttgtaactgagaaggaaggagactatgttccccccgagaaattaaagctgcttgcactgcaaagaggagaggatccagggaacctcaatgagtctgaagaagaggaagaggaagacgataacaatgagggtgacggagatgaggaaggcgagaatgaagaggaggaggaggacgccgaggccggtagcgagaaggaggaagaggcgagactcgccgccttggaagaacaacgcatggaaggtaaaaaacctcgggtgatggccggcaccttaaaactcgaggataaacaacgccttgctcaagaagaagagtccgaagcaaaaagactggcgattatgatgatgaaaaaaagagaaaagtacctctaccagaagatcatgttcggtaagagacgaaagattagagaagccaacaagctggcagaaaaaagaaaagcccatgacgaagcagttcgctccgagaagaaagctaagaaggcccggccagagtag

SEQ ID NO: 16568 - DNA, 1350 bp, synthetic construct
  misc_feature 1..1350: note = Description of Artificial Sequence: Synthetic coding sequence
  source 1..1350: mol_type = other DNA
atgtgtttcctctttagtacattccccagaaccggtaaatgtcacgtacagactatccagctctgtcgtagactgacggtcgaatttatgcattatatcattgccgcccgtgctctgcgaaaggtgtttttaagtataaagggcatctattatcaggccgaggtcctgggccaacctattgtctggattacaccctacgccttctcacacgatcacccaaccgatgtggattatcgcgttatggccacctttaccgaattctacaccacacttctcggctttgtgaattttcggctttatcaactcttaaacctgcactatccacctaaactggagggccaggcacaagcggaggccaaggcaggtgaaggaacctatgccttggacagtgagtcctgtatggagaaactggcagctctgtccgcctcactggcaagagtagtcgtccccgcaaccgaggaagaagctgaggtggacgaatttcctacggacggggagatgtccgctcaggaagaggatcgccggaaggagcttgaggcgcaggagaagcacaagaaactcttcgaaggcctgaaatttttcttgaatcgtgaggtgccaagggaagctctagccttcattatcaggtcatttggcggagaagtgagttgggataagagcttgtgcatcggggccacttatgacgtgacggacagccgtataactcatcagatagtggataggcccggccagcaaacatctgtaatcgggcgatgctacgttcagccgcaatgggtgttcgactccgtgaacgcccgtctgttgcttccagtggctgagtatttcagcggggtccagctccctcctcatttgagccccttcgtgaccgaaaaggagggggattacgtgcccccagagaagctgaagctactcgccctacagagaggagaggatccagggaacttgaacgaatcggaggaggaggaagaggaggacgataacaacgaaggggacggcgacgaggagggagagaatgaggaggaggaggaagacgccgaggccgggtccgaaaaagaggaagaggcgcggctcgccgccctggaagaacagcgaatggaaggaaagaaacctagagttatggctggcaccctgaaactggaggacaagcagcgtttagcccaagaggaagaatcggaggcaaaacggttagctattatgatgatgaaaaagcgcgagaagtacctgtatcagaagatcatgttcggtaagcgtaggaagatacgggaagccaacaaactcgcggagaagagaaaggctcatgacgaggcagtgcgtagcgagaaaaaggctaaaaaagccaggcccgaatag

SEQ ID NO: 16569 - DNA, 1350 bp, synthetic construct
  misc_feature 1..1350: note = Description of Artificial Sequence: Synthetic coding sequence
  source 1..1350: mol_type = other DNA
atgtgttttctcttttccacatttcctagaacagggaagtgccacgttcaaaccatccagctttgtcggcgacttaccgtggaatttatgcattacattatcgcagcgcgcgccctgcgcaaggtctttttgtcaatcaaaggaatttactatcaggcagaagttcttgggcagcctatcgtttggattacaccatatgcattttcccacgatcacccaacggacgtggattacagggtcatggccaccttcaccgaattttatacaacgctcctgggtttcgttaactttcggttataccagttgctgaatctgcattaccctcccaagctggagggccaggcccaggcagaggctaaggcaggggaaggcacatatgctttagattctgagagctgcatggagaaacttgctgcactgtccgcttcattagccagggtggttgtgcctgctacagaggaagaagccgaagtggacgagttcccgactgacggcgagatgagtgcccaagaggaggatagaaggaaagagctcgaagcccaggaaaaacataagaagttgtttgaagggctgaagttcttcctgaatcgcgaggtgcctcgcgaggcactggcattcataatccggtcattcggcggtgaagtctcatgggacaagtcactgtgtatcggcgcaacttacgatgttacagacagtcggattactcaccagatagttgatagaccaggccagcaaacatcagttattgggcgctgttatgtgcaaccccagtgggtatttgacagcgtgaatgctcgattgctcctccctgtggccgaatacttttccggtgtgcagctgccaccccatttgagtcccttcgtgactgaaaaggaaggtgattatgtgccacctgaaaaactcaagctcttagcgctgcagcggggcgaggacccgggaaaccttaatgagtcagaagaggaggaggaagaggacgataacaatgaaggcgacggtgatgaggagggagaaaacgaagaggaggaagaggacgctgaagccggatccgagaaggaagaggaggcccgcttagccgcactcgaggagcaacggatggaaggaaagaagccacgtgtgatggctggcacgcttaagctggaggataaacaacgcttggcccaggaagaggaaagcgaggccaagcgcttagccatcatgatgatgaagaaaagagagaaatacctttaccagaagattatgttcggcaagcgacggaagattcgagaagccaacaagttggccgagaagcggaaggcccatgacgaagcggtaaggtcagaaaaaaaggctaaaaaagctagacccgagtag

SEQ ID NO: 16570 - DNA, 5154 bp, synthetic construct
  misc_feature 1..5154: note = Description of Artificial Sequence: Synthetic coding sequence
  source 1..5154: mol_type = other DNA
atggaacctgccgctgccgcaaccgtacagcggcttccagagttaggacgcgaagacagagcctctgcccctgcagccgccgccgccgcagcagctgctgcagccgcagctgccgcggcacttgccgcggcggcgggaggaggtcggtcccctgaacccgccctgacacctgccgccccatccggcggcaacggctcagggtctggggctcgcgaagaggcccctggagaggcacctcccggacccctcccagggagggccggaggcgcagggcgtaggaggcgacgcggcgcccctcagcccatcgccggcggagcagcaccagtgcccggtgcaggaggtggcgccaattcactgctcctcaggcgaggtcgcctgaagcgcaacctaagcgctgccgccgctgcagcttcctcctcttcttccagctctgccgccgccgcttcacactctcccggagcagccggccttcctgccagctgcagcgcatcagcctcactgtgtacgcggtctctggaccgtaagaccttgcttctgaaacataggcagactctacaacttcagccaagtgaccgtgactgggttcggcatcagctgcagaggggctgtgtgcacgtctttgatagacacatggccagtacttacctgcgaccggtgctgtgcactctggatactaccgctggagaagtggccgccagactactgcagctagggcacaaagggggtggcgtggtgaaggtccttgggcaggggcccggcgccgcagcggcgcgggaaccagctgagccaccgccggaagcgggcccaagactggcccccccagagcccagagatagtgaggtgcctcccgcgcgctctgcaccaggcgcatttggcgggcctcctcgcgccccgcccgctgatctccctctcccggtgggtgggcctgggggatggagtcgcagggcatcacccgctcctagtgatagcagccctggagaacccttcgtgggggggccagtctcaagcccaagagctcctaggcccgtggtttccgatacagagagctttagcctaagcccaagcgctgagagtgtgagtgatcggctggatccctattcctcaggtggcggatcgtctagctctagcgaagagctggaagcagacgccgcctccgcccctactggagtaccgggtcagcctcggcgcccaggtcacccggctcagcctctacctctcccacagaccgctagctcaccccagccccaacagaaagcgcccagagcaattgactctccaggcggggccgttcgagaagggtcatgcgaagaaaaagcggcggctgctgtcgcacctgggggtctgcagtccacaccaggacgctctggtgtaaccgccgagaaagcccccccgcctccaccacctccaacgctgtacgtgcagctgcacggggagactaccagaagactagaggcagaagaaaagccactccagattcagaatgactacctctttcagttaggatttggtgagctatggcgggtacaggaagaaggcatggatagcgagattggatgcctgattcgcttttacgccggcaagcctcactctacaggaagttccgagcgcatacaactttcgggaatgtataacgtccgtaagggtaaaatgcagctccccgtcaatcgctggactcgcagacaagttattctgtgcggaacctgtcttatagtaagctccgtgaaagattctctcaccggcaaaatgcatgtgctccctctcattggggggaaagtggaagaggtcaagaagcaccagcactgtttggcctttagctcttccgggcctcaaagtcagacatattatatctgctttgacacatttacagaatatttacgctggctgaggcaggtgagcaaggtggcttcccagagaatctctagcgtcgacctaagctgctgttcactggaacacctgccggcaaacctattctatagtcaggatttgacgcacctgaacctgaaacagaattttctgcgtcagaacccttccctccccgcagcaaggggactaaatgaactgcagcggtttaccaagttgaaatcactgaatttgagcaacaatcacttgggggacttccccttagcggtctgctccattccgacacttgcggaacttaatgtgagctgcaatgcactgcgtagtgtgcccgccgccgttggagtgatgcacaaccttcagacttttctgctcgacggtaattttttacagtctttgcctgctgagctcgagaacatgaaacaacttagctacctcgggttgtctttcaacgaatttaccgatattcctgaagtgttagagaagctcaccgccgtggacaagctgtgcatgtctggaaattgtgtcgaaacactgcgcctacaggccctcagaaaaatgcctcatatcaaacacgtcgacctccgtttgaatgtgatccggaaactgattgccgatgaagtggattttctgcagcacgtaactcaacttgacctccgagacaataaactaggtgatcttgacgccatgatttttaataacatcgaggtgctccactgcgagcgcaaccagctggtgacccttgatatttgcggttattttctgaaagcgctgtatgcatcatcaaacgaactggtgcagcttgacgtgtaccctgtgcccaattatctcagctatatggatgtcagtaggaaccgactggaaaatgtgccagagtgggtgtgcgaatccagaaagctggaagttcttgatattggccacaatcagatctgcgaacttccggcacggctgttctgtaattcctccttgaggaagcttttagctggtcataatcagctggctagactgccggagcgcttggagcggacttccgtcgaggtgcttgacgttcagcataaccaattgctagagctgcctcccaatttattgatgaaagcagacagcctccgtttcctcaacgcctctgcaaataaactggagtcactcccaccggctacactcagcgaggaaaccaattccatcctccaggagttatatttaaccaataactccttgaccgataaatgcgtgccgctgcttacagggcatccacacctgaaaatcctccatatggcctacaataggctgcagtcttttcctgcgtccaaaatggccaaactggaggagctggaggagattgacctctccggcaataagctcaaggctatcccgaccacgattatgaattgccgacgaatgcacaccgtaattgcgcactctaattgtattgaggtattcccagaggtcatgcagctccccgaaatcaaatgtgtagacctatcatgcaacgaactttctgaggtgactctgccagagaatctgccccctaaactgcaggaattagatctgaccggaaatccacgactagttcttgaccacaaaactctagaactactcaacaacattcgctgctttaaaatcgaccagcctagtacaggcgatgcctccggggcccccgcagtctggagtcatggctacaccgaggcttcaggggtcaaaaacaaactgtgcgtcgccgccctgagcgtgaataacttttgcgataatagagaggcgttgtacggagtgtttgacggtgatagaaatgtagaggtgccttacctgctccagtgtactatgagtgacatcctagctgaagagctccagaaaaccaagaacgaggaagagtacatggtgaatacatttatcgtcatgcagcggaaactaggcaccgcaggtcagaaactaggtggtgcagctgtcttatgtcatatcaagcacgatcctgttgatccaggcggttcatttaccctgacatccgccaacgtgggtaagtgtcaaacagtgttgtgccgaaatggaaagcccctgcccttgtctcgcagttatataatgtcctgtgaggaagaactgaaacgcatcaaacagcataaggccatcatcacagaggacgggaaggtaaacggcgttacagaaagcacccggatcctcggctataccttcctgcatccatctgtggtgcccagaccacacgtgcagtccgtgcttttaactccacaggacgaatttttcatcctgggttccaagggcctttgggacagcctgtccgtcgaggaagcagtggaggcagtccgcaacgtaccagatgcactggctgcagccaaaaaactgtgtaccctggcacagagctatggatgtcacgacagcatcagtgctgtggttgtccagctgtctgtgacggaagatagcttttgctgctgcgaactttctgccgggggcgcagtccctcccccatctcccgggattttcccaccaagcgttaatatggttattaaggacaggccaagcgacgggttgggtgttccaagctcatcaagtggaatggctagcgagatcagttctgagttaagtacctctgagatgtcgtccgaagtggggagcacagcatccgatgaacctcctcctggtgcactgagcgaaaacagccccgcctacccttccgaacagcgatgtatgctgcaccccatatgcctgagcaacagcttccagaggcagttaagctccgccactttttccagtgcgttctccgataatgggttggatagcgacgatgaagagcctattgagggggtctttacaaacggatctcgagtagaggtcgaagttgacattcactgtagtagggctaaggagaaggagaagcaacagcatctactgcaagttcccgccgaagcttcagacgaaggcattgtaatttccgccaacgaagacgagcccggactgcctcggaaggcagatttcagcgcggtcggcactattggcaggaggagagcgaatggcagtgtggccccccaggagaggtcccataatgtcatagaggtagccacggacgccccattgcgaaaacccggcggttactttgcggccccagcccagcccgacccagacgatcagttcatcatcccccctgaactcgaggaggaggtgaaagagataatgaagcaccatcaggagcagcagcagcagcaacagccaccaccacccccacagttacagcctcaattacctcgccactatcagctggatcagctgcctgactattacgacaccccactttag

SEQ ID NO: 16571 - DNA, 3618 bp, synthetic construct
  misc_feature 1..3618: note = Description of Artificial Sequence: Synthetic coding sequence
  source 1..3618: mol_type = other DNA
atggattcagaaatcggctgtttaattagattttacgctggtaagccccactctacaggtagtagcgagcggatccaactttccggcatgtacaacgtacgaaagggcaaaatgcagttgccagttaataggtggacccgtaggcaggttatcttgtgcggcacgtgcttgatcgtgtcgtccgtgaaggactccctgactggaaaaatgcacgtgctgccactaatcggcgggaaggtggaggaagtgaaaaaacaccaacactgtctcgcgttctctagttcaggtccccagagccagacatattacatttgttttgacacatttacagagtatctacgctggctgaggcaggttagcaaagtagcctcacagaggattagcagcgtcgatctgtcctgttgcagcctagagcatctaccggctaatctgttttacagccaggaccttacccatttgaatctgaagcaaaacttcttaaggcagaacccttcccttcccgccgcgcgcgggttaaatgaactgcagcggttcactaaactgaaaagcctgaacttaagcaataatcacctgggggatttccctttagccgtatgtagcatccccactctggccgaactgaacgtgagctgcaatgctctaagatcagtgcccgcagcggtgggagtgatgcataacctgcagacattcttactggacgggaatttcttacagtcattgccggctgaattggagaatatgaaacaattgtcctacctcggcttgagctttaacgagtttacagacatcccagaggtgctggagaaactcaccgccgtagacaagctgtgcatgagcgggaattgcgttgagaccttgagactccaagcactcaggaagatgccccatatcaagcatgtcgatctccggctcaacgtcatacgcaaactaattgcagacgaagtggatttcttacagcacgttacacaactggacctgcgagataataagttgggcgacctggacgcaatgatcttcaacaatatcgaggtgctccactgtgagcgaaaccagttggtgactcttgatatatgcggatactttctaaaggcgctctatgcctcctctaatgagctagtccagctggatgtctacccagtaccaaattatttgtcctacatggacgtttcccggaaccggctggaaaacgtgcccgagtgggtgtgtgaatcccgcaagctggaggttttagatatcggacacaatcagatctgcgagctgccagcccggctgttttgcaactcatcactgagaaagctgctggccggacacaatcagctggcccggctgccagaaagattagagcgcacatcggtggaggtgttagacgtgcagcacaaccaactgctcgaactacctcccaatcttcttatgaaagccgattccctgcggttcttgaacgcaagcgctaataagctggagtccctcccccctgccacactgtccgaggaaacgaactcaattctgcaggaactttaccttaccaataactccctcactgataaatgcgtgccacttctgaccggacatccccacttaaaaatcctccacatggcctacaatagactccagtcgtttcccgcaagcaaaatggccaaactggaggagttagaggagattgacctgagcggaaacaaactgaaagccattccaacaaccattatgaactgcagaaggatgcatacagtgattgcgcactccaactgtatcgaggtcttcccagaggtaatgcagttgcctgagataaagtgcgtggacctgtcctgcaatgagttatctgaggtcacactgcctgaaaatttaccacctaaactgcaggagcttgacctgactggaaatcctagattagtgcttgaccataagacgctcgagctgttgaataacattcgttgcttcaagattgatcagccctcaacgggggacgcgagcggggcccccgctgtgtggtcccacggctacaccgaagctagcggtgtcaagaataaattgtgtgttgccgctctctccgttaataatttttgtgataatcgggaggcactgtacggtgtcttcgacggggaccgtaacgtggaagtcccatacctgctacaatgtaccatgagtgatatcctcgccgaggagcttcagaaaacgaagaatgaagaagagtacatggtcaatacctttattgtcatgcagcggaagcttggcaccgccggacagaagcttgggggcgctgctgtattatgtcacattaagcacgaccccgtagatccagggggttcattcacgctgacctctgcaaatgtcggcaaatgtcagacagttctgtgtcgtaatggcaaacccctgcccctgagccgcagttacatcatgagctgtgaagaggaactgaagcgaatcaagcaacacaaggctattatcacagaagacgggaaagtgaatggggttacagaaagtaccaggatacttggatacacatttttacatccaagcgtggtgcctaggccccatgtgcagtcggttctgctgacccctcaggatgagttcttcatactcggcagtaaaggcctctgggatagtctctccgtggaagaggccgtggaggcagtccggaatgttcccgatgcactcgctgcagccaaaaagctttgcactctggcgcaaagctatggctgtcatgactctatcagtgctgtggttgttcaactctcagtgactgaggacagcttttgttgctgcgaactatcggccggcggtgctgtacccccccccagtccagggatcttcccaccatcagtaaacatggttatcaaggatcggccctctgatggtctgggggtgccctcttcaagtagcggcatggcgagcgagatctcctctgagctgtcaacaagtgagatgtcctccgaagtgggatctaccgcaagcgatgagccgccacctggggccctttcagaaaattctcctgcatacccctcagaacagcgatgtatgctgcaccccatctgcctcagcaatagttttcaacgacagctttctagcgccacctttagttcagctttcagcgataacggactcgactctgacgatgaagagcctattgagggcgtgttcaccaacggctcgcgagtcgaggttgaggtggacatccattgcagtcgcgctaaggagaaggaaaagcaacaacatctcctccaggtacctgccgaggcatctgatgaaggcatagttatttccgctaatgaagacgagccaggcttgccacgcaaggccgattttagtgcagtgggcacaatcggacgccggcgggccaacggtagcgtagccccccaggaacggtcgcataatgtgattgaagtagcaaccgacgctcctctgagaaagcctggcggatactttgccgccccggcgcagcctgatccagatgaccagtttattattcctcccgaactggaggaggaagtgaaagagattatgaagcatcatcaggagcaacagcagcagcagcagcctccaccacctccgcaattgcaaccgcaactaccaagacactaccagttggaccagctaccagattactacgatacccccctatag

SEQ ID NO: 16572 - DNA, 2379 bp, synthetic construct
  misc_feature 1..2379: note = Description of Artificial Sequence: Synthetic coding sequence
  source 1..2379: mol_type = other DNA
atgcatatcctcccactggtcggaggaaagatcgaagaagtcaagagacgccagtacagcctagccttttcctctgctggcgcacaggcccagacctaccacgtgtcatttgaaacgctggccgagtaccaacgctggcaacgccaggcctcaaaagtagtgtcgcaacgcatatctactgtggatttgagttgctattccttggaggaagttcctgagcacctgttttacagccaggacattacatacctgaacctgaggcataatttcatgcagctcgagaggccggggggtctggataccttatataaattcagccagttgaaaggtctaaacctgtctcacaacaaactcggcctttttcctatactcttgtgtgaaatctctacgctcacggaacttaatttgagttgtaacggctttcacgatctcccctcgcagatcgggaacctgctgaacctgcagacactgtgcctggatggcaattttctgacaacactccctgaggagctaggaaacctccagcaactgtcttctttaggaatcagcttcaacaacttctctcagattccagaggtctatgagaaactaactatgttggatagggtggtcatggcaggcaattgtctcgaggtcctaaacctcggcgtactcaataggatgaatcatataaaacacgtggacctccgtatgaatcacttgaaaactatggtcatagaaaatttggaaggtaacaaacacataacccatgttgatctacgtgacaatcgtctgacggatttggacctttcctccttatgcagtcttgagcagttgcactgtgggcggaaccagctccgtgagctgactctctccggcttcagccttcgcacactgtacgctagttctaatcggcttactgcagtgaatgtgtatcccgtcccatctttgctaacattccttgacctttcacgcaatcttttagaatgcgtgcctgattgggcctgtgaggctaagaagattgaagtacttgacgtgagctataatttattaactgaggttcccgtccggatcttatcaagcctgtccctgcgcaaactgatgctgggacacaaccatgttcaaaacctcccgaccctggtggagcatatccctctcgaagtgttggaccttcagcacaacgctctgacccggctgccagacaccctgttttctaaggccttgaacctgcgttacctaaacgcttcagccaactctctggaatctctacctagcgcatgtacgggtgaggaatccttatctatgctacaactgctctatcttactaacaatctgctaaccgaccagtgtatccccgtgttggtagggcacctccacctgaggatactgcacctggctaacaatcagctccaaacttttccagcttccaagttgaacaaactggaacagctggaggagttgaatttaagcggcaataagttgaagaccattccaaccacaatagccaactgtaagcggctacatacactggtcgcccactcgaacaatatctctatttttcctgaaattctgcagcttccgcagatacagttcgtcgacctatcttgtaacgacttaaccgaaatccttatacccgaagcccttcctgctactctccaggatctggaccttactggtaacactaacctggtccttgagcataagactcttgacatttttagtcatatcaccactctgaaaatcgaccagaaacctctccccacaacggatagcaccgttacatctacgttttggtctcatgggttggcggagatggccggacagcggaataagctctgtgtaagcgcgctcgctatggatagctttgccgaaggcgttggcgcggtgtatgggatgttcgacggagataggaatgaggaattgcctcgtctcctgcaatgtactatggctgatgtgctgctcgaagaggtgcagcagagcaccaacgatacggtttttatggccaacacctttttggtcagtcaccgaaagctgggcatggctggccagaaattgggctcttccgcactgctttgctacattaggcccgacacggctgaccctgccagtagcttctcgctgacagtcgcgaacgtagggacatgtcaggctgtcctttgtagaggtggtaagcccgtccctttatctaaggttttcagccttgagcaggatcccgaggaggcccagcgtgtgaaggatcaaaaagctataatcacagaggttcctgaggatctcaaggagttccagacaacggacatccctgttcaccactgtaatttccgtgccgttttgggctgtctttgttctgccagcgtgctcggctcatacgccgggcccgcccctaggtggcggaggacctag

SEQ ID NO: 16573 - DNA, 3972 bp, synthetic construct
  misc_feature 1..3972: note = Description of Artificial Sequence: Synthetic coding sequence
  source 1..3972: mol_type = other DNA
atgaaaagaaacggttccaggaattgcctgaaccggaggagcaggttcgggtcaagagaacgcgactggctgcgggaggatgtcaaacggggctgtgtttacctttatggcgccgataccaccacagcaaccactacaacaactacatcaagctccagcagctcaagttcttcgtctagtgatctccatctggtactctgtaccgtggaaactccggcaagtgagatatgtgctggggaaggcagggaaagtttgtatttacaattgcatggcgacctcgttagacgcttggaaccaacagaacgccctctgcagattgtgtacgactacctcagccggctgggtttcgacgaccccgtcagaatccaggaagaagccactaatcccgatttaggttgtatgatccggttttacggagagaaaccttgccacatggaccgtctcgatagaatactgctaagcggcatttataatgtgcggaagggaaaaacacaactccacaaatgggccgagcggctggtggtcctatgcgggacatgcctcatcgtctccagcgttaaggactgtcagactgggaagatgcacatccttcccctagtgggagggaaaattgaagaggtgaagagaagacagtattccctggcattctcatcagccggcgcccaggcccaaacctatcacgtgtccttcgaaactttggcagagtatcaaagatggcagaggcaggcgtccaaggtggtgagtcagcggatttctacagtcgacctcagctgctactcactagaagaggtcccagagcatctgttctattctcaggacattacatacttgaatctccggcataacttcatgcagctggagcggcccggtgggctggacaccctgtataaatttagccagctcaagggactcaatctctcgcataacaagctaggtctgtttcctattctgctatgcgaaatctctacactgaccgagcttaacctttcttgcaatgggtttcacgacctaccatcgcaaattggaaatctgctgaacctgcagacgttgtgtttggacgggaatttccttacaactcttcccgaggaactggggaatctacagcaactctcctccctgggaatttcattcaataacttctcccaaattccagaggtgtatgagaagttgactatgcttgaccgcgtagtgatggcgggcaactgcctagaagtgctgaacttgggagtgctcaaccgaatgaaccatatcaagcacgtcgacctgagaatgaaccacctcaagacaatggtaatagaaaatcttgaggggaataagcatatcacacatgttgatctgagagataacagactaactgacctggatttatccagcctctgctctctagagcagctccactgcggcaggaaccagcttcgggagctcactctgtccggattcagccttaggactctatatgctagtagtaatagattgactgcagttaacgtgtatcccgtcccgagtttgttgacatttctcgacctgtcacgcaatctgctcgagtgcgtcccagattgggcatgtgaggctaagaaaattgaagtgctcgacgtttcttacaacttgctgacagaggttccggtgagaatactgtcaagcttatctctgaggaaactgatgttgggccataaccatgttcagaacctgccaacgttggtcgagcacatccctcttgaggtgctggacttacagcacaacgcactgactagattgcccgacaccttattctcaaaggcactcaatttgcggtatcttaacgcttccgcaaactctcttgagagcctcccttctgcttgtactggagaggagtccctctctatgcttcagctcctttacctgaccaataatctgctgacagaccagtgcattcctgtgctggtgggtcatctccaccttagaatcctgcatcttgccaacaaccagctgcaaacgttcccagctagcaagctgaataaactggaacagctcgaagagttaaatctgtctggtaacaagcttaaaaccatcccaactaccatcgcaaattgtaaacgattgcataccctggtggcccatagcaacaatattagcattttccctgagatcctccaactgcctcagatacagtttgtcgatctttcttgtaatgatctaaccgaaatcctcattcctgaagccttgccagcaaccttgcaggacttagaccttacaggtaacacgaacctggtgttggaacataagactttagacattttttcacatatcactacacttaagatcgatcagaagcctcttccaacgactgactctactgtaacctcaacgttttggagccacggcttggccgagatggccggccagcgtaacaaactgtgcgtgtctgctctggctatggactccttcgccgaaggcgttggagcagtctacggaatgtttgatggcgaccgtaatgaggagctgccacgcctgctgcaatgcaccatggcagatgtcctactggaagaagtccagcaatccaccaatgatacagtttttatggcgaatacatttttggtgtctcacagaaagctgggcatggctggccagaagctaggaagctccgcgctgctgtgctatattcgaccagacaccgccgatcctgcatcttccttctccttgactgtggctaatgttggcacatgtcaggcggttctgtgccgcggaggaaaacccgtgccactgtccaaggtcttctctttagaacaggacccagaggaggcccagagagtcaaagatcaaaaagccattataactgaagacaataaggtgaatggcgtgacctgttgtacacgcatgttgggatgcacttatctgtacccctggatcctgcccaagccccatatctcttcaacacccctgacaatccaagatgagctgttgatactgggtaacaaggcactgtgggagcacctctcttatacagaggccgtaaacgctgttcggcatgttcaggatcccttagctgcagcaaaaaagctctgcaccctggctcagagttatggttgccaggataacgtgggggcgatggttgtgtatctgaacatcggcgaggagggctgcacttgcgaaatgaacggtctgaccttacctggcccagtgggtttcgcatctaccacaactataaaggacgccccaaagccagccacgccatcaagctcctctggcatcgccagcgagttttccagcgagatgagcacctccgaagtatccagcgaggtgggaagtacagcatccgacgaacacaacgcaggtggactggatacagccctgctgccacggcccgagaggcgatgttccctgcacccaacccccacgtctggcctgttccagcgtcaaccttcttccgctaccttcagtagtaaccagtctgataatggcctggactctgacgacgaccagcccgttgaaggggtgatcaccaatggcagcaaagtggaagtcgaagttgacattcactgttgcagagggcgcgatctggagaatagtccccctctgattgagtcctctcctacgctctgcagtgaggagcatgcccggggatcatgctttggaatacggcgtcaaaactctgtaaatagtggtatgctcctcccaatgtcgaaggaccgcatggagctccagaaatccccaagcacatcttgtctttacggcaaaaagctgtccaacggatccatcgtacctctagaagattcccttaatctgatcgaagttgcaactgaggttcccaaaagaaagacagggtatttcgcagcgccaacacagatggaaccagaggaccagttcgtggtgcctcatgacctggaggaggaggtgaaggagcaaatgaaacagcatcaagattcgcgtttagaacccgaaccgcatgaagaggaccgcactgaaccacccgaagaattcgacactgccttgtag

SEQ ID NO: 16574 - DNA, 2871 bp, synthetic construct
  misc_feature 1..2871: note = Description of Artificial Sequence: Synthetic coding sequence
  source 1..2871: mol_type = other DNA
atgaagagaaatggctcacggaactgcctcaaccgtcgttcaaggttcggctccagagagcgggactggctgcgagaggacgtcaagcgggggtgcgtctatctgtacggagcagacacaacgacggccaccaccactacaacaacatcatcaagttcctcaagctccagtagctcttcggatctgcacttagttctctgcacggtggaaactcctgcctcagagatttgcgcaggagaaggcagagagagtctgtaccttcagcttcacggcgaccttgttcgccggttggagcctactgagcgcccactgcagatagtgtacgattacttgtcccggttaggcttcgatgatcccgttcgcatacaggaagaagccaccaaccctgatcttggctgtatgatacgattttacggcgagaaaccgtgccacatggatagactggaccgtatcctgctgagcggtatatataacgtgaggaaggggaaaacccagcttcataagtgggctgagcgcttagtcgtcctctgcggcacctgtctgatcgtgtcatctgtgaaggactgccaaaccggaaagatgcatattttgcctctggtcggagggaagatcgaagaggtcaagcggagacagtactctttagcctttagttcagctggtgcccaggcccaaacataccatgttagttttgagacgcttgctgagtatcagaggtggcaacggcaagccagtaaggttgtttcccagaggatcagtaccgtcgatctatcttgttactcactcgaggaagtgccagaacatctgttttacagtcaagatattacttacttaaatcttcgccacaatttcatgcagctggaacgcccgggaggccttgataccctatataaattctctcaactgaaaggactgaacctgagccacaacaagttaggtctgtttcccattctactgtgcgaaatatcaactctgacggaactgaacctgagttgcaatgggttccacgacctaccttcccagattggaaatctccttaacttacagactctgtgtctcgatgggaattttctgacaaccctcccggaggagctgggcaatttacagcagttgtcttccctgggtatctctttcaataacttctcccaaatacccgaggtgtacgagaaattaaccatgctggacagagttgtcatggcaggcaattgtctagaagtgctgaatcttggggtactgaaccgtatgaaccacatcaagcatgtcgaccttcgaatgaaccatctgaagactatggtaatcgagaatctggagggcaacaagcacatcactcacgttgacctgcgcgacaacagactgacagacttggatttgtctagcttgtgtagtctggaacaactgcattgtggccgaaatcaacttagggaactgacactctctgggttttccctgagaacgttatacgcatctagcaatcggctcaccgctgtcaatgtctatcccgtcccaagcctcctgacttttcttgacttatcccgaaatctgctcgaatgcgtgcctgattgggcatgcgaggccaaaaagatcgaggtattggacgtttcttataatctactcacagaagtgcccgtcaggatcctgtcctctctcagtctgagaaaactcatgttaggccacaatcacgtgcagaaccttccaactcttgtagaacacatccctcttgaggtgcttgatttgcagcacaatgctttgaccagactgcccgacacgctcttcagcaaggccttgaacttaaggtatctcaacgcctcagccaactcattagagagtctgccatctgcctgcactggcgaagagagtttatcgatgctgcagctcctttatctaactaacaatcttctcaccgaccagtgcataccggtcttggttggccaccttcacctgaggattttacacctggcgaacaaccagctgcagacgtttcccgcatccaaactgaacaaattagaacagctggaggagctgaatttgagtgggaataaattgaaaactatcccgactaccatcgcaaattgtaagcggcttcacactctggtcgcccattcgaacaacattagcatattcccggagatactgcagctgccacaaatccaatttgtggacttaagttgtaatgatctcacagagatactcattccggaggcgctcccagcaacattgcaggacttggacttgaccggcaacaccaacttggtgctggaacacaagacacttgatatattcagccatatcaccacactgaaaatcgaccagaagcctctcccgactaccgattctaccgtgacctccacattctggtcccacggcctcgctgagatggcaggccagcgtaataaattgtgcgtaagtgccttagcgatggattcttttgcagagggcgtgggggccgtgtatggaatgttcgacggtgaccggaatgaggagctgcctcgactcctccagtgcacaatggcagatgtgctgctggaggaggtccagcaatcgactaatgacaccgtgtttatggcgaatacctttctggtgagtcatcgaaaactggggatggcaggccaaaagttaggatcatccgctctgttatgttacatcagacccgacacagcagatccagcttccagtttttcgctaactgttgccaacgtaggaacttgccaggcagtgttgtgccgcggagggaaaccagtgcctctatccaaggttttcagtctggaacaggaccccgaggaggcccagcgggtaaaggaccagaaggcgataatcactgagaactgggtgctgaaccagaagcatttacaagacttccccggggaagataaatag

SEQ ID NO: 16575 - DNA, 3771 bp, synthetic construct
  misc_feature 1..3771: note = Description of Artificial Sequence: Synthetic coding sequence
  source 1..3771: mol_type = other DNA
atgaagcggaatggctcccgcaattgccttaatcggaggtctcggttcggatcacgtgaacgcgactggctgcgtgaggatgtcaaacgtgggtgtgtttacttgtatggtgctgataccacgaccgcaaccaccactacaaccacaagctcaagtagcagctcctccagctcatcctccgacctacatcttgtcctgtgcaccgtggaaactcctgccagcgagatctgtgctggcgagggacgcgagtcactctatctccagttacatggcgatctggtgagacggctggagcccactgaacgtccgctgcagatcgtgtatgactacctgtccagacttggttttgacgatcctgtgcggatccaagaggaagcaacaaatcccgatctggggtgcatgatccgcttctacggcgagaagccatgccacatggatagacttgacaggattttgctgtcaggaatttacaatgtcagaaaggggaagactcaacttcataagtgggccgaacgattggttgttttgtgtggtacttgtctgattgttagctcggtgaaagattgccagaccggcaagatgcatatactcccacttgtcggcggaaagattgaggaggtcaagcgaaggcagtacagtctggcgttctcgagcgctggggcccaggctcagacgtatcatgtctcctttgaaactttggccgagtaccaacgttggcagagacaggcatccaaagtcgtaagccagaggatttccactgtcgatttgagttgttacagcctcgaagaagttcccgagcacttgttctattctcaggatatcacttatctgaatctgagacacaatttcatgcaactcgaacgccccggtggacttgacacgctgtacaaattctcacagttaaaagggctgaacttgtctcataacaaacttggtttgtttcccatcctattgtgtgagatcagcacgttaactgagttgaacttaagctgtaacgggtttcacgatttaccatcacagatcggtaatctgttgaatttacagacactgtgcttagacggcaattttttaactacacttccagaggaacttggaaacctacagcagctttcaagcctgggaattagctttaataacttttcacagatcccagaggtgtacgagaaattgaccatgttggatagagttgtgatggcaggaaattgtctcgaggttttgaatctgggcgtgctgaaccgaatgaaccatatcaagcacgtggatcttagaatgaatcacctgaagacaatggttatagagaacttggaaggcaacaaacacattacgcacgtggatttgcgagataacagactcaccgacctcgatctgtctagcctgtgttcccttgagcaactgcactgcggccgcaaccaactgagagaactcaccctgtccggattttccctgaggaccctctacgcttcctctaataggctgacagctgtcaatgtatacccagtcccctcattgcttacatttctggacctgtccagaaacctcttggaatgtgtgcctgattgggcctgcgaagccaagaaaattgaggtccttgatgtgagttataaccttttgactgaggtccctgtacgtattctgagcagcctgagcctgcgtaagcttatgttaggccacaaccacgttcaaaacctgccaaccctggtggagcacattcccctagaagtgttggacttgcagcacaacgctttaacccgattgccggacacactgttctcgaaagcgttgaataaactcaataagctcgaacaattagaggaactgaatctgtccggaaacaaattaaaaacaattcctacaacgatcgctaattgcaaacgcctgcatacgctggtggcacactctaataatatcagtatatttcctgagatcctccagcttcctcagatacaattcgtcgacctgtcatgtaatgatctgaccgagatcctaatccctgaggctcttcctgctacgctgcaggatttagatctgacaggcaacacgaacttggtcctcgaacataagacacttgacattttttcacacatcacaacccttaagattgaccaaaagcccctccctaccacagattctacggtgacctcaacattctggagccatggcctggctgagatggccggccagcgaaacaagctgtgcgtgagtgctttggcgatggatagcttcgcggagggcgttggtgccgtctacggcatgttcgatggtgacaggaatgaggaactaccccggctgttgcagtgtaccatggccgatgtcctgctggaggaagtgcagcagtcaaccaatgatacagttttcatggccaatacgtttctggtgtcacacaggaagctcgggatggccgggcagaagctggggtcctcggcgttgctgtgttatatacgcccggacactgcagaccctgcttcatctttttctcttactgtcgccaatgtggggacctgtcaggcagtcttatgccggggaggaaaacccgttcctttaagcaaggtcttttcactggagcaggacccggaggaggcccaacgtgtcaaggatcaaaaagctatcatcaccgaggacaacaaggtgaatggtgtaacgtgttgcaccaggatgttgggatgtacctatctatatccctggatcttgcctaagccccacatttcttctacccccctgaccattcaggacgaactcctgatcctgggcaacaaagccctgtgggagcacctgtcttacacggaagcagtgaatgccgtccggcatgtgcaagaccccctcgccgccgccaaaaagctctgcacgctggctcagagttacgggtgccaggacaatgtcggggcaatggtagtatacctgaatataggagaggaagggtgtacctgcgagatgaacggattaactctgcccggaccagtgggttttgcctctactactactataaaggatgcccctaaaccggctacccccagctcatcgagcggcattgcttccgagtttagctcagagatgagcacaagtgaggttagttcagaggtgggttccactgctagtgatgagcataatgccggcgggctggacaccgccctattgcctaggcccgagcggaggtgctctctccaccccactcctacctccggtctttttcagaggcagcccagtagtgccactttttcctccaatcagtccgataacggactcgacagtgatgacgaccaacctgtcgagggagtgatcacaaacggaagcaaggtggaggtagaggtcgacatccactgctgtcgcgggcgggatttggagaattctccgccgctcatagagtcgtcaccaaccttatgtagcgaggaacatgctagagggtcatgcttcgggatccgccgacagaactctgtgaactcagggatgctgcttccaatgtccaaagataggatggagctccagaaatcacctagcacctcttgcctgtacggaaaaaaactgtctaatggtagcatcgtacctctggaggacagccttaacctaatcgaggtcgccactgaagttcctaagcggaagactggatatttcgccgcgccaactcaaatggagcctgaagatcaattcgtggtacctcatgaccttgaagaagaggtaaaggagcagatgaaacaacaccaggacagccgcctcgaaccggaacctcacgaggaagatcgcaccgagcctcccgaagagtttgacactgctctgtag

SEQ ID NO: 16576 - DNA, 1272 bp, synthetic construct
  misc_feature 1..1272: note = Description of Artificial Sequence: Synthetic coding sequence
  source 1..1272: mol_type = other DNA
atgaaacggaatgggagtcggaattgcctaaacaggagaagccggtttggttctcgcgagcgcgactggcttagagaagatgttaaaaggggctgcgtgtatttgtacggagccgacaccacgacggccaccaccacgacaaccacttcctctagctcctcaagcagctcttcctcgagcgacttacacctagtactctgcaccgttgagacccccgcctctgagatttgcgcaggggagggccgagaatcactttacctgcaacttcacggggatctggtgcggcggttggagccaactgagaggcctctacaaattgtttacgattaccttagccggttgggatttgacgatcctgtccgcatccaggaggaggctaccaaccctgacttggggtgtatgatcaggttttacggcgagaagccttgtcatatggaccgactggacaggatattgctttcgggaatttataacgtgcgcaagggcaagactcaattacacaagtgggccgagcgcttggttgttctttgcggaacttgcttaatcgtatcctccgtgaaggattgtcagacaggcaagatgcacattttaccactagtgggaggaaagattgaagaagtgaaacgcaggcagtattctcttgccttttcatccgcgggcgctcaggcgcagacataccacgtgtcttttgaaaccctggcggagtatcagcgctggcaaagacaagcttctaaagtggtttctcagcgaatcagcacggtggacttaagttgttactctcttgaggaggttccagagcacctgttctactcgcaggatattacatacctgaacttaaggcacaacttcatgcaattagaaaggcccggcggtctcgacactttgtacaagtttagtcagctgaagggccttaacttgagccacaacaaactgggcctcttcccgattctgttatgtgagattagtactctgacggagttgaatctaagttgtaatggtttccatgacctgcctagccaaatcggaaacttgctcaatcttcagacactctgtctcgacggaaatttcctaaccacccttcctgaagaactgggaaatctgcagcaattgagtagtctgggaatatcctttaataacttctcccagattcctgaagtgtacgaaaaacttacaatgctggatagagtggtgatggcaggtaattgtttggaggtccttaatcttggggtgctgaataggatgaatcacattaagcatgtcgacctaagatag

SEQ ID NO: 16577 - DNA, 501 bp, synthetic construct
  misc_feature 1..501: note = Description of Artificial Sequence: Synthetic coding sequence
  source 1..501: mol_type = other DNA
atggccggacaacgcaacaagctctgcgtgtctgccttggcgatggactcgttcgcagagggcgtcggggcagtgtatggcatgttcgacggggacagaaacgaggagttgcccaggcttctgcaatgcaccatggcagacgtgctgctcgaggaggtgcagcagagcacgaacgataccgtgttcatggccaacacatttctcgtgagccaccggaaactcggaatggctggacagaaactgggctcctccgccctcctctgctatataagaccagacaccgccgaccccgctagctccttcagtctcacagtcgctaacgtcggtacctgtcaggctgtactctgccgaggcgggaagccagtaccactcagcaaagtgttctcactggaacaggatcctgaggaggcccagagggtgaaagatcagaaagcaattataaccgagaattgggttctgaaccaaaagcacttgcaagacttcccgggggaagacaaatag

SEQ ID NO: 16578 - DNA, 3972 bp, synthetic construct
  misc_feature 1..3972: note = Description of Artificial Sequence: Synthetic coding sequence
  source 1..3972: mol_type = other DNA
atgaagcggaacggcagtaggaattgccttaatcgccgcagccggtttggctcacgggaaagggattggcttagggaggacgtgaagaggggttgtgtctatttgtacggtgcggacacaactacagctaccactaccaccactacatccagtagttcttctagctcctcatcatcttcagacttgcatttggttctgtgcactgtagaaacccctgcttccgaaatctgcgcaggtgagggtagggagtctttgtacttgcagctacatggagatctcgttcgtcggttagagcccactgaaaggccgctacaaattgtatacgactatctgtcacgcttgggattcgatgatccagtaagaattcaagaggaggccacgaatccagatctgggatgtatgatccgcttctatggtgagaaaccgtgccatatggacaggctggaccgaatcctgctaagtggcatatataatgttcgcaagggaaaaacccagctgcataaatgggccgagagacttgtggtactctgtggcacgtgtctcattgtatcctcagtgaaggattgtcagaccgggaagatgcacatactgccattggtcggcggtaagattgaagaagtcaaacgcaggcagtactcgctggctttctcatccgccggggcacaggctcagacctatcatgtgagctttgaaactttggccgagtaccagagatggcaacgccaggcctcaaaagtggtctcccagaggattagcacagtcgacctgtcctgttacagcctcgaggaagtcccggagcaccttttctatagtcaggacataacttacctaaacttgcggcacaatttcatgcagctcgagcggccaggaggcttagatactctttataagttctcccagttgaaaggccttaatctttcccataacaaacttggtctgttccccattctactctgcgagatatcaaccctgaccgagctgaacctatcgtgtaacggattccacgatctgccatcgcagattggaaaccttctgaatttgcaaaccctgtgcctggatggaaactttctcactacattacctgaagagttggggaatttgcagcagctctcaagtctcggtatctcctttaataatttcagtcaaattcctgaggtttacgagaagttaactatgcttgacagggtcgtgatggccggcaactgtttagaagtgttgaacttgggcgtactcaatcgcatgaaccacattaaacacgtagatctccgaatgaaccacctcaaaacgatggtgatagagaacttagaaggcaataaacacatcacacacgtcgatttgcgagataatcggcttacagacttggatctcagcagcctgtgctctctagaacagttacactgtggccgcaaccagctgagagagctgacgctgagtggatttagcctcagaactctgtacgcttccagtaataggttaactgccgtgaatgtttaccctgtgccctccctgctcaccttcctggacctgtctcgaaacttactcgagtgcgtgccagactgggcatgtgaggctaagaaaatcgaagtgctcgacgtgtcatacaatttgttaacagaagtacccgtccgaatcctatccagcctctccctacggaagctcatgctgggtcacaaccacgtgcagaatctgcctactctggtggaacatatcccccttgaagtgctcgacctccaacacaatgctcttacccgattgcccgataccctctttagtaaagccctgaatttgcggtatctcaacgcatccgcaaactcccttgagtcactgccctctgcctgtactggggaggagagcctgtcaatgctgcagctgctgtatttaaccaataacctgctaaccgaccaatgcattcctgtgctcgtgggccatcttcatctgcgcattctacacctggctaacaatcaactgcagacgtttcccgcctcgaaactgaacaagctggaacagctggaggagttgaatctgtcaggtaataaactaaagactataccaactacaatcgctaactgcaagcgattgcatactctcgtggctcatagtaacaatattagcatatttcccgagatcctccagctaccccagatccagtttgtcgatctttcatgtaacgatctaacagaaattttaattccggaggctctccctgctaccctgcaggaccttgacttgacaggtaacacaaacctcgtcttagagcataaaacccttgacatcttctcccatattacgacgctcaagattgaccaaaagccgctgcctacgactgacagcaccgtgacctctaccttttggtcccatggcctcgccgagatggccggccaacgcaacaaactgtgtgtctcagcgctggctatggatagcttcgccgagggggtgggtgccgtgtacgggatgtttgatggcgaccggaatgaggagctgcctcggttattgcagtgtacaatggccgacgtcctgctggaagaagtgcaacagagcactaacgatacggtgtttatggctaacacttttctagtctcgcacaggaaactcgggatggcgggtcagaaactgggatcttcagcacttctctgttacattaggcctgatacagctgatccggcttcttctttcagtctgacggtggctaatgtaggaacttgtcaggcagtgctatgcagggggggtaagccggtccccctgtccaaagtgttttcattggaacaagatccagaagaagcacagcgggtaaaagaccagaaggccataattacagaggataacaaagtgaacggagtgacatgctgcacaaggatgctcgggtgtacatacctgtatccatggattctccccaagcctcacatcagctctacaccactgactatccaggatgagttgctgattttgggcaacaaagccctctgggaacacttgtcctataccgaggccgtgaacgccgttcggcacgtccaggaccccctggcggcagccaaaaaattgtgcacattagcacaatcatatggttgccaggacaatgtgggggccatggtggtgtatctgaatattggggaagagggatgcacctgtgaaatgaatgggctaaccttaccaggaccagtcggtttcgctagcaccacaaccattaaggacgctcctaagcctgcaaccccaagctcttcttcaggcatcgcctctgagttcagttcagagatgtcaacctctgaagtgtcgagtgaagtggggagtactgcttcagatgaacataacgcaggcggcttagacacggccctactgcctcgtccagaaaggcgctgtagcttacatcctacccccacctctgggcttttccagcgacaacctagttcagcaaccttttcctcaaatcagtcagacaatgggctcgattctgacgacgatcagcctgtggagggtgtgatcactaacgggtcgaaggtcgaggtggaagtagacattcattgctgccgagggcgcgatttagagaattcaccacctttgatcgaatccagcccaacactgtgcagcgaagagcatgcacgcgggtcatgcttcggcatcagaagacagaactcggtgaacagcggaatgctcctaccgatgagtaaggatcgcatggaactgcagaagtccccttcaacctcctgcctgtatggaaaaaagttgtccaacggctccattgtgcctctggaagattctctgaatttaattgaggtagccaccgaagtgccaaagcgcaagacggggtacttcgcggcacctacccagatggaaccagaggatcagttcgtagtgccgcatgatctggaggaggaggtgaaagaacagatgaagcagcaccaggattcccgactggagcccgaacctcacgaagaagatcgcaccgaaccccctgaggaatttgataccgccctgtag

SEQ ID NO: 16579 - DNA, 1212 bp, synthetic construct
  misc_feature 1..1212: note = Description of Artificial Sequence: Synthetic coding sequence
  source 1..1212: mol_type = other DNA
atgacagccattattaaggagatcgtgtcccggaataagcgccggtatcaggaggacggtttcgatctggatctaacctacatttatcccaacattatcgccatgggctttcccgcagaacgattagagggcgtataccgaaacaatatcgacgatgtcgttcgctttctggattctaagcataagaaccactacaagatatacaatctttgcgccgaacgccactatgataccgctaagttcaattgcagagtcgcacagtatccttttgaggaccacaaccctcctcaactggagttaattaaaccattttgcgaggatctagaccagtggctctctgaggacgacaatcatgtggccgccatacattgcaaggctggcaagggacgcacgggagtaatgatctgtgcgtacttgttacacaggggaaagtttttaaaagcccaggaggctttggacttttacggggaggtacgcacaagagacaagaagggggtgaccattccaagccagagaaggtatgtctactattacagctacctcctgaagaaccacctagattataggcctgtcgcccttctttttcataaaatgatgtttgagaccatcccaatgttctccggaggaacttgcaatccgcagtttgttgtatgtcaattgaaagtcaagatctatagtagcaactccggacctacacgtagagaggataagttcatgtattttgaattcccacagccgctgccagtgtgtggtgatattaaggtggaattcttccataagcagaacaaaatgttaaagaaggataagatgttccatttctgggtgaacacattcttcatccccggccctgaggaaacgagtgagaaagtcgaaaacggcagtttgtgcgaccaggaaatcgacagcatttgttcgattgagagagccgacaacgataaggagtatcttgtgctcaccttaaccaagaatgatctagataaagccaataaggataaggcgaaccggtatttctcccctaatttcaaggtgaagctgtattttacgaagaccgtagaagaaccatccaaccccgaggccagttccagtacaagcgtcacgcctgacgtatccgacaacgagcccgatcactatcgctattcggacacaactgactccgacccggagaatgagccttttgatgaagaccagcacacgcagatcacaaaagtgtag

SEQ ID NO: 16580 - DNA, 531 bp, synthetic construct
  misc_feature 1..531: note = Description of Artificial Sequence: Synthetic coding sequence
  source 1..531: mol_type = other DNA
atggggaaagctgcagccgcagttgctttcggggccgaagtgggggtacgcctggcactctttgctgccttcttggtgacggaactcctgcccccatttcagcgcctgattcaacctgaggaaatgtggctttatcgaaatccatacgttgaggccgagtactttccgacaaagcctatgttcgtcatcgcattcctcagtcccctttcattgatttttttggcaaagttcttaaagaaagctgacactcgagattcgcggcaggcatgcctcgctgcctctttggcactcgcactgaacggggtgttcaccaatacaatcaaactaattgtgggtaggccacggcctgattttttctacagatgcttccctgatggtctcgcacactctgacctgatgtgtaccggtgataaggacgtagtgaatgaggggcggaaaagtttcccctcaggtcactcttcctgtatgaatatcatttggactctgccatatgcatgcttccacatcatcgaattcaatctggaatcctag

SEQ ID NO: 16581 - DNA, 651 bp, synthetic construct
  misc_feature 1..651: note = Description of Artificial Sequence: Synthetic coding sequence
  source 1..651: mol_type = other DNA
atgggaaaagcagccgcggctgttgcctttggcgctgaagtgggcgtgcgactagcactttttgccgccttcctagtgacagagctcctgcctccttttcagagactgatccagcctgaggagatgtggctttacaggaatccttatgtggaagctgagtattttcccacaaagcccatgttcgtgatcgcatttctttcacccttgtcactcatcttcctggcaaagtttctgaagaaggccgacacacgcgacagcagacaagcctgtttggctgcatccctggctctggcgctcaacggagttttcaccaacaccatcaagttaatcgttggccggccgagacccgactttttctataggtgttttccagatggactcgctcactccgatctgatgtgtactggagacaaggatgtcgtcaatgaaggccgaaagtcgtttccgtccggtcattcaagttttgcttttgccggactggcattcgcgagcttttacctggccggtaagttgcactgttttaccccacaaggccgtggcaaatcatggcgattttgcgcctttctcagtcccctgctgttcgccgctgtaattgctctctccaggacctgtgattacaagcaccattggcaggggcctttcaagtggtag

SEQ ID NO: 16582 - DNA, 795 bp, synthetic construct
  misc_feature 1..795: note = Description of Artificial Sequence: Synthetic coding sequence
  source 1..795: mol_type = other DNA
atggggaaagcggccgcagctgtggcttttggggctgaggtgggcgtgaggctggctctattcgccgctttcctcgtcaccgaattactgcccccttttcaaaggctcatccagcctgaagagatgtggctatacaggaatccctacgtcgaggctgagtacttcccaaccaagcccatgtttgtaatagcattcctgagcccacttagcctgatctttctggccaagtttttaaaaaaggccgacactagagactcacgccaggcctgcctcgccgcttctcttgccctcgccctgaacggagtgttcacgaacacaatcaagcttatcgtggggcgaccacgccctgactttttctatcgatgctttcctgacggcttggcccatagcgacctaatgtgcactggcgacaaggacgtggtgaacgagggccggaagtcattcccgagtggacattcctctttcgcctttgcgggcttggcattcgcatctttctatctggctggtaagcttcactgtttcactccacagggccgcggaaaaagctggcgcttttgtgcctttctctccccactgctgtttgcggccgtaatcgccttgtccagaacttgtgattacaagcaccattggcaggacgtgttagtggggtccatgatcggcatgaccttcgcttatgtctgctatcggcaatactatccccctctgacagacgccgagtgccataaaccttttcaagataagctggtattgtccacggcccagaaaccaggcgacagctattgcttcgatatttag

SEQ ID NO: 16583 - DNA, 1086 bp, synthetic construct
  misc_feature 1..1086: note = Description of Artificial Sequence: Synthetic coding sequence
  source 1..1086: mol_type = other DNA
atgcacggagactatactctaacccttagaaagggcggtaacaataagcttattaagatatttcatcgggacggtaagtatgggtttagcgacccgttgacgttttctagcgtagtggagctgatcaatcactacagaaatgagtccttggcccaatacaatccaaagcttgacgtgaaactcctgtatcccgtgtctaagtaccagcaagaccaggttgtgaaagaggacaatattgaggctgtgggcaagaaattgcatgagtacaatacacagttccaggaaaaatcgagagagtacgatcgcttatacgaagagtacactcggacctctcaagaaattcagatgaaaagaaccgctatcgaggcctttaacgaaactattaagatcttcgaggagcagtgtcaaacgcaggagagatactcgaaggagtacatcgagaaatttaagagggaaggaaatgagaaggaaatccaacggatcatgcataactatgacaaactgaaatcccgaatttcagagattattgattcccgcaggcgattagaggaagatctgaagaagcaggccgccgaatatcgtgaaattgacaagaggatgaattccatcaagcctgacttaatccagctccggaaaactcgggatcagtacctcatgtggctcacccaaaaaggagtgagacagaaaaagctgaatgaatggctcggcaatgagaatacagaagaccagtactctctcgtagaagatgatgaggacctcccacaccacgatgaaaaaacttggaatgtgggaagctccaatagaaacaaagccgagaaccttctccgcggcaaaagggacggtactttccttgtccgggaatccagcaaacaggggtgttatgcctgcagcgtggtggttgacggcgaagtgaagcactgtgtgattaataagacagccaccgggtatggtttcgctgaaccatataacctgtattcttcactgaaagagttagtgctacattaccagcacaccagtctggtgcagcacaatgacagtctgaacgtgacactggcttaccccgtctacgctcagcagagacggtag

SEQ ID NO: 16584 - DNA, 3207 bp, synthetic construct
  misc_feature 1..3207: note = Description of Artificial Sequence: Synthetic coding sequence
  source 1..3207: mol_type = other DNA
atgcctcccaggccctcttccggggagctgtggggaattcacttgatgccaccacgaattctcgtggaatgtctgctgcccaacggaatgatcgtgacgctcgagtgtctccgtgaggccaccttaatcactataaagcatgagctctttaaggaagcccggaaatatcctctgcatcagctcctgcaggacgagagttcctatatttttgtctccgttacccaggaggcggagcgagaagaattcttcgatgagacacggcgcctctgcgatctgcggctgtttcagcccttcctaaaggtaattgagccagtggggaatagagaagagaagattctgaaccgggaaatcgggtttgccatcggcatgccggtgtgtgaattcgacatggtgaaggaccccgaagtccaagatttcagacggaacatcctcaatgtgtgtaaagaggcagtggatctgagggacctgaattcgccacacagcagggccatgtacgtgtacccgcccaatgtcgaaagttcccccgagcttcctaaacatatctacaacaaactcgacaaggggcagattatcgttgtcatctgggttatagtatcaccaaacaacgacaagcagaagtatacacttaagatcaaccacgactgcgtgcctgagcaagtgatcgccgaagctatccgaaagaagacccgttctatgctgctgtccagcgaacagctgaagctctgcgtcctcgagtaccaggggaaatatattttaaaagtctgtggctgtgatgagtattttctcgagaagtaccctctttcccagtacaagtacattcggagctgtattatgttggggagaatgcccaacctgatgctgatggctaaagagagcttgtattcccaactgccaatggattgtttcacaatgcccagctattccagaaggatcagcaccgctaccccttacatgaacggcgagactagtaccaaatcactgtgggttataaatagcgccttaagaatcaagatcttatgtgcaacttacgtgaatgtcaatatccgggacatcgataaaatttacgtgcggactggcatataccatggcggggagccactctgcgataacgttaatactcagcgggttccctgcagtaatcctcgctggaatgaatggctgaactacgatatatacatcccagatctgccacgtgccgctaggctctgcttgtctatttgctcagttaagggtaggaagggcgccaaagaagagcactgtccactggcttggggcaacataaatctgttcgactacacggacactttggtcagtggtaaaatggcgctgaacctctggccggttcctcatggccttgaggatctcctgaacccaatcggcgttactggtagcaacccgaataaggagacaccttgcctcgaactcgaatttgactggttcagctctgtggtcaagtttccggatatgtccgtgatcgaggagcacgccaactggtccgtgtcacgcgaagcgggttttagctactctcacgcagggctttcgaatagactggccagagataatgagctgcgtgaaaatgacaaggagcagttgaaggcaatctctaccagagacccactgtcagagattactgagcaggagaaagacttcctgtggagccataggcactattgtgttacaattcctgagatactacctaaactgctcctcagcgtcaagtggaattcacgcgacgaggtagcgcagatgtattgcttggtaaaggactggccccctatcaagcccgagcaggcaatggagttacttgactgtaactatcccgacccaatggtccgaggcttcgccgtgagatgcctcgaaaaatacttaacagacgataagttgtctcagtatctgatacagctggtacaggtgcttaaatacgaacaatatctcgacaatctcttagtgaggttcctgctcaaaaaagctctgacgaaccagcggattgggcattttttcttctggcacctgaagagcgagatgcataataagacagtgtctcagcgcttcggccttctcctggaatcctattgtcgagcctgcgggatgtacttgaagcaccttaataggcaagtggaggcgatggagaaattaatcaacctcacggatatactgaagcaggagaagaaggatgagacccagaaggtgcaaatgaaatttctggtggagcagatgaggcggcctgatttcatggatgcactacagggatttctaagtcccctcaatccagcgcaccaattgggaaatctgcgcctggaagaatgtcgcatcatgtcaagcgcaaagcggccactctggctcaactgggagaaccctgacatcatgtcagagctcctctttcagaacaatgagatcattttcaaaaacggcgacgacctgaggcaagatatgctgaccctccagattatacgcataatggagaacatctggcagaaccaggggttggacttgagaatgcttccttacggatgtctgagcatcggagattgtgtcgggctcattgaagtcgtgcggaactctcatactattatgcagatccagtgtaaaggcggcctgaagggggctctccaattcaattcacacacactgcatcaatggctgaaggacaaaaacaagggtgagatatacgatgcggcaatagatctgttcacacggagttgtgccgggtactgcgtggcaaccttcatcctgggaatcggtgataggcacaatagtaatataatggtcaaagacgacggccaattgttccatatcgacttcggtcattttctcgatcataagaagaagaaatttgggtataagagagagagggtgccctttgtgctcacacaagactttttgatcgtgatcagcaagggggcacaggagtgtactaaaactagagagtttgagaggtttcaggaaatgtgctacaaggcctaccttgccattcgccagcatgctaatctcttcatcaacttatttagtatgatgctggggtccggcatgcctgaactccagagttttgatgatattgcttatatcagaaaaaccctggcattggacaagactgagcaggaagctctcgagtattttatgaagcagatgaacgatgctcatcacggaggctggactacgaagatggactggatcttccatacaattaagcagcacgctctgaattag

SEQ ID NO: 16585 - DNA, 357 bp, synthetic construct
  misc_feature 1..357: note = Description of Artificial Sequence: Synthetic coding sequence
  source 1..357: mol_type = other DNA
atgccaccccggccgtcgtccggggaactgtgggggatccacttgatgcctcctaggatccttgtagagtgtctgctgccaaatggcatgatcgtgaccctagaatgtctccgggaggccaccctgatcacaataaagcatgaactgttcaaggaagctcgtaagtatccactacaccaactcctccaagatgagtcttcttacatctttgtttcagtgacgcaggaggctgagcgggaggagttttttgacgaaacgcgaaggctgtgcgatctgcgtctgtttcaacccttcctgaaggtgattgagccagtgggcaaccgcgaagagaaaatcctgaatcgcgagattgggtag

SEQ ID NO: 16586 - DNA, 66 bp, synthetic construct
  misc_feature 1..66: note = Description of Artificial Sequence: Synthetic coding sequence
  source 1..66: mol_type = other DNA
atgccaccccgtccatcctcaggcgaactgtggggtatccacttaatgccaccgcggatactgtag

SEQ ID NO: 16587 - DNA, 3213 bp, synthetic construct
  misc_feature 1..3213: note = Description of Artificial Sequence: Synthetic coding sequence
  source 1..3213: mol_type = other DNA
atgtgcttttcctttattatgccccctgcaatggccgacattttggatatttgggcagtcgattctcagatcgcatccgacgggagtatacccgtggatttcctgttgcccaccggtatttatattcaattagaggttccccgcgaggccaccatttcttacatcaagcagatgctgtggaaacaggtgcacaattatccaatgttcaacctcctgatggacattgatagttatatgttcgcatgtgtcaaccagactgccgtgtatgaggagttggaagatgagaccaggaggttgtgtgacgtcaggcccttcctgccagttcttaagctggtaactcgctcgtgcgatcccggtgaaaagctggacagcaaaatcggagtcctgatcgggaagggactgcacgaatttgactctctgaaggatccggaggttaatgagtttcgccgtaagatgcgcaaatttagcgaagaaaaaattctgtcccttgtgggcctttcttggatggattggctcaaacagacttatcctcccgagcacgaaccgtccatccccgagaatctggaggataaattgtatggcgggaagctgatcgtcgccgtgcactttgagaattgtcaggacgtgttctcttttcaggtaagccccaatatgaatcccattaaagtgaacgaactggccatccagaagcgactgaccattcatggaaaagaggatgaggtgagcccatatgactacgtccttcaggtatctggtcgtgtagagtatgtgtttggggatcatcctctcatccagtttcagtacattcggaactgtgtcatgaaccgggcactgcctcatttcattctggtcgagtgttgtaagatcaagaaaatgtatgaacaggaaatgattgctattgaggccgctatcaacagaaacagtagcaacctgcccttgccactccctccaaagaagaccagaattatctcacatgtctgggaaaacaataatcctttccagatcgtattggtgaagggtaacaaattgaacactgaagaaacggtgaaggtgcatgtccgcgcagggctgtttcatggtaccgagttactctgtaagaccattgtgtcctcggaagtctccgggaagaatgaccatatctggaatgaaccactggagttcgacatcaacatttgtgatctgccccgcatggcccgtctgtgttttgcggtatatgcggtactggataaagtgaaaaccaagaaaagcaccaagaccatcaatccctccaagtatcagacgatcagaaaagcaggaaaggtgcattaccccgtggcttgggtgaacacaatggttttcgattttaaagggcagctccggaccggggacattatactgcatagctggagcagcttcccggacgaactggaggaaatgctgaaccctatgggaactgttcagactaatccctacacagagaatgccacggcgcttcatgtgaaatttcccgagaataagaaacagccttactactacccgccattcgacaaaatcattgagaaagctgccgaaattgcaagcagtgactcagctaacgtttcgagcaggggaggtaagaaatttctgcccgtcctgaaggagattcttgatcgcgaccctctatcacagttatgtgagaacgagatggatctcatctggactctgcgccaagactgccgggagattttcccacagtccctgcccaaattgctgctgtcaatcaaatggaacaagttggaagacgtcgcccagttgcaggccctgctacagatatggcccaagctcccccccagagaggcgcttgaattactggatttcaactatcccgatcaatatgtgcgggagtatgcagtgggctgtttaaggcagatgtcggatgaagagctgagtcagtacttacttcaacttgttcaggtgttgaagtacgaacctttcctggactgcgctctctctcgctttctgctggaacgcgccctagggaatcggcgcatcggtcagttcttgttttggcacctgcggtccgaagtgcatatccccgccgtaagcgtccagttcggtgtgatccttgaggcatactgcagggggtctgtcggccatatgaaggtgctctctaagcaggttgaggcactgaacaagctgaaaacacttaatagtctaataaagttgaatgccgttaaacttaatcgggcaaaaggcaaggaggccatgcacacctgcctgaaacagtccgcgtaccgggaggcactgtctgacctgcagtctcccctgaatccatgtgttattctgtctgaactgtacgtggagaaatgtaagtatatggactccaaaatgaagcccctgtggttagtatacaacaacaaggtgttcggggaagacagtgtgggagtgatctttaaaaacggagatgatttgagacaggatatgctaacacttcagatgctgagactaatggatctgttgtggaaggaggcgggactcgacttgagaatgctgccttatgggtgccttgcgacaggagacaggagcggtcttattgaggttgtgagcacaagcgagactatcgcagacattcagctgaactccagcaatgtggccgccgccgctgcattcaataaggatgctctcctaaattggctgaaggagtacaactccggagacgatctggacagggccattgaagaattcacgttatcttgtgcaggatattgtgtcgcctcctatgtcctggggattggggacagacattctgataacattatggtaaagaagacaggccagctctttcacatcgatttcggccacattctgggcaactttaagtcgaagtttggaatcaagcgtgagcgggtgccgtttattctgacctatgactttattcacgtgatccaacagggaaaaactgggaataccgagaaatttggcagattccgccagtgttgtgaagacgcctatctgattctcagacggcatggcaacttgttcatcactctcttcgccctcatgctcacagcaggtctacctgagctgactagcgtgaaggatatccagtacctgaaagactcactcgcactggggaaaagtgaagaggaggccttaaagcagttcaaacagaagtttgacgaagccttgcgagagtcgtggaccacaaaggtaaactggatggctcatacagtgcgcaaagactatcgctcttag

SEQ ID NO: 16588 - DNA, 303 bp, synthetic construct
  misc_feature 1..303: note = Description of Artificial Sequence: Synthetic coding sequence
  source 1..303: mol_type = other DNA
atgtgctttagttttattatgccccccgctatggcagacatattggatatctgggctgtcgattcccagatcgccagcgatgggtctatccccgtggattttctgctccctactgggatctatattcagctggaggtcccccgagaagcgaccatctcatacatcaagcagatgctatggaagcaggtgcacaactatccgatgttcaatttattaatggacattgacagctacatgttcgcttgcgtgaatcagactgccgtttacgaggagctcgaggacgaaacacgacgactgtgctag

SEQ ID NO: 16589 - DNA, 171 bp, synthetic construct
  misc_feature 1..171: note = Description of Artificial Sequence: Synthetic coding sequence
  source 1..171: mol_type = other DNA
atgtgctttagttttatcatgccacccgccatggcagacatcctggacatctgggcggttgactctcagattgcaagcgacggatccatccctgttgattttttgctgcctactggcatttatatccagctggaagtgccaagagaagcaactatttcttacatcaaatag

SEQ ID NO: 16590 - DNA, 3213 bp, synthetic construct
  misc_feature 1..3213: note = Description of Artificial Sequence: Synthetic coding sequence
  source 1..3213: mol_type = other DNA
atgtgctttagcttcattatgcccccggcgatggcagatatcctggacatctgggccgtagactctcagatcgcctcggatggaagtatccctgtggactttctcctccccactggcatctatattcaactcgaagtgccacgcgaagctaccattagctatatcaagcagatgctctggaaacaggtgcataattaccccatgtttaacctgctcatggacatcgactcttacatgttcgcttgtgtgaaccagacggccgtgtatgaggagttggaagacgagaccagacgcttgtgcgatgtaagacctttcctgcccgtgttgaagctcgtgaccagatcttgcgaccccggcgagaagcttgattcaaagatcggggtgctgatcggtaaggggctccacgaatttgatagcctcaaggaccctgaagtgaatgagtttagacgcaagatgaggaagtttagtgaggaaaagatcttatccttggttggcctgtcttggatggactggctaaaacaaacttatccgccagaacacgagccctctatcccagagaacctggaagacaagctctatggagggaaactcatcgtggctgtgcactttgaaaactgtcaagacgtttttagtttccaagtttcacctaacatgaaccccattaaggtcaatgaactggccattcaaaaacgactgacaatccatggaaaggaggatgaggtgtccccttatgactacgtgttgcaggtgtccggacgggttgagtacgtttttggcgaccaccctctgatccagtttcagtacatccgcaattgtgtgatgaatcgggctctgcctcatttcatcctcgttgagtgctgtaagattaagaaaatgtatgagcaagagatgattgccattgaggccgctatcaaccggaactccagtaacctccctctgcctctgccccccaaaaaaacacggattatctcccacgtgtgggagaacaataatcccttccagatcgtgcttgttaaggggaataagcttaatactgaggagacggtcaaagtacacgtaagggccgggctctttcacggcactgagctcctttgcaagacgatcgtctccagtgaagtctctggtaaaaacgaccacatttggaatgagcccctggaattcgacatcaatatctgcgacctcccgagaatggcacgcctttgtttcgctgtgtacgctgttcttgacaaggtgaaaaccaagaagtcaacaaagacaattaatccctcaaaataccagacaatccgaaaggcgggcaaagtgcattaccccgtggcatgggttaacaccatggtctttgatttcaaggggcagcttcggaccggagatataatcttgcattcctggagcagttttcccgatgagcttgaagaaatgctcaatcctatgggtacggtgcagactaatccatatacggagaatgccacagcactgcacgtgaagtttccagagaacaagaagcagccgtactattaccctcccttcgacaagattatcgagaaggcggctgaaatagccagtagcgactccgctaacgtctcatctcgtggcggcaaaaagttcctgcctgtgcttaaggagatcttggatcgggacccactgtcccagctctgcgagaacgagatggacctaatctggaccttaagacaggattgtagagagattttccctcagagcctgcccaagctgctgcttagtattaaatggaataaactcgaggacgtcgcgcagctgcaggctttgctgcagatctggcctaagctgccccctcgtgaggccctcgagctgctcgatttcaactatcctgaccaatatgtgcgggaatatgcagttgggtgtcttagacagatgagcgatgaagaactgagccagtaccttctgcagctggtgcaagtccttaagtatgagcccttcttagactgtgcgctatctcgttttctgctggagagggccttaggcaatagaagaatcgggcagttcctgttttggcacctcagatcagaggttcatatccctgccgtgtccgtacaatttggcgtgattctggaagcctattgccgtggctctgtaggccatatgaaagttctaagtaagcaggtggaggcattaaataagcttaagaccctgaattctttgatcaagctgaacgcagtaaaactgaaccgcgcaaagggcaaagaagctatgcacacttgccttaagcaaagtgcctatagagaggcactgagcgacttgcagagtcccttgaatccttgcgtgatactgtctgagctatatgtggagaagtgcaaatacatggactccaaaatgaagccattgtggttagtatacaataacaaagtgttcggagaggatagtgtgggcgtaatcttcaagaacggtgacgatctacgtcaggacatgctcacactgcagatgctgcggttaatggatctattgtggaaggaggcaggactagatctccggatgctgccttatggttgcctggctactggcgacaggagtggccttatagaggtcgtcagcacctccgaaaccattgctgacatccagctaaacagtagtaacgtggccgctgctgccgccttcaacaaagatgctttgctgaattggctgaaggagtacaacagcggtgacgatctggatcgtgctattgaggaattcacgctgtcatgcgccggctactgcgtcgcatcatacgtcctgggcatcggagatcgccactctgacaacattatggtgaaaaaaaccgggcaactgttccatattgattttggacacatccttggaaacttcaagtccaagtttggcattaagagggagcgggtcccttttatcctaacctatgattttattcacgtcatccagcagggcaagacgggcaatacagagaaatttggcagattccggcaatgctgtgaagatgcttacttgatcctccggaggcacggaaacctcttcatcacgcttttcgccctaatgctgacagccggacttcccgaactcactagcgtcaaggacatccaatacttaaaagattccctcgccctgggaaagtctgaagaagaagccctcaaacagtttaagcagaaatttgatgaggcacttagggaatcctggactactaaggtgaactggatggcacacacagtcaggaaagactatagatcatag

SEQ ID NO: 16591 - DNA, 396 bp, synthetic construct
  misc_feature 1..396: note = Description of Artificial Sequence: Synthetic coding sequence
  source 1..396: mol_type = other DNA
atgtgttttagctttattatgccccccgccatggcggatatcctcgacatctgggccgtcgactctcagattgcttcagatggcagcatcccagtcgacttccttctacctacaggaatttacattcagctggaggtgccccgcgaggcaacaatcagctacattaaacagatgctgtggaagcaggtccataattatcccatgtttaatctgctgatggacatagattcatacatgttcgcttgtgttaatcagactgctgtgtatgaggagctagaggacgaaacccgacggctgtgtgacgtgcggccatttcttcctgtgctaaaattggtgactagaagctgtgaccccggagaaaagttggattcaaagatcggagttctgataggttag

SEQ ID NO: 16592 - DNA, 2109 bp, synthetic construct
  misc_feature 1..2109: note = Description of Artificial Sequence: Synthetic coding sequence
  source 1..2109: mol_type = other DNA
tgagttcgcgcagggctcttccatggcaccgaactcttatgcaaaacgatcgtgtccagtgaggtttccggaaagaacgaccacatctggaacgagcctctggaattcgacattaatatctgcgacttgccccgtatggctcgtttgtgctttgccgtttatgctgtcctggacaaagtgaaaaccaagaaaagcaccaaaaccatcaacccaagcaagtatcagactattaggaaggcgggtaaagtccactacccagttgcctgggtaaacacaatggtgttcgattttaagggccaactgcggaccggcgatatcattctgcattcgtggagttctttccctgatgagctggaagagatgctgaaccctatgggcaccgttcagacgaacccatatactgagaacgctactgccttgcacgttaaatttcctgaaaataagaagcagccatattactatcccccattcgacaagagcagggggggcaagaagttcctgccggttctgaaagagatcctggaccgcgatcccctctcccagctgtgcgaaaacgagatggacctgatatggacattgcggcaagactgcagagagatttttccccagagcctgcccaagctgctgctgagcattaagtggaacaaactcgaagatgtcgcacaactgcaggcactgctgcagatttggcccaaattaccacctagagaagcactcgagctgttagactttaattatcctgatcaatatgtgcgtgagtacgccgtgggatgtcttcggcagatgtccgacgaggaactctcccagtatctgctgcaactcgtgcaggtcctgaaatacgagccttttctagactgtgcactgtccagatttctcctggagcgcgcactcggcaataggagaattggacagttcctgttttggcacctccgaagtgaggtgcatatccccgccgtcagtgtgcagtttggagtgattttggaagcctactgccgaggatctgttggacatatgaaagtcttaagtaagcaggtggaagccctcaacaaacttaagactctgaacagcctaatcaagttaaatgccgttaagctcaatcgtgcaaaaggcaaagaggccatgcatacatgccttaagcaatccgcctatcgcgaagcactctccgacctacagtctcctctgaatccctgcgtcattctgagcgaactgtatgtggaaaagtgtaagtatatggacagcaaaatgaaaccgttgtggttggtgtataataataaagtctttggagaggacagtgtgggagtcatctttaaaaacggcgatgacctaaggcaagacatgttaacactccagatgcttcgattgatggacctcctgtggaaagaggctggcttggaccttaggatgctgccctacgggtgcctggccactggagaccgcagtggcttgattgaggtcgtttcgacatcagagactatcgcagacatccagctcaactcatccaacgtggcggccgccgcggcatttaacaaggatgccctgctgaattggctaaaggagtacaattcaggcgacgatttagatagagctatagaagaattcacgctatcttgtgccggctactgcgttgcttcctacgtcttaggcatcggcgatagacactcagacaacattatggttaagaaaacaggacagcttttccatattgactttggtcatatactgggtaattttaagtcaaagttcggaattaagagggaacgtgttccattcattttaacgtatgacttcattcatgtgatccaacagggaaagaccgggaacacagaaaagtttggcagattcaggcagtgctgtgaagacgcatatctcattctgcgtcgccacggcaatctcttcattaccttgttcgctttgatgcttacagccgggctccctgagctcacatccgtgaaggacatccaatacctcaaggatagtctggcacttgggaagtccgaagaggaggccttgaagcagtttaagcagaagttcgatgaggcccttagagagtcctggacgactaaagtcaactggatggcccatacagttaggaaagattacagatcctag

SEQ ID NO: 16593 - DNA, 1566 bp, synthetic construct
  misc_feature 1..1566: note = Description of Artificial Sequence: Synthetic coding sequence
  source 1..1566: mol_type = other DNA
atggatttaatctggaccttgagacaggattgccgtgaaatctttcctcaatctttgcctaagttgttattgagtattaagtggaacaaactggaggatgttgcccaacttcaagccctcctgcaaatttggcccaaactgccacccagggaagcgctggaacttctagacttcaattacccagaccagtacgtgagggagtatgcagtcggatgcttgaggcagatgtccgacgaagagctgagccagtatttgctccagctcgtccaggttctcaagtatgaacctttcctcgattgtgctttgagcagattcttattggaaagagctctcggaaatcgtcgaatcggtcagtttctcttctggcacctgaggtccgaggttcatattcccgctgtgagtgtgcaatttggcgtgattttggaagcttattgcaggggcagtgtgggccacatgaaggtcctatctaaacaagtggaggcattgaataagctgaagactctgaacagtttgatcaagctgaacgccgttaagttgaatagggctaagggcaaagaggccatgcatacatgcctgaagcagagtgcttaccgcgaggctttatccgatttacagagccccctgaacccttgcgttattcttagtgagctgtatgtggagaagtgcaaatacatggacagcaagatgaaaccattgtggctggtctataacaacaaggtttttggggaagattcagtgggggtgatcttcaaaaatggagacgtatgctttcccctagatctgcgccaggatatgctgaccctgcagatgttgcggcttatggacctcctatggaaggaggcaggcctggatcttagaatgttgccatacggctgcctcgctactggggatcggagtggtctcatcgaagtggtgtctacctctgagacaatcgcggacattcagctgaacagcagtaatgtggccgcagctgcagctttcaataaagatgcccttctgaattggctcaaggagtacaactcgggggacgacctggacagggcaatcgaggagtttactctgtcctgtgccggctattgtgtggcttcatatgtgctgggcattggggatcgacattccgataacataatggtgaaaaagacagggcagctgttccacatcgacttcggacacattttgggtaacttcaaatctaagtttggtataaagagagagagggttccgtttattctgacctacgattttatccacgtgattcaacaaggaaaaacagggaacaccgagaagtttggccgttttcgccagtgttgtgaagatgcttacctgatactaagacgccacggcaatctgtttataaccctcttcgccctcatgcttacagctggtctgccagagctcactagcgtcaaggacattcaatacttgaaggactctctcgcactggggaagagtgaagaggaggcactgaagcagttcaagcagaaattcgatgaggcactgcgtgagtcgtggaccacaaaggtcaactggatggctcatacagtgcgaaaagactacaggtcctag

SEQ ID NO: 16594 - DNA, 3207 bp, synthetic construct
  misc_feature 1..3207: note = Description of Artificial Sequence: Synthetic coding sequence
  source 1..3207: mol_type = other DNA
atgcccccaggcgtcgattgcccgatggagttttggacaaaagaggaaaaccaatccgtggttgtggatttcttactgccgacaggcgtttatctcaacttccccgttagccggaacgctaatcttagtacgattaagcagctgctatggcaccgggctcagtacgagcctctgttccatatgctcagtggaccagaagcttatgtgttcacctgtataaatcagacagccgaacagcaggagctagaggacgaacagcgacggctctgcgatgttcagccattcctaccggtcctgcggctggtcgcaagggagggtgaccgcgtcaaaaagctgatcaacagtcagatatcactacttatcggtaagggactccacgaatttgatagcttgtgtgaccccgaggtgaacgatttcagggccaagatgtgccaattctgtgaagaagcggcagcacggcggcagcaactgggttgggaagcatggctgcaatactcgttccccttgcagctggaaccgtccgcccagacctgggggcccggcaccttgagactgcccaaccgcgcgctgctggtgaacgttaaattcgagggctccgaagagtccttcacatttcaagtctcaacgaaggatgtgccgttagcgcttatggcctgcgccctcaggaaaaaggcaacagtgttccggcagcccctcgtcgaacagcctgaggactacactctgcaggtgaatgggaggcacgaatatctttatggcagttatcctctgtgccagttccaagtgcagaaaccccgtgctaaacccccaccaatccctgctaaaaaaccatctagcgttagcttgtggagtctcgagcagccattccgcattgagctgatccagggctccaaagtaaacgccgacgagagaatgaagttggtcgtgcaagcaggattgttccatggcaatgagatgctgtgcaaaactgtatccagtagtgaagtgtctgtttgttcagaaccggtgtggaaacagaggctcgaattcgacattaatatttgcgatctacccagaatggccagactgtgtttcgcactatacgccgttattgagaaagctaagaaagccagaagcaccaagaagaaatccaagaaagccgactgccccatagcttgggccaacctcatgctgttcgattacaaggaccaactgaaaaccggcgaaaggtgcctatatatgtggccttctgtgcccgacgagaaaggggagctgctgaaccctactggcaccgtgcgatccaacccaaacaccgatagtgctgcagcacttctgatctgtctgccagaagtagcccctcaccctgtttattatcccgcccttgaaaagttaccgggcggtatgcttttagcctccagagagtggagacccgagcttttgtggatgaggctccatgccgaggactcagcgccaagccgaatgattggcgtcgcaatgccgggcctgggagtcctaccaggtctcgtacaagctccgggcgacgccgaatgctctcgcctgctgcaaatcctggaactaggtcgacatagcgagtgtgtgcatgtcactgaagaggaacagctgcagctgcgcgaaattttggagagaagaggaagcggcgaactctacgaacacgagaaggacttggtgtggaaactgcggcatgaagtacaagaacattttccagaagcgctcgcgcgtctgctgttggtcacaaaatggaacaaacatgaagatgtggctcaggatgctctgccggcagtcagctggccagagctgccggtgctgagtgctctggagctgctggacttttcattccccgattgccacgtcggctccttcgcaatcaagtccttgcgcaaattgaccgatgacgaactcttccaatacctactgcagttagtccaggtgctaaagtacgaaagctacttagactgcgaactcacgaaattcttgttggacagagcactggctaaccgcaagattggacacttcttgttctggcacctgagaagcgaaatgcatgtgcctagcgtggcgctgaggtttggcctcatcctagaggcttattgtcgcggcagtacccaccacatgaaagtgctaatgaagcaaggcgaggcattgtcaaagttaaaagcccttaatgactttgtcaaactctccagccagaagacccctaaaccgcagacaaaagaacttatgcatctctgtatgagacaggaagcctatcttgaggcactgagccacctgcagagccccctggacccctcaacgctcctggctgaggtgtgtgtggagcagtgtaccttcatggactcaaagatgaagccgctgtggatcatgtatagtaacgaggaagctggctccggaggttccgtcggaatcatcttcaagaatggcgatgatttgcgacaggacatgctgacactgcagatgatacagctgatggacgtgctgtggaagcaggagggtctggatctacggatgaccccgtacggatgtttgcctacaggtgatcggactggactcatagaggtcgtccttcggtctgatacaatagctaacatccagctgaacaagtctaatatggctgcgaccgccgctttcaacaaggacgcgttgctgaactggctgaagagtaagaaccctggcgaagctttagatagggcgatagaagagttcacattgtcctgtgctggttactgtgtggctacgtacgtactcgggatcggagataggcattccgataacattatgattagagagtctggacagttgttccatattgacttcggacactttttggggaactttaaaacaaagtttggcatcaacagggagcgggtgccctttatcttaacatacgacttcgtgcacgtgattcaacagggtaagaccaacaacagcgagaagttcgaaaggtttaggggttactgtgaaagggcttatacaatcctcaggcgacacggtctgttatttctgcacctgttcgccttgatgcgggccgctggactccctgagttatcttgttcgaaagacatccaatacctgaaagattctctagccctgggaaaaactgaggaggaagcgctcaaacatttccgggtcaaatttaatgaggccctccgagagtcctggaaaacgaaagtaaattggctggcacataatgtaagtaaagacaaccgccagtag

SEQ ID NO: 16595 - DNA, 3207 bp, synthetic construct
  misc_feature 1..3207: note = Description of Artificial Sequence: Synthetic coding sequence
  source 1..3207: mol_type = other DNA
atgcctccgggggttgattgccccatggaattctggacaaaagaggagaaccaaagtgtggtagttgattttttgttacctactggcgtttaccttaacttccctgtatctcggaatgcaaatctgtcgacaataaaacagttgctatggcacagagcgcagtatgagcccctgtttcacatgttatctggtccagaggcatatgttttcacctgtattaatcagacagccgaacagcaagagttggaggacgaacaaaggaggttgtgtgatgtccagccctttctccccgtcctgcgtctggttgcaagggagggggatcgcgtcaaaaaattaataaatagtcagatttctttgttgattggaaagggcctgcacgagtttgacagcctgtgtgaccccgaggtgaacgattttcgggctaagatgtgccagttctgtgaagaagccgccgcccgaagacagcagcttggctgggaggcgtggctacagtatagtttccccctgcagttggaaccgagtgcccaaacatgggggcccggtacgttgcgtcttcctaatagggcactgctcgtcaacgtcaaatttgaaggctcggaagagtcattcacctttcaggtctcaaccaaggatgttccattggcactcatggcctgtgctctccgaaagaaagccaccgtcttccgccaacctctggtggaacaacctgaggattacactctgcaagttaatggaaggcacgaatatctgtacggctcttaccccctctgtcaatttcaagtacaaaagccaagggccaaacctccacctatccccgctaaaaagccttcctcagtctcgctgtggtccctagaacaaccgtttcgcatcgaattaattcagggatctaaagtaaacgccgacgagcggatgaaactcgtggtccaggccggactcttccacggcaatgaaatgctatgcaagactgttagctcttctgaggttagtgtctgcagcgaaccagtgtggaaacaaagattggagtttgatataaatatctgcgacctgccccgcatggccagactgtgtttcgctctttacgctgtaatcgagaaggccaaaaaagcccggagcactaagaaaaagtccaaaaaagccgactgccctatcgcatgggccaacttgatgttatttgactataaggaccagctgaaaacgggagaaagatgcctgtacatgtggccctccgtacccgatgaaaaaggagagcttttgaaccctacaggaaccgttcggtctaaccctaacaccgactcagccgccgcccttctgatctgccttccagaagtagccccacatccagtctactatcccgcgttagagaaacttccaggcgggatgctactggccagcagagaatggaggcctgagttgctgtggatgaggctgcacgctgaggactccgcacccagccggatgattggcgtcgcgatgccaggactgggggtcctgcctggtctggttcaggctcctggcgatgctgaatgcagtagactactacagattctggagctcggacgtcattcagagtgcgtccacgtgaccgaggaagaacagctgcagctgagagaaatcctcgagcgacgcggcagcggagaactgtacgagcatgaaaaggatctggtatggaagctgcgtcacgaggtgcaggaacactttccagaagcactggccagattattgctcgtgacgaaatggaacaaacacgaagatgtcgcccagatgttgtacctgctctgcagctggccagagctgcctgtgctcagtgccctcgaattattggattttagtttcccggattgccatgtcggctccttcgccatcaagagcctccggaaactcaccgatgatgagctgtttcagtacctcctccagttagtccaagtcctgaagtatgagtcctacctggattgtgaactgacaaagttccttctcgacagagcgcttgctaaccgaaaaattggccactttttattctggcatctaaggagcgagatgcacgtaccctcggtggcactgcgcttcgggcttattttggaggcctattgcaggggttctacccatcatatgaaggtcctgatgaagcagggagaagcgctctcgaagctgaaagcattgaacgacttcgttaagttgagcagtcagaagacacccaaaccgcagacaaaagagctgatgcacctgtgtatgagacaggaagcgtatctagaagcccttagtcacctccagtctcctcttgatccgagcactctgctcgcagaagtgtgtgtcgaacagtgcacatttatggactccaagatgaagcccctatggattatgtactcaaacgaagaagccggcagtggcggaagcgtgggcattattttcaagaacggggatgacctccggcaggacatgctgacgctacagatgatacagcttatggacgtcctttggaaacaggaagggctggaccttcgaatgactccatatgggtgcttacccactggagatcggaccggcctaatagaagtcgtgcttaggtcagacaccatcgccaacattcagctgaacaagtcaaatatggcagcaacggctgcctttaacaaagacgccctgctaaattggcttaaaagtaagaatcccggcgaggccctggaccgtgccatcgaagaatttactctgtcctgtgcgggatactgtgttgcaacctacgtgcttgggattggggacaggcactcagataatatcatgatcagggaatctgggcagttattccacattgactttggacacttcctaggtaactttaagacgaagttcgggattaatagggagcgggtgccatttatcctgacatacgatttcgtccacgtgatacagcaagggaagacgaataactccgagaaatttgaacggtttcgaggctattgtgagcgggcctataccatcctaaggcgacatggattactgtttctacacctgtttgcgctgatgagggcagccggcttacctgagctttcgtgctctaaagacattcagtacctcaaagactcactggcattgggcaaaaccgaggaagaggcactgaaacacttccgcgtaaaattcaatgaagctctaagagaaagctggaaaaccaaggtgaattggctggcccataatgtgtcaaaggacaaccgacaatag

SEQ ID NO: 16596 - DNA, 3135 bp, synthetic construct
  misc_feature 1..3135: note = Description of Artificial Sequence: Synthetic coding sequence
  source 1..3135: mol_type = other DNA
atgcctccaggagtagattgccccatggagttctggacgaaggaggaaaaccagagcgtagtggtcgatttccttctcccaacgggagtgtatttgaactttcccgtcagcagaaatgcgaatctgtcaacaatcaaacagcttctctggcacagagcccagtacgagcccttgtttcacatgttgtccggacctgaggcctatgtgttcacatgcatcaatcagacagccgaacagcaggagctggaggacgagcagcgcagactgtgtgatgtacagccgttcctgccagtgctacggctggtcgcccgggaaggggacagagtgaagaaattgatcaacagccagatttctttactcatcgggaaagggctgcacgaattcgattccttatgtgatcctgaggtcaatgacttccgagcgaagatgtgccagttttgcgaggaggctgcagctcgtcgccagcagttgggatgggaggcctggttacaatatagctttcctctgcagttggagccgtccgcccagacctggggtccaggcactttgcgcttacccaaccgggcactgctggtgaacgtgaagttcgaaggtagcgaagaaagcttcacctttcaggtgagcactaaagacgtaccccttgcgctgatggcctgcgccttacggaaaaaagcaaccgtttttcggcagccgctggtcgagcagccggaggactatactctacaggtcaacggtcgacacgaatatttgtatggttcataccctttgtgtcagtttcagtatatatgctcttgcctgcattcaggtctaacgcctcatcttactatggtccatagcagctccatcctcgccatgagggatgagcagtctaaccctgcaccacaggtgcagaagcccagggcaaaaccaccgcctatacccgctaagaaaccaagttcggtctccctgtggtccctcgaacagcccttccgtattgagctgatacaaggatcaaaagtcaacgcggacgaaagaatgaagttggtagttcaggctgggctattccacggcaatgagatgctgtgtaagaccgtaagttccagcgaggtgtccgtctgtagcgagcctgtctggaagcagcgacttgaatttgacattaacatctgtgacctgcccaggatggccaggctgtgctttgcattgtatgcagtaatcgaaaaagcaaaaaaagcgcgttccactaaaaagaaaagcaagaaagctgactgccctattgcttgggccaacctcatgttattcgactacaaagatcagttaaaaactggggagcgatgcctttatatgtggccctcagtcccagatgaaaagggagagctcctgaatccaacaggaactgtacgatccaaccccaacactgactcggcggctgcactcctgatttgcctgccagaagtggccccccaccccgtctactaccctgcactcgaaaaaattttggagttgggcagacatagtgagtgcgtccacgtaactgaggaggaacagttacagctccgagagatcctggaaagacgcggctctggcgagctctatgaacacgagaaggacctggtctggaaactgcggcatgaagtacaagaacactttccagaggcccttgcgaggctacttttagtcacaaagtggaacaaacacgaagatgtggcccaaatgctgtacctgctttgtagctggccggaactgcccgtgctgtccgccttggaacttctggacttctcttttccggattgccatgtgggctctttcgcaataaaaagtctgcggaaactgaccgatgatgagctctttcaatacctgctccagctggtgcaggtgctgaaatatgagtcgtatctcgattgcgagttaacaaaattcttgcttgatcgtgccctggccaacagaaagatcggacactttttgttctggcaccttagaagtgaaatgcacgtgccttccgtggccctgcgatttggcttgatcttggaagcctattgtcgcggatcaacccatcatatgaaggtgctcatgaaacagggcgaggctttgtcaaaattgaaggctctcaatgattttgttaaactgagctcccagaaaacacccaagccacaaacaaaagaactgatgcatctctgtatgaggcaagaggcctatctggaggcactctctcatttgcagagcccactggacccaagcactttgctggccgaggtttgcgtggaacagtgcacttttatggattcgaagatgaagcctttgtggatcatgtattcaaacgaagaggccgggagcggcggctctgtaggcatcatctttaaaaatggcgatgacctgcgtcaggatatgctgaccctccaaatgatccagctaatggacgtgctctggaaacaggaaggcctggacctccggatgacaccctacgggtgtttgcctactggggatagaaccggcctgattgaggtggtacttagatccgataccatcgcaaacatccaactgaataagtccaacatggcagctactgcggccttcaacaaggatgctctcctgaactggcttaaatcgaagaacccgggcgaggcacttgacagggctatagaagaatttacactgagctgtgcaggctattgcgtcgccacctacgtgctcggcatcggagatcgccattctgataacattatgatccgcgagtcaggtcagctgttccacatcgactttggacactttctcgggaactttaagaccaagtttgggatcaatcgagagagagtgccgttcattctgacatacgactttgtccatgtgatccaacaagggaagacgaataactctgaaaagttcgaacgattcaggggttactgcgagagggcctatactattttgcgcagacacggactgctcttcctccacctgttcgcgctgatgcgtgccgccgggctccccgaactgtcttgtagcaaggacattcagtatcttaaggacagcctggctctgggaaagacggaagaggaggctcttaaacattttagggtaaagtttaacgaggcgcttcgggagagctggaaaaccaaggtcaattggctggcacacaatgtctcaaaagataacagacagtag

SEQ ID NO: 16597 - DNA, 3207 bp, synthetic construct
  misc_feature 1..3207: note = Description of Artificial Sequence: Synthetic coding sequence
  source 1..3207: mol_type = other DNA
atgccccctggggtggattgcccgatggagttctggaccaaagaagagaaccagagcgtggtggtcgatttcctactccctacaggcgtctacctcaactttccagtgtcacgcaacgccaatctttcgactataaagcagctgctctggcatcgtgcccagtatgaaccgctgttccacatgttgtcaggtccagaggcgtacgtgtttacttgcatcaaccaaacggccgaacagcaggagctcgaggatgagcagaggcgcttatgtgacgtccagccctttcttccagttctgcggttagtggcacgcgagggagatcgggtgaaaaagctcatcaatagtcaaattagtctgctaatcggcaaaggattgcatgagttcgatagtctttgtgaccccgaggtgaacgacttcagggctaagatgtgccagttctgcgaggaagctgccgcgagaaggcagcagctgggctgggaggcttggctgcaatactcctttcccctacagctggaaccaagcgcccagacgtggggtcctgggactctgaggctcccaaatcgagcacttctggtaaacgtgaaattcgaaggctctgaggagtcttttacctttcaggtgtcaactaaagatgtccccttagccctgatggcctgcgccctccgcaagaaggccacggtcttccggcaaccccttgttgagcaaccagaggattacacactgcaggtgaatgggaggcacgagtatctttacggttcttatccactctgtcaattccaggtgcaaaagcccagagccaaacccccgcccatcccggcaaagaaaccctctagcgtgagtttgtggtcccttgaacagcctttccgaatcgagttgattcagggatccaaagtgaacgctgacgagagaatgaagctggtagttcaggccggactgttccacgggaacgagatgctctgcaagaccgtgtcgtcatctgaagtcagcgtctgttcagaaccggtgtggaagcagaggttggagttcgacataaatatctgtgacctgcctcgcatggcgaggctgtgtttcgccttgtatgcagttattgagaaggctaagaaagcacgcagtaccaagaaaaaatccaagaaagcggattgtcctatagcgtgggcaaacctgatgctttttgactacaaagaccagctcaagactggggaaaggtgtttgtatatgtggcccagcgtgcctgacgagaaaggtgaattactcaatccaaccggcactgtgcggtcgaatccaaacacagactccgccgccgctctgttaatttgcctgccggaggtggctccacaccctgtttactatccggctctggagaagttgccagggggcatgctgttagcatccagagaatggcgccctgaactgctgtggatgagactccacgcagaagactcagccccctccaggatgatcggagtggctatgcctggcttgggagtgctcccagggcttgtgcaggccccgggtgatgctgaatgctcccgactccttcagattctcgaacttgggagacactcagagtgcgtgcacgtcacagaggaagagcagctccaactccgggagatacttgagcgcagaggtagtggtgagctgtatgaacacgagaaggatcttgtctggaagctgagacacgaggtgcaggaacattttcccgaagcgctggcacggttgcttttggtgacaaagtggaataagcatgaagatgtagcacaaatgttatatctactctgctcatggcctgagctgccagtgctttcagccttggagctactggatttcagctttcctgactgccacgtcggttctttcgcaattaaaagcctaagaaaattaacagacgatgaactattccagtatctcctccaattagtccaggtgctcaagtacgagagctatctggattgtgaattgaccaagttcctgttggatagggctctggctaacagaaagatcgggcacttcctcttctggcacctgcgcagcgagatgcacgtgccttcagtcgccttaagattcggcctgattctcgaagcctattgcaggggttccacacatcacatgaaggtactgatgaagcagggggaagctctgagcaagctgaaggccctgaacgactttgtgaaattatcaagccagaagacgcctaaaccacagaccaaagagctgatgcacctatgtatgcgccaggaagcttacctggaagcactgagtcatttacagagtcctctagatccctccactctgttagcagaagtatgcgtggaacaatgcacgttcatggactccaaaatgaagccactatggataatgtacagcaacgaggaggccggctctggaggcagtgtcgggattatttttaaaaacggtgatgacctgaggcaggacatgctgacacttcagatgattcagctgatggatgttctgtggaagcaagagggtttagatttgagaatgaccccgtacggttgtcttcccacaggggatcgcacaggattaatcgaagtagtcctgcgtagcgacaccattgccaatatccagctgaacaagtccaacatggccgcaacagcggcatttaacaaagacgcccttcttaactggctgaaatccaagaaccctggagaggcactggacagggccatagaggagtttaccctctcatgtgcgggatattgcgttgctacttatgtgcttgggatcggcgataggcattccgataacattatgatcagagagtctggacagctttttcacattgactttggccacttcctcggaaatttcaaaacaaagtttgggataaatagggagagggtgcccttcatcttgacttacgacttcgtccacgtcatacagcagggaaaaacaaacaatagtgaaaagttcgagcggtttcgcggctactgcgagcgggcatacacaattttacgtagacatggtttgctgttcttgcacttgtttgcactcatgcgggctgcaggcctgccggagctgtcatgctctaaagatattcaatatctgaaggacagcttggcactaggtaaaaccgaggaagaagccttaaagcattttcgcgttaagtttaacgaagcactgcgtgaatcttggaaaacaaaagttaattggctcgctcacaacgtgtccaaagataacaggcagtag

SEQ ID NO: 16598 - DNA, 960 bp, synthetic construct
  misc_feature 1..960: note = Description of Artificial Sequence: Synthetic coding sequence
  source 1..960: mol_type = other DNA
atgatccccgagtctagcgaactcgtggtgcaggccggcctatttcacgggaacgagatgctttgtaaaactgtatccagcagtgaggtaagcgtgtgctctgagcctgtgtggaagcagaggctggagttcgatataaacatctgtgacttgcccagaatggcgcgattatgcttcgccttgtacgctgtgattgagaaggctaagaaagccaggtctaccaagaaaaagtccaaaaaggcagactgccctatcgcatgggctaatctgatgcttttcgactacaaggaccagctgaagacaggagaacgctgcctctatatgtggccatccgtccccgatgaaaagggcgagctgctgaatccaacaggaaccgtaagatccaatccaaacactgattctgccgctgcccttctgatctgcctacctgaggtggcgcctcatccagtgtactatccagcactcgagaagatcttggaacttgggcgtcatagtgagtgcgttcacgttacagaggaggagcagctccagctgagggagatcctggagcggcgtggctccggggagctgtacgagcacgaaaaggacttagtctggaaactgcgccacgaggtgcaagaacatttccccgaggccctggctagactgctgctggtcaccaaatggaacaaacatgaagacgtggcccagatgctgtacctcctgtgttcatggcccgagctgcccgttttatctgccttagagctattggacttttcttttcccgattgtcatgtcggtagcttcgccatcaaatcgctcaggaagctcaccgatgatgaactcttccagtaccttcttcagctggtccaggtccttaagtatgaatcctatctcgactgtgagttgactaaattcttgttagatagggccttggcaaaccgtaagatcgggcactttctgttttggcacttaagatag

SEQ ID NO: 16599 - DNA, 3309 bp, synthetic construct
  misc_feature 1..3309: note = Description of Artificial Sequence: Synthetic coding sequence
  source 1..3309: mol_type = other DNA
atggagctcgaaaactataaacagcccgtcgtgctacgggaggataattgtcggaggcgccggagaatgaagcccaggtccgccgccgccagcctcagttctatggaactgattccaatcgagttcgtgctgcctacatcacaacgcaaatgcaaatcaccagaaactgccctgcttcatgtggccgggcacggaaacgtggagcagatgaaggcccaggtgtggctcagagcccttgagacatccgttgcagctgacttctaccaccggctggggcctcatcactttttgctgttgtaccagaagaaaggccaatggtatgaaatctatgacaaataccaggtcgtccaaaccttggactgtctccgctactggaaggccacccatcgaagcccagggcagatccacttggttcaaagacatccaccaagcgaggaatcccaggcatttcagcggcagctcacagccctcatcgggtatgatgtcactgacgtctccaatgttcatgacgacgaactagagtttactcgccgcggcctggtgacaccccgcatggcagaggtggcctccagggaccccaaactgtatgcaatgcatccttgggttactagcaagccgttgcctgaatacctgtggaagaaaattgcgaacaattgtatattcatcgtgattcatcgcagcaccacttcacagaccataaaggtgtccccagacgacacccctggcgctattctgcagagcttcttcactaagatggcgaaaaaaaagtctttgatggacatcccagagtcccaatccgagcaggacttcgtcctgcgcgtatgcggaagagacgagtatctcgttggggagacgccaataaaaaactttcagtgggtgcgccattgtctgaagaacggcgaagagattcatgtagtgctggatactcccccagatccagcgctcgatgaggtccgtaaagaggagtggcccttagtagacgattgtaccggggtgaccggttaccacgagcagctgacaattcatggcaaagatcacgagtctgtctttaccgtgagcttatgggactgcgaccgaaaattccgtgtgaagataaggggcatcgacattcctgtgctccctaggaacaccgacctcacagtgtttgtggaggctaatatccagcacggacagcaagtgctctgccagagaagaactagtccaaagcccttcacagaggaggtgctgtggaacgtgtggctggaattctctatcaaaatcaaagaccttcccaagggagccctacttaatctgcagatctattgcggaaaggccccagccctctcctcgaaggcgagcgctgagtccccctcaagcgagagcaaagggaaagtgcagttgctgtattacgttaatctgctacttattgatcaccggtttcttctgcggcgaggagagtacgtgttacacatgtggcagatctcaggtaaaggcgaagatcagggcagtttcaatgccgataagctcacgtccgctacaaaccctgacaaggagaatagcatgagcatcagtatcttgctggacaattactgccaccccattgcccttcccaaacaccagcccacacccgaccccgaaggcgatcgtgtgagggcagaaatgcccaatcagcttaggaaacagctcgaggccatcattgccacagatccgttaaatccacttaccgccgaagacaaagaactgttgtggcacttcagatacgaatcactaaaacaccctaaggcctaccccaagctcttctccagcgtgaaatggggacaacaggaaattgtcgcaaaaacctaccaacttctagctcgtcgcgaagtctgggatcagtccgcactcgacgtcgggctaactatgcagctcctcgattgcaacttctctgatgagaacgtacgggctatcgcggttcagaaattggagtccctggaggatgatgatgttcttcactaccttcttcagctggtccaagctgtgaaattcgaaccgtatcacgacagcgctctggcccgtttcctgctgaagcggggactacggaataaaagaattggccacttccttttctggttcctcaggtcagagattgcacagagtcgccactaccagcaaagatttgccgtgatcctggaagcctacttgcgggggtgcggcacggctatgcttcatgattttacacagcaggtgcaagtcattgaaatgctgcagaaagttacgctggacattaagtccctgagcgccgagaagtacgacgtctccagtcaagtgataagtcagctaaaacagaaactcgagaatttacagaactctcagctgccagagtcctttcgcgtgccctacgatccaggccttaaggctggcgccttagctatcgaaaagtgcaaggtcatggcatccaaaaagaaacccttatggctggagttcaaatgcgccgatcccacagccctgtctaatgagacaatcgggattatcttcaaacatggcgacgaccttagacaggatatgctgattcttcagatactgcgaatcatggagagtatctgggaaacagaaagcctcgatctttgtctgctcccatacgggtgtattagcactggcgataagattggaatgatcgagatcgttaaagatgctaccactatagcaaaaattcagcagtccacagtgggcaacaccggggctttcaaggacgaagtcttgaaccactggctgaaggaaaaatcgcctactgaggagaagttccaggctgcagtggagagattcgtgtatagttgcgctggctactgcgtggccacgttcgtactgggcattggtgatcgccataatgataatataatgattaccgaaacaggcaacctgtttcatattgatttcggccacatactgggtaattacaagagctttctcggcatcaacaaggagagggtgcctttcgtgctgacaccagactttctgttcgtgatggggacaagcggaaaaaagacatccccccactttcagaagtttcaggatatctgtgtgaaggcctatctggccttacgccaccacactaacttgctcatcatcctcttctctatgatgttgatgaccgggatgccacaactcacgtcaaaagaggacattgagtacatacgtgatgccctcaccgttggaaaaaacgaggaggatgctaagaagtactttctggatcaaatcgaggtttgtcgggacaaaggctggacggttcagtttaattggttcctgcacttagttctcggaattaagcagggggagaaacacagtgcctag

SEQ ID NO: 16600 - DNA, 3309 bp, synthetic construct
  misc_feature 1..3309: note = Description of Artificial Sequence: Synthetic coding sequence
  source 1..3309: mol_type = other DNA
atggagctggagaattataagcagccagttgtcctgagagaagacaattgccgcagacgaagacggatgaaaccccgcagtgcagccgcttccctgtcctccatggagctgatcccaatcgaatttgttctgcccacatcccagcgcaaatgcaaaagcccagagactgctctgttgcacgtggcgggacatggcaatgttgaacagatgaaagcccaagtttggctgagggccctagagaccagcgttgccgctgatttttaccaccggttaggcccacatcattttctcctcctgtaccagaagaagggccagtggtacgaaatctacgacaaataccaggtggttcagactctggattgtctcaggtattggaaagctacccatagatctcccgggcagattcacttagtgcaacggcaccctccatctgaagagagccaggcctttcagaggcaactcactgccctcatcggctatgatgtgaccgatgtatccaacgtacatgacgacgaactggagttcacacgcagagggctggtgaccccaaggatggcggaagtggcttcccgcgacccaaaactctatgccatgcacccttgggttacgagcaagccattacctgagtacctgtggaaaaagatcgctaataattgtatcttcattgtgatacaccggtctaccacatcccagacaatcaaggtcagccccgacgacacgccaggcgccattctgcagagcttttttaccaaaatggcaaagaaaaaaagccttatggatatcccggagagccagtccgaacaggacttcgttctccgcgtgtgcggccgtgatgagtacctagttggggaaactcccatcaagaacttccaatgggtgcggcactgcttgaaaaatggagaggagatccatgtcgtgcttgacacacctccagatcccgcacttgacgaggtgcgcaaggaagagtggcctctggtggatgattgcacgggagttacaggctatcatgagcagctcaccatccatggtaaagatcacgagagtgtctttaccgtatcactatgggattgtgaccgtaaattcagagtcaaaatccgaggtattgatatccccgtgttgccacgcaacacggatctcaccgtttttgtcgaagctaatatccaacacgggcaacaggtcctgtgccagcggagaactagcccaaaaccttttaccgaagaagtgttgtggaacgtttggttggagtttagcatcaagattaaagacttgccaaagggggccttgctgaatttgcagatctattgcggtaaagcccccgctcttagttcaaaagcaagcgctgagtcacccagctctgagagcaaggggaaggtgcagctgctgtactacgtcaatctgctgctgattgaccacaggttccttcttcggcgtggagagtacgtccttcacatgtggcagatttccggaaagggcgaagatcagggtagcttcaacgctgacaaattgactagcgcaactaatccggacaaagagaacagtatgagtatctcaatcctgttggataattactgccacccgatagccctccccaaacatcaacctacccccgaccctgaaggagaccgcgttcgagccgagatgcctaatcaactgagaaaacagctggaggcgatcattgccaccgaccctttgaatcctctgaccgctgaagacaaggaacttttgtggcacttccgatatgagagtctgaagcatcccaaagcctacccaaaattattcagtagcgtgaagtggggacagcaggaaattgtcgcgaagacataccaactgctcgcccgccgcgaagtttgggatcagtctgctctcgatgtgggcctcaccatgcagctactggactgcaacttttctgatgagaacgtgagggcgatcgccgtacaaaagctcgagagtctggaagacgatgatgtcctacactacctgctgcagctcgtccaggcagtgaaatttgagccctaccatgactctgccctggctcggttccttctcaaaagaggcctgcgaaataaaaggataggccactttttattttggtttttgagaagcgaaattgctcaaagtcggcactatcagcagcggttcgccgtcattttagaagcctacctaaggggttgcggtacagcaatgttgcatgatttcactcaacaggtccaagttatcgaaatgttgcaaaaagtgactctggatatcaaatcactcagcgcggagaagtatgacgtcagttctcaggtcatcagtcagctgaaacagaaactcgaaaacttgcagaatagccagctgccggagagcttccgagtcccttacgaccctgggctgaaagcaggcgcactggcaatagagaagtgcaaggtgatggcatctaagaaaaagccactgtggctggagtttaaatgcgcggatccgacggcacttagtaatgagactatcgggatcatatttaaacacggggatgacctccgacaagacatgttgattttgcagatcctgcgcattatggagtctatttgggaaacagaatccctcgacctgtgtctactcccatacggttgtatcagcacaggggacaagatcggaatgattgaaattgttaaggacgctaccacaattgccaaaatacagcaaagcactgtcggcaacactggggcattcaaggacgaagtgttgaaccattggcttaaagaaaaatccccaaccgaggaaaagttccaggctgccgtggaacggtttgtgtatagttgcgcaggatattgcgtcgcgacattcgtgctcggaatcggagatcgacataatgataacatcatgattacagaaactggaaacttatttcatatcgactttggacacatcctcgggaactacaaatcttttctgggaattaataaagagcgggttccctttgtattgactcccgactttctgttcgtgatggggaccagcggtaaaaagaccagcccccattttcagaaattccaggatatctgtgttaaggcctacttggccctgcgacatcacacaaatctactgataattttgttctccatgatgctaatgactggcatgccacagttaactagtaaggaggacatcgaatacatacgcgatgcactgaccgtggggaagaatgaagaggacgctaagaaatacttcctggaccagatcgaggtgtgccgggacaaagggtggaccgttcagttcaattggtttctccatctggtgctcggcatcaagcagggagagaaacattctgcctag

SEQ ID NO: 16601 - DNA, 3309 bp, synthetic construct
  misc_feature 1..3309: note = Description of Artificial Sequence: Synthetic coding sequence
  source 1..3309: mol_type = other DNA
atggagctcgaaaactataagcagcccgtcgtactccgcgaagacaactgtcgcaggcggagacgaatgaaacccaggagtgctgccgcttcactgagttccatggagcttatccccatcgagttcgtcctgcctacatcccaacgaaaatgtaaaagccctgaaactgcccttctgcatgtggcaggccacggaaatgtcgagcaaatgaaggctcaggtttggctgcgagctctagaaaccagtgtggccgccgatttctatcacaggctgggtccccatcattttcttctcctttaccagaagaagggccaatggtatgagatctacgacaagtatcaggtcgtgcagacgttagactgtctccggtactggaaagccacgcacaggtcacccggccagattcacctggtgcaaaggcatccgcctagcgaggaaagtcaggcttttcagaggcagcttacggctttaatcggttacgacgtcactgatgtttcaaacgtgcatgacgacgagctggagtttacccggcgaggtctcgtgacccccagaatggctgaagttgctagtcgcgatccaaaactctacgcaatgcacccttgggttactagcaaacctctgcctgagtacctatggaaaaagatcgctaataattgcatcttcattgtgatacacagaagtaccacctctcaaactataaaagtctccccggatgatactcccggagcgattctccagagcttcttcaccaaaatggccaaaaaaaagagcctgatggatatacccgaatctcagagtgaacaggatttcgttttaagagtctgtggacgagatgagtatttggttggcgaaacccccattaagaacttccagtgggtgcgccactgtctaaagaacggagaagagatccatgtggtgctcgacacgcctcctgatccagccctggatgaagtcaggaaggaggaatggccgcttgtagatgactgcacgggggtaactggctatcatgaacaactgaccattcacggcaaggatcatgagtcagtcttcaccgtgtctttgtgggattgcgatcgcaaattcagagtaaaaatcagaggtattgacatcccggtgctgcctagaaacacagatcttacagttttcgtggaagccaacatccagcacggccaacaggtgctctgtcaacggcggacttcccccaaaccgttcacagaagaagttctgtggaatgtatggctggagttctccatcaagataaaagatctacctaagggggcacttctcaatcttcagatatattgcgggaaagctcctgccctatcctcgaaggccagcgcggagagtcccagctcagagagtaagggcaaagtgcagttgctgtactacgtcaatctgcttttgatcgatcaccgcttcctgctcaggagaggcgagtatgtgctccacatgtggcagatatccggtaagggggaggaccagggcagcttcaacgccgataaactgacttcggcaaccaaccccgacaaagagaactcaatgagcatttctatcctcttggataattattgtcaccctatcgccctaccaaagcatcagccaactccagatcctgagggggaccgggttagggcagagatgcccaaccagttgcgcaaacagcttgaggccatcatagccactgaccccctcaacccattgaccgcagaggacaaggaactgctgtggcacttcaggtacgagtcactcaagcacccgaaggcatacccaaaactgttttcatctgtgaagtggggccagcaagagattgtcgctaaaacataccagttacttgctcgacgagaagtctgggaccagtccgctctggatgtgggcctgaccatgcagctgctcgactgcaacttctctgacgagaatgtcagagccattgctgttcagaagttggagagcctcgaggatgatgacgtgctgcactaccttcttcagctcgtgcaggctgtaaaatttgagccctaccatgactccgccctcgccaggtttctgctaaagagggggcttcgcaacaagcgcattgggcactttttgttctggtttctgcgcagtgagatcgcccaatcccgccactatcagcagcgcttcgcggtcattctggaagcctacctaagagggtgtggtaccgcgatgctccacgatttcactcagcaagtgcaagttatagagatgctccagaaggtcactcttgacataaagtcactcagtgccgaaaagtatgatgtcagctcccaggtcatatcacagctaaaacagaagctggagaatctgcaaaactcacagctgcccgaatcattcagagtgccctatgaccctggtctgaaagctggggctctcgccattgagaagtgcaaggtgatggcctccaaaaagaaacccctgtggctagagttcaagtgcgctgatcctactgctttgtccaatgagactataggaatcattttcaaacatggggacgatctgagacaggatatgttgattttgcaaatcctcaggattatggaatctatatgggagactgagagccttgacctctgcctactcccttacggttgcatcagcactggggacaagatcggcatgatcgaaattgttaaagacgccaccactattgccaagattcaacagagcaccgttgggaataccggcgctttcaaagatgaggttttgaaccactggctaaaagagaagtcacccaccgaagaaaagtttcaagccgcagtcgaaaggttcgtttactcctgcgccggttactgtgtcgcgacctttgtcttgggaatcggagacagacataatgacaacattatgattaccgagacgggtaacttgtttcatattgacttcggtcatattctggggaactataaatcttttttgggaatcaataaggaacgggtgccattcgtgcttacgcccgattttctgttcgtgatggggacatctggcaaaaagacatccccccacttccagaagttccaggacatctgcgtgaaagcgtacttagccttgcgccaccacaccaacctgctgattatactgttctcaatgatgctcatgactgggatgcctcagctcacatccaaggaggatatcgaatatatccgggacgccctgacggttggcaaaaatgaggaggacgccaaaaaatattttctcgatcagatcgaggtttgtcgggacaaaggctggaccgtgcagtttaactggtttctacaccttgtactggggatcaagcagggggaaaagcactctgcttag

SEQ ID NO: 16602 - DNA, 5061 bp, synthetic construct
  misc_feature 1..5061: note = Description of Artificial Sequence: Synthetic coding sequence
  source 1..5061: mol_type = other DNA
atggcacaaatcagctcaaattcaggctttaaagaatgcccgagcagccatcctgagcccacccgcgccaaagatgtggacaaagaggaggccctgcagatggaggccgaggcactggctaagctacagaaggaccggcaggtaactgacaaccagcgcggttttgaactctcttcatctacaagaaagaaggcccaggtgtacaataagcaggattatgacctgatggtgttccctgaatcggactcacagaaacgggcactcgatattgacgttgagaaattgacacaagcagaacttgagaaactgcttcttgatgactcttttgaaacgaagaagacccccgtgctgccggtgaccccgatcctgtcgccctctttttctgctcagttgtatttccgccccaccatccagaggggacaatggccaccggggctccctgggcctagcacgtatgccttgcccagcatttatccatctacttattcaaaacaggccgcatttcagaatggatttaatcccagaatgcctacatttccgtcaacagagcctatataccttagtctgcctggtcagtcaccgtacttctcttatcccctgacaccagctacaccatttcaccctcaggggagtttgcctatctatcggccagtggtgagcacagacatggccaaactgttcgataaaattgcatccacgtctgagttcttaaagaacggtaaggcccgcaccgatctggagatcacggattccaaggtcagcaacttacaggtctcccctaagagcgaggacatctccaagtttgactggttggaccttgaccctttgtccaaaccgaaggtcgacaacgtagaggtcctggaccacgaggaagaaaagaatgtgtcatccctgctagctaaagatccctgggacgccgttctgctggaggaacgcagtacagccaattgtcatctggaacgcaaagtgaacggtaaaagcctctctgtggccaccgtgacccgcagtcagagccttaacatccgtacaacacagctggctaaggcacaagggcatattagtcagaaagaccccaatggcacctccagcttgccgactggctcttccctcctacaggaggttgaagttcagaatgaagaaatggccgcattctgcagaagtatcactaagctgaagacaaagtttccctacactaatcaccggactaatccgggctacttgttgagtcctgtcactgcacagcgcaatatttgcggggagaacgcttccgtgaaggttagtattgatattgagggtttccagcttcccgtcaccttcacatgcgacgtgtccagcacagtcgagataatcattatgcaggcactgtgttgggtacacgatgatctgaaccaggtggacgtggggagctacgtcctgaaggtgtgcggacaggaagaggttctccaaaacaaccactgcctaggttctcatgagcacatccagaattgccggaagtgggacaccgagattcggttgcagcttctgaccttttccgcaatgtgccagaatctggctcgcactgccgaagatgatgagactccagtcgatcttaataagcatctctaccagatcgaaaaaccatgcaaggaggccatgacccgacacccagtcgaagagttacttgacagttaccacaaccaggtggagctagcactgcagattgagaatcagcatcgtgccgtggaccaggtgattaaagcagtacgcaaaatctgctctgcactggatggtgtcgagactcttgcaataaccgagtctgtgaaaaagttaaaacgtgcagtgaacttgccaagatcaaaaactgccgatgtgacctccctgtttgggggagaggacacaagtaggagcagtactcggggcagtctgaacccagaaaaccccgtgcaagtgtctatcaatcagctcaccgctgcaatttatgacctactgcggctgcatgccaactccggacgcagtccaactgactgtgcgcagagcagcaaatccgtaaaggaggcatggactaccacagagcagctccaattcaccatattcgctgcccatggaatcagttcaaactgggtaagcaattacgaaaagtactacctgatatgctctctgtcgcacaacgggaaggacctctttaagccaatacaatctaaaaaggttggcacctacaaaaactttttctatctgattaagtgggatgagctcattatctttcctattcagatctctcagctccccctggaatcagtcctacacctaaccctattcggcatcctcaaccagagctccgggagcagccccgattcaaataaacagcgcaagggccctgaggcattgggaaaggtcagcttacctctattcgattttaaacggttcttaacatgtggtaccaaactgctgtacctatggacaagtagccacaccaattctgttcccggcactgtgaccaagaaaggttatgtcatggagagaattgttctgcaggtcgactttccctcacccgcgtttgatattatatacaccaccccacaggttgatcgaagcattatccaacaacataatctcgagaccctcgagaacgatatcaagggcaagcttttggacattctgcacaaagacagctccttagggctgtccaaagaggataaagctttcttgtgggaaaagcgctactattgcttcaagcaccctaactgtcttccgaagatactggcttctgctcctaactggaaatgggtgaatctggcaaagacatatagccttttgcatcagtggcctgccttatacccactgattgctctcgaattgctggatagtaagtttgcggatcaggaggtccgcagcctggcagttacatggatcgaggcaatatctgatgatgaactgaccgatctgctcccccaatttgtgcaagctctgaagtatgaaatctacctgaatagttctcttgtgcaatttttgctgagcagggccctgggcaatatccaaatcgctcacaacctgtattggttgctcaaggatgccctgcacgatgtgcaatttagtaccagatacgaacacgtactgggtgccctgctttctgtaggaggcaaacgccttagggaagagctcttaaaacagaccaagctcgtgcaactgctcggtggagtcgcagagaaagtccggcaggcctcgggtagcgcgagacaggtggtcctacaaagaagcatggagcgggtccaaagtttctttcaaaagaacaagtgcaggctcccactgaagcctagtttggtcgcaaaggagctgaatatcaagtcgtgttccttctttagttcaaacgctgtacccctgaaggtgactatggttaatgccgaccccatgggagaagagataaacgtgatgttcaaggttggggaggatctgcgacaggatatgctggccttgcagatgattaaaatcatggacaaaatctggctaaaggaagggctggacctccgaatggttatttttaagtgcctgtcgacagggagggacagaggcatggtggaattagtgccggcgtctgataccctgcgcaaaatccaagttgaatacggggttaccggttcctttaaagataagcctttggccgaatggcttcggaaatacaacccctctgaagaagaatatgaaaaagcatcagagaattttatttatagctgcgcaggatgttgcgtcgccacctacgtcctgggaatatgcgacaggcacaacgacaacattatgctgaggtcaactgggcacatgttccacattgattttggaaagttcctgggtcatgcgcagatgtttggctcctttaagcgggatcgtgcaccatttgtcctcacttctgatatggcatatgttatcaatggcggcgagaagcctaccattagattccagctgtttgtagatctgtgttgtcaagcctacaatctgatccgtaaacagacaaacctatttcttaatctgttatccctgatgattccttccgggctgccagagttgacgtctatacaagaccttaagtacgttcgtgacgccttacagccccagacaacagatgcagaggcaacaatctttttcactcgtcttatagaaagttccctcggtagtatcgccacaaagtttaacttcttcattcacaacttggcccagctccggttctcaggcctcccgagcaatgacgaacccatcctgtcattttccccgaaaacatatagttttaggcaggatggcaggattaaggaagtgagcgtgtttacttaccacaaaaagtataacccagacaaacactacatttatgtagttcggattctgagagagggacagattgagccatcatttgtgttccgtaccttcgacgagtttcaggagctccacaataagctcagcatcatctttcccctctggaaactacccgggtttcccaaccggatggtactgggcaggacacacataaaagatgtagcagccaagagaaagatcgagttaaattcatatctccagtctctgatgaatgcttctactgacgttgccgagtgcgaccttgtttgtacttttttccaccctttactgcgggacgaaaaagctgaagggatcgcacgcagtgccgacgctgggtctttcagccctacacccggccagattggcggtgcagtgaagttgagcatcagttataggaacggcacactgttcatcatggtaatgcacattaaagatctcgtgaccgaagacggggcagaccccaacccctatgtgaaaacctatctgctgccggacaatcacaaaacctctaaacgaaagacaaagatctccaggaagacaaggaatccaactttcaacgagatgctggtgtactcgggatactcgaaggagaccctccgtcaacgtgagctccagttgtccgtcctcagtgcagagagcctgcgtgagaacttcttcctcggaggtgtgactttgccactgaaggatttcaacctctctaaggagacggtgaagtggtaccagctaactgctgccacttacctgtag

SEQ ID NO: 16603 - DNA, 393 bp, synthetic construct
  misc_feature 1..393: note = Description of Artificial Sequence: Synthetic coding sequence
  source 1..393: mol_type = other DNA
atggcgcagatttccagcaacagcgggtttaaagagtgtccgtcctcacaccccgaacctacacgggctaaagatgttgacaaagaggaggcccttcagatggaagctgaggcactggctaaactacagaaggatcggcaggtcactgataaccagcgaggctttgagctgtctagcagcactcgaaaaaaggcacaggtgtataataagcaggattacgatttgatggtgtttcccgaaagcgatagccagaaaagggccctggacattgatgtcgaaaagctgacccaagcagagctggaaaagctgctcttggatgattcctttgagacaaaaaagacgccagtcctgcccgttacacccattctcagtcccagcttctctgcccagtag

SEQ ID NO: 16604 - DNA, 1452 bp, synthetic construct
  misc_feature 1..1452: note = Description of Artificial Sequence: Synthetic coding sequence
  source 1..1452: mol_type = other DNA
atggcacagatatcctcaaattccggctttaaggagtgtccaagctcgcatcccgagccgactcgcgcaaaagatgtggacaaggaagaggcattgcagatggaagctgaggctctagccaaactgcagaaggatcgccaagtgacagacaaccagcgcggtttcgaactgtctagttccacacgaaagaaagcccaggtgtataacaagcaggattatgacttgatggtttttcctgagtccgattctcaaaagagggctctggatattgacgttgagaaactaacacaagccgagctggagaagctactcttagacgactctttcgaaaccaaaaagacacctgtcctgccggtgaccccaatcctctctcctagcttctcagctcagttatactttcgaccgactattcagcgcggccagtggcctcctgggctgccaggaccctccacctacgcactgccaagtatataccccagcacttacagcaaacaggccgccttccagaacggttttaacccccggatgcctactttcccttccaccgagcctatttacctctcactccctggacaatctccctatttttcttatccactgacgcccgcgacaccattccatccacaaggaagtttgcccatctaccggcccgtggtgagtactgacatggctaaactgttcgacaagatcgcatctaccagtgaattcttgaagaatggtaaagcacgcactgaccttgagattactgactctaaggtcagcaaccttcaggtcagccctaagtcggaagatatttcaaaattcgactggctcgacctggatcctctgagcaagcccaaggttgacaacgtggaagtgctggaccacgaggaggagaaaaacgtttcctctctgttggcaaaagatccctgggatgctgtactgcttgaagagcgtagtaccgccaattgccaccttgaaagaaaggttaatgggaaatcattgagcgtggcaaccgtaacaaggtcgcagagtctgaatattcgaaccacacagctagctaaagcccaaggacatatctctcaaaaggaccctaatgggacctcttcgcttccaactggtagctccctgttgcaggaagtggaggtgcagaatgaagaaatggcagccttttgccggtcgattacaaagctaaagacaaaatttccatacacaaaccaccgaactaatcctggctacttactctcccccgtcaccgcccaaaggaacatctgcggggaaaatgccagcgtgaaggtgtccattgacatcgagggcttccaactcccagtgacattcacctgcgacgtgtcatccacagtggaaatcattataatgcaggccctctgttgggtgcacgacgatctaaatcaggttgatgtcggtagttatgtccttaaagtctgtgggcaggaagaagtcctgcagaaatag

SEQ ID NO: 16605 - DNA, 3921 bp, synthetic construct
  misc_feature 1..3921: note = Description of Artificial Sequence: Synthetic coding sequence
  source 1..3921: mol_type = other DNA
atggccgctttttgcaggagcatcaccaagctaaaaactaaatttccttacacaaatcaccgtacaaaccctgggtacctgttgagccccgtcacagcccagcgcaatatctgtggcgagaacgccagcgtgaaagtgtccattgatattgagggcttccagctacctgtgacattcacttgcgatgtctcctctactgtcgaaatcatcataatgcaggccttatgttgggttcacgacgacctgaaccaagtagacgtgggttcatacgtcctgaaggtctgcggccaagaggaagtcctccagaacaaccactgcttagggtcgcacgaacacatacaaaattgtagaaagtgggatactgagatccgtctgcaattacttaccttttcagccatgtgtcagaatctagctagaactgctgaggatgatgagactccggtcgatctaaataaacacttgtatcagatagaaaagccatgcaaggaagcgatgactcggcaccccgtagaggagctgctggactcgtatcacaaccaggtggaattggcgctgcagatcgagaatcagcatcgtgcagtggaccaggtcattaaagcagttagaaagatttgttcagccctggacggtgtggaaactctggctattaccgaatcggtgaaaaagttaaagcgtgccgtgaacttacctcggtctaaaacggcagatgtcacctctttgtttgggggagaagacacttcacggagctccacccggggatccctgaaccctgaaaacccagtgcaggtgtccatcaatcagctgacagcagccatttacgaccttctacgcctacatgcgaattcaggcaggtcaccaactgactgtgcacaatcgagcaagagtgtcaaagaagcttggacgactacggaacagctgcagtttactatcttcgctgcacatggcatctcaagcaattgggtgagcaactatgagaagtactaccttatctgttctctgtctcataatggcaaggacctttttaaaccaatacagtccaagaaggtgggcacctataagaatttcttttaccttatcaagtgggatgaactaatcattttcccgattcagatctcccaattgcccttggaatccgtgctccatttaactctgtttggaattctgaaccagtcctcagggtcatctcctgatagtaacaaacagcgcaagggacccgaggctttgggaaaggtctccctccctctgtttgatttcaaacgatttctgacctgcggaactaagctgctgtacctgtggacctcatcgcataccaactctgtcccaggcaccgtaaccaagaaaggctacgtcatggagcgcatcgtcctccaagtggactttcccagtcctgcctttgatatcatctacacaaccccccaagtcgacagaagtattatccagcagcacaatctcgaaactcttgagaacgacataaaaggcaagcttctggacatactccataaagacagctccctgggcctgtccaaagaggataaagcatttctgtgggaaaaaagatactactgcttcaagcacccaaattgtcttccaaagattctcgcgtctgcgccaaactggaaatgggtcaacctagcaaaaacgtactccctgctccaccagtggcccgcattatatccgctcatagccctcgagttgctggacagtaaattcgcagaccaggaggtccgatctctagctgtcacatggatcgaagccatctcagacgatgaactgactgatctgctgccccagtttgtacaggctctcaaatacgagatttacctgaactccagtttggttcagttcctgcttagccgagccctgggaaatatacagattgcgcacaatctgtactggctcttgaaggatgcccttcacgatgtccaattttctactcgctacgagcacgtgctgggcgctctgctgtccgtcggaggaaagaggcttcgagaggaactgctaaaacagactaaactggtgcaactgctgggaggggtagctgaaaaagtcaggcaggcatcagggagcgctcgccaggtggtgctgcagcgcagtatggagcgggttcaatcttttttccagaagaacaaatgtagactgcctctgaagccatccttggtggccaaagaactcaacatcaagtcatgctcttttttcagctccaatgccgtgcctctcaaggtcaccatggtgaacgccgatccgatgggagaggaaatcaatgtcatgtttaaggttggtgaggatctgcgacaagatatgctggccttacagatgataaagataatggacaagatctggctgaaggagggactggacctgaggatggtcattttcaaatgtctgagtaccggacgtgataggggaatggtggagttagtcccagcttcggatacactgagaaagatacaggttgagtatggcgttacagggtcattcaaggataagccgttagcggagtggttgaggaagtacaatccttctgaggaggaatacgaaaaggctagcgagaacttcatctacagttgtgccgggtgttgtgtggccacctatgtgctagggatatgcgatagacacaacgataacattatgctccgcagcaccgggcatatgtttcatattgactttggcaaatttctgggacacgcgcaaatgtttggaagctttaaacgcgatcgggcaccattcgttctgacttccgacatggcttatgtgataaacggtggcgaaaagccaacaatcagattccagctcttcgtcgacctgtgttgccaggcctataatctgattagaaagcagaccaatctgttcctgaatcttctgtccctgatgattccttctggcctgccagagctcaccagtattcaagacctaaaatacgttagggacgccctgcagccccagaccacggacgccgaagccacaatcttttttacgcgtcttatcgaaagcagtctgggctcgatcgccacgaagtttaatttctttatccataacctagctcaactccggtttagcggcttacctagcaacgacgaacccatcctaagcttcagtccgaagacatattcgtttcgacaagacggcaggataaaagaagtatccgtcttcacctatcataaaaaatataatccagacaagcattacatctatgtcgtacggatactgcgcgagggacagatcgaaccctcattcgtattcaggactttcgacgaatttcaggagctacacaacaagcttagtatcatcttccctctttggaagctgcctggcttccctaacaggatggtattgggccggacccacatcaaggatgtggccgcgaaaagaaaaatagagcttaactcctacctgcagagcctaatgaatgcatcaaccgatgtggctgaatgcgacctggtgtgcacattctttcaccccttgctgcgagatgaaaaggcagaggggattgcaaggtccgccgacgctggatcattttcccctactcccggccagattggcggcgcagtgaaactgtcaataagttacagaaatgggaccctctttattatggtgatgcacatcaaagatctcgtcacagaagacggagccgatcctaacccctatgtcaaaacttacctattgccagacaaccataagacaagtaagagaaaaacaaagatatcccggaaaacccggaatcccactttcaatgaaatgctagtgtatagcggctattcaaaggaaactctgagacaaagagagctgcagctgagcgtgctttcagccgagagccttcgagagaatttcttcctcggaggggttactctgccactgaaagattttaatcttagtaaggagaccgtcaaatggtaccagctaactgccgcaacatacctttag

SEQ ID NO: 16606 - DNA, 1947 bp, synthetic construct
  misc_feature 1..1947: note = Description of Artificial Sequence: Synthetic coding sequence
  source 1..1947: mol_type = other DNA
atggcccagatctctagcaactcaggtttcaaagaatgccccagcagccacccagagcccaccagggcaaaagatgtggacaaggaagaggccctacagatggaggcggaagccctggcgaagctgcaaaaggaccggcaggtgaccgacaaccagcggggctttgagttgtcctcttcaacccggaagaaagctcaggtctacaacaaacaggactatgatctcatggtgttccccgaatccgacagtcagaaacgggctctggatattgacgtcgagaagctcacgcaggctgaattggagaagttactgctcgatgatagcttcgagacaaaaaagacgccagtgctccccgtcactcccattctctccccaagtttctccgcccaactgtacttcaggccaacaattcagcgaggccagtggccccctggtctgcccggtccttctacgtacgccctcccatctatttatccctcaacttatagcaagcaggcggcttttcagaatggctttaatccccgaatgccaaccttcccgtctacagagcctatctaccttagtctgcctggccagtccccatattttagttaccccctgaccccggccacacccttccaccctcaggggtccctgcctatctaccggcccgtagtgtccaccgatatggccaaactgtttgacaaaattgcctccacctccgagtttctcaagaatgggaaggcaaggaccgacctggaaataaccgatagtaaggtatctaatctccaggtctcaccgaagtctgaggacatctcaaagtttgactggctcgacctggaccccctgtccaaacctaaggtcgacaatgttgaggtgctggatcacgaggaagagaagaacgtgtccagcttgctggcaaaggacccgtgggatgcagtactactagaggaaagatctacagcaaactgtcacttggagcggaaggtcaacggcaagagcctgtccgtggctaccgtgacccgaagtcagagcctcaacattagaacgacccagctggccaaggcacaggggcacatctcacagaaggacccaaatggtaccagttccctgcctaccgggtcatctcttcttcaggaggtcgaggttcagaatgaggaaatggctgctttttgccggagcattacgaagcttaagaccaaattcccttacaccaatcatagaacaaaccctgggtatttacttagtcctgtaaccgcgcagaggaatatttgtggtgaaaatgcaagtgtgaaggtcagcatcgacatcgaggggttccagttgcctgttacatttacgtgcgatgtctcaagtacagtggaaattattattatgcaagcactttgctgggtgcatgacgatttgaatcaggtggatgtgggctcatatgtgctgaaagtctgtggccaggaagaagtgctgcagaacaatcattgtttaggaagtcacgaacacatccagaattgtcgtaaatgggacactgagattcgcctgcagctattgacattctccgcaatgtgccagaatctcgccaggacagccgaagatgacgagactccagtggaccttaataaacatctgtaccagattgagaaaccatgcaaggaggcaatgacaagacatcctgtggaagagctgctggacagctatcataaccaagtcgagctcgcactgcagattgaaaatcagcatcgggccgtggaccaggtgatcaaggctgtcagaaagatttgcagcgcccttgacggcgtagaaaccctcgccatcactgagagcgtgaaaaagctgaaaagggccgtcaatctaccgcgatccaaaaccgctgacgtcacatcgctttttggcggagaggacacttccagaagttctaccagagggtcgctgaacccagaaaatccggtgcaggttagcatcaaccagttgtag

SEQ ID NO: 16607 - DNA, 2664 bp, synthetic construct
  misc_feature 1..2664: note = Description of Artificial Sequence: Synthetic coding sequence
  source 1..2664: mol_type = other DNA
atgggagaggccgagaaattccactacatttattcgtgcgatcttgatataaatgtacagctgaaaatcggttccctggaggggaaacgagagcagaagagctataaggcagttttggaagaccctatgttgaaattctctgggctctaccaggaaacatgcagcgacctctatgtcacctgccaggtcttcgctgaagggaaacctctggcccttcctgtgcgaacctcctataaagcgttcagcactcgctggaactggaacgagtggttaaaattacccgtcaaataccccgatctgccccggaatgcacaagtcgcactgacaatttgggacgtttacgggcctggaaaggccgttcccgtgggcggcaccactgtctcgctctttggcaaatatgggatgttcagacagggcatgcacgatctgaaagtgtggccgaacgtggaagccgatgggagcgagccgaccaagacccccggcagaacatcctctacactgtccgaggaccagatgagtagactggctaaactcactaaagcacaccggcaggggcacatggttaaagtagactggcttgacagattgacattccgcgagatcgaaatgattaatgaatccgaaaagaggtctagcaacttcatgtatttaatggtcgagttcaggtgtgtgaagtgcgacgacaaggagtacgggattgtgtactacgagaaggacggcgacgaatcctctccaatccttacatcctttgagctcgtaaaggttccagacccccagatgtcaatggaaaaccttgtggagtctaagcaccataagctcgctcggtcgctccgttccggtccatcagaccatgatctgaaaccaaacgccgcaaccagagaccagctcaacataattgtgtcctatcccccaacgaagcagctgacatatgaggaacaggatctggtgtggaaatttagatactacctcactaaccaggaaaaggccctgaccaagtttctcaaatgcgttaattgggatctcccacaggaggcaaagcaagctctcgagctgcttggtaaatggaagcctatggacgtcgaggacagcctggaactactcagttcccactacaccaatcctaccgtgcgaaggtacgccgtggccaggctgagacaggcggacgatgaagacctgttgatgtacctgctgcagttggtacaggcccttaagtatgagaatttcgatgacatcaaaaacggactagaacccacgaagaaagattcccagagcagcgtatctgagaacgtgagcaattcgggaatcaatagcgcagaaatcgattcatcccagatcattacctcacccctcccaagcgttagctctcccccaccagctagtaaaactaaagaggtgccagacggagaaaatctggaacaagacctatgtacctttctgatatctcgtgcctgtaagaatagcactttagctaattatctctattggtacgtaattgttgagtgtgaagatcaggacacacagcagagggatcccaaaacccacgagatgtacctgaacgttatgaggaggttcagtcaagctttgctgaagggcgataaaagtgtcagggtgatgagaagtcttctggctgcccagcaaaccttcgtggataggctcgttcacctgatgaaggctgtgcagagggagtcaggcaatagaaaaaaaaagaatgagaggctgcaggccctgctgggggacaatgaaaaaatgaatctcagtgacgttgagttaattcctcttcctctggaaccgcaggtaaagattaggggcattatccctgagactgcgacattgttcaaaagcgctctcatgccagcccagctgttcttcaaaacagaagacggcggcaagtacccagtaatcttcaaacacggggacgacctcaggcaagatcagttgatcttgcaaataatttcgctgatggataagctcctgcgaaaagaaaaccttgacctcaagcttaccccgtacaaggttctggcaacctctacgaagcacggtttcatgcagtttattcagagtgtccctgtggccgaagtgttagataccgaaggctccattcaaaacttctttcgtaagtacgctcccagcgaaaacggacctaatggcatctcagcagaggtgatggatacatacgtgaaatcgtgcgctggatattgtgtaatcacttacattctgggagtcggggaccgacatcttgacaatcttctgttgaccaagaccggcaaactgttccacatcgacttcgggtatattcttgggcgcgaccctaagcccttgcccccgccaatgaaactaaacaaagaaatggtcgaaggcatgggggggacccagtcagaacagtatcaagaatttcggaagcagtgctataccgcctttttacaccttagacggtattctaatctgatcctcaacctattcagtcttatggtggatgctaatattcctgacatcgcattagagcctgataagaccgtcaaaaaggttcaagataaatttcgcctggatttgagcgacgaagaagccgtacattacatgcagagccttatcgacgaaagcgttcatgctctgtttgccgctgtggtggaacagatccacaagttcgcacaatattggaggaaatag

SEQ ID NO: 16608 - DNA, 2475 bp, synthetic construct
  misc_feature 1..2475: note = Description of Artificial Sequence: Synthetic coding sequence
  source 1..2475: mol_type = other DNA
atgggggaagctgaaaagttccactatatttactcatgcgacttggacataaacgttcagttaaaaatatggaatgagtggctgaaactgcctgttaaataccctgacctccctcgtaacgcgcaggtggcccttaccatctgggatgtgtatggtcctggaaaggctgttcccgtgggtggcactacggtttccctctttggaaaatatggcatgttccggcaaggaatgcatgaccttaaagtgtggcccaatgtggaagccgatgggtccgagcccaccaaaacccctggacggactagcagcacgttgtctgaagatcagatgtcacggcttgctaagcttacaaaggcacaccgacagggccacatggtgaaggtagactggctagaccgtctgacgttcagagaaatcgaaatgatcaacgagagtgaaaagaggtcctccaattttatgtatttgatggtggagtttcgttgcgttaaatgcgacgacaaggagtacggcattgtgtattacgaaaaagatggtgacgaaagcagccccatcttgacttcgtttgagctcgtgaaagtgcccgatcctcaaatgtcaatggaaaacctggtagaaagcaagcaccacaagctggctcgatcccttcggtctggcccaagtgatcatgacttgaaaccaaacgcagcaactagagatcagctgaatatcatcgtcagctatccccctaccaagcaactcacgtatgaggagcaagatctggtgtggaagttccgctattaccttaccaatcaagaaaaagccctgaccaagtttcttaagtgtgtcaactgggacctgcctcaagaggctaaacaggccctggaactcttaggcaagtggaagcccatggatgtcgaagacagccttgagctcctgtcttcccactataccaaccctaccgtccggcgatatgccgtcgcacggctccgccaagccgacgatgaggacctattgatgtatctgttacagttagtccaagcactcaaatacgagaacttcgatgacattaagaatggtctggagcccacaaagaaggactcacagtcgtctgtctccgagaatgtgtccaatagcggcatcaactcagccgagatcgatagttctcagatcatcaccagtccacttccctcggtctcatcccctcccccagcatctaaaaccaaagaggtgcctgacggggagaacttagaacaggatctgtgcacattcctcatatcccgagcctgcaagaactcgacgctggctaattacctgtactggtacgtcatcgtggagtgtgaggaccaggacacacagcagcgggaccctaagacccatgaaatgtacctgaatgtaatgcgcagattctcccaggctctattaaaaggagacaagagcgtccgagtcatgcgaagtctgctggcggcgcagcagacttttgtggaccgtctcgtgcacttgatgaaagccgtccagcgcgaatccgggaatcgaaagaaaaaaaacgagcggttacaggccctgctcggagacaacgaaaaaatgaatctgagcgacgtggagctcatccctctgccgctggagcctcaggtgaaaataagaggcattatccctgagacagcaacactcttcaagagcgctctaatgcctgcccagttgtttttcaaaacagaggacggggggaagtatcccgtgattttcaagcatggagacgatctacgccaggaccagttgatattgcagatcatatccctgatggacaaactattaaggaaggaaaatcttgatcttaaactcactccctacaaggtacttgctaccagcacaaagcacggctttatgcagttcattcagtcggtgccagtggccgaggtactggataccgaggggagcatacagaacttcttccggaaatatgctccatctgagaatggaccgaacggcattagtgccgaagtgatggatacgtacgtaaagagttgcgcaggctactgtgtgattacatatatcctcggggtgggcgatagacatctggataaccttctactcactaaaactggcaaactgtttcatattgacttcggttacatactgggtagggacccgaagcccctacccccacccatgaagttaaacaaagagatggtcgaggggatgggggggactcagtcagaacagtaccaagagttccggaagcagtgttacacagcattcttacacctacgccggtattccaacttgattctgaatctgttttccctaatggtggatgccaacattcctgacattgctttggagcccgataaaaccgtgaaaaaggtacaggacaaatttcgcctcgaccttagcgacgaagaagcggtccactatatgcagagccttatcgacgagtctgtgcatgcgctgtttgccgccgtcgtcgaacaaatccacaaattcgcccagtactggcggaagtag

SEQ ID NO: 16609 - DNA, 2175 bp, synthetic construct
  misc_feature 1..2175: note = Description of Artificial Sequence: Synthetic coding sequence
  source 1..2175: mol_type = other DNA
atgagcgccgaggggtaccagtacagagcactttacgattacaaaaaagagcgagaggaagacatcgacctgcaccttggagatatattgactgttaacaaagggtctcttgtggctctgggcttcagtgacgggcaggaggctagacccgaggagataggctggttgaatggctacaatgaaacgaccggtgagcgtggagattttccaggaacttacgttgagtacattgggcgaaagaagatctcccctcctacaccgaagccgaggccccctaggccattgccggtggcccctggcagctctaagactgaagcagacgtcgaacagcaagctctgacactgccagatctggccgagcagtttgcgccaccagatatagcacctccactactgattaaactggtcgaagctattgagaaaaaaggcctggagtgctccaccctgtataggacacagtccagcagcaaccttgctgaactgcgtcaactcttggactgtgacactccaagcgtggatctggaaatgattgatgtccacgtgctggccgacgctttcaaacgatatttgctcgacttacctaatcccgttattcccgcagcagtgtactctgagatgatcagtttggctcccgaagtccaaagttccgaggagtacatacagctgctgaagaaactgatcaggtccccgagtataccccaccaatattggttgactctgcaatacttactgaagcatttttttaagctcagccagacttcaagcaagaatctcttgaacgcccgagtcctttctgagatttttagccccatgttatttcggttctcagctgcctcttcagacaataccgagaatttaataaaggtgatagagatcttaataagcaccgaatggaatgaacgacaacctgctcccgcccttccaccaaaacctcccaagcccactactgtcgcaaacaacgggatgaataataacatgagcctgcaagatgcagaatggtattggggagacatcagtcgggaagaggtgaacgagaagctgcgggacaccgctgacgggacctttttggtgcgtgacgcctctacgaaaatgcacggagattatacactcacattacggaaaggtgggaacaacaaactgattaagattttccaccgggatggcaaatatggattctccgatccattaacattcagcagcgtcgtcgagcttattaatcactatagaaacgagtctctggcccagtacaacccaaagcttgatgttaaactcttataccccgtctccaagtaccagcaggatcaggtggtgaaagaggataacattgaggcggttggtaaaaaactgcacgagtacaatacgcaatttcaggagaagtcccgggaatatgacaggctctatgaggaatacacacgcacgtctcaagaaatccagatgaagcggactgccattgaagccttcaacgagactattaaaatttttgaggagcagtgccagactcaagagcggtatagtaaagagtacatcgagaagttcaaacgcgaaggcaacgagaaggaaattcagcggatcatgcacaattacgacaaactgaagtcaagaatttctgaaattatagatagccggcggcgtttggaagaggaccttaaaaaacaggccgcagaatacagagagatcgacaaacgtatgaacagtattaagcccgacctcattcagttgaggaagacgagggatcagtacctcatgtggctgacccaaaagggggtgaggcaaaaaaaactgaatgagtggctaggcaacgaaaataccgaggaccagtattctctggtggaggacgacgaggacttaccccaccacgatgagaagacttggaacgtgggctcttctaaccgcaataaggccgagaacctgcttagaggcaagcgagacggtacattcctggtccgggaatcgtcaaagcaaggctgctatgcatgctctgtcgtggttgatggagaagttaagcactgtgtgataaacaaaacagccaccgggtacggctttgcagagccctataatctgtacagctcgctcaaggaacttgtgttgcactaccagcatacctctttggtgcaacacaacgatagccttaacgtgacactggcgtaccccgtctacgcacagcagcgtaggtag

SEQ ID NO: 16610 - DNA, 1275 bp, synthetic construct
  misc_feature 1..1275: note = Description of Artificial Sequence: Synthetic coding sequence
  source 1..1275: mol_type = other DNA
atgcacaacctgcagacacttccacccaagccacctaaaccaacgactgtcgccaataatggcatgaataataatatgagcctgcaggatgccgagtggtattggggcgatatcagccgggaggaggtgaatgaaaaactgcgggataccgccgacggcaccttcctagtcagggacgccagcactaagatgcacggggactataccttgaccctgcggaagggagggaataacaaattaatcaaaatattccatcgtgacggtaagtacgggttcagtgaccccctgaccttctcctccgtggtcgaacttatcaatcactaccggaacgaatcgctggcccaatacaatccaaagctggatgtgaaattgctctaccccgtgtccaaataccaacaggatcaggtcgtgaaagaggataatatcgaggccgttggtaagaagctgcatgagtataatacacagttccaggagaaatcgcgggagtacgaccggctgtacgaggagtacacacgtacgtcccaagagattcagatgaagcgcactgctattgaagcattcaatgaaacgattaagatttttgaggaacagtgtcagacacaagagcggtactccaaggaatacatcgagaagtttaagagagagggaaatgagaaagagatccagcgcatcatgcataactatgacaaactgaagagtaggatttcagagatcatcgactcaagacggcgcctcgaagaggatcttaaaaagcaggcagctgagtatcgcgaaattgacaagcggatgaatagcatcaagccagacctcatccagctccgtaagacccgggatcaatacctcatgtggctgacccaaaagggcgttcgccaaaaaaaactgaacgaatggctcggcaacgagaatacagaggatcaatacagtcttgttgaggatgatgaggaccttcctcaccacgatgagaaaacctggaacgtgggatcgtctaatcgcaataaagccgaaaatttgttgcgcgggaaaagggatggcacattcctggtgcgggagtcgtcaaaacaggggtgctacgcatgtagtgtcgtggtcgatggcgaggtgaagcattgtgtgatcaataaaacagctaccggatatggctttgccgaaccctataatttgtactcttcccttaaagaacttgtgctccattaccagcatacttcccttgtgcagcacaatgacagccttaatgttaccttggcctaccctgtgtacgcccagcagcgtcgctag

SEQ ID NO: 16611 - DNA, 1365 bp, synthetic construct
  misc_feature 1..1365: note = Description of Artificial Sequence: Synthetic coding sequence
  source 1..1365: mol_type = other DNA
atgtataatactgtatggaacatggaagacttggatctggaatacgcgaaaacagacataaactgcggcaccgacctgatgttctatattgaaatggatccacctgcccttccgccaaaacccccaaagcctactactgtggcaaacaacggaatgaacaacaacatgtcattgcaggatgctgagtggtactggggcgacataagtagagaggaagtaaacgaaaagctccgagacacagcagacgggacatttcttgtgcgcgacgcctccactaagatgcacggggattacaccctaactctgcggaagggtggcaacaacaagttgataaagatttttcatcgtgacgggaaatatggctttagcgatccacttacattttcctcagtggtcgaactgattaatcattataggaatgaatcactggctcaatacaatcccaagttggatgtgaaattgctctatcctgtctctaaatatcagcaagaccaggtcgtcaaggaggataacatagaagccgtaggcaaaaagctccacgagtataacacccagttccaggagaaatccagggagtacgacagactctacgaagagtacactcgcacttctcaagaaatccagatgaaacgaactgcaattgaagccttcaacgaaacaatcaagatcttcgaagaacagtgccaaacacaggaacgctatagcaaggagtatatcgaaaaatttaaaagagagggaaacgagaaggagatccagcggatcatgcataattacgacaagctcaaatcaagaatcagcgagatcatcgacagcagacggaggctggaggaggacctcaaaaaacaagccgccgagtaccgggaaatagacaaaagaatgaactcaatcaagccagacttaatccagttgcgaaaaacaagagatcagtatctaatgtggttaactcagaagggggtccggcagaaaaagctgaacgagtggctcggtaatgaaaatacagaagatcagtacagccttgtagaagatgacgaggatctcccccaccatgacgagaaaacatggaacgtgggttctagcaacaggaataaggctgagaacctccttcgcggcaagcgggatggaacttttcttgttcgagagagttccaagcagggctgttatgcatgttcagttgtcgtggatggcgaagtaaagcattgtgtcattaacaagactgcaactggctacggatttgcagaaccctataacctatatagctccttgaaggagcttgtgctacattaccagcacacctcactggtgcagcacaacgattctcttaacgtgactctcgcatatcctgtttacgcccagcagcgcagatag

SEQ ID NO: 16612 - DNA, 2199 bp, synthetic construct
  misc_feature 1..2199: note = Description of Artificial Sequence: Synthetic coding sequence
  source 1..2199: mol_type = other DNA
atgtccgccgaaggataccaatacagagccctctatgattataaaaaagagcgggaggaagatatcgatctgcacctgggtgatatcctcaccgttaacaaggggagcctagtggccctcggattttctgacgggcaggaggccagacccgaggagattggatggctcaacggttataatgagactacaggggagaggggtgacttccctggcacatacgtggagtacatagggcggaagaagataagcccccctactcccaagccccgaccgcctcggccactgcccgtggcaccggggagcagcaagaccgaggcggatgtcgaacaacaagcgcttacactccctgacttagcagaacagtttgcccccccagatatcgcccctcctctactgataaagctcgtcgaggccatcgagaaaaagggcttggaatgctcaacattgtataggacacagtcgtctagcaacctcgccgagttaagacagctgctggactgcgacactccctctgttgatttagagatgatcgatgtgcacgttctggccgatgcttttaaacgttatcttctcgatttacctaacccagtcataccagctgcggtgtactcggaaatgatcagcctcgcgccggaagtccagtcatctgaagaatacatccagctgctgaagaaactgatccgtagtccgtctatcccacaccaatattggctgaccctacagtacctgctcaaacatttttttaaactcagtcagacctcatccaagaacctgctgaacgctagggtgctgtctgagattttctcacctatgttatttagattctccgccgcctcaagtgataatacagagaatctgataaaggtgattgaaatcctcataagcacagagtggaacgagaggcagccagcacctgcacttccaccaaagccccctaagccaactactgtggctaataacggtatgaataataacatgagcctgcaggatgccgaatggtattggggcgatatttccagagaggaagtgaatgaaaagctgagggacacggccgatggcacgttcctggtccgggacgccagtacaaagatgcatggcgattacaccttgactttgcgaaagggcgggaacaacaaactgatcaagatctttcatcgtgatggcaagtatggatttagtgatcccttgacattctccagcgtggtggagctcattaatcactatcgaaacgagtccctcgcacagtacaaccccaagcttgacgtgaagttgctctatcccgtcagcaaataccagcaggaccaggttgtcaaggaggacaacatagaggccgtaggaaagaagctgcacgaatacaatactcagttccaagaaaagtcacgagagtatgaccggctgtacgaagagtacactagaaccagccaagagatccagatgaaaaggaccgccatagaggcattcaacgagacaataaagatattcgaggagcaatgccaaacacaggaaaggtactccaaagaatacatcgaaaagttcaaaagggaggggaacgaaaaagagatccaacgcatcatgcacaactacgataaactcaagtcacgaatttccgagattatcgatagcagacgacgtctggaagaggatttaaagaaacaggccgcagaataccgggagatcgataagcgcatgaattcgattaaacccgacttgatacagctgcgaaagacacgcgaccagtaccttatgtggctaacacagaaaggagttcgccaaaaaaagttgaatgaatggttgggtaacgagaataccgaggagaacttccttagttgcctaccatctcaatatagcctggtcgaggacgacgaggatttgcctcatcacgacgagaagacgtggaatgtcggatccagtaatcgaaataaagctgagaaccttcttagggggaagagggacggaacatttctcgtaagggagtctagtaaacaggggtgttacgcttgctctgtcgtggtcgatggagaagtaaaacactgcgtgatcaacaaaacagcaaccggatatgggttcgccgagccatacaacctgtatagttctttaaaggagctcgttttgcattaccagcacacttctcttgttcagcataacgattcactgaatgttaccctggcctaccccgtctacgcccagcagcgtcggtag

SEQ ID NO: 16613 - DNA, 2175 bp, synthetic construct
  misc_feature 1..2175: note = Description of Artificial Sequence: Synthetic coding sequence
  source 1..2175: mol_type = other DNA
atgagtgctgagggctatcaataccgcgcgctgtacgactacaagaaggaacgagaggaggatattgatctgcacctgggggacattctcacagtcaacaaaggaagtctggttgctctggggttttctgatggtcaggaagcacgcccggaagagataggatggctgaacggctacaacgagactactggagagcgaggtgacttccccgggacttacgtcgagtacattggaagaaagaagatctctccgccaacaccgaagcctcgacctcctaggccactccctgttgcacccggatcctctaagactgaagccgacgtcgagcagcaggcactgaccctcccggacttggcggaacagtttgccccacccgacattgctcccccattgctcatcaagttggtcgaagccattgaaaagaaggggttggaatgcagcacactctacaggacacagtctagtagcaacctggccgaactgcggcaacttttggactgcgacacaccttccgtggatctagaaatgattgacgttcacgtcctggcagacgcatttaaacgctacctcctcgatctgccaaatccagtgatcccagctgctgtgtattccgaaatgatttcccttgcacccgaggtgcaatcgagtgaggagtacattcagctgcttaaaaagctgatccgatctccatcgatcccccaccaatattggcttacactccaatatctcctcaaacattttttcaagctgtctcagactagcagcaagaatctgttgaacgcacgagtgttatcagaaatcttttcccccatgctctttaggttctccgcagcaagctctgacaacacagagaatctcatcaaggttatcgagatcttgatctcaacagagtggaatgagagacagcccgcgcctgctctgccacccaaaccacctaagcccacaacggtcgctaataacgggatgaacaataatatgtccttgcaagacgccgagtggtactggggggacatctccagagaagaggtcaacgagaagcttcgggatacagccgatggcaccttcctggtgagagacgctagcacaaagatgcatggagactatacactcacccttcggaagggtgggaacaataagcttatcaagatatttcatcgagatggcaaatacgggtttagcgatcctctaaccttttcaagtgtggtggagttaataaatcattatcgcaacgagtccctggcccaatacaatccaaagctcgatgtgaaactcctatatccagtctcaaagtatcagcaggatcaggtggtcaaggaggacaacatcgaggccgtgggcaagaaacttcacgaatataacacgcagttccaggagaagtccagagaatatgacagactctatgaggagtatacacgaaccagtcaggagatccaaatgaaacgtacggcaattgaggcatttaatgagacgataaaaatttttgaggagcagtgccagacgcaagagcgttacagcaaagagtacattgaaaagtttaaacgcgagggcaatgagaaggaaattcagagaataatgcacaactacgacaagttgaagtcccggatatccgaaattatcgactccaggagacggttagaagaggacttgaagaagcaggctgcagagtatcgagaaattgacaaacgaatgaatagcattaagccggacttaatccagctgaggaaaacacgggaccaatatctcatgtggctaacccagaagggggttcgtcagaagaagctgaatgagtggcttggcaacgaaaataccgaagatcagtatagcttggtggaggacgacgaagacttgcctcatcacgacgaaaaaacctggaacgtggggtcttcaaatcgaaataaagcggaaaacctcctgcggggtaagcgcgatggcacgttcctggttcgggagagctctaagcagggctgctacgcgtgcagcgtagtggtggacggagaagtcaagcattgtgtgatcaacaaaaccgcaaccgggtacggattcgcggaaccctataatctttacagttcgctcaaggagctggtcctccattatcagcatacatctttagttcagcataatgattcccttaacgtgacgttggcctacccagtttatgcccaacagagacgatag

SEQ ID NO: 16614 - DNA, 414 bp, synthetic construct
  misc_feature 1..414: note = Description of Artificial Sequence: Synthetic coding sequence
  source 1..414: mol_type = other DNA
atgcacggggattatacactgactctgcgaaaaggtgggaataataaactaatcaaaatttttcacagagacgggaaatatggcttctccgatccactgacattcagttctgttgtggaactgatcaatcattatagaaacgaatctcttgctcagtacaacccaaaactggatgtaaaactgctatatcctgtatctaagtaccagcaggaccaggtggttaaagaagataatatcgaagcagtgggaaagaaacttcatgaatacaacacccagttccaggaaaagagtcgagaatacgaccggctttatgaggaatataccaggacatcccaggaaatccagatgaaacgaacggcgatcgaagcctttaacgaaaccatcaagatctttgaggagcagtgtcagacatag

SEQ ID NO: 16615 - DNA, 2175 bp, synthetic construct
  misc_feature 1..2175: note = Description of Artificial Sequence: Synthetic coding sequence
  source 1..2175: mol_type = other DNA
atgtctgccgagggctaccagtatcgagccctgtacgactataagaaagaaagagaggaggacattgatttgcatctgggtgacatcctcacggttaacaaggggtccttggtggccttaggcttctccgacggccaggaagcacggccagaagagattgggtggttaaacggttataacgaaacaaccggcgagcgtggcgattttccaggtacttacgtggaatatattggacgaaagaagatctctcccccaacacccaagccaaggccccctaggcccttgcccgtcgcacctggttctagtaaaacagaagccgatgtcgagcagcaggccctgaccctgcctgacctcgcggaacaatttgccccccccgacattgccccacctctgctaattaaactggtggaggcaatcgagaagaagggactcgagtgtagcaccctgtatcggacccaaagttcctcaaatctggcagaattgagacagctgctggactgtgacacacctagcgtggatctggagatgatagatgtgcacgtgttggccgatgcgttcaagaggtacctgctcgaccttcctaatccagtaattcctgccgctgtgtattccgaaatgatctctttggcgcccgaggttcagagctctgaggagtacatccagctgctgaaaaaactgatccgatctccgagtattccccaccagtactggctaacactgcagtacctgctgaaacatttctttaagctgagtcagactagctcaaaaaacctgctgaacgcccgcgtgctgagtgagatctttagtcccatgctgtttcgcttctcggctgcctcttccgacaacaccgagaacctgatcaaggtaattgaaattttgatctccaccgagtggaacgaacggcagcccgcccccgcgctgccgcccaagccaccaaagcctactactgtggccaacaacggaatgaacaacaatatgtccctgcaggacgcggagtggtactggggcgacatttctcgagaagaggtgaacgaaaaactgcgcgatacggctgacggtacttttcttgtgagagatgccagcaccaagatgcacggcgattatactttgactctgcgaaagggcggaaacaacaagctgataaagatctttcatcgtgatggaaagtatggattctcagaccccctcacattcagcagtgtagtggagctaatcaaccattatagaaacgagagcctcgcccaatataacccaaagctagatgtgaagctcctctatcctgtatccaagtaccagcaggatcaggtcgtgaaggaagataacatcgaggctgtgggaaagaaactccatgaatacaatacacagttccaagaaaaatcacgcgagtatgacaggctttacgaggagtatacacgaacctcccaggagatccagatgaagcggacagccatcgaggcctttaacgagaccatcaagatctttgaggagcagtgtcagactcaggagagatactccaaggaatatatcgagaaattcaagagagaggggaatgagaaggagattcagaggatcatgcataattacgataaactcaagtcccgcatttcagagatcatcgactcacggagacgtctggaggaagacctgaagaagcaggccgccgagtacagagaaatcgacaagaggatgaatagcatcaagccggatctcattcaactgaggaagaccagagaccagtacctgatgtggctcacccagaaaggagtccgacagaagaagctcaacgagtggttgggcaacgagaacaccgaagaccagtattctctagtggaggatgacgaggatctcccgcatcacgacgagaaaacctggaatgtcggaagttccaaccgaaacaaggccgagaatttgcttcgggggaagagggacgggaccttcctggtcagggagagttcaaagcaaggatgctatgcctgctcggttgttgttgatggcgaggttaagcattgcgtgattaacaaaacagccactgggtacggtttcgcagagccttacaacctgtactccagccttaaagaactggtactgcattatcaacacacttccctggtccagcacaacgatagtcttaatgtcactctggcatatcctgtttacgcgcagcaacgaagatag

SEQ ID NO: 16616 - DNA, 1224 bp, synthetic construct
  misc_feature 1..1224: note = Description of Artificial Sequence: Synthetic coding sequence
  source 1..1224: mol_type = other DNA
atgctattcgataaagtgaaggcattctcagtccaactggatggggccaccgccggagtggagccagttttctccggtggtcaggctgttgctgggcgagtgttgcttgaactctcaagcgccgctcgcgttggcgcactgaggctgcgtgccagggggagggcgcacgtgcactggacagagagcaggagtgccggcagctcaacagcatatacccagtcatacagtgaaagggtcgaagtggtcagtcaccgcgccacgctgctggctccagatacaggtgagacgaccactctgccacccgggcgacatgagtttttattctctttccagctcccgccaactctcgtcacctcttttgaggggaaacatggatccgtcaggtactgtatcaaggccacgttgcacagaccctgggtaccagcgcggcgggcgaggaaggtgttcaccgttatagaacccgtggacattaatacccccgccctgcttgctcctcaggctggcgctagggagaaagttgcaaggagctggtattgtaataggggcctagtgtccctttccgccaagatcgaccggaagggctatacccctggagaggtgatccccgttttcgctgaaatcgacaacggatccactagacctgtacttccgcgtgctgctgtggtgcagacccagacgttcatggcacgcggcgcccgaaaacagaagagggcggtagttgcctcactagccggagaaccagttgggcccggtcaaagggcactgtggcagggacgagctctgcggatcccccccgtagggccctccatcctgcactgtcgtgtattacacgtcgattacgcgctaaaggtgtgcgtcgacattcctgggacctcaaaactgctcctcgagcttcccctggtgattggaactataccacttcacccatttggtagccgttcgtctagtgtgggcagccacgccagcttcttgctggattggagactgggtgcgttgccagaacgccctgaggcaccacccgaatactcagaggttgtggcagataccgaggaagccgctctggggcagagcccgtttccactgccccaggatccagatatgtcgctagaaggccctttttttgcgtatatccaggagtttcgataccggccacctccattgtatagcgaagaggacccaaaccctctgctaggggacatgcgaccccggtgcatgacctgttag

SEQ ID NO: 16617 - DNA, 1386 bp, synthetic construct
  misc_feature 1..1386: note = Description of Artificial Sequence: Synthetic coding sequence
  source 1..1386: mol_type = other DNA
atgtacaatactgtgtggtccatggatagagatgatgcagattggcgagaagtgatgatgccatattcaaccgagctgattttttacatagaaatggatccccccgctctcccgcctaaaccgcccaagcccatgacttcagccgtgcccaatggtatgaaggattctagcgtttccctgcaggacgccgaatggtattggggagatatttcacgggaggaagtcaatgataagctgagagatatgcctgacgggactttcctggtaagggacgcgtcgacaaaaatgcaaggagattatacattgaccttgaggaaaggcggcaataataagctgattaaaatctatcaccgagacggaaagtacggtttctctgatcccctaactttcaattccgtggtcgagcttatcaatcactaccatcatgagtcattggcgcagtacaaccctaaattagatgtgaaactaatgtatcctgttagtcggtaccaacaagaccagctcgtgaaggaagacaacattgacgctgtcgggaaaaagctgcaggaataccattcccagtaccaggagaaaagtaaagaatacgaccgactctatgaggagtatacaagaactagccaggagatccagatgaaacggacagctattgaagcatttaatgaaactattaaaatttttgaggagcaatgccacacgcaggaacagcattccaaagagtatatcgagcggttccgccgcgagggcaatgagaaggaaattgagcggatcatgatgaactatgacaagttgaaatcacgcttaggcgagatccacgactctaagatgcggcttgagcaagatttaaagaaccaggcactcgacaatagggaaattgataagaagatgaatagtattaagcctgacttgatccagctgcgcaaaattcgtgaccaacatctagtttggctgaaccacaagggcgtacgacaaaagcgcttgaatgtttggctggggattaaaaatgaggacgccgatgagaattactttatcaacgaagaagacgaaaatctgcctcactacgacgagaaaacatggtttgttgaggatatcaaccgggtgcaggcagaggacctcctgtatgggaagcctgacggggcttttcttatccgagaatcctcaaagaagggatgctatgcctgctcagtggtagccgacggtgaggtcaagcattgcgtgatatattctacagctcgaggatacggtttcgctgagccctacaacctttactcatcacttaaagagctagtgctgcactaccaacagactagtctcgtgcaacacaacgactctttgaacgttcgcctcgcataccccgttcacgctcagatgccatcattatgccgatag

SEQ ID NO: 16618 - DNA, 1101 bp, synthetic construct
  misc_feature 1..1101: note = Description of Artificial Sequence: Synthetic coding sequence
  source 1..1101: mol_type = other DNA
atgtacaacaccgtctggtctatggaccgggatgatgcagattggagagaagtgatgatgccgtactcaactgaattgattttctatatcgaaatggaccccccagcagcagaagtgaatgacaagctgcgggatatgcccgacgggacattcctggtcagagacgcatcaacaaagatgcagggggactatacactaacactgagaaaggggggtaacaacaaactcatcaaaatctatcaccgcgacgggaaatatggcttttctgatcctctgacgttcaactccgtggtcgaattaatcaaccactaccatcatgagagcctggctcagtataaccccaagctggacgtcaagttgatgtaccctgtttcacggtaccagcaggaccagctcgtcaaggaagataacattgacgctgtgggaaagaagcttcaggagtaccattcacaataccaggaaaaatccaaagaatacgaccggttatacgaggaatacacacggacatctcaggagattcagatgaagagaaccgccatcgaagcgtttaatgaaacgattaagatctttgaggagcaatgccatacacaggagcagcacagcaaagaatatatcgagcgatttagaagagaggggaatgaaaaggagatcgaacggtggttgaaccacaagggagtgcggcagaaaaggttaaatgtgtggctgggcattaaaaacgaggacgcagatgagaactacttcatcaatgaagaggatgaaaacctgccacactacgacgaaaaaacatggttcgtcgaagatataaaccgagtgcaagccgaagacctcctgtatggtaagccggatggcgcattcctgattagggagtcttctaaaaagggctgctatgcctgctcggtcgtagctgacggcgaggtgaagcactgcgttatttattccaccgctcgaggatacggttttgccgagccctataacctgtactcaagcctaaaagagcttgtcttgcattatcagcagacctctctcgtgcagcacaatgattccctcaatgtgaggttagcttatccagtacacgctcaaatgccctcactttgtagatag

SEQ ID NO: 16619 - DNA, 1209 bp, synthetic construct
  misc_feature 1..1209: note = Description of Artificial Sequence: Synthetic coding sequence
  source 1..1209: mol_type = other DNA
atgtataatacagtttggagcatggatcgggacgatgccgactggagggaagtcatgatgccatactccactgagcttatattttatatcgagatggatccaccagccctgccaccaaaacctccgaaaccaatgacttccgctgtacctaacggaatgaaggatagttctgtttcactgcaagacgcagagtggtattggggggacatttcaagagaggaggtgaatgacaaacttcgtgatatgccagacggaactttcttggttagggatgccagcacgaagatgcagggagattacacgctgacccttcggaaggggggtaataacaaactcatcaagatctaccatcgtgatggcaaatacggcttctccgatcccttgacttttaactcagtggtggagctgatcaatcattatcaccatgagtcactggcacagtataatcccaagctagacgtgaagctgatgtaccctgtctcgagataccaacaggaccagctcgtaaaggaggataacatcgacgctgtcggaaaaaagctgcaggaataccattcacagtatcaggagaaaagtaaagagtacgaccggctctatgaggagtatacaaggacaagtcaagagatccagatgaaaagaacggccatcgaggcattcaacgagacaatcaagatattcgaggaacaatgccatacccaagagcagcattccaaagagtacatcgagaggttccgcagagagggaaatgaaaaggagatcgagcggtggctgaaccacaaaggtgttcgacagaaaagactaaatgtgtggctcggaatcaaaaatgaggacgctgacgagaactatttcatcaacgaggaagatgagaatctgccccattacgacgaaaaaacctggttcgtggaagatatcaaccgggtgcaggccgaggatctcttatatggtaagccggacggggcctttctgattagagagtcgtcaaaaaagggatgctatgcctgttctgtcgtggctgatggcgaggtaaagcattgcgtgatctacagcactgcacgcggttatgggtttgcagagccgtacaacctgtacagctcactaaaagaattggttttgcattatcagcaaacatccctcgtgcagcacaacgacagcctaaatgtccgtctcgcctatcctgttcacgctcagatgcctagcttatgtcgctag

SEQ ID NO: 16620 - DNA, 1386 bp, synthetic construct
  misc_feature 1..1386: note = Description of Artificial Sequence: Synthetic coding sequence
  source 1..1386: mol_type = other DNA
atgtacaacaccgtttggagcatggatagggacgacgccgactggcgcgaggttatgatgccttactccacagagctgatattctatatagaaatggatcctcctgctctgccaccaaagccccctaagccgatgacatctgccgtgcccaacgggatgaaggacagtagcgtctcgctgcaggacgcagagtggtactggggagatatttcccgagaagaggtgaatgacaagttgcgcgatatgcctgatgggacttttttggttagagatgccagtactaaaatgcagggcgactacaccctgacattacggaaggggggcaacaataagctcatcaagatttaccacagagatgggaaatacggcttctccgaccctcttacttttaacagcgtagtggagttaattaatcactatcatcacgaaagcttggcccagtataaccctaagctggacgtcaagctgatgtaccctgtgagccgatatcagcaggatcagttggtaaaggaggataacattgacgccgtgggtaagaagctccaagagtaccactctcaataccaggaaaagtcgaaagagtatgacaggctgtacgaggagtatactcgtacctcgcaggagatccagatgaaacggacagccatagaagcatttaacgaaacaatcaagatttttgaggaacaatgtcatacccaggaacagcattcaaaagagtacattgagcgttttaggcgcgagggaaatgagaaagaaatagaaagaattatgatgaactatgataagctgaagagcaggcttggcgaaatacatgactcaaaaatgaggctggaacaagacttgaaaaaccaggccctggacaatagggagattgacaagaagatgaattctattaagcctgacctcatacagctaaggaagattcgcgaccagcatctcgtgtggcttaatcataaaggagttcggcagaaaagactgaatgtgtggctaggaattaagaacgaggacgccgatgagaattacttcatcaatgaggaggacgaaaacttgccccactatgatgagaagacatggttcgtggaggatatcaaccgagtgcaggccgaagacctgttgtacggaaagccagatggggcctttctgataagggaaagcagtaaaaagggctgttacgcttgctctgtggtggctgacggcgaggttaagcactgcgtcatctactcaacagcccgaggctatggcttcgccgagccttataatctgtactcctccctcaaagagctggtcctgcattaccagcagacctctctcgtgcagcataacgactcattgaacgtacgtctggcatacccagtgcatgctcagatgccttccctctgcaggtag

SEQ ID NO: 16621 - DNA, 1386 bp, synthetic construct
  misc_feature 1..1386: note = Description of Artificial Sequence: Synthetic coding sequence
  source 1..1386: mol_type = other DNA
atgtataacacagtgtggagtatggaccgggatgatgcggactggcgcgaagtgatgatgccttattccaccgagttgatattctacattgaaatggatccaccagctctgccacctaagccacccaagcctatgacctccgcggtgcccaacgggatgaaggattccagtgtatcccttcaggatgccgagtggtactggggagatatcagtagggaggaagtcaatgataaactacgcgatatgcccgacgggactttcctggtgagggacgcgtctacaaagatgcagggagattacaccttaactctgaggaagggcggtaataacaagttaattaaaatttatcatcgcgacggaaagtatgggtttagcgacccactcactttcaacagtgtggtggagctgatcaaccattatcatcacgaatcattggcccagtacaaccctaaactggacgtgaaactaatgtatccagtctcccggtaccagcaggaccagctggtgaaggaagacaatatagatgcggtaggtaagaaattgcaggaatatcactcccagtaccaggagaaatctaaggagtatgaccggctgtatgaagagtatacccgtacatcacaggagattcaaatgaaacgcactgccatagaggctttcaacgagaccattaagatttttgaggaacagtgtcacacacaagagcagcatagtaaagaatacatcgagaggttcaggcgggaaggtaacgagaaggaaatagagcggatcatgatgaattatgacaagctgaaatcccgcctgggagagattcacgactccaagatgcggctggagcaggacctgaaaaatcaggccctggacaatcgggaaatagacaaaaagatgaactctattaagccagatctgattcagctccggaaaatccgggatcagcatctcgtgtggctgaaccacaagggcgttaggcagaagcgcctgaatgtgtggttgggcatcaagaacgaggatgccgatgaaaactactttattaatgaggaggacgagaatctaccgcactatgacgagaagacctggtttgtggaggatattaatagagttcaagccgaagacctcttgtacggcaagcctgacggcgctttcctaatccgggaatcgtccaagaaagggtgttatgcttgctcagtcgtcgccgatggtgaggtcaagcactgtgttatttattctacagctcgaggctacggattcgctgaaccttacaacctgtatagttccctgaaagaattagtcctgcattaccagcagacctccctagtgcaacataacgacagtctgaatgtccgactcgcctacccggtccacgcgcaaatgcctagcctttgcagatag

SEQ ID NO: 16622 - DNA, 1209 bp, synthetic construct
  misc_feature 1..1209: note = Description of Artificial Sequence: Synthetic coding sequence
  source 1..1209: mol_type = other DNA
atgtacaacactgtctggagcatggaccgagatgatgccgattggagggaagttatgatgccttacagcacagaactcatattctacatcgagatggatccgccagccctgccccccaaacctcctaaacccatgaccagcgccgttcccaacggaatgaaggactctagtgtgtcattacaggacgctgaatggtattggggagacataagtcgtgaagaagtcaacgacaaactgagggacatgcctgatggcacattcctcgtccgtgacgccagtactaagatgcagggtgactacaccctaaccctacgtaagggtgggaataataagttaatcaagatctaccatcgggatgggaaatatggattctctgacccactgacctttaattccgtggtcgagctaattaaccattaccatcacgagtctctcgctcaatataacccaaagctggacgttaaactcatgtatccggtatccaggtaccagcaggaccagctggtgaaggaagacaatatcgatgcagtcggtaaaaagcttcaggagtaccactcccagtatcaagagaagtcaaaggaatacgaccggctatatgaagagtacactcgcaccagccaagaaatccagatgaagcggactgccatcgaggcttttaacgagactatcaagatatttgaggaacagtgccatacacaggaacagcactccaaggagtacatcgaaaggttccgccgcgaaggcaacgaaaaagagatcgagaggtggctgaaccataaaggagtgaggcagaaaagacttaatgtgtggcttggaatcaaaaatgaggacgcggacgagaactatttcatcaacgaggaagatgaaaatttgcctcattatgatgaaaaaacatggtttgtggaggatatcaatagggtccaagccgaagatttgctctacggaaagcctgatggagccttcctgatacgggagtcatctaagaagggctgttacgcatgttcggtggttgccgacggagaagtaaaacactgcgtcatctactcgactgccaggggatacgggttcgctgaaccttacaacttgtattctagcctgaaagaactggtgctgcattaccaacaaacctccttggtgcagcacaatgattccttaaacgtgaggcttgcatacccggtccatgcacagatgccaagtctgtgtaggtag

SEQ ID NO: 16623 - DNA, 621 bp, synthetic construct
  misc_feature 1..621: note = Description of Artificial Sequence: Synthetic coding sequence
  source 1..621: mol_type = other DNA
atgtacaataccgtctggtcaatggatcgagacgacgccgactggcgtgaagttatgatgccctatagtacagaactgatcttttacatcgaaatggacccgcccgctcttccacctaaacctcccaaacccatgacaagcgccgtgccaaacgggatgaaggactcttcagtgtcgctccaagatgcggagtggtattggggcgacatcagccgagaggaggttaacgacaagctgcgagatatgccggacggcacgttcttggttcgcgacgcgtctaccaagatgcagggcgactatactctgactctgcggaaaggagggaataacaagcttatcaagatatatcatagggatggcaaatacggtttctccgaccctctgacattcaacagtgtggtggagctcataaaccactaccatcacgaatcactggctcagtacaatcctaagctggatgttaaactgatgtaccctgtatcacgatatcagcaggaccagctggtaaaggaggacaatatagacgctgtgggcaaaaaacttcaggagtatcactcacaataccaggagaagtctaaggaatatgatcgcctctacgaagagtacactagaacaagctag

SEQ ID NO: 16624 - DNA, 1524 bp, synthetic construct
  misc_feature 1..1524: note = Description of Artificial Sequence: Synthetic coding sequence
  source 1..1524: mol_type = other DNA
atgggaccaagccggttagtgagaggacccaggccccagggcatgcgctcgccctaccggcggccaggcatgggctggcccagacctagatttcctcgcatgttcaagtgctctcggcggaggtaccagcagggactcagggggcgaacggcctccagtgccgctattaacccagcaacaagggccatggggattaacaacactcacaccgatacaaccattgtctggatttttcctccccaggccctgccccctaagcctcccaagcccatgacctctgcagtcccaaacgggatgaaagacagttctgtcagcctgcaggacgcggagtggtactggggcgatattagccgcgaagaggttaacgacaaactccgagacatgcctgacggaacctttctggttagagatgcctccacaaagatgcagggagattacacacttacgcttcgcaaaggcggcaataacaagctgatcaagatctaccatcgggacgggaagtacggcttttcggatccactgacatttaattctgtggtggaactcataaatcattaccaccacgaatcactggcacagtacaaccctaagcttgatgtgaagctcatgtaccccgtgtcccgttaccagcaagaccagttagtgaaggaagataatattgacgctgtggggaaaaagttacaagaataccatagccagtatcaggagaagtcgaaagaatacgatcggctgtacgaagagtatacaagaacaagccaggagatccagatgaaacggaccgctatcgaggccttcaacgaaaccattaaaatcttcgaggaacaatgtcatactcaagaacaacactcgaaggaatatatcgagcgatttcgaagggaaggcaatgagaaggagattgagcgtataatgatgaattacgataagctaaagtcgaggcttggcgagattcacgattccaagatgcgcttagagcaggatctgaagaaccaggccctggacaaccgggaaatcgacaagaagatgaactcgatcaagcccgatttgatccaactgcggaaaatccgcgatcagcaccttgtgtggctcaaccacaagggggtacgccagaagcggctcaatgtatggctgggtattaaaaatgaggatgctgatgagaattactttataaacgaagaagacgagaatctccctcattatgatgagaaaacttggtttgttgaggacataaacagagttcaagctgaggatctcctatatggcaaacctgacggtgcatttctcattagggagtcgtctaaaaaagggtgctacgcgtgtagtgtcgttgcagatggagaggtgaaacactgcgtgatttacagcaccgcacgagggtatggctttgctgaaccttataacctgtactcaagcctgaaggagttggttttgcattaccagcaaacgagtctcgtacagcataatgacagtcttaacgttcggctcgcctacccggttcatgcgcaaatgccctctctgtgccgctag

SEQ ID NO: 16625 - DNA, 2643 bp, synthetic construct
  misc_feature 1..2643: note = Description of Artificial Sequence: Synthetic coding sequence
  source 1..2643: mol_type = other DNA
atgcagcctggggccacgacctgcactgaagatcgcattcaacacgccctggagcgctgtctgcacggcctgagcctgagtcgccggtctactagctggtccgccggtttgtgtttgaattgctggagcctgcaggagctcgtgtccagagatcccggtcattttctgattttgttagagcaaatccttcaaaaaacaagagaggttcaggagaaggggacatatgatcttctcacaccgctggcactcctgttctattcgaccgtcctttgcacaccccatttcccacccgatagtgatctcttgttgaaggccgcatccacttaccacagattcttgacatggccagttccctactgttcaatatgccaggaactgcttacattcatcgacgcagaattgaaggccccaggcatttcataccagcggctggtgcgagcagaacagggtctccctatccggtctcaccgcagtagtactgttacggtcctgttgctgaaccccgttgaggtacaggccgaattcctggctgtggccaacaagctctctacgccagggcacagtccacactctgcctataccactctgctcctgcacgcatttcaggcaacctttggcgcgcactgcgacgtccctggcttgcactgcaggctgcaggcgaaaaccttggcggaattagaggacattttcaccgagaccgcagaagcccaggaactcgcatcaggcatcggagatgccgccgaggcccgccgctggcttcggacgaaactccaggccgttggcgaaaaggctggattccccggagtgctcgacacagcaaagcctggcaagctccacaccattcccatcccggtcgctaggtgttatacatatagttggtcccaggattcttttgatatcttgcaggaaattttgcttaaagagcaggaattactacagcctgggatcctcggcgatgacgaggaagaagaggaggaagaagaagaagttgaggaggatctggagaccgacggtcattgtgcggaacgagactccctgctcagcactagctccctggcgtctcatgatagcaccttgtctctggcaagtagccaggcaagtggacccgcattatcccgccacttgctaacgtcattcgtgtcaggtttatccgatgggatggatagcggctacgtagaggatagcgaagagtctagcagtgagtggccctggcgaaggggcagccaagagcgcaggggccacagacggccggggcagaagttcatcaggatctataaactgttcaagagcactagccagctggtactcagaagagacagccgcagcctggaaggcagctcagatacagcactgccattacgtcgggcaggttcattatgcagccccctcgatgagcctgtcagccccccctcacgcgcgcagaggagtagaagccttcctcagcccaaactcggaactcagttaccctcgtggctactagcgccggccagccgcccgcagcgtagacgaccgttcctgtccggagatgaggatccaaaagctagtaccctgagagttgtggtttttggctctgatagaatctcaggcaaggtcgcaagggcctacagcaacctgcgacggctggaaaacaaccgtcctctgcttactcggtttttcaagctccagtttttctatgtgccggtcaaaagaagccatggtaccagtcccggtgcctgcccgccgccacggtcccagactcccagtccaccgacagatagcccccgacacgcgtctccaggagagctgggaactaccccatgggaggagtcgactaacgacatcagccattatctcgggatgctcgacccatggtacgagcgtaacgtgcttggcctgatgcatcttccccccgaggtcctctgccagcagagcctcaaggcagaggcacaggccttggagggttctcccactcagctccccattctggcagatatgctgctgtactattgtcgattcgctgcgcgcccagtgcttctccaggtataccagaccgagctgacctttattaccggggagaagacgacagagattttcatccattcgctagagctcggtcacagtgccgctacaagagctatcaaggcaagtgggcctggttccaagcgattgggaatagatggggaccgcgaggctgttcctttgactctccagatcatctactctaagggagctatttctggcagatctcgttggtcaaatcttgagaaggtctgcacgtccgtgaacttaaataaggcctgcagaaaacaagaggaactggatagctccatggaggccttgaccctgaatttgacagaggtagtgaaacggcagaacagcaagagcaagaagggcttcaaccagatttctacttcacagattaaggttgataaagtgcagataattggctcaaactcctgtcctttcgctgtgtgcctggatcaggacgaaaggaaaatcctccagagcgttgttcggtgtgaggtgagtccttgctacaagcctgaaaaaagcgacctctcttcacctccacagacccctccagacctccccgcacaggctgcccccgatctgtgttcactgttatgtctgcccattatgaccttctctggcgctttgccctag

SEQ ID NO: 16626 - DNA, 2643 bp, synthetic construct
  misc_feature 1..2643: note = Description of Artificial Sequence: Synthetic coding sequence
  source 1..2643: mol_type = other DNA
atgcagccaggcgcaaccacttgcaccgaggaccgcatccaacacgcgctggaacgctgcctgcacggcctttccctgagccgcagaagcacatcttggagcgctgggctctgtcttaattgctggagcttgcaggagctggtaagcagagatccgggtcacttccttatattactggaacagatcctacagaaaacacgggaggttcaggagaaaggaacttatgatctcctgacacccttggccctcctgttttacagcactgtgctatgcaccccacattttccacctgacagcgacctgttacttaaggctgcttcaacgtatcacagattccttacctggcccgtcccatactgcagtatctgccaggaactgttgacctttattgatgccgagctgaaagcacctggaatttcctaccagaggttggtgcgcgcagaacagggattgccaatccgatcacatagatcctctacagttacggttctcctcttaaatcccgtggaagttcaggctgagttccttgccgtcgctaataaactgtcaacccccggccattccccgcactcagcctataccacactgctgctgcatgcattccaggcaacttttggagcgcattgtgatgttccaggactgcactgtcggttgcaggccaagacactcgccgagctggaggacattttcaccgaaacagctgaggctcaggagttagccagcggtatcggggacgctgccgaggccagacgctggttacgaactaaactccaggccgtaggggagaaggctggctttcctggcgtgttagataccgctaagcctgggaagctgcacacaataccgatccctgtggcccgatgctatacatattcgtggagtcaggactcgttcgacatactccaggaaatcctgcttaaagagcaggaacttttacagcccggaatcctcggtgatgatgaagaggaagaagaggaagaggaggaggttgaggaagacttggagactgacggacactgcgctgagcgcgatagcctgctgtcgacttcgtctcttgcctcccatgatagtacattgtctcttgcatcaagccaggcgtcaggacctgcgctgtcccggcacttgcttacatcattcgtgagcggcctgagtgacgggatggattcaggctatgtagaggacagtgaggaaagcagcagcgagtggccttggaggagaggctcacaggaaagacggggccaccgcagaccagggcagaagtttatcagaatttataaactgtttaaatctacatctcagctggtgctgcgcagagactctcgctctctggaggggagcagcgatactgcattacctctgcgtcgagccggttctctctgctcaccactggatgaaccagtgtctcctcctagccgagcccagaggtcccggtcactgcctcagcccaagcttggcacgcagttgcctagctggttactagcgcccgctagtcgtccccagaggaggaggcctttcctgagcggcgatgaggaccccaaggcctccactctacgcgtcgtggttttcggatctgatcgtataagcggaaaggtggctagggcatacagtaacctgcggcgcctcgaaaataaccgccctcttttgaccagattcttcaaattgcagtttttctacgttcctgtgaagcgatcacatgggactagccctggagcctgcccacctcctaggtcccagacgccaagcccccctactgactcacctcgccatgctagcccaggcgaactgggcaccactccatgggaggagtcaaccaatgacatctctcactacctcggcatgctggatccctggtacgagagaaatgtgctcggcttgatgcacttgccgcctgaggtcctctgtcagcagtctttgaaggccgaggctcaagccctggaggggtctccaactcagctgcctatcctggccgacatgttgttgtactattgtagatttgcggccaggcctgttctactgcaggtgtatcaaacagagctgacttttattacaggtgagaagaccaccgagatctttatacacagtctggagcttggccacagcgctgccacccgggcaataaaggcctccgggccgggttccaagcgccttggcatcgacggggatcgtgaagctgtgcctctgactctccagatcatttatagcaagggtgccatctccggtcgatcccgctggagtaatttggagaaggtgtgcactagcgtgaatttgaacaaggcctgccgaaagcaggaagagctcgactctagtatggaggccctgacacttaatttgactgaagtggtaaaacgccaaaactcaaaaagcaaaaaagggttcaatcagatctccacctctcaaatcaaggtagataaggttcagatcattggctccaactcatgtccatttgccgtgtgcctggatcaagatgagagaaaaatcctgcagtcagtcgtgaggtgcgaggtttccccttgttataagcccgagaaaagcgacctatctagcccaccccagacccctcccgatttgcccgcccaggccgcacccgatctctgctcactcctctgtctccccattatgacgttcagtggagccctgccctag

SEQ ID NO: 16627 - DNA, 447 bp, synthetic construct
  misc_feature 1..447: note = Description of Artificial Sequence: Synthetic coding sequence
  source 1..447: mol_type = other DNA
atgaaactgttggtcttggccgtgctgctgactgtggctgcagccgattcgggaatatctcccagagccgtgtggcagttcaggaagatgattaagtgtgttataccaggcagtgaccctttcttggagtacaataattacggctgttactgcggcttgggtgggtcagggacaccagtcgatgagcttgacaagtgctgccagacacatgacaactgctacgatcaggccaaaaagctggacagctgtaagttccttttggataacccatatacgcatacttatagctattcatgtagtggtagtgctataacctgctccagcaaaaacaaggagtgtgaggcctttatttgcaactgcgatcggaatgctgctatttgtttttctaaggccccatataataaggcacataaaaatctcgacacgaagaagtactgtcagtcatag

SEQ ID NO: 16628 - DNA, 435 bp, synthetic construct
  misc_feature 1..435: note = Description of Artificial Sequence: Synthetic coding sequence
  source 1..435: mol_type = other DNA
atgaaaaccttactgctgcttgcagtgatcatgatttttggactcctccaggctcacggaaatcttgttaactttcatcggatgatcaagctgaccaccggtaaggaagcggccttaagctatggcttttacgggtgccattgtggggtaggtggcaggggcagccccaaggatgcaaccgatcggtgctgcgttactcacgattgttgctacaagcgtcttgagaaacgagggtgcggcacaaaatttctgagctacaagttttctaactctggctcgagaattacgtgtgccaaacaagactcctgtcgatctcagctgtgtgagtgcgataaggctgcggcaacctgcttcgccagaaataaaaccacatataacaaaaaatatcagtactattccaacaagcactgcaggggatcgaccccaaggtgctag

SEQ ID NO: 16629 - DNA, 435 bp, synthetic construct
  misc_feature 1..435: note = Description of Artificial Sequence: Synthetic coding sequence
  source 1..435: mol_type = other DNA
atgaaaaccttgctgctcctcgcagtgataatgatattcgggctactccaggcccacggcaacctggtgaattttcacagaatgattaagctaaccactgggaaagaagccgctctgtcctatgggttttatggatgtcattgtggcgtgggagggagaggttcccctaaggatgccacagatagatgttgtgttacacacgactgctgttacaaacgacttgagaaacgaggttgcgggaccaaattcctttcctataagttcagcaactctggctctagaattacttgcgccaagcaggacagctgtagaagccaactgtgcgagtgcgataaagccgccgctacctgcttcgcaaggaacaaaaccacttataacaaaaagtatcagtactatagcaacaagcactgcagaggctcgactccaagatgctag

SEQ ID NO: 16630 - DNA, 438 bp, synthetic construct
  misc_feature 1..438: note = Description of Artificial Sequence: Synthetic coding sequence
  source 1..438: mol_type = other DNA
atggagttggccttgctctgcggactagtagtgatggccggcgtcatcccaatccagggcggcatcctcaatctgaacaagatggtaaagcaggtaactggtaagatgcccattctttcctactggccctacggttgccattgcggtcttggcggaagaggacaacccaaagatgctactgactggtgctgtcagacgcatgactgttgctacgatcatctgaagacccaaggctgctccatctataaggactattacagatataacttttcacaggggaacattcactgtagcgataaaggctcatggtgcgagcagcagttatgtgcatgtgacaaggaggtcgcgttctgcctgaagcggaacctggatacctatcagaagagattgcgtttctactggcgcccacattgtcgcggacagacgccagggtgttag

SEQ ID NO: 16631 - DNA, 429 bp, synthetic construct
  misc_feature 1..429: note = Description of Artificial Sequence: Synthetic coding sequence
  source 1..429: mol_type = other DNA
atgaaaagccctcacgtccttgttttcctgtgcctcctcgtggccctggtgactggtaacttagtgcagttcggagtcatgatcgagaagatgactggcaagtctgcattgcagtataatgactatggctgctattgtggaatcggcggctcacattggcccgtggaccagaccgattggtgctgtcacgcacacgattgttgctatggtcgacttgaaaaactgggttgcgagccaaagctcgaaaagtatctgttctccgtctctgaacggggaatattctgtgcgggacgaactacttgtcagagactgacttgcgagtgtgacaagagggcagccctgtgtttcaggcgaaacctgggcacttacaacaggaaatacgcccactatcccaacaagctgtgtaccgggcctactccaccttgctag

SEQ ID NO: 16632 - DNA, 636 bp, synthetic construct
  misc_feature 1..636: note = Description of Artificial Sequence: Synthetic coding sequence
  source 1..636: mol_type = other DNA
atggccgatggagccaaggctaatccaaagggcttcaagaagaaagtgcttgatagatgtttttctggatggcggggtccccggttcggtgcaagctgccctagtcgcacaagtcgctcttcgctggggatgaaaaaattttttactgtcgctattctggcaggctcggtcctctcaacagcccatgggtctttgctgaacttgaaggctatggtggaggcagttactgggagatccgccattctaagttttgtggggtacggctgctactgcgggctgggaggtcgcggccagcccaaagacgaagtggattggtgctgccacgcacacgattgctgttaccaggagctgttcgaccagggatgtcacccatatgtcgaccactacgatcacaccatcgagaataacaccgagattgtgtgtagcgatcttaataagacggaatgcgacaagcagacatgcatgtgcgataaaaacatggtactctgtctaatgaaccaaacgtacagggaggaatataggggatttttaaatgtgtactgccagggccccacacccaactgtagcatctatgagccgccgcccgaggaggttacatgcagccaccagtctcccgcgccacctgctccgccttag

SEQ ID NO: 16633 - DNA, 936 bp, synthetic construct
  misc_feature 1..936: note = Description of Artificial Sequence: Synthetic coding sequence
  source 1..936: mol_type = other DNA
atgcctgcccctcgcgccccacgggccttagctgccgcagctcctgcctccggcaaggctaaactcacgcatcccgggaaagcaattctcgccggcggcctggctggcggcattgaaatctgcatcacattccctacagagtacgtgaaaacccagctccaactcgacgaaagaagtcaccctcccagatacagagggattggtgactgcgtccgccagacggtgcgctcccacggcgtgctcgggctgtaccgggggctgtcctcactattatacggctctattcccaaggcagctgtgcggtttggcatgttcgaattcctatcaaaccacatgagagatgcccaaggcagactggatagtactaggggcctactttgcgggctgggcgctggcgtggccgaagccgttgtggtagtgtgccccatggagaccatcaaggtgaaattcatccatgatcagactagccctaatccaaagtaccgtggattcttccacggtgtgagagagattgtcagagagcagggtttaaaagggacttaccagggtctcacagccaccgttcttaaacagggaagcaaccaggccatacgatttttcgtgatgaccagcctacggaactggtatagaggtgataatcctaacaagcctatgaatccattgatcactggcgttttcggggctatagcaggtgcagcatccgtctttggaaatactccacttgacgtgataaaaacacgcatgcagggactggaagctcacaagtacaggaacacgtgggattgcgggctccagattctgaaaaaggaaggtttaaaagcattctacaaaggtacagtccctcgcttgggccgtgtctgcctggatgtagccattgtatttgttatctacgatgaggtggtcaagctccttaataaagtgtggaagactgactag

SEQ ID NO: 16634 - DNA, 2250 bp, synthetic construct
  misc_feature 1..2250: note = Description of Artificial Sequence: Synthetic coding sequence
  source 1..2250: mol_type = other DNA
atgagctttatagatccttaccagcacatcattgttgaacaccaatactcacataaattcaccgtggtggttctgcgtgcaactaaagtgaccaagggcgcatttggggacatgcttgacacacctgacccatatgttgaactcttcatttccactactcccgatagtcgaaaaaggacgagacacttcaataacgatataaaccctgtgtggaatgaaactttcgagttcattttggaccccaatcaagagaatgtgctggagattactctgatggacgccaattacgttatggatgagacgctggggaccgcaacattcactgtgagcagcatgaaggtgggggagaaaaaggaggtgcccttcatcttcaaccaagttactgaaatggtgctggagatgtcactcgaggtgtgctcctgtcccgatctgaggttttcaatggcactctgcgatcaggaaaagaccttccggcagcagcggaaagaacacataagggaatccatgaaaaaactgctcggccctaaaaacagcgaagggctccacagtgcccgcgatgtgcctgttgttgctatactcgggtcaggtgggggcttcagagccatggtgggtttcagcggagtcatgaaggcactgtatgagtcaggtatcctggactgtgctacatacgtggccgggctgagtggctcaacttggtacatgtctacattgtatagtcaccccgatttccctgagaaaggcccagaagaaataaatgaggagctgatgaaaaacgtgtcccacaacccattgcttctcctaacacctcagaaagtcaaacgctacgttgagagtctctggaagaagaagtccagcggtcaaccagttacattcacggatatttttggaatgttaatcggggaaactctgattcacaacagaatgaatacaactctttctagtcttaaagaaaaggtcaacactgctcagtgtccacttcccctattcacctgcctgcatgtcaagccagacgtttctgaactcatgttcgccgattgggttgagttctccccctacgagatcggaatggccaaatacggaacattcatggctccagatctgttcgggtctaagttttttatgggaacggtggtgaagaagtacgaggagaatccgttgcattttttgatgggggtgtggggtagcgccttctctatcctgttcaaccgcgttcttggagtcagtgggagccagagtcgaggatcgaccatggaggaggagctcgagaatatcacaactaaacatatcgtttctaacgattcaagcgactccgacgacgaaagtcatgagcctaagggaacagagaacgaagatgctgggagtgattatcaaagtgacaatcaagctagctggattcacaggatgatcatggcactcgtgagcgactcagctctgttcaacacccgggaaggcagggccgggaaggtgcataacttcatgctcgggctgaatctgaacacatcgtacccattatcacctttgtcggacttcgctacgcaagattcttttgacgacgacgaattggatgccgccgtggccgatccggatgagtttgaacggatttatgaacccctggatgtaaaaagcaagaaaattcacgtcgttgactccggcctgactttcaatctgccatatccgctgattctgcggccccaacgcggagttgatctgatcatttcctttgacttcagcgccagaccgagcgatagcagtcccccattcaaggaattgttgttggccgagaaatgggctaagatgaataagctgcccttccctaagatcgacccctacgttttcgacagagagggcttaaaggagtgttacgtgtttaaaccaaagaacccagatatggaaaaggactgccctacgataatccatttcgtgttggccaatataaacttcagaaagtatagggcccctggtgtccccagagagacagaggaggaaaaggagattgctgactttgacatcttcgatgacccagaatctcctttttcgacctttaacttccagtatcctaaccaggcatttaagagactccacgatctgatgcattttaatacactcaacaatattgatgtcattaaagaggctatggtcgaatctatcgaatacaggcggcaaaacccatcccggtgcagcgtgagcctcagcaacgttgaagctcgcagatttttcaataaggagttcctctctaaacctaaggcctag

SEQ ID NO: 16635 - DNA, 150 bp, synthetic construct
  misc_feature 1..150: note = Description of Artificial Sequence: Synthetic coding sequence
  source 1..150: mol_type = other DNA
atgagttttatcgatccttatcagcatatcattgtggagcaccagtactctcataagttcactgtggttgtgctccgagccacgaaagtgacaaaaggtgcgtttggagacatgcccaaggtcaccaaaggcgcatttggggacatgtag

SEQ ID NO: 16636 - DNA, 2070 bp, synthetic construct
  misc_feature 1..2070: note = Description of Artificial Sequence: Synthetic coding sequence
  source 1..2070: mol_type = other DNA
atgagtttcattgacccataccagcacatcatagtggagcatcaatatagtcataagtttacggtggttgtgctacgggccacaaaagttactaagggcgcttttggtgatatgctggacacccccgatccttacgtcgaacttttcatctctacaacccccgactccaggaaaaggactagacatttcaacaatgacattaaccctgtgtggaacgagacgttcgagttcatcctagaccccaatcaggaaaacgtcttagagattacactgatggacgctaattatgtgatggatgagacactcggcacagccacgttcacagtctcatccatgaaagtaggcgagaagaaggaagttccttttatttttaaccaagtccccgtggtggcaattcttggcagtggcggaggatttcgggccatggttggattttctggggtcatgaaagctctgtacgaatccggaatcttggattgtgctacttacgttgccggactatcaggcagcacatggtacatgtctactctatattctcatcccgattttccagagaaggggcccgaagaaattaatgaagagttgatgaaaaacgtatcccacaatcctctcctcctcctcacaccccagaaggtcaagcggtacgtagagagcctctggaaaaagaagtcatctggccaacctgtgacctttactgatattttcggcatgttgattggagagactctgatccataatcgcatgaatacgacactcagctcgctgaaagagaaggttaatactgcccagtgcccactgcccctttttacttgcctacacgtgaagccggacgtgtccgagttgatgtttgcagactgggtcgagtttagcccttatgaaattgggatggctaagtacgggacattcatggcccctgacttgtttggcagtaaattttttatgggcacagtggtcaaaaagtatgaagaaaaccccctccattttctcatgggagtgtggggtagtgctttctccattctgttcaacagagtgttgggggttagcggcagtcagtccagaggttccacgatggaggaggaattggagaatatcaccactaagcacatcgtctctaacgattccagcgatagtgacgacgaaagccacgaaccaaagggaactgagaatgaagatgccggcagtgactaccagtcagataaccaagctagttggatacatcggatgattatggccttagtcagtgactcagctctgttcaacactagagagggccgtgcaggaaaagtgcataacttcatgcttgggctgaacttaaatacgagctacccgctctctcctctatccgacttcgccacgcaagactcctttgatgatgatgaattggatgccgcagtggccgatcccgacgaattcgaacgaatctacgaacctctggatgttaagagtaagaaaattcacgtcgtggattccggcctgacctttaacctcccctacccccttattctgcgcccacagaggggggttgacctaatcatttcctttgatttttccgcaaggccttcggactctagtcccccttttaaggagctgctgctggctgaaaagtgggccaagatgaataaacttcccttccctaagatcgacccttatgtgttcgatcgcgaaggtctgaaagagtgctatgtgttcaagcccaaaaatcccgacatggagaaagactgcccaaccattatccacttcgtgctggcgaatattaactttaggaaataccgggcccccggtgtaccgagagaaaccgaggaagagaaggagatcgcggacttcgacatatttgacgatcccgaatcccccttctccaccttcaatttccaatacccgaaccaagccttcaagcgcttacatgatttgatgcatttcaacacgctgaacaatatagatgttattaaggaggctatggttgaaagtattgagtatcgcagacagaatccaagcaggtgttctgtctctctgtccaatgtggaagccaggcggtttttcaacaaggagtttctgagcaaacccaaagcctag

SEQ ID NO: 16637 - DNA, 2346 bp, synthetic construct
  misc_feature 1..2346: note = Description of Artificial Sequence: Synthetic coding sequence
  source 1..2346: mol_type = other DNA
atggcagtggctgaggtcagtaggacgtgcttgcttacagttcgggttctgcaggcacaccgcctcccttctaaagatttagtcacacccagtgactgctatgtgacgctgtggctccccactgcctgtagccatcggctccagacacggacagtgaagaattcgagcagtcccgtttggaaccaaagctttcacttccggattcatagacaactcaagaatgtaatggaactgaaggtgtttgatcaagacttggttacgggcgacgatccagtcttatctgtactgtttgatgcaggtaccctcagagccggagagttccgtagagagtccttttcgctcagcccacaaggggaggggaggctcgaggtggagttcagactacagtctctcgccgacagaggcgaatggctggtgagcaacggtgtcttagttgcaagagaactgagttgtttgcacgtgcagttggaggaaacaggggatcagaaatcctccgagcatagggtgcagctcgttgtcccaggctcgtgtgagggtccccaggaagccagtgtcggtacggggacctttagattccactgccctgcgtgttgggagcaagaattgagtatacgattacaggatgctccggaagagcagctgaaggcgcctttgtctgctttgccatccggtcaggtcgttcggctggtttttcccacatcccaggagccgttgatgagggtggagctgaaaaaagaggcaggactgcgggaattggccgtgagattgggtttcgggccatgtgcagaggaacaggcctttctgtcccggcggaagcaggtggtggccgccgccctgagacaggcactgcagctggatggtgacctgcaggaagacgaaattcctgttgtggccattatggcaactgggggtggaatccgcgctatgacgtcactgtatgggcaattggctgggttaaaggagcttggactgctggactgcgtgtcctacattacgggcgcaagtggctctacatgggccttggccaacttgtacgaagatcccgaatggagccagaaagacctcgctggccccaccgagttgttaaaaacccaagtcacaaagaacaaactcggagtgctggcccccagccagctgcagcggtatcggcaggagctggctgaaagagcacggctcggatacccaagctgttttaccaatctgtgggcactgatcaacgaggccttgctgcacgatgagccacatgatcacaaactcagtgatcagagagaagccttgtcccacggtcagaatcctctgcctatctattgcgccttgaatactaaagggcaaagcctcactacatttgagtttggcgagtggtgtgaattctcgccttacgaagttggctttcccaagtacggagcctttattccatccgagctctttggaagcgagtttttcatggggcagctcatgaaacgactacctgagtcccgcatatgtttcttagagggcatctggtccaacctgtatgctgctaacctgcaggattcactgtactgggcttctgaaccttctcaattttgggacagatgggtgcgtaatcaggctaatctggacaaagaacaggtaccactgctgaagatcgaggaaccaccgtcgacagccggccggatcgctgagtttttcacagatctgctgacatggaggccccttgcgcaggctacccacaacttcctcaggggacttcactttcacaaggactatttccagcatccacacttctcgacctggaaagcaaccaccctggacgggttgcccaaccagctcacccccagtgagccccatttatgtctgctcgatgtggggtatttgataaacacgagctgtctccccctgcttcagccaacacgcgatgtggacttgatcctcagtcttgactacaatctgcacggggcgttccagcagttgcagctcctcggcagattctgtcaggagcagggtattccgttcccacctatctcacctagccccgaagagcagctgcagcctagagaatgtcatactttcagcgatcccacctgccctggcgccccggcggtcctgcatttccccctggttagtgatagcttccgagagtactccgccccaggagtgagaaggaccccggaggaagctgccgcaggggaagtcaatttgtcatcatccgactcgccctatcactacaccaaagtcacatatagccaggaggacgtggataaattactgcacctgacacattacaacgtttgtaacaaccaagagcaattactggaggccctgagacaggccgtgcagcgtcgccgccagcgccgccctcattag

SEQ ID NO: 16638 - DNA, 417 bp, synthetic construct
  misc_feature 1..417: note = Description of Artificial Sequence: Synthetic coding sequence
  source 1..417: mol_type = other DNA
atgaagggtttgctccccttggcctggttcttagcctgttctgttccggcggtacagggcgggcttctcgacctcaagagcatgatagagaaagttacagggaagaacgctcttactaactacggtttctatgggtgctattgtggctggggagggcggggaacccccaaagacggcactgactggtgttgttgggcccacgatcactgttatgggcgattggaggaaaaagggtgtaatatacggactcagtcctacaaataccggttcgcctggggagtagtgacctgtgagcctggaccattttgtcacgtaaacctgtgtgcatgcgataggaaactcgtgtactgtttgaagaggaatctacgatcttataacccacagtatcaatacttccccaatattctttgcagctag

SEQ ID NO: 16639 - DNA, 2421 bp, synthetic construct
  misc_feature 1..2421: note = Description of Artificial Sequence: Synthetic coding sequence
  source 1..2421: mol_type = other DNA
atgcaattcttcgggagactggtgaatactttctctggggttacaaacctgtttagcaatccctttcgggtcaaagaggttgccgtggccgactacacctcttccgaccgcgtacgcgaagagggccaactgattttgtttcaaaatacgcctaaccgcacctgggactgcgtgctggtgaatcctagaaactcccaatcgggcttccggcttttccagttggagctggaagccgatgctcttgtgaatttccatcaatactcatctcagctgctacctttttacgagagctccccgcaggttcttcatacagaggtcctgcagcatctgaccgacctgatccgcaaccacccctcctggagcgtggctcatctggcagtcgagctgggtattcgagaatgcttccaccactcaagaatcatcagttgcgccaactgtgccgaaaatgaggagggctgtacccccctgcacctggcgtgcaggaagggggacggggagatcctcgtcgagttggtacagtactgtcacacgcagatggatgttaccgattataaaggtgagactgtcttccattacgccgtgcaaggcgacaatagccaggttctgcaacttttaggcagaaacgcagtggcaggcctgaaccaggtcaataatcagggtcttacacccctgcacctcgcttgtcagctgggaaagcaggaaatggttcgggtgctcctgctgtgtaacgcacgctgtaacattatggggcccaacggctaccccatacattctgctatgaaattctctcaaaaaggttgcgcagaaatgattattagcatggactcctctcagatccacagtaaggacccacgctacggggcttcacctctccattgggcaaagaacgcggagatggcccggatgctcctcaaacgcggctgcaatgtgaatagtacaagcagcgcgggaaataccgcccttcacgtggccgtaatgcgcaaccgatttgactgtgccattgtcctcctcacccacggagccaatgctgatgcccgcggtgagcacggtaatacacctttgcacctggcaatgtccaaggacaatgttgagatgatcaaagcactcatcgtcttcggcgccgaggtggacactcccaatgactttggagaaacccccacctttcttgcatccaaaatcgggcgtctggtgactaggaaggccatattgaccctgctcagaaccgtgggggccgagtactgttttcctccaattcatggcgtgcctgcagagcaggggtctgctgcccctcatcatcctttcagtctggagcgagcacaacctcctccaatctcccttaacaatctcgagctgcaggatctgatgcatattagtcgggcgaggaagcctgctttcatccttggatccatgcgagatgagaagagaacgcacgaccaccttctgtgcctggacggaggtggtgtcaagggcctgatcattatccagctcttgatagccatagagaaagccagcggtgtggcgaccaaagacctgtttgactgggtggccgggacaagcaccggcgggattctggccctggctatcctgcattccaaatccatggcttacatgcgggggatgtattttaggatgaaggatgaagtttttagggggtcccgaccgtacgaatccggtcctctggaggagttcctaaaacgggagtttggggaacacaccaaaatgacagatgtccggaagcctaaagtcatgctcaccgggacactgtcagatagacagcctgccgagcttcacttgttcagaaattatgatgcgccagaaaccgtgcgtgagccacgattcaaccagaacgtgaatctccgcccacccgctcagccctctgatcaactggtatggcgcgcagctagaagcagcggtgcagcgcctacatactttagacccaatggccggtttttggacggtggcctgcttgccaataacccaacacttgacgccatgactgaaattcatgagtacaaccaggacctgattcgcaaaggacaagccaataaggttaaaaaactttctattgtggtgtcactgggcacgggacgctccccacaggtgcccgtcacctgcgtcgatgtgttcaggccctccaatccttgggagttggctaaaactgtgttcggagcaaaagaactcgggaagatggtagtcgattgctgtacggacccggacgggcgggctgtcgaccgggctcgtgcttggtgcgagatggtgggcatacaatatttcagattgaatccgcaactcgggacagatataatgctggatgaagttagcgatactgtactggttaacgccctttgggaaacggaagtgtacatctacgagcatcgcgaggaattccagaagctgatccagctgctcttatccccatag

SEQ ID NO: 16640 - DNA, 1284 bp, synthetic construct
  misc_feature 1..1284: note = Description of Artificial Sequence: Synthetic coding sequence
  source 1..1284: mol_type = other DNA
atgcagttcttcggccgcctggtgaacaccttttctggagtgacaaatttgttcagtaatccatttcgagtgaaagaagtcgccgtggcagattatacttcatccgatcgtgttagagaggaaggccagctcatcctgttccaaaacacacctaaccgcacttgggattgcgtattggtcaacccaaggaattctcagagtgggttcagatgtgctaactgcgctgagaacgaagaaggttgtactcccctgcacctggcctgtagaaagggcgacggggagatcctcgttgagcttgtgcagtattgccacactcaaatggacgtgactgactataaaggggagacagtgttccactatgcggtccagggcgacaatagtcaagtgcttcaactgctcgggaggaatgccgttgcagggctgaaccaggtgaacaatcagggcctcacacccctgcacctggcatgccaattgggtaaacaggaaatggtccgggtcctgttattgtgcaatgcccggtgcaatataatggggccaaacggatatcccattcacagcgcaatgaagtttagtcagaagggctgcgccgagatgataatcagcatggactcgagtcagatccacagtaaagaccccagatacggtgcaagcccgctgcactgggccaagaatgctgaaatggcccgtatgctgctaaaacgcggctgcaacgtaaatagcacgtcaagcgctgggaacaccgcgcttcacgtggccgtaatgcgcaaccgtttcgattgcgcaattgtgctgcttactcacggcgcaaacgcggatgctcgcggggaacatggaaatacccccctgcatctcgccatgtccaaggataacgtcgagatgatcaaggccctcatcgtattcggcgccgaggtggatacacctaacgacttcggtgaaacaccaactttcctcgcctctaaaatcggacgtctggtcactaggaaagcaatcctgacacttttgagaactgtgggtgctgaatattgtttcccaccaatacacggagttcctgcggagcagggcagtgcagccccccaccacccttttagcctggagagggcccagcccccacccatttctttaaacaacctaggtagtcacccaagtcaagcagggtggtgggcgtggggggcagcctcagacgggactacaggaagtcatgcacaccttacagggccagaggcttcggtgcaccccggtctccacgaaggacgagaggcagacagacagaatatggagagttag

SEQ ID NO: 16641 - DNA, 2259 bp, synthetic construct
  misc_feature 1..2259: note = Description of Artificial Sequence: Synthetic coding sequence
  source 1..2259: mol_type = other DNA
atgcagttctttgggaggctggtgaacacctttagcggggtcacgaacctgttctctaacccctttagagtcaaagaggtggcagtcgccgattatacaagctctgacagggttagagaggaaggacaactcattctgtttcagaacactcctaacagaacctgggactgtgttctggtgaacccacgaaatagccagagtggtttcagactgttccaactggaattggaggccgatgcactcgtgaacttccatcagtacagctctcagctgctgcctttctatgagtccagcccacaggtactgcacacagaggtcctccaacacctgacagacttaatcaggaatcatccctcctggtccgtggcccatctcgccgtggaactgggtatccgggaatgttttcatcacagtaggattattagttgtgcgaattgtgctgagaacgaagagggctgtactcccctccacctggcttgtagaaagggagatggagaaattctcgtcgagctggttcagtactgtcacacccagatggacgtgaccgattacaagggagaaaccgtattccactacgccgtgcagggcgacaactcacaagttttgcagctgctgggtaggaatgctgttgctggactcaaccaggtgaataaccagggcctcacacccctgcacctggcatgtcagctgggcaagcaggagatggttcgggttctgctcctctgtaacgcgcgatgcaacatcatggggcccaatggctaccctattcacagtgctatgaagttcagtcaaaagggatgtgccgaaatgatcataagcatggactctagccaaatccacagcaaagacccccgttatggggctagtccactgcactgggcaaaaaacgccgaaatggcgcgaatgctgctcaagcggggatgcaatgtcaacagtacttcttctgcggggaacaccgccttgcatgtggcagtgatgaggaatcgatttgattgtgctatcgtcttattgacacatggggccaatgcagatgctcgcggcgagcatggaaatactccgctgcacctcgcaatgtctaaggataacgtagagatgataaaggcgctaatagtattcggtgcggaggtggacactcctaatgactttggcgagacaccgacattcctcgcctccaagattgggcgccagttacaggatctgatgcacatttctcgtgccagaaaaccggcttttatactggggagcatgagggatgaaaagcggacgcacgatcatctgttgtgcctcgatggaggaggcgttaaaggcttaattataatccagttgttgatcgctatcgagaaagctagcggagtcgcaaccaaggatctgtttgattgggtcgccggcacatctactggaggtattttagccctggctatactgcattccaagagtatggcctacatgaggggcatgtattttcgcatgaaggacgaggttttcagaggtagcaggccatatgagtccgggcccctcgaggaatttctcaagcgggagtttggagaacacactaaaatgactgacgtgagaaaacccaaggtgatgcttacaggaaccctgtctgatcgtcagcccgctgagctgcacctcttccggaactatgacgcccccgaaacagtgagagagccacggttcaatcaaaatgtaaacctccgaccccctgcgcagccaagcgaccagctggtctggcgggcggcacgttcatctggagctgcccccacctattttagacctaatggcagattcctagacggtgggttactggccaacaacccaacattggatgccatgacagagattcatgaatataatcaggacctaataagaaaaggacaggcgaacaaggtcaagaagctgagcatcgtagtcagcctcgggaccggtagaagcccacaggtccccgtgacgtgcgtggacgtcttccgccccagcaacccctgggaattggctaagacagtgtttggggcaaaggaactgggaaagatggtagtcgactgttgtacagaccctgatgggcgagccgtggaccgggcacgcgcatggtgtgaaatggtcggcatccagtacttccggttaaatccacagctcggcacagatataatgctggatgaagtgtccgataccgtactcgtgaacgccttatgggagaccgaagtctatatctatgagcacagggaggaatttcaaaagttgatccaactcctcctgtctccctag

SEQ ID NO: 16642 - DNA, 1440 bp, synthetic construct
  misc_feature 1..1440: note = Description of Artificial Sequence: Synthetic coding sequence
  source 1..1440: mol_type = other DNA
atgcagttcttcgggcggcttgttaatacttttagtggagtcaccaatctcttcagtaatccatttagagtgaaggaggtggccgtcgccgattatacttctagtgatagggtgcgtgaggaaggccagctgatcttatttcagaataccccaaacagaacttgggactgtgtgctggtgaacccacgaaactcgcagagtggtttccgacttttccaattagaactcgaagccgatgctctcgtcaattttcaccagtatagcagtcagctccttcctttttatgaatcctcaccacaggtgctgcacacagaggtactacaacatctaactgatctgatcaggaaccatccatcctggtcagtggcacatttagccgtggaattggggatcagagaatgcttccatcactctcgcataattagctgtgccaattgcgctgaaaatgaggaggggtgcactccactccacctggcctgcagaaaaggagacggagagatcctcgtggagctcgtgcagtattgccacacccagatggatgtaaccgactataaaggtgaaactgtcttccactacgctgtgcagggggataacagccaagtgctacagctgctgggccggaacgccgtcgccggacttaatcaggtgaataatcagggcctgactccgctgcacttggcatgtcagctgggcaaacaggagatggtgcgggtcttactgctatgtaatgctaggtgcaatatcatgggtcccaatggctatcccatccatagtgcaatgaagtttagtcagaaaggatgcgccgagatgatcattagtatggactctagccagatacatagtaaggaccccaggtacggagcttcgcctttgcattgggctaagaatgccgagatggctcgaatgctgctcaagcgagggtgcaacgtcaattcaacttcatctgctggcaatactgctctgcatgttgccgtgatgagaaaccgattcgattgtgcaatagtgctgcttactcacggcgcgaatgccgatgcccgtggggagcacggcaatactcccttgcatctcgcgatgtccaaggacaacgtcgaaatgatcaaggctctgattgtgttcggggcagaagtggacaccccaaatgattttggagagacaccaacattcttggcctctaagatcggtagactcgttactaggaaggccatcctgacactcctgcgaacagtgggagctgagtattgttttcctccaatacacggcgtgcccgcagaacagggcagcgccgccccccaccatcccttttcattggagcgggcacagccacccccaatctccctgaacaaccttgaattgcaagatttaatgcatatctctcgtgctaggaaaccagcttttatcctaggttccatgcgcgacgagaaaaggacggacagaacgtag

SEQ ID NO: 16643 - DNA, 2259 bp, synthetic construct
  misc_feature 1..2259: note = Description of Artificial Sequence: Synthetic coding sequence
  source 1..2259: mol_type = other DNA
atgcagttttttggacgactggttaatactttttctggtgtgacaaacttgttctccaatcccttcagggtcaaagaggtcgctgtagcggactatactagtagtgacagagtcagggaagaaggccaactgatcctgttccagaatactccaaaccgaacctgggactgcgtgcttgtcaatccaaggaactctcagagtggttttaggctgtttcagcttgaactcgaggccgatgcgctggttaacttccaccagtactcttcccagctactccccttttacgagtccagtccacaggttttacacaccgaagttctacagcacttaacggaccttatcagaaaccacccgtcctggtccgtagcacatctggccgtggagctcggcatcagggagtgcttccaccacagtcgcataatcagctgtgcaaactgcgccgaaaacgaggagggatgcaccccgctgcatctcgcttgccggaagggggacggcgagatcctcgttgagctggtgcaatactgccatacccaaatggatgtcacagactacaagggtgaaaccgtcttccattacgccgtgcagggagataattcccaggtcctgcaactgttgggccgcaatgcggttgccggcttaaatcaggtgaataaccaagggcttacaccattacacctcgcctgccaactgggaaagcaggagatggtacgggttctgttactgtgtaatgcccgttgcaacataatgggaccaaatggctatcccatccactccgccatgaagttctcacagaagggttgcgcagagatgattatatctatggatagcagccagattcatagtaaagacccccgctatggggcatcccctctgcattgggccaaaaacgcagagatggctcgcatgctgctcaagagaggatgcaatgttaacagcacttcttcagctggcaatactgctctccatgttgctgttatgcgcaatcgctttgactgtgccatcgttctgttgacacatggtgccaatgcagacgccaggggagaacacggaaacacacctctgcacctcgcaatgtctaaagacaatgttgaaatgatcaaggcccttattgtatttggagccgaggtggacacaccaaacgattttggggagaccccgaccttcttagctagcaaaattggccgccagttacaggacctcatgcacattagccgggccaggaagcccgccttcatccttggctctatgcgcgatgagaagaggacccacgaccatttactctgcctcgatgggggtggggtcaagggtcttattatcatccaactgctcatcgccatagaaaaggcctccggagtggctacaaaggacctgttcgattgggtggcgggaaccagcacaggcggaatccttgctcttgccatcctgcattctaagtctatggcatacatgcgcggcatgtattttcgcatgaaggacgaggttttcaggggctcacggccatacgaaagcggcccactggaagagttcttgaaaagagagttcggcgaacatactaagatgaccgatgtccgcaagcccaaggtcatgcttaccggtactctgagcgacaggcaacctgcggagctgcatctgttcagaaactatgatgcgccagagaccgtccgagagcctcgcttcaatcagaatgtgaatctaaggcctcctgcccagcctagtgatcagttagtgtggcgtgccgctcgctcatcaggcgcagcccctacttactttcgccccaatggtcgctttctggatggcggactgctggctaataatcccacactcgacgctatgaccgagatccatgagtataaccaggatctgattaggaaaggtcaggcgaataaagtgaaaaaactgagtattgtagtcagcctggggactggccgttcaccccaggtacctgtgacttgtgtggacgtgttccgaccttcaaacccatgggagttggccaaaacggtgtttggagctaaagaactgggcaaaatggttgtggactgttgcacggatcctgacgggcgagccgtggatcgagcacgtgcctggtgcgagatggtaggcattcaatatttccgattgaacccccagctgggcacggatatcatgttggacgaggtgtccgacactgtcttagtaaacgcactctgggagaccgaggtctatatatacgagcatcgagaggagttccagaagctgatccaacttcttttgagcccctag

SEQ ID NO: 16644 - DNA, 2004 bp, synthetic construct
  misc_feature 1..2004: note = Description of Artificial Sequence: Synthetic coding sequence
  source 1..2004: mol_type = other DNA
atgcaattctttggacgcctggtaaataccttcagtggagtcacgaacttattttcaaaccctttccgggttaaagaggtagccgtcgcggattacacttcctcagatagagtcagagaagaaggtcagctcatcttgttccagaacacaccaaataggacttgggattgtgtattggtaaaccctaggaacagtcaaagcggttttagactgtttcaacttgaactagaagccgatgcattagtaaactttcaccagtactcttcccagcttggtaagcaagaaatggtccgggtgctgctcttgtgcaatgcccggtgcaacattatggggccaaacggctaccctatacattccgctatgaagttctcccaaaaaggatgcgcagagatgattatctccatggactcctcccagatccattctaaggacccaaggtacggagcaagtccactgcattgggcgaaaaacgctgagatggccagaatgctgctcaaacgcgggtgcaacgttaactccactagttccgctggcaatacagctttgcacgttgcagtgatgcgaaacaggttcgattgcgccatcgttctcctcactcacggagccaacgctgacgcacggggtgagcacggaaacacacccttgcatctggctatgagcaaagataatgtcgagatgataaaggctttgattgtgtttggagctgaggttgatacgccaaacgatttcggcgagacccctacgttcttggcgagcaagataggcaggttagtaacccgaaaggctattctgaccctgcttaggacagtcggcgcggaatactgcttcccccccatccacggtgttcccgcggagcagggaagcgccgcccctcatcacccattctctctggaacgcgcccagccacccccgatatcactcaacaatttagaactacaagatctgatgcacatttccagagcacgaaagcccgccttcatcctcggcagtatgcgggatgagaagaggacccacgaccacctgctgtgtttggatggggggggggtgaaaggcctcatcatcatccaactgctgatcgccattgaaaaggcgtcaggcgtagccacgaaggaccttttcgactgggtcgccgggactagcacaggaggaatcttagctctagctatcctgcactcaaagtccatggcctatatgcgcggcatgtactttcgtatgaaagatgaagtatttaggggctccagaccatatgagtccgggcctttagaagagttcctcaaaagggagttcggggaacacactaagatgactgacgttagaaagccaaaagtaatgttaacaggcactttaagcgaccggcagccagccgaactgcacctctttcggaactacgacgcccccgagaccgtcagagagccgagattcaaccagaacgtgaacctgcgccctcccgcccagccttcagatcagctggtgtggagagctgcccggagtagtggtgcggctcccacctacttcaggcctaacggtcgttttctggatggaggtttattagccaacaatcccacgttggatgccatgacagagatacacgaatataaccaggacctgatccggaaggggcaagctaacaaagtcaaaaagctgtcaatcgtggttagtcttggaactggcaggtccccgcaggtgcctgttacctgtgttgatgtcttccggccaagcaatccttgggagctggcaaagaccgtctttggagccaaggaactcgggaaaatggtcgtcgactgttgtacagatccggatggcagggcggtggaccgggccagagcctggtgcgagatggtcggcatacagtacttccgtttgaatcctcagctgggaaccgatatcatgctagatgaggtttcagataccgttctcgtcaacgccctctgggagacggaggtatatatctacgagcacagggaggaattccagaaacttatacagctcttgctgtctccatag

SEQ ID NO: 16645 - DNA, 501 bp, synthetic construct
  misc_feature 1..501: note = Description of Artificial Sequence: Synthetic coding sequence
  source 1..501: mol_type = other DNA
atgcaattctttggacgactagtcaacactttttccggcgtgacaaatctgttttctaaccccttcagggtaaaggaagtggccgtggcagattacacctcatccgacagagtacgggaagaaggacagctgatcctgttccaaaatacgcctaaccgtacctgggactgtgttctcgtcaaccccagaaattcccagtctggcttccggtgcgccaattgcgcagagaacgaggaagggtgtacaccattgcacttggcatgccgcaaaggggatggcgagatcttggtggagctggttcaatactgtcatacacagatggatgtgaccgattataaaggcgagactgtgttccactatgccgttcaaggtgacaatagtcaggtgttacagttgctgggacgcaacgccgtggccgggctgaaccaggtcaacaaccagggactgactcctctgcatttagcgtgtcaactaggcaagcaggaaatggtgcgagtgtag

SEQ ID NO: 16646 - DNA, 1299 bp, synthetic construct
  misc_feature 1..1299: note = Description of Artificial Sequence: Synthetic coding sequence
  source 1..1299: mol_type = other DNA
atgcaattcttcggtcggttggtaaacacattcagtggtgtcacaaacctgttcagtaaccccttccgggtgaaggaagttgccgtggccgactatacctcctccgaccgggtacgcgaggagggtcagctgatcctatttcagaacacaccgaaccgaacgtgggattgcgtgttggtgaaccctagaaatagccagtctggcttcaggctcttccaactcgagctggaggctgacgctctggtcaactttcatcagtatagtagccagctgcttcctttttatgaatctagtcctcaggtgctgcacacagaggtgctgcagcatctgacggacctgatccgcaatcacccaagctggtctgtggctcacctggcagttgaactaggcatccgcgagtgtttccatcactctcgaatcattagggtgcggtcagcccatcaagtgccaggcctgtgggaactgataagtactcaccacgagatagagttttcacagcctcctcaggctgtgcccattgccaggcgtaccaggagagctgcacatccatgcacctggcctgccgctcgcgtaatgggccgaagttggtggagttggtgtagcacagccacactacggtggatgtctcccacaacccgcgagaggccgagctccataatgctgagtagggtcacaattctgcgatgctgtcggtgtgcggagatgatcatttctatggatagctcccagattcatagtaaggacccgcggtacggggctagtcccctccactgggccaaaaatgctgaaatggccaggatgctgttgaaaaggggctgtaatgtgaactccacctcaagcgccgggaataccgccctccatgtggctgtgatgcgcaaccgttttgattgcgcgatcgtgctgctgacccatggggccaacgcagatgccaggggcgaacacggcaacaccccgctgcatctcgccatgtcgaaggataacgtagagatgatcaaagcactcatcgtgttcggcgctgaggtcgacacccctaatgactttggcgagacccctacgttccttgcaagcaagatcggtcgtctggtcacgagaaaagctattctaaccctactgagaacagtcggggccgagtattgcttcccccctattcatggcgttccagcagaacaggggagcgccgccccccatcacccatttagtcttgagagggcccagcctcccccaatatcgctgaacaatctcggatctcatcctagccaagccgggtggtgggcgtggggagcagcctcagacggctag

SEQ ID NO: 16647 - DNA, 243 bp, synthetic construct
  misc_feature 1..243: note = Description of Artificial Sequence: Synthetic coding sequence
  source 1..243: mol_type = other DNA
atgcagtttttcggacggctggtaaatactttctctggagtcaccaaccttttttccaatcctttcagggtcaaagaagtggccgtggccgactacacctcaagtgatagggtccgcgaggagggccagcttatcctgttccagaacacgccaaacagaacatgggactgtgtcctggttaatcccaggaattctcaatccggctttaggctgtttcagctagaactggaagctgatgcctag

SEQ ID NO: 16648 - DNA, 498 bp, synthetic construct
  misc_feature 1..498: note = Description of Artificial Sequence: Synthetic coding sequence
  source 1..498: mol_type = other DNA
atgggtccgctccctgtttgcttacccatcatgttattactcctgctgccatctctattacttcttttgttgctccccggcccagggagcggagaagcctctagaattctaagggttcaccgccggggcattcttgaattagccgggacagtgggctgcgtcgggcctcggactccgatcgcctatatgaagtacgggtgtttttgtggtctaggagggcatgggcaaccccgggatgcaatagactggtgctgtcatggccatgactgctgttatacgcgcgcggaggaagctgggtgttcccccaaaacagaaagatattcatggcagtgcgtgaaccaatccgtattatgcgggccagctgagaacaaatgtcaggagcttctttgcaagtgcgatcaggagatcgctaattgcctcgcacagacagagtacaacttgaagtacttgttttatccgcagtttctgtgcgagccagactctcccaagtgtgattag

SEQ ID NO: 16649 - DNA, 498 bp, synthetic construct
  misc_feature 1..498: note = Description of Artificial Sequence: Synthetic coding sequence
  source 1..498: mol_type = other DNA
atgggacccctcccagtctgtcttcccatcatgctacttctcctattgccgtccctgctacttctgctgctgcttccagggcccggctcaggagaagcgagccgaatactgcgagtacaccggcgggggattctggaactggccggcactgttggatgcgtcgggccacggacccctattgcatacatgaagtacgggtgcttctgcggcctgggcggtcatggacaaccgcgggacgctattgattggtgctgccacgggcatgattgctgttacactagagccgaggaagccggttgtagccccaaaaccgaacgttactcatggcagtgtgtcaaccagtctgttctatgtggacctgccgagaacaagtgtcaggagctcctctgcaagtgtgatcaggaaattgctaactgtcttgcccaaactgagtataacctgaagtatctgttttatccccagtttctttgtgaacccgactccccaaagtgtgattag

SEQ ID NO: 16650 - DNA, 570 bp, synthetic construct
  misc_feature 1..570: note = Description of Artificial Sequence: Synthetic coding sequence
  source 1..570: mol_type = other DNA
atggcgcttctgagtaggcccgctctgacactgttacttcttttaatggccgctgtcgtgcggtgtcaagaacaggcccagacaacagattggagagcgaccttgaagactattcgaaacggagtgcataagattgatacgtatctgaatgctgccctggatctcctggggggtgaggacggactgtgccagtataaatgttctgacggatccaagccctttcctcggtatggttacaaaccctccccgcctaacggatgtggctcacccctctttggcgtgcaccttaacattggcataccgagcttgaccaagtgctgtaatcagcatgataggtgctatgagacttgtggtaaatccaagaacgactgcgatgaggagttccagtattgcctatctaagatatgccgggatgtgcaaaaaacactgggtctcactcagcacgtccaggcatgcgaaacaaccgtggagttgctattcgatagtgtgatccacctgggctgcaagccctatctggactcacaacgtgcagcctgtagatgccattacgaagaaaaaacagatttatag

SEQ ID NO: 16651 - DNA, 213 bp, synthetic construct
  misc_feature 1..213: note = Description of Artificial Sequence: Synthetic coding sequence
  source 1..213: mol_type = other DNA
atggccctactgtcgcgtcccgctcttacattgcttttgctgctgatggccgcggtggtgaggtgccaggaacaggcccaaaccacagattggcgagcgaccctgaagactatccggaatggcgttcataagatcgatacctacttgaatgcagcattagacctcttgggcggggaagatgggctgtgccagtataagtgcagtgacgcatag

SEQ ID NO: 16652 - DNA, 588 bp, synthetic construct
  misc_feature 1..588: note = Description of Artificial Sequence: Synthetic coding sequence
  source 1..588: mol_type = other DNA
atgaaactggcttcaggtttcctcgtgctgtggctaagcctcggaggtgggttggcacagtctgataccagccccgatactgaggagtcgtactcggattggggcctccgccaccttagagggagtttcgaatctgttaatagctattttgacagctttctggagctgctcggtggaaagaatggcgtctgccagtacaggtgtcgctacggcaaggctcctatgcctcgccccggttacaaaccccaggagcccaacggatgcggatcttattttctcggtctgaaggtacctgagtctatggacttgggcatcccggccatgactaagtgttgcaatcagcttgacgtgtgttacgacacatgcggagcaaacaagtaccgttgtgacgccaagtttcggtggtgtcttcattcaatctgttcagatctgaagagatccctcggatttgtgagtaaggttgaggccgcatgcgactccctggtggacacggtgtttaataccgtgtggactttggggtgtaggcccttcatgaatagtcagagagccgcctgcatttgcgctgaggaggagaaagaggagttgtag

SEQ ID NO: 16653 - DNA, 3876 bp, synthetic construct
  misc_feature 1..3876: note = Description of Artificial Sequence: Synthetic coding sequence
  source 1..3876: mol_type = other DNA
atggccggagccgcttcaccatgcgccaacggatgtggtcctggcgcaccgagcgatgccgaggtgttgcacctgtgccgatcattggaggtgggtaccgttatgaccttgttctattcaaagaagtcccagagacctgaacgtaaaacatttcaggtgaaactggaaactcggcaaattacgtggagtcgtggggcagataagattgaaggcgctattgatattagggagattaaggaaattagaccaggcaagacctcccgagacttcgatcgctatcaggaagacccggctttccgcccagaccagagtcattgctttgtcattttatacggcatggaatttaggttaaaaactctcagcctgcaggctacatcagaggatgaagttaatatgtggatcaagggactgacttggctaatggaagacaccctgcaggcccctacccctttacagatcgagaggtggctgcggaagcagttctactcagtggacaggaacagggaagacaggatctccgctaaggatctcaaaaacatgttaagccaagtcaactacagggttcccaacatgcgctttctgcgcgagcggctgactgatctcgaacagcgaagcggagatatcacctacggacagtttgcgcagctttataggtctctcatgtacagcgcacagaagactatggacctgccctttctggaggcgagcaccctgagggcaggtgaacgtcccgagctctgccgcgtgtctctgccagagtttcaacagttcctacttgactaccagggagaactgtgggccgtggaccgcctgcaggtgcaggagttcatgttgagcttcctccgtgatcccctgcgcgaaatagaggagccttactttttcctcgacgaatttgtaactttcctcttttccaaagagaactccgtgtggaacagtcaactcgatgctgtgtgccccgatactatgaataaccctctgtcccactactggatcagttccagtcataatacctacctcaccggggaccagttcagctctgagagcagccttgaggcatatgcacgctgcctgaggatgggttgtcgatgtatcgagttggattgttgggatggacccgacgggatgccagtcatataccacgggcacacactaaccacaaaaattaaatttagtgacgtacttcataccattaaggaacacgcgtttgttgcgagcgagtaccccgtgatcctctcaattgaagaccattgtagtatcgcacagcagcgcaacatggctcagtacttcaagaaggttcttggcgatactcttctaactaaaccagtggagatcagcgccgacgggttaccatcccccaatcaactaaagcgcaaaatcctgatcaaacacaagaaactggccgagggctctgcatatgaagaggtgcctaccagcatgatgtactcagaaaatgacatttcgaacagcattaagaacggcatactgtacctcgaggatccagtcaaccacgaatggtacccccactactttgtgctcacgtccagtaagatttactatagcgaggagacctcctctgaccagggtaacgaagacgaagaggaaccaaaagaggtatcgtcttccaccgagttacacagtaatgaaaagtggtttcatggcaaactgggcgccggccgcgacggcagacacattgcagagcgactcctgacagagtattgcatcgagacaggcgccccggacggcagttttctggtaagggagtctgaaaccttcgttggggactataccctctcattttggcggaacggcaaagtgcaacactgcagaattcattcacggcaggatgctgggaccccaaaattctttctgaccgacaacctagtgtttgactccctgtacgatctcataacgcactatcaacaggtgcccttgaggtgcaatgagttcgagatgagattatcagaaccagtaccccaaactaacgcacacgaatccaaagagtggtatcacgcttcgctgacaagagcacaggcagagcatatgctgatgcgggtaccaagggacggggctttcctggtcagaaaacgaaatgaacccaactcatatgctataagctttagggctgagggcaagatcaaacactgccgagtacagcaagaaggtcagaccgttatgctgggcaactccgaatttgactcactcgtcgatctaatcagctactatgagaagcaccccctgtatagaaaaatgaagctgcgatacccaatcaacgaggaggctctggagaagatcggcacagcagagcctgactatggtgcactgtacgaggggaggaaccccggattctatgtggaggccaatcctatgcccacattcaagtgtgccgtgaaagccctctttgactacaaagcccagagggaggatgagctaaccttcatcaaatccgcaatcattcagaatgtggagaagcaagagggaggatggtggcgcggcgactacggtggaaaaaagcagttgtggttcccctccaattacgtcgaagagatggtcaatccggtggccctggaacccgagagggagcacctggacgagaactctccgctgggcgacttactcaggggtgtgttggacgtcccagcctgccagattgctattcgtcccgagggtaagaacaaccgtctctttgtcttctccatctccatggccagcgtggcacattggtccctagatgtcgcggctgattctcaggaggagcttcaagattgggttaagaaaattcgagaagtagctcagactgccgatgctcgccttacagaaggcaaaatcatggaaagacgtaaaaagatcgctctagaattatcggagttggttgtctactgccgccctgtgcctttcgatgaagagaagatcgggactgagcgagcctgttacagagacatgtcaagtttcccggagactaaagctgaaaaatacgtgaacaaggcgaaaggaaagaaatttcttcagtataataggttacaactgagtcgcatctatcccaagggccagcggctagattcttccaactatgaccctctcccgatgtggatttgtgggtctcaactcgtcgccctgaatttccagacccctgacaagccaatgcaaatgaatcaggcactgtttatgactggacggcattgtggatatgtgcttcaaccttccaccatgcgagatgaagcgttcgatccattcgataagtcatccctgcggggactggaaccctgcgcaatcagcatagaggtcctcggggcccgccacctgcctaagaacggcagaggcatcgtttgcccattcgtcgaaatcgaggtagccggcgccgaatacgattccaccaagcagaaaacggaattcgtagtggataacgggctcaatccagtgtggcctgcaaagcccttccatttccagatctccaatcccgagttcgcctttctgcggtttgttgtgtatgaggaagacatgttctctgatcagaactttctcgcccaagccaccttccctgtcaagggcctgaagaccggttacagagccgtgccactaaagaataactattcagaagacctggaactggcatcgctccttataaaaatagatatctttccagctaaacaggaaaatggtgacctcagccccttctccgggacctcactcagagagcgggggtcagacgcttcaggccagctctttcacggtcgagcacgggagggttcattcgaatctaggtatcagcagccatttgaggattttaggatatcccaggagcacctagctgaccattttgactcaagagagagacgagccccccggcggacacgggtgaacggtgacaatcgcctgtag

SEQ ID NO: 16654 - DNA, 3873 bp, synthetic construct
  misc_feature 1..3873: note = Description of Artificial Sequence: Synthetic coding sequence
  source 1..3873: mol_type = other DNA
atggcaggagccgcctcaccatgtgcaaatggatgtggcccaggcgcaccaagcgacgcagaggttctgcatctgtgccgcagtttggaggtgggtaccgtgatgacactgttttacagtaaaaaatcgcagcggccagaacggaagacattccaggtgaaactggagaccaggcaaattacatggagccggggtgccgataaaatcgagggggccatcgatattagagagatcaaagagattcggcccggaaaaacctcccgggatttcgataggtatcaggaagaccccgcatttcggcccgaccaatctcactgcttcgtaattctgtacggaatggaattccggcttaaaacactgagccttcaagctacaagcgaagacgaagtgaacatgtggattaagggactgacatggctgatggaggacactcttcaggcacccactcctttacagattgagcggtggcttcggaaacaattctacagcgtggacaggaacagggaagacagaattagcgccaaagacctcaaaaatatgctgtctcaggtcaactaccgggtgccgaacatgaggtttctgcgtgagaggttgaccgacttggaacaacgatccggcgacattacctacggacagtttgctcagctctataggtctctcatgtactctgcacaaaagacaatggacttgccttttctagaggccagcaccttgcgcgccggcgagagacctgaactgtgccgcgtcagtctgcccgagttccagcaatttctcctggactaccagggggagctgtgggccgtagatagactccaggtgcaggagttcatgttatcattcctgcgtgatcctctgagggagatcgaagaaccatacttcttcctcgatgaattcgtcaccttcttattttccaaggagaacagtgtgtggaattcgcagctagacgccgtgtgccccgacacaatgaataatccactgtcccattactggatatcctccagccacaatacttatttaacaggagaccagttttctagtgagtctagtcttgaagcatacgccaggtgtctacggatgggctgtcgctgtatagagcttgactgctgggatggacctgatgggatgcctgtaatttatcatgggcataccttgacaacgaagataaagttttcagatgtacttcacaccattaaggagcatgcgttcgtggcgagtgaatacccagtgatcctgagcattgaggatcactgtagtattgcccagcagcgaaacatggctcagtatttcaagaaggtgctgggcgacacactcctgaccaagccagttgaaatttcagccgatggcctgccctcaccaaatcagctcaagaggaaaattctcattaagcacaagaagttggccgaaggttctgcttacgaagaggtcccaacctcaatgatgtactcggaaaatgacatcagcaatagcatcaaaaatggcatactatacctggaggatcccgtgaaccacgaatggtatcctcactactttgtgctaacatcttcgaagatctattactcagaagaaacaagtagtgatcaaggcaatgaggatgaagaggaacccaaggaggtcagcagtagcactgagctgcattctaatgagaaatggtttcacggcaagctcggagccggacgagatgggcggcatatcgcggaacgcctgttaacagaatattgtattgaaaccggcgcccctgacggctcgttcctggtacgggagtctgagacttttgtgggagactacaccctctccttctggcgtaacgggaaagttcagcactgcaggattcatagtcgtcaggacgcggggacacctaagttcttcctgactgacaaccttgtcttcgattccttatacgacctaattactcactatcagcaggtgcccctcagatgcaacgagtttgagatgcggctaagtgagccggtgccacagacaaatgcacacgagtccaaagaatggtaccatgcttcccttacaagggcacaagccgagcatatgttgatgcgggtcccacgagacggcgccttcctggttagaaaaagaaatgagccgaattcctacgctattagcttccgcgccgagggcaaaattaagcactgtcgggtgcagcaggaaggccagaccgtcatgctggggaactctgaatttgattctctcgtagatctgatttcctactacgagaaacacccgttgtatcgtaagatgaagctacgttacccaatcaatgaagaagcgctggagaagatagggactgccgagccggactatggagcactctacgagggccgaaacccaggcttttatgtcgaggcgaacccaatgccaacattcaagtgtgccgtgaaggcattgttcgactacaaagcacaacgcgaagacgagctgaccttcatcaaaagcgcgatcattcagaacgtcgagaaacaggaaggaggttggtggcgaggtgattacgggggtaagaagcagctgtggtttcccagcaattacgtcgaagagatggtgaacccagtggcccttgagccggagagagagcacttggacgagaactcccctctgggcgaccttctgcggggtgtccttgatgtgccagcctgtcagattgccattcggcccgagggtaagaacaatcgcctatttgtcttttccatttcaatggcctcggtcgcccattggagcctcgacgtggcggccgattcccaggaagagttgcaggattgggtcaagaagattagggaagtcgcccagactgctgacgctcgcctgacagaaggtaaaatcatggagcgccggaagaaaatcgctctggagctgtcggagctcgtggtttactgtagacctgtgccttttgatgaagagaagataggcacagagagggcttgctatagagacatgagcagttttcccgaaaccaaggccgagaaatatgtgaataaagcaaagggaaagaaattcctccagtacaatcggctgcagctttcccgtatctaccccaaggggcagcgtctggacagctctaactatgaccccctgccaatgtggatatgcggcagccagctggtggctcttaatttccaaacgcccgacaagccaatgcaaatgaatcaggccctgttcatgaccggtcgccactgtggatatgtgctgcagccaagtaccatgagagacgaagcattcgatcctttcgacaaatcgtcactaagaggtctcgagccctgcgctataagcattgaggtgctcggagcaagacacttgcctaagaacggtcgggggatcgtgtgcccgttcgtagagatcgaagttgcgggtgccgaatacgactctaccaagcaaaagactgaatttgtcgtagataacggactgaatcccgtctggcctgccaaaccttttcactttcaaatcagcaatccagagttcgcttttctgagattcgttgtatacgaggaggatatgttcagcgaccaaaatttcctggctcaggcaacctttcccgttaagggactcaaaacaggctaccgcgcggtgcccctgaaaaacaactacagcgaggatttggagctcgcttccctgctgattaagatcgatatcttccctgccaaagaaaacggagatctgtctcccttttctggaacctcccttagagaaaggggctctgacgcctctggacagctgtttcacgggcgtgctagagaaggttcttttgagtcaagataccagcagcccttcgaggatttcagaatctctcaggagcatcttgcagatcacttcgactctcgcgaaagacgcgccccccggcgaacccgcgtcaacggagacaaccggctgtag

SEQ ID NO: 16655 - DNA, 3876 bp, synthetic construct
  misc_feature 1..3876: note = Description of Artificial Sequence: Synthetic coding sequence
  source 1..3876: mol_type = other DNA
atggcaggtgccgcctcgccgtgcgctaacggatgcggaccgggggccccctccgatgccgaggtgctgcacctctgcaggtccttagaggtgggcactgttatgacattgttttattccaagaagtcacaacggcccgagaggaaaaccttccaggtgaagttggaaacccgacagatcacgtggagccgaggcgccgacaaaattgagggcgctattgatatcagagaaatcaaagagatccgaccagggaagacaagccgagatttcgatcgctatcaggaagaccctgctttcaggcccgaccagtcccattgctttgtgatcctatacggcatggagtttagacttaaaacgttgtccctccaggctacctctgaggatgaggtcaacatgtggatcaaaggtctaacatggctgatggaagataccttgcaggcccctactcccttgcagattgagaggtggctgaggaagcagttttactcggttgacagaaacagagaggacagaatctccgccaaggatttgaagaatatgttatctcaagtgaattaccgtgtccctaatatgagatttctgcgcgagcggctgacagacctggagcaaagaagcggagacatcacctatggccaattcgctcagctctaccggtctttaatgtacagcgctcagaagacaatggatctaccatttttagaagccagcactctgcgcgccggcgaacgcccagaactatgtagagtgtcgctgccagagtttcagcagttcctgctggactatcagggggaactgtgggcagtagaccgacttcaggtacaggagtttatgctctcatttctgcgcgaccccctccgggagattgaggaaccatacttctttctagatgagttcgttaccttccttttttctaaagaaaattcagtgtggaacagccaactggatgcagtctgccctgacactatgaacaatccgctgagccactactggatctcctcctcgcacaacacttaccttaccggggatcaattctcatcagagtcatctctagaggcctacgcaaggtgtctccggatgggatgcagatgcatcgaactcgactgctgggatggccctgacggcatgcccgtgatctaccacggacacacactgaccactaaaattaaattctccgatgtgttacacaccataaaagagcacgcttttgtggccagcgaatatcctgtaatcttaagtattgaggaccattgctcaatcgctcagcaacgcaacatggcccagtatttcaaaaaggtactgggcgatactttactgacaaaacctgtggagatctcggcagacggtctgcctagccccaaccaactgaaacgaaaaatactcatcaaacataaaaagctcgcagaaggcagtgcgtacgaagaggtccctacttcgatgatgtacagcgagaatgacatttccaactcaatcaagaacgggatcttatacctcgaagatccagtgaatcatgaatggtacccccactattttgtgctgaccagtagcaagatctattatagtgaggagacaagttcagatcaaggcaatgaagacgaagaagaaccaaaagaagtgagctcatccactgagctccatagtaatgagaagtggtttcacgggaagctcggcgcggggcgggacggccgccacattgcagaacgactgcttacagagtactgcattgagacaggcgctccagacggctcattccttgtgcgcgaatccgaaacattcgtgggcgactacacgctcagtttctggagaaatgggaaagtccagcattgccgaatacactctcggcaggacgctggaacaccaaagttttttctcaccgataatctggtcttcgattcgctgtacgacctcattacccactaccaacaggtccctcttcgttgtaacgaattcgaaatgcgcctatccgagccggtcccccaaaccaatgctcacgagtcaaaggaatggtaccatgccagtctgacccgagcgcaggctgagcacatgctcatgcgtgtcccccgcgacggcgcctttctggtcagaaagcgtaatgagcccaattcatacgctataagcttcagggccgaagggaagattaaacactgcagagttcagcaggaaggccagacagtgatgcttggcaattccgagtttgattcattggtagacctcatctcctattatgaaaaacatcccctctatcgtaagatgaagctccgctaccccattaacgaggaggcgctggaaaagattggcacagctgaaccggactacggagctctgtatgagggcagaaacccaggtttttatgtggaggctaacccaatgcctacctttaagtgtgccgtaaaagcgttgtttgattataaagctcagcgggaagatgagttaacatttatcaagtcggcaattatccagaacgtcgagaagcaagaagggggctggtggcggggagattatgggggtaagaaacaactgtggtttccatctaactacgtggaggagatggtgaacccagtagctttggagccagagagggagcacctggatgagaattcaccgttgggagatctactgagaggcgtgctggatgtgcccgcttgccaaattgcgatcaggcctgagggaaaaaacaaccgcttgtttgtcttttccatctctatggcttccgttgcccactggagtctggatgtcgcagccgattctcaagaggaactgcaggactgggtcaagaaaataagggaggtcgctcagactgccgatgccaggctgaccgagggaaaaatcatggaacgaagaaaaaaaatcgctctggagttgtctgagctcgtcgtctattgtcgacctgtgcccttcgatgaggagaagatcggcactgaaagggcttgttaccgcgatatgtcctctttcccagagactaaggcagagaagtacgtgaacaaggcaaagggaaaaaagttcctccagtacaatagactccagctgagtcgaatctaccccaaagggcagcgcttagacagtagcaattacgaccccctcccaatgtggatctgcggctctcaattggtggcgctcaattttcagacaccagataaaccaatgcagatgaatcaagctctgttcatgaccggccggcattgcggatacgttctacaaccctccacaatgcgcgacgaagccttcgatccattcgataaatcatccttaaggggattagagccctgtgcaatttccatcgaggtactgggagcgcgccacttgcccaagaacggacgaggcattgtgtgcccatttgtcgagatcgaagtagccggggccgagtacgattctacaaaacagaagacggagttcgttgttgacaacggcctgaacccagtgtggcctgccaagcctttccacttccagatcagcaatccggaattcgctttcctccgattcgtcgtgtatgaagaagatatgttcagtgaccagaacttcctggcacaggctactttccctgtgaaaggcctgaagaccggctacagagccgtcccccttaagaataattatagcgaagatctcgaactcgcctcactgctcataaaaattgacattttcccggctaagcaagagaatggggatttgtcaccattctcagggacgtccttgcgagagagaggatcagatgcatccgggcagctgtttcatggcagagcccgtgagggatcattcgaatcccgctatcagcagccctttgaggactttcgaatctcccaggagcacctggcagatcactttgactctcgcgagcgccgcgccccccgaagaaccagggttaacggcgacaatagactgtag

SEQ ID NO: 16656 - DNA, 3798 bp, synthetic construct
  misc_feature 1..3798: note = Description of Artificial Sequence: Synthetic coding sequence
  source 1..3798: mol_type = other DNA
atgtcaaccaccgttaatgtggatagtctcgccgaatacgaaaaaagtcagatcaagagggccttggagcttggcacagtaatgacagtcttcagttttagaaaatctacccctgaacggcggactgtgcaggtgataatggagactcgccaggttgcttggagcaagacggcggacaagatcgaagggttcttagatatcatggaaatcaaggagatccggccaggaaaaaactcgaaggactttgaacgggcaaaggctgtcagacagaaggaggactgttgctttacgattctttacgggacacagttcgttctatccacgttatcccttgccgcagatagtaaagaagatgcggtgaactggctctcgggactgaaaatattgcatcaggaagcaatgaatgccagcacccccaccatcatagaatcttggttgcggaaacaaatttattcggtggatcaaacgaggcgcaacagcatctcactcagggagttaaagactattcttcccctgatcaatttcaaggtatcgagtgccaaatttttaaaggacaagtttgtggaaatcggggcccacaaagatgagctatccttcgaacaattccatctgttttataagaagctgatgttcgagcagcaaaagagcatcctcgacgagtttaagaaagacagttctgtgtttattctgggaaacacggaccggccagacgcctcggcggtctacctccatgacttccagaggtttctaatccacgaacaacaggaacattgggcccaggacttgaacaaagtgagagagagaatgacgaagttcattgatgatacaatgcgcgagacagcagagcccttcctgtttgtggacgagttccttacctatctgttctcccgggaaaattccatctgggacgaaaagtacgacgccgtggacatgcaggatatgaacaatccgctgtcacactactggatcagttcgagccacaacacttacctcaccggcgatcagctcagatcagaatctagcccggaggcctatatacgttgcctgcgcatggggtgcagatgtattgagctggattgctgggacgggccggatggcaagcccgttatctaccacggatggaccagaactactaagatcaaatttgacgatgtcgtgcaagctattaaggatcatgcatttgtgacatccagcttcccagtcatactgtctatcgaggaacactgttctgtggagcaacagcgacatatggctaaagccttcaaggaagtgtttggagatctgctgctcaccaaacctacagaagcatccgctgaccagctcccatcaccgtcacaactcagggagaaaatcattattaagcacaagaaactggggccccgaggcgatgtcgacgttaacatggaagacaaaaaagatgagcataaacagcagggcgagttgtatatgtgggactcaatcgaccagaagtggacgcgtcattactgcgccatcgccgacgccaaactgtctttttcagacgacatcgagcaaactatggaggaagaagtgcctcaggatattccacccacagagttgcacttcggagagaaatggtttcacaagaaggtggaaaaacgcactagcgctgagaagctcttgcaggaatattgtatggagaccgggggtaaggacggcacattcctggtgcgggaatcggaaactttccctaatgattatacactcagcttttggcgttcaggcagagtgcagcattgcaggattaggagtacaatggagggaggaaccctgaagtattatttgactgacaatcttaccttctcatctatctatgccctcattcagcattatagggagacacacttgagatgtgccgagtttgagctgcgcctgaccgatcctgtccccaaccctaatccgcatgaatcgaagccatggtactatgatagcctgtcccgtggagaggccgaggatatgctgatgagaatcccccgtgatggggcctttctcatccggaagagggaaggaagcgactcttatgccattaccttccgagcaagaggaaaggtgaaacactgccggattaaccgtgacgggcggcatttcgtcctgggtaccagcgcctattttgaatccctcgtggaactggttagctactacgagaaacattccctgtacagaaaaatgcggctgcggtaccccgtgaccccagagctgctcgagaggtacaatatggagagagacatcaattctctttacgacgtgtcaaggatgtacgtcgatcccagcgagattaacccttcaatgccacagaggacagtgaaggccctctatgactacaaggccaaacgatctgacgagttatctttctgtagaggcgccctcattcataatgtgagcaaagagccaggggggtggtggaagggggattatgggacccgaatacagcagtattttccatcgaattacgtggaggacatctctacagctgatttcgaagaactcgagaaacagatcatagaggacaatcctctgggctcactgtgtcggggaatccttgatctgaacacctataacgtagtgaaggctccacaggggaagaaccagaagagctttgtctttatcttggagcctaaacagcagggcgacccacccgtcgaattcgcaacagacagggtagaggaattgtttgaatggtttcaatccatcagagagataacatggaagattgataccaaggaaaacaacatgaagtactgggagaagaaccagtctattgccattgaactctctgacctagttgtgtattgtaaacctacctctaagactaaggacaacctcgaaaaccctgactttcgcgagatcaggagctttgttgagaccaaagctgacagcataattagacaaaagcctgtggacctgctgaaatataatcagaagggtttgacgagagtgtaccccaagggtcagcgtgtcgatagttcaaactacgacccattcagactttggctatgtggatctcagatggtcgccttaaattttcagacggcagataaatatatgcagatgaaccatgccctgtttagtctgaacggccgcaccgggtacgtgctgcagccagaaagcatgcgcacagagaagtatgatccaatgcctccagagtcgcagaggaaaatcttgatgaccctgaccgtaaaagtactgggggccagacacttgcccaagctaggcaggagtatagcctgcccatttgtcgaggtggagatatgcggggctgaatacgataataataagtttaagactaccgttgttaatgacaatggcctgagcccaatatgggcccctacccaggaaaaagtcaccttcgagatctatgatccaaacctggcttttcttcgcttcgtcgtgtacgaagaggacatgttctcagaccccaatttcctggcccacgccacgtacccaatcaaggccgtcaagtcaggttttcggtccgtgccactgaaaaatggctattccgaggatatcgagcttgcatctttgttagttttttgcgaaatgcgcccagttctagagagtgaggaggagttgtattcttcctgccggcagttacgcaggagacaggaagagctgaataatcagttattcctatacgatacgcaccagaacttgagaaatgctaaccgggatgcactcgtgaaggagtttagcgtcaacgagaatcagttgcaactgtatcaggaaaaatgcaataaacgcctcagagagaaacgtgtgtcaaactccaagttctatagctag

SEQ ID NO: 16657 - DNA, 2916 bp, synthetic construct
  misc_feature 1..2916: note = Description of Artificial Sequence: Synthetic coding sequence
  source 1..2916: mol_type = other DNA
atgagcttgaagaatgagcctcgcgttaacacaagtgcgcttcagaagatcgcggccgatatgagtaatattatagaaaacctggacactcgggagctccacttcgagggcgaagaagtggattacgatgtgagccccagtgaccccaagatccaggaggtgtatattcctttttcagctatatataatacacaggggttcaaagagcccaacatccagacgtacctgtctggctgtcccatcaaagcacaagtcctcgaagtggaacgtttcacctctaccacacgggttccatcaattaatctttacacaatcgagttaacccacggcgaattcaagtggcaagtgaagagaaagtttaaacacttccaggagtttcacagagagctgctgaaatacaaggcctttattcggattcccattcctacgcgtcggcataccttcagacgccagaacgtgcgcgaagagccacgcgagatgccaagtctgcccaggtcttctgaaaatatgattagagaggaacaatttctggggagacgcaagcagttagaagattatttaaccaaaatcttgaaaatgcccatgtataggaattatcacgccactaccgagttccttgacatatcacagctcagttttatccacgatctcggacccaagggaatagaggggatgattatgaaacgaagtggtggccaccgtattcctggcttgaactgttgtggacaggggagggcctgctataggtggtctaaacgctggctcatcgtgaaagactccttcctgctgtatatgaaaccagattcaggagccatagcgtttgtcttgctggtggacaaagagttcaaaatcaaagtcggcaagaaggagactgagacgaaatatggcattaggatcgataatctgtcccggacactgattctgaagtgcaactcttaccggcacgcccgctggtgggggggggccattgaggaattcatacaaaagcacggtacaaatttcttgaaggaccaccgcttcgggtcgtacgcggccatccaggaaaatgccctcgctaagtggtatgtgaatgcgaagggatattttgaggacgtggcgaacgcgatggaggaggccaacgaagagatcttcattacagactggtggttgtcccctgaaatatttctaaagagacccgtcgtcgaaggaaataggtggagactggactgtattctcaagagaaaggctcaacaaggtgtcagaatcttcatcatgctctacaaggaggtggaactcgctctgggcatcaatagtgagtacaccaagcgcactctgatgagactgcacccaaacattaaagtcatgcgtcacccagaccatgtgagcagcacagtttacctttgggcacatcacgagaagctggtgattattgaccagtcagtggctttcgtgggcggcattgacctcgcttatggccggtgggacgacaatgagcatcggctcactgatgttggatcagtaaagcgggttacgtcaggcccaagtcttggtagcctcccacccgccgccatggaaagcatggaatcacttagactaaaagacaagaatgagccagtgcagaacctccctatacaaaagagcatcgacgacgttgatagcaagttaaagggtatcggtaaacctcgaaagttcagcaagtttagcctgtataaacagctccatcgtcatcacctgcatgacgccgattctatctcctctattgactcgacttccagctacttcaaccattatcgaagtcaccacaatctgattcatgggctgaagccccactttaaactgttccatcccagctctgagtctgagcagggtctgacccggccacacgccgataccggcagcatccggagcttacaaactggcgtgggggagctgcatggcgagaccaggttttggcacggtaaggactattgtaactttgtgttcaaggattgggttcagctggacaagccctttgctgacttcatcgatcgctactcaacccccagaatgccttggcacgatatcgccagcgccgtgcatggcaaggcagcccgtgatgtggcacggcatttcattcagaggtggaactttacaaagatcatgaaaagcaaatatagatcactatcttatccattcctactgcctaaaagccagacaaccgcacatgagttgcgctaccaggtgccgggtagtgttcatgcgaacgtgcagctgctacgatctgcagctgactggagcgctggtatcaaataccacgaggagtctatccatgctgcctacgttcatgtgatcgaaaactcgcgccattatatctatattgaaaatcagttctttatttcgtgcgcagacgataaagtggtattcaataagatcggggacgctatcgcacagagaatcctgaaagctcacagagagaaccagaagtaccgcgtgtacgtagtgattcctctattacctggtttcgagggagatatctcaacaggtgggggaaatgccctgcaggctattatgcatttcaattacaggaccatgtgtcgaggggagaactcaatcctaggacaattgaaagccgaattaggaaaccaatggatcaactacatctctttttgcgggctccggacacacgccgagctcgagggaaacctggtgaccgagctcatctatgtccattcgaagctgctgatagcagatgacaacaccgtaattatcgggtcggccaatataaatgacagaagtatgctcggtaaaagagactctgagatggctgtgattgtgcaggacacagagaccgtgccatctgtcatggatggaaaggagtaccaggctggccgatttgccagaggactacggttgcagtgctttcgaagtaagatgacaccaggagtcgaagacccttag

SEQ ID NO: 16658 - DNA, 1794 bp, synthetic construct
  misc_feature 1..1794: note = Description of Artificial Sequence: Synthetic coding sequence
  source 1..1794: mol_type = other DNA
atgtctttaaagaatgagcctagggtgaacacatctgctctgcagaaaatcgccgcggatatgagtaatatcattgaaaatttggacactcgcgagttacatttcgagggggaagaggttgattacgatgtgagcccctcagatcccaagatccaggaagtctacattcctttcagtgctatctataacacccaggggttcaaagaaccaaatattcaaacttatttatccggctgtcctattaaggcccaggtcctggaagtggagaggttcaccagcactactcgtgtgccatccataaatttatacacgattgaactcactcacggtgagtttaagtggcaggtgaagaggaagttcaagcattttcaggaatttcacagggaattactcaagtacaaagcgttcatcaggatacctatccctacacggcgtcacacattccggcggcagaatgtgcgcgaagagccacgcgagatgcctagccttccacggtcatctgaaaacatgatccgggaagaacaatttttgggcaggaggaaacaactggaagactatctcactaaaattctgaaaatgccaatgtatcgcaattaccacgccaccaccgagtttcttgacatatcccagctgtctttcattcacgacctgggcccaaagggaattgaaggaatgatcatgaagcggagcgggggccaccggatccccggacttaattgttgcggacaggggcgtgcatgttacaggtggtctaaaagatggttgatcgtgaaggactcattcctcctgtatatgaagcctgactccggcgcgatagcgtttgttctgctggtggacaaagagttcaagataaaagtaggaaagaaagagactgagacaaaatatgggatacggatcgacaatctgtccaggacactgattctgaagtgcaattcataccggcatgccagatggtggggcggagccattgaagagttcatacaaaagcacggtacgaactttcttaaagaccaccgatttggatcttacgctgcaatacaagagaacgcacttgctaagtggtacgtcaatgccaagggatattttgaagacgtggcaaatgcaatggaggaagccaatgaagaaatctttataaccgattggtggttgtccccggagatttttctcaagcgaccggtggtggagggtaacaggtggcggctcgattgcattttaaagagaaaagctcagcagggcgtccgcattttcattatgttgtacaaagaggttgagttagctctgggcatcaattcagagtatactaaacgtaccttaatgcgtctgcatcctaacattaaggtcatgagacatccagaccacgtttcctccacagtgtatctttgggcccaccacgagaaactagtgataatcgatcagtctgtcgccttcgtgggagggatagatcttgcatatggtcggtgggatgacaacgaacatagactgacagacgtcggctctgtaaagcgcgtgacctcaggtcccagcctgggctccctgccgatacccggacccagtgttgtgtataggcaggtttgggagagctgtatggggaagcctgatagtggaatggaacggacaacagccattagtagtagtaagacaggttttaaccttatcaatctgttgctcatcagcctcactggaacccccagacctggctgccctgggatgaccctgcctctccagtccactggaaggcgcctggtaatgtggcacgtcactagctcttccgccgggacctcccagaaattgtag

SEQ ID NO: 16659 - DNA, 3225 bp, synthetic construct
  misc_feature 1..3225: note = Description of Artificial Sequence: Synthetic coding sequence
  source 1..3225: mol_type = other DNA
atgagccttaaaaatgaacccagggtaaatacttcagcactgcagaaaatcgctgccgatatgtccaatattattgaaaacttggacactagggagctgcacttcgagggcgaggaagtcgactacgatgtttctcctagtgatcccaagatccaggaggtgtatatcccattcagcgctatatacaacacccagggctttaaggaacctaatatacaaacctatctgtcagggtgtcctattaaggctcaggtgctggaagttgaaagatttacatccactacaagagtccccagcatcaacttatatactatagagcttacacatggggagtttaaatggcaggtaaagcggaagttcaaacactttcaggagtttcatagagaactgcttaagtataaagcatttatccggatacccatcccaacacggaggcacaccttccgtaggcagaacgtccgggaggaacctagggagatgccctcattgcctcgtagttctgagaacatgattagggaagagcagttcctgggccgccgcaagcagttggaagactaccttaccaagatccttaaaatgccgatgtaccggaactatcacgcaactactgagtttttggacatctctcagctgagtttcatccatgatcttgggcccaaaggcatagaggggatgatcatgaagcgctccggaggccacaggattccagggctcaactgttgcgggcaggggcgggcttgctaccgctggtctaagcggtggctgatcgtgaaggactcttttctgctctacatgaagccagactccggggccattgcctttgtattgctcgtggacaaagaatttaagattaaagtggggaagaaggagactgagactaagtacgggattagaatcgacaatctgtctaggacgctgattctgaagtgcaattcctacaggcatgccagatggtggggtggtgcaattgaggaatttattcagaaacatggtaccaactttctgaaagaccataggtttggctcttatgctgcaatacaggaaaatgccctggctaaatggtatgtaaatgcgaagggttacttcgaagatgtggccaatgccatggaggaagcaaacgaggagattttcattactgactggtggctgtctcctgaaatatttttgaagcggcccgtcgtcgaaggcaacaggtggagactggactgtatcttaaaaagaaaagcccagcagggagttagaattttcatcatgctgtacaaggaagttgaattggcactcgggatcaacagtgagtacacaaagcggaccctcatgagactacatcccaatataaaggtaatgcggcaccctgaccatgtgagctccacagtctatttatgggcccatcacgaaaagctagtgataatcgaccagagcgtggcctttgtgggaggcattgatctggcctatggcaggtgggatgacaacgagcacagactcactgacgtgggctctgtcaagcgcgtgaccagtgggcctagcttgggcagtctgccacccgcagctatggaatcaatggaatcactgaggctcaaagacaaaaatgaacccgtgcagaatcttccgattcaaaagagcatcgatgatgttgacagcaagctgaagggaataggaaagccccggaaattttctaagttcagcctgtacaagcagttgcaccggcaccatctacacgatgctgactccatctcttctatcgattctacatccagctattttaatcattaccggagccaccacaatctgatccatgggctcaaaccacacttcaagctttttcacccctcttccgaatcagaacagggtctcactaggcctcacgctgacactggctcaatacgtagcctccagaccggggtcggggaactacacggtgaaactcggttctggcacggcaaggattattgtaatttcgtgttcaaggactgggtacaactggacaaacccttcgcagacttcatcgatcggtattctaccccaaggatgccatggcatgacattgcaagcgcagtccacggcaaggcagcccgagatgttgcacgtcattttatccagaggtggaatttcaccaagatcatgaaaagcaaatataggagcttatcctatccgttcctgctacctaaatctcagacaactgcacatgagctgcgttaccaggtacccggctcagttcatgccaacgttcagctgctgcggtcggctgctgattggagcgctgggatcaagtatcatgaagaatctatacacgctgcctacgtccatgtaattgagaactccaggcactacatttatatcgagaaccaattttttatatcttgcgctgacgacaaggtagtgtttaataaaatcggcgacgcgatcgcccagagaatcttaaaggctcacagagaaaatcagaaatatagagtgtatgtggtgattccactgctgccaggctttgaaggggatatctctaccggcgggggaaatgcactacaggcaatcatgcacttcaactaccgcacaatgtgtcggggtgagaactctattcttgggcagctgaaggcagaactgggaaatcaatggatcaattatatctccttctgtggactcagaacgcatgccgagctcgagggtaatttagtcacagaattgatttacgtccactcaaagcttttgattgcagacgacaacacagtaatcatcgggagcgcaaatattaacgacagatccatgctgggcaaaagagacagcgagatggccgttattgtccaggataccgagaccgtgccatcagtgatggacggcaaggaataccaggctggccgattcgccagggggctgcgcctccagtgtttccgcgttgtgctggggtacttagacgatccaagcgaggacattcaggatcccgtgtcagataagttcttcaaggaggtgtgggtttctactgctgctcgaaatgcaaccatttacgataaagtctttcgatgtttgcccaacgacgaggtacataacctaattcaactgagggacttcatcaacaaacccgttctagccaaagaagaccccattcgagccgaagaggaattaaagaagatccgaggatttctcgtacaattcccattctatttcctgagcgaggaaagcctcctgcccagcgttgggactaaggaggcgatcgtgccaatggaagtgtggacctag

SEQ ID NO: 16660 - DNA, 3111 bp, synthetic construct
  misc_feature 1..3111: note = Description of Artificial Sequence: Synthetic coding sequence
  source 1..3111: mol_type = other DNA
atgtcactcaagaacgagcccagggtgaatacctcagctctgcaaaaaatcgctgcagatatgagcaatattattgagaatctagacacccgagaactgcatttcgagggtgaggaggtggactacgacgtgtctcctagcgacccaaaaattcaggaggtctatatcccattctccgccatttataatacacaggggttcaaggagccgaacattcaaacctacctttctggctgcccaatcaaggctcaagttcttgaagtggagaggttcacaagcactacacgcgtccccagtattaatctatacacaatcgagctcactcatggagagttcaagtggcaagtgaagagaaagtttaaacattttcaggagtttcaccgcgaattgctgaagtataaggcgttcatcaggattccgatcccaacccgaagacacaccttccggcggcagaacgttcgtgaggagcctcgggagatgccttctctccctcgcagctccgagaatatgatcagagaggaacagtttctcggtcgcaggaagcagttggaagactaccttaccaagattctcaagatgcctatgtaccggaactaccatgcgactacagagtttttggacatcagccagctgagctttatccatgatcttggccctaagggaatcgaagggatgatcatgaagcgctccggggggcacaggatacccgggcttaactgttgcggtcaagggcgggcctgctaccgttggagtaaaaggtggttgatagtaaaggactccttcttactttacatgaagcctgatagcggcgcgatagcgtttgtattgcttgtggataaggagtttaagataaaagtgggaaagaaggaaacagagacaaaatacggtattaggatcgataacctgtccaggactctgattctgaaatgtaactcctaccgacacgcccgctggtgggggggggccatcgaagagttcatccaaaaacatgggacgaactttctcaaggaccatcggttcgggagctacgccgcgatccaagaaaatgccctggcgaagtggtacgtcaacgccaagggctatttcgaagatgtagcaaacgctatggaggaggctaacgaagaaatctttattactgattggtggttgagccccgaaatctttttaaaacgccctgtcgtagaggggaacaggtggaggctggattgcatactgaagcgaaaagcacagcagggagtccgcattttcatcatgctttacaaggaggttgaacttgccctcggcatcaattcggaatacacgaaacggactctgatgcgcctccacccaaacatcaaagtaatgcggcaccccgaccacgtgagtagtactgtctacttgtgggcccaccacgaaaagctcgtcatcatcgatcagtctgtcgccttcgtgggcggcatagatctagcctatgggaggtgggatgacaacgagcatcgcctgactgatgttggcagcgtcaagagagtcacgtccgggccttctttgggatccctgccgcctgcagccatggaatccatggagtcactccgcctcaaagacaagaatgagcccgtgcaaaatttgcccatccaaaaatcaattgacgatgtcgactctaagcttaaaggaattggtaagcccagaaaattttcaaaattttccctgtacaagcaactgcaccgccaccatctacatgatgccgatagtatttcatccatcgatagtacctccaatacgggctcgattcgtagccttcagacaggggtgggcgagctgcacggggaaacccgattctggcacggcaaggactattgtaactttgttttcaaagattgggtgcaactagacaagccgttcgccgatttcattgacaggtattctaccccacggatgccctggcacgacattgcttctgccgtgcacggaaaggctgcacgcgatgtggctagacattttatccagagatggaacttcacaaagattatgaagtccaaatacaggtctttgtcttacccttttttgcttcccaagagccagactacagcccacgagctacgataccaggtaccaggatcggtgcatgccaatgtgcagctgctcagatcagcggcggactggtcagctgggattaaataccatgaagaaagtatccacgcagcctacgttcacgtcatagaaaattctcgccactatatttatattgagaatcaattttttatatcgtgtgctgatgacaaggtcgtctttaataagatcggagatgctatcgctcagagaatactcaaggcccacagggaaaaccagaagtatcgggtgtacgtggtgatacccctgcttcctggattcgagggcgatatctctacaggcggcggtaacgcccttcaggctatcatgcatttcaactatagaacaatgtgccgaggggaaaactccatcctggggcaactgaaggccgagctgggaaaccagtggatcaattacatctctttctgtggcctgcgcacccatgctgaattggagggaaatctcgtgactgagctgatttacgtccatagcaaactcctgatcgccgacgataacacagtgattatcgggtccgccaacatcaatgatcgctctatgctcggaaagcgggactccgaaatggccgtgattgtgcaggatacagagaccgtgccatcggtgatggatggcaaagagtaccaggcgggccggtttgcccgcggtctgaggttgcaatgtttccgggttgtgctgggatacctcgatgatccttccgaggacatccaagatccagtcagtgacaagttttttaaggaggtgtgggtatcaaccgctgcacgcaatgcaactatatacgacaaggtattccggtgcctgcccaatgatgaggtgcacaatctgatccagctgcgcgactttatcaataaaccagtcttggcgaaggaggatcccatcagggccgaggaggaactgaagaaaatcagggggtttctcgtccagttcccattttatttcttatcagaggaatccctcttaccatccgtcgggaccaaagaggctatcgtgcccatggaggtgtggacatag

SEQ ID NO: 16661 - DNA, 429 bp, synthetic construct
  misc_feature 1..429: note = Description of Artificial Sequence: Synthetic coding sequence
  source 1..429: mol_type = other DNA
atgagcctgaaaaatgagccaagggtcaacacgtccgccctccagaaaatagctgctgacatgagtaacatcatagagaacctagataccagggagctgcattttgagggcgaggaagtcgactacgatgtctccccttcagatcccaaaattcaagaggtgtacattccctttagcgctatttataacactcaaggtttcaaggaaccgaatatacagacctacctttctgggtgcccaattaaagcccaggtgctcgaggtggaacggttcacatctaccaccagagtgccaagcatcaacctctacacaatcgaactgacacacggggagttcaaatggcaagtgaagaggaagtttaagcatttccaggaattccaccgagaactcctaaaatataaagcctttataaggatcccgatcccctag

SEQ ID NO: 16662 - DNA, 2580 bp, synthetic construct
  misc_feature 1..2580: note = Description of Artificial Sequence: Synthetic coding sequence
  source 1..2580: mol_type = other DNA
atgtactccggtgcagggcctgctcttgccccacctgctcccccaccccccatccagggctatgcttttaagccaccaccccgccctgattttggcacatctggcagaacaatcaagttgcaggccaatttcttcgaaatggatattcctaagatagatatctaccattacgagcttgatatcaaacccgagaagtgcccaagacgcgttaatcgagaaatagtggaacacatggtccaacatttcaagactcaaatttttggtgaccgaaaacccgtgtttgacggccgaaagaacttgtataccgccatgccattgccaatcggcagggataaagtcgaactagaagtgaccctccctggcgaggggaaggatcggatcttcaaggtgtccattaagtgggtgtcatgtgtgagccttcaggctctacatgatgctttgagtggccgtctccctagcgtgcccttcgagacaatccaggccctggatgtggttatgcgtcacttgccctccatgcgatatactcccgtgggaagatcttttttcaccgctagcgaaggctgctcgaatcccctaggcggtggccgggaggtgtggtttgggttccaccaatctgtgagaccctcgctgtggaagatgatgcttaacatcgacgtctctgcaactgccttctataaggcccagcctgtcattgaatttgtgtgtgaggtgttggattttaagtcaattgaggaacaacagaagccactgacggatagccagcgcgtgaagtttaccaaggaaataaaggggctaaaggtggagattacccactgtgggcaaatgaaaagaaaataccgagtatgcaatgttacccggaggcctgcctcccatcaaacatttcctctgcagcaggaaagcggccaaacggtagaatgtactgttgcccaatactttaaagacagacataaactcgtgctccgataccctcacctgccgtgccttcaggtgggtcaggaacagaaacatacctacctccctctcgaggtgtgcaacatcgtcgcagggcaacgatgtatcaagaaacttaccgataaccagacatctactatgatccgggctacggcccgcagcgcacccgatagacaggaggagattagcaaattgatgagatcggcctcttttaacactgacccttacgtgcgggaattcgggataatggtcaaggacgagatgactgatgtgaccgggagggtgctgcagcccccatctatcttgtacggggggagaaataaggccatcgctacacccgtccagggagtgtgggatatgaggaataaacagttccatacggggattgagattaaagtctgggcgatcgcctgcttcgcccctcagcgtcaatgcactgaggtccacctgaagtccttcaccgagcagcttaggaagatctctcgggacgcgggtatgcccatccagggtcaaccttgtttctgcaagtacgctcagggggcagatagtgtggaacccatgttccgtcacctgaaaaatacctacgcgggtctccagttggtggtcgttatcctgccaggcaaaactcccgtgtacgccgaggttaagcgtgttggcgatacagtcctggggatggctactcagtgtgtccagatgaagaatgtccaacgcacaactccacagaccttgtccaacctctgccttaagattaacgtgaagcttggcggagtaaacaatatcctgctgccccagggtcgacctcccgtgtttcagcaacccgttatatttttgggagctgatgtcacacaccctcccgcaggggacggcaagaaaccttccattgccgcggtggtcggctcaatggatgcccatccgaaccgctactgcgccacagtgagagtccaacagcaccgccaagagattattcaggacctggcggccatggtgagggagctgctgatacagttctacaaatccaccaggttcaaacctacacgtatcatcttttatcgagatggcgtctccgagggccagttccagcaggtgttgcatcatgaactgctggccatcagagaagcatgcataaagctggaaaaggactaccaaccgggcatcacttttatagtcgtgcaaaagcgacaccatactcgcttgttctgtactgacaaaaatgaaagagtcggaaaatcggggaatatccctgccggcacgactgtcgacacaaagatcacccaccctacggagtttgacttttatctgtgttcccacgcggggatccaggggacttcccgcccctcccattaccacgtgctctgggatgataacagatttagttccgacgaactccagatcctgacgtatcaattatgccacacttatgtgagatgcacccggtcagtgtcaatccctgccccagcatattatgctcacctcgtggcctttcgcgcacgctaccacctggtagataaagaacacgactcagccgagggatcgcatacctccggacaatctaacggccgagaccaccaggccctcgctaaggcagtgcaggttcaccaggatacgctcaggactatgtattttgcttag

SEQ ID NO: 16663 - DNA, 1926 bp, synthetic construct
  misc_feature 1..1926: note = Description of Artificial Sequence: Synthetic coding sequence
  source 1..1926: mol_type = other DNA
atgctgtccggaatcgaagccgctgccggcgaatatgaggattctgagttgagatgtagagtcgcagtcgaagaactgtcaccaggagggcagcctcgcagacggcaggccctcaggaccgcggaactgtctctgggcaggaacgagcggagggaactgatgctcagattacaagcacctggacccgcagggaggccccggtgttttcctctccgcgccgcccgattgttcactcggttcgcagaggctggaaggtcaaccctacggttgcccgctcatgacacacctggggctggagcagtccaacttctgctgagcgactgtccacccgatcgactgcgccgctttctgaggaccctgcgacttaagctcgccgccgcccccgggcctggccctgcatccgcccgtgctcaacttctggggccaaggccacgagatttcgtcactatctcaccggtgcagcctgaagagcggcgtctgagagccgcgacccgagtgccggatacaacgttagtgaaaaggccagtcgagccacaggccggagcagaacccagtaccgaggctccccgctggccactgcccgtgaagcgcctgtccttacctagtacgaagccacagctgtctgaggagcaggccgctgtgctgcgcgcagtacttaaaggccagagcatcttttttacaggctccgcaggaacaggaaagagctatctgttaaagaggattctaggcagcctccctcctactggaaccgtcgcaaccgcgagtacaggggtcgccgcctgccacatcggggggactaccttgcacgccttcgcaggaatcggctcagggcaggcgccgctagcacaatgtgtagctttggctcaacggcccggggtgaggcagggttggctgaactgtcagcggcttgtcatcgatgaaatcagcatggtcgaagcggatctcttcgacaagttggaagctgtagctagggctgtccgccagcagaataaacccttcgggggtatccagcttattatatgcggcgatttcctgcaactcccacccgttaccaaggggtcccaaccacctcgattttgttttcagagcaagtcctggaagcgctgtgtgccagtgactctagaattaacaaaggtctggagacaagcagaccaaaccttcatctccctgctccaggcagtgaggttgggcagatgcagcgacgaggtgacccgtcagcttcaagccaccgcatctcacaaagtaggacgggacgggatcgtcgcgactcggctgtgcacccatcaggacgacgtagcccttacaaatgaaagacggctccaggaactgccgggtaaggtgcatagattcgaagcaatggattctaatcctgagctcgccagtactctggacgcccaatgtcccgtcagccagctactccagttgaaactaggagctcaggtgatgctggttaagaacctttccgtgtctcggggcctggttaacggagcccgaggagtggtagttgggttcgaggctgagggccgcgggctcccgcaggtgaggttcctctgcggagtaactgaggtcatacacgcagatcgttggacagtgcaggcgactggaggtcagctgcttagtcggcagcaattgcctttgcaactagcttgggccatgtcgattcacaagtcccagggtatgacactggattgtgtggagattagcctcggcagagtatttgcctccggtcaagcctatgttgccttatctcgggccaggtcgttgcagggtcttcgcgtattggacttcgaccccatggccgtgcgttgtgatccgcgggttctgcatttttatgcaacgttgcggcggggacgcagcctgagtctggagtctcctgacgacgatgaggcagctagcgaccaggaaaatatggatccaattttatag

SEQ ID NO: 16664 - DNA, 2124 bp, synthetic construct
  misc_feature 1..2124: note = Description of Artificial Sequence: Synthetic coding sequence
  source 1..2124: mol_type = other DNA
atgttgagcggtatcgaggccgcggccggggagtatgaggattcagagctccgctgtcgggtggctgtagaagagctctctcccggcggccagcccagaagacgtcaggccctacgtactgctgagctgtctctgggccgcaacgagcgcagggagctaatgcttcggttgcaggctcctggaccagcaggaagacccaggtgcttcccgttaagggcggcccgccttttcacccggtttgccgaggccggcaggagtacactcagacttcccgcacatgacacacccggagctggggccgtgcagctgctgctctccgattgtcctcccgatagactgaggagattcctaagaaccttgagattgaaacttgccgccgctccaggcccaggacctgcaagtgcccgcgctcagttattggggcccaggccccgcgattttgtgactattagccccgtccagccagaggagcgcaggctgagagcagccacaagggtgccagatactacattggtgaaaagacctgtcgaaccccaggccggcgccgagccttctactgaagccccaaggtggccactacccgtgaagcggctgagcctcccctctacgaaacctcaactatccgaagaacaggcagcagttctgcgcgcagtgctcaaagggcagagtatcttttttaccggttccgcgggaaccggcaagagctacctcctcaagagaatcctcggaagtctgcctcctactggcacagtggctaccgcgtcaaccggggtggctgcatgtcatatcggaggtacgacactgcacgctttcgctggaatagggtctggccaagcgcctctggctcagtgtgtggctctagctcaaagaccgggcgttaggcagggctggctgaattgtcagagattggtaatcgatgaaattagcatggttgaggccgacctatttgacaaactggaagctgtggcacgcgcagtaaggcagcagaataaaccctttggagggattcagctaatcatctgcggggacttcctccagctcccacctgtcactaagggatcccagccacctcggttctgctttcaatctaaatcctggaagcgctgtgtgccagtcactctcgagctaaccaaagtttggaggcaagccgatcaaacattcatttccctgctacaggccgtgcgactgggccgctgcagcgacgaggtgactagacaactgcaagctaccgcctcccacaaggtcggacgtgatgggattgttgcaactagactgtgcactcatcaggacgacgtcgcattgaccaacgagaggagactgcaggagctacctgggaaggtgcacagatttgaagccatggacagcaaccctgagttagctagtacactagacgcacagtgcccggtttcccaattgctgcagctgaagctcggggcccaggtgatgctggtgaagaacctaagtgtgtccagagggttggtgaatggtgccagaggggttgtggttgggtttgaggccgagggacgaggcctgccgcaggtgagattcctatgcggtgtcaccgaggtcatccacgccgaccggtggactgtccaggctacggggggccaactgctgtcccgccagcagttaccgctgcagctggcatgggccatgtccattcacaagagtcaaggcatgacactcgactgcgtagagatttcgctgggccgagttttcgcgtccggacaagcttatgtagctctttcacgagctcgctccttacagggactgagagtgttggacttcgacccaatggccgtgcggtgcgacccgagagtgcttcatttttatgccacactacggcgtggtcgcagcctgtctctggcggctgaggggcgcgggaacgaggacaggtgcagcggtagctccatacgagcccttggaggggattggtggggattgagactcggggctgctagcaagcagaggaccgaattgaggtgtgtctcaaccgccagaccttctctggcgcagcccagaactaacactctccagtccctgacaaaggaacacaagctgcagaatgtccacccttattttaaactactctttcaggggataaactctgtctggggtcactag

SEQ ID NO: 16665 - DNA, 1926 bp, synthetic construct
  misc_feature 1..1926: note = Description of Artificial Sequence: Synthetic coding sequence
  source 1..1926: mol_type = other DNA
atgctctccggcattgaagcagcagctggggaatatgaggattccgagttgcgctgcagggtggccgtggaagagctctcccctggtggacaacccagacggcgccaggctctgcgaactgcagaactttccttaggacgtaacgaaaggcgcgagttaatgttgcgcctgcaggctcctgggccagccggcaggcctcgctgctttccattgcgcgccgcccgactgttcacgaggttcgctgaggcaggaaggtcaaccttgagactcccagcccatgacacacctggcgctggcgctgtgcaactgctcctgtctgactgtcctccagacaggctccgaaggtttttgcggaccctccgcctcaaactagccgcagcgccaggccccggcccggcgtccgcacgggcacaactcctggggccccggccacgggacttcgtcacaatatccccagtgcaacccgaagaacggcggctccgggcagcgacccgtgtccctgatacaacgctggtgaagcggcctgtagaaccccaggcgggcgcagaacctagcaccgaggctccacggtggccactgccggtgaaaaggctgtctttaccaagcacaaaaccgcaactgtccgaagaacaggctgcggttctcagggctgtgttgaaggggcagtccatcttcttcacgggctccgccggcacgggcaagtcttacctgttgaagcgcatcttaggcagcctccctcctaccggaacagtggcgacagcgtccacaggcgtcgcagcttgccacataggaggaacaacactgcacgcctttgctggcatcgggtccggacaggcccccctggcccagtgtgtcgcacttgcgcagcgccctggagtgcgccagggatggctgaattgccaaagactcgtaatagacgaaattagcatggttgaagcagatcttttcgataaattggaagccgtggccagagcagttagacaacagaataaaccattcggcgggatccaactcatcatctgcggagactttttacagctaccccccgtaacaaagggcagtcagcctccacggttttgttttcagtcgaaaagctggaagcgatgtgtccccgtcactctggaactcactaaagtctggaggcaggcggaccagacattcataagcttgctgcaggcagtacggttgggacgctgctcagatgaggtgaccaggcagctacaggcaactgcctcccataaggtcgggagagacgggatcgttgcaacacgcctgtgcacacatcaggacgacgtcgccttgacaaacgaacgccgccttcaggaattaccagggaaggttcaccgattcgaggccatggattctaaccccgagctcgcatcgacactcgatgctcagtgccctgttagtcagttgttacaacttaaattgggggctcaggtcatgcttgtcaagaatctgagtgtatcccggggtttggttaatggtgctcgcggcgtcgtcgttggctttgaggctgagggcagggggctaccacaggtgcgcttcttgtgcggggtaacggaagtaatccacgcggacagatggactgttcaagcaactggtggccagctgctgtcgagacagcaactgcctctgcagttggcttgggcaatgtcgatccataagtcacagggcatgacactggattgtgttgaaatatctctgggtcgagtcttcgcaagtgggcaagcttacgttgccctttcccgggctcgaagcctgcaaggcctcagagtgctggatttcgaccccatggctgtccgttgtgatcctcgtgttctgcacttctatgccactctccgtaggggtcgctccttaagtctggagtccccagatgacgacgaggcagcttcagaccaggagaatatggatcccattctgtag

SEQ ID NO: 16666 - DNA, 801 bp, synthetic construct
  misc_feature 1..801: note = Description of Artificial Sequence: Synthetic coding sequence
  source 1..801: mol_type = other DNA
atgctgtccggcattgaagctgccgccggggagtacgaagatagtgaactgcgttgccgtgtcgccgtggaagaactgtcccctggcggacagccaaggcgcaggcaagctcttcgtactgccgaattgagtctgggtaggaatgagaggcgggaactgatgctgaggctccaggctcccgggcccgcggggagacctaggtgctttccgcttagagctgcacgcttgttcacaagatttgcggaagccggtcgcagtacccttcgattgcccgcccacgacacacccggggctggcgcagttcaactcttgttatccgattgccccccagatagacttagaaggtttttacgcactttacgcttgaagcttgctgccgcacctggaccgggcccagcctctgcgcgtgcccagttgctcggtccgcggcccagggatttcgttacaatcagtccagttcagcctgaggaaagacggttgcgcgcggccacaagagtcccggatactacactggttaaacgtccggtggaaccccaggccggtgccgagccctccacagaggctcccagatggcctttacctgtgaagcggctttccttaccctccacaaagccacagctttctgaagaacaggctgccgtactccgggctgtgctgaaggggcaaagcattttctttactggatcagctggctctggaggtagagaagaagtgggaggacagtggtgggggggtatcgaagagcaaggtgacctgtccaatttcgccccagtgcaggagcaaggcagccatatctgctag

SEQ ID NO: 16667 - DNA, 987 bp, synthetic construct
  misc_feature 1..987: note = Description of Artificial Sequence: Synthetic coding sequence
  source 1..987: mol_type = other DNA
atgagcatgctagctgagagaaggcgaaaacaaaaatgggctgtcgacccccaaaacaccgcctggtcgaatgacgacagtaagtttgggcagcggatgctggaaaagatgggttggagcaaaggaaaagggctgggcgcccaggaacaaggcgcaactgatcacattaaggttcaggtcaaaaataatcatctgggcctgggcgctaccatcaataacgaagataattggatcgctcatcaggacgattttaatcagttgcttgctgaattgaatacttgtcacgggcaagagaccaccgacagtagcgacaagaaggagaagaagagcttcagcctggaggagaagagtaagatcagcaaaaatagggtccactatatgaagtttacaaaggggaaggatctgtcctcccgctcgaagaccgatttggattgcatctttggcaagcgtcagagcaagaagacccccgagggtgatgcgtctccttccactccggaggaaaatgagacaaccacaaccagtgcattcactatacaggaatactttgccaagaggatggcagctcttaaaaacaagccacaggtgccggtcccaggaagtgatatatctgagactcaagtcgagcggaaacgcggaaaaaaacggaataaagaggccaccggtaaagacgtggagtcgtacctgcagcctaaagccaagcgacataccgaggggaagcccgagcgggctgaagcccaagagcgagtggcgaaaaaaaaatccgcgccagcggaggaacagctgcggggaccttgttgggaccagagctccaaggcctctgctcaggacgcgggggaccacgtccagcctcctgaaggccgggacttcactttgaagccgaaaaagaggaggggaaaaaagaagctgcagaaacccgttgagatcgctgaagatgcaacccttgaggaaactttggttaagaagaagaagaagaaggactctaagtag

SEQ ID NO: 16668 - DNA, 519 bp, synthetic construct
  misc_feature 1..519: note = Description of Artificial Sequence: Synthetic coding sequence
  source 1..519: mol_type = other DNA
atgctggcagagcggcggagaaaacagaaatgggctgtggacccccagaacacagcatggtccaacgacgattccaagttcggtcagagaatgctcgaaaagatgggctggtctaagggcaaaggactgggtgctcaggagcagggagcaactgatcatattaaagtccaggtgaagaacaatcacctgggccttggcgctaccataaataacgaggataactggatagctcaccaagacgatttcaaccaactgctggcggaattaaatacctgtcacggccaagaaaccactgacagcagtgataaaaaggagaagaaatcgttcagcctcgaagagaaatcaaagatctcaaagaatcgtgtgcattatatgaagttcactaaaggtcggtgtcagtctctgcattccaggggggaaaggaatcacgataatcagcggttgcaccatcccggggtgctttgccaggccgatggcagcactgaggaacaagccccagggtcctctagtcgcgtgtag

SEQ ID NO: 16669 - DNA, 525 bp, synthetic construct
  misc_feature 1..525: note = Description of Artificial Sequence: Synthetic coding sequence
  source 1..525: mol_type = other DNA
atgagtatgctcgcagagaggagacgaaagcagaaatgggccgttgatccgcagaacaccgcttggagcaatgacgatagcaaattcgggcagagaatgctcgagaagatgggctggtcaaaaggtaaggggctgggcgctcaagagcagggtgctaccgaccacatcaaggtacaagtgaagaacaaccatctgggccttggggctacgatcaataacgaagacaattggatcgctcaccaagatgactttaatcagcttctggcagagctcaatacatgccacgggcaggaaaccaccgattctagtgacaagaaggagaaaaaatcttttagcctggaggagaagtccaaaattagtaagaacagagtgcactacatgaaattcactaaagggcgctgtcagagcctgcactccaggggggagagaaaccacgacaaccagaggctccatcatccaggagttctctgtcaggccgatggtagcactgaagagcaggcccctggctctagtagcagagtctag

SEQ ID NO: 16670 - DNA, 972 bp, synthetic construct
  misc_feature 1..972: note = Description of Artificial Sequence: Synthetic coding sequence
  source 1..972: mol_type = other DNA
atgcccgttcattcccgcggggataagaaggagactaatcaccacgacgaaatggaggtggactacgccgagaatgaaggttcttcatccgaggacgaggatactgaatcctcctcggtctccgaggatggggattctagtgagatggatgacgaggactgtgaaagacggaggatggagtgcctagatgaaatgagcaatctcgagaaacagttcactgatcttaaggaccagttgtacaaggaaagactgagccaggtggacgcaaaactgcaggaagtaatagccggcaaggccccagagtatctggaaccgttagccactttacaggagaacatgcagatcaggacaaaggtagccggtatctatagggagttgtgcctcgagagtgtgaagaacaagtatgaatgcgagattcaagctagtagacagcactgcgaatccgaaaaactcctgctgtatgatactgtccagtctgaactcgaagagaagataagacgcctagaggaagacaggcatagtatagacatcactagtgaactgtggaacgatgagctacagagtcgtaaaaagcggaaagacccatttagtcctgataaaaagaagccagtagtggtgtctggaccatacatcgtgtacatgctccaagacctcgacatccttgaggactggacaactatacgaaaagcaatggccactctgggacctcaccgggtgaaaaccgaaccaccggtgaagcttgagaaacatttgcatagtgcaagaagtgaggagggccgtctgtactacgatggtgaatggtatatcagaggccagacaatttgcatcgataagaaggatgagtgtccgacgtccgccgtcattactacaattaatcatgatgaagtgtggtttaaacggccagacggttctaagtcaaagctctacatctcccagctgcagaaggggaagtattcaatcaagcactcgtag

SEQ ID NO: 16671 - DNA, 666 bp, synthetic construct
  misc_feature 1..666: note = Description of Artificial Sequence: Synthetic coding sequence
  source 1..666: mol_type = other DNA
atgccagtgatgaggttgtttccttgtttcctgcagctcttggcagggcttgccctgcctgccgtccctccacaacaatgggcgttaagtgccggcaacggaagctcagaggtggaggtagtgcctttccaagaggtgtggggcagaagctactgccgggccctagaacggctcgtggatgtagtctccgaatatcccagtgaagtcgagcatatgtttagtcccagttgcgtttctctcctgaggtgcaccggctgttgtggagacgaaaatcttcactgcgtcccagtggaaactgctaatgttacaatgcaactgctcaagattcgttccggggatagaccgagttacgttgaactaaccttttcccagcacgtgagatgcgaatgccggcactctcccggacgacagagtccggatatgcccggggattttcgggccgatgccccatcatttctgccacctcgccgttcactacctatgctcttccgcatggaatggggatgtgccctgaccgggagccagagtgcagtgtggccctctagcccagtcccagaggagatcccgcgcatgcaccccggacgaaacggaaaaaagcagcaacggaaacctcttcgcgaaaagatgaagcctgagagatgtggagatgctgtacctagaaggtag

SEQ ID NO: 16672 - DNA, 450 bp, synthetic construct
  misc_feature 1..450: note = Description of Artificial Sequence: Synthetic coding sequence
  source 1..450: mol_type = other DNA
atgcctgtaatgcgcctgtttccctgctttttacagctactggccggcttggctctgccagctgtgccccctcagcagtgggccctatctgcaggtaatggcagtagtgaagtggaagttgtaccctttcaggaagtgtggggtcgctcttattgtcgagcattggagcgcctggtggacgtcgtaagtgagtacccatctgaagtcgagcacatgttctctccatcatgcgtgagcctgctaagatgcaccggttgctgcggcgatgagaatctgcactgcgtcccggtggaaacagcgaacgtgacgatgcagctgctgaaaatacgtagtggcgaccgcccatcctacgtggaactaaccttctcacagcacgtgcgttgtgagtgtaggcccctgagagaaaagatgaagccagagcggtgtggagacgctgtgcctcgtagatag

SEQ ID NO: 16673 - DNA, 513 bp, synthetic construct
  misc_feature 1..513: note = Description of Artificial Sequence: Synthetic coding sequence
  source 1..513: mol_type = other DNA
atgccagttatgcgactcttcccgtgctttctccaactgcttgctggtctggcactccctgccgtgcctccacagcagtgggcactaagcgccggtaacgggagctcagaggtggaggtagtgcccttccaagaagtgtggggcagatcttactgtagagctctggaacggttagtcgatgtcgtctccgagtaccctagcgaggtcgagcacatgttcagcccgtcttgtgtgagtctgctcagatgcacgggatgttgtggagacgaaaacctccattgtgtcccagtcgaaactgctaacgtcaccatgcagctacttaagataagatccggtgatcgaccttcatacgttgagctcaccttctctcagcacgtgcgatgtgagtgtcgacctttgagggaaaagatgaaacctgagcgacgcagaccgaagggccggggaaagcgtagacgggaaaagcaacggccaaccgattgccacctctgtggagatgccgtccctaggaggtag

SEQ ID NO: 16674 - DNA, 477 bp, synthetic construct
  misc_feature 1..477: note = Description of Artificial Sequence: Synthetic coding sequence
  source 1..477: mol_type = other DNA
atggccctcgaggtcctgatgctcttggccgtcctgatttggaccggggccgagaatctccatgtaaaaatttcatgcagtcttgattggctaatggtgagcgtgattcctgttgcagagtctcgcaacctgtacattttcgcagatgagctacacttggggatgggttgtccggcgaaccgcatccacacctacgtgtatgagtttatctatctcgtaagagactgtggaattagaacccgggtcgtgtcagaagagaccttattgttccagacagaactgtacttcacaccacggaacatagaccatgatccccaggaaatacatctcgagtgttctacctcaagaaagagtgtatggctgaccccggttagcaccgaaaatgaaatcaagctggacccttcacccttcatagccgattttcagacaacagcagaggagcttggcctgctgtcttctagccccaacctgctctag

SEQ ID NO: 16675 - DNA, 1188 bp, synthetic construct
  misc_feature 1..1188: note = Description of Artificial Sequence: Synthetic coding sequence
  source 1..1188: mol_type = other DNA
atgcgggccctccttgctagattgcttctatgcgtgttggtggtctccgacagcaaaggaagcaacgagctccatcaggtgccatataagagtaaaacttgctatgaggggaatggtcatttttatagaggcaaggcaagcactgataccatggggcggccttgtcttccatggaacagcgctacagtgctccagcagacttatcacgcccatagatctgatgccctccagctcggactcggcaaacacaactattgccgcaaccccgacaaccgccgacgcccttggtgctatgtgcaggtcggcttaaagctcttagtgcaggagtgtatggttcatgactgcgccgacggcaaaaagcctagctccccccccgaagagctgaagttccaatgcggccagaaaacactgaggccgcggtttaagataataggaggagagttcaccactattgaaaatcagccctggttcgccgctatttataggcgccaccgtggcggctctgtgacatacgtatgtggtgggtcactgattagtccctgttgggtaataagtgcaacacattgtttcatcgactatccaaagaaagaagactatatcgtctaccttggtcggtcccgactaaatagcaacacgcagggcgagatgaagtttgaggtggagaatctgattctgcacaaggattattccgcagacactctagcccatcataacgacatcgctctgctgaaaatcaggtcaaaggagggccggtgtgctcagccctcccgaactattcagacgatatgcttaccttcgatgtacaacgacccgcagttcgggaccagttgtgagataactggctttggaaaagagaactcaacggactacctgtatcctgagcaacttaagatgacagtggtcaaattaatctctcacagggagtgccagcagccccattattacgggagtgaggtcaccacaaagatgctctgcgctgccgatccgcagtggaagaccgactcatgccagggagacagcggcggacccctagtgtgttctttgcagggaagaatgaccctgactggaattgtttcctggggccggggatgtgccctcaaagataagcccggagtgtacacaagagtgagccattttttaccctggatcaggtcgcatactaaagaagaaaacgggcttgcgctgtag

SEQ ID NO: 16676 - DNA, 1188 bp, synthetic construct
  misc_feature 1..1188: note = Description of Artificial Sequence: Synthetic coding sequence
  source 1..1188: mol_type = other DNA
atgcgcgccctccttgcgaggctgttgttgtgtgtattagtggtctccgacagcaaggggagcaatgagctgcatcaggtgccttacaaaagtaaaacctgttacgagggcaacggtcacttttatcgcggcaaagcaagcactgacacgatgggccggccctgtttaccgtggaattccgctacagtgttgcagcagacctatcacgcgcaccgcagcgatgcactgcagttggggctcggcaagcacaattactgtagaaatccagacaaccgcagaaggccttggtgttacgtgcaggtcgggctaaaattgttggtacaggagtgcatggtgcacgattgcgctgatggcaagaagccttcttccccccccgaggagctgaaatttcaatgtggacagaaaacactgcggcctcgcttcaagattatcggcggggagtttacaacgattgagaaccaaccctggtttgctgccatctatcgaagacataggggaggcagcgtgacttatgtgtgtggcggtagcctcatcagtccgtgttgggtcatcagcgccactcattgctttatcgattatcctaagaaggaagattacattgtgtaccttgggaggtctcggctcaactctaacactcagggagagatgaaattcgaagttgaaaacctcatccttcacaaggattatagcgctgacactctcgctcatcataatgatatcgcactcttaaaaatccggtcaaaagagggaaggtgcgcccagcccagccggaccatacagacgatctgtcttccctctatgtacaatgatccccagttcggaacttcctgtgagattaccggctttgggaaggagaattcaaccgactatttatatcctgagcaattgaagatgacggtcgtgaaacttatttcacaccgcgaatgccagcaaccacactactatggcagcgaggtgactactaaaatgctgtgtgccgccgacccccagtggaagaccgattcctgtcagggagacagcggagggccactagtgtgtagtctgcagggccgtatgactctcacgggcattgtctcctggggaagggggtgtgcacttaaagataagcctggggtatatactcgggtttcgcatttcctgccctggattcggagccataccaaggaagagaatggactcgctctgtag

SEQ ID NO: 16677 - DNA, 1296 bp, synthetic construct
  misc_feature 1..1296: note = Description of Artificial Sequence: Synthetic coding sequence
  source 1..1296: mol_type = other DNA
atgcgggcccttctggctcggctattgctctgtgtgctggtggtgtctgattctaaaggcagcaacgagttacaccaggtccccagcaattgcgattgtctgaatggagggacgtgcgtatcgaacaaatatttcagcaatattcattggtgtaattgtcccaagaaatttggcggacaacactgtgagattgacaaatccaaaacctgttatgaagggaatgggcacttctatcgagggaaagcaagcacggataccatgggtagaccttgtctcccatggaattctgcgaccgttctgcagcaaacatatcatgctcatcggtctgatgcattgcaattgggtctcggcaaacataattactgccgcaatcctgacaacagacgaagaccctggtgctatgtccaggttggacttaagcttcttgtccaagagtgcatggtccacgattgtgctgacggtaagaagccctcatcacctccagaggagttaaagtttcagtgcgggcagaaaactctaaggcctagattcaagatcatcggcggggagttcaccactattgagaatcagccttggtttgctgccatatataggaggcacaggggcggctcggtgacatacgtctgtggcggtagcttgatatcaccctgctgggttatttccgccacacactgctttattgattaccctaagaaggaggattacatcgtgtaccttggaaggagtagattgaatagcaacacacaaggagagatgaaatttgaggtggagaacctcattctgcacaaggattatagcgccgatacgctggcccaccacaatgatattgccctgttgaaaatccggtcaaaggagggtagatgcgcacagccgagccgcactattcagactatctgcttgccgagcatgtacaacgatccgcaattcggcacgagctgcgaaatcacaggcttcggcaaggaaaactctaccgattatctctatccggagcagcttaagatgaccgtggtcaaactcatctcccaccgggagtgccagcaaccgcactattacggctccgaagtcacaaccaaaatgctctgcgcggctgacccccagtggaaaaccgattcttgtcagggagactccgggggccccctggtgtgctcactccagggcagaatgaccctgaccggaatcgtgtcatggggaaggggctgtgcactaaaggacaaacccggagtgtatactagagtaagccatttcttaccatggattagatcacacactaaagaagaaaatggccttgccctttag

SEQ ID NO: 16678 - DNA, 1245 bp, synthetic construct
  misc_feature 1..1245: note = Description of Artificial Sequence: Synthetic coding sequence
  source 1..1245: mol_type = other DNA
atggttttccatctgcggacccggtacgagcaagctaactgcgactgcctgaacgggggcacctgcgttagtaacaagtacttctcaaatattcattggtgcaactgccctaagaagttcgggggacagcactgcgagatcgacaagagtaaaacatgctacgagggtaacgggcatttttaccgaggtaaggccagtacagacaccatgggacgcccgtgcttaccatggaatagtgccaccgtcctgcagcaaacgtatcacgcacatagatctgatgctttacaactcggactcggcaagcacaactattgtagaaaccccgataacagacgcagaccgtggtgctacgttcaggtcggtctgaaacttcttgtgcaggagtgtatggtccatgactgtgcagatgggaagaagccttcctcacctccggaagagctaaaattccaatgcggacagaagaccctccgcccccggttcaaaataatcggcggggaatttaccactattgaaaatcagccttggtttgccgctatttatagacggcaccggggaggaagtgtcacatacgtttgcggcggcagcctcatcagcccgtgttgggttatctcggccactcactgcttcatagattatcccaaaaaagaggactacattgtctacctcggccggtcaaggctcaattccaacacacagggtgagatgaagtttgaggtggagaatctgattctccacaaggactactccgccgacaccctagcgcaccataatgacatagcactgttgaaaatccgttcgaaggagggcaggtgtgctcagccttctcgtaccattcaaacaatatgtctgccttccatgtacaatgaccctcaattcggtacctcttgtgaaataaccggatttggcaaggagaactcaaccgattacctgtacccagagcagctgaagatgacagtggtaaaactcatctcccatcgggagtgtcagcagccccactattatggaagcgaggtcaccactaaaatgctatgcgcagccgatccacagtggaagacggattcttgtcagggggactccggagggccactggtttgcagcctccagggacggatgacccttacaggcatagtgagctggggccgaggctgcgccctgaaggataagcccggcgtgtacacccgggtatctcactttctgccctggatcagaagccacacaaaagaggagaacggcctggcattgtag

SEQ ID NO: 16679 - DNA, 3984 bp, synthetic construct
  misc_feature 1..3984: note = Description of Artificial Sequence: Synthetic coding sequence
  source 1..3984: mol_type = other DNA
atggaggctccattgcaaacaggtatggtgcttggtgtcatgatcggcgcgggcgtcgcggtcgtagtgacagcagtgctgatcctgctggtggtgcgtcgactgagagtgcccaagacccctgcacctgacggtcccaggtaccgctttaggaaacgggacaaggtccttttctatggtcggaagattatgagaaaagtatctcagtccacaagctcactggtggacacaagtgtttccgcaacttcgcggccgagaatgaggaagaagctgaaaatgctaaatattgccaagaagatactcagaattcagaaggaaactcctactctgcagagaaaagagcctcccccagccgtgttggaagctgatcttaccgaaggcgacctggccaattctcacctaccgtctgaggttctctacatgctgaagaatgtgcgagtgcttggccatttcgagaaaccactgttccttgaactgtgccggcacatggtgttccagcgtttagggcagggcgactacgtatttagacctgggcaaccggatgcctccatatatgtggtccaggacggcctgctggaactctgcctgccaggtcccgacgggaaggagtgtgtggtgaaagaggtagtgcctggtgacagtgttaatagcctgcttagtatcctggacgtgatcactggccaccaacatccccagcgcactgtgtcggcccgggcggctagggacagtaccgtgctgcggctgcccgtggaggccttcagcgcggtgttcactaaatatccggaatcactcgtgcgcgtggtacaaatcatcatggtccggctgcagcgggtaacattcttggcgcttcacaattacctcgggctgactaacgaattgttcagtcacgagatccaaccactgcgcctgtttccctcgccagggttgccgacacgaacctcaccagtcagaggctcgaaaaggatggttagcacatctgccaccgatgagccaagggagactcctggccgcccacctgacccaactggtgctccactgcctggccctaccggggaccctgttaagcctacctccctggaaactcctagtgcccccctgcttagccggtgtgtgtcgatgcccggcgatatttcaggtctgcagggcggaccacgttccgactttgacatggcatatgaacggggccgaatcagtgtgagtttgcaggaggaggcatctgggggctccttggccgcccccgcaagaaccccaacacaggagccaagagaacaacccgctggtgcctgtgaatacagctattgtgaagacgagtctgctacaggagggtgcccgttcggcccctaccaagggcgccagacctcctcaatttttgaggctgcaaaacaggagttagcaaagttgatgagaattgaagatcccagcctgctcaacagccgcgtgctgctgcaccacgctaaggcaggtactatcatcgcccgtcagggagaccaggatgtctccctgcactttgtgttgtgggggtgtctgcatgtgtaccagcggatgatagataaagctgaggatgtttgtctgtttgtggcgcaaccaggcgagctggtggggcagctggcggtacttacaggagaaccattgatatttacactgcgggcccagcgggactgcacattcctgcgaattagcaaatcagacttctatgaaatcatgcgcgcccagccgtcagtcgttttatccgctgcacatactgtcgccgcgcgaatgtcgcccttcgtcaggcaaatggactttgccatcgattggacggcagtggaagccggtcgtgccttgtatcgccagggtgaccggagtgattgtacatatatagtgctcaacggacgtcttaggagcgtaatccagaggggctccggaaaaaaagagttggtgggcgaatacggacgtggtgacctgatcggagtagttgaggcccttacgcgtcagccgcgggccactactgtgcatgccgtgcgggatactgaactggccaagttgcccgagggtaccctgggtcatatcaagagaaggtacccgcaggtggtgacgagattgattcatctcctgtcccagaaaatcctcggcaaccttcaacaattgcaaggcccgtttcctgcaggctccgggctcggagtgcccccgcactcagagctcacaaatccagcctcaaatctagccaccgtggccattctccccgtgtgtgccgaagtcccgatggtggccttcaccctggagctgcagcatgccctccaagcaatcggaccaacccttctgttgaactcggacataatccgggcacggctgggtgcttcggccctggacagcatccaggagtttcgtcttagtggttggctagctcagcaagaagacgctcacaggatagttctgtaccaaaccgatgcttctctcacaccttggaccgttagatgcttgagacaggccgattgtatcttaatcgttggcctcggcgaccaggaacccacccttggccagttggagcaaatgctcgagaacaccgcagtgagggcactcaagcaacttgtgttgctccatcgcgaagagggagcgggccctacccgcactgtagaatggttgaacatgaggagctggtgttcaggacacctgcaccttaggtgcccacgtcggctcttctctcgccggtccccggccaagctccacgaactgtacgagaaagttttctcaaggcgtgcagatagacatagcgatttctctaggctcgctcgggtgcttaccgggaacaccatcgccctagtactggggggaggcggagccaggggctgttcacatattggcgtactgaaagccttagaggaagctggcgtgcccgtggacctagttggcggcacaagcatcggatcatttatcggggctttgtacgcagaagagcgtagcgcttcccggacgaagcagcgggcgagagagtgggctaaaagtatgacaagcgtgctggaacctgtcctggatctgacctaccccgtaacttccatgtttacagggagcgcctttaatcgctccatccatagagtgttccaggataaacagatcgaagatctgtggctgccctactttaacgtgacaacggatattactgcatcggcgatgagagtccacaaggatgggagcctctggcgctacgtccgggcctctatgaccctgtccggctatcttccgcccctttgtgatcccaaggacggtcatcttctgatggacggggggtacattaacaacctaccagccgatattgcccgcagcatgggtgcaaagacggtgatcgcgatcgatgtgggttctcaggatgagacagacctgagcacctacggggacagtctttcagggtggtggctgttgtggaagcgtctcaatccctgggccgacaaagtgaaggttcccgacatggctgaaattcaatctcgcctcgcctacgtctcttgcgtcagacagctggaggttgtgaagtcttcctcgtattgtgagtacctgcgcccaccaattgactgttttaaaactatggactttggtaagtttgaccagatttacgatgtgggttatcagtacgggaaagctgtgttcgggggttggtcgagagggaatgtcatcgagaagatgttgaccgatagaaggtctacggacctcaacgagagtagaagggccgatgtgctggcttttccaagctctggatttaccgacctggcagagatcgttagtcggatcgagccaccaacctcgtacgtttctgacggctgtgcggatggggaagaaagcgactgcctcaccgaatacgaagaagacgcaggcccagattgctccagagacgagggaggaagcccagaaggcgcttcaccatcaactgcctccgagatggaggaggagaaatccatcctgcgccaaaggcgctgtcttccgcaggaacccccaggcagtgcaaccgatgcatag

SEQ ID NO: 16680 - DNA, 846 bp, synthetic construct
  misc_feature 1..846: note = Description of Artificial Sequence: Synthetic coding sequence
  source 1..846: mol_type = other DNA
atggggcatcctccactgttgcccttactgctgctcctccacacttgtgttccggccagctgggggctgagatgtatgcaatgtaagacgaacggcgactgtagagtggaggaatgcgccttgggccaggatctctgtcgtactacaatcgttagactatgggaagagggagaagagctcgagctggtagaaaagtcatgcacccactccgagaaaactaacaggaccctgtcatacaggactggtctcaagattacctcgctaacagaagtggtttgtgggctcgacctctgtaatcagggtaacagtggacgtgctgtcacctattccagatccagatacctggagtgcatctcttgtggaagctccgacatgtcatgcgagagaggccggcaccaaagtctgcagtgccgctcccctgaagaacagtgtctggacgttgtgacgcactggattcaagaaggtgaagagggtcggcccaaagacgaccggcacctgcgcggatgcggataccttccaggttgtcctggcagtaacggattccataataatgacacttttcattttctgaagtgctgtaacacaacaaagtgtaacgaaggccctatcttagagttggaaaatctgccccaaaatggcagacagtgttacagctgtaagggcaacagcacacatggttgctccagcgaggagacctttttaattgattgcaggggccccatgaatcagtgcctggtggcgaccggtacccacgaacggtctctgtggggtagctggctcccatgcaagagcactacagccctgcgacctccttgctgcgaggaggcgcaggctacccacgtatag

SEQ ID NO: 16681 - DNA, 1008 bp, synthetic construct
  misc_feature 1..1008: note = Description of Artificial Sequence: Synthetic coding sequence
  source 1..1008: mol_type = other DNA
atgggacaccctcctctgctgccactcctgctcttgctacacacctgcgtaccggcctcttggggtctccgctgcatgcagtgcaaaaccaacggagactgccgcgtcgaagagtgtgcactcggccaagatctatgtcgcactaccatagtgcggctgtgggaagagggagaggaattagaactggtagaaaaaagctgtacccattcggagaaaaccaatcgtacactgagctatagaactgggcttaaaataacatccctcaccgaggtggtctgtggcctggacctctgcaaccagggcaactcaggacgcgccgtgacatactccagatcccggtatctggagtgcatcagttgcggcagttccgacatgagctgcgagaggggccgacatcagtctcttcagtgtcggtcccccgaagaacagtgtctggatgtggtcacccattggattcaagaaggagaggagggccggcctaaagacgataggcatctgcgtgggtgtggatatttgcccggatgtccaggatcgaacggttttcacaataacgatacattccatttcctgaagtgctgcaatactaccaagtgcaatgaggggcccatcctggagctcgagaatctaccacagaatgggagacagtgctatagttgcaaagggaactctacacacggctgctcctcggaagagacttttctcattgactgtaggggaccaatgaaccagtgcctggtagctaccgggacccacgagccgaagaatcaatcatatatggtgcggggatgcgcaacggctagcatgtgtcagcatgcccacctaggagacgccttttccatgaaccacatcgatgtgtcgtgctgcactaaatctgggtgcaatcatcctgatctcgatgtccaatatcgctcgggcgccgcccctcagcccgggccagcccacctatcactcaccatcacgcttctgatgactgctcgcctttggggaggcacactgctctggacatag

SEQ ID NO: 16682 - DNA, 1038 bp, synthetic construct
  misc_feature 1..1038: note = Description of Artificial Sequence: Synthetic coding sequence
  source 1..1038: mol_type = other DNA
atgtccctgttcggactcctgctgctgaccagcgcacttgccggacagcgacagggcacgcaagccgagtcaaatctgtccagtaaatttcagtttagctctaacaaagagcagaacggagttcaggatcctcagcatgagcggattataacagtaagcaccaatggatcaattcatagcccacggtttcctcatacatatccacggaacacggtcctcgtgtggcggctggtagcggtggaggaaaatgtatggattcaactgacgttcgatgagcgtttcggcctagaagacccagaagacgacatttgtaagtacgacttcgtcgaagtcgaggagccctcggatggaactattctgggcaggtggtgcgggagcggcacagtacctggaaaacaaattagcaagggcaatcagatccggatcaggtttgtgtccgacgagtacttcccctctgaacctggcttctgcatccactataatatcgtcatgccccaattcacagaagcggtgagcccctcagttctgcctccgtccgcccttcctctcgacctcttgaataatgcaatcacagccttttcgacactcgaagaccttattagataccttgagccagagcgttggcagctggatttagaggatctgtacaggcctacatggcagctactgggaaaggctttcgtcttcggaagaaagagccgggtggtggatctgaacctcttgaccgaagaagtcaggttatacagttgcaccccgaggaatttctccgtgagcattcgggaggagctgaaaaggacagataccattttctggcccgggtgccttcttgtgaaacggtgtggtgggaactgtgcttgttgtttacataattgcaacgagtgccaatgcgtacctagcaaggtaactaagaagtaccatgaggtactacagttgcgaccaaaaactggcgtgcgcggcctacacaagagcttgaccgatgttgccttagagcaccacgaagaatgcgattgtgtgtgccgcggatccacaggcggttag

SEQ ID NO: 16683 - DNA, 549 bp, synthetic construct
  misc_feature 1..549: note = Description of Artificial Sequence: Synthetic coding sequence
  source 1..549: mol_type = other DNA
atgcctcaattcaccgaggcagttagcccctctgtgctgcctcctagtgcgctgcctttagatttgctaaataatgccatcactgctttcagcaccctcgaagacctcatcaggtacctcgaacccgagcggtggcagttagacttggaagacctgtatcgccctacctggcagctcctgggaaaggctttcgtgttcggccggaagagtagggtcgtggacctcaacctactgacagaggaagtccggttatatagctgcacccctaggaacttttccgtaagtattcgggaggagctgaaaagaacagacaccattttttggcccggttgtctgctggtgaagcgttgtggcgggaattgcgcctgttgcctgcataattgcaatgagtgtcagtgtgttcccagcaaagtgacgaaaaaataccacgaagtcctgcagctgcgaccaaagaccggagtccgggggctacataagagcctcacagatgtggcacttgaacaccacgaagaatgcgattgtgtctgcaggggatcaacaggaggttag

SEQ ID NO: 16684 - DNA, 573 bp, synthetic construct
  misc_feature 1..573: note = Description of Artificial Sequence: Synthetic coding sequence
  source 1..573: mol_type = other DNA
atgatgcagtacacctggctgcttacgaaacagttcaccgaggcagtgagccccagcgtgttgccaccatcagctctgcctctggacctattgaacaatgccatcaccgcttttagcacgctggaggacttaattagatatttggagccagagagatggcaactggatctcgaagacctgtaccggcctacgtggcagttgcttggtaaggcttttgtctttggcagaaagagcagggtggtggacctcaatctcctgaccgaggaggtgagattgtacagctgcacccctcgcaacttctcagttagcatcagagaggaacttaagcgtaccgacacaatcttttggccaggctgtttgctggtgaagagatgcgggggtaattgcgcctgttgcctgcacaactgcaatgagtgccagtgcgtgccctcgaaggtgactaaaaaataccacgaagtgctgcagctaaggcccaagaccggcgtccgcggtctgcacaagtcactgacagacgtagccctggaacaccacgaagagtgcgattgcgtgtgcagggggagcaccggtggctag

SEQ ID NO: 16685 - DNA, 504 bp, synthetic construct
  misc_feature 1..504: note = Description of Artificial Sequence: Synthetic coding sequence
  source 1..504: mol_type = other DNA
atgagtctttttggactattattactcacaagtgctttggcaggtcagagacagggtacccaagctgaaagtaatctgtcctctaaatttcagttctcaagcaataaggagcaaaatggggttcaggatccacagcatgaaaggattattaccgtgagcaccaacgggtcaatacatagcccaaggtttccgcatacctatccccggaacactgtgctcgtgtggagactcgttgccgttgaggaaaacgtgtggatccagcttacattcgacgagcggttcggattagaggatccggaggacgatatctgtaaatacgatttcgttgaggtggaggagccttccgacgggacaattctgggacggtggtgtgggagcggcacggtaccaggaaaacagatctcaaagggcaatcagattcgtatcagattcgtctcagatgaatacttcccatcggaaccatcaaatcggggcggcaagattattcagttgcacacgagctag

SEQ ID NO: 16686 - DNA, 2217 bp, synthetic construct
  misc_feature 1..2217: note = Description of Artificial Sequence: Synthetic coding sequence
  source 1..2217: mol_type = other DNA
atgcagccacgatgggctcaaggcgcaacaatgtggcttggtgtgttgctgacgctgctcttgtgctcatctctagaaggtcaggagaactcattcaccatcaattccgtggacatgaaatcactgcccgattggactgtccagaatggtaagaatcttaccctccaatgcttcgccgacgtgagtactacctctcacgtaaaaccacagcatcagatgctgttttataaggacgacgtgctcttctacaatatcagctccatgaagtccaccgagtcttactttattccagaagtccggatctatgactcaggaacctacaaatgcactgtgatcgtgaacaacaaggaaaagacgactgctgagtaccaggttctggtggagggtgtcccctcgccccgcgtcacactggataaaaaggaggcgatccagggcggcattgtgcgcgtcaactgtagtgtcccggaggagaaagctcccatccattttacaattgaaaaattggagttgaatgaaaaaatggtcaaactgaagcgtgagaaaaattcaagagatcagaacttcgtgattttggaattccccgtggaggagcaggatagagtcctcagctttcgttgccaggcgcggattatctccggtatccatatgcagacgagcgagtccacaaagtcagagttggtcacagtgacagagtctttctcaactcctaagttccatatcagccctactggtatgattatggaaggagcccagctgcatatcaaatgcaccattcaagtgacccacttggcacaggagttccccgaaattatcatccagaaagataaagctattgtggcacataatcgccacgggaacaaagccgtttatagcgtcatggcgatggtggagcattcaggcaactacacgtgtaaagttgagtcaagcaggatatctaaggtgtcctccatcgtggttaacatcacagagttatttagcaaaccggaactcgaatctagcttcactcatctagatcagggcgagagacttaacctctcttgttccatccctggggccccacccgcaaacttcactattcagaaagaggataccatcgtgagccaaacgcaggacttcactaagatagccagtaagtctgactctgggacctatatctgtactgccggtatcgataaggtggtaaaaaaaagcaataccgtgcaaattgtggtttgcgaaatgctttcacaacccaggatatcttatgacgctcaatttgaggtaataaaggggcagacaattgaggtgcgttgcgaatcgatatctggtactctgccaattagttaccagctgctgaaaacatccaaggtgctggagaattcgactaagaattctaacgaccccgccgtgtttaaggacaatccgacagaggatgtggaataccagtgcgtggcggacaattgtcatagtcacgctaagatgctgtcagaggtgctgcgggtgaaggttattgctcccgttgatgaggtccaaatttcaatcctgtcttccaaggtggtggaatctggggaggatattgtactgcaatgcgcggttaatgagggttctggccccattacatacaagttctatcgagaaaaagagggaaagcctttctaccagatgacgtctaatgccacacaggccttttggactaagcagaaggcttcaaaggaacaggagggcgagtactattgcacggcctttaatcgtgctaaccacgccagcagcgtccctaggtccaaaatcctgaccgttcgggtaattttggccccttggaagaagggactcatagcagtggtgatcataggagtgatcatagcgctattaatcatcgctgccaagtgttactttttgcggaaggcaaaagccaagcagatgcccgtggagatgagccgccccgcggtccctttactaaactccaataatgagaaaatgagtgacccaaacatggaggccaactctcactacggccacaatgatgacgtgcggaatcacgccatgaaacccatcaacgacaacaaggaacccctgaactctgatgtgcaatacacagaggtgcaggttagctccgctgagagtcacaaggacctcggaaagaaagacacggaaacagtctactccgaggtccgcaaggcagttcccgacgcggtggagagcaggtatagccgcacagaggggtcccttgacggtacctag

SEQ ID NO: 16687 - DNA, 636 bp, synthetic construct
  misc_feature 1..636: note = Description of Artificial Sequence: Synthetic coding sequence
  source 1..636: mol_type = other DNA
atgcggaccttggcttgcctcctgttgcttggatgtggttacttggctcacgttctcgccgaggaagctgaaattcctagggaggtgatagagcggctggctcgctcccaaattcactctattagggatctgcaacgtctgctggagattgattcggttggcagcgaggacagtctggatacctctcttcgggcccacggagttcatgccaccaagcatgtgcccgaaaagcggccacttccaattagaagaaaacggagcatcgaggaagccgtaccagccgtctgtaaaacaagaacagttatctatgaaattcccaggagccaagtggacccaacctcagccaactttctgatctggcccccgtgtgttgaggtaaagcgatgcactggttgttgcaataccagctccgtgaaatgccagcccagcagggtgcaccaccgaagcgtcaaggtcgcgaaggtggaatacgtcaggaagaagcccaagttgaaggaagtccaggtgcggctcgaagagcacttggagtgtgcctgcgccacaaccagccttaatcctgactatagagaggaggataccggtaggccccgtgagagcgggaagaaacgcaagaggaaaaggcttaagccgacttag

SEQ ID NO: 16688 - DNA, 591 bp, synthetic construct
  misc_feature 1..591: note = Description of Artificial Sequence: Synthetic coding sequence
  source 1..591: mol_type = other DNA
atgagaacgctggcctgtcttctcctgctgggttgtgggtatttagcacatgttcttgcggaggaagcagagattcccagagaagtcatcgagcgcttggcgcggtctcagattcattccattagagacttacaacggttgctggaaatcgactcagtgggcagcgaagactctctggatacaagtcttagggcccacggcgttcatgcaacgaagcatgtcccggaaaagagacctctccctattcggcgcaaacggagcatcgaagaagctgtgcctgctgtgtgcaagacccggaccgtaatctatgaaatcccaagaagccaggttgatcccaccagcgcaaacttcctgatctggccaccatgtgtggaagtgaagcgctgcacaggatgttgtaacacaagcagcgtgaagtgccaaccttcaagggtgcatcaccgcagtgttaaggtggctaaagtggaatatgtgcggaagaagccgaaactgaaagaggttcaggtgcgactagaggagcatctcgagtgcgcctgcgcaacgacgagcctcaatcctgactacagagaggaggacaccgacgtgcggtag

SEQ ID NO: 16689 - DNA, 162 bp, synthetic construct
  misc_feature 1..162: note = Description of Artificial Sequence: Synthetic coding sequence
  source 1..162: mol_type = other DNA
atgagaacgctagcttgtctgctcctgctgggttgcggatacctggcccatgtgctcgcagaggaggccgagataccaagggaggtgattgagcgtctggccagaagccagatccatagcatccgcgacctgcagcgcctccttgaaatcgactccgtgtag

SEQ ID NO: 16690 - DNA, 3270 bp, synthetic construct
  misc_feature 1..3270: note = Description of Artificial Sequence: Synthetic coding sequence
  source 1..3270: mol_type = other DNA
atgggtacttcccaccctgccttcttagtgttggggtgtctgctgacaggtctctccttgattctgtgccagcttagcttgccttcaattctgcctaatgaaaacgagaaagtggtacagctgaactctagcttctcacttcggtgtttcggtgaatccgaagtctcctggcagtatcccatgagcgaagaggaatcttccgacgtggagattagaaacgaggaaaataactctggtctgttcgttactgtgctggaggttagtagtgcgtcagccgctcacaccggtctgtacacatgttactacaatcacactcagactgaggagaacgagttagagggccgacacatatacatctatgttcctgatcccgacgttgcctttgtccctctgggtatgaccgactacctcgtgattgtagaagacgacgacagtgccatcattccttgtaggacaacggatccagaaactcccgtgacactgcacaatagcgagggagttgttcccgcctcctacgattccagacaaggtttcaacggtaccttcacagtgggcccttacatttgcgaagcaacggtaaaagggaaaaagttccagactattcccttcaatgtttatgctctgaaggccacaagcgagctggacctcgagatggaagccctgaagactgtttacaagagcggtgaaaccatagtcgtgacatgtgctgtgttcaacaatgaagtcgttgacttgcagtggacatacccgggggaagttaaaggcaaagggattacaatgcttgaagagatcaaggttcccagcatcaagctggtgtacaccctaaccgtaccagaagctaccgttaaggacagcggcgactacgagtgtgctgcaaggcaggcgactagggaagttaaggagatgaagaaggtaacaatcagtgttcacgagaagggattcatagagatcaaacctacattcagccaattggaggcagtgaacttacatgaggtgaagcacttcgtcgttgaagtaagggcatacccccctcctaggatttcatggttgaagaataatctgacactgattgaaaatctcaccgagattacgactgacgttgagaagatccaagaaatcaggtatcgctcgaaactgaaactgattagagctaaggaagaggatagtggacattataccatagttgcacagaatgaagatgctgttaagagttacacgtttgaattgctaacccaggttccgagctcaattctggaccttgttgacgatcatcatgggtcgaccgggggacagaccgtaagatgcacagctgagggaacaccacttcccgacatcgagtggatgatttgcaaggatattaagaaatgtaacaatgaaacgagttggacaatcctcgccaacaatgtatcaaatatcattaccgaaattcattcccgggaccgctccacagtggaggggcgcgtaacattcgccaaggtagaggagacgattgctgtgcgctgccttgccaagaatctgttaggcgccgagaacagagagttgaagcttgtggcccccaccttacgcagtgagctcacggtggcagccgctgtgctggttttactcgtaatcgttattattagcctcattgtcttggtcgtgatttggaagcaaaaacccaggtatgaaattaggtggagagtcatcgaaagtattagtccagacggccatgagtacatttacgtggacccaatgcaactgccctacgatagtagatgggagtttcccagggatggcctggtgcttggcagggtgctcggctcgggagccttcggcaaagtggtcgaagggaccgcttacgggttgtctaggagccagcccgttatgaaggtagcagtcaagatgctgaagccgactgcccgcagcagtgaaaaacaggcactcatgtctgagctgaagataatgacccacctaggtcctcaccttaacattgtgaatctactgggcgcttgcacaaaatctggccctatatacatcatcactgaatattgtttctatggggatcttgttaactacctgcacaagaaccgtgatagctttctgtcacatcacccagagaaacccaaaaaagagttggatatattcggtttgaatcccgctgacgaatcaactaggtcttacgtcatcctgtctttcgagaataacggggactatatggacatgaagcaagccgatacaacgcaatatgtgcccatgttggaacgcaaggaggtgtccaagtattccgacattcagagaagcctttatgatcgcccagcctcctacaagaagaagagcatgttagactctgaggtgaagaatctcctgagcgatgacaattccgaaggcttgacgttgttagacttacttagttttacctaccaggttgccaggggcatggagttccttgcatctaaaaattgcgtccatcgagacctggccgctagaaacgtcctccttgcccagggaaagatcgtcaaaatctgcgatttcggcttggccagagacatcatgcatgactcaaattacgtctccaagggcagcacctttctgcctgtgaaatggatggcaccggaaagcatattcgacaacctgtacaccacactgagtgacgtgtggagttatgggatccttctgtgggaaatcttcagtctcggcggaactccatacccaggtatgatggtcgatagcaccttttacaataaaatcaagtcggggtaccgtatggctaagcccgaccatgcaacttcagaagtctatgaaatcatggtgaagtgctggaattctgaacctgaaaaacgtccttccttttaccacctgagcgaaatagtggaaaacctgctccctggccaatacaagaagtcatatgagaagattcatttggattttttgaaatccgatcatcccgccgtagcccggatgagggtggatagcgacaatgcttacatcggtgtgacatataaaaatgaagaagacaaactaaaagactgggaaggaggcctagacgagcaacgtctctccgccgattcaggttatattatcccactgcctgatatagacccagtgccagaggaagaagatcttgggaaaagaaatcggcatagttctcagaccagtgaggaaagcgccatcgaaacaggtagtagcagtagcacattcatcaagcgagaagacgagaccatcgaagatattgatatgatggatgatatcgggattgattcttccgacctggttgaggacagttttctttag

SEQ ID NO: 16691 - DNA, 480 bp, synthetic construct
  misc_feature 1..480: note = Description of Artificial Sequence: Synthetic coding sequence
  source 1..480: mol_type = other DNA
atgggcaccagtcatcccgcctttctcgtgttaggttgtttgttgacagggctgagtctaattttgtgccagctgtcactgcctagcattctcccaaacgaaaatgaaaaggtggttcagctgaattcctcattctccttacgttgtttcggagagtctgaggtatcatggcagtatcccatgagcgaggaagagtctagcgatgtcgagattagaaatgaggaaaacaattccggtctttttgtgactgtacttgaagtgtccagcgcatccgccgcccatacaggcctctatacctgctactacaaccatactcagacagaggagaacgaactggagggacggcatatttacatctacgtgcccgacccggacgtggctttcgtgccccttggaatgacggactacctggtcatagtggaggatgacgatagcgctataattccttgcaggactaccgatcctgaaacccctgtgtag

SEQ ID NO: 16692 - DNA, 477 bp, synthetic construct
  misc_feature 1..477: note = Description of Artificial Sequence: Synthetic coding sequence
  source 1..477: mol_type = other DNA
atgggtaccagtcatcctgccttcctcgtgttggggtgcctgctgacgggcttgtccctgattctatgtcagctatcgttaccaagcattctgccaaacgagaacgaaaaagtggtgcagttgaatagtagcttcagcttacgctgtttcggcgaaagtgaagtgagttggcagtatccaatgtctgaagaggagtccagcgacgttgagatcaggaatgaggaaaataattctgggctctttgtgactgtacttgaggtatcgagtgcctctgccgcccacaccggactgtatacttgttactacaatcatacccagacggaggagaacgaactggagggaagacacatttacatctacgtgcccgatcccgacgtagcctttgttccactcggtatgaccgactacttggtgatagtggaagatgacgattccgccatcattccctgtcgcaccaccgaccccgaaaccccctag

SEQ ID NO: 16693 - DNA, 657 bp, synthetic construct
  misc_feature 1..657: note = Description of Artificial Sequence: Synthetic coding sequence
  source 1..657: mol_type = other DNA
atgggtacttcccacccggctttcctcgtccttgggtgtctgttgaccgggctgtctcttatcctctgtcagctttccctgccaagtatcttgcccaacgagaatgagaaagtggtgcagttgaattcaagtttttcactaagatgcttcggggagtctgaggtttcatggcagtatccaatgtctgaggaggagagttctgacgttgagattcggaacgaagagaataacagcgggctgtttgtgaccgtattggaagtcagcagcgccagcgccgcacacaccgggctgtacacatgttattacaatcacacccagaccgaagaaaacgaactggagggtcgtcatatctacatctacgtgcctgatccagacgtagccttcgtgcccctgggaatgactgattatcttgtgattgtagaggatgatgacagtgcgattattccttgtcgtacaaccgacccggagactcccgtgacactgcacaattctgagggcgtcgtgccggccagctatgacagtcggcagggcttcaatggcactttcacggtcggtccatacatttgcgaagcaaccgtaaaggggaagaagtttcagaccataccattcaatgtgtacgccctgaagggcacctgcatcataagcttcttgttgtag

SEQ ID NO: 16694 - DNA, 465 bp, synthetic construct
  misc_feature 1..465: note = Description of Artificial Sequence: Synthetic coding sequence
  source 1..465: mol_type = other DNA
atgggaacgagccatcccgcattcttggtgctgggctgtctattgactggtctctctttgatactatgccagttaagcttgccctcaatactgcctaacgagaacgagaaagtcgttcaactgaattcctcctttagcctgaggtgcttcggtgagagcgaggtgtcatggcagtaccctatgagtgaagaagagtcctctgacgtggagattcggaacgaagaaaataactccgggttatttgtcactgttctggaggtcagctccgcatccgccgcccacacaggactgtacacatgttattataaccacacacaaacagaggaaaacgagttagagggacgccacatctacatatacgtaccggacccggacgtggcttttgttccactgggtatgacggactacctcgtgatcgtagaagacgacgactccgcgatcataccatgcagaacaacagattag

SEQ ID NO: 16695 - DNA, 3321 bp, synthetic construct
  misc_feature 1..3321: note = Description of Artificial Sequence: Synthetic coding sequence
  source 1..3321: mol_type = other DNA
atgagactccccggagctatgcctgccttggcattgaagggggagctgctgttgctgtcattgctcctgttgctcgagcctcaaattagccagggccttgtggttaccccccccggacccgagttggtgttgaatgtctcttctacgtttgtcttgacatgttccgggtccgctcccgtggtttgggaacggatgagccaggaaccaccccaagagatggcaaaagctcaggacggaacattttcaagcgtgctgacactgaccaaccttaccggcttagatactggcgaatatttctgtacgcacaatgattcacgcggccttgagacggatgagcgcaagcgactgtacatcttcgtgcctgaccccactgtgggcttccttcccaacgacgctgaagagcttttcatcttcctgactgagatcaccgagattacaattccatgcagggttacagatcctcaattggtagtgacgttacatgaaaagaagggtgacgtcgctctcccggtgccgtatgaccaccagagaggattcagtggcatattcgaggaccgtagctatatatgcaaaacaacaatcggcgatcgggaggttgattctgacgcttactacgtttatagactgcaggtgtcaagtatcaatgtgagtgtgaacgccgtgcagacagtggtgcggcaaggagagaatatcacactgatgtgtatcgttatcgggaacgaagtggtgaattttgagtggacctacccgcgtaaggagtccggtagactcgtcgagccagtcacagacttcctcttggacatgccttaccatatacgcagcatactacatataccaagcgctgagctggaagattcaggcacctatacttgtaacgtgactgagagcgtgaatgaccatcaggatgaaaaggcaataaacatcacagtagttgagagtggctacgtaagactgttgggagaggtaggtactctgcagtttgccgagctgcatagaagccggacactgcaggttgtgttcgaggcatatcccccgcccaccgttctgtggttcaaggataaccgcactttgggagacagtagtgccggggagatagcccttagcactcgcaacgtttcagagactagatacgtctctgagctgacattggtccgcgttaaggtagcggaggctgggcactacacaatgcgtgcattccatgaagacgctgaagtccagttgagcttccagctgcaaataaacgtccctgtgcgtgtacttgagttatccgagagtcacccggactcgggagagcaaacagtgcggtgcagaggtcgcgggatgccgcagccaaacataatctggagcgcttgcagggatctcaagaggtgtcctagagagctccctccaacactccttgggaacagctctgaagaggaatcgcagttggagaccaatgtcacttactgggaggaagagcaggaatttgaggtcgttagtaccctgcgactccagcatgttgacaggcccttgtcagttaggtgcactctccggaatgcagtgggacaggacacacaagaggtcattgttgtcccccatagtctcccattcaaagtcgtggtgattagcgctattctcgcgcttgtggtcttgactattatttcccttatcatcttgatcatgctgtggcagaaaaagccgaggtacgagatccgatggaaagttattgagagcgtgagctccgacggccacgaatacatttacgtcgatcctatgcagctcccgtatgatagcacatgggagctgcccagggaccagctagtgctgggtaggactctggggtcaggcgctttcgggcaggttgtcgaggcgaccgcccatggcctatcccactcccaagcaaccatgaaagtcgccgtaaagatgttgaagagcactgccagatctagcgagaagcaggcccttatgtccgaactgaagatcatgtctcacctgggaccgcacctgaacgtcgtcaatttgcttggcgcatgcactaagggcggtcctatatatataatcacggaatattgtcgctacggcgacctggtcgactaccttcacagaaataagcatacctttttgcaacaccactcagataaacgccgtcccccatccgccgagctgtattccaacgcactccctgtcggcctgcccctgccttcgcatgttagcctaactggggagtctgatggcgggtatatggacatgtccaaggacgaaagcgttgattatgtgcctatgttggacatgaaaggggatgttaaatatgccgatatcgaatcaagcaattatatggctccttatgataactatgttccctcggccccagaaaggacatgtagggccaccttgatcaacgaaagcccagtgctctcatacatggatttagtgggattcagctatcaggttgctaacggtatggaatttttggcatcaaaaaactgcgtgcacagggatctggctgcccgcaacgtcctcatttgtgaaggcaagctcgttaaaatttgcgatttcgggttagcacgggatattatgagggattcaaactatatatcgaagggctccacatttctgccactgaagtggatggctcccgagtccatcttcaacagcctttacacaactctgagcgacgtatggagctttggaatcctgctgtgggagattttcaccctgggtggcacaccgtatcctgaactgccaatgaatgaacaattctataacgccattaagcgcggttataggatggcccagcccgcccatgcaagcgatgagatctacgagatcatgcagaaatgctgggaagaaaagtttgagattagaccaccgttctcccagctcgtgctgctattggaacggctactgggggagggatacaagaagaaatatcagcaggtagacgaagaattcttgaggagcgaccatcccgccattttgcgctcccaggctcgtttgccgggattccacggattaagaagccctctcgatacctcctccgtgctgtacaccgccgtccaaccaaatgaaggcgataacgactacattatccctttacccgatcccaaaccagaggtggccgatgaggggccacttgagggcagcccctccctagctagcagcactctgaatgaggtgaacacgagtagtaccatctcttgtgattccccacttgaaccacaggatgagccagaacccgaacctcagctcgaactacaggtggaacccgagcccgagctagagcagcttcccgacagtggctgccccgcgccgcgggccgaggcagaggactcattcttgtag

SEQ ID NO: 16696 - DNA, 525 bp, synthetic construct
  misc_feature 1..525: note = Description of Artificial Sequence: Synthetic coding sequence
  source 1..525: mol_type = other DNA
atgaggcttccgggagccatgccagccctggcgctcaagggcgagctgttgcttctgtctcttctcctcctactggaaccccagatttcacagggtctggttgtaacaccaccagggcccgagctggtcttaaacgtgtccagtacgtttgtactgacctgctctggctctgctccagtagtgtgggaaagaatgagtcaagagccaccccaggaaatggccaaagctcaagacggcactttctcatcagtgctgacccttactaacctgacaggactggatactggcgagtatttttgcacccataacgactctcgaggtctggagacagacgaacggaagagattgtacatattcgttcccgacccgacggtggggtttctacctaacgacgcggaggagcttttcatttttctgactgagatcacggagatcacaataccctgtcgggtgactgacccacagttggtagtcacactgcacgagaagaagggcgatgtggctctgcccgtcccatacgactag

SEQ ID NO: 16697 - DNA, 2331 bp, synthetic construct
  misc_feature 1..2331: note = Description of Artificial Sequence: Synthetic coding sequence
  source 1..2331: mol_type = other DNA
gctgccagcgaacccgacaccgccggaagcgttcgaggtctgccaactgctcactgtcccgttgtggacaaccgaaccctcggcgacagctcggcgggcgagatcgctctttcaactcgcaacgtgagtgaaacgcgttatgtctcagagctcactctggtaagggtcaaagttgcggaggcaggccactacacgatgcgcgcctttcatgaagacgcggaagtgcaactgtcattccagctccaaatcaatgtgcctgtccgcgtcctggaattgagcgaatcacatccagactccggcgaacagacagtccgatgtcgcgggaggggcatgcctcaaccgaacattatctggtcagcctgtagagatctgaagcggtgtccacgagaactaccacccactctactggggaattcgtcagaggaagaaagccagctagaaaccaatgtgacttattgggaggaagaacaggaatttgaggtcgtgtccactctcagactccaacacgtggaccggccattgagcgtgcggtgcaccctgcgcaatgcggtgggacaggacacacaggaggtgattgtggtcccccactcactgccattcaaggttgtggttatctctgccattctggccttggtggtcctcaccatcataagtttaattattctgataatgctctggcaaaaaaagccacgttatgagataagatggaaagtgattgagagtgtaagttcagacggccatgagtatatttatgttgatcccatgcaattgccgtatgattccacgtgggagctaccacgcgaccaactcgtgctcggtaggacccttggctcaggcgccttcggacaagtggtggaggctaccgcgcacggtctgagtcacagccaagcgaccatgaaggtcgccgttaagatgctgaagagcacagcccgttcctcagaaaagcaggcactcatgtccgaactgaaaatcatgagtcatttgggcccgcacctgaatgtcgtcaatctgttgggcgcgtgcactaaaggggggcccatatacataattactgaatactgccgctacggcgatctcgtagactatctgcaccggaataagcatacctttttgcagcaccattcggacaagcgacggccaccctcagctgagctgtactccaatgcactccccgtgggattaccacttccaagccatgtgagccttactggcgaatcagacggggggtatatggacatgtccaaggacgaatctgttgattatgttcccatgctggacatgaaaggcgacgtgaagtatgcagatatcgagtcttcgaattacatggctccttatgacaattacgtaccttcggcacccgagcgaacctgccgcgcaaccctcattaatgagtctccggtcttaagttacatggacctggtaggtttcagttaccaggtcgctaatggcatggaatttctggcaagcaagaattgcgtccaccgggacttagcagctagaaatgtgctaatctgcgaaggcaagttagtgaagatatgcgatttcggcctggcgagggatatcatgcgggacagcaactatatcagcaagggctccactttcctgcctctgaaatggatggcccccgaatccatcttcaacagtctctatactactctcagcgatgtatggagcttcggcatacttctgtgggagattttcaccttgggcggcactccatacccggaactaccaatgaatgagcagttttacaacgcaataaaacgggggtacaggatggcccagcccgcccacgctagcgacgaaatctacgaaattatgcagaagtgttgggaggagaaattcgaaatacggcctcccttctcacaactcgtgctgctgctggaaaggctcttaggagaaggatacaaaaaaaagtatcagcaggtggatgaggagtttctgcggtccgatcatccagctatactgagaagccaggcccgcttgccaggttttcacggtctgagatctccccttgacacaagctccgtcctgtacacagccgtgcagccaaacgaaggtgataatgattacatcatccctctcccagatcctaagccagaggttgctgacgagggccctcttgagggttcaccaagtttagcatcatcaaccctcaatgaagtgaacacttcttcaacaatttcttgtgatagtcccttggagcctcaggatgaacccgagcccgagcctcagctggaacttcaggtcgaacctgagcccgagttggaacaactgccggattctggatgtcccgctcctagggcagaagctgaggattctttcctctag

SEQ ID NO: 16698 - DNA, 891 bp, synthetic construct
  misc_feature 1..891: note = Description of Artificial Sequence: Synthetic coding sequence
  source 1..891: mol_type = other DNA
atggggctgtcccactctaagacccacctcagggttattaaagtggccccgctacagaataaagaagtggagactccttccgccggcagagtggattttgctttcaaccaaaatctggaggaaaagacatcttattctctcgcaagattgcaagatcagaacaaagccctggaaggccagctacctcccctacaagaaaattggtacggccgttattcaacagcaagcagggacatgtattttgatattccactggagcacagagaaacctccattataaagagacacccacctcagaggctccagaaattggaaccgatcgacctgcctcgcgtgattacctcaggtaggctccttagccaacgagaagctcgcaccatgcacaaggccaagcaggtgctggagaagaaaatgcagactcccatgtacaccagcgagaaccgtcagtatcttcacaaaatgcaggtcctagagatgatccggaagagacaagaggctcagatggaattaaagaaatctctccatggcgaggcaagaatcaacaagcagtctcctagagatcacaaggcgaaaaagactctccaatccaccccccgaaacgatgaccatgacctgcttaccatgctgcccgacgagatcttgaataggggcccaggcaatagcaagaacactgagtttctcaagcaccaggctgtgaataactactgcccctggaagattggcaaaatggaaacgtggttacacgaacaggaagctcagggtcaactcctctgggatagtagtagtagcgatagtgacgaacaaggcaaggatgaaaagaaacctcgggcactggtccggactcgaaccgagaggatccctctgtttgacgagttctttgatcaagagtag

SEQ ID NO: 16699 - DNA, 1734 bp, synthetic construct
  misc_feature 1..1734: note = Description of Artificial Sequence: Synthetic coding sequence
  source 1..1734: mol_type = other DNA
atgcccgagggcgcccaggggctctcattatccaagccctccccttcgttagggtgcggacggcggggtgaggtctgcgactgtggtactgtttgtgagacccgaaccgctcccgccgcccctactatggccagtcctcgcggaagcgggtctagcacctctctcagcaccgttggctcagagggcgatcccgctcccggcccgacgcccgcctgttcggcctcgcgacccgagcctcttcccggaccccccattcggcttcatttatcacctgtcggcatcccaggctcagcccggccatcacgtctcgagagagtcgctcgagagatcgtggagaccgagagggcctacgttagggacctcagatcaatcgtggaagattatttgggtcccctactcgacggcggcgtgctgggcctttccgtcgaacaggtggggacacttttcgcgaatattgaggatatttacgaattttcatccgagctgttagaggacctggaaaattcctccagcgcgggaggcatagccgaatgtttcgtgcagagatccgaggattttgatatctacacactgtattgtatgaattaccccagctctctggccctgcttcgtgaactgagcctgtcacctccagccgctctgtggctgcaggagcgacaggcccaactgcggcactctttacctctccaaagctttcttcttaaaccggtccagcgcattctgaaatatcatctgctcctccaggaactcggcaagcattgggccgagggcccgggaactgggggacgggaaatggtggaggaagccattgtttcaatgacagcagtcgcctggtatattaatgacatgaaaagaaagcaggagcacgcagctcggctccaggaagttcagcggagactcgggggctggacaggtcctgaactaagtgctttcggggaactcgtgttagagggtgcattccgtgggggtggaggcggggggccacgcctgagagggggcgaaaggttactgttcttattttctcggatgctactagtcgccaaacggcgggggctggagtacacgtacaagggacacatcttttgctgtaacctctctgtatccgagagtccacgcgaccccctgggcttcaaggtgagtgacctcaccatcccaaagcacagacacctgctgcaggctaagaatcaagaggaaaaacgtctatggattcattgcctgcagcgactgtttttcgagaaccatccagcatctattccagccaaggcaaagcaagtgttgcttgagaactctctgcattgtgccccaaagagtaaacctgttttggagccactcacgcctccgctcggtagtccacgcccccgggatgctcgttccttcactccgggtcggcgtaatacagcaccctctcccggcccttctgtgattagacgagggcggaggcagtctgagcctgtgaaagacccgtacgtgatgtttcctcagaatgcaaagcccggattcaaacatgctggttccgagggggagctatatcctccagaaagccagccacctgtttcaggctccgccccccctgaagacctggaagatgcaggcccaccgactctggacccgagtggcaccagcatcaccgaggagatcttggagctgctcaatcagcgggggctgcgagaccctggagaatccatgggtttgcaccgcgcgcaaggcgctcctgacgcccccttccacatgtag

SEQ ID NO: 16700 - DNA, 4161 bp, synthetic construct
  misc_feature 1..4161: note = Description of Artificial Sequence: Synthetic coding sequence
  source 1..4161: mol_type = other DNA
atgcctgaaggcgcccagggcctatccctgtcaaaacccagcccttctcttggatgtggacgccggggtgaggtttgtgactgtggtacggtgtgcgaaactaggactgcgcccgccgcccccactatggcctcgccaaggggctccggctccagcacttcactaagcacagttggtagcgagggcgacccggctccaggccccaccccagcttgctctgccagccgccctgagccattaccaggacctcccatccgcttacacttgagccccgtaggcattccgggtagcgcaagaccctccaggctggagcgcgtggcacgggagatcgtagagaccgaaagagcttacgttagggatctgcggtcaatagtggaagattacttaggacccctcttagacggcggcgtgttgggcctatcggtggagcaggtgggcactctgtttgcaaacatcgaagacatctacgaattttctagtgagctactcgaagatctggaaaattcgagtagcgccgggggcatcgcagaatgctttgtgcagcggtctgaagatttcgatatatacaccctgtattgtatgaattatccttcctccctcgctctgctgcgcgagctctcacttagtcccccagctgctctgtggctccaggagaggcaggcacagttgcggcatagcttaccactgcagtcattcctgctcaagcctgttcagaggatcctaaagtaccacctgctgttgcaggagctaggcaaacattgggccgaggggcccgggaccggcggtcgggagatggtggaagaggcgattgtgagcatgactgccgtggcatggtacattaacgacatgaagcgcaaacaggaacacgctgccaggttacaggaggtgcaacgtcgattgggcgggtggactggccccgagctctcagcttttggcgagcttgttttagagggggcctttcggggagggggcggaggcggacccagactccggggaggtgagcgactgctcttcctatttagcagaatgcttctcgtggctaagcggagggggctggagtacacatataaaggccacatcttctgctgcaacctgagtgtgtctgagtcaccaagagacccactgggctttaaagtgagtgacctgacaatccctaagcacagacatctgctacaggctaagaatcaagaggagaaacggctctggatccactgcctccagaggctgttctttgagaatcacccggctagtatcccagccaaggcaaagcaagtcttactggagaatagtttacattgcgccccaaagtctaaaccagtgttggagcccctcaccccgcccttgggcagcccaagacccagggacgcccggagcttcacgcctggacgccgcaacaccgcaccctcacccggcccctccgtgatccggagaggtcgcaggcagtccgagccggtgaaagacccatatgtcatgttcccccagaatgcgaaacctggtttcaagcacgccgggtctgagggggagctttacccccctgagtctcagcccccagtctctggaagtgctccacctgaggatctggaggatgcaggcccgcccacactggacccatccgggacctctataacagaggaaattctggagcttctcaatcagcggggcctgcgggatcctggtccatcaacccacgacattccaaagtttcctggggacagccaagtccccggagactccgagacactgacattccaagcactaccctctcgtgattctagcgaagaggaagaagaagaagaagagggcctagaaatggatgagcggggtcccagccctctgcatgtcctggaaggccttgagtccagcatcgccgcagaaatgccgagtatcccatgccttactaaaatcccagacgtccccaacttgcccgagataccatcaagatgcgagatacctgagggcagtcgattgccaagtctttcggatatttctgatgtattcgagatgccttgcttacctgcaatcccctccgttcccaatactccaagtttgtcatctacaccaaccctctcctgcgacagctggctgcagggccctctgcaggaaccagctgaggctcctgctaccagacgtgaactgttttcaggtagtaaccctggtaagctgggtgaacctccatccgggggcaaggcaggacccgaggaggacgaagagggtgtgtccttcaccgactttcaacctcaggatgttacgcaacatcagggcttcccagatgaactggcttttcgatcgtgcagcgaaattcggtctgcctggcaggccctggaacagggacaattagcccgcccagggttccccgaaccactgcttatcttagaagactctgacctggggggcgactcagggtctggaaaggcgggcgctccctctagtgaacgtacggcaagcagagttagggaactggctaggctctacagcgagcgcattcagcaaatgcagagggccgaaactcgcgcaagcgctaacgcacctcgtagaagacctagagtcttggcgcaaccacaaccctccccctgcctccctcaggaacaggccgagcctgggctcttacccgcttttggtcatgttttggtctgcgagctagcttttcccctgacgtgcgcgcaggaatcagttcctctggggccagcagtgtgggtccaggccgctattcccctctctaaacaggggggatcgcccgatggccagggtttgcatgtgtcaaacttgcctaaacaagatctgcctggtattcacgtgtccgcagcgacactcctgcccgaacagggggggtcccgccatgtccaagctccagcagccactcctcttccaaagcaagagggtcctctccaccttcaggttcccgccctgactactttctccgatcaagggcacccagaaattcaggtgccagcaactaccccgctacctgagcatagatcgcatatggtgatcccagctcccagcaccgcattttgtcccgagcaggggcactgcgcggacatccacgttcccacaacccctgcccttcccaaggaaatctgcagcgacttcacagtgtctgtaaccacccctgtgcctaagcaggagggccatttagattcagagagtccgaccaatatcccacttactaaacagggggggtcccgggatgtgcaggggcccgatcctgtttgtagtcagcctattcagccactaagttggcatggaagctccctggaccctcaggggcctggagatactctgccccccctgccatgtcatctgcccgatctacagatacctggtacatctccactgcccgctcatgggtcccacctcgaccatcgcatcccagctaatgcgccactaagtctgagccaggaattgccagatacacaagttcctgcgactacacccctccccctccctcaggtactaaccgatatttgggtgcaggctcttcctacgagcccgaaacagggcagcttgcccgacatccaaggacccgccgcagctcccccactccccgagcccagtctaacagatacccaagtccagaaacttacccctagcctggagcagaagtcattaatcgacgctcatgtgcctgctgcaacccccctacctgaaagagggggctccctagacatccaagggctgtcaccaactccagttcagacaactatggtgctaagtaaacccggtggatctctcgcctcacacgtagcaagattagaaagcagtgatctcacgccccctcactcacctcctccatcttctcgccagcttctcggacccaacgccgccgcattgtcccgctatctggccgcctcctacatctcacagtccctggccagacgacagggccccggcgggggcgcgccagctgccagccgcggctcttggtcctcagctccaacctcccgggcttctagtccacctcctcagccacagcctccaccacctcccgctagacggctttcttatgctactacagtcaatatccacgtgggcggcggggggaggttgcggcccgcaaaggcccaggtaaggctcaaccaccctgctttgctcgcttcgacccaggagtccatggggctccaccgggctcagggcgcacctgacgctccattccatatgtag

SEQ ID NO: 16701 - DNA, 1734 bp, synthetic construct
  misc_feature 1..1734: note = Description of Artificial Sequence: Synthetic coding sequence
  source 1..1734: mol_type = other DNA
atgcccgaaggagcccaggggttatctctttcaaaaccctctccttcccttggttgtgggcggcgcggagaagtttgtgactgcggtacggtttgtgagacacgcaccgcgcccgccgcccccacaatggctagccctaggggatcaggatctagtacatccctgagtaccgtggggagcgagggagatccagccccaggccccacacctgcctgttccgcttcccggcctgagccgctgcctggcccccctataaggctccacctttcacccgtgggaatacccggctccgcccggccgagccgacttgaaagggtggcacgggaaattgtggaaactgaacgagcctacgttcgcgatctccggtccatcgtcgaggattaccttgggcccctacttgatggcggagtcctgggattatctgttgaacaggtaggaaccctgtttgcaaatattgaggacatatatgagttttcttctgagctcttagaagaccttgaaaactcttcttctgccggaggtattgcagagtgctttgtgcaacgtagtgaagactttgacatctacacgctctattgtatgaactatccctccagcctggccttgctgcgtgagttatcactgagtcctccggctgctctctggctccaggaacggcaggcccaactgcgacacagcctccctctgcagagcttcctgctcaagccagtgcaacgtatcctcaagtatcatctgttgctgcaggaactcgggaagcattgggctgaggggcccggaaccggtggacgtgagatggtagaggaggctatagtctccatgaccgccgttgcctggtacatcaacgatatgaaacgaaaacaggaacacgcggcaagactgcaagaagtacagagaaggctgggaggatggacgggtccagaattgtctgctttcggggaattagtgttagaaggcgctttccggggtggcggcggcggtggccccaggctgagagggggagaaaggcttttattcctcttttcgcggatgttgctcgtggctaagcgcaggggtttggagtacacttataaaggccatattttttgttgcaacctgtcggtctctgaatccccccgtgaccctctgggcttcaaggtgagcgatctcaccatccccaagcatcgccacttactccaggcaaagaatcaagaggagaagcgcctgtggatacattgccttcagcggctctttttcgagaaccatccggccagcatccctgctaaggctaaacaggttcttttagaaaatagcttgcactgcgcacccaagtcgaagccggttctggagccgttgactccccctttaggctcccctcgcccacgtgatgctaggagcttcacacctgggcgacggaatacagccccaagcccaggtccttcggtcatacggcgggggcgccgccagtcggagcccgtcaaagacccgtacgtaatgttccctcagaatgccaaaccgggattcaagcacgctggatctgagggagaactctaccctcccgaatcgcagccccctgtgagcggatctgcacctcctgaagatctggaagacgccggaccacctaccctagatccttcaggaacctcgattacagaagagatcctcgaactactcaaccagcgcggcctgcgcgatcccggtgagtccatgggcctccatcgagcacagggtgctcctgatgcaccattccacatgtag

SEQ ID NO: 16702 - DNA, 4074 bp, synthetic construct
  misc_feature 1..4074: note = Description of Artificial Sequence: Synthetic coding sequence
  source 1..4074: mol_type = other DNA
atgccagagggagctcaaggcctgagtctgtcgaagccatcaccttcattgggatgtggcagacggggggaagtttgtgattgtggtactgtttgcgaaacacgcactgccccagctgccccgactatggcgtcccctcgaggcagcgggagcagcacaagcttgtccaccgtagggtcagagggtgatcccgcaccaggtcctacacctgcttgtagtgcgtcgcgccccgagcccctgcccggacctcctattagactgcacctgtcacccgtgggtatacctgggtccgctaggccctcacgtcttgagagagtggccagggagattgtcgaaaccgaaagagcttatgtacgagatttgcgcagtatagtcgaagattacctgggacccctgctcgatggcggggtgctcgggttgtctgtcgagcaagtgggaactttattcgccaacatagaggatatttatgagttcagcagtgaactgctggaagaccttgaaaattcatcatccgccggcggcatcgccgagtgtttcgtacaaagatcagaggacttcgatatctatacactctactgtatgaattatcctagtagcctggccctgctgcgggagctgtccttatcaccccctgccgctctgtggctgcaggagcggcaagcccagctgcgtcatagtctgcccttgcaatctttcttgttgaaacctgttcagcgcatactaaaataccatttgctgttgcaggagcttgggaaacattgggccgaagggccaggaaccggaggaagagaaatggtcgaggaagctatcgtgtcaatgaccgcggtggcttggtacattaacgatatgaaacggaaacaagagcatgctgctcggctccaggaggtacagcggaggctgggtggatggaccggacctgagctttccgctttcggcgaattggtccttgagggagcttttcgcggaggtggaggaggcggacccaggctgcgcgggggagaacggctcctcttcctgttcagtcgaatgctgctcgtggcaaagaggagaggcttggaatatacttataaagggcacatcttctgctgcaacttgtctgtgtcagaatccccccgcgatcccctgggtttcaaagtgagcgatttaaccattccaaagcacagacatctgctgcaggccaaaaaccaggaagagaagagactctggatccattgcctgcagcgactcttctttgaaaatcatcctgcttctattcctgctaaagcgaaacaggttctgctggaaaattccctacactgcgcccccaagagtaagcccgtcctcgagccccttaccccacccctgggcagccctcgtccccgggatgcacgcagctttactcccggacggcgaaatactgcaaaaccgggctttaaacacgccggttctgaaggtgaactgtaccccccggagtcacagccacctgttagtgggagtgccccaccagaagatttagaagacgcagggccgcccactctagacccaagcggtacctctataacagaggagattctggagctgctcaatcagcgtggactaagggatccaggtccgtccactcacgatattcccaagtttcccggggatagccaagtccctggtgacagcgagacactgactttccaagccctcccatcgagagatagcagcgaagaggaggaagaagaggaagaggggttagagatggacgaacgggggccttccccactgcacgtgctggagggattagagtctagtatagccgctgaaatgcctagcattccgtgtctcacgaagataccagatgtgcccaatcttcctgagattcccagccggtgcgagatccccgagggcagccggttgccctctctgtccgacatctctgatgtgttcgaaatgccatgcctgccagcaatcccatcagtgccgaacaccccatctttatccagcacccccaccctgtcatgtgattcttggcttcaagggccactccaggagcctgctgaggcccccgctacgaggcgggaactgttttctgggtccaatccgggtaaactgggagaaccgccttccggagggaaggctggtcctgaggaagatgaggagggtgtttccttcactgactttcaaccccaagatgtgacccaacaccaaggctttccagacgaattagcctttaggtcttgctctgagatccgcagtgcgtggcaggctctggagcaaggacagctcgctagaccgggcttccccgagccactcctgatcttggaagactcggatctgggaggcgacagcggatccggcaaggctggggccccaagctcagagcgtaccgcaagccgggtcagagagttggctagattatacagcgaacggattcaacagatgcaaagagcggaaaccagggccagtgccaatgctcctaggcgccgcccccgcgtgttagcccagccccagccatcaccctgcttgcctcaggaacaggccgagcccggtctcctccctgcttttgggcatgtcctagtgtgcgagttagccttccctctgacttgtgctcaggaatcggtgcccctagggcctgctgtttgggttcaagcagcgataccactaagcaaacagggaggaagccctgatggccagggtttgcatgtaagcaacctccctaagcaggatttacccggtattcacgtgtcagccgctactctgctgccagaacaggggggttccagacacgttcaggcacctgctgcaactcctctccccaagcaggaggggcccctacaccttcaggtgccagccctgactacattttcagaccaagggcatcctgaaattcaagtacctgccactacacccctgccagagcaccgtagccacatggtgatcccagcgccatccacggctttttgccctgagcaagggcattgcgcggacattcacgtcccaacaacgcctgcactgccaaaggaaatctgcagcgatttcaccgtgagtgtgacaacgcccgtgcctaaacaggaaggccatctcgactcagaaagccccaccaacattcctctgactaagcagggcgggagccgagatgttcagggtccagatcccgtctgcagccaacctatccaacccctgagctggcacggaagcagtctggatccccagggaccaggcgatacgctgccacctctgccttgccatctgcctgatctgcaaatcccggggactagccctctccctgcccacgggtcacacttggaccaccggattccagccaacgcgccactctcactatcacaggaactccccgatacgcaggtgccagcaactacccccctgcctctgccccaggtgctgaccgacatttgggtccaggctctccctacctcgccaaagcagggatccctgcccgatatccagggcccggccgcagcgcccccgctgcctgagccatcacttactgacacacaggtgcagaagctgaccccttccttagagcaaaagtctctgattgatgctcacgtacctgccgcaaccccattaccagaaagaggtggatcactcgatatccagggcctctcgccaacaccagtgcaaactacaatggtactttctaaacctggtggcagcctcgccagtcacgtcgctcgtctagagagtagcgacctgactcctccccatagcccaccgccttcatcccgacagctgctgggtcctaatgctgccgctctgagcagatacttagccgccagctatatcagtcagtctctcgctcgtcggcaaggacctggcggtggagctccagcagccagtcgcggatcatggagctccgcgccgacctcacgggcaagttccccccccccacagcctcagccaccacccccgccagcgcgcaggttgtcctacgctactactgttaatattcatgtggggggcgggggtaggctgcgtcccgcgaaggcgcaggtgcggctgaatcatccggccttattagcgagcacacaggaatcaatggggctgcaccgggcacagggcgctcctgatgccccctttcatatgtag

SEQ ID NO: 16703 - DNA, 597 bp, synthetic construct
  misc_feature 1..597: note = Description of Artificial Sequence: Synthetic coding sequence
  source 1..597: mol_type = other DNA
atgcccgaaggcgcacagggcttgtcacttagcaagcccagtccctccctggggtgcgggagacggggggaagtctgcgattgtggcactgtgtgcgaaacccgcaccgccgctccagccgcccctacaatggctagcccccgggggtctggaagcagcacctccctgtctaccgtgggttctgagggtgacccagcccctggacctacacctgcgtgctccgcttctcggccagaaccgttgcctggtccacccatccgcctccatctttctcctgtcggcattccaggcagtgctcggcctagcaggctggaacgcgtcgccagggaaattgtagaaactgaaagggcttacgtgcgcgacctgagatctatcgttgaggattatctcgggcccctgctcgacggaggcgtcctcggcctgtccgtggagcaggtcgggacgctgtttgccaatattgaggacatttatgagttctcctccgagcttctagaggacctagagaacagttcttctgctggtggaattgccgaatgttttgtccagagatccgaagacttcgatatttacaccctgtattgtatgaactacccatag

SEQ ID NO: 16704 - DNA, 3714 bp, synthetic construct
  misc_feature 1..3714: note = Description of Artificial Sequence: Synthetic coding sequence
  source 1..3714: mol_type = other DNA
atgccggagggggcacaaggcctgagtcttagcaaaccaagtccatctctcggatgtggaagaagaggtgaggtttgcgattgcggtaccgtgtgtgaaaccagaactgggagcgccagacctagccggttagaaagggtggcgagggagatagtagaaactgagagagcttatgtgagggatcttcggtccatcgtcgaagactacctgggtccactgctggatgggggcgtcctcggcctcagcgtcgaacaagttggcacgctcttcgccaatatagaagacatttatgaatttagtagtgaactgttagaggatctggagaactcatcatcagctggtggcattgctgaatgctttgtgcagagaagtgaggattttgatatatacaccttgtattgtatgaattacccatctagcctggcgttgttgcgagagctaagtctgtcccccccagcagcattgtggcttcaggaacggcaggcccagttgaggcacagtctaccgttgcaatcttttctgctgaagcctgtccagcggattctgaaataccaccttcttcttcaggaactaggaaaacattgggcagaggggcccggaaccggaggacgcgaaatggtggaagaggccattgtgtcgatgactgctgtcgcttggtatatcaacgatatgaaacggaagcaagaacacgcggcccggcttcaggaggtgcagcggaggttgggcggctggacgggcccagaactgagcgccttcggggaactggtgctggagggcgcttttagaggtgggggtgggggagggcccaggcttcgtggcggggagagactgctgtttctgttctctcgaatgctccttgtggctaaacggaggggcttggaatacacatataaaggacacatattttgctgcaatctgagcgtctctgagtccccgagagacccactgggattcaaggtctcagatctgaccatccctaagcacaggcatctgctccaggccaagaatcaggaggagaaacgcttgtggatacattgccttcagagactgttttttgaaaaccacccagcctccatccccgccaaagcaaagcaggtgctgctcgaaaatagccttcactgtgctccaaaaagcaaaccagtcctggaaccactgaccccacctctgggcagtcctcggccgcgggacgccagatcatttactcccggacgccggaacacggcccccagccccggcccatcagtgatacgtcggggcaggagacagtccgaacctgtgaaggacccctatgtgatgttcccacaaaatgcaaagcctggcttcaaacatgccgggtctgagggcgaattatacccgcctgaatctcaacctcctgtatcaggtagtgccccaccagaggacttagaggatgccggaccccccacactggacccttctggtacctctatcacagaagagatcctcgaactgctgaaccagcgtggtttgagggacccaggtccaagcactcacgatatccctaaattcccaggagacagccaggtgccgggcgactctgagaccttgacgtttcaggcgctgccaagcagggattcatccgaggaagaggaggaggaggaagaggggctggaaatggatgagagaggtccatctccgctgcatgtcttggagggcctggagtcatcaatcgctgccgagatgccctctatcccctgcttgaccaagattcccgacgtgccaaatttgcctgagattccttctcgctgtgagatccctgaaggctcacgactaccatccttgtctgatatcagcgatgttttcgaaatgccttgcttaccagctattccaagcgttcctaatactccttcactctcatctacgcctacacttagttgcgacagttggctccagggccccctccaggaacctgcggaagcacccgctacccggcgggaacttttcagtggatccaatcctgggaaactcggggagccgccctcaggcggaaaagccggccctgaggaagatgaagagggtgtgtccttcacggactttcagccacaagacgtcacgcagcaccagggctttcccgatgagctggcgtttcggagctgctccgaaatccgctctgcttggcaagcacttgagcagggccagctggcgcgtccaggctttccagaacccctattaattcttgaagacagtgatcttggcggagactccgggagcggcaaggccggcgctccttcaagcgagcgtactgcttcccgggtgagggagctcgcaagactgtattctgagaggatccaacagatgcagcgagcagagacccgggcaagtgctaacgctccacgcaggcgtcctagggtcctcgcacagccacagccttccccttgtcttcctcaggaacaggctgagccgggcctactccctgcatttggtcacgtgttagtgtgcgaactggcgttccctttaacatgtgctcaggaatccgttccattgggtccagccgtctgggtgcaggcagcaatccccttatccaagcaaggcgggagtccagatggacaggggctccatgtgtcaaacctccctaagcaggacctgccaggtattcatgtatcagccgcgaccttgttaccagagcagggaggctctcgccatgtacaagcacccgccgccactccgttgcccaagcaggaagggccactgcacttacaggtgcctgctttgactacattcagcgatcaggggcacccagaaatacaggtcccagcgactactccactccccgagcatcggagccacatggtgattcctgcaccctctacagcattctgccccgagcagggacactgtgctgacatacatgttccgaccactcctgccctcccaaaggaaatttgcagcgacttcactgtttctgtgactaccccggttcctaagcaagaagggcacctggattctgagtcacccactaatattccacttactaaacagggaggctccagagatgtacagggccccgaccctgtctgcagccaaccgattcagcccctgagctggcacgggtcttcactcgacccccagggcccgggggataccctgcctcctttgccctgccacctgccggacctgcagattccagggacttctcctctgccggcccatggcagtcaccttgatcatcggattccggctaatgctcccttgtcgttgtcacaggaactgcctgatacgcaggtgccagccactacccctctccctttgccccaggtcttgactgatatttgggtccaggccctccccactagcccgaagcagggaagcctgcccgacatccagggtcctgccgccgccccaccactccctgagcccagtttgacagacacccaggttcagaaactcacaccctctctggagcagaaaagtctgatagacgcccacgtccccgccgcaacgcctctgccagagagggggggctctttggacatccaaggactgtctcccacgcctgtgcagacaacgatggtgttgtccaaaccaggtggctcgctggcctctcacgtggcccgcaatttatgggcttttaccgggcctcgaggattgctgatgcccccttctacgtgtgagcccgggcatgaagcctctctaaagcagggtttccagccagacgccatcgacccccaaaacctgacatggaagtcacgccactag

SEQ ID NO: 16705 - DNA, 1128 bp, synthetic construct
  misc_feature 1..1128: note = Description of Artificial Sequence: Synthetic coding sequence
  source 1..1128: mol_type = other DNA
atgatgaagaagaataattcggccaaaaggggcccacaagacggcaatcagcagccagcacctcccgaaaaggtcggctgggtgaggaagttctgtggaaagggaatctttcgtgagatctggaaaaatagatacgtggtgttgaagggagatcagctgtatatttctgagaaggaggtgaaagatgagaaaaacattcaggaggtctttgacctctccgattatgaaaaatgtgaggaattgagaaaatccaagagtcgttccaaaaaaaaccacagcaagtttaccctggcacatagcaagcagcccggaaacactgctccaaacctcatctttctggcagtctctccagaagaaaaagagtcctggatcaacgctctcaattctgcaatcacgagggccaaaaaccgaatcctggatgaggcatctacgagcacatctgacggaatgcttacccttgacctgattcaggaagaggaccctagcccagaggaacccacaagttgtgctgaatctttcagggtagacctggataaatccgttgcccagctggctgggtcccgacgcagggcagactcagataggatccagccaagcgccgatagagcgagtagtctgagtaggccgtgggagaagaccgataagggcgccacttatactccgcaggcgcctaagaagctgacccctaccgaaaagggaagatgtgcctccctcgaagagatcttgtcccagcgagatgccgcatcagctagaacgcttcagctaagggcagaagagcccccaacccctgcattgcccaaccctggccagctatctcggatccaggatctagtggcccggaagctcgaagagacccaggaactccttgccgaagttcaaggcctcggtgacggtaaacgtaaggcaaaggacccacctcgcagccccccagatagcgagtcagaacagctcttgctcgagaccgagagacttctgggggaagcttcctctaactggtctcaggcaaagagggtcttgcaagaagtgagagaactaagggacctgtacagacagatggaccttcagacccccgactctcacctccggcagaccactccgcattctcagtatcgcaagagtttaatgtag

SEQ ID NO: 16706 - DNA, 1230 bp, synthetic construct
  misc_feature 1..1230: note = Description of Artificial Sequence: Synthetic coding sequence
  source 1..1230: mol_type = other DNA
atgatgaagaaaaacaactctgcaaaacggggtccacaggacggtaaccaacaacccgccccacccgaaaaggtgggctgggtgcggaagttttgtgggaagggtatctttcgagaaatttggaagaatcggtatgtggtgctgaaaggcgaccagctctacattagtgaaaaagaagttaaagatgaaaagaacatccaggaagtcttcgacctaagcgattatgaaaaatgtgaggagctcagaaagtcaaagtctcgcagcaagaagaaccattccaagtttaccctggcacacagcaaacagccgggcaatacagctcccaacctcatctttttggctgtcagccccgaggagaaggagagctggataaacgcactcaattcagccatcactcgtgccaagaaccggatcttggacgaggttactgtggaggaagatagttaccttgcccaccctaccagagaccgagctaagatacaacacagtcggcggcctccaaccagggggcacctcatggcagtagccagtaccagtacaagcgacggcatgcttactttagatcttatccaggaagaggatccctcccccgaggaacctactagctgcgccgagtcattccgagtcgatctcgacaaaagcgtggcgcaacttgctggtagcaggagaagggcagatagtgaccgaatccagccgagtgccgatcgcgcctctagcctaagccggccttgggagaagacagacaaaggcgcgacatatactccccaggcacctaagaagttaacccccactgagaagggccgatgtgcgagcctggaggaaatcctgtcccagagagacgccgctagtgccaggaccttgcagctgagggcagaggaaccccccacacccgctctccctaaccctgggcagctctctaggatccaggacctcgttgcccgcaagctggaggagacccaagaacttctggcagaagtccaaggactgggagatggaaaacggaaggcaaaagatcctccgagatccccccctgatagtgaaagcgagcagctgctccttgaaaccgaacggttgctgggagaagcatctagtaattggtcccaggcaaagcgcgttctccaggaagttagggaactcagagatctgtatcgccaaatggacctccagacgcccgatagccatctgcgccagaccactccgcatagtcaatatcgaaagtccctgatgtag

SEQ ID NO: 16707 - DNA, 681 bp, synthetic construct
  misc_feature 1..681: note = Description of Artificial Sequence: Synthetic coding sequence
  source 1..681: mol_type = other DNA
atgttgacacttgacctgatccaggaagaagacccctcccccgaagaacccaccagctgcgcagaaagtttcagggtagatttggacaagtctgtagcccagctcgctggatcaaggagacgagccgacagcgacagaattcagccttctgcggaccgagcatctagtctctcacggccctgggagaaaaccgacaagggtgcgacctacaccccccaggcacccaagaaactgactccaaccgaaaaaggccgctgtgcatcactggaggagatcctgtcccagagagatgctgcttccgcacgcaccttgcagttaagggccgaggagccacccacgccagctttgcctaatcccggccagctgagtcgcatccaggaccttgttgcacgcaagctggaggaaactcaagaacttctggctgaagtccagggccttggagacggcaaacggaaagccaaggacccacctcggagccctcctgattctgagtccgagcagctgctcttggaaacggaacgtctgcttggagaagcctcttcaaattggagtcaggcgaagcgggtgctgcaagaggtgagagagctccgcgatctgtatagacagatggatctccagaccccagattctcatctgcggcaaaccacaccgcactcccagtaccgaaaatccctgatgtag

SEQ ID NO: 16708 - DNA, 675 bp, synthetic construct
  misc_feature 1..675: note = Description of Artificial Sequence: Synthetic coding sequence
  source 1..675: mol_type = other DNA
atgccaagtactctgccctcccccgaaccacgcaccgtctcctggatgagcacgtcactccaagtgactgttgaggaagattcctacctggctcacccaacacgcgatagagccaaaattcagcactccagacggccccccaccagagggcacctcatggcagttgccagcaccagcaccagtgacggcatgcttaccctagacctgattcaggaagaagacccctcacccgaagagcctacatcatgcgcagaaagtttcagagttgatctcgacaagagcgtggcacagctggctggctccagacgaagggccgactccgacagaattcaaccctccgcagacagggcctcaagtttgagcagaccatgggaaaaaacagacaagggagcaacctatacaccccaggcccccaagaagttgacacctactgaaaaaggccggtgcgccagcctcgaggaaattctctctcagagagatgccgccagtgcaaggaccttacagcttagagctgaggaaccccccactccagcactgcccaaccctgggcaactgagtcgcattcaggacctcgtcgctcgaaagctggaggagacccaagaattactagccgaggtccaggggctcggggacgggaagaggaaagccaaagacccgcccaggtctcctccgtag

SEQ ID NO: 16709 - DNA, 384 bp, synthetic construct
  misc_feature 1..384: note = Description of Artificial Sequence: Synthetic coding sequence
  source 1..384: mol_type = other DNA
atgaccgcagcagcaaccgcaaccgtgctgaaggaaggggtgttggagaagcgctcaggcgggcttctgcagctctggaagaggaagcggtgcgtgctcactgaaaggggtctccagctcttcgaagctaagggcacaggggggaggcctaaagagctgtcttttgcgcgaatcaaagcagtcgagtgcgtagaatcaactggccgccatatctactttaccctggtgacggaggggggcggcgagattgatttccgttgtcccctagaggaccccgggtggaatgcacagatcacactgggcctggtgaagttcaagaatcagcaggcgatccagacggtgcgggcccgccagtcactcggtacaggtacactggttagttag

SEQ ID NO: 16710 - DNA, 384 bp, synthetic construct
  misc_feature 1..384: note = Description of Artificial Sequence: Synthetic coding sequence
  source 1..384: mol_type = other DNA
atgacggcagccgcaactgccactgttcttaaggaaggagtcttggagaagcgatcgggaggcctgctccagctctggaaaagaaaacgctgtgtgctcacagaacggggtctccaactgtttgaggcaaaaggaaccggaggtcgtccaaaggagctgtcttttgcaaggatcaaggccgtggagtgtgtggagtctactggaagacacatttattttacactggttacggaaggcgggggtgaaatagactttcggtgccctctagaggatcccgggtggaacgcacagatcaccctgggcctggtcaagtttaagaatcagcaggcgatccaaactgtgcgggcccggcagtccttgggaaccggaaccctagtttcttag

SEQ ID NO: 16711 - DNA, 1710 bp, synthetic construct
  misc_feature 1..1710: note = Description of Artificial Sequence: Synthetic coding sequence
  source 1..1710: mol_type = other DNA
atgtcgttcggaatcctcaagcccgacctgcgcattgtgttcgtccacaataaggcggtcatttggcaaaagtcccgggtgtctgatcacaaaatggctctcatgtccgttctgggcaccgccgttatgaacaatatggaaagtttccagtaccactctgaagagagccaaatctatctgagcggctttctgccaaaatgtgacgcagaccacagctttaccagtctgtccaccccagagcgcagctttatctttattaatagtaggcccgtgcaccagaaggacattctcaaactcattcgccaccactacaatcttaagtgcttaaaggaatcaactcggctctaccccgtgttcttcctgaagatcgatgtgcccaccgcagacgtggacgtaaatctgacgcccgataagagtcaagtgctgttgcaaaacaaggaatctgtcctcattgctctggagaatctgatgactacctgctacggacccctgcctagcacaaattcttacgaaaataataagaccgacgtgagtgctgcggatattgtcctgtccaagactgccgaaaccgatgtgttgttcaacaaagtggagtcttcgggaaagaattattctaatgtagacacttctgtgataccttttcaaaacgacatgcacaacgacgagagtgggaagaacacggacgactgtctgaaccaccaaatttccattggcgatttcggctacggccactgctccagtgagatttctaacattgacaaaaataccaaaaatgcatttcaggacataagcatgagcaatgtctcttgggaaaattcccagaccgagtacagcaagacctgtttcatctcctccgttaagcatacccagtccgagaacggaaataaggaccacatcgacgagagcggggaaaatgaagaagaagccgggctggaaaacagctctgagattagcgccgatgaatggtcgagagggaatattctcaaaaattcagtgggagaaaacattgaacccgttaagatcctggtgcccgagaaatcccttccctgcaaagtcagcaacaataattatccgatccccgagcagatgaatctaaacgaggacagttgtaacaagaagagcaatgtgatcgataacaagtccggcaaggtgaccgcctacgacttgctgagcaatcgtgtgatcaagaagcccatgagcgcttctgcactctttgtgcaagaccacagaccacagttcctgattgagaacccaaaaacctccctggaagatgccacccttcagattgaggagctatggaagacgctctccgaagaggagaaactgaaatatgaggaaaaggccaccaaagacttggaaagatacaattcacagatgaagagggcaatcgaacaggagtctcagatgagtctaaaagacggccgcaaaaaaattaaaccgacatcagcttggaatctggcgcagaaacataaattgaaaacctcactgtcaaatcagcccaaattggatgagctcctacagtcccagatcgaaaaacgcaggagtcagaatatcaagatggttcagattccattttctatgaaaaatctcaagattaacttcaagaagcagaataaggtggacttagaagaaaaagacgagccatgcctaattcacaacttgaggtttcccgatgcttggttaatgacctcaaagacagaatctttttag

SEQ ID NO: 16712 - DNA, 2271 bp, synthetic construct
  misc_feature 1..2271: note = Description of Artificial Sequence: Synthetic coding sequence
  source 1..2271: mol_type = other DNA
atgtcctttggcattttgaaacccgatttacggatcgtctttgtacacaataaagccgtgatctggcagaaatctcgcgtgtctgaccataagatggctttaatgagtgtgctcggtactgccgtgatgaacaacatggaaagcttccagtatcacagtgaagaatcacagatctacttaagtggattcctgcctaagtgtgacgcggaccattcctttaccagcctctctacccctgagcgaagctttattttcattaactcacggcctgtgcaccagaaggatatactcaagctaatacgccaccattataaccttaagtgccttaaagaaagcacccgcctgtatcccgtgttcttcctgaagatcgacgtacctaccgctgacgtggatgtcaatctgactcctgacaaatcacaagtgttgctgcagaacaaagaatcagtgctgattgccctcgagaatctgatgacaacctgctacggtccattaccgtccactaatagctacgagaacaacaagacggatgtgtccgccgccgatattgtgctgagcaaaactgccgaaactgatgttctattcaataaagtggagagctcagggaaaaattactccaacgtggatacctctgtcatcccattccagaacgatatgcacaatgatgaatcagggaaaaacactgacgactgcctgaaccatcagatatcgatcggagatttcggttatggccattgctcaagtgaaatctctaatatcgacaaaaacaccaagaacgccttccaggatatttccatgagcaacgtctcctgggaaaacagccaaacagagtactccaagacctgttttatctcatccgtgaaacatacacagtcagagaacggtaacaaagaccacattgacgaatctggcgagaacgaagaagaagccggactggaaaacagcagcgagattagcgcggacgaatggagtaggggcaacattctaaagaactcagtgggggagaatatcgaacctgtgaagatactggtgcccgaaaaatccctgccctgcaaggtgtccaataacaattacccaatcccggagcagatgaacctcaacgaagatagttgtaacaaaaaatccaatgtcattgataataaaagtgggaaggtgactgcttacgatttgctgtccaacagagtgatcaagaagccaatgagtgcaagtgccctgtttgtgcaggaccacagaccccagttccttattgaaaatcccaagacttcactcgaggacgcaacattgcagattgaagaactgtggaagacactgagcgaagaggaaaagctcaaatatgaggagaaagcaactaaggacctcgagcgttacaacagccaaatgaaaagggcaatcgagcaagagtcacagatgtcgctgaaagatggccgaaagaagattaagcctacctcggcttggaatctcgcccagaaacacaagctgaagactagcctaagtaatcagccaaaattggatgaactgctacagtcccagatagagaagaggcgatctcagaatattaaaatggtgcagattcctttctctatgaagaaccttaagatcaattttaaaaaacagaataaggtcgacttggaggagaaagacgaaccgtgtcttattcataacttgcgcttcccagatgcatggcttatgacctccaaaacagaggtgatgctgttaaacccctatcgcgtcgaagaagccctattgtttaagcggctgctggaaaaccacaagttgcccgcggagccactggagaaaccgataatgctcactgagtccttatttaatggctcccattacctagatgtgctgtataaaatgacagctgatgatcagcggtatagcggcagcacgtacctgagtgacccaaggcttactgcaaacggattcaaaataaaactcatccccggcgtatcaataaccgaaaactacctggagatcgaaggcatggcaaattgcctccctttctacggagtggccgacctcaaggagatcctgaatgccatactcaacagaaatgccaaggaggtctatgaatgtagaccacgcaaggtcatcagctatctcgaaggggaagctgtacgcctgagccggcagctgcccatgtacctgtccaaggaggacattcaggacataatctaccgaatgaagcatcagtttggcaatgagattaaggagtgtgtccatggtcgccccttcttccaccatctcacgtatttgcctgaaacgacatag

SEQ ID NO: 16713 - DNA, 222 bp, synthetic construct
  misc_feature 1..222: note = Description of Artificial Sequence: Synthetic coding sequence
  source 1..222: mol_type = other DNA
atgaaacagctgcccgctgcaaccgtgaggttattgagctcttcccagatcattacttcagtcgtcagcgttgtgaaggagctgatcgaaaattctctggatgctggagctactagcgtagatgtgaagctggagaattatgggtttgacaaaattgaagtgcgtgataacggagaagggatcaaggctgtagacgcgcctgtgatggctatgaagtattag

SEQ ID NO: 16714 - DNA, 585 bp, synthetic construct
  misc_feature 1..585: note = Description of Artificial Sequence: Synthetic coding sequence
  source 1..585: mol_type = other DNA
atgaagcagcttcctgctgccaccgtccgcttactgtctagctcgcagataattacaagcgtggtgtctgtagtgaaggaactgatcgagaacagcttagatgccggcgcaacctccgtagatgtgaagctggagaactatggctttgataaaattgaagtaagggataatggggaaggtattaaggctgtggacgctccagtcatggccatgaagtattatacctcgaagataaattctcatgaagatctggagaatctgaccacttacggatttcggggtgaggctctgggctccatttgttgcattgcagaggttctgattactacaagaaccgccgctgataacttttcgacacaatatgtccttgacggctctggacacatactgtcacagaaaccctcccacctgggccagggtactacagtgactgcactgcggttattcaagaatctacctgttagaaagcagttttacagcaccgccaaaaagtgtaaggacgaaatcaagaagattcaggacctcctgatgagttttgggattctgaaacccgatctgaggattgtctttgtgcataataagtag

SEQ ID NO: 16715 - DNA, 2271 bp, synthetic construct
  misc_feature 1..2271: note = Description of Artificial Sequence: Synthetic coding sequence
  source 1..2271: mol_type = other DNA
atgtctttcggcatcctgaagcccgacttgcgcatcgtcttcgtccacaacaaagccgtgatttggcagaaatcacgtgtcagcgaccacaagatggcgttgatgagtgtgctgggcaccgccgtcatgaataatatggaatccttccaataccattctgaggaatcgcagatttacttgtctggctttttaccaaagtgtgacgcagaccacagctttacatctctgtccaccccagagcgatccttcattttcattaactctcgccccgttcatcagaaagatatcctgaagctgattcgccatcactataatctaaagtgtttaaaagagtcgactcgactgtacccggtgttcttcctgaagatcgatgttccgactgccgacgtggatgtaaacttaacccccgataaatcacaggtgcttctacagaacaaagagtccgtcctgatcgccctggaaaacttgatgaccacatgctacggacctcttcctagcactaattcttatgagaataataaaacagacgtttccgcggccgacatagtgttgtcaaagactgcagagactgatgtcttattcaacaaagttgaaagtagtggaaaaaactattccaatgtggatacaagcgtgattccatttcagaacgacatgcataatgacgagagtggtaagaataccgacgactgcctgaatcatcagatttcaatcggtgacttcggctatggccactgttcatcagagatcagcaacatcgacaagaacacaaaaaacgccttccaagatatttctatgtcaaatgtgagctgggagaactcgcagacagaatactccaagacctgcttcatttcaagtgtgaaacacacccagagcgagaatggcaataaggatcatatcgacgagtctggcgagaacgaggaagaagctggcctggaaaatagtagcgaaattagtgcagatgaatggtccaggggaaacatcctgaaaaatagcgtgggggagaacatcgaacctgtaaaaatcctggtacccgaaaaatcactcccatgcaaagtgagtaataacaactaccctatccctgagcagatgaacctaaatgaagactcttgcaataagaagtctaatgtcattgacaacaagagcggtaaggtgactgcttatgatctgctgagcaacagagtgataaagaagcctatgtcagcaagtgctctgttcgtccaggatcacaggcctcagttcctgattgagaacccgaaaacaagtttggaagatgctaccttgcaaatcgaagagttatggaaaaccctttcagaggaagagaagttgaaatacgaagaaaaggcaacaaaggacctggagaggtacaattcccagatgaagcgcgcaatcgaacaggagtctcagatgagtctcaaagatggcaggaaaaaaataaaacccacctcggcctggaacctcgcccaaaagcacaagctcaagacctctttgagtaaccagcccaagttagatgaacttctgcagtcgcagatagagaagaggcgcagccaaaatattaaaatggtacagattcccttttctatgaagaatttgaagatcaactttaagaagcaaaataaagtggatcttgaggaaaaggacgagccttgcctgattcataatttgagatttccagatgcttggttgatgacatcgaaaacagaagtcatgcttcttaacccatacagggtggaggaagctctgctgtttaaaaggctgttggagaatcacaagctgcctgccgagccactggagaaacccatcatgcttacagagtccttatttaatggatcccactatctcgatgtgctatacaagatgaccgcggacgaccaacgatatagcggttccacatacttgtccgatccccgcctgaccgcaaatggcttcaagatcaagctcatcccgggcgtctccatcactgagaactacctcgaaatcgaagggatggcaaactgtctgcctttttacggagtggccgacctgaaagagattctgaatgccatactgaatcgaaatgcgaaggaggtatatgagtgtcgcccacgaaaggttattagctacctggagggggaagccgtcagactgtccagacagttgcccatgtatctgagcaaggaggatatccaggacatcatttatagaatgaagcatcagttcgggaatgagattaaagaatgcgtacatgggcgtcccttctttcaccacctcacctacctgccagaaaccacgtag

SEQ ID NO: 16716 - DNA, 2799 bp, synthetic construct
  misc_feature 1..2799: note = Description of Artificial Sequence: Synthetic coding sequence
  source 1..2799: mol_type = other DNA
atgaagcagctcccagccgcaaccgttaggcttctttcttcatcccaaatcatcaccagcgttgtttctgtggtcaaggagctcatagaaaatagcctggatgccggagcgacttctgttgatgtgaaattagaaaactacggatttgataagattgaggtgcgggataatggtgaaggcattaaggccgtggatgcacccgtgatggctatgaaatattatacttccaaaatcaatagtcacgaggacttagaaaacttaacaacttacgggtttaggggggaagccctcggttctatttgctgtatcgctgaggtgctcataactacaaggacagccgcagataatttctccacacaatacgtcctggacggatctggccatatcttatctcaaaaaccatcccacctcggacaagggacgaccgtgactgctctgagactgtttaaaaatcttcccgttcgcaagcagttctactcaactgctaaaaaatgtaaggatgagatcaagaagatccaggatttgctaatgtcttttgggatccttaaacctgacttgaggatcgtcttcgtgcacaacaaagcagttatctggcaaaagagccgggtgtcagaccataagatggcgctgatgtcggtgctggggacagccgtgatgaataacatggaaagttttcagtaccatagcgaggagtcacaaatatacctctcaggtttccttcctaagtgcgatgccgatcatagtttcaccagcctgagcacccccgagaggagctttatcttcataaactccaggcccgtccaccagaaagacatcctaaaactgattagacaccattacaacctgaaatgtttgaaggaaagtacacgtctgtatccagtgttctttttgaaaatcgacgtccccactgccgacgtcgatgtcaatctaaccccagacaagtcccaggttctgctgcagaataaggaatctgtgctgattgccctcgagaatctgatgaccacttgttatggcccactcccctccaccaactcttatgaaaacaataaaaccgacgtctcagctgccgacatcgtcctcagcaaaaccgcagaaacagacgtcttattcaataaggtcgagagttcagggaagaactattctaatgttgacacctccgtcatcccattccagaacgacatgcacaatgatgagtcggggaagaacaccgatgattgccttaaccaccagatctccatcggagacttcggctatggacactgttcaagcgaaatctcaaatatcgacaaaaacacaaagaatgcttttcaggatatctccatgagtaatgtcagctgggagaactcacagaccgaatattcgaaaacgtgtttcattagtagtgtcaaacacacgcagtctgagaatggtaataaggatcatatcgacgagtctggggagaacgaagaagaagcagggcttgagaatagctcagagattagtgcagacgagtggtccagggggaacattttaaaaaattctgtgggggaaaacatcgagccagtaaagatccttgtcccggaaaaaagtctgccatgcaaggtgtcaaacaataactacccgatccctgaacaaatgaatctgaatgaagatagttgcaacaaaaaaagcaacgtgattgacaataaaagtggaaaagttaccgcgtacgatctgctgtctaaccgtgtgattaagaagcctatgtccgcaagtgcactgtttgtccaggaccatagaccgcagttcctgatagaaaacccaaaaacctcactcgaagacgccaccctccagatcgaggagctgtggaagacactttcagaggaggaaaagctgaagtacgaagagaaggctacgaaagatctggaacgctataattcacaaatgaaaagggctatcgagcaggagtcacaaatgtcactgaaggatggaagaaagaagattaaacccacctcagcctggaacctggctcaaaagcataaactgaagacgtccttgagcaaccagcctaagctggatgaattgctgcagagccagatcgagaagcgtagaagccagaatatcaaaatggtgcaaatacctttcagtatgaagaatctcaagattaactttaagaagcagaataaagtcgacctggaggagaaagacgagccttgcctgatacataatctccgattccccgacgcctggctgatgacaagcaagactgaggtgatgctactgaacccgtacagagttgaagaggcacttctcttcaagcgactgttggagaaccacaagctgcctgctgagcctttggagaagcccataatgctcactgaaagtctttttaatggaagtcactacctggatgttctctataagatgacagctgacgatcaacgatacagcggctcaacctacttaagcgatcctaggcttacagccaacggctttaagatcaagcttatacccggcgtgtcaatcactgaaaactacttggaaattgagggcatggctaactgcctgcccttctatggggtagccgaccttaaggagatcctaaatgcaatattgaacaggaatgcaaaagaggtctacgagtgccgtccccgcaaagtgatttcgtacttggagggagaggccgtgcgccttagcaggcagctcccgatgtacctatctaaggaggatattcaggatataatttatcggatgaaacatcagtttggcaacgaaataaaagaatgtgtgcacgggagaccattctttcaccacctgacctacttgcctgaaaccacatag

SEQ ID NO: 16717 - DNA, 135 bp, synthetic construct
  misc_feature 1..135: note = Description of Artificial Sequence: Synthetic coding sequence
  source 1..135: mol_type = other DNA
atgaaacagctgcccgccgctaccgtcagactgctttctagtagtcagattataacgtcagttgtaagcgtcgtaaaggaactcatcgagaactccctggatgccggggccactagcgttgatgtgaagctgtag

SEQ ID NO: 16718 - DNA, 2313 bp, synthetic construct
  misc_feature 1..2313: note = Description of Artificial Sequence: Synthetic coding sequence
  source 1..2313: mol_type = other DNA
atgaaacagcttccagccgctaccgtgcggctcctgagttcttctcagataatcacatctgtcgtctcggtggtgaaagaactgattgagaactctctggacgctggagccaccagcgtagacgttaaactcgaaaactatggattcgataaaatagaggtcagggataacggtgaaggtatcaaggcagtggatgctcctgtgatggcaatgaaatattacaccagtaagatcaactctcacgaagatctggagaacctgacgacctatggcttccgcggagaggctctcgggtccatttgttgcattgcagaggtgttaataacgaccagaaccgccgccgataacttctcgactcagtacgtgctcgatgggtcgggccacatcctgagccagaagccgtctcacttagggcagggcactactgtcactgcgctccggcttttcaagaacctgccggtccgcaaacagttctacagcaccgcaaagaagtgcaaggacgaaattaagaagatccaggatctcctcatgagcttcggcatactaaaaccagacctgaggatcgtgtttgttcataacaaagcagtgatctggcagaaaagtagggtaagcgaccacaagatggccctgatgtctgtgctcgggacagccgtgatgaataatatggaatcgtttcagtaccattcggaggagagtcagatttacctctctggattcttgcccaaatgcgacgcagaccacagcttcaccagcctaagtactcccgaacgatcattcatttttattaatagcaggccggtccatcagaaggatattctaaagctgattagacatcactacaatctgaagtgtctgaaagaatctactagactgtaccctgtgttctttttgaaaattgacgtccccacagcagatgtggacgtgaacctcactcccgataagtctcaggtgcttctgcagaataaggagtctgtcctgatcgcgctagagaatcttatgaccacgtgttatggcccgctgccttctactaactcttacgagaacaacaaaaccgacgtgagcgccgctgacatcgtcttgagcaaaactgcagaaacagacgtgctgtttaataaagtcgaatctagcggcaaaaattactccaatgtggatacttctgtgatcccgttccagaacgatatgcataacgacgaatccggtaagaacaccgatgattgcctgaatcaccagatctccataggcgatttcgggtatgggcattgcagctcagagatcagcaacatcgacaagaacactaagaacgcctttcaggatattagcatgtctaacgtgagctgggaaaatagtcagacagagtacagcaaaacttgctttatttctagcgtcaaacacacacagagtgaaaatgggaataaggaccacattgacgagtctggcgaaaacgaggaggaagccggactcgaaaattcctcggagatatctgcagatgaatggagccgcggtaatatcctgaaaaactcagtgggagagaatatcgaaccagtgaagatccttgtgcccgagaaaagcctgccgtgcaaggtgtccaataataactacccgattccggagcagatgaacctgaacgaagattcctgtaacaagaagtccaacgtcattgataataagagtgggaaagtcacggcctacgaccttttgtcaaaccgtgtgatcaaaaaacctatgtcggcttctgcgttgtttgtgcaggatcaccggccccagttcttaattgagaatccaaagacatccctcgaggacgccactctccagattgaggagttgtggaagaccctgagtgaggaggagaaactcaacctgtttaacggcagccactatctcgatgtcctgtataaaatgacggcggacgaccagcggtattctggaagtacttatctgtctgacccccgcctgaccgccaacggctttaagataaaactgattcctggtgtgtcaataacagagaactacctagaaatcgaggggatggcaaactgcctcccgttctatggagtggccgatctaaaagagatcttgaacgccattctgaaccggaacgccaaagaagtgtacgagtgccgccccagaaaagtgatctcttacctggagggagaggccgtccgactgagtagacaattacctatgtatctatccaaggaggatatccaggatatcatctaccgaatgaaacatcagtttggtaatgagatcaaggagtgcgtccacggtcggccattctttcatcacctgacgtacctccctgaaacaacatag

SEQ ID NO: 16719 - DNA, 2682 bp, synthetic construct
  misc_feature 1..2682: note = Description of Artificial Sequence: Synthetic coding sequence
  source 1..2682: mol_type = other DNA
atgaaacagttaccagccgctacagtgagactcttgtcatcatcccagataatcacctcagtcgtgtcagtggtgaaggagctgattgagaactctctcgatgccggggccaccagcgttgacgtgaagctcgagaactatgggtttgacaaaattgaagttcgcgacaacggtgaaggaattaaagcagtcgatgcaccagtgatggctatgaaatactatacgagtaagatcaatagccacgaggatttggaaaacctgaccacttacgggttccgcggggaagccctgggctccatctgctgcattgctgaagtactgattactacgaggaccgccgcagataatttttctacacagtacgtgctggacggctccggccatattcttagtcagaaacccagccacttagggcaaggtaccaccgtgacagctttacgactgttcaagaacctccccgtgcgcaagcagttctattcaacggcaaagaagtgtaaagacgagatcaagaagattcaagacctgcttatgagttttggcatactaaaacctgatttgcgaattgtgtttgtccataacaagatttacctgagtggctttcttccgaaatgtgatgcagaccactcgttcacctccttatctacccccgagcggagtttcatctttattaactcaaggccagttcaccagaaagacatccttaagctgattcgacaccactacaacttaaaatgtctgaaggagtctacacgactatatccagtgttcttcttgaagattgacgtcccgactgccgatgtggacgtaaacctgacccctgataaatcccaggtcctgttgcaaaacaaggagagtgtgctgatcgcccttgagaatctcatgactacttgttacgggcccctaccctctactaattcatatgagaacaacaagaccgatgttagtgccgcggatattgtgctgtctaagacagccgaaactgacgtgctcttcaataaagtggaaagctccggaaagaattactccaacgtggatacatcagtcattccttttcagaatgatatgcacaacgacgagagtggcaaaaacaccgacgactgtctcaaccatcagattagcattggggactttgggtacgggcattgttcatctgagatatcaaatatcgacaagaatactaagaacgcattccaggacatttccatgtctaacgtctcctgggagaatagccagactgaatactcaaaaacgtgcttcatatcctccgtcaaacatactcagtccgagaatgggaataaggaccatatcgatgagagcggagaaaatgaagaagaagcaggattagagaactcgagcgagatctcggctgatgaatggtcacgtggcaacattctcaagaactcagtcggagagaacatcgaacctgtgaaaattctggtcccagaaaaaagcttgccatgtaaggtatccaacaataactacccaatacccgagcagatgaacttaaatgaggactcctgtaacaaaaaaagcaacgtgattgacaataagtcaggcaaagtcactgcctacgacctgctcagcaaccgtgtgatcaaaaaacctatgagcgccagtgcgctgtttgtgcaggatcaccggccacagtttctgattgagaatcccaagacaagcctggaggatgcaacactgcagattgaggaactgtggaaaaccttgtccgaggaggagaagctgaaatacgaagagaaagcaactaaggacttggaacgatataattcccagatgaaaagagccattgagcaggagtcgcagatgtctctgaaggatggcaggaagaagatcaagccaactagcgcttggaaccttgctcagaaacacaagcttaagacctccctctctaatcagcccaagctggacgaactgctgcaatcgcagattgagaaacggagatctcagaatatcaaaatggtccagatccccttcagcatgaaaaatctcaagatcaattttaagaagcaaaacaaggttgacctggaagaaaaggacgaaccgtgcttgattcacaacctacgattcccagacgcatggctcatgacatctaagactgaggtgatgttgcttaacccataccgcgttgaggaagctctcctgttcaagcgtctgctcgagaaccacaaactaccagcagagcctctggagaagcctatcatgcttaccgaaagtctttttaacgggagtcactatcttgatgtcctgtataaaatgacagcagatgatcagcgctatagtgggtccacttaccttagcgaccctcgcttaacagccaacggattcaaaatcaagttaatccctggcgtaagcataaccgaaaattacctggagatcgagggcatggcaaactgcctgcccttctacggagtagctgacctgaaagaaatcctgaacgcaatcctgaatcggaatgccaaagaggtgtacgagtgccgtccaagaaaagtgattagttacctcgagggtgaagcagtgagactgagccgccaactcccaatgtatctcagtaaggaggatattcaagacatcatatatcgtatgaaacaccaatttggcaatgagattaaggaatgcgtgcatggcaggcccttctttcaccacctgacgtacctccccgaaaccacctag

SEQ ID NO: 16720 - DNA, 2589 bp, synthetic construct
  misc_feature 1..2589: note = Description of Artificial Sequence: Synthetic coding sequence
  source 1..2589: mol_type = other DNA
atggagcgagccgagagttccagtaccgagccagctaaggcgattaaacctattgaccggaaatccgtgcatcaaatttgctccggacaagtagttctgagcttgagcaccgcagttaaagagctcgtggaaaattcactggatgctggcgccactaacattgatttgaagctaaaggactatggagtcgacttgatcgaggtgtcggacaacgggtgcggcgtggaggaggaaaactttgaaggactaactctcaagcaccatacttctaaaatccaggagtttgccgatctcacacaggtggaaacgtttggttttcgcggagaagctctgagctctctatgcgcattatccgacgttaccatctcgacttgccatgcaagcgccaaggttggcaccaggctgatgttcgatcacaacggcaagatcatccagaaaaccccgtatcccagaccaagagggacaactgtgagtgtgcagcaactcttttccaccctgcccgtgagacataaggagttccagagaaatatcaagaaggaatatgctaagatggtgcaggtcctccatgcctattgtatcatctcagcagggatcagagtgtcttgtactaaccagctgggacagggcaaacggcaaccagtggtctgcactggtggttccccttctatcaaggagaatattggatcagtgtttgggcagaagcagttgcaatccctcatcccctttgtgcaacttcccccatccgattctgtctgtgaggagtatggactctcttgttctgacgcgcttcacaacttgttctatatctccggattcatcagtcagtgcacccatggcgtgggccgttcatcgactgacaggcagtttttcttcatcaacagacgaccatgcgacccagcgaaggtctgtaggctcgtgaatgaggtctatcacatgtataacagacaccaatatcctttcgtggtgctgaacatttcagtcgacagcgagtgtgtggatatcaacgttacccctgacaagagacagatactgctccaggaggagaagcttctgctggccgttctgaagacttccctcatagggatgttcgattcagatgttaacaaactcaacgtgtctcagcaacctctgttagatgttgagggcaacttaatcaagatgcacgccgccgaccttgaaaaaccgatggttgaaaagcaagatcaatctccctctctccggactggggaggaaaagaaagacgtgagcatcagcagactgagagaggccttcagcctgcgacatacaacggagaacaagccgcattcccccaaaaccccagaaccccgcaggagcccactgggacagaaaagaggtatgttgagttcgagtacgagtggggccatttccgataagggcgtgctccgcccacagaaggaggccgtcagttctagccacggaccttctgatcctaccgaccgtgccgaggtggagaaagactctggtcatgggagcacttccgttgattctgaggggtttagtatccctgatactggctctcactgttcctcagagtatgccgcaagctctcctggtgatcgtgggagccaggagcacgtcgatagccaggaaaaggcccccaagacagatgattcgttctcagacgtggattgccactcgaatcaagaggacaccgggtgcaaatttagagtgctgccacagcccaccaacctggcaacgcccaacacaaagagatttaaaaaggaggagattctgagcagttccgatatttgccagaagctggttaacacccaggacatgtctgcctctcaggtcgacgtggctgtgaagatcaacaagaaagttgttccgctggacttctccatgtcttctttggcgaaaaggattaaacagctacaccatgaggcacagcagagtgaaggcgagcagaattacaggaaatttcgtgctaagatctgcccaggggaaaaccaagctgcggaggacgagcttaggaaagagatcagtaaaactatgtttgccgagatggagattatcggccagtttaaccttggattcatcatcactaaactgaatgaagacatattcattgtggatcagcacgcaacagatgagaaatataacttcgagatgctgcaacagcataccgtattacagggacagagactaatcgctccacaaacattaaatcttactgccgtgaatgaggcggtgctgatcgagaacttggagatctttcgtaagaacggctttgacttcgtcatcgatgagaacgctcccgtgaccgagcgggcaaagttaattagtctgccaacatctaaaaattggacgtttggaccgcaggacgtggatgaactgatcttcatgttaagcgactctcccggagtaatgtgtagaccatcgagggtgaagcaaatgttcgctagcagggcctgtcgtaaaagcgttatgattggcacagctttgaacacgtccgagatgaagaagctgattacgcacatgggtgagatggatcacccctggaactgtccccatggccggcctaccatgcggcatatcgcgaacctgggagtgatcagccaaaactag

SEQ ID NO: 16721 - DNA, 1386 bp, synthetic construct
  misc_feature 1..1386: note = Description of Artificial Sequence: Synthetic coding sequence
  source 1..1386: mol_type = other DNA
atggagcgggccgagagcagttccacggaacctgctaaggctatcaagccaattgataggaaatcagtccatcagatatgctccggccaagtcgtgttgtccctctctaccgcggtgaaggagctggtggagaactcactggacgctggagccacgaacatcgacctcaaacttaaggattacggagtggacctgatcgaggtgagcgataatggatgcggagttgaagaagaaaactttgaggggcttactttgaagcatcatacctcaaagatccaggagtttgcagacctcacacaggtggaaactttcgggttccgtggcgaggctctgagttccctatgtgctctttccgacgtcaccataagcacatgccacgccagtgcaaaagtgggaacgaggctgatgtttgaccataacgggaaaattatccaaaagaccccctacccaagaccccgcggtactaccgtcagcgtacagcaactgtttagcactctgcctgtccgccataaagaatttcagcgtaacataaagaaggaatacgccaaaatggtccaggtgttacatgcttactgtattatttcagctggcattcgggtatcctgtacaaatcaactcgggcagggcaagcggcagccagtagtttgtacggggggaagccccagcattaaggagaacattgggagcgtattcgggcagaagcagctgcagagcctcatcccattcgtacagctgcccccctccgatagcgtttgtgaagagtatggactgtcatgttcggacgcgctgcacaaccttttctacaagacaatgtttgccgaaatggagataataggccagtttaatctgggatttatcattaccaagctgaatgaagacatattcatcgtcgaccagcacgccactgacgaaaagtacaattttgagatgctgcagcagcacactgtgctgcagggtcagcggttaattgccccccagacactgaacttgacagcagtgaacgaagctgtgctaatcgaaaatctcgagatttttcgcaaaaacgggtttgattttgtaatagacgagaatgcgccagtcaccgagcgagccaaattaatttctcttccgacttcaaagaattggacgttcggacctcaggacgttgacgaactgatctttatgctaagcgactccccgggtgtcatgtgtcggccatcccgggtgaagcagatgtttgcatccagggcttgccgcaaaagtgtcatgatcggaacagctctcaatacatccgagatgaagaagcttatcacgcacatgggtgagatggaccacccctggaactgcccgcacgggcgtccaaccatgagacatatcgccaatctgggcgtcatctctcaaaactag

SEQ ID NO: 16722 - DNA, 2448 bp, synthetic construct
  misc_feature 1..2448: note = Description of Artificial Sequence: Synthetic coding sequence
  source 1..2448: mol_type = other DNA
atggaacgggctgaatcttctaggtcaaagctcaaagactacggcgtggacttgattgaggtgtccgacaacggatgtggggttgaggaagagaacttcgagggcctgaccctgaaacaccacactagcaaaatccaggaattcgctgacctaacacaggtcgagacattcgggttcagaggggaggccctgtccagcctgtgcgcgctatcagatgtgacaatttcaacatgtcatgccagtgctaaagtagggacgcgcctgatgttcgatcataatggcaagatcatccagaaaacaccctaccccagacccagaggcactacggtaagcgtgcagcagctgtttagcacgctgccagtgaggcacaaggagttccagcggaacatcaaaaaagagtatgccaagatggttcaggtcctccacgcctactgcattatttcggccggaatccgcgtatcctgcaccaaccaactgggacagggcaagaggcagcctgtggtgtgcacaggaggctctccctcaattaaggagaacattgggtctgtctttggccagaagcaattacagagtctgattccctttgtccagctccctccctctgattcagtgtgcgaggagtacggattgagttgtagcgacgcccttcataacctgttctacatttctggatttatttcacagtgtactcatggagtgggcaggtctagtactgatcgccagttttttttcatcaatcgcagaccttgcgaccctgccaaggtctgcaggctggtgaacgaagtttaccatatgtacaacagacatcagtatcccttcgttgtgttgaacatttccgtcgattcggaatgcgtggatattaacgttacacctgacaagcgacaaattcttcttcaggaggagaagctgctgctggccgtcttaaagacttcactcataggcatgttcgatagcgatgtaaataaactcaacgtgtctcaacagcccctcctggacgtggaagggaacctcatcaaaatgcatgccgcagatttagaaaaaccaatggtcgaaaagcaggaccagtctccgtcactgcggacgggagaggaaaagaaggacgtcagcatctccaggctgcgagaagccttcagcttgaggcacaccactgagaacaagccacactccccaaagactcccgaacccagacggtcacccctggggcaaaagcgcggcatgctatcctctagtacttcaggggccatctcagacaaaggagtgctgcggccacaaaaggaagcagtgtcatcttcgcacggaccaagcgacccgactgatagggcagaggttgaaaaggacagtgggcacggtagtacctcagtggatagcgagggattctccatccctgatactgggtcacactgcagtagtgaatatgcagccagttcacccggagaccggggttctcaggagcatgtggattcccaggagaaggccccaaagaccgacgactccttctctgatgtagattgtcactccaaccaggaggacaccggttgtaaattcagggtcctgccacagccaaccaacttagcaacacccaacactaaacggtttaaaaaagaggagattctctctagtagtgacatatgccagaagctggtgaacacgcaggatatgagtgcctctcaggtggatgtcgccgtgaagatcaacaagaaggtggttcccttagacttcagtatgtcctcattggctaagaggattaagcagctccatcacgaggcccagcagtcagagggtgaacagaactaccgtaaattcagagccaaaatctgtcccggagaaaatcaggccgccgaggacgaacttaggaaggagatctcaaaaactatgttcgcagaaatggaaattatcggtcagttcaacctggggtttatcattacgaagcttaatgaagatatattcatcgtggaccagcacgccacagacgagaaatacaactttgaaatgcttcaacagcatactgtgctgcagggacagagattgattgcaccacagactcttaacctgactgctgttaacgaagccgtgctgattgaaaacctagagattttccggaagaatggctttgattttgtgatcgatgagaacgcacccgttaccgagcgcgcaaagttgatcagtttgccaacctcaaagaattggactttcggccctcaagacgtcgatgaactgatcttcatgctgagcgacagtccaggggtcatgtgcaggccaagccgggtcaagcagatgtttgctagccgcgcatgtcgaaagtctgttatgatcggcacagcgttaaatacctcggaaatgaagaaactgattacacatatgggcgaaatggatcacccctggaattgccctcatggacgccccacaatgcggcacattgcgaacctgggggtgatatctcaaaactag

SEQ ID NO: 16723 - DNA, 1719 bp, synthetic construct
  misc_feature 1..1719: note = Description of Artificial Sequence: Synthetic coding sequence
  source 1..1719: mol_type = other DNA
atggaaagagcagagtcttctagcaccgagcctgctaaggctatcaagcctattgatcgcaagtctgtccatcagatttgtagtggccaagtagtgctatccctgtccacagctgtgaaggaactggtagagaacagcctcgatgcgggagctacaaacattgatttgaaactgaaggattatggagtggaccttatcgaggtttcagacaatggatgcggagtagaagaagagaacttcgaaggactcacattgaagcatcacacatctaaaatccaggaatttgccgatctcacacaggtggaaacttttggtttcaggggagaggctctatctagcctgtgcgctctttctgacgttaccatttctacttgccacgcatcagcaaaggttggaactaggttaatgtttgatcataacggaaagattatccagaaaaccccatacccaaggccgcggggcacaaccgtgagtgtacagcaattattctcaactctgcccgtcaggcacaaggaattccagcggaatataaagaaagagtatgctaaaatggtccaggtactgcatgcatattgcattatctcggctggtataagagtctcgtgtacaaaccagctggggcagggtaagcggcagcctgtggtctgcacggggggctcacccagcattaaagagaacatcggtagtgtctttggtcagaaacagctccagtcccttatccctttcgttcagctgcccccaagcgacagtgtgtgtgaggaatacggcctgagttgctccgacgctctacataatttattttatatctccggcttcatctctcaatgtactcacggtgtgggtcgctctagtacagataggcagttcttcttcatcaatcgaaggccctgcgaccctgccaaagtgtgccggctggtaaatgaggtataccacatgtacaataggcaccaatatccttttgtcgtactgaacattagtgtggattcagaatgtgtcgacatcaacgtcacacccgataaaagacaaattctgttgcaggaagagaagctgcttttagcagtgctgaagacttctctgattggaatgttcgactccgatgttaacaagctgaatgtatctcagcaacctctgctcgatgtggaaggaaacctaatcaagatgcatgccgctgacctcgagaagcctatggttgaaaagcaggaccagtctccaagcttgagaacgggcgaggagaagaaggacgtctccattagtcgcctgagggaagccttttctctgcgccatactaccgaaaacaaaccacattcaccaaaaactccggagcccaggcggagcccacttggccagaagagaggtatgctcagctcttcgacctcaggggcaattagcgataaaggagtgctgcggccccagaaagaagctgtcagcagcagccatgggccttctgatcccaccgaccgggccgaggttgagaaggactctggacacggctctacatctgtcgattccgaaggtttcagcattccggacactgggtcccattgttccagtgagtatgccgccagcagcccgggagacagaggctctcaggagcatgtagactcgcaggagaaagcaccaaaaaccgacgattctttcagtgatgtggattgccattccaatcaagaagatacgggtctgaaaaccggcccctccgacccccgcacgtccatgaattag

SEQ ID NO: 16724 - DNA, 2271 bp, synthetic construct
  misc_feature 1..2271: note = Description of Artificial Sequence: Synthetic coding sequence
  source 1..2271: mol_type = other DNA
atgtggggaagaaggcggaagctgcgccggctgaatgacgtgactatctctacctgtcacgcaagtgcaaaggttggtacccgattgatgttcgaccataatgggaaaatcatccagaagaccccatacccaagaccccggggaactaccgtgtcagtccagcagcttttcagtacgttgcccgtgcggcacaaagagttccagagaaatatcaagaaagagtacgcgaagatggtgcaggtactccacgcttattgcataatcagcgctgggatccgggtgtcgtgtacaaatcagctaggccaaggaaagcggcagccagtggtgtgcacgggaggaagtcccagtatcaaggaaaacattggctctgtgttcggacagaagcagttgcagtctctgattcctttcgtccaacttcccccttctgattcagtgtgcgaggagtacggccttagctgctcagatgctcttcataacctgttttacatttcaggctttatctcacagtgcacacacggggtgggcaggagtagcacagatagacaattcttcttcatcaataggagaccatgcgatcccgcaaaggtctgcagactcgtcaatgaggtttaccacatgtacaatcgacaccagtatccattcgtcgtcctgaatatcagcgtggattctgaatgcgtcgatattaacgtgacacccgataaacgacagattttgcttcaggaggagaagctcttgcttgctgtcttaaagaccagcctaatcggaatgtttgactctgatgtcaataagctaaacgtgtcccagcaaccattgttggatgtggagggcaatttgatcaaaatgcacgcggcagatttagaaaaacctatggtcgaaaagcaggatcaaagcccctcgctaagaactggagaggaaaaaaaggatgtgagcatttctcggctcagagaagcgttctctctacgccacactactgagaataagccccactcccccaaaacacccgagcctagacgcagtccgttgggacagaaacgtggaatgttgtcttcttcaacgtctggcgctatatctgataaaggagtcctccggccccaaaaggaggcggtgtcatcatcccatgggcctagcgacccaaccgaccgggctgaggttgaaaaggacagtgggcatggatcaacttccgttgattctgaggggttctcgatccccgacacaggtagccattgttcatcagagtatgctgcgtcttccccgggagacagggggagccaggagcatgtcgatagtcaggaaaaagcccccaagactgacgactctttctcagatgtcgactgtcacagtaaccaggaagatacgggctgtaagtttcgagtattacctcaaccaaccaacctggctacaccaaatacaaagcgtttcaagaaggaggagatcctttcctcatctgacatttgccagaagctcgtgaatacacaagacatgtccgcgagccaggtcgatgtggccgttaaaattaataaaaaagtagtgcctttggacttctcgatgagctctctggccaagaggatcaagcaacttcatcatgaagcacaacagtccgagggggagcaaaactaccggaagtttcgggccaagatctgtcccggcgagaaccaggctgcggaggacgaattgagaaaagaaatatccaagaccatgttcgccgagatggagatcattggccaatttaatctcggcttcatcataaccaagctcaacgaggacatcttcatagtggatcagcatgccaccgatgaaaagtataattttgaaatgctgcaacaacacacggtattgcaaggccaacgactaattgcacctcaaactctgaatctaaccgcagttaacgaagcagttctcatagagaacctggagattttcagaaaaaatggatttgattttgtaattgacgagaatgccccggtgaccgagagagccaaacttatcagcctgcccaccagcaagaattggactttcgggccacaggatgtcgacgagctcatatttatgctctcagactcccccggcgtcatgtgtcggcccagcagagttaagcaaatgttcgcgtctagagcctgccggaaatccgtgatgattgggacagccctgaatacaagcgagatgaaaaaattgattacccacatgggagagatggaccatccctggaattgtccccatggtaggccaaccatgagacacatcgcaaaccttggcgtaatctcccagaactag

SEQ ID NO: 16725 - DNA, 1812 bp, synthetic construct
  misc_feature 1..1812: note = Description of Artificial Sequence: Synthetic coding sequence
  source 1..1812: mol_type = other DNA
atgtccgccgcggtaaccgcaggcaaattagcccgggcaccagcagaccccggaaaggctggagtgcctggcgttgccgctccgggagcaccggcagcagcaccccctgccaaagagatccctgaagtcttagtagacccgcgatcccgccgaagatacgtccgtggacgatttttgggcaaagggggatttgctaagtgtttcgaaatcagcgatgccgacacgaaagaagtgtttgccggcaaaatcgttcccaagtctctcctgctgaaaccccaccagcgggaaaagatgtccatggagatttcaattcataggtccctggctcatcagcatgtggtgggcttccacgggttctttgaagataacgatttcgtcttcgtagtgttggagctgtgtagaaggcgttccctcctggagctgcacaaaagaagaaaagcacttactgaaccagaagctcgctattatttgagacagatcgtcctgggctgtcagtacctgcatcggaatagagttatccatcgggacctgaagttgggcaatctgttccttaatgaggatctggaagtcaaaattggcgacttcggactggccacgaaggtggaatacgatggcgaacgaaagaagaccctgtgcggtacccctaattatatcgctcctgaggtcctgtctaagaaggggcacagtttcgaagtggacgtgtggagcatcgggtgcatcatgtacacgctcctggtcggcaagccgccgtttgagacaagttgtttaaaggagacgtacctgcgaatcaagaagaacgagtactccattccaaagcatattaacccggtagcagcatctctgatacagaagatgctgcaaaccgatcctacagcaagacccactattaatgaacttttgaacgatgaattctttacatccggctatatccccgcaaggctccctattacctgtttgactatccccccccgttttagcatagctccttcatccctcgaccctagtaataggaaacctctcacagtgctgaacaaaggattggagaaccccctccctgagagaccacgcgaaaaagaggaaccagtggtcagggagacaggtgaagttgtcgactgtcatctaagtgacatgctgcaacagcttcacagcgtaaacgcttccaaaccgagtgagcgggggttggtgcggcaagaggaggctgaagatccagcttgcatcccgattttctgggtgtcaaagtgggtggactattccgacaagtatggcttaggctaccaactatgcgataactctgtgggcgtactcttcaatgacagcacccgcctgatcctttataatgacggcgattctctccagtacatcgagagagacggcacggagagctatttgaccgtttcttcacatccgaactccttaatgaagaaaatcaccctccttaagtacttccgcaattacatgagtgaacacttgctgaaagcaggagctaatatcactccccgggagggcgacgaactggcgcggttgccttacctgcgaacttggtttcgtactcggagcgcaatcatcctgcatctgtccaatggatccgtccagattaatttttttcaggatcacactaaactcatattgtgccctcttatggcagcagttacctacatcgacgaaaaacgcgatttccgtacatacaggctatctcttctggaggagtatggatgttgcaaagagctcgcgtctaggctgcggtatgcccgcaccatggtggataagctgctgtcctctaggtccgcctctaaccggcttaaggcatcctag

SEQ ID NO: 16726 - DNA, 744 bp, synthetic construct
  misc_feature 1..744: note = Description of Artificial Sequence: Synthetic coding sequence
  source 1..744: mol_type = other DNA
atgtcagcggcagtgaccgccgggaagctggctcgcgcccccgctgatcctggcaaggcaggggtgccgggagtggctgcccccggcgccccagccgccgcgcctcccgcaaaggagatcccagaggtcctggtggatcccagatctaggagaaggtacgtgcggggcaggttcttgggtaaaggaggattcgccaagtgttttgagatcagtgacgcagacaccaaagaggtttttgctggaaagatcgtgcctaagtctctactactgaaaccccaccaaagggagaagatgagcatggagatctcaatccatcgctcattagcgcaccagcatgtagtagggttccacggcttttttgaggacaacgactttgtcttcgttgtactggaactatgtcggcggcggtcactcttagagctgcacaaaagacggaaggccctgacagaacccgaagcaagatactatctgcgccagatcgtgcttggttgccagtacctacacagaaaccgcgtcatccatagggacctgaagcttggcaacctctttctgaacgaggatctggaggtaaagataggcgattttggattggccacaaaggttgaatatgatggtgaacgtaagaaaaccctgtgtgggacaccaaattatatagcccctgcggtcccttgcttacagtgcgcgccacagcctcgatggcttggaagggcagcgtcttcccttcaagtgggcgtcgccgtatag

SEQ ID NO: 16727 - DNA, 1521 bp, synthetic construct
  misc_feature 1..1521: note = Description of Artificial Sequence: Synthetic coding sequence
  source 1..1521: mol_type = other DNA
atgtccatggaaatctcaatccatcgaagcctcgctcaccagcatgtggtggggttccatggcttctttgaagacaatgacttcgtgttcgtcgtgctagagctatgccggcggcggtctttgttggaactgcacaagagacggaaagcactgacagagccagaggcacgatactacctgagacagattgtgctgggatgtcagtatctacatcggaatcgtgtgattcaccgggatttaaaactaggcaacctgtttctcaacgaagatctcgaagtaaaaattggggacttcgggctggccacaaaggtcgaatacgacggcgaaaggaagaaaacactctgcggcacacctaactatattgctcctgaagtcctgagcaagaaagggcactctttcgaagtggatgtttggtccatagggtgcattatgtatacgctgcttgtgggaaaacctccatttgagacatcgtgcctgaaagagacctacctgcgcatcaagaagaatgaatacagcataccaaaacacataaaccctgtggcagcctcgttaatacagaagatgctccagacggatccgaccgcccgaccaaccattaatgaattactcaatgacgagtttttcacgagcggatatattcccgcgcgtctgcccattacttgtctaacgatacctcctcgtttcagcattgccccatctagccttgacccatctaatcgcaaacctctcaccgtgcttaacaagggcctggagaacccccttcctgaaagacctcgcgaaaaagaggagccagtggttcgggaaacgggggaggtggtcgactgtcacctgtctgatatgctgcaacaactccacagtgtcaatgccagcaaaccatccgaacgggggttggttcgccaggaagaggctgaggaccccgcgtgtatccccattttctgggtgagcaagtgggtcgactacagcgacaagtacggactgggataccagttgtgcgacaacagcgtgggggtgctgttcaatgacagcacccggcttattctttataatgacggtgatagcctacagtacattgagcgggatggcactgagtcttatctaacagtgtcttctcatcccaattccctgatgaagaaaattaccctacttaagtacttccggaactacatgtctgaacacctgttgaaagccggcgctaatattaccccaagagagggcgacgaattggctagattaccatacctgaggacatggtttaggaccaggtcagctataatcctacatttgtccaacggaagtgttcaaatcaatttcttccaagatcacaccaagctcattctgtgcccactgatggcagcggtgacatacattgacgagaagcgtgattttcgtacctaccggttaagcttattagaagaatacggatgctgcaaagagttagcatccaggttacggtacgctcggacgatggtggataaactgttgtcgagccgaagcgccagtaaccgattgaaagcttcctag

SEQ ID NO: 16728 - DNA, 1941 bp, synthetic construct
  misc_feature 1..1941: note = Description of Artificial Sequence: Synthetic coding sequence
  source 1..1941: mol_type = other DNA
atggagcccgccgcaggcttcctctccccgagacctttccaacgtgccgccgcagcccccgccccaccagcaggccccgggcctccgcccagcgcgctcagaggaccagagctggaaatgctggcaggacttcctacaagcgacccaggacggctaatcacagatccgcggtcagggcgcacctatctgaagggcagactgttggggaaagggggattcgcaagatgctatgaagcaacagatactgagaccggcagtgcttatgcagtcaaggtgattccccagtcccgtgtggcaaagccccaccagcgcgaaaaaattctaaacgagatcgagctgcacagagacttgcagcatcggcacatcgtgcggttcagtcatcactttgaggacgccgataacatctatatctttctggaactgtgcagcaggaagagtttagctcacatctggaaggctcgacacactctcctggaacctgaagtgcgatattacctccggcaaattttgagcggattaaaatatctccaccagcgggggatcctgcaccgggatctaaagttggggaactttttcatcacagagaacatggaacttaaagtgggtgattttgggctcgcagccaggttagagccacctgagcagcggaaaaagaccatctgtggcacacctaactatgtggcccctgaggtcctgctccgacaaggccatggccccgaagctgacgtttggagcctgggctgcgtaatgtataccctgctgtgcggatccccgccctttgaaactgctgaccttaaagagacttaccgatgcattaagcaggtccactataccttgcctgcttctctcagtctccccgctagacagcttctcgcagccatcttgagggcatccccgcgggaccgcccctccatagatcaaatcctccggcacgacttcttcacaaagggctatactcccgatcggctgccaataagtagctgcgtcaccgtgcccgacttgacgccccctaacccagctcgaagcttgttcgctaaggtgaccaagtccctgtttggccgcaagaagaaatctaaaaaccatgctcaggaacgagacgaggtgagtggacttgtgtcaggccttatgcggacttctgtcgggcatcaagacgcccgtcctgaggcaccggctgcgtctggcccagcccccgtatcactcgtggaaacagctccagaagattcttcccctcgcggcaccctggctagttcaggggatggatttgaggagggccttaccgtggcaactgttgtagagagtgcactctgtgccttacgcaactgcatcgcattcatgccaccagcagagcagaatcccgccccattggctcagccggaacccttagtgtgggttagtaagtgggtcgactatagtaacaaattcggcttcgggtatcagttgagttctcgacgcgttgctgtgctgttcaatgatggcacacatatggcactgagcgctaacaggaagactgttcattataacccaacgagcacaaaacacttttcgttcagcgtgggagcggtccccagggcccttcagcctcaactgggaattttgaggtatttcgcctcatatatggaacaacacttgatgaaaggcggagatttgcctagcgtggaagaagtcgaggtgccagcccctccactgcttctgcagtgggtgaaaacagatcaggctttactgatgctgttcagtgatggaacagtccaggtcaacttttacggcgatcatactaagctcatcttgagtggctgggagccacttcttgttacgttcgttgcacgcaaccgctcagcctgtacgtacctggctagccatttgagacaattgggatgcagccccgacctgcgacagagactccgctatgctctcaggcttctgcgggatcgctcccctgcctag

SEQ ID NO: 16729 - DNA, 1866 bp, synthetic construct
  misc_feature 1..1866: note = Description of Artificial Sequence: Synthetic coding sequence
  source 1..1866: mol_type = other DNA
agccggcagaggcacgcacggcctgggcctggaggaaccgaaaagcccggccccagatgtgacgcaccagccgcctggagcttgcccccggtgtcctgcctgaggacatacctgaagggacgcttgctgggtaaggggggtttcgcccgctgttatgaggctaccgacacagagaccggaagcgcatatgccgtgaaggtgatccctcagagtcgggtggccaagccacaccagcgcgaaaaaatcctcaacgaaatcgagctgcaccgcgacctgcaacaccggcacatcgtaagattttcccaccactttgaggatgcagacaacatctatatattcttggagctgtgttcacggaagtctcttgctcatatctggaaggctcgtcacacactcctggaacctgaggtgagatactacctccgacagatcctgtctggacttaagtaccttcatcagcgcggaatcctgcaccgcgacttgaaactgggtaatttcttcataacagagaatatggagctgaaagtaggggactttggtttggccgcacggctagagccccctgaacagaggaagaagacaatctgcgggacgcccaattatgtagccccagaagttctgcttcgccagggccacggtcccgaagcggacgtctggagcctggggtgtgttatgtacacgttgctttgcggcagcccaccatttgaaaccgcggacctgaaagaaacctacagatgtattaaacaggtgcactatactctgcctgccagccttagcctgcccgccaggcagctgctggctgccatactccgcgcttctcctcgagataggccttcaattgatcagattctgcgccacgatttcttcactaaagggtacactcccgatcgcttacccatatctagctgtgtaacagtgcccgacctgaccccacccaatcctgcccggtccctgttcgctaaagtcaccaaaagtctgttcggacggaaaaaaaagagtaagaaccatgcacaagaacgggacgaggtgagcggtttggttagtgggttaatgcgcaccagcgtgggtcaccaggacgctcgacccgaagccccagcggcttccggccccgctcccgtctccttagtcgagaccgctccagaggatagctctccaagaggtacgcttgcctcttcgggggacggtttcgaagaaggcctgacggtggccacggtggtggagtccgctttgtgtgctctgaggaattgcatcgcttttatgcccccggctgagcagaaccctgctcccttagcgcagcctgagcccctagtttgggtctcgaaatgggtagactattccaacaagttcgggtttggctaccagctctcttctcggcgcgtagctgtactgttcaatgatggcacccacatggcattaagtgcaaacaggaaaactgttcactacaaccccacctccaccaagcatttcagcttctccgttggagctgtccctagagccttgcagccacagctaggcattctccgctacttcgcaagctacatggagcaacacttgatgaaaggcggagaccttccttctgtagaagaggtggaggtgcccgcaccgccactgctgctccaatgggtaaagacggatcaggcgcttctaatgctgttttccgatggcacagtccaggtgaacttctacggagaccacacaaaactgattctgtccgggtgggagcctcttcttgtcacttttgtggccagaaataggagcgcctgcacttacctcgccagccatctgcgccagttgggctgctctccggacctccggcagcgcctgcgatatgcgctgcgattgctgagggacagatctccagcatag

SEQ ID NO: 16730 - DNA, 2913 bp, synthetic construct
  misc_feature 1..2913: note = Description of Artificial Sequence: Synthetic coding sequence
  source 1..2913: mol_type = other DNA
atggcaacctgcattggagaaaaaatcgaggattttaaggtggggaacctcctgggaaaagggtcctttgcaggcgtatacagagccgagtccatccacaccgggctagaggtcgccatcaagatgattgataaaaaagcgatgtacaaggccggcatggttcaaagagtacagaacgaggtcaagattcattgtcagcttaagcaccccagtatcctggagctgtataactatttcgaggactcgaactacgtgtacttggtgcttgagatgtgccacaacggggaaatgaatcggtatctgaagaatcgcgtcaagccttttagcgaaaacgaggctcgtcactttatgcaccaaattataactgggatgctgtacctccattcccacggcattctgcacagggacttgaccctctcaaacctgctcctgaccaggaatatgaatatcaaaatcgccgacttcggacttgcgactcagctgaaaatgccacatgagaaacactacaccctctgcgggacgcctaactacatttcacctgaaatcgcaacaagatctgctcacggtttggagtcagatgtgtggtccctggggtgtatgttctatactctgcttatcggccggcctccttttgacactgacactgtgaagaataccctcaacaaggtggtgttggcagattatgaaatgccaagtttcctgagcattgaggctaaggacctaatacatcagctcctgaggaggaacccggccgaccgactctcgctcagttcagtactggatcatccatttatgtctaggaactcatctacaaagtctaaggacctaggcaccgtggaagatagcattgattccggacacgcaactataagcaccgccatcaccgcctctagttccacctccatcagtggcagtctgtttgataaacgccggctcctgattggacaacccttgccaaataagatgaccgtcttcccgaaaaataaatcaagcacagatttctcttcaagtggcgacgggaattccttctatacgcagtggggcaaccaggaaacttccaactctgggcgaggacgcgtgatccaagatgccgaggaacgcccacactcccggtaccttcgcagagcatactcatccgatcgttccggaacttctaacagccaaagtcaagctaagacttataccatggaacgatgtcattccgcagaaatgctctctgtctccaaaagatccggagggggcgagaacgaggaaagatattctccgaccgacaataatgctaacatttttaattttttcaaggaaaagacctcttcatccagtgggtcctttgagcgccctgacaataaccaagccttatctaaccacctctgccctggaaagactcctttcccttttgctgatcctactccccagaccgagactgtgcagcagtggttcggtaacctccaaataaacgctcacctgagaaaaaccaccgagtacgacagcatctccccaaatagagacttccaggggcacccggacctgcagaaggacacctccaagaacgcatggacagatacaaaagttaagaaaaattcggatgcctccgataacgcacatagcgtgaaacagcagaacacaatgaagtacatgactgcgctgcacagcaaaccagagattattcagcaggagtgtgtgtttggttccgaccccctctcagaacagagcaagacgcgtggaatggaaccaccatgggggtatcaaaaccgaaccctccggtcaatcaccagccctctagttgcccatcgcctaaaaccgatccgccaaaagacaaagaaagctgtggtcagcatactggattctgaggaggtctgtgtggagctggttaaggagtacgcctcccaggagtatgttaaggaagtcctgcaaatatcaagcgatggtaatacaatcacaatttactaccccaacgggggacgcgggttcccacttgctgaccggccaccgtcaccaaccgacaacatctctcgatactcgtttgataaccttcccgagaaatattggaggaagtatcagtacgcaagccgttttgtacagctggttcgcagcaagagcccaaaaattacctacttcacaagatacgccaaatgcattttaatggagaacagtcctggtgccgatttcgaggtatggttttatgacggtgttaagatccataagaccgaggatttcatacaggttattgagaaaaccggtaaaagctacaccctcaagtccgaatccgaagtgaattcactaaaggaggagattaaaatgtacatggaccatgctaacgagggacataggatctgtctggcactcgagagtataatctccgaagaggaaagaaagacacgcagcgctccttttttccctatcattatagggagaaagcctggatcgaccagctctccaaaggccctgagcccccccccatccgtagactctaattatcccacccgtgaacgcgcgtcctttaatcggatggttatgcattctgccgcctccccgacacaggctcctatactgaacccctctatggttacaaatgagggtctgggtctgactacaaccgcatccggtactgatatttcttccaactccctgaaagattgtctgcctaaatccgctcaacttctgaagtctgtcttcgtcaagaatgtggggtgggcgactcagctcacaagtggtgctgtctgggttcagttcaacgacggatcccagctggttgtgcaggccggggtgtcttcaatctcttacaccagtcccaatggacagacaaccagatatggtgagaatgagaagctccctgactacattaagcaaaaactgcagtgtttgtcatccattctcctgatgttttccaaccccaccccaaacttccactag

SEQ ID NO: 16731 - DNA, 2817 bp, synthetic construct
  misc_feature 1..2817: note = Description of Artificial Sequence: Synthetic coding sequence
  source 1..2817: mol_type = other DNA
atggccacctgtataggggagaagattgaggactttaaagtgggtaatcttctgggaaagggaagttttgcaggcgtctatcgcgcggaaagtatccatacaggcttggaggtggccatcaagatgctttacaattactttgaagactctaactatgtatacctcgttctggaaatgtgccacaatggggaaatgaaccgatacctgaagaacagggtgaaacccttcagcgagaacgaagctcggcacttcatgcaccaaatcataacgggaatgctatatctgcattcccacggcattctgcatagagacctgaccctttcaaatctgctcctgacacgcaacatgaacattaagatcgcagattttggcctggcaacccagcttaagatgccccacgagaaacactacacattatgcggcacccctaattacatctccccggagatcgccacacggagcgctcacggactcgagtctgatgtgtggtcactggggtgtatgttctacaccctgctgattgggcggcctcccttcgacactgacactgtcaaaaacaccttaaacaaggtcgtcctggccgactacgaaatgcccagcttcctgtcaattgaagcaaaggatctgatccaccagctgctgcgaagaaaccctgctgataggttatccctctcgtcggttctggatcatccgtttatgtctagaaattctagcacaaagagcaaagatctgggcactgtggaggatagtatcgacagcggccacgccacgattagtacagctatcaccgcctcctcctctacatccatttctgggtccctgttcgataagaggcgattactaatagggcagccactgccaaacaagatgaccgtctttcccaaaaataaatcgtctacagactttagctcctccggagacgggaattctttttatactcagtggggaaatcaagagacctccaattccgggcgcggccgggtaatccaggatgcggaagaacgcccgcactctcggtacctgagacgggcctacagtagtgataggtctggcacctctaattctcagtcccaggcgaagacttacacaatggaaagatgccacagtgcagagatgcttagtgtgtctaaacggtcaggagggggcgagaacgaggagaggtatagtccaaccgacaataacgcaaacatatttaacttcttcaaagagaagacatcgtccagtagcggaagcttcgaacgccccgataataatcaggctctctctaatcatttgtgccctggaaaaacgccctttccatttgcggacccaacccctcagacagagaccgtgcagcagtggtttggcaacctccagattaacgcccaccttagaaagacgactgagtacgatagcatttcccctaacagagattttcagggtcacccggatctccagaaggatacctctaaaaacgcgtggaccgacacaaaggtgaaaaagaattccgatgcctcagacaatgctcattctgtcaagcaacagaacactatgaaatatatgacagccttacatagcaagcctgaaattatccagcaggagtgcgtttttggaagtgaccccctgagtgagcagagcaaaacccgcggcatggaacccccctggggctaccagaatcgaacactcagaagcatcaccagtcccctcgtcgcccatcgactgaaacctatcagacagaaaaccaagaaagcagttgtgtctatactcgacagcgaagaagtatgcgtggaactagttaaagagtacgcctcccaggagtacgtcaaagaagtacttcaaataagctcagacggcaacactataacgatttattaccccaacggaggccgcgggttccccctcgctgatagaccaccctctccaacagataacataagtagatactcgttcgacaatctccccgaaaagtattggcgcaagtatcaatatgcgtcccgtttcgtgcaactggtgaggtcaaagtcacccaaaatcacttactttactaggtatgcaaagtgcatactgatggaaaacagccctggcgctgatttcgaagtctggttttacgacggcgtgaaaatccacaaaacagaagattttattcaggtgattgagaagacagggaaaagctacactctgaagtccgaaagcgaggttaactccctaaaggaggagatcaagatgtatatggaccacgcaaatgaaggacaccgtatctgcttagctctggaaagtatcattagtgaagaagagaggaagacacgtagtgccccattctttcctatcataatcggacggaaacccgggtcaacttcctccccgaaggccttgtctcccccaccttctgtggacagtaattacccaactagggagcgcgcttccttcaacagaatggtgatgcatagtgcagcatcaccaacccaggcccccattctcaacccctccatggtgaccaacgaggggctaggattgaccaccacagccagtggaacagatatctctagcaatagtctcaaggactgtctgccaaagtccgcacaactcttgaaatcagtgttcgtaaaaaatgtgggatgggcgacccagctgacatccggggctgtttgggtgcagttcaatgatggaagccaattggttgtccaggcaggggtttcctctattagctatacttcacccaacgggcagaccactcgttatggtgagaatgaaaagctgcccgattacatcaagcagaagctccagtgcctgagtagcatattactgatgtttagcaatcctactccaaactttcactag

SEQ ID NO: 16732 - DNA, 2790 bp, synthetic construct
  misc_feature 1..2790: note = Description of Artificial Sequence: Synthetic coding sequence
  source 1..2790: mol_type = other DNA
atgattgacaaaaaagctatgtataaagctgggatggtccagcgagttcagaatgaggtgaagattcactgtcagcttaagcatccctccattctggaattgtataattattttgaggattcaaactacgtataccttgtcctcgagatgtgccacaatggagaaatgaaccggtaccttaagaatagggtgaaaccgttcagcgagaatgaagctcgtcactttatgcaccagatcattacagggatgttatatctgcatagccatggaatccttcaccgcgacctaacattaagtaacctcctgcttacgcgcaatatgaatataaaaatcgcggacttcggcttggccacacagcttaagatgccccatgaaaagcactatacactttgtggaacccccaactacatttctccagagattgcgacaagaagcgcacatggtctggaatcagacgtctggagcctaggctgtatgttttacacactactaatcggaaggcctccttttgacaccgatacggtgaagaacactttaaataaagttgtgctggccgactacgagatgccctccttcctgtctatagaagccaaagacctgattcaccaactgctacgccgcaatcccgctgacagactctcgttgtcctctgttctcgatcacccctttatgagtcgcaacagttccaccaaaagcaaggatctggggactgtggaggacagtatcgactctggtcacgctacaatcagcacagccataaccgcatcgtcttctaccagcatttcaggctctctgttcgacaaaaggcgcctgctaattggccagccacttccaaacaaaatgacggtgttccccaaaaacaagtcttccaccgacttttcgtccagcggcgatggcaattctttttacacgcagtggggtaaccaggaaacctccaattctggcagggggcgtgtcatacaggatgcggaagagcgcccgcactctagatacctcagacgagcatactcaagcgatagatcagggacatctaactcccagtcgcaggccaaaacatatacaatggaacggtgccactcagcggagatgttgagcgtgtccaagaggtcagggggcggcgaaaacgaggagcgttactcaccaactgacaacaatgctaatattttcaattttttcaaggaaaaaacgtcctcttcaagcgggtccttcgaacggccagacaacaatcaggctctctcgaaccacctgtgtcccggtaagactccctttccttttgccgacccgactccgcagaccgagacagtgcagcaatggtttggcaacctgcagatcaatgcccacctgcggaaaaccactgagtacgattccatttcgcccaaccgggattttcaaggacatcctgacctacagaaggacacatcaaagaatgcctggaccgacaccaaggtcaaaaaaaattcggatgcgtctgacaacgcacactcagtgaaacagcaaaacaccatgaaatacatgactgctttacattccaagccagagatcattcagcaggagtgcgtatttgggagcgaccccctcagcgagcagagcaagacccgcggcatggaaccaccctggggctatcagaataggaccctgcgatcgattacctctccactggttgctcaccggcttaaaccgataagacagaagactaaaaaggccgtggtctccatactggatagtgaggaggtatgcgtggagctggttaaagagtacgcctcccaggaatacgtgaaagaagttctccagatcagctctgatggtaacacaatcaccatttattatcccaacggcggacggggttttcctctcgctgaccgaccaccttcacctactgacaacatcagccgttattcctttgacaatctgcccgaaaaatattggcggaaatatcagtatgcgagtcgttttgttcagctcgtgagatctaagtctccaaaaataacatactttacgcgctatgcaaagtgtatcctcatggaaaattcacccggggcagatttcgaagtctggttctatgacggggtaaagatacataaaacagaggattttattcaggtcatagagaagaccgggaagtcctacactctgaaaagcgaatccgaggtgaactctctgaaagaagaaattaagatgtacatggaccacgctaacgaagggcatagaatctgccttgctcttgaaagcattatctccgaagaagaaagaaaaacaagatctgccccttttttcccgattattatcggaaggaagcccggcagtacctctagcccaaaagcgctgagcccacctccctcagtagactcaaactaccccacacgagaacgtgcatccttcaaccgcatggtgatgcatagtgccgcaagtcccacgcaagcccctatactcaatccgagtatggtgacaaacgagggactcggtctgactaccacagcaagcgggactgacatttcctccaactcactgaaggactgcctcccaaaaagcgcccagctcctcaaaagcgtgtttgtgaagaacgtggggtgggccacccagctgacatccggagctgtttgggtgcagttcaatgatggttctcagctcgtcgtgcaagcaggtgtcagttccatatcttataccagtccaaacgggcagacgacgcggtatggtgaaaacgaaaagctgcctgattacattaagcagaagctgcagtgtctgtcgagcattctgctgatgttctctaaccctacacctaacttccactag

SEQ ID NO: 16733 - DNA, 1752 bp, synthetic construct
  misc_feature 1..1752: note = Description of Artificial Sequence: Synthetic coding sequence
  source 1..1752: mol_type = other DNA
atggcagctaggcggcggcgaagcacgggggggggacgtgctagagccctcaatgaaagtaagagagtaaacaacggtaataccgctccagaggattccagccccgctaaaaagacaagaagatgccagcgtcaggagtctaagaagatgcctgtcgccggcggcaaggccaacaaagatcgaaccgaggataaacaggacggaatgcctggcaggtcttgggccagtaaacgggtctcagagtcagtgaaagccctgcttcttaagggaaaggccccggtcgatcctgaatgtacagcgaaagtcgggaaagcccacgtctattgcgaggggaacgacgtttatgacgtcatgctgaatcagactaacctgcaattcaataacaataaatactacctgatccaactcctggaggacgacgcacagaggaactttagtgtgtggatgagatggggaagggtgggcaaaatgggacagcatagcctggtggcatgctccggcaatttgaataaggctaaggaaatttttcagaagaaatttcttgacaagactaagaacaactgggaggaccgcgagaagtttgaaaaagttcccggtaaatatgacatgctccagatggattatgcgactaatacacaggacgaagaggaaaccaaaaaagaggaatccctcaaaagcccactgaaacctgagtctcagttggatctccgggtccaggaactcattaaactgatttgcaacgtccaggctatggaagagatgatgatggagatgaaatataatacaaagaaggcgcccttagggaaattgaccgtggcccagatcaaagccggctaccaaagcttgaagaagatcgaggattgcatccgtgccgggcaacacggtagggcactgatggaagcctgtaatgaattttacacgcgtatccctcacgattttgggctgcggacaccacccctgattcggacacagaaggaactctcagagaagattcagcttctggaggctctaggcgacatagaaattgctatcaagctggttaagacagaactgcagagccccgagcacccgctcgatcagcattataggaatctccattgtgcattgagacctcttgatcacgaaagttacgagtttaaggtaataagtcaatatctgcagtccacgcatgccccaacccactccgactatacaatgactctgctagacctttttgaggtggagaaggacggggagaaggaagcatttcgggaggacctgcacaatagaatgctcctgtggcatggttctagaatgagcaactgggtcggcattctcagtcatggtctgagaatcgctccaccagaggccccaatcacgggatatatgttcgggaagggaatttatttcgccgacatgtccagtaagtctgccaattattgcttcgcatccaggctgaaaaatacaggtctgctgctgttgagcgaggtcgctctcggccagtgtaatgagctgctggaagctaaccccaaagcagagggcctcctacagggcaagcattccactaaaggattaggcaaaatggctccaagtagcgcacacttcgtcaccttgaatggtagcacggtgccactgggccctgcctcagataccggcatcctgaatcccgacggctatacccttaattacaacgaatatattgtgtacaatccaaaccaagtaagaatgcgatatttactcaaggttcagttcaattttctccaattgtggtag

SEQ ID NO: 16734 - DNA, 1713 bp, synthetic construct
  misc_feature 1..1713: note = Description of Artificial Sequence: Synthetic coding sequence
  source 1..1713: mol_type = other DNA
atggctgctcggcggcgacgaagtacagggggcggaagagctcgcgctctaaacgaatccaaacgagtcaataacggaaatacagccccagaggactcttctcctgccaaaaaaacaaggaggtgccagcggcaggagtcgaagaaaatgcccgtggcagggggcaaagctaataaagaccgcactgaagataaacaagacgaatctgttaaggccctgctactcaaagggaaggctcccgtggaccccgagtgcaccgcgaaggtggggaaggcgcacgtgtactgtgaagggaacgatgtctatgacgtaatgctgaatcagactaacttgcagtttaataataataagtactacctcatccaacttctagaggatgacgcccagagaaatttctctgtttggatgcggtgggggagggtaggtaagatgggacagcactccttagtggcctgtagtggcaacctcaacaaagcaaaggagatctttcagaagaagttcctagataagacaaaaaataactgggaagatcgtgagaaattcgagaaagtcccgggcaaatacgacatgctgcaaatggactatgccacaaacacccaggacgaggaggaaactaagaaggaagaaagcctgaaaagccccctcaagccagaaagtcagctggatctgcgggtgcaggagctaatcaaactgatctgtaatgttcaggcaatggaagagatgatgatggagatgaagtacaataccaagaaagctccattgggtaaacttacagttgcccagatcaaggcgggatatcaatccttaaaaaaaatcgaggattgcatccgggcaggtcagcacgggcgcgccttgatggaggcttgcaatgagttctatactaggataccccatgacttcggccttcggacccctccactcatccgaacacagaaggagctgtccgaaaaaatacaactgctagaagccctgggagacatcgaaatagctatcaaactcgtcaagaccgagctccagtcccccgagcaccccttagatcagcattacaggaacctccactgcgccctgagacccctggaccacgagtcatatgagttcaaagttatttcccagtaccttcagtctacacacgccccgacacactctgattacacaatgaccctactggacttatttgaagttgagaaagacggtgaaaaggaggctttccgcgaggacctgcacaatcgcatgctcctgtggcatggttctaggatgagcaattgggtgggcattctgtctcatggactcaggattgccccaccagaggcccccatcacggggtacatgtttggtaagggcatttattttgcagatatgagcagtaaaagcgctaactactgttttgcctctcggctgaagaacacgggactgctcctgttgagtgaggtcgcacttggccagtgcaatgaactgctggaagctaaccctaaagccgaaggcctcttgcagggaaaacatagtacaaaaggcctgggtaagatggcccccagcagtgctcattttgtgacacttaatggcagcactgtccctctgggacccgcctcagacacaggaatcttgaatcccgacggctataccctcaattataatgaatacatcgtttataacccaaaccaagtccgtatgcggtatcttctgaaagtgcagtttaacttcttgcagctctggtag

SEQ ID NO: 16735 - DNA, 1623 bp, synthetic construct
  misc_feature 1..1623: note = Description of Artificial Sequence: Synthetic coding sequence
  source 1..1623: mol_type = other DNA
atgtcgctccttttccttgcaatggccccaaagccaaaaccttgggtgcagaccgaaggaccagagaagaaaaaaggtagacaggcagggcgggaagaagaccctttccggtccacggctgaagccctgaaagccattccagcagagaaaaggattatacgggtggaccccacttgtcctctgtcctccaaccccggtacgcaggtgtacgaggactacaattgcacccttaatcagaccaacattgaaaataacaacaataagttctacataatccaactcctgcaggacagtaatcgtttttttacctgttggaaccattggggacgggtcggtgaagtgggccagtctaaaataaatcatttcacaagactggaggatgcaaagaaggatttcgagaagaagtttagagagaagacaaaaaacaattgggccgagcgggatcatttcgtcagtcatcccggtaagtacacgttaatcgaagtccaggcagaagatgaagctcaggaagccgtagtcaaggttgaccgggggccagtgcggacggtcacgaagagggtgcagccatgctccttagaccctgccacccagaagcttattacaaacattttttctaaagaaatgttcaaaaataccatggccttaatggacctggacgtgaaaaagatgccgcttgggaagctgtctaaacagcagattgcgcgtggatttgaagccctggaggctctggaggaggctttgaaagggccaacagatggcggccagtccctggaagagctgtcatcacacttttataccgtgattccccacaactttggtcacagccaacctcctcctatcaacagccctgaactgcttcaggcgaagaaggacatgcttttagtgcttgcggatatcgagctggcccaggccctgcaagccgtttctgagcaagagaagacggtggaggaggtcccacacccgctcgatagagactatcagcttctgaaatgccagcttcagctgttggactctggcgcgccggagtataaggttatccagacctacctggagcagacagggtctaatcaccggtgcccaactctgcaacatatttggaaagtcaaccaggagggtgaagaagacaggtttcaggcgcactcgaagctcggcaacagaaaactcttgtggcatggtactaatatggccgtggtggcagcaatcctcacttccgggctaaggattatgcctcacagtggtgggagggttggcaagggcatttactttgcatctgaaaacagtaaatcggctggctatgttattggcatgaagtgcggcgcacatcatgttgggtacatgttccttggcgaggttgccttagggcgcgaacaccatatcaacaccgataacccctccctcaaaagtccaccaccaggttttgactcagtcatcgccaggggacacactgagccagatccgacgcaggacacagagcttgagctggatggccagcaggtagtggtgccacaggggcagcctgtcccatgcccagagttcagctcttcaacattttcccaatccgagtatctgatctatcaggagtcccagtgtaggctccggtacctgctggaggtgcatctctag

SEQ ID NO: 16736 - DNA, 1602 bp, synthetic construct
  misc_feature 1..1602: note = Description of Artificial Sequence: Synthetic coding sequence
  source 1..1602: mol_type = other DNA
atggcgccgaaaccgaagccctgggtgcagactgagggacctgagaagaagaagggcagacaggcaggccgagaggaggatcctttccgttccaccgctgaggccctgaaggcgatccccgctgagaagcgtatcatccgtgtggatcccacgtgccctttgtcaagcaaccccggaacccaggtgtacgaggactataactgtactctgaaccagactaatattgaaaataataacaacaaattctatatcatccaactgttacaagacagtaacaggtttttcacctgctggaatcactgggggcgagtcggtgaggttggtcagtcaaagatcaatcacttcacccgactggaagacgctaagaaggatttcgagaaaaagtttcgagaaaagaccaagaacaactgggccgagcgggatcactttgtgagccatcccgggaaatataccctgatcgaggtgcaggctgaggacgaggctcaagaagccgtagtcaaagtcgatcgggggccagtgcgtactgtgaccaagcgcgtgcaaccttgttcgctcgatcccgcgacccagaaactgattaccaatatcttttccaaggagatgttcaagaatacaatggccttaatggatctagacgtgaaaaaaatgccactggggaagctgtcaaaacagcagatagcacgtggatttgaagctcttgaggctctggaggaggcactgaagggtccgacggacggtggacagtctctagaggagctctcaagccacttctacaccgtgatacctcacaattttggacacagtcaacccccacctatcaattccccagaattgcttcaggcgaaaaaggatatgttgctcgtcctggctgatatagagctggctcaggctctgcaggccgttagcgaacaggagaaaacagtggaggaagtccctcacccactggacagagattatcaactccttaagtgccagctgcagctgctcgactcaggagcacccgagtacaaggttattcagacatatctcgaacagactggcagtaaccaccggtgtccaactttacagcacatatggaaagtgaaccaggagggtgaagaggatcggttccaggcccatagcaaactcggcaaccggaagctactatggcacggcaccaatatggccgttgttgccgccattctcacctccggcctccgcattatgcctcacagcggcggccgggttggcaaaggaatctacttcgcgtcagagaacagcaaatcagccggatatgtcattggcatgaaatgcggtgcccatcacgtcggctatatgttcctgggggaggttgctctcgggagggaacaccacatcaacacagacaatccctctctgaaaagccctcccccaggcttcgactcagtgatcgcacgtgggcacaccgagccagaccccactcaggacacggagctggagctggatgggcagcaagtggtggttccccaaggtcagcccgttccatgcccagagttcagcagtagcacattttcccaatcagagtacctgatttatcaggagagccagtgcagactccgataccttttagaagtgcatctctag

SEQ ID NO: 16737 - DNA, 1602 bp, synthetic construct
  misc_feature 1..1602: note = Description of Artificial Sequence: Synthetic coding sequence
  source 1..1602: mol_type = other DNA
atggcaccaaaacctaagccgtgggtgcagacagagggcccagagaaaaagaaaggcagacaggccgggcgggaggaagatccattccgctcaacggctgaagccctcaaagctattcccgctgagaagcgaatcatccgtgtcgatcccacgtgcccactaagcagcaatccaggtacccaggtgtatgaagattataattgcactctcaaccaaaccaacatcgaaaataataacaataaattctatataatccagctgctgcaagatagtaaccggttctttacttgttggaatcactgggggcgcgtgggtgaagttggacagtctaaaatcaaccactttacaaggctagaggatgccaagaaggacttcgagaaaaagttcagagagaagactaagaacaactgggcagagcgagaccacttcgttagccacccaggtaagtacacgctgattgaagtgcaagctgaggacgaggctcaggaggcagtggtgaaggtggaccgaggccctgtacgcactgtgacaaaaagggtgcagccgtgtagcctcgatcctgctactcaaaagctgattacaaatattttctccaaggagatgtttaagaatacaatggcccttatggatctggacgtcaaaaagatgcctttgggcaagctgagcaagcagcaaattgcgagaggcttcgaggctctagaagccctggaagaggccttgaaggggcccacagacggtggacagtccctggaagagctgtcaagtcatttctacacggtcatcccacacaacttcgggcatagccagcccccccccataaattctcccgagctgctgcaggccaaaaaagacatgctgctggtccttgcggatatcgaactagcacaggccctgcaggcagtatctgagcaggagaagactgtcgaagaggtgccacaccctctggaccgtgactatcagctgctgaagtgtcagttgcagttgctggattccggtgcacctgaatacaaagtgatccagacttatcttgaacagaccgggtcaaaccacaggtgtcccactttgcagcatatctggaaagttaaccaggaaggtgaagaggaccgtttccaagcccactcaaagctgggtaaccgaaaacttctgtggcatgggaccaacatggcagtcgttgccgccatccttacgagtggcctccgaattatgccacactcaggcggccgcgtgggcaagggaatatattttgcttccgaaaatagcaagtcagcgggctacgttattggcatgaagtgtggcgcccaccatgttggctacatgttcctcggcgaggtagccctcggaagggagcatcatatcaatacagacaatcccagcttgaagtctccaccaccggggttcgacagcgtgatcgctagaggacatacagaacctgaccctacccaggacactgagctcgagctcgacggccaacaggtcgtggtgccccagggtcagcccgtgccgtgcccagaattctcctcttcgactttcagccaaagtgaatacctcatttaccaagagtcgcaatgccgcttaaggtacctcttagaagtccacttgtag

SEQ ID NO: 16738 - DNA, 999 bp, synthetic construct
  misc_feature 1..999: note = Description of Artificial Sequence: Synthetic coding sequence
  source 1..999: mol_type = other DNA
atggcaccaaaacccaaaccatgggtgcagaccgagggaccagagaaaaagaagggtcggcaggcgggaagggaagaggatcccttcaggagcactgcagaagcattgaaggccataccagcagaaaaaagaattattagggtggaccccacctgccccctgtcttccaatccaggtactcaggtgtacgaggactacaactgcacacttaatcagactaatatagaaaacaacaataacaaattctacattatccagctgctccaggactcaaatcgattctttacatgctggaatcactggggcagggtaggggaggttggacagagtaaaataaaccatttcacccgccttgaagatgcaaaaaaagatttcgagaaaaaattccgagagaagaccaagaataattgggcagaaagggatcattttgtgtctcacccaggcaagtatacactgatcgaggtgcaggccgaagatgaagcccaggaggcggtggtaaaggttgatcgcgggcccgtgagaacagtcaccaagagggttcagccgtgctccctggacccagctacacagaagctcattaccaatattttttccaaggaaatgttcaaaaatactatggctttaatggatttggacgttaaaaagatgcctctggggaaactgtccaagcagcaaattgctcgaggctttgaagctctggaggcactggaagaggctctgaaggggccgactgacgggggccagagtctggaagaactctcgtcccatttctataccgtgattccccacaactttggtcattcacaacctccccccatcaactcgccggaactccttcaggcaaagaaagacatgctcctcgtgctggctgacattgagttggctcaggcgctccaggcggtaagcgaacaggagaaaactgtcgaggaggtgccccatcccctggatagggactaccagctattgaagtgccagctgcagctcctggacagcggctag

SEQ ID NO: 16739 - DNA, 5175 bp, synthetic construct
  misc_feature 1..5175: note = Description of Artificial Sequence: Synthetic coding sequence
  source 1..5175: mol_type = other DNA
atggtgatggggatttttgccaactgtattttctgcctaaaggtcaagtacctcccacagcaacagaagaagaagctccagactgatatcaaagaaaacggtgggaaattttccttttcattgaacccgcagtgcacacatatcattctggataacgcggacgttctgtctcagtaccagctcaactctatccagaagaatcatgtccacatcgcgaacccagatttcatctggaaatctatacgtgaaaaacgtcttctggatgtgaaaaactatgatccctacaaaccactggacataactccccctcctgaccagaaggcctcttcctcggaggtgaagaccgaaggactctgccctgatagcgccaccgaggaggaagacacagtcgagttgaccgagtttgggatgcaaaatgtagaaattccacacttaccccaggattttgaggtggctaagtacaatactctggagaaagtgggcatggagggcggacaggaggccgtcgtcgtggaactgcagtgctctagggatagccgtgactgcccattcctgatctcaagccatttccttctcgatgacgggatggagacacgcaggcagttcgccattaaaaagaccagcgaagatgcttccgaatatttcgaaaactatatcgaggagctaaaaaaacagggtttcttgctgcgcgagcacttcacacccgaggccactcaacttgcttcagaacagttacaggcactgttacttgaagaggtgatgaactcctccaccttgtctcaggaggtcagtgacctggtggaaatgatctgggccgaagccctgggccacctggagcatatgttattgaaaccggttaataggataagtctaaatgacgtgagcaaagctgagggcatcctcctcctggtgaaagcggctctcaaaaacggtgagaccgctgagcagcttcagaaaatgatgaccgagttctataggctaatcccccataaggggaccatgcccaaggaagtgaacttgggattactggcaaagaaggcagacctctgtcagctaattcgcgacatggtgaatgtctgcgagaccaatctcagtaaacctaatccacccagtctggccaaatatagagccctcaggtgtaagattgaacatgtggaacagaacacggaggagtttttaagagtgcgcaaggaggtgttacagaaccaccattcaaagtctccggtcgatgtgctgcagatctttcgtgtcggccgagtcaatgagaccaccgagttcctgagcaagttaggcaatgtgagacctttgctccatgggtctcctgttcagaacatagtggggatcttatgccgaggtttgttactccctaaagtcgtggaagatcgtggcgttcagaggaccgacgttggcaacctggggtctgggatttatttttctgattccctgagcacctccatcaaatattctcaccctggcgagacagatgggactaggttactcttgatctgcgatgtcgcattgggcaagtgcatggatctgcacgaaaaggatttcagtcttactgaggccccaccaggatatgatagcgtgcacggggtctcacagaccgccagcgtgacgacagatttcgaggatgatgagtttgtggtgtacaaaacaaatcaggttaaaatgaagtatattataaagttttcaatgccaggggaccaaataaaagactttcacccaagcgaccacactgagcttgaggagtataggccggaattctccaacttttctaaagttgaagactatcaattgccagatgccaagactagttccagcaccaaagctgggctgcaggacgccagcggcaacctcgtgccactggaagatgttcacatcaagggcagaatcatagacactgtcgctcaggtgatagtgttccagacctacaccaacaaatcccacgtcccaattgaggcaaaatatatctttccactcgacgataaggccgccgtttgtggcttcgaggctttcattaatgggaaacatatagtaggggaaatcaaagaaaaagaagaagctcagcaagagtacctcgaagccgtgactcagggacatggagcttatctaatgagtcaggacgctcctgacgtgtttacagtgtcagtgggaaatcttccccctaaagcgaaggtcctgataaagatcacatacattaccgagctttctatcctgggcacagtcggggtgtttttcatgcctgccacagtcgcgccctggcagcaggataaggccctgaacgaaaacctccaagataccgtcgaaaaaatctgcatcaaggagattgggacaaagcagagctttagcctcactatgtccattgaaatgccatacgtaatcgagtttatattctccgacacccatgagctcaagcaaaaacgaactgactgtaaggcggtgatctctacaatggaaggatctagtctggacagcagtggcttcagcctgcacattgggctgtccgcagcttacttgcctagaatgtgggtagaaaagcatccagagaaggagagtgaggcctgtatgttggttttccagcctgatctcgacgtcgaccttccagatcttgcaagcgaatctgaagtgattatctgcttggattgcagcagcagtatggagggtgtaacctttctgcaggctaaacagatcgctctgcacgctctctctctggtcggcgaaaaacagaaagtcaacattatccagtttggcactggatacaaggagcttttttcatacccaaagcacattacatccaacacgatggccgccgaattcataatgtccgccacccctaccatgggtaataccgacttctggaaaactctgaggtatctgtcgctcttgtacccagctaggggctctcgaaacatattgcttgtgagtgacggccaccttcaagatgagtcccttactctccagctagtgaagagaagcagacctcatactcggttgttcgcttgcgggattggatctactgctaaccgacacgtgctccgcattctgtcccagtgcggcgcgggagtattcgagtatttcaacgcgaaaagtaaacattcctggcgaaagcagatcgaggaccagatgacacgcctctgcagtccatcatgccacagtgtcagcgtgaagtggcagcaactgaatccagacgtccccgaggcactccaggcccctgcccaggtaccctccttgttcctgaatgataggctgctggtttatggctttattccacactgcacccaggccacactttgtgcccttatccaggagaaagaatttcgcaccatggtgtctacgaccgagctgcagaagacgaccgggaccatgattcacaaactggccgctagggctctaatacgggactacgaggatggcatactgcatgagaacgaaacttctcacgagatgaagaaacagacattgaagtcccttatcattaaacttagcaaagaaaacagcctgattacacagtttacgagcttcgttgccgtggagaagagagatgagaacgagtctccctttcccgacattcccaaggtttcagaactgatagcaaaggaggacgtggactttcttccctatatgagctggcagggggagcctcaggaagccgttaggaaccagagcttgttggcctcctccgagtggccagaactcaggttgagtaaaaggaagcataggaagataccctttagcaagcggaaaatggagctcagtcagcctgaagtctcagaagacttcgaagaagatgggctgggggtactccccgcattcaccagtaacctggagaggggtggcgtggaaaaactgcttgatttaagctggacagagagctgtaagcctaccgctacagaacctctgtttaaaaaggtgtcgccatgggagaccagtacatcctcgttttttcctatcctggcgccggccgtgggctcttacctacctccgaccgcccgggcacatagtcccgccagccttagcttcgctagttataggcaagtagccagctttggttcggcggcaccaccacgccagttcgacgcgtcccagttcagtcaaggaccagtgccaggaacctgcgcagactggattcctcagtcggcgtcatgcccaaccggacctccgcaaaaccccccaagcagtccatactgtggaatcgtcttttcagggtcctccctgtcatccgcacagtcagcccccctacaacacccaggtgggttcacaacaagaccaagcgccggcaccttccctgagctcgattctccgcagttgcacttcagtctgcccaccgatccggatccaattagggggttcggctcataccacccaagcgcttcaagtcccttccattttcaaccctcagctgcctctcttaccgccaacctgcggctgcccatggcctccgctttacccgaggctttgtgctctcagtcacgaactacaccggtggacttgtgccttttagaagagtctgtgggctctttagaaggatccaggtgccccgtattcgcttttcagtccagcgatactgagagcgacgaactgtctgaggttcttcaggactcctgttttctccagattaaatgtgataccaaggatgatagtatcttgtgctttctggaggtcaaggaagaagacgagatcgtatgtatccagcactggcaggacgctgtgccttggaccgagctgttgtctctccagaccgaggacgggttctggaaacttacacccgagttaggactgattttaaacctgaacactaacggcttgcattccttcctgaaacagaaaggcattcaatcattgggcgtcaagggaagagagtgcctgctggatctgatagcaaccatgctagtcctgcagtttatacggaccagacttgagaaagaagggattgtgtttaagtctcttatgaaaatggatgacgcttctatcagtcggaatatcccttgggctttcgaagccatcaaacaggcgtcagagtgggtccgacgaacagagggacagtacccatcaatctgccccaggctggaactaggaaatgattgggattctgctaccaagcagcttctggggctgcagccaatatccaccgtgtcgccactacacagggtgttgcattactctcaagggtag

SEQ ID NO: 16740 - DNA, 1911 bp, synthetic construct
  misc_feature 1..1911: note = Description of Artificial Sequence: Synthetic coding sequence
  source 1..1911: mol_type = other DNA
atgaaccctagtgctccgtcctatccgatggctagtctgtacgttggggacctccaccctgacgtgacagaggccatgctctacgaaaaattttctcccgctggccctatcttgagtattcgagtctgtagggacatgataacccgccggagcctaggatacgcttatgtgaattttcagcaacccgcagatgcggaaagggctctggatactatgaactttgacgtgatcaaggggaaacccgtcagaatcatgtggagtcagcgtgatccgagcctgcgtaagagtggggtcggcaatatcttcattaagaacttggataagagcattgacaacaaggccctgtacgacacattttcagcgtttggtaacattttgtcttgcaaagtcgtgtgcgacgaaaatgggtcgaaggggtacggatttgtgcatttcgagacccaagaggcagctgagagggcaatcgagaagatgaacggcatgcttcttaacgaccggaaagtattcgtgggacgattcaagtcccgcaaagagagggaggccgaactgggcgctagggccaaagagtttacgaatgtgtatattaagaatttcggcgaagatatggatgatgagaggttgaaagacttatttggtaagtttggccccgccctgtctgtgaaggtaatgactgacgaatccggcaaatccaaaggttttggatttgtgagcttcgagcggcatgaggacgctcaaaaagctgtggatgagatgaatgggaaagagctcaatggaaagcagatctacgtggggcgggcccagaagaaagtcgagcggcaaacggagctaaaaaggaagtttgagcagatgaagcaagataggattaccaggtaccagggtgtcaacctgtatgtgaaaaacctggacgatggcatcgacgacgaaagactccggaaagaattcagcccattcgggactataacttccgcaaaggtgatgatggaaggtggccggtccaaaggcttcggattcgtgtgtttctcttcgcctgaagaagccaccaaggcagttaccgagatgaacggtcgtatcgtcgctacaaaacccttgtacgtcgcactcgcccagaggaaggaggagaggcaggcacacctcacaaatcagtatatgcagagaatggctagtgtgagggccgttccaaacccagtgatcaacccttatcagccagcccccccgtccgggtacttcatggcggccatcccccagacccaaaaccgtgccgcctactaccccccgtctcagatcgcacaactgcggccttcaccacggtggaccgcacaaggtgcacgcccacacccatttcagaacatgcccggtgccattagaccagcagcccctcgcccacctttctccaccatgagaccagcgagctctcaggtgcccagagtcatgtccactcagagagtggcgaacacctccacacaaaccatggggccacgtcccgctgcggcggctgccgcagcgacccctgcagtcagaaccgttcctcagtacaagtacgccgccggtgttcggaaccctcagcagcatctgaacgcacagcctcaggtgactatgcagcagccagccgtgcacgttcagggacaggaacccctcacggcttccatgctggctagcgctccacctcaggagcagaaacaaatgctgggggagcgtctattccctctgattcaggctatgcatcccactcttgccggtaagataacgggtatgctcctggaaatagataattcagagcttttgcacatgcttgagagtcctgagtctctgcgttccaaagtagatgaagccgtggcagtgctacaggcgcatcaggcaaaggaagcagcacagaaagctgtgaatagcgctactggggtccctacagtatag

SEQ ID NO: 16741 - DNA, 1644 bp, synthetic construct
  misc_feature 1..1644: note = Description of Artificial Sequence: Synthetic coding sequence
  source 1..1644: mol_type = other DNA
atgaatccaagcgctcctagttatccaatggcctcattatatgtgggcgacctccaccccgatgtgacggaggcgatgctctatgagaagtttagtccggcaggccctatcttatccatccgagtatgcagggacatgatcaccagaagatcactgggctacgcctacgtaaatttccagcaacccgctgacgcagagagggctttggatacgatgaacttcgacgtgattaaggggaagcccgttagaatcatgtggagccaacgtgatccatcactgagaaaatcaggggtgggcaatattttcattaagaacctggacaagagtatcgacaataaagctttgtatgacaccttctccgctttcgggaacatccttagttgtaaggtagtttgtgacgagaatgggtcaaaaggctacggctttgtccacttcgagacccaggaagctgccgagagggccatagaaaaaatgaatgggatgctgctgaacgataggaaggtttttgttggaagattcaagtctcgcaaagaacgtgaagctgaactcggcgccagggcaaaggaattcaccaacgtttatatcaaaaacttcggcgaagacatggatgacgagagactcaaagacctatttggaaaatttgggcccgcactttctgtgaaggtcatgacggacgaatccggtaaatcaaaaggattcggctttgtgagcttcgaacgacatgaagacgcccagaaggctgtagatgagatgaacggaaaggagctcaatggcaaacagatttatgtgggcagggcccagaagaaggtcgaacgacagactgaattgaagcgtaagttcgaacagatgaaacaggataggatcacacggtaccagggagttaacctgtatgtgaagaatctcgatgatggaatagacgatgagaggctgcgcaaggagttctcaccattcggaacaatcacctcagccaaggtgatgatggaaggcgggcggtcgaaaggttttgggtttgtgtgcttcagcagtccagaggaggcaactaaggccgtaactgagatgaatggcaggattgtggcaacaaaaccattgtacgttgcactggcgcagcgtaaagaggaaagacaagcccatctgacaaaccaatacatgcagcgcatggcttccgtgagggctgttcccaacccagtcattaatccctatcagcctgccccaccaagcggctactttatggccgccattccgcaaactcaaaatagagcagcctattatcccccctcacaaatcgctcagctgcgcccatcgccaagatggactgcccagggggctagaccccaccctgcagtacacgtccagggccaggaaccactgacggcaagcatgctggcgtcagctcctcctcaggagcaaaaacagatgttgggtgaacgcctcttccctctgatccaggccatgcacccgacactcgctggcaagatcacgggaatgcttttagagattgacaacagcgaattattgcacatgcttgagagccccgagagcctcagatcaaaagtggatgaagcagtcgccgttctacaagcacaccaggctaaagaggctgcccagaaagcagtgaacagcgccaccggcgtgcccacggtctag

SEQ ID NO: 16742 - DNA, 129 bp, synthetic construct
  misc_feature 1..129: note = Description of Artificial Sequence: Synthetic coding sequence
  source 1..129: mol_type = other DNA
tagatgttagagtccccagagagcttgagatccaaggtagacgaagctgttgctgttctgcaggcccaccaagccaaggaagcagcacagaaagctgtcaatagcgcaaccggtgtgcctacagtgtag

SEQ ID NO: 16743 - DNA, 117 bp, synthetic construct
  misc_feature 1..117: note = Description of Artificial Sequence: Synthetic coding sequence
  source 1..117: mol_type = other DNA
atgaatccttccgccccatcttaccccatggccagcctctatgtcggcgatctgcatcctgatgtgacagaggctatgctgtacgaaaaattctcccccgctggcccgatcttatag

SEQ ID NO: 16744 - DNA, 357 bp, synthetic construct
  misc_feature 1..357: note = Description of Artificial Sequence: Synthetic coding sequence
  source 1..357: mol_type = other DNA
atgaatccatctgcaccatcgtatcccatggcaagcctctatgtgggcgacctgcacccagacgtcactgaagccatgctttatgagaagttctcaccggctggccctattctttccattcgcgtgtgtagggatatgattacaaggcggagcttggggtatgcatatgtgaactttcaacaacccgcagacgcagagcgggccctggacactatgaactttgacgtcatcaagggcaaaccggtccgcataatgtggagccagagagaccctagtctccgcaaatctggggtcggtaatatatttatcaaaaatctcgacaagtcgatagataacaaagcactttatgatacatag

SEQ ID NO: 16745 - DNA, 132 bp, synthetic construct
  misc_feature 1..132: note = Description of Artificial Sequence: Synthetic coding sequence
  source 1..132: mol_type = other DNA
atgaatccgtccgctccatcgtatcccatggcctccctgtacgtgggggatctgcacccggacgttaccgaagccatgttgtatgagaagttttcgccagctggcccgatattatctattcgtgtctgctag

SEQ ID NO: 16746 - DNA, 510 bp, synthetic construct
  misc_feature 1..510: note = Description of Artificial Sequence: Synthetic coding sequence
  source 1..510: mol_type = other DNA
taggcgtcctctcaggtgccccgggtgatgtccactcagcgtgtagccaacacatctacacagacaatggggcctagacccgctgctgctgccgccgccgccactcccgcagtcaggactgtgccacagtacaaatacgccgcaggcgtacgcaacccgcagcagcatttgaacgcacaaccgcaggtgaccatgcagcagccggctgtgcacgtgcagggccaggaaccactgaccgccagcatgttagcatccgcccctccacaggagcaaaaacagatgctcggtgaacgcctcttcccgctcatccaggcgatgcatccaacactggccggaaaaatcactggaatgctcctggagatagataattcggagctgctgcatatgctggagtccccggaaagcctgagaagcaaggtagatgaagcagtcgctgtattacaagcacatcaggcaaaagaagccgcccagaaagcagtcaatagcgcaactggggttccgactgtctag

SEQ ID NO: 16747 - DNA, 186 bp, synthetic construct
  misc_feature 1..186: note = Description of Artificial Sequence: Synthetic coding sequence
  source 1..186: mol_type = other DNA
atgaacccgtccgcaccaagttaccccatggcttccctgtatgtaggcgatctgcatcccgatgtgaccgaggccatgctgtatgagaagttttccccagcgggacccatcctctctatcagggtgtgtcgagacatgatcacccgcaggagtctaggttacgcatacgtcaattttcaacagtag

SEQ ID NO: 16748 - DNA, 390 bp, synthetic construct
  misc_feature 1..390: note = Description of Artificial Sequence: Synthetic coding sequence
  source 1..390: mol_type = other DNA
atgaacccaagcgcaccttcatatcctatggcttctctgtacgtgggtgaccttcacccagacgtgaccgaggccatgttgtacgagaaatttagtccggcgggtcccatcttgagtatacgtgtgtgccgcgatatgattacacgcagaagcctgggctatgcatacgtaaattttcagcaaccagcagacgccgagcgcgctctggacacaatgaacttcgatgtgattaaaggaaagccggttagaattatgtggtcccagcgggaccctagcttacgcaagtccggagtgggcaatatatttatcaaaaatctggataagtctattgacaataaagctctctacgatacgttttccgcattcggaaatattctcagctgtaaatag

SEQ ID NO: 16749 - DNA, 552 bp, synthetic construct
  misc_feature 1..552: note = Description of Artificial Sequence: Synthetic coding sequence
  source 1..552: mol_type = other DNA
atcagacccgctgcacctcgcccacccttctctaccatgagaccagcatccagccaggtgccccgagtaatgagcacacaaagagttgcgaatactagcactcaaaccatgggacctaggcccgcggctgctgctgccgctgccacaccggccgttcggaccgttccacaatacaaatacgctgccggagttagaaacccccagcagcatctgaatgcgcaacctcaggtgaccatgcaacaacctgcagttcacgtccagggccaagaaccattgaccgcatctatgcttgccagcgctccaccacaggaacaaaagcagatgttgggcgagaggctgttccccctgattcaggctatgcaccccactctggcaggcaagataacaggaatgctgctcgagatcgacaactcagagcttctccatatgttagaaagccccgaatctcttcggagcaaagtcgacgaagcggtcgccgtgcttcaggcccaccaggccaaagaggccgctcagaaagccgtcaacagcgcaactggcgtgcctaccgtgtag

SEQ ID NO: 16750 - DNA, 228 bp, synthetic construct
  misc_feature 1..228: note = Description of Artificial Sequence: Synthetic coding sequence
  source 1..228: mol_type = other DNA
atgaacccctctgcacctagttatcccatggcttccctgtatgtgggcgacctgcacccagatgtgacagaggctatgctatacgagaagtttagcccggccggcccaatcctgtcaatcagagtatgcagggacatgatcactaggcgtagcctcggatacgcttacgtaaatttccaacagcccgccgatgctgagagggccctcgataccatgaactttgattag

SEQ ID NO: 16751 - DNA, 1008 bp, synthetic construct
  misc_feature 1..1008: note = Description of Artificial Sequence: Synthetic coding sequence
  source 1..1008: mol_type = other DNA
atgagcaaacggaaggccccacaggaaaccctgaacgggggtattaccgatatgctgaccgagctagccaattttgagaaaaacgtgtcacaggccattcacaagtacaacgcttatagaaaggcggcttctgtgatagccaagtaccctcacaaaatcaagtccggtgctgaggcaaagaaacttccaggtgttggcaccaaaatcgctgagaaaattgacgaatttctggctaccggtaaacttcgaaagctggagaaaataaggcaggacgatacaagtagctcaatcaacttcctcactcgagtgagcggcatcgggccctcagccgcccgcaagttcgtggacgaaggtataaagaccctggaggatctccggaagaacgaggacaagctcaatcatcatcagcggattgggctcaaatatttcggcgacttcgagaagagaatcccaagggaggagatgcttcaaatgcaggatatcgtactgaacgaagtcaagaaagtcgacagtgaatacatcgctaccgtgtgcggaagcttccggcgtggtgccgagtccagcggggatatggacgtcctgctaacccaccccagtttcacgagtgagagcactaagcagcccaagctgcttcatcaggtggtggaacagctccagaaagtgcattttattactgacacccttagtaaaggtgaaaccaaatttatgggcgtatgccaactacctagtaagaacgacgaaaaggaatacccgcacaggcgcattgatattagactgatcccgaaagaccagtactactgcggggtactgtactttactggaagcgatattttcaataaaaatatgcgggcccacgccctggaaaaggggttcaccatcaacgagtataccattagacctttgggagtgaccggagtggccggggagccactcccagtcgactcggagaaggacattttcgattatatccagtggaaataccgcgaaccgaaggatcgcagtgagtag

SEQ ID NO: 16752 - DNA, 720 bp, synthetic construct
  misc_feature 1..720: note = Description of Artificial Sequence: Synthetic coding sequence
  source 1..720: mol_type = other DNA
tgaggggactttgagaagcgcattccccgcgaggagatgctgcagatgcaagacattgtgcttaacgaagttaaaaaggttgacagtgagtacatcgctacagtttgtggtagcttcagaagaggcgcagagagctccggcgatatggatgtcttgctcacccacccaagttttacctctgaatctactaaacagccgaagttgctgcatcaagtcgtagagcagctgcaaaaagttcatttcataaccgacacattatccaagggggaaacgaagtttatgggcgtctgccagctcccatctaagaatgatgagaaggagtacccccaccgtaggatcgatataaggctgatccccaaagatcagtactactgtggcgtgttgtattttactggctccgatatatttaacaaaaatatgcgagcccacgcattagaaaaaggctttactatcaacgagtatacaatacgtccattaggcgttactgtcctccaggccacccgcgaggacctgatgcacaatatgctgttagggccacagctaaaggcgatcaaagaattgcaggagaatccttgccagtggatcgtgaagaagacaagtctcatcactagcagtggcaatacgggaaaccccaggactggtgctaacgaggcatgtatcctacccggaaggcacaatcctatcggcgtcctgatatattttctgacttttgcaatgtag

SEQ ID NO: 16753 - DNA, 843 bp, synthetic construct
  misc_feature 1..843: note = Description of Artificial Sequence: Synthetic coding sequence
  source 1..843: mol_type = other DNA
atgtcgaagcggaaagctcctcaagagacactcaacggaggaattaccgacatgctgacagaacttgccaatttcgagaagaacgtgtcccaggcaatccacaaatataacgcttaccggaaggccgccagcgtcattgccaagtatccacacaaaattaagtctggggcggaagctaagaagcttccaggtgtggggaccaaaatcgcggaaaaaatcgacgaatttctcgctaccggcaaactcaggaagttggaaaagatcaggcaggacgacacctcctcctccattaattttctgaccagggtgtccgggatcgggccctctgcagccagaaaattcgtggatgaaggaataaagaccctggaaggttcccagcttgatagctgccctgtcaagggccacctgaatggcactgagtcccttctggatctgatctgggacgtgatgacaattctgaaacttaaaaatgctgatcttcgcaaaaatgaggacaagctgaatcaccatcaaagaattggcttaaagtacttcggagactttgagaagcgtatcccacgggaagagatgctgcagatgcaggatatagttctgaatgaggtgaagaaggtggacagcgaatacatcgcgaccgtgtgtggctcattcaggagaggcgccgagtcatcgggggacatggatgtccttttgactcatcccagttttacctcagagtcgaccaaacagcctaaactccttcaccaggttgtggagcagctgcagaaagtacacttcataacggacactttaagcaaaggcgagactaagtttatgggggtgtgtcagctccccagcaagaactag

SEQ ID NO: 16754 - DNA, 714 bp, synthetic construct
  misc_feature 1..714: note = Description of Artificial Sequence: Synthetic coding sequence
  source 1..714: mol_type = other DNA
taggagaagattgacgagttcctcgccacagggaagttgcgtaaacttgaaaagattaggcaggacgatacctcttccagcatcaatttcctaacaagggtctccggtatcgggccatcggccgcacggaaatttgtcgatgaaggcatcaaaactttggaagacctacggaagaacgaagacaaactcaaccatcaccaacgcatcgggttaaaatacttcggagacttcgagaaaagaattcctagagaggagatgcttcaaatgcaagacatcgtgctgaatgaggtgaaaaaggtggacagcgagtacattgctacggtttgtggaagcttccgccgcggggccgagtcaagcggggatatggatgtgctgttgactcacccgtcatttacgtcagagagtaccaaacaaggggtctgccagctgccttctaaaaacgacgaaaaggaatatccccaccggcggattgatatacggttgatcccaaaagatcagtactactgcggcgtcctctatttcactgggtccgatatcttcaacaagaacatgagagcccacgctctggagaaaggcttcactatcaacgagtataccattagacctctgggagtgacgggggttgccggagagcccctcccagtagatagtgagaaggacatctttgattatatccagtggaagtatcgagagcctaaggatcgtagcgaatag

SEQ ID NO: 16755 - DNA, 546 bp, synthetic construct
  misc_feature 1..546: note = Description of Artificial Sequence: Synthetic coding sequence
  source 1..546: mol_type = other DNA
atgctccaaatgcaggatattgtgctcaacgaggtcaaaaaggtagatagcgaatacatcgccacagtttgtggctcattccgacgaggcgcggaatcatctggcgatatggatgtgctcctgactcacccatcgttcacctcagagtccaccaaacagccaaaactcctccatcaggttgtggagcagctccaaaaggtccatttcatcactgacactctgagtaaaggagagacaaaattcatgggggtgtgtcagctgcccagcaagaatgatgagaaagaatatccccatcgacgcatcgacatacgactgatcccaaaggaccaatattattgtggagtgctctactttacaggttccgacattttcaacaagaacatgcgcgcgcatgcccttgaaaagggattcacaatcaatgagtataccattcggccacttggagtcacaggcgtggcgggcgaacccttaccggtagactctgaaaaggacatattcgactacatccagtggaagtacagagagcccaaagaccgcagcgagtag

SEQ ID NO: 16756 - DNA, 1728 bp, synthetic construct
  misc_feature 1..1728: note = Description of Artificial Sequence: Synthetic coding sequence
  source 1..1728: mol_type = other DNA
atggatccccgcggaattctaaaagcttttcctaaaagacagaaaattcacgccgacgcctccagcaaggtcctggctaaaatccctagaagggaggagggtgaagaggccgaggaatggctctcctcactgcgagcccacgttgttcggactggtattggccgtgcgagagcagaactgttcgagaagcaaatcgttcaacacggcggccaactgtgccccgcccaaggcccaggcgtgacccacatagtggtcgacgaaggaatggattacgagagagccttgcgcttgctgcggctgccccaactgcctcccggcgcccagctggtgaaaagtgcatggctgagtctgtgtttacaggagcgtagattagttgacgtagccggcttttccatttttatcccttcgcggtacctggaccatccacaaccttcaaaagccgagcaggatgcctccattcctcccggcactcatgaagcacttttgcagacagcactttcaccacctccacctccgacccgtcctgttagccctccccaaaaagcgaaggaggcgcccaacacacaggcgcagcctatcagtgacgatgaggcctctgacggcgaagagacacaagtgagtgctgctgatctcgaggccttgatcagtggacattaccctaccagcctcgagggagattgcgaaccgagtcccgctcccgctgtactggacaagtgggtgtgtgcccaaccgtcatcccaaaaagccaccaatcataacttacatatcacagagaagctggaggttctggctaaggcttacagcgttcaaggtgacaagtggagggctttgggttatgctaaagccataaatgcccttaagagtttccataagccagtgacttcataccaggaagcttgttctatacctggaattggaaaaaggatggctgagaagatcatcgaaatcctggaaagcggccatctccggaagttggaccacatctccgagtccgtcccggtgttggaactgttttctaatatctggggtgctggcacgaaaaccgcgcagatgtggtaccaacagggctttaggagcttggaagacatacggtcccaggccagtcttactactcaacaggcaattggtttgaaacattactctgacttcctggagcgcatgccccgcgaggaggccaccgagattgaacagacggtgcagaaagccgcacaggcctttaattccgggctgctttgcgtggcttgcgggagttatagacgaggcaaggcaacgtgcggcgacgtggatgtcctgattactcatcctgacggcaggtcgcatagaggaatcttttctcggctcctcgattctttacgccaggaaggctttctgaccgatgatctggtgtcacaagaagaaaatggccagcagcagaaatatttgggtgtctgccggctgcccgggcccggtaggagacaccggcggctggacataattgtggtgccttactctgagttcgcttgcgctctgctgtatttcaccggcagtgcccacttcaatagaagcatgagggccctggctaagaccaagggaatgtcattatcagaacatgccctgtccacagctgtcgtgcggaatacgcacggatgcaaagttgggccagggagagtgctccccacacctacggagaaagatgtattccgcctgcttggcctgccatatcgcgagccggctgaaagggattggtag

SEQ ID NO: 16757 - DNA, 897 bp, synthetic construct
  misc_feature 1..897: note = Description of Artificial Sequence: Synthetic coding sequence
  source 1..897: mol_type = other DNA
atgcaccatcagaaatatctacagaggttcctcgggggcaagagggaaaagaagcaaaaagaggcttgcagcatcccgggcattgggaagagaatggccgaaaaaataatcgagattttggaatctgggcatctcagaaagctggatcacatttcagagtccgtccccgtgctggaactgtttagtaacatctggggggctggtaccaagacagcccagatgtggtatcagcagggtttcagatccctcgaggatataagatctcaggccagtctgactactcagcaggccattggcttgaaacactactctgatttcctcgagcggatgccgcgcgaagaggccaccgagatcgagcagaccgtccagaaagcggcccaggcattcaactcaggcctcctgtgtgttgcctgtggtagttatcggaggggcaaggctacctgcggcgacgtcgacgtcctgatcacgcacccagatggccgctcacatagaggaattttttctagactgctggattccctgcggcaggaaggcttcttgacagatgacctggtatcccaagaggaaaacgggcagcagcagaagtatctgggggtgtgtcgactgccgggccctggaaggaggcaccgacgcctggacattatagtggttccgtatagcgaattcgcttgtgccctgctctactttaccggatccgcacacttcaaccgatctatgagggctttagcaaaaacgaaaggcatgtcactgtcggaacacgcgctatctaccgccgtggtgagaaatacacatgggtgcaaggtcggacccggccgggtactccctacgcccacagagaaggatgtctttaggctgctgggactcccttatcgcgaacccgcagagagagattggtag

SEQ ID NO: 16758 - DNA, 1548 bp, synthetic construct
  misc_feature 1..1548: note = Description of Artificial Sequence: Synthetic coding sequence
  source 1..1548: mol_type = other DNA
atggatcctcgaggcatactgaaggccttccccaaacgccagaagattcatgcagacgcttcctcaaaggtgctggccaagattcctcggagggaggagggcgaggaggctgaggaatggttgagtagcctgcgcgcccatgtggttcggaccggaataggacgagccagagccgaactctttgaaaagcagatcgtgcagcatggaggccagctgtgccctgcccagggacccggagtcacccacattgtcgttgatgaggggatggactatgagcgagccttacgcctgttacgtttgccgcagctccctcccggcgcacagctggtgaagtccgcttggctctccctatgtcttcaagaacgccgccttgtcgatgtggctggtttttctattttcatccctagtcgttatttagatcacccacagcctagtaaagccgagcaagacgcctccatcccgcctggcacccacgaagccctacttcagacagccttgagtccgccaccccccccaaccagacccgtgtcccctcctcagaaagccaaagaggcaccaaatacacaggcccaacctatttccgatgatgaggctagtgatggagaagaaacacaagtgtctgccgccgacctagaagcactgatatcgggacactacccgactagtctggaaggtgactgtgaaccatcccccgcgccggcagtacttgacaagtgggtgtgtgcacagcccagctcgcagaaagcgacaaaccacaaccttcatattaccgagaagctggaagtcctggccaaagcgtatagtgttcagggagataaatggcgagcactcggatacgctaaagcaataaatgccctcaaaagctttcataagcccgtgacatcgtaccaggaggcttgctcgatcccaggcatcgggaaacgtatggcagaaaagataattgagatccttgaatctgggcacctcaggaaactagatcacatcagtgagtccgtcccagtgcttgaactatttagtaatatttggggggcaggcacgaagactgcccagatgtggtaccagcagggatttcgttcgctggaggatatccggtcccaggctagccttacaacccagcaggcaattggcttgaagcattattccgacttcctagagcgcatgccgagagaggaggccacggaaatcgagcagacggtccagaaggcggcccaggcatttaactcaggactgttatgcgtcgcctgtggatcctataggcgaggaaaggcgacatgcggggacgtggacgtcttgataacccacccagacggcagatcacaccgtggcattttctcaagactccttgacagtttgaggcaggaagggttcctgaccgacgacctggtgtctcaagaggagaatgggcaacaacagaaatatctcggcgtatgtcggctcccaggaccaggccggaggcatcgcaggctcgatattatcgtggtcccatactctgagtttgcttgcgccttgcaaggaggagcctggcccagcgctgcacattctcattag

SEQ ID NO: 16759 - DNA, 903 bp, synthetic construct
  misc_feature 1..903: note = Description of Artificial Sequence: Synthetic coding sequence
  source 1..903: mol_type = other DNA
atgctgatgcatcaccaaaagtacttgcagagattcctgggaggcaaaagggagaaaaaacagaaggaggcttgctccatcccaggtattgggaaacgcatggcagagaagatcatagagattttggagtcgggccaccttaggaagctggaccatatcagtgaatcagtgccagtgctcgaactgtttagcaatatatggggcgccggaacgaaaactgcacaaatgtggtaccaacagggctttcggtccctggaagatatccgctctcaggcatctttgactacacagcaggccattggtctgaagcattactctgatttcctagaacgaatgcctcgcgaagaggcgactgagatcgaacaaactgtacagaaggccgcccaggcgttcaacagtgggctgctgtgcgtggcatgtggctcataccgccgaggcaaggccacctgcggcgatgtcgacgtcctgattacacaccctgatggtcgctctcaccgaggtatcttttctcgactcttagattctctgagacaagagggttttcttaccgacgacttggtcagccaggaggaaaacggacaacaacagaaatacctcggcgtctgcagactccctggccctgggcgccggcatcgaagactcgacattatagtggtgccatattcagaatttgcctgcgctctgttgtatttcacaggatctgcacattttaacagaagtatgcgggcactcgccaaaaccaaaggtatgagtcttagcgaacacgctctgtccaccgccgtggtgagaaacacccacggatgtaaggtcggtcccggcagggtgcttccaacacctacagagaaggatgtgttcaggctcctgggactgccttatcgggaacctgcggagcgagattggtag

SEQ ID NO: 16760 - DNA, 1728 bp, synthetic construct
  misc_feature 1..1728: note = Description of Artificial Sequence: Synthetic coding sequence
  source 1..1728: mol_type = other DNA
atggatcccaggggcatcttaaaggcattccctaagagacagaagatccacgccgacgcgtcttctaaagtattggccaagataccaagacgagaagaaggggaggaagccgaggagtggttgtcaagcttgcgcgctcacgtagtacgcacggggatcggaagagcccgggcagagcttttcgagaaacagattgtgcagcatggcggtcagctctgtccggcccagggcccaggcgtgacgcacatcgttgtggacgagggcatggattacgaacgcgccttacgtctcctgcggctccctcagctgccacccggcgctcagctggtgaagagtgcttggctgtccctctgcctgcaggaaaggcgcctagttgacgtggctggctttagtatctttatccccagtcgttatctggatcaccctcagccctctaaggccgaacaggatgcgtcaatcccacctgggacacacgaagcgctcctccagacggcactgtctcctccgccccctcctactaggcctgtgtcccctccgcagaaggcaaaggaggcaccaaatacccaggctcagcccatcagcgacgatgaagcaagcgacggggaggaaacacaggtgagtgccgcagatctcgaagcccttatcagcgggcactacccaacatcactggaaggtgattgtgaaccttcccccgctccagcagtgctggacaagtgggtttgtgcacagccttcaagccagaaggcaactaatcacaacttacatataactgaaaaactggaggtgttagctaaggcttacagcgtgcagggcgataagtggcgggcccttgggtacgctaaggccataaacgctctcaagtcttttcataagcctgttacttcttaccaggaggcatgttctattcccgggattggcaaaaggatggccgaaaagattatcgaaattctggagagtggacacctgcgcaagctggaccatattagcgaatcggttccagtgctcgagctcttctctaacatctggggagcaggcacaaaaacagcccaaatgtggtatcagcagggctttagaagcctcgaagacatccgaagtcaggcctccttaactactcaacaagcaatcggtctgaagcactacagtgattttctcgaacggatgcctagagaagaagccactgagattgaacagacagtccagaaagctgcacaggcattcaatagtggattactttgtgtcgcctgcggaagttacaggagggggaaggcaacgtgcggagatgtggacgtcctgataacgcacccagatggccggtcccacaggggaatcttcagcagactcctggattcccttcgtcaagagggctttctgactgacgaccttgtgagtcaggaggaaaacgggcagcaacaaaaatatcttggggtgtgtcgcttgccgggccccggtcggcggcacaggagactggatattatcgttgtcccttactccgagtttgcctgtgctctgctgtacttcactgggtcagcacatttcaaccggtccatgcgagcattagccaagacgaaagggatgtccctcagcgagcacgccctgtcaaccgcagtggtgagaaacactcatggctgtaaggttggtcccgggagagtcctgcctaccccaaccgagaaggacgtgtttcggctgcttggattgccctatagagaacccgcggagcgtgactggtag

SEQ ID NO: 16761 - DNA, 516 bp, synthetic construct
  misc_feature 1..516: note = Description of Artificial Sequence: Synthetic coding sequence
  source 1..516: mol_type = other DNA
atggattacgagagagcactgagactgttgcgacttccacagcttccgcccggcgctcaattggtgaagtctgcctggctttcactctgtctgcaagaaaggagactggtggacgttgccggattctcaatattcatcccttccagcccaagcctgatgatgaaacctgtgatgggtaagaaaccccgtctagtccagctgatctggaagccttcttctgtggccaccacccctcccccgctgagagaaatagtctccctggcgcagccactgctttcttggatctccggaagcgtgcattctccacaggcacggagaagacccatcacaacttctatctctcagagatcctggaaattttggcctaagcctaccgtgttccgcgagacgtcggggggcccatgggcaatgccacgtcccagtatgccctctcgtgcctctatcagtctctccccgcggactagacggcccgcagtgtccctgggcctgggctccggatggctgaggaagtcctag

SEQ ID NO: 16762 - DNA, 747 bp, synthetic construct
  misc_feature 1..747: note = Description of Artificial Sequence: Synthetic coding sequence
  source 1..747: mol_type = other DNA
atggaagcactctgtgtttgctctctaatgcccctacactggtcctggatactcaccgcatcccatctcgccgccttctttcagggttttcgttcacttgaagatatcagatctcaggcctccctgaccacacagcaggccattgggcttaaacattattccgatttcctcgagaggatgcccagggaggaagccacggaaatcgagcaaaccgttcagaaggccgcccaggcctttaactccgggctgttgtgtgtcgcttgcgggtcctatcgcaggggcaaggccacctgcggagatgttgacgtgctgatcacacacccagacggccggtcacacagggggattttcagcaggctgctggattcgctgcgccaggagggcttcctgacagacgacctggtgtctcaggaagagaacggacagcagcaaaagtacttgggtgtgtgtcgcctccccgggccaggaagacgccaccggcggctagatataatcgtcgttccctactcggagtttgcctgtgctctgctgtactttaccgggtctgcccactttaaccgctcgatgcgcgccctagccaaaactaagggtatgagcctctccgagcacgcgcttagcacggctgtcgtccgaaatacccatggatgcaaggtggggcccgggcgagtactgcccacccctaccgaaaaagacgtcttcaggctactgggactaccctatcgcgagcctgccgaaagagactggtag

SEQ ID NO: 16763 - DNA, 1728 bp, synthetic construct
  misc_feature 1..1728: note = Description of Artificial Sequence: Synthetic coding sequence
  source 1..1728: mol_type = other DNA
atggaccctagggggatcctcaaagcgtttccaaagagacagaagatacacgctgatgcttcaagtaaagtccttgcgaaaatcccacgtcgagaagagggagaggaagctgaggagtggctatccagcctgcgagcccatgttgtgaggaccggcattggcagggccagagctgagttattcgaaaagcagatcgttcagcacggtggccaactctgtcctgctcagggacccggagtgactcacatagtcgttgacgaaggcatggactacgaaagggccctgagactcctccggctgcctcagctcccacctggtgctcaattagtgaagtctgcatggctaagcttgtgtttacaagaacgaagattggtggacgtggcgggatttagcattttcataccttccagatacctcgatcacccccagccctcaaaggcggaacaggatgccagtataccacccgggacacacgaagctcttctgcagactgccctgagcccacctcctcctcctacccggccggtgtcccctccccagaaggctaaagaggcaccgaatacccaggcacagcctatcagcgatgatgaggcctcagacggcgaggaaacgcaggtgtccgccgccgacctggaggctctgattagcggacattaccctacaagcctcgaaggagattgtgagcccagcccagctccggctgttcttgataagtgggtctgcgcccagccatcctctcagaaggctaccaaccataacttacacatcacagaaaagttagaggtcctggctaaggcctattccgtacagggggataagtggcgagcactgggctacgctaaggccattaatgctctgaagtcgtttcacaagcccgtcaccagttaccaagaggcctgttctatcccgggtatcggcaaacgaatggcggagaaaattattgaaattttagaaagcggacatctgcgcaaacttgatcatatttcggagtctgtacccgtcctcgagctgttttcaaatatctggggtgccggcacaaaaaccgcccaaatgtggtatcagcagggctttcggagtctggaggacattaggtcacaagcgagcctcacgactcaacaagcaattggtttgaagcactattcagatttcttagaacggatgcccagagaggaggccacagagatcgagcagacagtgcagaaggcggcccaggcttttaattcaggcctcctgtgcgttgcatgcggctcttatcgcaggggcaaagctacctgcggagacgtggatgtgcttatcacccacccagacggccgcagtcataggggcattttctcccgcttgctggatagcctgcggcaagaggggtttctgacggatgacctcgtcagtcaggaagagaacggacagcagcagaagtaccttggtgtgtgccgactccccggacccggccggaggcacaggagactcgacattatcgtggtgccctactcagagttcgcgtgtgccctgctgtactttaccggttctgcgcattttaacaggagtatgcgggcccttgccaagaccaagggtatgagcctctctgaacacgccttatcaacggccgtagtaagaaatacacacgggtgcaaagtgggccccggacgcgtgttgcccacgcccacagagaaggatgtcttccgcctgctggggctcccttatagggagcctgccgaaagggattggtag

SEQ ID NO: 16764 - DNA, 1464 bp, synthetic construct
  misc_feature 1..1464: note = Description of Artificial Sequence: Synthetic coding sequence
  source 1..1464: mol_type = other DNA
atggattacgagcgagccctcagactgttgcggctcccgcagttgcccccaggtgctcagctggtgaaatctgcttggctgtccctctgtctgcaggagaggcgcctggtagacgttgcgggcttttccatttttatcccttctcggtacctggatcaccctcaaccctctaaggccgaacaggacgcttcaataccacccgggactcatgaggcattgctgcagaccgctctctcccccccgcccccacccacccgtcccgtgagtccgccccagaaggcaaaagaagcgcctaacacccaagctcagcccatatcagatgacgaggccagtgacggcgaggagacacaggtaagtgctgccgacctggaagccctaatttctggtcactatcccaccagccttgaaggcgactgtgaaccatctcctgctcctgcggtgctcgacaaatgggtctgtgcacagccatcctctcagaaggccaccaatcacaacctccacatcactgaaaagctcgaggtactcgccaaggcttactccgttcagggtgacaaatggcgagccctgggatacgccaaagcgattaacgctttaaagtcatttcataaaccagtgacctcctatcaggaggcctgtagtatccctggcattggcaagaggatggctgaaaaaattatagagattctggagagtggacatctgcggaagctggatcatattagtgagtctgtgcccgtgctcgagttgttttcaaacatctggggcgcaggcactaaaactgcacaaatgtggtatcaacagggatttagatccctggaagacattcggagtcaggcaagtctgaccacccagcaggctattgggctgaagcactattccgattttctggaaagaatgcctcgcgaggaagccactgagattgagcagacagtgcagaaggctgcgcaggccttcaatagcggactactgtgtgttgcttgcgggagttaccgaagaggcaaggcaacctgtggcgatgttgatgttctcatcactcatccggatggtcggtctcaccgcggcatcttttcacggttattggactctctgcgccaagaagggtttctgacagatgaccttgtgtcccaagaggagaatggacagcagcaaaaatatctgggcgtctgccgcctaccgggacccggacgccgacatagaaggctcgatattattgtggtcccctactccgagtttgcctgcgctctcttatatttcacaggttccgcacattttaaccgttccatgagggctctcgctaagacaaaagggatgtccttgagcgaacatgccttgagcaccgcagtggtaaggaacactcacggctgtaaggtggggcccgggcgggttctacccacccctacagagaaagacgtgttccgcttgctcgggttaccctatcgtgaacccgccgagagggactggtag

SEQ ID NO: 16765 - DNA, 1548 bp, synthetic construct
  misc_feature 1..1548: note = Description of Artificial Sequence: Synthetic coding sequence
  source 1..1548: mol_type = other DNA
atggatcccagaggtattctgaaggcctttccgaagcgccagaagatccatgccgacgccagttcgaaagttctcgccaagatccctagaagggaggaaggcgaagaagctgaagagtggttaagctcccttcgtgcacacgtcgtcaggaccggaatcggcagggcccgcgctgagctctttgaaaaacagatcgtccaacacgggggacagctctgccctgcacaggggcctggcgtcactcacatcgtggtagatgaggggatggactacgaaagggctttaaggctcttgagactaccccagctgcctccgggagctcagctggtcaagagcgcatggttgtccctgtgtctgcaggagaggagacttgtggacgtcgcgggtttctccattttcattccctctagatatctggaccaccctcagccatcaaaggccgagcaagacgcttctataccccctggtacgcacgaagccctactgcaaaccgccctgagccccccccctccgcccacaagacccgtgtcccctccccagaaggccaaggaggcccccaacacccaggcccagccaatctccgacgatgaagcatccgatggagaggaaacccaggtctccgccgccgacttggaggcccttataagcggccattaccccactagtttggagggtgactgcgagccgtcccctgcgcccgcagtgctggataaatgggtttgcgctcagccctctagccaaaaggccacaaatcacaatctccacatcactgaaaaactggaagttctggccaaagcctacagtgttcagggcgacaagtggcgcgccttgggttatgccaaggctattaacgccctcaagtctttccacaaacctgtcaccagttaccaagaggcatgttcgattcccgggattggaaagaggatggccgaaaaaatcatcgagatcctagaatcagggcatctgagaaaactggaccacatcagcgagtcagtgccagtgctggagttgttctccaacatatggggcgctggcaccaagactgcacaaatgtggtatcaacagggctttagaagcctggaggatatccgatcgcaggctagtcttacaacccagcaggcaatcggcttgaaacattattctgactttctggagcgcatgcccagagaggaggctacagaaatcgaacaaaccgtgcagaaggctgcgcaggcctttaattccggattactgtgtgtggcctgtggaagctaccgcagggggaaagccacgtgcggcgacgtggacgtgctaatcacccatcctgatggccggagtcatcgagggatcttctcaagactcctggactcattgcggcaagaaggctttttaactgatgatctggtgtcacaagaggagaatggtcaacagcagaagtacctgggcgtgtgtcgcctgcccggtccgggtcggcgacacaggcgcttggatattattgtcgtcccctactctgagttcgcatgtgctttgcagggaggggcctggccttcagcagctcacagccactag

SEQ ID NO: 16766 - DNA, 810 bp, synthetic construct
  misc_feature 1..810: note = Description of Artificial Sequence: Synthetic coding sequence
  source 1..810: mol_type = other DNA
atggatccgcgtggcatcctgaaagcttttccgaagaggcagaagatccacgctgatgcatcaagcaaggtgttagccaaaatcccgcggagggaggagggcgaagaggctgaggaatggttgtcctccctccgggctcacgtggttaggaccgggatcgggcgggcccgcgccgagttgtttgagaaacaaatagtgcaacacggtggtcaactctgtcctgctcaaggcccaggggttacccacatcgtcgtggacgagggcatggattacgaaagagcattgagattgcttcgtctgccgcaattgccaccaggggcccagttggtgaaatccgcatggctgagcctctgcctacaggagcgccgacttgtcgatgttgctgggttcagcatctttatcccctcaaggtacctagaccatccccagccctccaaggccgagcaggacgctagcatcccaccaggaacgcacgaggccctgttgcaaacggctctctcccctcctcctccaccgacccgccctgtcagcccaccacaaaaggctaaggaggctccgaacacccaggctcagcctatttccgatgacgaggcgtctgatggggaagagacacaggtttccgccgctgacttggaagctctgataagtggccactaccccaccagcctggagggcgactgcgaaccatcccccgcccccgcagtcctggataaatgggtgtgtgctcagccgtcctctcagaaggccacaaaccataatttgcacataaccgaaaagctggaagtcttggccaaggcatattccgtttag

SEQ ID NO: 16767 - DNA, 1413 bp, synthetic construct
  misc_feature 1..1413: note = Description of Artificial Sequence: Synthetic coding sequence
  source 1..1413: mol_type = other DNA
atggaccctcgaggcatactgaaggctttcccaaagcgccagaagattcatgctgatgcctcttctaaagtgctggccaaaatcccaagaagggaggagggcgaagaagcggaggagtggctgtccagtcttcgtgcccatgtcgtgagaactgggatcgggcgagcccgtgcagagctttttgagaagcaaattgttcagcacggaggtcagctgtgtcccgcgcagggccctggcgtcacccatatagtcgtggacgaggggatggactatgaaagggctctgcgtctgttgagattaccgcagctgccccccggcgcacagctggtgaagtccgcctggcttagtctgtgcttgcaagagcggcgactggtcgatgtagccggcttttctatctttattcccagccgctacctggaccatccccagccttctaaagcagagcaggatgcctccattcccccaggaactcacgaggctctcctgcagacagctctgtcgcctcctccaccaccgacgaggccggtatctccccctcagaaagcgaaagaagcccctaacactcaagctcagcctattagcgatgacgaggcctcagacggggaagaaacgcaggaggcctgtagtattcccggaatcggcaagaggatggccgagaagattatcgaaatcctagagtctgggcatcttaggaagctggaccatatcagcgaaagtgtgcccgtcctcgagctgttcagcaatatttggggagccggcacgaaaactgctcagatgtggtaccagcagggatttcgctcactggaggacatacgtagtcaggcctccttaactactcagcaggccataggattgaagcactatagcgactttttggagaggatgcccagagaggaagcgactgaaattgagcagaccgtacagaaagcggcccaagcattcaattcaggactcttgtgtgtggcttgtggtagctaccgcagaggaaaagccacttgcggagacgtggatgtattgattacacaccctgacggccgatctcaccgcgggattttctctaggctcctcgatagtctgcggcaggaggccgtgccttctgtgggccctggattcttgacggacgatcttgtgagtcaagaggaaaatgggcagcagcaaaaatatctgggagtttgtcgccttccgggacctggaaggcggcatcggcgtctggacataatcgtggtcccctacagcgagttcgcctgcgcgctattgtactttacaggctccgcccacttcaatcgctcgatgcgcgctctagccaagacaaagggaatgtccctttccgagcacgctctgagcacagcggtggtacggaatacccacggttgcaaagtcggaccaggaagggtattgcctacgccaacatag

SEQ ID NO: 16768 - DNA, 1005 bp, synthetic construct
  misc_feature 1..1005: note = Description of Artificial Sequence: Synthetic coding sequence
  source 1..1005: mol_type = other DNA
atggatccaagaggcatactgaaggcgttccctaaaaggcaaaagatccatgcggacgcttctagcaagccctcttgcgcaagtgccctgcgctgtctatgcccagagtcagatatcggagccgacagcgcctgtccaggacctgccgaatggctgagcagtttgagagcacacgtcgttaggacaggcatcgggcgggccagggccgagctcttcgaaaaacaaattgtacaacatggaggccaactctgccctgcgcagggaccaggagtgactcacattgttgtggacgaagggatggattacgagagggctcttcggttactgcgcctgccccagcttccgcctggagcccaactagtgaaaagcgcctggttgtccctttgccttcaagaacgccggctcgtcgatgtcgctggcttttccatctttatcccatcaagatatctggaccatcctcagccctccaaagcagaacaggatgcatccatcccccccggtacgcatgaggcgctcctgcaaacagccctcagtccgcctccacctcccactcgaccagtttctcccccccagaaggcgaaggaggccccaaatactcaagcacaaccaatttctgatgatgaggcgtctgatggggaggaaacgcaggtctccgctgcagatctggaagccctcattagtggccattaccctaccagcttggagggcgactgcgagccttcacctgcgccagcagtactggacaaatgggtctgcgcgcagcccagttcccagaaggccacaaatcacaacctccacatcaccgagaagctggaggtgcttgcgaaggcgtatagtgtgcagggagataaatggagagccctgggatatgctaaagcaatcaacgcactcaagagctttcacaaacccgttactagctatcaagaggcgtgcagcattcccggcatcggcaagcgaatggccgagaagattatcgagatactggaatcaggtcatctccgctag

SEQ ID NO: 16769 - DNA, 657 bp, synthetic construct
  misc_feature 1..657: note = Description of Artificial Sequence: Synthetic coding sequence
  source 1..657: mol_type = other DNA
atgcaccatcagaagtacctgcaacggtttcttggtggaaagagggaaaagaagcagaaggaagcatgtagcattccaggaattggaaagcgtatggcggagaaaattatcgagatactggaatctgggcatctgaggaagcttgaccatatatcagagagtgtcccagtgctggaattgttctccaacatctggggagctgggaccaaaaccgctcagatgtggtaccaacaaggcttccggtccctggaggacatccgttcgcaggcaagcctgacaacacagcaggccatcggacttaaacattattctgattttctggaacgcatgcctagggaggaggccaccgagatcgaacagacagtccagaaagccgcccaggccttcaacagcgggctgttgtgtgtggcctgcggttcctacaggagaggaaaggctacctgcggggacgtggacgtgttgattacacaccccgacggtcgctcccaccgtggtatcttttccagacttttggatagcttacggcaggaaggattcctgactgatgacctggtcagtcaggaggagaacgggcaacagcaaaagtacttgggggtgtgtaggctgcccggtccgggtcggagacatagacggctggatattatcgtggtgccctag

SEQ ID NO: 16770 - DNA, 567 bp, synthetic construct
  misc_feature 1..567: note = Description of Artificial Sequence: Synthetic coding sequence
  source 1..567: mol_type = other DNA
atggacccacgagggattctgaaggcgtttccaaagcgacagaaaattcacgccgatgctagctcaaaagtcctggccaagatccccaggagggaggagggggaggaagctgaggagtggctgtcttctctgagagctcacgtggttaggacaggcatcggacgcgcgcgggcggagctcttcgagaagcagatcgtgcaacacgggggccaactttgtcccgctcaaggacctggggtgacgcacatcgtagtggatgaaggcatggactatgagagggccctgcgcctgcttcgactgccccagctcccgccaggagcccagctggtgaaatcagcttggctgagcctttgtctgcaggagcgccgactggtggatgtggcagggttctccatttttatacctagccgctatctcgatcacccgcagccctcgaaggcagaacaggacgcttccattcctcctggcacgcatgaggccttgctccaaacagccctctctcctccgccgcctcccacaaggccagtttcccccccccagaaagcaaaggaagcacccaatacatag

SEQ ID NO: 16771 - DNA, 516 bp, synthetic construct
  misc_feature 1..516: note = Description of Artificial Sequence: Synthetic coding sequence
  source 1..516: mol_type = other DNA
atggactacgagagggctctgaggctgctgcggttaccccagctaccgcctggcgctcagctggtgaaatctgcctggctgagcttgtgccttcaggagcgacgtctggtagacgttgcggggttcagcatctttatcccgtcttctccaagtctgatgatgaaaccagtgatggggaagaaaccccgtttagtgcagctaatctggaaaccatcctcagtagccaccacacccccccccctgagggagatcgtgagtctggcccagccacttctgagttggatatctgggtccgtgcacagcccccaggcgcgtaggcggcctattacaacaagcatttcacagcgttcatggaagttttggcctaagccaactgtatttcgtgagacatccggtggcccttgggcaatgccccggccatcaatgcctagtcgcgcctctattagcctttcaccgaggacgaggcgtccagccgtctctttgggactgggctctggatggttgagaaaatcttag

SEQ ID NO: 16772 - DNA, 459 bp, synthetic construct
  misc_feature 1..459: note = Description of Artificial Sequence: Synthetic coding sequence
  source 1..459: mol_type = other DNA
atggattatgaaagggccctcagactgttgcgcctgccacagctcccccctggagctcagttagtgaagagtgcctggctgtccctttgtctgcaggaaagacgcctcgtggatgtggcaggatttagcatcttcatcccttcatcccccagcctcatgatgaagcctgtgatgggcaaaaaaccgcgtttggtgcagctcatttggaagccttcatctgtggctaccacacctccgcctttacgtgagatcgtctcactggcccagccactgctttcctggatctcaggtagtgtgcactccccccaggctagacggcgaccgatcactacatctatctcgcagcgaagctggaagttctggcctaaacccacagtgtttcgagaaacctccgggggaccctgggcaatgccacggccctcaatgccatctcgggcctcaatctcgctcagcccctag

SEQ ID NO: 16773 - DNA, 939 bp, synthetic construct
  misc_feature 1..939: note = Description of Artificial Sequence: Synthetic coding sequence
  source 1..939: mol_type = other DNA
atgcaccatcagaaatacctccaaaggtttcttggggggaagcgagagaagaagcagaagcctatcagtgacgacgaggctagcgacggggaggagactcaggaggcctgcagtattccaggcattggaaaaagaatggccgaaaagattattgagatcctggagtctgggcaccttcgcaaactggaccatatcagcgaatcagtgccagtacttgaactcttcagcaacatctggggggctggtacgaaaaccgcgcagatgtggtatcagcagggttttagaagcctcgaggacattcgaagtcaggcgtcactgactacacagcaggctattggcctgaagcattacagcgacttcttagagcgcatgcctcgtgaagaggcgaccgagatcgagcagactgtccaaaaagcagctcaagcattcaacagcgggctcttgtgcgttgcctgcggcagttatagacggggtaaggctacatgcggggatgttgacgttttgatcacacaccccgatggaagaagccatcgtgggattttttcccgcctgcttgatagcctgaggcaagagggtttcttgacggatgatctcgtaagtcaagaagagaatgggcagcaacaaaagtatcttggggtctgtcgcttaccgggccctgggcgacgacaccgccggctggatattatagtggtaccctacagcgagtttgcctgtgcgctgctgtacttcacgggctccgcgcactttaaccgatctatgagagctctggctaaaacaaaaggcatgtccctgtcagagcatgctctcagcaccgccgttgttcgcaatacccacgggtgcaaggtaggtccagggagagttcttcccacaccaacagagaaagatgttttccgactgttgggtttgccttacagagagccagcagagagggactggtag

SEQ ID NO: 16774 - DNA, 1401 bp, synthetic construct
  misc_feature 1..1401: note = Description of Artificial Sequence: Synthetic coding sequence
  source 1..1401: mol_type = other DNA
atggctgaccagctctacttagaaaatatcgacgaattcgtaaccgatcagaataagatcgtcacctacaagtggctgtcatacacactcggggtacatgtgaatcaagccaagcagatgctctacgactatgtagaaaggaagagaaaagagaattctggcgcccaactccacgtgacctatctcgttagcggatcactcattcagaacggacatagttgtcataaagtcgctgtagtccgagaggacaaactggaggccgttaagtccaaattagcggtgacagcctcaattcacgtctattctattcaaaaggccatgttaaaagattctggacctctctttaatacggattatgacattctgaagtccaacctacagaattgctctaagttcagcgctatacagtgtgcggccgccgtcccccgagctcccgctgaatcaagcagttcctccaagaagtttgagcagtctcacttgcacatgagctctgagacccaagctaacaacgagttaactacgaacggccatggaccaccagcatccaagcaggtgtctcagcaacctaagggtataatgggaatgttcgccagtaaagccgctgctaaaacccaggagaccaacaaggaaaccaagacagaggccaaagaagtgacgaacgcctctgccgctgggaataaggcacctggtaagggaaacatgatgagcaatttcttcggaaaagccgctatgaataagttcaaggtgaacctggacagcgagcaggcagtcaaggaggagaagattgtcgagcaaccaaccgtgagcgtgactgagcctaaactagccacccccgctggtctgaagaaaagctccaaaaaggcagaaccagtgaaggtgttacagaaagaaaaaaaaagaggaaagagagtagctctgagcgacgatgaaacaaaagaaactgagaatatgcgtaaaaaaaggcgtaggataaagctgcccgagagtgattcatcagaagacgaagtgtttcctgactccccgggtgcctacgaggcagagagcccgtctcccccccccccaccgtctcctcctctggagccggtacccaaaacagagccagagccaccatctgtaaagagttcttccggcgaaaataagcgaaagagaaagagggtgctcaagtcaaagacgtatctggatggcgaggggtgcatcgtcaccgagaaggtgtacgagtctgaaagctgcacggatagcgaggaagaactaaacatgaagacatccagcgtccataggcctcctgcgatgaccgttaagaaggaaccgagagaggaaagaaaaggacctaagaagggaacagctgccctgggcaaagccaacagacaggtctcaattaccggcttttttcaacgtaagtag

SEQ ID NO: 16775 - DNA, 1284 bp, synthetic construct
  misc_feature 1..1284: note = Description of Artificial Sequence: Synthetic coding sequence
  source 1..1284: mol_type = other DNA
atgctctacgactatgtggagaggaaaaggaaagaaaactccggtgctcagctgcatgtgacatatctcgtatctgggtcccttattcagaatggccactcatgccacaaagtggccgtcgtccgggaagacaagttggaagccgtcaaatctaaactcgccgtgaccgcaagcatccatgtctattcaatccagaaagccatgctcaaagatagtggacctttgtttaataccgactacgacatccttaagagtaatttgcagaattgctctaagttttcagcaattcaatgcgccgctgcggttcccagagcacccgctgaaagctctagctcctcgaagaagttcgaacaatcacacttacacatgtcttccgaaacacaggccaacaatgagttgacaaccaacgggcacggccccccggctagtaagcaggtgagtcagcagcccaaagggattatgggtatgtttgcaagcaaggccgcagccaaaacgcaagagacgaataaggaaaccaaaaccgaagctaaggaagtgactaacgcaagtgccgccggtaacaaggcaccaggaaaggggaacatgatgtctaacttttttggaaaggcagccatgaacaaattcaaagtaaatctggacagtgagcaggctgtgaaggaagagaagatcgtggaacagccaacagtgtcagtaaccgagcctaaacttgcaaccccagcaggattgaagaagtcctccaagaaggcagaaccagtcaaagtcttacagaaggaaaagaagcgaggtaaacgtgtggcactgagtgacgatgagaccaaagagacggagaacatgaggaagaaacgacgccgcatcaagctccctgaatccgattctagcgaggatgaagtgttccctgacagtcctggagcctacgaggccgagtcccccagcccccctcctcccccgagcccgcccctggagcctgtgcccaaaacagagccggaacccccaagcgttaagtctagctccggggagaataagcggaagcgcaagcgcgttctgaaatcaaagacatacctcgacggcgaaggctgtatagtgacagagaaagtgtacgagagcgagtcctgcacagattcagaagaggagctgaacatgaaaacgtccagcgtgcaccgccctccagctatgaccgtcaagaaggagccgagggaagagaggaagggtcctaagaaggggactgcagccctgggcaaagccaatcgacaggtgagcatcaccggtttcttccagagaaaatag

SEQ ID NO: 16776 - DNA, 1083 bp, synthetic construct
  misc_feature 1..1083: note = Description of Artificial Sequence: Synthetic coding sequence
  source 1..1083: mol_type = other DNA
atgctgaaggatagcggccccttgttcaataccgattacgatattttgaagtctaatttgcagaattgttccaaattctcagctatccaatgcgctgcagcagtgccccgtgcaccggccgaaagtagcagttcgagtaagaagttcgaacagagccatctccacatgtcctctgaaacacaggctaataatgaactgacaaccaatggacacggccctcccgccagtaagcaggtgtcccagcagccaaaaggtattatggggatgttcgccagcaaagcggcggctaagacccaggagaccaacaaggaaacaaagactgaggctaaagaggtgaccaacgcaagtgcagcagggaacaaggcacccgggaaaggaaatatgatgagtaactttttcggcaaggccgctatgaacaagtttaaggtgaatctggattccgagcaggccgtgaaagaggagaaaatcgtggaacagcctacggtttccgtgactgagccaaagctcgctacccctgcgggcctgaaaaaatcatctaagaaggcggaacctgtaaaagtcctacagaaggaaaaaaaacgagggaaacgggtcgccctgagcgatgacgaaacaaaggagactgagaatatgagaaaaaagcgacgccgtataaaactgcctgaatctgattcatcagaggatgaagtgttccccgacagccccggtgcttacgaggcagagtcccccagtccccctcctcccccttcgccaccgttggagcctgtgccaaagacagagcctgagccaccctcggtaaagagcagctcaggagagaataagcggaaacggaaaagagttctcaaaagtaagacgtatcttgacggtgaaggttgtatcgtcaccgagaaagtgtacgagagtgagagctgtacagacagtgaggaagaactgaatatgaaaacgtccagcgtccacaggcccccagcgatgaccgtgaaaaaggaacctagagaagagcgcaagggtcccaagaagggcacggctgctctcggcaaggccaacaggcaggtaagtatcaccggcttcttccagaggaagtag

SEQ ID NO: 16777 - DNA, 804 bp, synthetic construct
  misc_feature 1..804: note = Description of Artificial Sequence: Synthetic coding sequence
  source 1..804: mol_type = other DNA
atggctgatcagctttacttggaaaacatcgatgagtttgtcacggatcagaataagatagtgacctacaagtggctgtcgtatacacttggcgtccacgtgaatcaagcaaaacagatgctgtatgactatgtcgagagaaagagaaaggagaattcaggggcacagctacatgtgacgtacctcgtatcgggctccctcatacagaatggccattcttgtcataaagttgccgtggtgagggaggacaaactagaggcagtgaaaagtaagctagcagtaaccgcgtcaatacatgtctatagcatccagaaagctatgctcaaggactccggcccgctcttcaacactgattatgacatcttaaagagcaatctccagaactgctccaagttctccgctatccagtgcgcagctgctgttccccgagccccggccgagagctcttcgagctccaagaaatttgagcagtctcacttgcatatgagctctgaaacgcaggccaataatgagctcacaacaaacgggcacggcccacccgcctcaaagcaggttagccagcaacccaagggcatcatgggcatgttcgcctccaaggcagccgctaagactcaggagactaataaagagactaaaacggaggccaaagaggtgacgaacgcctcagcagcgggcaataaggcccctgggaagggtaatatgatgtctaacttctttgggaaagcagccatgaacaagtttaaggtcaaccttgatagtgaacaagccgttaaggaagagaaaatcaaagaaaagaagcgctag

SEQ ID NO: 16778 - DNA, 1566 bp, synthetic construct
  misc_feature 1..1566: note = Description of Artificial Sequence: Synthetic coding sequence
  source 1..1566: mol_type = other DNA
atgggagaggtggaagcgcctggtaggctatggctggagtccccccctggtggagctcccccaatctttctgccctctgacgggcaggctctggtgctggggcggggcccattgacccaggttaccgaccgcaagtgctcacgcacacaggtagaacttgtcgctgatcctgagactagaacagtggcagtcaagcaactgggcgttaatcctagtacaactgggactcaagagttaaagccaggcttagagggctccttaggcgtgggggatactctgtatctggtgaatggacttcatcctctgaccctgcgctgggaggagacgcgtacccccgagtctcagccagatacccctcctggcacaccacttgtcagccaggacgagaagcgcgacgccgaacttcccaagaaaaggatgcggaaatctaatcctggctgggagaatttggagaagctgctcgtcttcacagccgcaggagtcaaaccgcaaggcaaggtggcggggttcgacctggacggtaccttaatcacgaccaggtcaggcaaggtgttcccaaccggcccttctgactggagaattttgtacccggagatccccagaaagttaagggagctggaagccgagggctacaagctcgtcatcttcacaaatcaaatgagcatcgggaggggtaaactgccagctgaggagtttaaggcaaaggtggaggccgtggtagaaaaactcggggtgcccttccaggttttggttgccacacacgctgggctatataggaagcctgtgaccggcatgtgggaccatcttcaagaacaggctaacgatggtacgcccatctcgataggcgacagcatctttgttggggatgcggctggaaggccagctaactgggctccgggccggaaaaagaaagatttcagctgcgctgacagactgttcgccctcaacctcgggctaccgttcgccacccctgaagagttcttcctcaagtggccagctgcgggcttcgaactgccagcatttgacccccggacagtgtcacgaagcggccccttatgcctcccagaaagcagagcattgctgagcgcatctccagaggttgttgtggctgtggggttcccaggagctggcaagagtaccttcctcaagaagcatctagttagcgccggctatgtgcacgtgaatcgggacacgcttggctcttggcagaggtgtgttacgacatgcgagacagccttgaaacagggcaaaagagtagcgatcgataataccaaccctgacgcagccagtagagcacgatatgtccagtgcgcccgggccgcaggcgtcccttgtagatgttttctgtttaccgcgacactcgagcaggcaaggcacaacaataggtttcgtgaaatgactgactcatctcacatacctgtcagcgacatggtaatgtacggatataggaagcaattcgaggccccgacgctggccgagggcttcagcgcaatactcgagattccctttagactgtgggtggagccaaggctgggtcggctgtattgtcagtttagtgaaggctag

SEQ ID NO: 16779 - DNA, 699 bp, synthetic construct
  misc_feature 1..699: note = Description of Artificial Sequence: Synthetic coding sequence
  source 1..699: mol_type = other DNA
atgctgggcgcgatgttccgagccggcacccctatgccgcccaacctgaactcccagggaggaggccactactttattgaccgtgatggcaaagcttttagacacatcctcaacttcctgaggctcggacggttggacttgccccgtggttatggagagactgcccttctccgggctgaggctgatttctatcagatccgccctctgctggacgccttaagagagctagaagccagccagggaacccctgcgccaacagccgcgcttcttcatgctgacgtggacgtgagtcctcggctcgttcatttttctgcaaggcggggcccccaccattacgagttgagcagcgtgcaggtagacaccttccgggccaatctgttttgcactgattcagaatgtctaggcgccctcagagcacggttcggcgtcgcatcaggagatcgggctgaaggttcccctcatttccaccttgagtgggcaccccgcccggtagagctgccagaggtggaatatggccggctaggtctgcagcccctctggacaggcggacctggcgagaggcgcgaggtcgtcggaacacctagctttctggaagaagtgctgcgcgtggcccttgagcatggatttaggttggacagcgtattccccgatcctgaagacctgctcaattcccggagccttagatttgtccggcactag

SEQ ID NO: 16780 - DNA, 5157 bp, synthetic construct
  misc_feature 1..5157: note = Description of Artificial Sequence: Synthetic coding sequence
  source 1..5157: mol_type = other DNA
atgaaccagaatactacggaaccagtggccgcaaccgagaccctcgcagaggtgccggagcatgttctgagaggactgccggaggaagtaagattgttcccatccgcagtcgacaagacaagaatcggagtctgggctactaaaccaattctgaagggcaaaaagttcggcccttttgtgggggataaaaagaagaggtcacaagtgaagaacaatgtctatatgtgggaggtttactatccaaacttgggctggatgtgtatcgatgccaccgatcccgaaaaaggaaattggctgaggtatgtgaattgggcctgcagtggcgaggaacagaaccttttccctctggaaattaaccgcgccatttattataagacgttgaagcctatcgccccaggggaggagctgttggtctggtataacggcgaagataatccggaaattgctgcagcaatcgaagaggaaagagcatccgctaggtctaagaggtcctccccaaagagtcgaaaaggcaaaaagaagtcacaggaaaacaagaataagggcaacaaaatccaggacatccagctgaagaccagtgagcctgacttcacaagtgctaacatgagagactcagccgagggccccaaggaagatgaggaaaagccttcggcatccgccctggagcaacctgctacccttcaggaagtggcctcacaggaggttccgcccgaattagccactcccgctccagcctgggagccacagcctgagcccgacgagagattagaggctgccgcttgtgaagtgaacgacctgggagaggaggaggaggaggaagaggaagaggatgaagaggaagaagaagacgacgacgatgacgagctggaagacgaaggtgaggaagaagcatccatgccaaatgaaaactccgttaaagaacctgagatacgttgtgacgaaaagcccgaggacttgttagaggaacccaagaccacttccgaagagactcttgaggactgcagcgaagtaacaccagcaatgcaaattcctcggaccaaagaagaagccaatggcgatgtctttgagacttttatgttcccctgccaacattgcgagcgaaaattcacaaccaaacaaggcttagaaaggcacatgcacatacatatctctaccgtgaatcacgccttcaaatgtaaatactgcggcaaagccttcgggacgcaaattaacagacgaagacatgaacgtcgccacgaggccggtctcaagagaaagcctagccagactcttcagccatccgaagatctggccgatggtaaggctagtggagaaaacgtagcctccaaggatgattcttcaccgcctagtctcggtccagattgtctgattatgaactctgaaaaggcatcacaggatacgataaatagtagcgttgtggaggagaatggggaggtcaaggaactgcacccctgtaagtactgcaaaaaggtattcggaactcataccaacatgcgacgacatcagaggagagtacacgagcggcatctgatacccaagggggtgaggagaaagggcggtctggaggaaccccagcctccagctgagcaagcacaggccacacagaacgtttacgtgccctcaacagagcctgaagaggaaggggaggccgatgacgtttacattatggatatttctagtaatataagcgaaaatctcaactactatattgatggcaagatccagaccaataataacacctcaaactgtgatgtgatcgaaatggagtccgcgtctgccgatctgtacggcattaactgtttacttacgcccgttaccgtcgaaatcacccagaatattaagacaacacaggtgcccgtcactgaggacctgcccaaagagcccctcgggagtaccaacagcgaagcaaaaaaacgcagaaccgcatctccaccagcgctcccaaaaatcaaggcggaaacagactctgacccaatggttccctcctgctccctgtcactgcccctgagtatctccacaaccgaagcagtgagtttccacaaggaaaaaagcgtctacttgagctctaagttgaaacagcttctgcagacccaggataaactcacccccgctgggatctcagctacagaaattgccaaactaggccccgtatgcgtttcagcgcctgcgtctatgctcccggtgacctcctccaggtttaagcgaagaacatctagtcccccgagcagtcctcaacatagtcctgccctgcgagacttcgggaaaccttccgacgggaaagcagcctggacagacgccgggttgacatccaagaagagcaagttggaatcccattctgatagcccagcttggtccctgagcgggagggatgagcgtgagaccgtcagcccaccttgctttgatgaatacaagatgtcaaaggaatggacagcaagcagcgcgttctcttctgtttgcaaccagcaacccctcgacctctcttctggagtgaagcagaaagctgagggaacaggaaagacaccagtgcaatgggagtcagtgcttgacctcagtgtgcacaaaaaacattgctccgacagcgaagggaaggaattcaaggagagccactcagtgcaacctacctgtagcgctgtgaagaagaggaaaccaaccacatgtatgctgcagaaggtccttttaaacgagtacaatggcatcgaccttcccgtggaaaacccagctgacgggacccggtcacctagtccttgtaagtcgttggaggcccagccggaccccgatctgggtccaggcagtgggttccccgcccccactgtcgaatctactcccgatgtgtgcccgagctcaccagctctgcaaacgcccagcctgtcttccggtcagctaccccctctgctgatacctacagatccatctagcccccccccatgccccccagtgcttactgttgccaccccccctccccctctgctaccgacagtaccactgccggccccaagttcctcagcatctcctcacccgtgcccttctccactgtccaatgccacagcacagtcccccctgcccatacttagtcctactgtgtccccaagcccttcaccaatcccccccgtggaaccactcatgtcagccgcttcaccaggccctcccacactgtctagttctagttccagtagctcatcctcgagttccttttcaagctcctccagctcttcttcccccagtccgcccccgcttagcgccatttcttccgtcgtcagctcaggggacaatctggaagcatcccttcccatgatcagtttcaaacaggaagaattagagaacgaggggctgaaacctcgggaggaaccgcagagcgccgccgagcaggatgtagtggtacaggaaacctttaacaagaacttcgtatgcaacgtctgcgagagtccattcctgtctattaaggatctgaccaaacatttgtcaattcacgcggaagagtggccctttaaatgtgagttttgtgtgcagcttttcaaagataaaacagacttgtccgaacacagatttctactgcatggtgttggcaatattttcgtttgctctgtctgtaagaaagagttcgcctttctttgcaacctgcagcagcaccagagggatctccacccagataaagtgtgcactcatcacgaattcgaatcaggcacattaagaccccagaatttcacggatccatccaaggcacacgtggagcatatgcagtctcttccagaggatccgcttgaaacttcaaaagaggaagaagaattgaacgattctagcgaggagttgtatacaacaatcaagatcatggccagcggaataaagaccaaagaccctgacgtcaggctggggcttaatcaacactacccaagttttaagcccccccctttccagtaccaccaccgtaacccgatgggcattggagttaccgcaaccaactttactacccataatattccccaaacattcacaaccgctattagatgcaccaagtgcgggaaaggcgtggacaatatgcccgagctgcacaaacacatcttggcctgtgcaagtgccagtgataagaagaggtacacaccaaaaaaaaatccagtaccgctgaagcagaccgtacagcccaagaacggtgtggtggttttagacaattccgggaagaacgcctttaggcggatggggcaacctaagagactgaacttcagtgtcgagttatcaaaaatgagctccaacaaattgaaattaaacgctctcaaaaagaagaatcagctcgttcagaaagctattctccagaagaacaaatctgccaagcagaaagcagacctgaagaacgcttgcgaatcatcctcacatatatgcccctactgtaaccgtgagttcacctatatcggatcactgaataagcacgcagcctttagctgccccaagaagccactttcaccacctaagaagaaagtgtctcacagtagcaaaaagggaggtcacagctcccctgccagtagtgataaaaactcaaacagtaatcatcgtaggagaacagctgatgcagaaattaaaatgcagtccatgcaaaccccccttggtaagacccgcgctcggagcagcggcccaacacaggtacccctgccaagctcctcctttaggtccaagcagaacgtgaaattcgctgcgtctgtgaaatcaaagaaaccatcctctagttctctgcgaaactcaagcccaatccgtatggccaagattacccacgtggagggaaagaaaccgaaggccgttgctaagaaccactcagcccagctgagcagtaagaccagcagaagcctccacgtacgggtacaaaaatcgaaggctgtcttgcagtccaagagcaccctggcctccaaaaagaggactgaccgcttcaatattaagagccgggagagatctggaggacctgttacccgctcacttcagctggctgccgccgctgatctgtctgagaataaaagagaagacggaagtgcaaaacaggagctgaaagatttctcatattctctgcggctcgctagtaggtgttctcctcctgcagctccttacatcactcgacagtatcggaaagtgaaggcccccgccgcggcccagttccagggtcccttctttaaagaatag

SEQ ID NO: 16781 - DNA, 5049 bp, synthetic construct
  misc_feature 1..5049: note = Description of Artificial Sequence: Synthetic coding sequence
  source 1..5049: mol_type = other DNA
atgaaccagaatactacggaaccagtcgccgccacagaaactctggctgaggtgcccgagcacgtgctgcgcggactcccggaggaggtcaggctgttccccagcgcagtggataagactcggattggggtatgggcaaccaagccaattttgaaagggaagaagtttggtccctttgttggcgacaagaagaagcgtagccaggttaagaacaatgtctacatgtgggaggtatattacccaaatctggggtggatgtgcatagacgccacagaccccgagaagggcaactggctgcgctacgttaattgggcctgctcaggcgaggagcaaaatcttttcccactcgaaattaacagggctatttactacaaaaccctcaaacctattgctcccggtgaggaactcttggtgtggtacaacggggaagacaaccccgagattgctgccgctattgaggaagagagagcctctgcgagaagtaaacgctcgtcacccaagtcaagaaaaggcaagaaaaagtctcaagaaaacaagaataaaggtaacaagatccaggatatacagcttaaaacatctgagcccgatttcacaagcgccaatatgcgagacagcgcggagggtcctaaggaggacgaagagaaaccctcggcaagtgctctagagcagccagcaacactgcaggaggtcgcatctcaagaggtgcctcccgaactggctacgcctgctccagcctgggaacctcagccagaacccgacgagcgactcgaggccgccgcttgcgaagtgaatgatctgggcgaagaggaagaagaagaagaggaagaagacgaagaagaggaagaggacgacgatgatgacgaactggaagatgagggagaagaagaggcttccatgccaaatgaaaatagcgtgaaggaacccgagatccgttgtgacgagaagccagaagatttgttagaggagcccaaaaccacaagcgaggaaactcttgaggactgctccgaggtgacaccagccatgcagattccccgcaccaaagaggaagccaacggagacgtgttcgagacctttatgtttccctgtcagcactgcgagaggaagtttactaccaaacaaggtcttgaacgccatatgcatatccacatctctaccgtcaatcatgcctttaaatgtaaatactgtggcaaagcatttgggactcagatcaaccgccgacgccacgagaggcggcacgaggcaggtctaaagcgtaaaccctcacagaccctgcaaccttcagaagacttagctgatggtaaagcgtccggcgagaatgtggcgagtaaggacgacagttctccaccctctcttggccccgattgcctgataatgaactccgagaaagctagccaggacacaattaattccagcgtcgtagaggaaaacggcgaggtcaaggagttacacccatgcaagtattgcaagaaggtgtttggaactcacactaatatgcggaggcaccagagacgcgtgcatgaaagacacctgatccccaagggtgttagacggaaaggaggattggaggagcctcaaccgcccgctgagcaagctcaggcgacacagaacgtgtacgtcccctctaccgagccagaagaagaaggagaggcagacgatgtatatataatggatatttcatctaacatatctgagaatctgaattactatattgacggcaaaattcagacgaacaacaatacttctaattgtgacgtgatcgagatggagagcgcctccgctgacctctatgggatcaactgccttctaactccagttaccgtggaaatcacccagaatattaaaactacacaggtgcctgttacagaagacctccccaaggagcctcttggaagcaccaacagcgaagctaagaagcggaggaccgctagccccccggcactccctaagataaaagccgaaactgattcggaccccatggtcccttcttgttcactgtctctacccctgtctataagcacaacagaggctgtgtcctttcataaggaaaaatcagtgtatctaagctcgaaactgaaacaactcctgcaaacgcaggataagctgacacccgctgggatctcggccaccgagattgcaaaactgggcccagtatgcgtctcggcacccgccagcatgctcccggtaacgagttccagatttaaaagaaggacttcttcaccccccagctcccctcaacactcccccgctctgcgtgactttggaaagccctccgacggcaaggcggcttggacagacgctggcttgacatctaagaaatccaaattagagagccacagcgatagtccagcctggtcgctgagcggcagagacgagagggagacagtgagccccccatgttttgatgaatacaagatgtcaaaagaatggacagctagcagcgcgttttcctcagtttgtaaccaacaacccctggatctgtctagcggagtgaagcaaaaggctgaggggactggaaaaaccccagtgcagtgggagagtgtccttgatttaagcgtgcacaagaaacactgtagtgattcagaaggcaaggaattcaaggaaagccattcagtccagcccacctgtagcgcagttaaaaaaaggaaacccactacatgtatgctccagaaggttttgttgaacgaatacaatggaatcgacctgcccgtggagaaccccgccgacggtacaagatctcccagtccctgtaagtctctagaggctcagcctgatcctgatctagggccaggctcgggattccctgcacccacagtggagtcaacgcccgatgtgtgcccaagtagccctgcactccagacgcctagtctatccagtggtcagttaccgccactgctgatcccgacggatccaagttctcctcctccatgcccccctgttctgaccgttgctacacctccccctcctttgctacccacagtaccactgcctgcaccatcgtcatccgcgagtccgcacccatgcccttcccccttatcaaatgcgaccgcacaatcccctctgcccattctcagtcctaccgtcagcccgtcaccgtccccaatcccacccgtcgagccactgatgagcgcggcatcacctggtccccctacgctttctagctcttcgagcagttcgtcttcaagcagctctttctctagctccagctcttccagctctccttctcctcccccactgtcagcaatatcctccgtggtgagttcaggtgataatctggaggcctcattgccaatgataagctttaaacaggaggaactggagaacgaaggactgaagccaagagaagaaccccagtccgctgctgagcaagacgtcgtggtacaggaaacgtttaacaaaaactttgtgtgtaatgtgtgcgagtctccgtttctctctattaaagacctcaccaaacacttatctatccatgccgaagagtggccattcaagtgcgagttctgtgtgcaacttttcaaagacaaaaccgacctctccgagcatcggtttcttctccatggcgtcggcaatatctttgtgtgctctgtttgtaaaaaggaatttgcctttctgtgcaatcttcaacagcaccaacgcgacctacatccagataaggtgtgcacccaccacgaatttgagtccggtactctccgacctcaaaattttacagatccaagcaaggcacacgtcgaacatatgcagtccctccctgaggatcctctcgagacatccaaggaggaggaggagctgaacgactcttctgaggagctgtatactaccattaagattatggcttctggcatcaaaacgaaagatccagatgtgcgcctcggtctgaaccagcactacccatctttcaagcctcctccttttcagtaccatcatcggaacccaatggggataggcgtgaccgccaccaattttactactcacaatatccctcaaacttttaccacagctattcgttgtactaagtgcggcaagggggtggacaacatgcccgagctccataagcatatcctcgcctgcgcgtcagcttccgataagaaaagatacacccccaagaaaaatccagtaccactgaaacaaaccgtgcagcccaaaaacggggtagtcgtcctcgataactctgggaagaatgcatttaggagaatgggacagccgaaaaggcttaacttcagtgtggagttaagcaagatgagctcaaacaagcttaagctgaatgctttgaagaaaaaaaaccagttggtgcagaaggccatcctgcagaagaataagagcgcaaaacagaaggctgacctgaaaaacgcctgcgagtcatctagtcacatctgcccatactgtaatagagaatttacgtatataggctctctgaacaaacatgcagcctttagttgccctaagaaacctctaagtccacctaagaaaaaggtgagccatagctccaagaaaggggggcattcatctcctgcgagcagcgacaaaaactccaacagcaaccaccggaggcgaacagcagacgccgaaattaaaatgcagagcatgcagaccccgttggggaagacccgcgcaaggtctagtgggccaacacaggtcccattgccatccagctctttccgatcgaaacagaatgtcaagttcgcagcttctgtgaaatcaaaaaaacccagttctagttcacttcgaaacagttcacctattagaatggctaagattacacacgtcgaaggaaagaagccgaaagctgtagctaagaaccactccgcgcagctgtcttccaagacctcacggtccctgcacgtcagagttcagaaaagcaaggcggtcctccagtccaaaagcacactcgcttcaaagaaacggacagatcgatttaatatcaaatcccgcgagcgttccggtggccctgtgacgcgatcccttcagcttgcagcggcagctgaccttagcgagaataagcgggaggacgggagtgccaagcaggagctcaaggatttcagaaattttctctag

SEQ ID NO: 16782 - DNA, 4446 bp, synthetic construct
  misc_feature 1..4446: note = Description of Artificial Sequence: Synthetic coding sequence
  source 1..4446: mol_type = other DNA
atgcgggactccgccgaagggcctaaggaagatgaggagaagcccagcgccagtgcactggaacaaccggccacactgcaggaagtagcttcccaggaggtgccgcctgagctggcgacccctgcacccgcctgggagccccaaccagagcctgatgaaagactcgaagcagctgcttgtgaagtcaatgacctgggcgaagaagaggaagaggaggaggaggaagatgaggaagaagaggaagacgacgacgacgacgagttagaagatgaaggagaggaagaagcgtctatgcctaacgagaattccgtgaaggaacccgaaatcagatgtgacgagaagccggaggatctcctggaagaaccaaagaccaccagtgaggagacattagaggactgcagcgaggttacacctgcgatgcaaatacctcgtactaaagaggaggccaacggagacgtatttgagacattcatgtttccctgtcaacattgtgaacgcaagttcacaacgaagcaaggtctggaaagacatatgcacatccacattagtacggtgaaccatgcctttaagtgtaaatactgtgggaaggctttcgggacccagatcaaccggcgcagacatgagcgccgacacgaggccggtctgaagagaaagccctctcagactttgcagccatctgaagatttagcagacggtaaagcctccggcgaaaacgtggcctccaaggacgactcttcccctcctagcctaggcccagattgcttaatcatgaactcagagaaggcctcccaggacaccattaatagcagcgtggtagaagagaacggggaagtgaaggagctgcacccatgtaagtattgcaagaaggtatttgggacccataccaatatgcggcgtcatcagcgaagggtccatgagcgacacctgatcccaaaaggcgtcagacgaaagggcggtctggaggagccccaacctcccgctgaacaagcacaggccacgcagaacgtatacgttcccagtaccgagccggaagaagagggagaggctgacgatgtctatattatggatatttcatctaatatctctgaaaacctcaattattatattgatggaaagatccagacaaacaacaataccagcaactgtgatgttatcgagatggagtcagcttcggcagatctgtacggcattaattgcctgttgacaccggtcactgtggagatcacccagaacattaaaaccacccaggtacccgtgaccgaagacctgcccaaggagcccctagggtctaccaactctgaagcaaagaaacggaggaccgcctcccctcctgccctgcccaagatcaaagccgaaacagacagtgatcccatggtcccatcttgttctctgtcgttgccactgagcatctccactactgaggccgttagttttcataaggaaaagtctgtatacctttcttccaagctcaaacaactgctgcagacacaggacaagctgactcccgcaggcatttctgcaaccgaaatagccaagttgggaccggtctgtgttagtgcccccgcttcaatgctgcccgtgacaagctctaggtttaagaggcggactagctcaccccccagcagtccccagcatagccccgcgctccgggacttcgggaagccctctgacggtaaggcggcgtggactgatgctggccttacgtctaaaaaatcaaaactggaatctcatagcgattcaccagcttggagtttgtctggtagggacgagagagaaactgtgagccccccatgcttcgatgagtataagatgagcaaggaatggacagcctcatccgccttcagtagcgtttgcaaccagcagcctctggatctgtcttcaggcgtgaaacagaaggccgagggaaccggcaagactcccgtgcagtgggaatccgtgttagacctgagtgtacacaagaagcattgttccgacagtgaaggcaaggaatttaaggaatctcattctgtccagccgacctgtagtgccgtcaaaaaaagaaaacccaccacatgcatgttgcagaaggtactcttgaatgagtataacggcattgacctgccagtggagaaccccgcagacggcacgagatccccctcaccctgtaaaagtctagaggctcagcccgaccctgatctgggacctggctctgggtttccagcacctactgtcgaaagtacacctgatgtatgcccctcaagtccggcgctccagacgcccagcctgtcgtctggtcaactcccaccactattgattcctactgacccttcatccccccccccatgccccccggtgttaacagttgcaacccctcctccccccctcctgccaacggtccctctgcctgcccctagctcttctgcaagccctcacccctgtccgagccctttgagcaacgccacagcacagtctccactccctattctgagcccaacggtttccccttctccgtcgcctatcccgcccgtggagccattgatgtctgcagcctctcctggccctccgactctgagttcatcaagttcatcgtccagctcctcttcctccttcagtagctcatcttccagctcctcccccagccccccacccctttccgcgattagctccgttgtcagttctggcgataatctggaggcttccctacctatgatttcattcaagcaggaggaattggagaacgagggcctcaagccaagggaggaacctcaatcagccgcagaacaggacgttgttgtgcaggaaacatttaacaagaacttcgtgtgcaacgtttgtgaatcgcctttcttatctatcaaggatctgactaagcacctgtctatacacgccgaggaatggcctttcaagtgcgaattctgcgtgcaactttttaaagataaaacagacctttccgaacatcgtttcctgttacacggggttggtaacatttttgtgtgctcagtttgtaaaaaagaatttgcatttctctgtaacctgcagcagcatcagagggacctgcaccccgacaaagtgtgtacccatcatgagttcgaaagtggtacactccgccctcagaacttcaccgatccaagtaaggcccacgtggaacacatgcagagcctgcccgaagatcccttagagaccagtaaggaagaggaagagcttaacgatagttctgaggagctgtatactaccattaagattatggcttcggggatcaaaacgaaagatcctgatgtgcggttaggactaaatcagcactacccctcctttaagccaccacccttccagtatcaccacaggaacccaatgggaattggagtgactgccaccaatttcaccacacataatataccacagacgttcaccactgccattcgttgtaccaaatgcggcaagggcgtcgacaacatgcctgagttacacaaacatatcctagcgtgcgccagcgcatccgacaaaaagaggtatacaccgaagaaaaaccccgtgcccctcaaacagacggttcagcccaagaatggcgtcgtcgttctggacaactcggggaagaacgctttcaggcgtatggggcagccaaagaggctaaatttctctgtagagctgtctaagatgtctagtaataagttgaagttgaacgccttgaagaaaaaaaaccaactggtccaaaaggctatccttcagaagaataaatcggccaagcagaaggccgaccttaagaacgcctgcgaaagtagcagccatatctgcccatactgtaatcgggagttcacttacattgggagtctcaacaagcacgccgccttctcgtgtcctaagaaaccgctgtcacctcctaagaagaaagtctctcacagttcaaaaaaggggggacactcctcccctgcttccagcgataagaattctaactctaatcaccgaaggagaaccgccgacgcagaaatcaagatgcagtctatgcaaacaccactcggtaaaacccgcgccaggagctctgggccaacgcaagtgccactaccatcatcctcatttcgaagtaagcagaacgttaagttcgctgcatcagtgaaaagcaaaaaaccctcatcttcatcccttcgtaacagttcacccatccggatggctaagatcacccacgtggaggggaaaaagccaaaggccgtggccaaaaatcatagcgcccagctcagtagcaagacaagccggagtcttcatgtgcgagtgcagaaaagtaaggccgtgctacaatctaaatccacactggccagcaagaagcggacagacaggtttaatatcaaaagcagggaacgttcaggaggccccgtaactcgctcactccagctggccgctgctgccgatctgtcagagaacaaaagagaggatggttctgccaagcaagagttaaaggacttccgcaattttctgtag

SEQ ID NO: 16783 - DNA, 681 bp, synthetic construct
  misc_feature 1..681: note = Description of Artificial Sequence: Synthetic coding sequence
  source 1..681: mol_type = other DNA
atgaaccagaataccacagagcctgtggccgctacagaaaccttggccgaagtgccagagcacgtgctgagaggactgccggaggaggtgcgcctgttcccatccgccgtggacaagacaaggatcggcgtttgggctaccaaacccatcctgaaaggcaaaaagtttgggccattcgtgggagataaaaagaaacgatcccaggtcaagaataatgtgtatatgtgggaggtgtactacccgaacctcggctggatgtgcatagatgcaactgatcctgagaagggcaattggttgaggtacgtgaactgggcttgcagcggcgaagagcagaacctgttccccctggagatcaaccgggcaatttactataaaaccttgaaaccgatcgcacctggcgaggagctcctggtctggtataacggggaggataaccccgaaattgccgccgcaatcgaggaggagagggctagcgctaggtcaaagaggagctcgcccaagagcaggaaggctactgcgtcagcctggcggcccgatgccctacatcaaagaccaagaactagccctggtagtatcgggcgttcgaaactccagctgcaaccaagctcccgggaccacagctccaagtcgcgccattctgggtgctccttgaccgcccccgaagtgacatggaatcagtag

SEQ ID NO: 16784 - DNA, 5049 bp, synthetic construct
  misc_feature 1..5049: note = Description of Artificial Sequence: Synthetic coding sequence
  source 1..5049: mol_type = other DNA
atgaaccagaacactactgagccggtagctgctaccgagaccctggctgaggtgccggaacacgtcttgcgaggactgccggaggaggtgcgcctgtttccctccgctgtggacaaaactcggatcggtgtctgggccactaaaccgatcctgaagggaaaaaaatttgggcccttcgtaggagataaaaagaagcggagtcaagtcaagaataatgtctacatgtgggaggtgtattatcccaacttgggatggatgtgcatcgacgcgaccgacccagagaaaggcaattggttgagatacgtgaactgggcctgttcaggcgaagagcagaacctgttccctttggagataaacagggccatttattacaaaacgctgaaaccaatcgctcccggggaggagctgctggtttggtacaacggagaggacaaccctgaaatcgcggctgcaattgaggaagagcgcgcaagcgcgcggtctaagagatcaagcccaaaatccagaaagggtaaaaagaagagccaagaaaacaaaaataagggaaataagatccaggatattcaactgaaaacgtccgaacctgactttacgtccgccaacatgcgcgacagcgcagaggggcctaaggaggacgaagaaaagcctagtgcgagcgcccttgagcaaccagcaaccttgcaagaggtagcttcccaggaagtaccaccagagctcgccacccccgctccagcttgggagccccagcccgaacccgatgagcgcctggaggccgctgcatgcgaagtgaacgatcttggcgaggaggaagaagaggaagaggaagaagacgaggaggaagaagaggatgatgacgatgacgaactggaggatgagggcgaagaagaggcaagcatgcctaatgagaatagtgtcaaagaacccgagattaggtgcgacgaaaagccagaagatctgctggaggagcctaagacaacaagcgaagaaactctggaggattgtagcgaggtgacgcccgcaatgcagattcctcgtaccaaggaggaagctaatggcgacgtgttcgagacatttatgttcccatgtcagcactgtgagagaaagtttacgacaaaacagggtctagagcggcacatgcatatacatatctccaccgttaaccacgcctttaagtgcaaatactgcggcaaggcattcggaacacagattaaccgccggcggcacgaacggagacatgaggccgggctcaaacgcaaaccctcacaaacgcttcaaccctcggaagacctggccgatggtaaggcgagtggcgagaacgtagcctcaaaggacgattcttcacctccttcactggggccggattgcctaattatgaatagcgagaaagccagccaagatactatcaacagctccgtagtggaagaaaacggagaagtgaaggagcttcatccctgcaagtattgtaagaaggtgtttggcacacatacaaacatgaggaggcatcagagacgcgtgcatgaaaggcacctcattcccaaaggagtgcggagaaagggcgggctcgaggaaccacagccccctgcagaacaggcccaagcgacgcagaacgtgtacgtgccttccacagagcccgaggaggagggggaggccgatgatgtctacatcatggacatcagttccaatattagcgaaaacctgaactattacatagacgggaagattcagaccaacaacaacaccagcaattgtgacgtcatcgagatggagtctgcatcagccgatctttacggcatcaattgcttgctcaccccagtgactgtggaaattacccagaatatcaaaacaacccaggtcccagtcaccgaggatctcccgaaggaacccctcgggagcacaaattctgaagcaaagaaaagaaggacagcctctccccctgcgctccccaaaataaaagctgagaccgatagcgatccaatggttccttcctgctctttatccctaccactatctatcagcaccaccgaagctgtttcctttcataaagaaaaatcagtatatctatcatcaaagctgaaacaattgctacagacacaagacaaacttacaccggcaggcatctccgcaacagagatcgccaaactgggccccgtatgcgtatccgcccctgcaagcatgctgccggtcacatctagtcgctttaaaagacgcactagtagtcctccttcatctccccaacattcacctgccctgcgcgatttcggcaaaccaagtgatggaaaggctgcatggaccgacgcagggcttactagtaagaaatctaaactggagagccacagtgattcccccgcctggagtctgtcaggcagagacgagagggaaacagtttccccgccctgtttcgacgaatataaaatgtcaaaggagtggactgctagcagcgccttcagttctgtctgtaaccagcaacccctggacctgagcagcggcgtgaaacagaaggccgaggggacagggaaaacccccgtccagtgggagtccgtgctggatctgagcgtccacaaaaagcactgctcggacagcgagggcaaggagttcaaagagtctcattctgtgcagccaacctgttcagctgtgaagaaacgcaaacccacaacatgtatgttgcaaaaagtgctgcttaatgagtacaatgggattgacctgccagtggaaaatcccgcggacggcacccggtccccctccccgtgtaagtctttggaggcgcagcccgatcccgatttagggcctggcagtggcttccctgcacccacagtggagtctaccccagacgtttgtccttcaagtcccgctcttcagacacctagcctgtcttcagggcagcttcctccgctgcttatccctacagaccctagttcccccccgccctgccctcctgtacttacggtggcgacaccgccaccacccctactccctaccgtcccccttccagccccctcaagcagcgcaagcccccacccttgcccctctcccctctccaatgctactgcacagtcaccactgcccattttatcgccaactgttagtccgagcccgagcccgattccccctgtcgaacccttgatgtctgctgcgtcgcctggtccaccgacactcagttctagttctagttctagctcaagtagctcctccttcagttcatcatcctcctcatcgtcaccttcgccacctcccctcagcgcaatttcctccgttgtgagtagcggagacaacttggaggcatctctgcccatgatttcctttaaacaggaagagctcgagaacgagggactgaagcctagggaggaacctcagagcgccgctgaacaggacgtggtggtgcaggaaacgttcaacaagaatttcgtgtgcaatgtgtgtgagagccccttcctgagcattaaggatctgactaagcacctctccatccatgctgaggagtggccgtttaagtgcgaattttgtgtgcagcttttcaaagacaagactgatctgtccgagcaccgatttctactgcacggcgtgggcaacatctttgtgtgttcggtttgtaaaaaagagtttgccttcctatgtaacctgcaacagcaccagagagatctgcaccccgacaaagtgtgtacgcatcacgagtttgaaagcggcactttacggccacagaactttactgaccccagcaaagcacacgtggaacacatgcagagtctgccagaggaccctctggaaacaagcaaggaagaggaagagttgaatgatagtagcgaagagttatacacaactatcaaaattatggcaagcggcattaagactaaggacccagacgtgcggctgggcctgaatcagcactacccctcgtttaaaccacctcccttccagtatcaccatcgcaatccgatgggaattggtgtgactgccacgaactttacaacgcataatattcctcagacatttaccaccgccattcgctgcactaagtgtggcaagggcgtcgacaacatgcctgaactccacaagcacattctggcctgtgctagcgcctccgataagaaaaggtacactcccaaaaaaaatccggtaccgctgaaacagactgtgcaaccaaaaaacggcgtggtggtcctggacaacagcggtaagaacgcgttccgacggatggggcagcctaagcgtctgaatttctctgtggagctctccaagatgtccagtaacaaactcaaactgaacgccctcaaaaaaaagaaccagttagtacagaaggccattctgcagaagaacaaatcagcgaagcagaaggcagatctcaaaaatgcctgcgagagctcatcacatatatgcccctactgcaaccgcgagtttacctacataggatctctgaataagcacgcggcgttcagttgccctaaaaaaccactgagtcctcccaaaaagaaagtgtctcattcttccaaaaaaggtggccattccagccccgccagttccgataaaaactcaaacagcaatcatcgccgccggaccgctgatgcggaaatcaaaatgcagagcatgcagaccccgctcggcaaaacacgcgctcggagctcagggccaacccaggttccactaccaagttcaagctttaggtcgaagcagaacgtgaaattcgctgcaagtgtgaagtccaaaaagccatcctcgtcctcgctccgtaactctagccccatcaggatggccaaaatcacacacgtagagggcaagaagccaaaggccgttgctaaaaaccattctgcacagctctcaagtaagacctctaggtcactgcatgtccgggtacagaagtcgaaggcggtactccaatcaaagagcaccctggcctctaagaaacgcacagatcgcttcaatataaaatcgcgggaacgatcagggggaccagttacaagaagtctccaattggcagctgccgccgacctgagcgaaaacaagcgtgaagatggcagtgcaaaacaggagctgaaggattttcgatgtttcctttag

SEQ ID NO: 16785 - DNA, 237 bp, synthetic construct
  misc_feature 1..237: note = Description of Artificial Sequence: Synthetic coding sequence
  source 1..237: mol_type = other DNA
atgcgggacagcgccgaaggaccaaaggaggatgaagaaaaaccttccgcatccgccctagaacaacctgctacacttcaggaggtggccagccaggaggtgcctccagagcttgcgacgcccgcccccgcctgggaacctcagcctgagcctgatgaaagacttgaagcagctgcttgtgaggtgaatgacctcggggaagaggaagaggaggaggaagaggaggatgaagagtag

SEQ ID NO: 16786 - DNA, 4446 bp, synthetic construct
  misc_feature 1..4446: note = Description of Artificial Sequence: Synthetic coding sequence
  source 1..4446: mol_type = other DNA
atgcgggactcagccgagggaccaaaggaggatgaggaaaaaccctctgctagtgcgctggagcaaccagctacactgcaagaggtcgcgtcacaagaagtgccaccagagctggctacaccagcccctgcgtgggaaccacagcctgaacccgacgaacgattggaagccgccgcctgtgaggtgaatgacctgggtgaggaggaggaagaggaggaagaggaggacgaggaggaagaagaggacgacgacgatgatgagctcgaggacgagggagaggaagaggcatccatgccaaacgagaattccgtgaaggagcccgaaatcaggtgcgacgaaaaaccagaagatctattagaggaacctaaaacgacatctgaggagacgctggaggattgttccgaagtgacccccgcaatgcagattcccaggacgaaggaggaagccaatggagacgtcttcgagacgtttatgttcccgtgtcagcactgcgagcgcaaatttaccacgaaacaaggcctggagcggcacatgcatatccatattagcacagtgaaccatgcttttaagtgcaagtattgtggaaaagccttcggtacacagatcaatagacgccgccacgagcggaggcacgaggccgggctcaagcgcaagccgtctcagacccttcagcccagtgaagacttggcggatggtaaggcaagcggagaaaatgtggcctccaaagacgactcatccccgccttcattgggaccagattgcctcatcatgaattctgagaaagcgtctcaggataccatcaattcctctgtggttgaagagaatggcgaagtcaaggaactacatccatgtaagtattgtaagaaggtgttcggtacccataccaatatgcgccgtcatcagaggagggttcatgaaaggcacctaatcccgaaaggagtcaggcgcaaaggcggcctggaggagccacaacccccagccgagcaggcacaagccacacagaacgtgtatgtgcccagcacagaacccgaggaagagggagaggccgacgatgtgtatattatggatataagttcaaatatctcagaaaacctcaactattacatcgacggtaagatccagacaaacaacaataccagcaactgcgacgtcatagagatggaatctgcctcagcagacctgtacggaatcaattgccttctcacacccgtaaccgtggaaataacccaaaatattaagaccacccaggtgccagtcacggaggacctccccaaggagcctctcggcagcacaaactcagaagccaagaaaagaagaacagcaagccctccagccctgcctaagatcaaagcagagaccgacagcgatcccatggttccatcttgtagcttgtctctgccactgtcaattagcacgacagaggcagtttcttttcacaaagaaaagagcgtatatttaagttcaaaactgaaacagctcctgcagacccaagacaagttgactccagcaggaatcagcgcaaccgagatagcaaagttggggccggtctgcgtgtctgctccggcaagtatgctcccagttacctcttccagattcaaacgcaggacatcctcccctccatcatctccccaacactctcccgcccttcgcgacttcggaaagcccagcgatggcaaagcagcgtggaccgacgcaggcctgactagtaagaagtctaagctcgaatcacactctgactctccagcttggagtctctccggtcgcgacgaaagagagacagtgagccccccctgctttgacgagtacaaaatgtccaaagaatggacagccagctcagcgttcagctccgtgtgcaaccagcaaccacttgacctgtcgtccggagtgaagcaaaaggcagaaggcaccggtaagactcccgtgcaatgggaatcagttctggacctttctgtgcacaagaaacattgtagcgactcggaggggaaggagttcaaagaatcccactctgtgcagcctacatgctcagccgtaaagaaaagaaagcccacaacttgcatgctgcagaaagtcctgctgaacgaatataatggaatcgacctccccgtcgaaaatcccgccgatggcacgcgaagccccagtccttgcaagtcccttgaggcacagcccgacccagatctgggaccagggtctggctttcctgcacctacggtggaaagtacacccgacgtttgcccaagtagccccgctctccagacaccgagcttaagcagtggtcagctgccccccctgctgatcccaacagatccctctagtccaccaccttgtccacccgttctgaccgtcgctactcctccaccaccccttctgccaactgttccactccccgctccttcctcctctgctagtcctcatccatgtcccagcccactgagcaacgccaccgcacagagtcctttgcccatcctgtcgcccacagttagcccaagtccaagcccaatacctcctgtggaaccactgatgtcagccgccagccccggcccacccactcttagttcctcatcgtcttccagcagctccagttctagtttcagttcaagtagttcatcctcaagcccaagtcctcctccactcagtgctatttcttcggtggtctcaagcggcgacaacctcgaggcttcactgcccatgataagcttcaagcaggaggagctggagaatgaaggcctgaaaccacgcgaagagccacagtcagctgctgaacaagacgtcgtcgtacaggagacatttaataagaattttgtctgcaatgtgtgcgagagcccgttccttagtattaaagatttaactaagcacctttctatacacgccgaagagtggccctttaagtgcgagttctgtgtgcagctctttaaggacaaaaccgacctctccgagcaccggtttctgctccatggggttggaaacatcttcgtgtgttccgtgtgcaagaaggaattcgcatttttgtgcaacctgcaacagcatcagagggaccttcatcccgataaagtatgtacccatcacgagttcgaaagtggcaccctcaggccacagaatttcactgatccctctaaggcccacgtcgagcacatgcagtccctgccggaggatccactggagacgagcaaagaggaagaggagctcaatgattcttctgaggagctgtatacaaccatcaaaataatggcctcaggcattaagacaaaggacccggatgtgcggctgggtctgaaccagcattacccgtccttcaagcctcctcctttccagtatcaccacaggaatccaatgggcatcggcgtgacagcaactaatttcacaacccacaacatccctcagacattcacaactgctatccggtgcaccaaatgtggaaagggagtggataacatgccagaacttcacaagcacattcttgcatgcgcgtcggcatcggacaagaaaaggtacacccctaagaagaatcccgtgcccctgaagcagacagtccaacctaaaaacggggtcgttgttcttgataacagtggaaagaacgccttcagacgaatgggacagcccaagcgccttaacttcagtgtcgagctcagtaagatgtcctctaacaagttgaagctgaatgctctgaaaaagaaaaaccaactggtgcagaaggccattctgcagaaaaataaaagcgcaaaacagaaagcagatctcaagaacgcttgcgaaagcagctcccacatttgcccttactgcaatcgggagttcacgtatattggatctctgaacaagcacgccgccttctcctgccccaaaaagccactgagcccgcccaagaaaaaggtgagccactcctccaagaaaggtggccattctagtcccgcgtcctcagacaagaacagtaattccaaccatagaagacgaacagccgatgccgagatcaagatgcagtctatgcagacacctctgggtaagacacgcgctaggtctagtggcccaactcaggtgcccttgccaagttcttcattccgaagtaaacaaaatgtgaaatttgcggcaagcgtaaagtctaaaaagcctagctcatccagtcttcgtaacagctcccctatcaggatggccaagataactcatgtggagggcaagaagcccaaggcggtggccaagaaccactcagcacagctgagctccaagacatctagaagtctgcatgttcgagttcagaaaagcaaagctgtgctgcagagcaagagtaccctggccagtaaaaagcggactgatcggttcaatattaagagtcgagaacgatcaggaggcccagtgactagatccctgcagctcgccgccgctgcggacctgtccgaaaacaagcgcgaggacgggtctgccaagcaggagctgaaggatttccggaattttttatag

SEQ ID NO: 16787 - DNA, 675 bp, synthetic construct
  misc_feature 1..675: note = Description of Artificial Sequence: Synthetic coding sequence
  source 1..675: mol_type = other DNA
atgtcctcttactttgtcaattccacctttccagtcactctcgcttccgggcaggaatctttcttggggcaactcccattatattcatccggttatgcagacccacttcgccactatccagccccctacggccctggacccggtcaggataagggattcgctacctccagttactaccctccagctggaggaggctatggcagggctgccccttgtgactatggccccgcacccgcattttatcgggagaaggagtctgcttgtgccctgtcgggcgcagatgaacagccacccttccaccctgagcctcggaagtccgactgtgcacaggacaagagtgtcttcggcgagaccgaggaacaaaaatgttcgacaccggtgtacccttggatgcagcgtatgaactcgtgtaatagctcgtccttcggcccaagtggacggaggggcaggcagacttacaccaggtaccagaccctcgagctcgaaaaggaatttcactataaccgctacttgacccgtagacggcgaatcgaaattgcacacgccctgtgcctgacagagcgtcagattaaaatttggtttcagaatcgccgcatgaagtggaaaaaggagagcaagctgctgtctgcatcacagctgtctgctgaggaagaagaggagaaacaagcagagtag

SEQ ID NO: 16788 - DNA, 2496 bp, synthetic construct
  misc_feature 1..2496: note = Description of Artificial Sequence: Synthetic coding sequence
  source 1..2496: mol_type = other DNA
atgactgagctgaaggccaaaggcccaagggcaccccatgtggccggtggtccccctagtcctgaggtgggaagccctcttctgtgtcggcccgcagccgggcccttccctggatcacagacgtccgacaccctcccggaagtgtccgcgattcccatctcattggatggcctgctgttcccgcgaccttgccaggggcaggatccttctgacgagaagacgcaagatcaacagagcttgtccgatgtcgagggagcttactcccgggcagaggccactaggggagccggaggttctagcagtagtcccccagagaaagattccgggctgttggactcagtgcttgacactcttctggctccttccggcccagggcagtctcaacctagtccccctgcgtgcgaagtgacaagtagctggtgtctttttggccccgaactcccagaagacccccccgccgctcctgcaactcaacgcgtcctttctcccctcatgtcacggtctggatgcaaggtcggcgacagtagtgggacagcggcggcgcataaagtgttaccacgcggcctcagccctgctaggcagctccttctgcccgcctccgaatctccccattggagtggagcccccgtcaaaccctccccacaagccgcggctgtggaggttgaggaggaggacgggagcgaatccgaagagtccgcggggcctctgctgaaaggtaaacctcgcgccctcggaggtgccgccgccggggggggagccgctgcagtgcctccaggtgcggccgccggaggcgtggcgctggtacccaaggaggactccagattctcggctccgagggtggccttggtcgaacaggatgcgccgatggcacccggccgaagccctctggcaacaactgtgatggactttatccatgtgcctatcttgccattgaaccacgcactgttagcagcccggacaaggcaactgttagaggacgaaagctatgatggcggcgccggcgccgcctccgcattcgcaccccccaggtcttccccttgcgcctcaagtacccctgtggccgtgggagattttccagattgcgcttaccctccagacgccgaacccaaggatgacgcctatcccttatattcggactttcaaccccctgccctgaaaattaaggaggaggaagagggggcggaggcatccgcccgcagtccaagatcgtaccttgttgcaggagctaaccccgctgcctttcctgactttcctctcggtcccccaccacctctgcctccccgggccactcctagccgcccgggggaggccgccgtgacggcagctcccgcttccgctagcgtatcaagtgcgtcttctagcgggagcacattggaatgtatcctttacaaagctgagggtgcccctccccaacagggtccattcgccccccctccatgcaaagcccctggggcttcaggatgcttacttccaagagacggtcttccttccacatccgcatctgctgcggcggccggggcggccccggccctctacccggccttgggtttaaatggcctgcctcagctgggctaccaagctgcagtgttgaaggagggattgccccaggtctatcctccctatctgaattatcttaggccagactcagaagccagtcaaagcccgcagtatagcttcgagagtctgccgcaaaaaatctgtcttatttgtggagacgaagccagtggttgccactatggggtgctgacgtgtggctcctgcaaagtcttttttaaaagggccatggagggtcagcataactacctatgcgcgggaagaaatgattgcatagttgacaagattaggaggaagaattgtccagcctgcagactgaggaaatgttgtcaggccggcatggtgcttggtgggttccgtaatctgcacattgatgaccagattaccttaatccagtactcatggatgagcctcatggtgttcggtctcggctggcgcagttataaacacgtctcaggccaaatgttgtatttcgcacccgacttgattctgaatgagcagagaatgaaggagtcttctttttacagcttatgcctgaccatgtggcaaataccccaggagttcgtcaagctgcaggtctctcaggaggagtttctgtgcatgaaggtgctgctcctgctgaacacaatacctctggagggcctgcgatcacagactcagtttgaggagatgcgatcttcatacattcgggagctgataaaggccatcgggctaagacaaaaaggggtcgtgagcagttcccaacggttttatcagctcacaaaattgctggacaatctccacgacctagtaaaacagctgcacctgtattgtctgaacacattcattcagagcagagctctgtcggttgagtttcctgaaatgatgtcagaggtgattgctgctcagctccccaagatcttggctgggatggtgaagcctctactctttcacaagaagtag

SEQ ID NO: 16789 - DNA, 2802 bp, synthetic construct
  misc_feature 1..2802: note = Description of Artificial Sequence: Synthetic coding sequence
  source 1..2802: mol_type = other DNA
atgacagagctgaaagctaaagggccgagggctccccacgtggccggcggacccccaagtcctgaagtggggtcacctctattatgccgacccgcagccggcccctttcccggctcccagacctccgacaccctaccggaggtaagtgcgatccctatctccttagacggccttctgttcccgcgtccctgtcaggggcaagaccctagtgatgaaaaaacccaggatcagcagagtctgagtgacgtggagggtgcctattcccgagctgaggctactcggggcgctggaggctcatcatcaagcccacctgaaaaagactccggactactggatagcgtgctggatacgctgctcgccccttcaggaccaggacagtcccagccctctcctcccgcctgcgaggttacttcctcctggtgtttgttcggtcccgagttgccagaggaccctccggccgcccctgccactcagagagttttgtcgcccctcatgagtcgatctggttgcaaggttggagacagcagcggaaccgccgccgcgcacaaagtcttgccccggggcctgtccccagcccggcagttgctgctgcccgcatccgagagcccgcattggagcggggcacctgtgaaacccagccctcaagcagccgcggttgaagtggaggaggaggacgggtctgaatctgaagaatctgcgggacctctactgaagggcaaaccccgcgcgttgggcggtgccgcagctggaggaggagccgccgccgtcccacccggcgccgccgcgggtggggttgctctggtgccaaaagaggactctcgatttagtgcccctcgggtggcactcgttgaacaagatgccccgatggccccgggcagaagccccctggcgacgacggtgatggattttatccacgtccctatccttccgctcaatcacgcactgttggccgccagaactcgacaacttctcgaggacgaaagttacgatgggggagccggcgctgcctcagcttttgcccctccccgttcttctccatgtgcatcctctacaccggtggccgtgggggactttccagattgtgcatacccccccgatgctgagcctaaagacgatgcatatccactgtactcagattttcagccccctgcgcttaagattaaagaagaggaggagggggctgaagccagtgctagatctcctcggagttacctcgtcgcaggcgcgaaccctgcagcattccctgatttcccgctcgggccaccaccgcctctaccacctagggccaccccaagtcgcccaggtgaagcagccgtgacagcagctccggcaagtgcatcggtgtctagcgctagcagcagtggttccactctggaatgtatcctgtacaaggctgagggcgctcctcctcagcaaggcccctttgcacctcccccatgcaaggcacccggcgccagcggatgtctccttccccgtgacggccttccctccaccagcgcatctgcagccgcagctggtgccgccccagctctctatcctgcgctggggctgaatgggctgcctcagctgggataccaggcggcagtcctaaaagaagggttaccccaggtgtatccaccctacttgaactatctgcgtccagacagcgaagctagccaatccccccagtacagcttcgagtccctaccccagaagatatgtctcatttgtggggacgaggcaagcgggtgccactacggtgttcttacctgtggaagctgcaaggtcttctttaaacgcgctatggaaggtcagcataactacctatgcgctgggcgcaacgactgtatcgtggacaaaatacgtaggaagaattgcccggcctgtagactcaggaaatgctgccaagctggcatggtactgggaggacgcaaattcaagaaatttaataaggttagggtggtaagggccctggatgcagtggctctcccccagcccgtgggagtgccaaatgagagccaggcgctgtcacagagattcacatttagccccggtcaggacatacaattgatcccacctctgataaacttattaatgtcgattgaacccgatgttatctatgctggccacgataatacaaaacccgatacctcctcttcactcctcacaagtttgaaccagctgggcgagcggcagctactcagcgtggtaaagtggagtaagagtttgcccgggtttcgcaaccttcacatcgacgaccagattacactgatacagtacagttggatgtccttaatggtatttggccttggttggagatcatacaagcacgtttcgggacaaatgttatactttgcgcccgacttaattctcaacgaacaacgcatgaaagagagcagcttttatagtctgtgcttgacgatgtggcaaataccacaggagttcgttaagctacaggtgtcccaggaagagttcctctgtatgaaagttctccttctgctgaacactattcctttggaggggctccgctcgcagacacaatttgaggagatgagaagttcttacattagagagctgattaaggctattggactcaggcagaagggggtggtgagcagttcacagcggttctatcagctgacgaaactgctggataatctgcatgacctagtcaagcagcttcatctctactgcctcaatacattcatccagtcacgcgccctcagcgtagagttcccggaaatgatgtccgaggtgatcgcggcgcaactgcccaagatcctcgcaggaatggtcaaaccactactgtttcacaagaaatag

SEQ ID NO: 16790 - DNA, 2088 bp, synthetic construct
  misc_feature 1..2088: note = Description of Artificial Sequence: Synthetic coding sequence
  source 1..2088: mol_type = other DNA
atgacggagctcaaagctaaaggaccacgagcacctcatgtcgccggaggacccccttcgcccgaggtaggaagtcctctgctgtgtcggccagcagccggtccgtttccgggaagccagacttccgacacactcccagaggtgtccgctatacccatttctctggatggacttctttttccaagaccctgtcaaggtcaagatccttcagatgagaagacacaagaccagcaaagtctgtccgacgtcgaaggcgcttactcccgagcggaagccacccggggcgcaggagggagtagctcatcacctcctgagaaggactctgggctacttgacagcgtgctggacacccttctggcccctagcggtccaggacagtcacagccttccccaccagcatgcgaagtgacctcctcttggtgtctgttcgggcccgaattgcccgaagatccaccagccgcgccagctacccagagggtcctgagccccctgatgagccgcagtggctgtaaggttggcgacagttctggcactgcagctgcacataaagtcctaccacggggtctgtctcctgccaggcagctgctgctgccagcctccgagagccctcactggtcaggagcccctgtgaagccaagtccacaggctgccgcagttgaggtggaggaggaggatggcagtgagagcgaagagtccgccggtcctctcctgaaaggtaagcctcgagccctgggcggagctgccgccggtggaggggctgcggcggtcccaccgggagccgcagcagggggggtggcccttgtcccaaaggaggattctcggttcagcgcccctcgtgtagcacttgtcgaacaggatgctcctatggcgccaggccgatccccactcgctacgactgtgatggacttcattcatgtcccaatcttgcctttaaatcacgcactcctcgcagccagaaccagacagcttcttgaagatgaaagctatgacgggggggccggagctgcaagcgcattcgcgcccccaagaagtagcccgtgcgcttcttccacccccgtcgcagttggggattttccagattgcgcatatcctcccgacgccgagccaaaagatgatgcctaccccctctattctgattttcagccacctgccctgaagataaaggaagaagaagaaggcgccgaagccagcgctcggtctccaagaagctatcttgtagctggggcgaatccggcagcatttccagactttcctctggggcctcctccccctctgccccctcgggcaacaccttcccggcctggtgaagcagccgtgacagccgctccagccagcgcatccgtttcgagcgccagctcttccggaagcactcttgaatgcatcctctataaggccgaaggagccccccctcagcagggaccatttgctcctccgccttgcaaggcccccggagccagtggctgccttctcccacgcgacggcttgccaagcacctccgcctcggcggcggctgctggggcagcacccgcgctttaccctgcattgggcctgaatggtctgccacaactgggctatcaggcagctgtcttgaaggaaggcctgccccaagtgtatcccccatacctcaattacctgaggccggactctgaggcctcacagtccccccagtacagctttgaaagtctgcctcagaaaatttgcctgatttgtggcgacgaggcctcaggttgtcattacggtgtgctgacttgtggctcctgtaaggtctttttcaagagggccatggagggtcagcataattacctgtgcgccgggaggaatgattgcattgtagacaaaattcgcaggaaaaattgtcccgcttgccgactgaggaagtgttgtcaggcgggaatggtgctgggtgggttccgcaacctgcacatcgatgatcagattaccctaatccagtattcttggatgtcccttatggttttcggactgggctggagatcgtataaacacgtgtccggacaaatgctgtactttgcccccgacctaattctgaacgattcatttgggcgggcaactaaaagcaatcccgtgtag

SEQ ID NO: 16791 - DNA, 2295 bp, synthetic construct
  misc_feature 1..2295: note = Description of Artificial Sequence: Synthetic coding sequence
  source 1..2295: mol_type = other DNA
atgaccgagctaaaggctaagggtcccagggctccacatgtggccgggggtcccccatctccggaggttggaagcccccttctgtgccggcctgcagcagggccgtttcccggtagccagaccagcgacaccttacccgaggtcagtgcaattccaatctcactggacggtttacttttcccaagaccctgtcaaggacaggacccttccgacgagaagactcaggatcagcagtcattgtcagacgtggagggcgcttactcacgagctgaggccacccggggtgcagggggctcctcctcgtctccgccggagaaggactcaggtctcttggacagcgttctcgacacattgctggccccatccggacctggccagagccagcccagtccaccagcatgcgaagtgactagctcctggtgcctctttggacccgaactgccagaagacccacctgccgcacctgcaactcaacgggtcctcagtccactcatgagtagatctggctgtaaggtaggcgattcctcaggcactgctgccgcacataaggtactgccaagggggttgtcaccagccaggcaattactactccccgcatctgagtcccctcactggtccggggctcccgtgaagccttccccacaggctgccgctgttgaagtcgaggaggaagacgggagcgaaagcgaggagtccgcgggaccccttctgaaaggcaaacccagagcattgggcggcgccgcagctggcggtggcgctgctgcggtgcctccaggagcagcagcaggtggagtggccctggtgcctaaggaagattcccgcttctccgcgcccagggtggcgctcgtggagcaggatgcgcccatggcgcctggcaggtcccctcttgccacaacagtgatggactttatccacgttcctatactgcccctcaaccacgcccttctcgctgcacgcacaagacagctcctggaggatgagtcttacgacggtggcgccggggcagctagcgcttttgcccctcctaggtcctcgccatgtgcgtcctcaacgcctgtcgcagtcggagatttcccagactgcgcatacccgcctgacgcagaacccaaggacgacgcctaccccctatacagcgacttccagccaccagcactgaaaatcaaggaagaagaggagggcgcagaggcttccgctcgttccccacggagctaccttgtcgctggagctaatccagctgctttccctgactttcctctggggccgcctccccccctgccaccacgcgccacaccttcccgtcccggcgaggccgctgtgacagctgcccccgcctcggcctcagtcagcagcgccagcagctcagggtccaccctagagtgcatactatacaaggctgaaggtgcccccccccaacaaggccccttcgcgcctcccccctgtaaagcccccggagccagtgggtgcttgctgcctcgggacggactaccttcaacaagcgcaagcgcagctgccgctggtgcagcaccggcgttgtatccggctcttggactgaacggtcttccacagcttggataccaggcagcagttctcaaagaaggcttgccccaggtataccctccctatcttaattacctgaggcctgattccgaagcttcacaaagcccacagtattctttcgagtctctacctcaaaaaatctgcctgatttgtggagacgaggccagcgggtgtcattacggcgtgctaacatgtggatcttgcaaagtctttttcaagagggccatggaggggcgcaagttcaagaaattcaacaaagtccgcgtggtcagggctttggacgccgtcgccctgccacagccagttggggtgcctaacgaaagtcaggccctctctcaacggtttacatttagtcccggccaagatattcagttgatcccgccccttattaatctgctgatgtccatcgaaccagacgtaatctacgccggacatgacaatactaaacccgacacctcttctagtctcctgacctcactcaatcagcttggcgagagacagcttctgtcggtggtgaaatggagtaagtcattacccgggtttagaaacttgcacattgatgatcagatcaccttgatccagtacagttggatgagtctaatggttttcggactggggtggagatcttacaagcatgtttccgggcagatgctctattttgccccagacttgatcctgaatgagtcgcacagaagtctatcctctttcaaactggcgaaaaagtcatcatctgtctag

SEQ ID NO: 16792 - DNA, 1020 bp, synthetic construct
  misc_feature 1..1020: note = Description of Artificial Sequence: Synthetic coding sequence
  source 1..1020: mol_type = other DNA
atggaagggcaacacaactacctctgcgcgggtcggaatgactgtatcgtggacaagatcaggagaaagaactgccccgcctgtcgcctcaggaaatgttgccaagcaggaatggtcctagggggccgcaagtttaaaaaattcaacaaagtccgggttgtcagggcactcgacgccgttgctctacctcagccggttggggttccaaacgaaagtcaagccctatctcagcggttcaccttcagccctggccaagatattcaactgatccctcccctcatcaatctactgatgtctatcgaaccagatgtgatctacgctggtcacgacaacacaaagccggatacttcaagttctctgctgacgtcactcaaccagctgggggagaggcagctgttatctgttgtgaaatggagtaaatcgttgcccggcttccgtaacttacatatcgacgaccagataacattgattcagtactcctggatgtccttgatggtgtttggtctcggctggagaagctataaacacgtgtcaggccaaatgctttactttgccccggacctaattcttaatgagcagagaatgaaggaatccagcttctactccctatgcctgacaatgtggcagatcccccaggaatttgtgaaactgcaggtttcacaggaagaatttctttgcatgaaagtgctgctgctgctcaatactatcccactggaagggttgcgcagccagacccagttcgaagagatgcggtcctcatacatcagggagctgatcaaagcaattggtttaaggcagaaaggcgttgtatcctcctctcagcgcttctaccagctcactaagctgcttgataatctgcacgatctcgtgaaacagctacatttgtattgcttgaacactttcatacaatcgagagcgctttcggtggagttcccggaaatgatgagcgaggtgattgccgcacagctgcctaaaattcttgccggaatggtaaaaccactgctgttccataaaaagtag

SEQ ID NO: 16793 - DNA, 2412 bp, synthetic construct
  misc_feature 1..2412: note = Description of Artificial Sequence: Synthetic coding sequence
  source 1..2412: mol_type = other DNA
atgaccgaactgaaggccaaaggcccccgcgcacctcacgtggccggcgggccaccctcccctgaggtaggatcgccattactgtgcagacccgccgcgggcccgttccccggctctcagacaagtgacacactgccagaagtctcagcaattcctatctcgttggatgggcttctgttcccgagaccatgccagggccaagatcccagcgatgaaaaaacacaggaccaacaatccctcagcgatgtggagggtgcctactctcgagccgaggcgactcggggcgcaggcggcagctcttctagccctccagagaaagactccggattgctggatagtgtgctggacacactcttggccccatcaggccctggccaaagccagccatctccccctgcctgcgaagtgacctcgagttggtgcctctttggccctgaactgcccgaggatccccccgcggctcctgccactcagagggtacttagtccactcatgtccaggtccggctgtaaagttggtgattccagcggaaccgccgcggcacataaagtgctgcctaggggcctcagcccggcacgccaattgctgctgcccgcatcagaatctcctcattggtcaggggcaccagttaagcccagtccccaggctgccgctgtcgaagtcgaagaggaagatggtagtgaaagcgaagagtctgccggccctttgctcaagggcaaacctagggctctaggcggcgccgccgccggggggggcgccgctgcagtccctcctggcgcagctgcaggtggagttgctctagtgcctaaggaagatagtaggttttcagctcctagagtagcgttagtggagcaagacgcacccatggcaccgggacgttcaccattagcaacaactgtaatggacttcattcatgtgcccattctacctctgaaccatgcgttgctagccgccaggactagacagctgttagaagatgagtcatacgatgggggagccggtgccgctagcgccttcgctcctccaagaagcagcccctgtgcaagcagcactccggtagctgtgggagattttccagattgtgcatacccaccggatgccgagcctaaggacgatgcctatcccctgtactcagattttcagcctcccgctttgaaaatcaaggaggaagaagagggagcagaggcatccgcgagatcaccaagatcatacttggtggcaggcgctaatccagccgctttccccgactttcccttggggccacccccaccgctgccccctagggccaccccgagtcggccaggcgaggccgctgtgacggccgcccccgctagcgcctccgtttctagtgcatcaagtagtggtagtacacttgaatgtattctgtacaaagccgagggggcacccccccagcaaggccccttcgcccctcccccatgcaaggcccctggtgcgtcagggtgtctgctgcctcgggacgggctacccagtacatctgcatcagccgcagccgccggggccgccccagctctgtatccagcactgggcctgaatggactaccccagttgggataccaggccgccgtcctgaaagaagggctaccccaggtctacccgccttaccttaactacctgagacctgactctgaagcctcacagtccccgcagtactcattcgaaagtctcccacagaagatttgccttatctgcggcgacgaggcttctgggtgtcactacggtgtccttacgtgtggttcctgtaaggtgttcttcaaaagagccatggagggacagcacaactacctgtgcgccggcagaaatgactgcattgttgataagataaggcgcaagaactgtcctgcttgccggctccggaagtgctgccaggccggcatggttctgggaggcaggaagttcaagaagttcaacaaagtgcgggtcgttagagctctggacgcagtggccttgccacaacctgtcggtgtgccaaacgaaagccaggcccttagccagcgatttaccttcagtcctggccaagacatacaactgatcccgcctctgataaatctgcttatgagtattgagcctgatgtaatttacgctggccatgacaataccaaacccgataccagttctagcctgttaacgtctctgaatcaactgggtgagcgacagctcctctctgtggtcaaatggtccaagtcattacccgggttccggaatctgcacattgacgaccagatcactctcatccagtactcctggatgtcactgatggtgttcggcctgggttggaggagctataaacacgtcagtggccagatgctttatttcgccccagatctaatattaaacgagtctcaccggtcactgtcttcctttaagttggccaagaaaagttcatctgtgtag

SEQ ID NO: 16794 - DNA, 2073 bp, synthetic construct
  misc_feature 1..2073: note = Description of Artificial Sequence: Synthetic coding sequence
  source 1..2073: mol_type = other DNA
atgactgaactcaaggccaaaggaccgcgggccccacacgtcgcgggcggccctccctccccagaagtgggctcccctttactgtgtcggcccgccgccggcccatttccgggctcccagacaagcgataccctcccagaggtaagcgccatccctatctccttggatgggcttttgttcccaaggccgtgccagggccaagacccttctgatgaaaaaacccaggatcagcagtctctcagtgacgtggaaggggcctacagcagggccgaggccacccgcggggcagggggaagcagctcgtcacctccagagaaggattcaggcctgcttgatagcgtactggacactctgcttgcccccagcggacccggtcagtcccagccttcccctccagcatgtgaagtgacctcctcttggtgtctgtttggcccagaactgccagaagatcccccagctgctccagcgacacagagagttctgtcaccactgatgtcaagatccggctgtaaagtcggggactcatctggtacggccgccgcccataaggtactgcctagaggcctcagcccggccagacagttgctgctgccagcctcagaaagcccacactggagtggagcccccgtaaagccttctccccaagctgctgccgtggaagtcgaggaggaagacggaagcgagagcgaagaaagtgccggaccccttttgaaaggaaagccccgcgcccttggcggagccgcagccggcggcggcgctgccgctgttccccccggcgccgcagccggcggagtggccctggtgccaaaggaggactcccggttcagtgcgcctcgggttgctctcgtggaacaggatgccccgatggctcctggccggtccccactggcaacaactgttatggatttcattcatgtgccaattctgccactgaaccacgccctacttgccgctcggacaagacagctcttggaagatgagtcctatgacggcggggcaggcgcagcctccgcttttgcacctcctcggagctcgccttgcgcttcaagtactcccgtggccgtgggggacttccccgattgcgcctatccaccagatgcggagcccaaagatgacgcttacccgttgtatagtgattttcaacctcccgcactgaaaatcaaggaagaggaggaaggagccgaggcctctgctagatcaccccggtcctacctcgtcgctggtgctaaccccgctgccttccctgactttccgcttggcccacctccgcccctgccacctcgcgctactccctcaagacccggcgaagccgccgtcaccgcagccccagcttccgccagcgtgtcgagcgctagttcatccggctccacgttagaatgcattctttacaaggccgagggcgccccacctcagcagggacccttcgcaccccctccgtgcaaagctccgggggcgtctggctgcctgctgccacgggatggacttccttcaactagtgcgtcagccgcggccgccggcgcggctccagccttgtatcccgccctcggccttaacggcttgccccagctgggctaccaggcggccgtactgaaggaaggtctgccacaggtctatcctccctatctgaactacctccggcccgacagcgaggcaagccagtccccccagtacagcttcgagagtctgccccagaagatctgtctcatttgcggagatgaggcttctggatgccactatggagtccttacttgtggctcgtgtaaggtatttttcaaacgtgcaatggagggtcagcacaattatctgtgcgcaggtagaaacgattgtatcgtggataaaatacggcgcaaaaactgcccagcctgtcgcctgcgaaagtgttgccaagcggggatggtgctggggggcttcagaaacctgcacatcgatgaccagattacacttattcagtattcgtggatgagtcttatggtgtttgggttaggttggcgcagctacaagcacgtgagcgggcaaatgttatactttgcccctgacctcatcctgaatgaggaatccatcgtgactagctag

SEQ ID NO: 16795 - DNA, 1410 bp, synthetic construct
  misc_feature 1..1410: note = Description of Artificial Sequence: Synthetic coding sequence
  source 1..1410: mol_type = other DNA
atggatgtcgaaaatgaacagatcctcaatgtaaatcctgcggacccagataatctgtccgactcactcttcagcggcgatgaggagaacgccggcaccgaggagatcaaaaatgaaattaatggcaattggatcagcgccagttccatcaacgaagctagaatcaacgctaaagccaagagacgcctacgcaagaatagctcccgggatagcggtcgcggcgacagtgtctccgactctgggagtgacgctctccgctctggcctgaccgttccaacctcgcctaagggcaggctgctggaccgccgatctaggtccggaaagggcagaggccttccaaagaaggggggtgcaggaggcaagggggtgtggggaacacctggccaggtttacgatgtggaggaagtagatgtgaaagatcccaattacgacgacgatcaagaaaactgtgtgtatgagacggtggtgctccccctggacgagcgcgccttcgagaagacacttacacctattatccaagagtacttcgagcacggagacactaatgaggtagcggaaatgttacgcgacctgaatctaggagagatgaagtctggggtaccagtactggctgtgtcgctggctctggagggaaaagcaagccacagagagatgaccagtaaattgctgagcgatctgtgtggcaccgtgatgagtactaccgacgtcgaaaagtcttttgacaagttgttgaaagacctgcctgagctggccctcgacactccccgggccccccaactggtgggccaattcatagcaagagctgtaggagacggtattctctgcaacacctacatcgatagttacaagggtaccgtcgactgcgtacaagcgcgggctgcgctcgacaaggcaactgtcctgttgtccatgtcaaaaggtggaaaaaggaaagatagtgtgtggggcagcggtggaggtcaacagtctgtgaaccacctcgtaaaggagattgatatgcttctgaaggagtacctgttgtcgggggatatctcagaagccgaacactgtttaaaggaacttgaagtgccccacttccaccatgagctcgtctatgaggccatcataatggtgctcgaaagcacaggcgaaagtacctttaaaatgatcctggacttactgaagagcctctggaagagttcgaccattaccgtcgaccagatgaaaagaggttacgagcgcatttataacgagatcccagatataaacctagatgtaccccatagctactctgttctcgagaggtttgtggaggaatgttttcaagcgggtatcatatctaaacagctcagagacctgtgtcccagcagagggcgcaagcgattcgttagtgagggagacggcgggagactgaaacctgaaagttactag

SEQ ID NO: 16796 - DNA, 1377 bp, synthetic construct
  misc_feature 1..1377: note = Description of Artificial Sequence: Synthetic coding sequence
  source 1..1377: mol_type = other DNA
atgacaaaatatcccgacaatctgtccgattctctgttctcaggggacgaagagaacgccgggacagaagagattaaaaacgaaataaatgggaactggatatccgcctcttcaatcaatgaagcaagaatcaatgccaaggccaaaagaaggctgaggaaaaattcttctcgtgacagtgggcgcggggatagtgtaagtgattcagggtcagacgccctgcggtctggactgactgtgccgacctcaccgaagggcagattattggacagacgtagtaggagtgggaaaggacgcgggcttcccaagaaagggggagccggcggaaaaggggtgtggggtactcctggtcaggtctatgacgtcgaagaagtcgatgtgaaggaccccaattatgatgatgatcaggagaattgtgtctacgagacggtggtgctccctctcgacgaacgggcctttgaaaaaactctcacaccaatcatacaagagtattttgagcatggggatactaacgaggtggcagagatgctcagagaccttaacctcggagaaatgaaaagtggcgttcccgtgttagctgtgtccctggctttagagggtaaggcatcacacagagaaatgacctctaagctcctttctgacctgtgcggcaccgttatgagtaccacagacgtagagaagtcattcgacaaactgctgaaagatctgccggagctggcactggatactccacgcgctccacaactggtgggccaatttattgcccgtgctgtcggtgacggcatcttatgtaacacctatatcgactcatacaagggcaccgtagattgcgtgcaggcccgggccgccctggacaaggctactgtgcttctgagtatgtcaaaagggggaaagaggaaggacagcgtttggggctcagggggcgggcagcagtcagtaaaccacctggttaaggagatcgacatgctgctaaaggaatatttactctctggagacatctcggaagctgaacactgtctaaaggaactggaggtgccgcacttccatcacgagctggtgtatgaagccattataatggtgctggaatctaccggagagtccacctttaagatgattctcgacttgctgaaaagtctgtggaagtcgtcaaccatcacagtggaccagatgaaaaggggctacgagagaatttataacgaaatccccgatatcaaccttgatgtgccccactcctacagcgtcctggagcggttcgttgaggagtgcttccaggccggcattatctccaagcagctcagagacctgtgtccctcaaggggccgaaaacgattcgtgagtgaaggtgacggcggtcgtctgaagcccgagtcatattag

SEQ ID NO: 16797 - DNA, 696 bp, synthetic construct
  misc_feature 1..696: note = Description of Artificial Sequence: Synthetic coding sequence
  source 1..696: mol_type = other DNA
atggatgtggagaatgagcaaattcttaacgtcaaccccgcggagaatgccggcaccgaagagattaaaaacgagattaatgggaactggatcagtgcctcatccatcaacgaagcacgcattaatgccaaggctaaacggcggctgaggaagaactcctccagggattcaggccggggcgattccgttagtgattctgggtccgacgctctccgctccggactgacggtgccgacaagtcccaagggtcgccttctggatagaagatcccggagcggtaaaggcagaggactgcccaagaaagggggggccggggggaaaggcgtctgggggacccctggacaggtgtatgatgtggaggaggtggacgtgaaggatcccaactacgacgatgatcaagagaattgcgtgtacgagacagtagttctgccattggacgagcgcgcctttgagaaaacattgacccccatcatccaagaatactttgaacacggggacaccaacgaggtggcggaaatgttacgagacctgaacctcggagaaatgaagagcggcgtcccagtgcttgccgtctccttggctctggaaggtaaagcctctcaccgcgagatgacatccaaattattgagcgatctgtgcggaacagtgatgagtaccacagatgtggagaagagttttgacaagctactcaaatag

SEQ ID NO: 16798 - DNA, 786 bp, synthetic construct
  misc_feature 1..786: note = Description of Artificial Sequence: Synthetic coding sequence
  source 1..786: mol_type = other DNA
atgttcgaggcccgcctcgtccagggctctatcctcaagaaggttctggaagcccttaaagatttaattaatgaggcttgttgggacatctcatcaagtggggtgaacctgcagtcgatggactcttcacacgtttcactggtccagctgacattgagatctgaaggcttcgacacctatagatgcgatcgaaacctcgctatgggagttaacctgacttcgatgagcaagatattgaaatgtgccggtaacgaggatattatcactttacgggccgaagacaatgctgatacactagccctcgtatttgaagctcctaaccaggagaaagtgtccgactacgaaatgaagcttatggacctggacgtcgagcagttagggatcccagaacaagaatactcatgcgtcgtgaaaatgccttcaggagaattcgccaggatatgcagggatttgtcgcacattggtgacgccgtggtcatctcgtgtgccaaggatggtgtaaagtttagcgccagtggggagttgggcaacgggaatatcaagctctcccagacctccaacgttgataaagaagaagaagcagtcaccatcgaaatgaacgaaccagtgcagttgacttttgcgttgagatacctcaatttcttcaccaaggcaactccgctctcgagtacagtgaccctgtcaatgtctgctgacgtgccattggttgtagaatacaaaatagccgatatgggccatctgaagtactatcttgctccgaagatcgaggatgaggagggcagctag

SEQ ID NO: 16799 - DNA, 786 bp, synthetic construct
  misc_feature 1..786: note = Description of Artificial Sequence: Synthetic coding sequence
  source 1..786: mol_type = other DNA
atgtttgaggcacgcctcgtccaagggtccatcctgaaaaaagtgctcgaggcgttaaaggacctgattaacgaggcatgctgggacatttcttcttcaggtgtgaacctgcagtcaatggatagctcccacgtgtctctggtgcagctcactcttcgctccgaaggattcgacacgtataggtgtgaccgaaacttggccatgggcgtgaacctgactagcatgagcaaaattctgaagtgtgctggcaatgaggatatcatcactctgcgcgccgaggataacgctgatacacttgcgctggtgtttgaagctccaaatcaggagaaagtatcggattatgagatgaaactgatggatctggatgtagagcagctgggaatcccagagcaggagtacagctgtgtagtgaagatgccttctggcgagttcgcgagaatttgcagggatctcagccacattggagacgcagttgtgatttcctgtgctaaagatggagtcaagttttccgctagcggagaattgggcaatggtaacatcaagctgtctcagacatcaaatgtggataaggaggaagaagccgttaccattgaaatgaacgaacctgttcaacttactttcgctctccgatacctcaacttcttcaccaaagcgaccccactgtcttccacagtgaccctgtcaatgagcgccgacgtaccattggttgtcgaatacaagatcgcggacatgggccacctgaaatattacctcgctcctaagattgaagatgaagagggcagttag

SEQ ID NO: 16800 - DNA, 1140 bp, synthetic construct
  misc_feature 1..1140: note = Description of Artificial Sequence: Synthetic coding sequence
  source 1..1140: mol_type = other DNA
atgtcctcaccgtctctctccgatctaggaaagcgggaacccgcagctgctgccgacgaaagaggtacacagcagaggcgggcttgtgctaatgccacatggaatagtattcacaacggagtgatcgctgtcttccagcggaaaggcttacccgatcaagaactgttctcattaaacgaaggggtccgccagttactcaagacagaactcggatcttttttcaccgagtacctgcagaaccagctgttgaccaagggaatggtcattctgcgcgacaagattaggttctatgaggggcagaaactcctcgactccttggccgaaacgtgggacttcttcttctcagatgtgctgcccatgcttcaggccatcttctatcctgtgcagggtaaggaaccatctgtacggcaacttgcgctactccactttaggaacgcaataacgctgtccgtgaagctcgaggacgccttagcacgtgctcatgcccgcgtaccaccggcaattgtgcaaatgctgcttgtgctgcagggcgtccacgagagcaggggggtgactgaggactatttgaggctcgaaaccctggtacaaaaagtggtgagcccatacctgggaacctacggcttgcattcctctgaaggcccatttactcattcttgtatactggagaaacgactgttgagaaggagtaggtctggcgacgtgctggccaagaaccctgtggtgaggtcgaaatcctataacactcccctgttgaatcctgttcaggagcacgaggccgagggtgctgccgccggcgggacctccatacggcgacacagtgtgtccgagatgacatcttgcccagaaccccagggattctctgatcctccaggacagggtcccacaggtacattcagatcttctccggcccctcattctgggccatgcccctcacgtctctatcctacaacccaacctcccgaacagggcttagaccccacgcgctccagcttgcctcgctccagtcccgagaacttagtcgatcagatcctcgagagcgttgatagcgacagtgaaggtatttttatcgacttcggccgcggcaggggcagcgggatgtccgatttggagggatcagggggccgccagtctgtggtttag

SEQ ID NO: 16801 - DNA, 1167 bp, synthetic construct
  misc_feature 1..1167: note = Description of Artificial Sequence: Synthetic coding sequence
  source 1..1167: mol_type = other DNA
atgagaacacttcggagactcaagtttatgtcatctccaagcctgtccgacctgggcaaaagagagcccgcagctgcagcggatgaacgcggcactcaacagcgccgggcatgtgctaatgctacttggaattctatccacaacggcgtgatcgctgtatttcagagaaagggcctgcccgatcaggagctattctctctgaacgaaggcgtcaggcagctactgaaaaccgagctgggatctttctttaccgaatacctccagaatcagctccttactaagggcatggtcatccttagagacaaaatcagattctacgagggccagaaactgctcgactccctcgccgagacatgggatttctttttctcagatgttttgcctatgctgcaagccatcttttaccccgtgcaaggcaaagaaccatccgtgaggcagctcgccctgctccatttcagaaacgcaatcactctgagtgtaaaactagaggacgcactggcaagggcccatgccagggtgccccccgctattgtgcaaatgctgctggttctgcagggagtccacgaatcgcggggcgtgaccgaagactacttgcggctggagaccttagtacagaaggttgtgtccccatacctaggcacttatgggctccatagcagcgaaggcccattcactcatagctgtattctcgagaagaggctacttaggaggtcaagatccggcgatgtgctggcaaaaaaccctgtagtgcgttcaaaaagctacaacacacccctactaaacccggttcaggagcacgaagccgaaggtgccgccgccgggggcacatcaataagacgccattcagtcagcgagatgaccagctgcccagagcctcaggggtttagcgaccctcccggacagggtcccactggaacatttaggagcagccctgcccctcactccggtccttgtccctcccgtctctacccaacaactcagcctccggagcagggacttgatccgaccagatcctccttgccgcgctctagccctgagaaccttgtcgatcaaatcctggagagcgtggactcagactccgagggcatatttatagacttcggtcgcggcagagggagtggaatgagcgatttagaggggtctggagggagacaatctgttgtgtag

SEQ ID NO: 16802 - DNA, 804 bp, synthetic construct
  misc_feature 1..804: note = Description of Artificial Sequence: Synthetic coding sequence
  source 1..804: mol_type = other DNA
atgagctccccctcactgagcgatcttggaaagcgcgaaccagcagctgctgccgacgagagaggcacacagcaaagaagggcctgtgccaacgccacatggaatagcattcataatggcgttatagctgtctttcagaggaagggtctcccggatcaggagctcttttcattaaacgagggggtcaggcagctactgaaaactgaactgggctcattctttactgagtatctgcaaaatcagcttctgaccaaaggaatggtaatcctgagagataagatccggttttatgagggtcagaagctcctcgactcccttgcagagacctgggattttttcttcagcgatgtgctgcctatgctccaagccatattttaccctgttcaaggaaaagaacccagtgtacgccagctcgccttgctccacttcagaaacgccatcacactgagtgtgaagctggaagacgcactggcgagagcccatgctcgagtgcctcccgccatagtgcagatgctgttggtgctgcagggagtccacgagtcaaggggcgttactgaggactacctgcgactggagactctcgtgcagaaggtcgtcagtccctaccttgggacctacggcttacacagctcggagggcccgtttacccactcttgtatactcgagaaaaggctgctgagacggtcaaggtccggtgacgttctagctaaaaatcctgttgtccggtccaagagctacaatacgccactcttgaatccggttcaggagcatgaagccgaaggtgcagcggccgggggcacttag

SEQ ID NO: 16803 - DNA, 681 bp, synthetic construct
  misc_feature 1..681: note = Description of Artificial Sequence: Synthetic coding sequence
  source 1..681: mol_type = other DNA
atgagcagcccttctctttctgatctaggaaagcgtgagcccgccgctgccgctgatgagcgaggcactcagcaacggcgcgcgtgtgccaacgccacttggaacagcatccacaacggcgttattgccgtgttccagcggaagggtctccccgatcaagagcttttcagtctgaatgaaggggtcaggcagttgctgaaaacagaacttgggtccttttttactgagtatttacagaaccaactacttaccaaaggcatggttatcctccgcgataagatcaggttctatgagggacaaaaactactggactcactcgctgagacttgggacttcttcttctcagacgtgctgcccatgctccaggccatcttttaccctgtacagggaaaagaaccctctgtgagacagctcgctcttcttcacttcaggaatgcaatcactctgtccgtgaaactggaagatgcgctcgcacgggcccatgccagagtgcccccggctatcgttcaaatgttgctggtcctgcagggcgtccacgagtccaggggtgtgaccgaagactacctgcggttggagactttggtgcaaaaagtggtaagcccctacctggggacatacggcctgcactcctctgaagggccatttacccattcttgcattttggaaaagcgcctcctgtag

SEQ ID NO: 16804 - DNA, 1236 bp, synthetic construct
  misc_feature 1..1236: note = Description of Artificial Sequence: Synthetic coding sequence
  source 1..1236: mol_type = other DNA
atggtttgtctcgagctctctcagcgggaggcgtgggggtccggcagccctgaaaagatgccagcccagccggaagggctctatcgccttaaattcatgagtagcccaagtttaagcgacctcggaaagcgagagcctgccgcagccgcggacgaaaggggaacacagcagaggagagcatgtgctaatgcgacgtggaacagcatccacaacggcgtgatcgctgtctttcagcgtaaagggctccccgatcaggagctgtttagtctcaacgagggggtaagacaacttctgaagacagagctgggctctttttttactgagtacctgcagaatcagctgctaaccaagggcatggtgatcctgcgagataagatccgtttttacgaaggccagaaactgctcgactcacttgctgaaacttgggatttctttttctccgacgtcttaccaatgctgcaggcaatcttttatccagtccagggaaaagaaccctcagtgaggcaactagccctcctgcattttagaaatgctatcacgcttagcgtgaagctggaggatgctctggcgcgcgcccacgcccgggtgccccccgcgatcgtgcagatgctgctagttctgcaaggtgttcatgagagcagaggtgtgaccgaggactatctacgcttggagacactggtgcaaaaagtggtctctccatatttagggacttacgggctgcattcttccgaagggccctttacacattcttgcatcctggagaaacgcctgctgaggaggtccagaagcggagatgtgctggcgaagaatccagtagtgcggtcgaagagctacaatacaccactgttgaatcccgtacaggagcacgaggccgagggcgcagctgccggtggaacctctatacgaaggcactctgtctctgagatgacgtcttgtcctgagccccaaggtttctctgaccccccaggtcaggggccaaccggcacattccggagtagtcctgctcctcactcaggcccttgcccaagccggctgtaccccaccacccagccacccgaacagggcctggaccccacacgtagttcactccctaggtccagtcccgaaaacctggtcgaccagattctcgagagtgtagactcggactctgagggaatttttatcgatttcggacggggccgtggaagcggcatgtcagatttggaaggatctggggggaggcagtccgtggtctag

SEQ ID NO: 16805 - DNA, 2649 bp, synthetic construct
  misc_feature 1..2649: note = Description of Artificial Sequence: Synthetic coding sequence
  source 1..2649: mol_type = other DNA
atggagcctgctcctgcaaggtcccctcgcccccagcaggaccccgccagaccacaggagcccactatgcctccgcctgaaactccttcggaaggtcgccagccctcaccgtccccatcacccaccgagcgcgctcctgcgtctgaagaggaatttcagtttctacggtgccagcagtgtcaggccgaggcaaagtgcccaaaactgctgccctgcttgcatactctttgcagcggctgtcttgaggcttccggaatgcagtgccccatctgtcaagccccttggcccctgggcgcagatactcccgctctcgacaatgtgttttttgagtccctgcagcgcagacttagcgtgtataggcagatagtcgatgcccaggccgtgtgtactcgatgtaaagaatccgcagatttttggtgttttgaatgtgagcagcttctgtgtgcgaagtgttttgaggcacaccaatggttccttaagcacgaggcacggccactggccgaactgcgaaatcagtctgtccgagagtttctagatgggacgagaaaaacaaacaatattttctgtagtaaccccaatcaccggacgcctactctgaccagcatttactgtagagggtgttccaaacctctctgctgcagttgcgcgctcctggattcatcccatagcgaactgaaatgtgatatttccgcagagattcagcagcgacaggaagagctggacgcaatgacacaggcgctccaggagcaggactctgccttcggcgctgtccatgcccagatgcacgctgcagtgggtcaactgggtcgtgcccgcgccgaaaccgaggagctgattcgtgagcgggtgcgacaagtcgtcgcccatgtccgtgctcaagaaagagaactgctggaggcggtggacgcgcggtaccagcgcgattatgaagaaatggctagcagattgggcaggcttgatgccgtactacaacgaattaggaccggctctgcccttgtgcagaggatgaagtgctacgcctcagatcaggaggtgctggacatgcatgggtttttgagacaggccctgtgccgattaagacaggaagagccccagtccctgcaggccgccgtcagaaccgatggcttcgatgagttcaaagtcagactgcaggacttatcttcttgcattactcagggaaaggatgctgccgtgagcaaaaaggctagcccggaggctgctagtacgcctagggatccaatagacgtcgatttgcccgaagaggccgagcgcgtaaaggctcaggttcaggccctcgggttggctgaggctcagccaatggccgtggtgcagtcagtgcctggggctcacccagtgcctgtgtacgctttttccatcaagggtcccagctatggagaagacgtctctaatacgactacagctcagaaacgaaagtgctcacagacccaatgccctcggaaggtaatcaaaatggaatcagaggaaggaaaagaggcccgattagcaagatcatcccctgaacaacccaggcccagcacttcaaaggctgtttcaccaccccatctggatggcccacctagtccccggagccctgtcatcggttccgaggtgtttctgcctaatagcaatcacgttgctagtggggccggcgaagccgaggaaagggtggtggtgatcagcagttcagaagattccgatgccgagaattcatcctccagggagctggatgacagtagttccgagtcctcagatttacagctggagggcccctccacactgcgggttctggacgaaaacttggccgatccgcaagcggaagatcgcccacttgttttcttcgaccttaagatcgataatgagacacagaagatcagtcagttggccgcggtaaaccgagaatccaaatttcgggtggtgatccagcctgaagcctttttctccatctactcaaaggctgtatcacttgaggttggcctccagcacttcctttccttcctgagttcaatgcggcggcctattttggcatgctataaactctggggccccggcctgccgaactttttcagggcattagaggatatcaacaggctatgggagttccaagaagctattagtggttttctcgccgctctccctttaatccgcgaacgcgttcccggtgcctctagtttcaaattgaaaaatctggcccagacatatttggcgagaaacatgtccgaaagatccgcaatggctgccgttctggccatgagggacctgtgccggctgctggaagtctctcccggaccacagctggcccagcacgtctacccgtttagctcactgcagtgctttgcctctttacaacctctggtgcaggctgccgtgttaccccgagcggaggcaagactgctcgctttgcacaacgtgagcttcatggagttgctgtctgcccaccgaagagatcgtcaagggggcctcaaaaagtatagtagatacctgtctctgcagacaactacactccctcccgctcagcctgcgttcaatttgcaggcgttaggcacttactttgaaggtttgctggaaggtccagccctggcccgagctgaaggagtttccacccctcttgcaggccggggcctcgcagagcgggcctcacagcagtcatag

SEQ ID NO: 16806 - DNA, 2490 bp, synthetic construct
  misc_feature 1..2490: note = Description of Artificial Sequence: Synthetic coding sequence
  source 1..2490: mol_type = other DNA
atggagcccgctcctgccagaagcccccggccgcagcaggatccagcccggcctcaggagcccaccatgcctcctccagagactccatccgaggggcgccagccgtccccctccccctctcccaccgaacgagctcctgctagcgaagaggaatttcagttcttgcggtgccagcaatgccaggctgaggccaaatgccccaagctcctgccttgcctgcacacgctctgctctggctgcttggaagcctcgggcatgcaatgccccatctgtcaggcgccctggccactgggagccgacactcctgcacttgacaacgtgttcttcgagtcactccaaagacgactgagcgtttaccgccagatagtggacgcacaggctgtgtgtaccaggtgtaaagaatctgcagatttttggtgtttcgagtgcgaacagctgctctgtgcaaaatgttttgaggcccaccagtggttccttaagcacgaagctcgcccacttgcagaactcagaaaccagagtgttagggaatttttagatggcactcggaaaactaataacattttctgttctaacccaaatcatagaacaccaaccctcacttctatctattgcaggggctgctctaaacctctgtgttgtagttgtgcattgctggactcctcgcacagcgaactcaaatgcgacattagcgccgaaatccagcaaaggcaggaagagctggatgcaatgacccaagccctccaggagcaggatagtgccttcggcgctgtccacgctcagatgcatgcggccgttgggcaactcggtagggccagagcagagacggaggagctaattcgcgagagagtgagacaggttgtggcgcacgtcagggcccaggagcgcgaacttttggaggctgtggatgccaggtatcagcgtgactacgaagagatggcatcgaggctgggacggctcgatgccgtgttgcagaggatcaggaccggctccgctcttgtgcaaaggatgaagtgctatgcctccgatcaagaagtgctagatatgcatggatttcttaggcaggccctgtgtcggctgaggcaggaagagccccagtcattgcaggctgcagtccggaccgatggctttgacgagttcaaggttcgcttacaagatttgagctcgtgtatcacgcagggcaaggatgccgccgtatcaaaaaaagcctcccctgaagcagcaagcacccctcgcgatccgattgacgtagatttaccagaggaagcagaacgggtgaaggcccaggtgcaagccttgggcctcgccgaagcccagccgatggccgtcgtccagtcggttcccggagcacacccagtccccgtctatgcattctctatcaaagggccctcttacggcgaagatgtcagtaatacaacaaccgcccaaaaacgaaaatgctcccagacacaatgcccaagaaaggtaataaaaatggagagcgaggaaggaaaggaggctaggttggccagatcatcgccggagcagccacgtcctagtaccagtaaagcggtgagtcctccccatctggacggacctccaagccctcgaagccccgtgattggcagcgaagtatttttacctaatagcaatcatgtcgcctccggcgccggtgaagcagaagaacgagtggtcgtgatttcaagttcagaagatagcgacgccgaaaatagttgtatggaaccaatggagaccgctgaaccacaatcctcaccagcgcactcctccccagcccacagctcaccggcacactcatcaccagtgcagtcacttctgagggctcagggtgcatcgtcattgccatgcgggacctaccatcctcccgcctggcctccccatcagcccgccgaacaagctgccacacctgacgcagaaccacactctgagcctcctgatcatcaagagaggccagctgtgcacagaggcattcgctacctgctctatagggcccagcgggccattcggctgcgccatgccttgagactgcacccacagctacaccgggccccgatacgcacatggtcaccccacgtcgtccaggccagcactcccgccattactgggcccctgaaccaccccgctaacgcacaggagcaccccgcacaactgcagagaggaatcagcccaccccaccgcattaggggagcagttcgcagtcgctcccgctcacttaggggatcctctcacctctcccaatggttaaataattttttcgcacttccatttagttccatggccagtcagctggatatgtctagcgtggtgggcgcgggggaaagtagggcccagacattgggggccggcgtccccccaggcgactcagtccgcggcagcatggaggctagtcaagtccaggtcccactggaagcctcccccataacctttcctccaccatgcgctcccgaacgaccaccaattagtcccgttcctggcgctcgccaggccggactttag

SEQ ID NO: 16807 - DNA, 2346 bp, synthetic construct
  misc_feature 1..2346: note = Description of Artificial Sequence: Synthetic coding sequence
  source 1..2346: mol_type = other DNA
atggagcctgcacccgcgcggtcccctcgaccccagcaggatcctgccaggcctcaggaaccaacaatgccccccccagagaccccatcagagggtcggcagcctagtccatcacctagtccgacagaaagggctcctgcgtctgaagaggagtttcagtttctgcgctgtcagcaatgtcaagcagaagctaaatgccctaagctgctcccgtgccttcatacactgtgcagtggatgcctcgaagcgagcggaatgcaatgcccgatttgccaggccccttggcccttgggcgctgacacaccagcgctggacaatgtcttttttgagagtctccagaggcgtctgtccgtgtatcggcagatagtagacgctcaagcagtttgcactcggtgcaaagagagcgccgacttttggtgctttgaatgtgagcagctgctgtgcgcaaaatgcttcgaggcccatcaatggtttctaaaacatgaggcccgccccctggccgagctcagaaaccaatcagtccgggagttcttagacggcacccggaaaaccaataatattttttgcagtaatcctaaccaccgaactccaaccttaacttctatttactgccgtggctgctccaaacccctgtgctgtagttgtgctctgcttgactcatctcactcagaactgaagtgcgacatcagcgcagagatccaacaacgacaggaggagctggacgcaatgacacaggccctgcaggaacaggacagcgcattcggcgcagtgcatgcccagatgcacgccgctgtgggtcaactcggccgagctcgtgccgagacagaggagttaatacgtgagcgcgtgcgccaggtcgttgctcatgtccgggcccaggagcgggaactcctcgaggccgtggatgctcggtatcagcgcgattacgaagagatggcctcccgcctgggcaggttggatgctgtgctgcagcgtattcgtaccgggtcagcgctggtgcagcggatgaagtgttacgcatcagatcaggaggtcctagacatgcatggctttcttaggcaggccctgtgtcgcctccgacaagaagaaccgcaatctttgcaggctgccgttcgtaccgacggcttcgatgaattcaaagtgaggcttcaggatctgtctagctgcattacacaagggaaggacgccgcggtttcgaaaaaagcttctcccgaagctgcaagtactccgagggacccaatcgacgtcgatctggacgtgagcaatactaccacagcccaaaaacgaaagtgtagtcagacccagtgcccccggaaggtgataaaaatggagagcgaagaaggaaaggaggccagactcgcccgctcatctccagagcagccgaggcctagtacaagcaaagcagtctcgcccccccatcttgatggaccaccttctcccaggtctcctgtgatcggctctgaggtgtttctgcccaactctaaccacgtggccagcggcgctggggaagcggaagagcgagtagtagtgatcagctccagcgaagactctgacgctgaaaacagctgtatggagcccatggaaaccgcagagccacagagctcccctgctcactcgagtcctgcccactcatctccagcccatagttctcctgtccaatccctgttgcgcgctcaaggtgcatcatctttgccttgcggtacttaccacccaccagcttggccaccgcatcaacctgcagagcaggcagccactcctgatgcggaaccacactcggagccccccgaccaccaggagcgacctgcagtgcacaggggcattcgttatcttctgtatcgggcacagcgggccatccgactccggcacgcacttcggctacatcctcagctgcatcgggcacccattagaacgtggagcccccatgtggtccaggcctcaacccctgctattacaggacctctcaaccatcccgctaatgcccaggagcaccctgcccagctccagagaggcatatccccccctcatcgcattcgtggtgcagtccgttcccggtcaaggtccctccgcggatcaagccatttgtcacagtggctgaacaatttcttcgctcttcccttctcctctatggcatcccagctggacatgagcagcgtggtgggggctggcgagtcccgagctcaaaccttaggagcaggagtgcctcccggagacagtgttagaggctccatggaggcaagccaagtgcaggtgcctctagaggcctccccgattacatttcctcccccctgtgccccagagagaccccctatctctccagtacctggggccagacaagcaggcctgtag

SEQ ID NO: 16808 - DNA, 1272 bp, synthetic construct
  misc_feature 1..1272: note = Description of Artificial Sequence: Synthetic coding sequence
  source 1..1272: mol_type = other DNA
atggaacccgcccctgcccggtccccccggccccagcaggatccagcacgcccccaagagcctaccatgccacccccagaaaccccttcagaagggagacagccatcgccttcccccagtcccaccgagagagcaccggcttccgaggaagaattccagtttctccggtgtcagcagtgtcaagccgaagcaaagtgccctaagttgctcccctgcctccataccctttgttcgggctgcctggaggcaagcgggatgcaatgtcctatttgccaggccccatggccactaggggccgataccccggctcttgacaacgtgttctttgaatccctccaacggcgcctctctgtatacagacagattgtggatgcacaagccgtgtgtacccggtgcaaggagtcagccgatttctggtgcttcgagtgtgagcagctactgtgcgcgaaatgcttcgaggcacaccagtggtttctgaaacatgaagcccgcccactggccgaattacgcaaccagtcagtgcgcgagtttttggatggcacccgcaagactaacaacatcttctgttccaatcctaatcacaggacacctactctgaccagtatctactgtcggggatgttcaaagccactctgctgttcctgtgctctcctggattcctcccattctgaactgaaatgcgacattagcgcagagatccaacagcgacaggaagagttagacgcaatgactcaggctttgcaggaacaggactcagcattcggggccgtccatgcccagatgcacgccgcagtcgggcaactgggacgtgcacgagccgagacggaagaactcatcagggaaagggtgaggcaggtcgtggcccacgtgagggctcaggagagggagctcctggaggcagtcgatgccaggtaccagcgcgactatgaagagatggccagcagattgggtagattagacgcagtcctgcagaggattcgaacaggctcagcactcgtccagaggatgaagtgttatgcctccgatcaggaagtgctggacatgcacggattccttcgccaggcactttgtcgtctgaggcaagaagagccacagtcactgcaggctgccgttagaaccgatggctttgacgagtttaaggtacgcctacaagatctgagctcgtgtatcacccaaggtaaagacgccgccgtttctaagaaagcctcacctgaggccgctagtacgcccagagaccccatcgatgttgatttaaggaacgctctctggtag

SEQ ID NO: 16809 - DNA, 1308 bp, synthetic construct
  misc_feature 1..1308: note = Description of Artificial Sequence: Synthetic coding sequence
  source 1..1308: mol_type = other DNA
atggaacctgcccctgcaagatccccaaggcctcagcaggaccccgctagaccacaagagcccactatgccaccaccggagactccctccgaggggcggcagcccagtccctccccatcaccaaccgaacgcgccccggccagcgaggaggagttccagtttctaaggtgccagcaatgccaggctgaagccaagtgccccaaattactcccatgtttacataccctgtgtagcggctgcctggaagcctccgggatgcaatgtccaatttgccaggctccatggcctcttggagctgacactccagccttggataatgtttttttcgaatctttacaaaggcggctgagcgtataccgacagatcgtagatgcacaggccgtgtgcactagatgtaaggaatccgccgatttctggtgcttcgaatgtgagcagctcctatgtgcaaagtgtttcgaggcccaccagtggttcttgaagcacgaggccaggcccttggcagaacttcgtaaccagtcagtgagagaattccttgatggcacacgtaaaaccaataatatattttgtagcaaccctaatcaccggacgcctaccctgacaagcatctactgtcgcggctgtagcaagcccctgtgttgcagttgtgctctacttgatagctcacattcggagttaaaatgcgatatatctgccgaaattcagcaaagacaggaggagttagatgccatgactcaggctcttcaggagcaggactctgcattcggagccgtccatgcgcagatgcatgccgccgttgggcagttaggccgggccagagctgagactgaagaacttattcgcgaacgcgtgaggcaagtcgtagcccacgtgagggctcaggaacgagaactacttgaggctgttgacgcaaggtatcaaagggattacgaggagatggcgagtagacttggaagactcgatgctgtattgcagagaatcagaaccggcagcgcgctagttcagagaatgaaatgctacgcaagtgaccaggaggtgttggacatgcacggatttcttcggcaggccctgtgtagactcaggcaggaggaacctcagtcactccaagccgccgtccgcaccgatgggtttgatgaatttaaagtgcgcctccaggatctctcaagctgtatcacacagggcaaggatgctgctgtgtcaaaaaaggcctccccggaagctgcaagcacaccacgtgaccccatcgatgtggacctgctgcccccacctgctcacgcgttgacagggcccgcgcaatcgtccactcactag

SEQ ID NO: 16810 - DNA, 1902 bp, synthetic construct
  misc_feature 1..1902: note = Description of Artificial Sequence: Synthetic coding sequence
  source 1..1902: mol_type = other DNA
atggagccagctccagccaggtccccacgcccgcagcaggaccctgcacgccctcaggagcctaccatgccgccccccgagactccatccgaaggtcgacagccatccccatcaccctcccctactgagagggcccccgcctcagaggaggaattccagttcctgcggtgccagcagtgtcaagctgaggccaagtgccccaaactgctgccatgcctgcataccctatgttcagggtgccttgaggccagcgggatgcagtgccccatctgtcaagcgccctggcccctaggcgccgatacccctgctctggataacgtgttcttcgaaagtttgcagagacgtctatcagtctacaggcagattgtggacgcccaggcagtttgcacaaggtgcaaggagtccgcggatttttggtgtttcgagtgtgagcagctgttgtgtgccaaatgtttcgaagctcaccagtggttccttaaacatgaggcgcgcccactggccgagctcagaaaccagtcagtgagagaatttttagacggcacacggaagaccaataatatcttttgtagtaacccaaatcaccgaacaccgacgcttacaagtatatactgccgaggatgctctaagcctctgtgctgcagctgcgctctgctggacagttctcactctgagctgaaatgtgacatttcggccgagattcagcaacgccaggaggaacttgatgctatgacgcaggccctgcaagagcaggactctgccttcggagctgtgcacgcgcagatgcacgctgcagtggggcagcttggtagagcccgcgctgagacagaggagttgatccgtgaacgagttagacaagtggtggcccacgtgcgtgcacaggaacgagagctgcttgaagctgtcgatgctcgataccaacgggactacgaggaaatggcctcacggcttggcaggttggatgcagttttgcagagaatccgaaccggatctgcactagtgcaaaggatgaaatgttatgcctctgatcaggaggtgctggatatgcatggctttctcaggcaggcgttgtgtaggctgcgccaggaggaaccgcaaagcctacaggcagctgtccggaccgacggcttcgacgagtttaaggtccggctgcaggacctctcttcctgtattacccaggggaaggatgctgccgtgtccaagaaggcttcacccgaggccgcttccacccctagagacccgattgacgtcgatttgccagaagaagctgagcgcgtgaaggcccaggtgcaagccctgggacttgctgaggcccagcccatggcggtcgttcaatctgtacctggcgctcatccagtccctgtctatgccttttcaatcaaaggaccatcctacggtgaagatgtttcaaacactacgactgctcaaaaacgcaagtgcagccaaacccagtgtcctaggaaggtgataaaaatggagagtgaggagggcaaagaagcccgcctcgcgaggtccagtccagagcaaccgagacctagcactagcaaagccgtctctcccccccatttggatggccccccatcaccacggtctcccgtgatcggttcagaggtgtttctcccaaactctaatcatgtagcatctggcgccggtgaggccgaagagcgagtggttgttatctcttcctccgaggatagtgacgcagaaaactccagctctcgcgagcttgatgactcaagctctgaaagcagcgacctgcagctagaggggccttctacactgcgcgtgcttgatgagaacttagctgatccccaggccgaagaccggccattagtcttttttgatcttaaaattgataatgaatctggtttcagctggggctatccacaccccttcttgatatag

SEQ ID NO: 16811 - DNA, 1332 bp, synthetic construct
  misc_feature 1..1332: note = Description of Artificial Sequence: Synthetic coding sequence
  source 1..1332: mol_type = other DNA
atggccgtggtgcagtcagtcccaggagcccatccagtgcccgtctacgccttttcaattaagggtccctcctatggcgaagacgtttctaacaccactacagcacagaaacggaagtgtagccaaactcagtgcccgcgcaaggttattaaaatggagtccgaggaggggaaggaagcacgcttggcaagatcttctcccgaacaacctagacccagcacatccaaggcagtgtcaccgccgcatctagatggtccccctagcccccggtcgcccgttatcggctccgaagttttccttccgaatagcaatcatgtggcttcaggagccggggaggccgaggagcgggtcgtggtaatctcctcaagtgaggactcagacgccgaaaactcaagttctcgggaactggacgactcaagcagtgagagctcagacctccagctcgagggtccctccactttgcgggttctggacgaaaacctcgccgacccccaggcggaagatagaccattggtctttttcgacctgaagattgacaacgagacgcagaaaatctcccagcttgctgctgtgaatagagaaagtaagttccgcgtcgtcattcagccagaagcattttttagtatctactccaaggccgttagtttggaagtggggttgcagcactttctctcatttctgagctctatgcggcgcccaatcttggcttgctacaagctgtggggccccgggctcccgaacttctttcgcgctttagaagatatcaataggctgtgggaatttcaagaggctatcagcggattcctcgcggcattacctttgatacgagagcgcgttccaggggcctcttcgtttaagcttaagaaccttgctcagacatatctggcccgtaacatgagtgaacgatccgctatggctgcggtgctggcaatgagggacctttgtaggctgttagaagtgtcacccggacctcagctcgcccagcacgtgtacccgttttctagcctgcagtgctttgcctccctccaacctttagtgcaagctgccgtccttccaagggcggaggcccgtcttctagcattacacaacgtcagcttcatggagctgctcagcgctcacaggagggacagacaaggaggacttaagaagtacagtcggtacctttcactacagaccaccaccttgccaccagcccaacccgcatttaacctccaggccctggggacctacttcgagggcctacttgaggggcccgccctggcgagggcagaaggggtatccacgcccctggctggcaggggtttggctgaacgcgcgtcccaacaaagctag

SEQ ID NO: 16812 - DNA, 2598 bp, synthetic construct
  misc_feature 1..2598: note = Description of Artificial Sequence: Synthetic coding sequence
  source 1..2598: mol_type = other DNA
atggagccagcacctgctaggagccctcgaccacagcaggaccccgcacgacctcaggaacctactatgcccccacccgagacccctagtgaagggaggcagccaagcccctctcctagcccgaccgaacgggctcctgcaagtgaggaggaattccagttcctgcggtgccagcagtgccaggcagaagccaagtgcccgaaattgctcccatgcttgcacactctgtgttctggctgtctggaggcctcaggcatgcagtgtcccatctgtcaggccccgtggcccttaggtgccgataccccagcgctagataacgtcttctttgaatcactgcagcgtcgcttgtcagtgtatcggcagatcgttgacgcacaggccgtgtgcacacgatgcaaagagagcgccgatttttggtgcttcgaatgcgagcagctactttgtgctaagtgttttgaagcccaccagtggttcctgaaacatgaggcccgcccgctcgccgagttgcgtaaccagtctgtacgcgagtttttggatggaacccgcaagacgaacaacatcttctgttctaatcctaaccacagaacccccactctgacctccatctattgccgcggctgttccaagcctctgtgttgctcttgcgcccttctggactcatcccacagcgagttaaaatgcgacatcagcgccgaaattcagcaacggcaggaggaactggatgccatgacccaggccctgcaagaacaggacagtgctttcggagcagttcacgctcagatgcatgccgcagtgggacagctgggtagggctagggccgaaaccgaagagttaattagggagcgcgtgcgccaggtggtggcccatgtccgggctcaggaaagagagctgttggaagccgtggacgccaggtaccagcgggattacgaagaaatggcttcgagactgggcagactcgatgccgtcttgcagagaatccgtacaggatcagctttagtccagcgcatgaaatgctacgcctctgatcaggaagtccttgacatgcatggcttccttaggcaggccttgtgcagactgcgacaggaggagcctcagagcctgcaggccgccgttagaacagacggtttcgacgagttcaaggtcagactgcaggatctgtcatcttgtatcacccaggggaaagatgcggccgtctcaaagaaagcaagcccggaggccgcttcgactccacgggaccctattgacgtggacctgcccgaggaggctgagagagttaaggcgcaggtccaggctctgggcttggccgaagcacagccaatggccgtggtacagagcgttccgggcgctcaccctgtccccgtgtacgcattctcaatcaagggcccctcgtacggcgaggacgtgtcgaatacgaccaccgcgcagaaacggaaatgttcccagacccagtgtccacggaaagtcattaagatggagagtgaagaaggcaaggaagctagactcgcacgcagctctcccgaacaaccaagaccaagcaccagcaaagccgtctctcccccccaccttgacgggcccccaagtccacggtcacccgtgatcggaagcgaggtgtttctccctaatagtaaccacgtggcgtccggagcaggagaggcagaggagcgtgtggtggtcatatcttcaagcgaggattctgacgctgagaatagcagtagcagagagctggatgactcaagctctgaaagttccgatctgcagctcgagggcccatccacactacgcgtactggacgaaaatctcgcagatcctcaggccgaagatcggcccctagtatttttcgatcttaaaattgacaacgagacccagaaaatctcacaactggcggctgttaaccgggagtctaagtttcgggttgtgatccaacccgaggctttcttttcgttcctgagcagtatgagacggcccattctggcatgctataagctttgggggcctggtctacctaatttttttcgagccctggaagacattaaccgcctgtgggaatttcaggaagctattagcggcttcctggctgccctgcccctgattcgggagagagttcctggagcatctagcttcaaattgaagaatttggcccagacttacctagcccgtaacatgtctgaaagatctgccatggccgccgtgctggccatgcgcgatttgtgcaggctcctggaagttagcccaggaccacagctggctcagcatgtgtatcctttttcatccctccagtgcttcgctagtcttcagccacttgtgcaggcagccgttctcccaagagcggaggcccggctccttgcactgcacaacgtttcatttatggaattactgtctgctcaccggcgggatcgccaaggtggcctgaaaaagtatagccgctacctatccttacaaaccaccaccttacccccagcacagcctgcgtttaacttacaggcattgggtacctacttcgagggactgttggaaggccctgctctagcacgcgccgagggtgtgtctacccctctggcaggacggggccttgccgagagggcctctcagcagtcctag

SEQ ID NO: 16813 - DNA, 1836 bp, synthetic construct
  misc_feature 1..1836: note = Description of Artificial Sequence: Synthetic coding sequence
  source 1..1836: mol_type = other DNA
atggagcctgcaccagccaggtcgcctcgcccacagcaggatccagctcggccccaggagcctacaatgcctccccccgagactcctagtgaaggtagacaaccaagtcccagcccatccccgactgaaagagctccggcatctgaagaagagttccagttcctgcgatgtcaacagtgtcaagcagaggcaaagtgcccaaaattgctcccatgtctccataccttgtgcagcggctgcctggaggcaagcggcatgcagtgccctatatgtcaagcaccctggcctctcggagcggacacacctgcactggacaacgtgttctttgagagtttgcagaggcgcctgtctgtgtatcgacaaattgtggacgcgcaggcagtctgcactagatgcaaagagtcagctgacttttggtgcttcgaatgtgaacagttgctttgtgctaaatgcttcgaagcacaccagtggttcctgaagcacgaagcccggcctctggccgagctgagaaaccaatcagtgcgcgagttcctcgatggcacaaggaaaactaataacattttctgttctaaccccaatcatcgaacgcccaccctaacctcaatctattgtagaggctgttccaaacctctctgttgtagctgtgctctgctcgattccagtcattccgagcttaaatgtgacatcagcgctgagatacagcagagacaggaagagctggatgcaatgacgcaggccctgcaagagcaagactcagccttcggggctgtgcatgcgcagatgcatgcggccgttggccagctgggacgcgcccgggctgagactgaagagctcatcagggaaagagtgaggcaagtggtggcccacgtgcgagcacaggaaagggaactgctcgaagcagtggatgcccgttaccagcgcgactacgaagagatggcgtctcgattggggcggctggatgccgtgctgcagcgcatcaggaccgggagcgcgctggtacaacggatgaaatgctacgcaagtgaccaggaggtgctggatatgcatggcttcctaaggcaggctctgtgtcggttgaggcaggaggagccgcaatcactgcaggccgcagtccgaacggacggcttcgatgagttcaaggtgagacttcaagatttgtcctcatgtattactcagggcaaggacgcggccgtgtccaagaaagccagccctgaagcagcgagcacaccgcgcgatcctatagacgtggacctcccagaggaggctgagagagtgaaagcacaggtgcaagccctaggcttggctgaggcccagcctatggctgttgttcagtcagtgcctggtgctcaccctgtccctgtgtatgctttctcgatcaaaggtccctcttatggcgaggacgtctccaatacgaccaccgcacagaagcgaaagtgcagccaaactcaatgtcctcgaaaggtcattaagatggagagcgaggaggggaaggaagctcgactcgcaagaagttctcccgaacagccaaggccttcgacatcaaaggctgtgtcacccccacacctcgacggcccgccatcccctcgttctcctgtcattgggtcagaggtattcctccctaactccaaccatgttgcaagcggggccggcgaggccgaggaacgggtggtggtgatctctagttcggaagactctgatgccgagaactccgtctcagggcccgaggtacagccccgcactcccgcctcgccacactttagaagtcagggagctcagccccagcaggttacactccgtctcgccttaagactcggtaacttccccgtgcgccattag

SEQ ID NO: 16814 - DNA, 1683 bp, synthetic construct
  misc_feature 1..1683: note = Description of Artificial Sequence: Synthetic coding sequence
  source 1..1683: mol_type = other DNA
atggaacccgcgccagcacggagtcctcggccccagcaggatccagctaggccacaggagcctaccatgcctcctcccgagacgccaagtgaaggaagacagccatccccttctccctcgccaacagaaagggcccctgcaagcgaggaggagtttcagttcttgcgctgtcagcagtgccaggctgaagcaaaatgcccaaagctcttgccatgtctccacaccttgtgctccggatgcctagaagcatccggaatgcagtgcccaatctgccaggctccttggcccctgggcgcggatacccccgccctcgataatgtgtttttcgagagtctccaaaggagactgtctgtttacagacagattgtagatgcccaggcggtttgtacccgatgcaaagaatccgcagacttctggtgtttcgagtgtgaacagttgctgtgcgccaagtgcttcgaggcccaccaatggttcctgaagcatgaggccagacctctggctgaactgcgcaatcagtcggtgcgcgaattcctcgatggcacccggaaaaccaataacattttctgtagcaatccaaaccatcggacccccacactgacatctatctattgtaggggatgttctaaaccactctgttgcagctgtgccctgttggattcttcacatagtgagttgaagtgcgacatttcggcagagatacaacagagacaggaagaattggacgcaatgactcaggctttacaggaacaggattccgcctttggcgctgtgcatgctcagatgcacgccgcagtgggacagctcggaagggccagagcggaaaccgaagagctgatacgagagagggtgcgtcaggttgtcgcccatgtcagagcacaagaacgggagctactagaagccgttgatgctcgctaccaacgtgactacgaggagatggcgtccagactgggacggctcgacgccgtgcttcagcgaattcgcactggcagtgccctcgttcagcgcatgaagtgttacgcctccgaccaggaggtgctagatatgcacggatttctgagacaggcactgtgcagactgcggcaggaagagcctcaaagcttgcaagctgccgtgcgcaccgatggattcgatgaattcaaagtacggctgcaggatttgtccagctgcataacgcagggcaaagacgctgctgttagcaagaaggcctcccctgaagcggccagtacacctagagatcctattgacgtagatctgcctgaggaagctgaacgcgttaaggctcaagttcaggccctcggactcgccgaggcccagccaatggctgtagtccagtcagtccccggggcgcacccagttcccgtgtatgcgttctccatcaaaggccccagttacggagaagacgtttctaacactacaacggcccagaaacggaaatgttcccagacccagtgtccccgtaaggtgattaaaatggaaagtgaggagggcaaagaagctcgtcttgcacgtagcagccctgagcagccccggccctccaccagcaaggcagtgagtccaccgcacttagatggcccaccatcacctcgaagtcctgtgataggctcggaggtctttctgccgaattccaaccatgtggcctccggagctggggaagcgggtcgcgagaggaacgcactctggtag

SEQ ID NO: 16815 - DNA, 1758 bp, synthetic construct
  misc_feature 1..1758: note = Description of Artificial Sequence: Synthetic coding sequence
  source 1..1758: mol_type = other DNA
atggaacccgcacctgcacgctctccaaggcctcagcaagatccagcaagaccacaggagccaactatgcctcctcccgagactccaagtgaaggccggcagccctccccctcaccctctcccactgagcgggcccccgcttcagaagaggaattccagttcctccggtgtcagcagtgccaggcagaagccaagtgccccaaactgttaccctgcctccacaccctttgttctggctgcctggaagcatcgggcatgcaatgccccatctgccaggcgccttggccactcggcgctgacacacccgctctagacaacgttttctttgagtcactgcaacgcagactcagcgtgtaccgtcaaatcgtcgatgcgcaagccgtgtgtaccaggtgcaaggagtctgccgatttctggtgctttgaatgtgaacagctgctgtgtgcaaaatgcttcgaagcacaccagtggttcctcaaacatgaagcgaggccccttgcagagctcaggaaccaatccgtccgggaatttctcgatgggacccgtaagacgaataacattttttgctcaaaccctaaccacaggacccctactcttacttcaatctattgccggggatgcagtaagcccctgtgttgttcatgtgcactgctagacagctcccacagcgagttgaagtgcgacattagcgccgagatccaacaacgccaggaggagctcgatgccatgacacaggcattgcaggagcaggactctgccttcggggcagtacacgcgcagatgcacgccgcagtggggcagctcggaagagctcgcgccgagacagaggagttgatccgagagcgagtgcgccaggttgtcgctcatgtgcgcgcccaggagagggagctcctcgaagccgtagatgctaggtaccagagggactacgaggaaatggcttcaagactcgggcgccttgacgccgttctgcagagaatacgcacagggtcagccctcgtccaaaggatgaaatgttacgcatctgatcaggaggtgctcgacatgcacggtttcctccggcaggccctctgtcgtctgcgccaggaagaaccccagtccctgcaggctgctgtcaggactgacggttttgatgagttcaaggtgcggttgcaggatctatcatcctgtataacccagggaaaagacgcagccgtatccaagaaggcatcccccgaagccgctagcacgccacgtgatcctatcgatgttgacctagacgtatcgaacacgacaactgctcagaagcgaaaatgcagtcagacacagtgcccccggaaggtcatcaaaatggagagtgaagagggaaaggaggccagactggcaagatcatcccccgaacagccacggccatccacttcgaaggcggtttccccgcctcacttagatgggcctccctctcccaggtcacccgtcataggttcggaagtgtttttgcctaactcgaaccacgtcgcctcgggagcaggggaagccgaagaaagggtagttgtgatatcgagctctgaggatagcgacgccgagaattcctcatcccgggaactagatgatagtagcagtgaaagtagcgacctgcagctggagggtccttctacactgagagttctcgatgaaaacttggccgacccccaggccgaggataggccactggtattctttgatctgaagattgataatgaaagcgggtttagttggggttatcctcacccattcctcatatag

SEQ ID NO: 16816 - DNA, 483 bp, synthetic construct
  misc_feature 1..483: note = Description of Artificial Sequence: Synthetic coding sequence
  source 1..483: mol_type = other DNA
atgcagcctgctagtgctaagtggtacgatcggcgcgattacgtctttattgaattctgcgtggaagactcaaaggatgtgaatgtgaattttgagaagagcaaactgaccttctcttgcttgggcgggtccgataactttaaacatctgaacgaaattgatctgttccactgcatcgatcccaatgactcaaagcacaaaagaacggacagatctatcctgtgttgtctgagaaaaggagaaagtgggcagtcatggcccagactgacaaaagaaagggctaaactgaattggttatctgtggacttcaataattggaaagactgggaagacgattctgacgaggacatgtccaatttcgacagattttcggaaatgatgaacaacatgggaggcgacgaagatgtggacttgccggaggttgatggagcagacgatgacagccaggattcagatgacgagaagatgcctgatttggagtag

SEQ ID NO: 16817 - DNA, 3141 bp, synthetic construct
  misc_feature 1..3141: note = Description of Artificial Sequence: Synthetic coding sequence
  source 1..3141: mol_type = other DNA
atgcagaaaccgagtggcttaaagccacctggacgcggaggaaagcactcctctcctatggggcgaactagcaccgggtcggcctcaagttctgctgccgtggccgcctcatccaaggagggctctcccctgcataagcaatcctccggaccctccagctcccctgccgcagctgcagcgcccgagaagcccggtccaaaagcagctgaggttggcgatgactttctgggggacttcgtagttggagaacgtgtgtgggtgaacggggtgaagcctggagtagttcagtacctgggggaaacccagttcgctcccggacagtgggccggagtagtccttgatgacccagttggaaaaaacgacggcgcagtcggaggcgtgcgatacttcgagtgccctgccctgcaagggatttttacccgaccgtctaagctgacaaggcagccaaccgcggaaggctccgggtccgacgcccactctgtggagtccctaaccgcccaaaacctcagcctgcactccggcaccgccactccgccattaactagtcgtgtgattcccctacgagagtctgtacttaacagtagcgtgaagacaggaaatgaatccggttcgaacttatccgactccggatccgttaagcggggtgaaaaggatctccggctgggcgacagagtgcttgtcggaggcacaaaaactggcgtggtcaggtatgtgggagagaccgattttgccaagggggagtggtgtggggtggagctggacgaaccactcgggaaaaacgacggagccgtggctgggacgagatatttccagtgtccgcccaaatttggtctgtttgcgcctatccacaaggtcattagaattggattccccagtacttctcccgctaaggctaagaaaacaaagcggatggccatgggggtgagcgccctgactcattctccatcttcaagcagtatttcctccgtttccagtgtagccagctctgtgggcggacgccctagcaggtctggactgcttaccgagactagcagcagatatgcacgtaaaataagcggcaccacagccctgcaggaggccctgaaagaaaaacagcaacacattgagcagctgttagctgagagggatctggagcgggccgaggtcgccaaagcaacatcacacatatgcgaggtcgaaaaggagattgccctactgaaggctcagcacgaacagtacgtcgcggaggccgaggagaagcttcagcgcgctcgactgctggtcgagtctgtcaggaaggaaaaggttgatctctcgaatcagcttgaagaagaacggagaaaagtggaagacctgcagttcagagttgaagaagaaagcatcacaaagggtgacttggagactcaaacccagctggaacacgcacgcattggagagctggagcagagcctcctcctcgaaaaagctcaggccgaacgtttgctgagggaattggcggataatcgattgaccacagtcgcagagaagtcgagagtgctccaattagaggaggaattaactctgagacggggcgaaatcgaagaactgcagcaatgcctgctgcacagcgggccaccaccgccagaccatccagacgctgccgaaatcttacgactcagagaacgactgctatctgcttccaaagaacaccagcgcgagagtggagtactccgtgacaagtacgaaaaggcgctcaaggcctaccaggccgaggtagataagctgcgagccgccaatgaaaaatacgctcaggaagtcgcagggttgaaggacaaagtgcaacaagctacctcagaaaacatggggctcatggataactggaaaagtaagctagattctctggcatccgaccatcaaaagtcgctcgaggacctcaaagccactctgaactctggtcctggagcccaacagaaagaaatcggagaattaaaagccgtgatggagggaatcaagatggaacatcagttggaactaggaaacttgcaggcgaagcatgacctggaaactgcaatgcacgtgaaggaaaaggaagccctgcgtgagaagttgcaagaggcccaggaggaactggctggcctgcaacgccattggagagcgcaactcgaggttcaggctagccagcacagactagaattgcaggaggcccaagatcagaggcgggacgcagagctgcgcgttcacgaactggaaaaactagatgtggagtatcgcggacaggcacaggccattgaatttctcaaagagcagatcagtctggccgagaagaaaatgctggattacgaacgcctccagagggccgaggcccagggaaagcaagaggtagagagcttgagagaaaagctccttgtggccgaaaaccgtctccaggcggtggaagccctgtgcagctctcagcacactcacatgattgagtcaaatgatatctctgaggaaactatccgcacaaaggagaccgtggaaggcctacaggacaagctgaataagagggataaagaggttacagccttaaccagtcaaacagagatgttgcgagcccaggtcagcgcgttggaaagtaagtgtaagagtggggagaagaaggtggatgccttactcaaagagaaacggaggttagaagccgaacttgagactgtttccagaaaaacccacgacgcctccgggcagctagttctgatctctcaagaactgctgagaaaagagcgatctttaaacgaactcagagtgttgctcctggaagccaatcggcactctcctggccctgagcgggaccttagccgggaagttcacaaggcagagtggagaatcaaagaacaaaaactcaaggacgatattcggggcctccgtgagaagctgactgggctagacaaagagaaaagtctgagcgatcagcggcggtactccctcattgatcgctcatctgcccccgagctgttacggctgcagcaccagttaatgtcaactgaagacgcactgcgagacgcactggaccaggcccagcaggtggagaagttaatggaggccatgcgatcctgtccagacaaagcccagaccatcggcaactcagggagcgctaatgggattcatcagcaggataaggcccagaagcaagaggataagcattag

SEQ ID NO: 16818 - DNA, 1800 bp, synthetic construct
  misc_feature 1..1800: note = Description of Artificial Sequence: Synthetic coding sequence
  source 1..1800: mol_type = other DNA
atgtcaaggagtttgcttttgtggttcctcctgtttttgctactcctgcctccattgcccgtattgctggccgatcccggcgcgccgacgccggtaaatccgtgttgctactacccttgccagcatcagggcatttgtgtaagattcggactcgatcgttaccagtgtgactgtacaagaacaggatacagcggtcccaactgcacaatacccggcctgtggacatggttgcggaactccctgcgtccatcccctagttttactcacttcctgttaacccatggtcggtggttctgggagttcgtgaacgcgacttttatccgagaaatgttgatgaggttggtcttaacagtcaggtccaatctgatccctagccctccgacatataattcagctcatgactatataagttgggagtccttcagtaacgtgtcttactacacccggattcttccatctgtccctaaggactgtcccacaccaatggggactaaaggtaaaaaacaacttcctgatgcacagctgcttgcccggcggtttctactgaggcgaaagttcatacctgacccccaaggcaccaacttgatgtttgcgttctttgcacaacacttcacgcaccaatttttcaaaacatcaggaaaaatggggcccgggttcaccaaggcactcggccacggggtggacctggggcacatctacggagacaacctagagcggcagtaccagctcaggcttttcaaagacggaaaactaaagtaccaggtgttggacggggaaatgtatccccctagtgttgaagaggcgccggtattaatgcactatccaaggggaatcccccctcagtcacagatggccgttggccaggaggtctttggactccttccgggcctcatgctctacgccacactctggttgagagagcacaacagagtatgtgacctgctcaaggcggagcatcctacatggggggacgagcaattattccagacaactcggcttattctaatcggagagacaatcaaaatagtgatcgaagaatacgttcagcagctgagcggctactttctgcaactgaaattcgatcctgaactgctctttggagtacagttccaataccgtaatagaattgctatggaatttaaccacctgtatcactggcatccactgatgcccgactccttcaaagtcggaagccaagaatactcatacgagcaatttctgttcaatacttccatgttggttgattacggagttgaagccctggtggatgcctttagcaggcagattgccgggaggattgggggcggacgcaatatggaccaccacattctgcacgtcgccgtcgacgtgatcagggagtcaagggagatgcggctgcagccattcaatgagtaccggaaacgtttcggcatgaaaccttacactagctttcaggagttggtgggcgagaaagaaatggcagcggaactcgaggagctgtacggggacatcgatgctttggaattctatcccggactcctgctggagaaatgtcacccaaacagtatctttggagagagcatgatcgagatcggtgctccgttttcactcaagggtctactcggtaatcccatttgtagtcccgaatactggaaaccctccacatttggtggtgaggtcggattcaatattgtcaagacagccactctgaaaaagttggtgtgcttaaatactaagacatgcccctatgtgagctttcgcgtcccagacgcgtctcaggatgatggacccgctgttgagagaccttcaacagagctctag

SEQ ID NO: 16819 - DNA, 1473 bp, synthetic construct
  misc_feature 1..1473: note = Description of Artificial Sequence: Synthetic coding sequence
  source 1..1473: mol_type = other DNA
atgctgatgcgcttagtgttaacggtccgtagcaatctcatcccaagccctcccacctataactctgcccacgactacatctcctgggagtcttttagcaatgtctcctattacacgaggatattgccctcagtacccaaagactgccctacacccatggggactaaaggcaagaaacagctgcccgacgcgcagctgctcgcacggaggttcttactcagacgcaagttcatcccggatccccaggggacaaatctcatgttcgcatttttcgcacagcatttcacgcatcagtttttcaagaccagcggcaaaatgggtccaggcttcactaaagccttaggtcacggcgtggacttggggcacatttacggagacaatctggagcggcagtaccagctgagattgttcaaagacgggaagcttaagtaccaagtgctcgacggggagatgtatccaccctccgtcgaggaggcccctgtacttatgcactaccctcgtggtatccccccacagtcgcaaatggctgtcgggcaggaggtgttcggcctgctgcccggcctgatgctctacgccactctgtggctgagggagcataacagggtctgcgatctgcttaaagccgagcaccccacttggggtgatgaacagcttttccagactacccgcctcattctgatcggggagaccattaagattgtgatcgaggagtatgtgcagcagctctctggatactttctgcaactgaaatttgacccagaactcttattcggggtccagttccagtataggaatcgcatcgccatggagttcaaccacctgtaccactggcaccccctgatgccagactcctttaaggtcggttcccaggagtacagttatgagcagtttctctttaacacgtccatgctggtcgattacggcgttgaggcgcttgtggacgctttctcaagacagattgctggcagaatcggcggtggccgcaacatggatcatcatatcctccatgtggccgtggacgtgatccgggagtccagagaaatgcgacttcagcctttcaatgagtataggaaaaggttcggcatgaaaccatatacctcttttcaggagctggtcggcgaaaaggaaatggcagctgagctagaagagctgtatggggacatcgacgcactggagttttacccgggactgctgttagagaagtgccatccgaactccattttcggagagtctatgattgaaatcggggcaccattttctctcaagggactgctcggtaaccccatctgcagccctgagtattggaaaccttcaacattcggaggtgaggtcggtttcaacatcgtcaagactgcgaccctgaagaaactggtatgcttgaacaccaagacctgtccgtacgttagctttagagttcctgacgcctcacaggacgacggacccgccgtcgagcgaccttctacagaattgtag

SEQ ID NO: 16820 - DNA, 471 bp, synthetic construct
  misc_feature 1..471: note = Description of Artificial Sequence: Synthetic coding sequence
  source 1..471: mol_type = other DNA
agccttcttctgtggtttttgctgttcctgctactcttgccccctctccccgtcctactggcagatcccggagcgcccacaccagcgggcctgtggacgtggcttcgaaatagtctgaggccatctccgtcttttacgcattttctcctgactcatgggcggtggttttgggagtttgttaacgcaacctttatcagagaaatgctgatgcggctcgttttgactgtgaggagcaaccttatcccttccccacccacatataatagcgctcacgattacatttcatgggaaagcttttcaaatttcttcaaaaccagcggcaagatgggtcccggctttacaaaggcccttggccacggggttgacctcggccatatttatggggacaacttggaacgccagtaccagctgaggctgtttaaggatgggaagctcaagtaccaggtccttgatggggagatgtatccttag

SEQ ID NO: 16821 - DNA, 1614 bp, synthetic construct
  misc_feature 1..1614: note = Description of Artificial Sequence: Synthetic coding sequence
  source 1..1614: mol_type = other DNA
atgaggaagccccgactgatgaatccctgctgctactacccctgtcagcatcagggcatctgtgtgagattcggtttagatcggtatcaatgcgattgtactcgtactggctatagtggcccaaactgcacaatcccaggcctctggacatggctacgcaactctctgcgccccagtccttctttcacccactttctccttacacacggccggtggttctgggaatttgtcaatgctacctttataagggaaatgctgatgaggttggtgctgactgtgcgatcgaaccttatacccagtccccccacatacaattccgctcacgactacatctcatgggagagcttttctaacgtgagctactacaccaggattctgccctccgtgcctaaggattgtcccaccccaatgggcactaaaggcaaaaaacagctgcccgacgcccaattgctcgcacggaggttccttctccggcggaagttcatcccagatccgcaggggactaacctgatgttcgcgttcttcgcgcaacatttcacacaccaattctttaaaacttctggtaagatgggacctggttttaccaaagccttgggtcacggcgtcgatctaggtcatatctatggagacaatctggagaggcaataccagcttcgcctgttcaaagatggtaagcttaaatatcaggtgttagatggcgagatgtaccccccctccgtggaagaagcccctgtgttaatgcactaccctagaggtataccgcctcaatctcagatggctgtgggacaggaggtgttcggcctcctcccaggactgatgctgtacgctacactctggttgagggagcataaccgcgtgtgtgacttgctcaaggctgaacatcccacttggggtgatgagcaacttttccaaactacacgccttatactaatcggcgagaccattaagattgtcattgaggagtacgtacaacagctgagcgggtactttctccagcttaaatttgatccagaattactattcggcgtccaattccaatatagaaatagaatcgctatggagttcaaccatctgtatcactggcatccactgatgccggatagcttcaagataggcggcggcaggaacatggaccaccatatccttcacgtcgcggtggacgtcatccgggaaagtagagaaatgaggctacaacccttcaacgagtacagaaaaaggtttggaatgaagccttacacctcattccaggagctggtgggggaaaaggagatggcagctgaactggaagagttgtacggggacatcgacgcactggaattctacccaggcttgctcctcgagaaatgtcatcccaacagcatttttggtgagtcaatgattgagatcggagctcctttcagcctgaagggcctcctgggcaaccctatctgctcaccagagtactggaagccaagtacctttggcggggaggtaggattcaatatcgtcaagaccgctactctcaaaaagctcgtgtgtctgaatacaaagacctgtccatacgtgtcattccgcgtgcctgacgcctcacaggacgacggcccggccgtagaacgaccatctactgaattatag

SEQ ID NO: 16822 - DNA, 1815 bp, synthetic construct
  misc_feature 1..1815: note = Description of Artificial Sequence: Synthetic coding sequence
  source 1..1815: mol_type = other DNA
atgcttgctagagctttgttattgtgtgctgtactggctctgagccataccgccaacccatgttgcagtcacccatgtcagaaccggggagtgtgcatgtctgttggctttgatcagtacaagtgtgattgtactagaactggcttttacggggagaattgcagcacccccgagttcctgacccgcataaagctgttcttgaaacctacacctaacacggttcattatattttgacacatttcaaaggcttctggaacgtggtcaacaacattcccttcttacggaacgcaattatgagctacgtgcttacatccaggagtcacctgattgactctccacccacgtataatgccgactacgggtacaaatcttgggaagcattttcaaatctgagctactatactagagctctgcctcccgtcccggacgattgcccgaccccccttggagtgaagggaaaaaagcagctccctgactccaatgagatcgtagagaagctactgctccggcgcaaattcattcccgatcctcaagggtctaatatgatgttcgcattttttgcccagcacttcacccaccagtttttcaaaacagaccataagagaggccctgccttcactaacggtttaggtcatggtgtggacttgaaccacatctacggcgagactcttgcccgccagcgcaagctccgcctgttcaaagacgggaaaatgaaatatcagattatcgacggggaaatgtaccctcccactgtaaaagacactcaggccgagatgatctatccccctcaggtgccagagcacctgcggtttgctgtgggtcaggaggtctttggattagtcccgggactcatgatgtatgctacaatatggttgagagaacataaccgggtctgtgacgtattaaagcaggagcacccagaatggggtgacgagcagctcttccagacctcacggctaatcttgataggcgaaacaattaagatcgtaatcgaagactacgttcagcatttgagtggctaccacttcaagctgaagtttgatcctgaacttctattcaacaagcagttccagtaccagaatcgcatcgccgcagagtttaatacactgtaccattggcatccccttctgccagatactttccagatacacgaccagaaatacaattaccagcaatttatctataacaattccatcttgcttgaacacggaattacccagtttgtggagagcttcaccagacaaatcgccggcagggtggccggcggccgtaacgttcctcctgccgttcagaaagtctcacaggcctcgatcgaccagagccgacagatgaagtaccagagtttcaatgaatatcggaagcggttcatgctcaagccctatgaaagttttgaggagttgacaggtgagaaggagatgagcgccgagctggaagccctgtacggcgatattgatgctgtggagctgtatcctgctctgcttgtggagaaaccccggccagatgcaatcttcggcgaaacgatggttgaggttggcgctcccttcagcctgaaaggtctgatggggaacgtcatctgcagtccagcatactggaagccctctacctttggcggggaagtgggcttccaaatcatcaataccgcctctattcagtctcttatctgcaataacgttaaaggctgcccattcactagcttcagcgtacctgatcccgaattgattaaaacagtcacgatcaacgcgagttcctctcggtccggtctagacgatataaaccctacggtgcttctcaaagaaagatcaacagagttgtag

SEQ ID NO: 16823 - DNA, 1614 bp, synthetic construct
  misc_feature 1..1614: note = Description of Artificial Sequence: Synthetic coding sequence
  source 1..1614: mol_type = other DNA
agtctggtgcccgctacaaactatatctacacacccctgaatcagttgaagggcgggacaattgtcaacgtctatggagttgtgaaattcttcaagccaccctatctttcaaaagggaccgactactgctctgtggttaccatcgtggaccagactaacgtgaagttaacttgcctgctgttttcaggcaattatgaagcgttaccaatcatctacaaaaatggagatatcgtccgcttccacaggcttaagatccaggtgtataagaaggaaacacagggcattacctcgtctgggttcgccagcttaacctttgaaggaacactgggagctcccataataccccggactagtagtaagtattttaatttcaccacagaggatcacaaaatggttgaggcccttcgcgtttgggcgtccacacatatgtctcctagctggacactgttaaaattgtgcgacgtacagccaatgcagtatttcgaccttacctgtcagttgctggggaaagccgaggttgacggtgcctcgttcctcttgaaggtgtgggacggcacgcgcacgccctttccatcttggcgtgttttaattcaggaccttgtcctcgagggagacctgagtcacattcataggctccaaaatctgaccatcgatattctcgtctacgacaaccatgtgcacgtcgcgcggtctttgaaggttgggtcctttctccgaatctactcccttcacaccaaattgcagtccatgaattctgaaaaccaaacaatgctgagcctggagttccatttgcatgggggcactagctacggtcggggcattagggtcctgccggagtctaattccgacgtcgatcaactgaaaaaggacttggagtccgcaaatttaacagccaaccagcactccgacgttatttgccagtccgaaccagatgacagtttcccttcatccgggtccgtgagtttgtacgaggtcgaacgatgccagcagttatctgctactattttgacggaccatcagtatctcgaacgcacacccctttgcgcaattctgaaacagaaagccccccagcagtaccgcatacgagccaagctccgctcttataagcctaggcgcctgtttcagtccgttaagttgcactgcccaaaatgccatctcctgcaggaggtccctcacgagggggaccttgatattatttttcaagatggcgctacaaaaacccccgacgtcaaactgcaaaacacctcactgtatgattcaaaaatttggaccacaaaaaaccaaaaaggcagaaaggtcgccgtgcactttgtgaagaataatggcattctccccctgtccaatgaatgtcttctcctgattgagggtggcacattgtccgagatctgcaaactctcaaataagttcaactccgtaattccagttcggtcgggacatgaggaccttgagctcctggacctctccgcaccctttctcattcaggggaccatccaccactacgggtgtaagcagtgctcttcccttagaagcattcagaacctgaattccttggtggacaagacaagttggataccctcatccgtggccgaggaactggacatcgtgttgcaatag

SEQ ID NO: 16824 - DNA, 1905 bp, synthetic construct
  misc_feature 1..1905: note = Description of Artificial Sequence: Synthetic coding sequence
  source 1..1905: mol_type = other DNA
atgagcctcgttccagcaaccaactatatatacaccccactgaaccaacttaagggaggaaccattgtcaacgtgtacggggttgtgaaatttttcaagcccccctacttgagtaaggggaccgactattgttctgttgtcaccatcgtagatcagactaacgtcaaactcacttgtctgctgtttagcgggaattacgaggcactccccatcatttataaaaacggcgatattgttcggtttcatcgtctcaaaattcaggtgtacaaaaaagagacccagggaattacaagctcaggttttgcatctctgacgtttgagggcacactcggggcccctattatcccacgtacatcaagtaagtactttaactttactacagaagaccacaagatggtggaagctctcagagtctgggcatctactcacatgagtccttcttggactcttctgaagttatgcgacgttcagcccatgcagtactttgacctcacctgccagctgctgggcaaagctgaggtggatggagctagctttctgctgaaagtgtgggacggtaccaggaccccctttccaagctggagggtgcttatccaggatctggtgttggaaggagatttaagccacatccaccgcctgcagaacctcaccatcgatatccttgtttacgacaaccacgttcatgtcgcgcggagcttgaaggtcggaagttttctgcggatctactcgctgcacactaagttgcaatccatgaacagcgaaaaccagacaatgctgtccctcgaattccatctacatggaggcacctcttacggacgcgggatccgggtgttaccggagtcgaacagcgacgtggatcaactaaagaaggaccttgagtccgcgaatctgactgcgaatcaacattccgatgttatctgtcagtcagagcccgatgatagtttcccttcctctggtagcgtctccctctacgaggttgagcgctgtcaacagctgagcgccaccattcttactgaccaccaatatctggaacgcactcctctgtgcgccatcctaaaacagaaagcgccacagcagtacagaattagggccaagctcaggagttataaaccacgaaggctctttcagtccgtgaaattgcattgccccaagtgtcatctgcttcaggaggtacctcacgagggtgatctggacattatttttcaggacggcgcaacgaaaacacctgacgtcaagctgcaaaatacctccctctacgatagtaaaatctggaccactaagaaccagaagggacggaaggtggcagttcactttgtgaaaaacaatggcatcctgcccctgtctaatgagtgcctgctgctgatcgaaggcggaacactttccgagatctgcaagctgtccaacaagtttaactccgtcatccctgtcaggtcaggtcacgaggatctggaactacttgatctctctgctccatttctgatacaggggacgatccatcactatggatgcaaacaatgctcctcactgcgatcaattcagaatctgaactccctggtggataagacttcctggatacctagtagcgtggctgaggcacttggcatcgtgcctctgcagtatgtgttcgttatgacattcacactggacgatggaaccggtgtcttagaagcatatctcatggatagcgacaaattttttcagattcccgcctcggaggtgctcatggatgacgacctgcagaaatcagtggacatgatcatggacatgttctgcccaccgggaattaaaatagatgcttacccttggcttgagtgcttcatcaagagttataacgttacgaacggtaccgacaaccagatatgttatcagatctttgacacaacagtagctgaggacgttatttag

SEQ ID NO: 16825 - DNA, 1023 bp, synthetic construct
  misc_feature 1..1023: note = Description of Artificial Sequence: Synthetic coding sequence
  source 1..1023: mol_type = other DNA
ctgagcttggtgcctgccacaaactacatttatacgcccctgaaccagctgaagggcggtactatcgtgaacgtgtatggcgtagtgaagttttttaaacccccttatctgtctaagggaactgattactgctccgttgtaactattgtagaccagaccaatgtgaagctgacctgtctgcttttctctggaaattacgaggccctacccattatatataagaacggcgacattgtgcgctttcacaggttaaagatacaggtctacaagaaggagacccagggaattaccagctcggggttcgcaagtttgacatttgagggcaccctgggcgccccgattatccctaggacttcctccaagtacttcaacttcaccactgaggatcacaagatggttgaagccctgcgtgtgtgggcttctacccatatgagcccaagctggacactgctgaaactttgcgatgtacaaccaatgcagtattttgatctcacctgccagctcctgggaaaggccgaggtcgacggcgcatcttttctgctgaaggtctgggacggtactagaactccctttcctagctggagagtcctgatacaggatcttgtgctcgagggcgacctgagccatattcataggctgcaaaacctgactatcgacatcttagtttatgataaccatgtacacgtcgcccgatcactgaaggttggatcattcctcaggatatattctttgcataccaaactccaaagcatgaatagtgagaaccagaccatgctgagcctggagttccatctgcatggcggcacttcctatgggagaggcataagggttcttccagagtccaacagtgatgtagaccagttgaagaaggacctcgagtccgccaacttaaccgcgaatcaacatagcgacgtgatctgccagtccgaaccagacgactcctttccaaatggcgtatcgctgcgtcctcctggctggtcctccgtggcccgctcccggttgattgccgcctccacatcctag

SEQ ID NO: 16826 - DNA, 1512 bp, synthetic construct
  misc_feature 1..1512: note = Description of Artificial Sequence: Synthetic coding sequence
  source 1..1512: mol_type = other DNA
atggttgaggccctgcgggtgtgggcttctacacacatgagccctagctggacccttctcaagctgtgcgacgtgcaaccgatgcaatactttgaccttacttgccaactcctcgggaaagcagaggtcgatggtgcctcctttctgctgaaggtttgggacgggaccagaacaccttttccatcttggagggtactgatccaggacttggtgcttgagggcgatctgagtcacatccacaggttacaaaacttgaccattgacattctggtatacgataaccatgtgcacgtggccaggtccctgaaagttggcagcttcctgcgcatctactctttgcacacaaagctgcaatctatgaattctgaaaaccagacaatgctgtccctggagtttcacctacacgggggcaccagttatggacgaggcataagagttctcccagaaagtaacagcgacgtggatcagctcaagaaggaccttgaatcggccaacctcacagcaaatcagcattcagacgtgatctgtcaatccgagccggacgacagttttccttccagtgggtctgtctccttgtatgaagtggagcgctgccagcagctgagcgcaacgatactaactgatcatcagtacctggaacggactcccttgtgcgcaattctaaagcaaaaggctccacaacagtataggatacgagcaaagctacgctcatacaagcctagacggctcttccagagcgtgaagctgcattgccctaaatgccatttgttacaggaggtcccccatgagggtgatcttgacataatcttccaggacggggcgactaaaacacccgacgtgaaacttcaaaacacaagcttgtacgactccaaaatttggactacaaagaatcagaaggggcgcaaggttgctgttcactttgtcaaaaataacggcatcctaccacttagcaacgaatgtctcctcctcatcgagggcggaaccctttccgaaatttgtaagctgagcaacaaatttaatagcgtcattccagtccgatcaggacacgaggacctggagcttcttgacctgagcgcccctttcctgatccagggaacgatccaccactatggctgcaagcagtgttcaagcctgcgctcaattcagaatttgaactccctggtggataaaacctcctggatccccagcagcgtagccgaagcgctcggaattgtgcctctccaatatgtattcgtgatgactttcacactcgatgatgggacaggggtgctggaagcatacctgatggacagcgataagtttttccagatcccagcctctgaagttctaatggacgatgatctgcagaagtccgttgacatgatcatggatatgttttgtcccccaggcatcaaaattgacgcttatccttggctggagtgcttcattaagtcctacaacgtgactaacggaactgataaccaaatttgctaccagatctttgacactaccgttgcggaagacgtaatatag

SEQ ID NO: 16827 - DNA, 1380 bp, synthetic construct
  misc_feature 1..1380: note = Description of Artificial Sequence: Synthetic coding sequence
  source 1..1380: mol_type = other DNA
ttgtctttagtgccggcaaccaattacatctatacgccactaaatcagctcaagggtggcactattgtgaatgtctatggagttgtgaagtttttcaagccaccctatctaagtaagggcaccgactactgctcagttgtcaccatcgtggaccagacgaacgtaaagctgacctgcctattgttcagcggaaattatgaggcgctccctatcatttataagaatggggatatcgtccgtttccatagattgaagatccaggtgtacaagaaggaaactcagggtatcacatcttccggattcgcaagcctgactttcgaaggcacgctgggcgccccaattatcccaaggaccagctctaagtatttcaacttcactacagaggaccataaaatggtggaagccttgcgggtgtgggccagcacccacatgtccccttcctggaccttgctgaagttatgcgacgtgcagcctatgcagtattttgatctgacctgtcagcttttaggcaaggccgaggtcgatggcgcgagcttcttgctgaaggtgtgggacgggactagaacaccatttccctcctggcgggtgctcatccaggacctggtccttgagggagacctgtcgcacattcaccgcttgcagaacctaaccatcgacattttggtgtatgataaccacgtgcatgtggcgcgttccctgaaggttggttcttttttgcgcatttattctctgcataccaaattacagagtatgaacagtgagaatcagacgatgctttctttagagttccatttgcatgggggcacaagttacggcaggggcatcagagtacttccggagagcaattccgacgtggatcagctgaagaaagacctcgagtcagctaaccttacagctaaccaacacagcgacgttatctgtcaatcggaacccgacgactcgttcccatccagcggcagtgtcagcttatacgaagtggagcgatgtcagcagctctccgcgaccattctaacagatcaccaatacttggaacgtacacctctgtgcgctatcctcaaacagaaggctcctcaacagtatcggattcgcgctaagttaagaagttacaaacctagacgcctgttccaatctgttaagctgcattgtcctaagtgccatctgctccaggaagtcccacacgagggcgatctggatatcatcttccaagacggggcgactaagacccccgatgtcaagctgcagaatacaagcctgtatgattccaaaatttggaccacgaaaaaccagaaaggccgaaaagtggccgtacactttgtgaaaaacaatggcattttacccctgtctaatgagtgcctcctcctgattgaagtcctactgtag

SEQ ID NO: 16828 - DNA, 249 bp, synthetic construct
  misc_feature 1..249: note = Description of Artificial Sequence: Synthetic coding sequence
  source 1..249: mol_type = other DNA
atgtccctagtgccagctactaattatatctacacccccttaaaccaacttaagggtggaactatagtgaatgtttacggagtcgtgaaattcttcaagccaccatatttgagcaagggaaccgattactgtagcgtcgtgacgatcgtagatcaaacaaacgtgaagctgacatgcctgttgttcagcggtaattacgaggcactccccatcatctacaagaacggcgacatagttcggttccactag

SEQ ID NO: 16829 - DNA, 1557 bp, synthetic construct
  misc_feature 1..1557: note = Description of Artificial Sequence: Synthetic coding sequence
  source 1..1557: mol_type = other DNA
ctgtctctcgttcccgctaccaactacatctacactccactgaaccagctgaagggaggtaccatcgtcaacgtctatggagtggtaaaattcttcaaaccaccttatctcagcaaaggcaccgactattgttctgtcgtaacaattgtagaccagaccaacgttaaactcacatgtctgctgtttagcggaaattacgaggcactgcctattatctataagaatggcgacattgtgcggtttcaccggcttaagatccaggtctacaagaaggagacacaaggcatcactagcagcggcttcgcttctctgaccttcgagggcacccttggggccccaataattccgagaacctcatctaagtactttaacttcacaactgaggaccataaaatggtagaagccctacgcgtttgggcttctacccacatgagtcccagctggactctgctgaagctttgcgatgtgcagcccatgcagtacttcgatctgacatgccaactgctgggtaaggcggaagtcgacggtgcaagtttcctcctcaaggtgtgggatggcacccgcaccccattcccctcgtggcgagtacttatccaggatcttgttctggaaggcgacctcagtcatatccaccggctacagaatttgaccatcgacatactggtgtacgacaaccacgtgcatgtggctcgctctttgaaggtaggttcatttctgcgcatctattccttacataccaaactgcaaagtatgaattccgagaaccagaccatgctgagtctggagttccaccttcacgggggcacgagctatggccgaggcatccgtgtgctgccggagagtaactccgacgttgatcagctgaaaaaagacctggagagcgctaatctaacagccaatcaacatagcgatgtgatttgccaaagcgaaccagacgactcattcccgtctagcggatctgtctctctatatgaagtggaacggtgccagcagttgtctgccactattctaactgaccaccagtacctagagcgaactccgctctgtgccatactgaaacagaaggcaccccagcaataccgaatcagggctaaactgcggtcttataaacccaggcgcctcttccagagcgtgaaactccactgcccgaaatgtcatttattacaggaagtcccacacgagggtgacttggatattatcttccaggacggcgctaccaaaacccctgacgtcaaactgcaaaatacgtcactgtacgatagtaaaatatggacaacgaagaaccagaaaggccgaaaggtagcagtgcacttcgtgaaaaacaacggtatactcccactgagcaatgagtgcctactcctcatagagggcgggacccttagtgaaatttgtaaacttagtaataagttcaattccgtaataccagtcaggtccgggcatgaggacctcgagctcttggaccttagcgcgcccttccttatccaaggcaccattcaccactatggcacaggctactgcacacctcctatctgcgtctgttatgatctctatacttag

SEQ ID NO: 16830 - DNA, 1374 bp, synthetic construct
  misc_feature 1..1374: note = Description of Artificial Sequence: Synthetic coding sequence
  source 1..1374: mol_type = other DNA
agccctgaggacccaaggtccaaacataaatttaagattcacacctacggctcccccaccttctgtgaccactgcggatcacttctgtatgggctgatccaccaaggaatgaaatgtgatacttgtgatatgaatgtgcacaagcagtgtgttatcaatgtcccctccctatgcggaatggatcatacagagaagcgcggccgcatctacttgaaggctgaagtggctgatgagaagctgcacgtaacagtgagagatgcgaaaaacctcattcctatggaccccaatggcctgtccgacccttatgtaaaactcaagttaattccagatcccaagaatgagtctaagcagaaaacaaagacaatcagatccactctgaatccacagtggaatgaatctttcacctttaaattaaaacccagtgacaaagacaggcggctatccgttgaaatttgggattgggaccgcaccacccgcaacgatttcatgggttcactaagcttcggcgtctcagagctcatgaaaatgccagcgtccggatggtacaagctccttaatcaagaggaaggcgagtattataatgtgccgatccctgaaggcgacgaagaggggaacatggagctccgccaaaaatttgagaaggcaaagctgggacccgctgggaataaggtcattagtcctagtgaggaccggaagcagccatctaataacctggacagggtgaaactcaccgacttcaatttcctcatggtgctgggcaagggttcttttggaaaggtgatgttagctgatcgcaaaggcactgaggagctttatgccattaaaattctcaaaaaggacgttgtgatacaggatgatgacgttgagtgtaccatggtcgaaaaaagagtgttggccctcctggataagccaccctttcttactcagctgcattcctgttttcagactgtcgacagactgtatttcgttatggagtatgtgaacggaggagatctcatgtaccacatccagcaggttggaaaatttaaggagccacaggccgtgttttatgccgccgagatctccatcggtctatttttcctccataagcggggaattatctaccgtgacttgaagctggataacgtgatgttggacagtgagggacacataaagatcgcagatttcgggatgtgcaaggaacacatgatggatggggtgactactcggacattctgcggtaccccagattacatcgcacccgaaattattgcctatcagccgtacggaaaaagcgttgattggtgggcttacggcgtactgctatatgagatgttagctggacaggtaatgttttgctacatatttatgttcgtctattgctgcgtgatgtag

SEQ ID NO: 16831 - DNA, 2019 bp, synthetic construct
  misc_feature 1..2019: note = Description of Artificial Sequence: Synthetic coding sequence
  source 1..2019: mol_type = other DNA
atggcggacgtcttccccggcaatgatagtaccgcaagccaggacgtggcaaatcgttttgccagaaagggcgcgctgcggcaaaaaaacgtgcacgaggtcaaagaccacaaattcatcgcgcgtttcttcaagcaaccaaccttttgtagccattgcacagatttcatttggggttttggcaagcaggggtttcaatgccaggtgtgctgctttgtggttcacaaacggtgccacgagttcgtgaccttttcgtgtccaggggctgataaaggacccgatacagatgatccacgttctaagcacaaattcaagatccatacttacggttctccaaccttctgtgaccattgcggctcactgttgtatggcttgattcatcagggcatgaagtgcgacacttgcgatatgaatgtgcacaaacagtgcgtgatcaacgtcccatctctgtgtggtatggatcacaccgagaaacgcggaagaatatatctgaaggccgaggttgccgacgaaaaactgcatgtaacagttagggacgcaaagaatctaatcccgatggatcccaatggactgtctgacccctatgtgaaactgaagttaatcccggaccctaagaacgaatccaagcaaaagacaaaaaccattagatcgaccctgaacccgcagtggaatgagtccttcacctttaagctgaagccatccgacaaggataggcggctcagtgtggaaatttgggactgggatcgaacaacacgcaatgattttatggggagcttatctttcggcgttagcgagctcatgaagatgcccgcctccgggtggtacaagctgcttaatcaggaagaaggcgagtattataacgtgccaattcctgagggtgacgaggagggtaacatggagctgcgacagaagttcgaaaaagctaaattgggcccagctggtaataaggtgatctctccatcagaggacaggaaacagccgagcaacaacctggaccgggtgaaactgactgacttcaatttccttatggttctgggtaaaggatctttcggcaaggtgatgttggctgatagaaagggaactgaggaactgtacgccatcaagatcctcaagaaagacgtggtgatccaagacgatgacgttgagtgtacaatggttgagaaacgagtgctggctctgcttgacaagccacctttcctgacccagctccattcatgttttcagacagtagacagactgtacttcgtgatggaatatgtaaatggcggagacctcatgtatcacatccaacaagtgggtaaatttaaggagcctcaggcagtgttctatgccgctgaaatctccatcggactgtttttcctgcacaagcggggcattatctaccgggacctcaagctggataatgttatgctggattcagagggtcacatcaaaatcgctgacttcggcatgtgcaaagaacacatgatggatggggtgaccacgcggaccttttgcgggacaccagactacattgctccggaaattattgcataccaaccctacgggaagagcgtggattggtgggcctacggagtcctcctctatgagatgctcgccgggcagccaccattcgatggtgaagacgaagacgagctgttccaaagcattatggagcataacgtctcataccccaaatccttgtctaaagaagctgtaagcgtgtgcaaaggcctaatgactaagcaccccgctaagcgattgggatgtggtcccgagggagagcgcgatgtcagggagcatgccttcttcaggagaatcgactgggagaagctggagaatcgagaaattcagccgccgttcaaacccaaggtgtgtggcaagggagctgagaacttcgacaagttttttacacggggtcagccggtgttgactccccccgaccaattagtcatcgctaatatcgatcagagcgactttgagggcttcagctatgtcaatccacagtttgtgcaccctatattgcaatcagcagtctag

SEQ ID NO: 16832 - DNA, 2022 bp, synthetic construct
  misc_feature 1..2022: note = Description of Artificial Sequence: Synthetic coding sequence
  source 1..2022: mol_type = other DNA
atggcagacccggctgcgggtcccccaccaagcgagggggaggaaagtaccgtgagattcgctcgaaagggcgcacttcggcagaagaatgttcatgaggtgaaaaaccataagttcacagcaaggttcttcaaacagccgaccttctgtagccattgtaccgactttatatggggctttggcaagcaagggttccagtgtcaagtgtgttgctttgtggtgcataaaaggtgtcacgagtttgttacattcagttgcccaggggccgataaagggcccgccagtgacgatccccgctccaaacacaagtttaagatccacacctactcctctccgaccttctgcgatcactgcggctcccttttgtatggcctgatccatcaggggatgaagtgtgacacgtgcatgatgaacgtacataagcgctgcgtcatgaatgtccctagcctgtgcggcactgaccatacagagcgtaggggaagaatttacatccaggcccacattgatcgcgatgtccttatcgtgctggtaagagacgcaaaaaacctcgtacctatggatcctaacggcctctctgacccctacgtgaagcttaaactgattcctgatcctaagtccgaaagcaaacaaaaaaccaaaactatcaagtgttctctgaatcccgaatggaacgagacattcagattccagctcaaggaatccgacaaagatagaaggctgagcgtagagatctgggattgggacctaacctctaggaacgatttcatgggttctttgtctttcggcatctccgaattgcagaaagctagcgtggacggttggttcaagctgttgtctcaggaagagggagagtattttaacgtgccggtgccccccgaggggagtgaggccaacgaagagcttaggcagaagtttgagcgtgcaaaaattagccaggggactaaggtccctgaagaaaaaacgaccaataccgtgtctaagttcgacaacaacggaaaccgtgatcggatgaagttgaccgacttcaacttcctcatggtgctcggtaaaggcagctttggcaaggtcatgctctccgaacggaagggcacagacgagctgtacgcagtaaaaatactgaagaaggacgtggtaatccaagatgacgatgtggaatgtaccatggtggaaaaacgcgtgcttgccctgcccgggaaacccccttttctgacacaattgcatagctgttttcagacaatggaccgactgtattttgtgatggaatacgttaatggcggtgacctgatgtaccatattcagcaggttggacggttcaaggagcctcatgccgtcttttatgcagcagaaatcgctatcggccttttctttttgcagtcaaagggcatcatttacagagacctcaaactggataacgtgatgttagactctgagggccatattaaaattgccgattttggcatgtgtaaagagaacatctgggatggcgtgaccacaaagacattctgcggtacgccagattacatcgctccagaaattatcgcctaccaaccatatggcaaatctgtggattggtgggcgttcggcgtcttattatatgagatgctcgcgggccaagctccctttgagggtgaggatgaggacgagttatttcagtctattatggagcacaacgtcgcatatccaaaatccatgagcaaagaggctgtcgctatctgcaaaggactcatgaccaagcatcccggaaaacgcctcggttgcggaccagagggggagcgtgatatcaaggaacatgccttcttccggtacattgattgggagaaactggagagaaaagagatacagccaccctataaaccaaaggcttgcgggaggaacgcggagaatttcgacagattctttactcgccatccacccgtgctgactcctcctgatcaagaggtgataaggaatatagaccaatccgagtttgaagggttctcctttgtgaatagcgaattcctgaagccagaagtcaaatcttag

SEQ ID NO: 16833 - DNA, 2016 bp, synthetic construct
  misc_feature 1..2016: note = Description of Artificial Sequence: Synthetic coding sequence
  source 1..2016: mol_type = other DNA
atggcagatccggccgccggccccccgcccagtgagggtgaggaatccacagtcaggtttgctcggaagggtgccctcaggcagaaaaacgtccatgaggtaaagaaccataagttcaccgccaggtttttcaaacaaccaaccttctgttctcactgtactgacttcatctgggggttcggcaaacagggattccagtgccaggtctgctgctttgtggttcataagcgctgtcacgagttcgtgacattctcttgtccaggggcagacaagggacccgccagtgatgaccctcggagcaagcacaagttcaaaatccatacatatagctctcccactttttgtgatcactgtgggagcttattatatgggctcatccaccaaggtatgaaatgcgacacatgcatgatgaatgtgcacaaacggtgcgtgatgaatgtgccctctctgtgcggcactgatcatacagagcgacgcgggaggatctatattcaagcacatatagatagggacgtgctcatagtgctcgtacgcgatgccaaaaacctcgttccaatggatcccaatgggctgtccgatccatacgtcaaactgaagttaattcccgatccaaaatcagaaagcaagcaaaaaaccaagactattaagtgctcactgaacccagaatggaatgagaccttcagatttcagctcaaggaatccgacaaggatcgacgcctctccgtcgagatttgggattgggatcttacatcccgcaatgactttatggggtctttatcattcgggatcagcgagctacagaaggcatcagtggacggatggttcaaactcctgagtcaggaagagggggaatacttcaacgtgcccgtccctccagaaggctccgaggccaatgaggaactgcgccagaaatttgaacgagctaagatctcccagggcaccaaagtgccggaggaaaaaacaactaatactgtctccaaattcgacaataacgggaaccgcgacagaatgaaactcacggatttcaactttttgatggtcctcggtaaaggcagtttcggtaaggtcatgctctcagaacggaagggaaccgacgaactgtacgcggtgaaaatcctgaaaaaggatgttgtgatccaggacgacgacgtcgagtgcactatggtcgaaaagagagtacttgctctgcctggaaagcccccatttctcacgcaactccacagctgttttcagacgatggatcgtctgtacttcgtgatggagtacgtcaacggcggggatttaatgtatcatatccagcaggtggggcgttttaaggaaccacacgcggttttttacgctgccgagattgcaatagggctatttttcttacagtctaaaggaattatctatcgagatctgaaactggacaacgtgatgctcgactcagaaggtcatattaagatcgcagacttcggtatgtgcaaggagaacatttgggatggtgtaacaacaaagacgttttgcgggacacctgattatatcgcaccagaaattatagcctatcagccttatggtaaatctgtggactggtgggcatttggcgtgctcctttatgaaatgctagcggggcaggctccatttgagggtgaggacgaagatgagttattccagagcattatggagcataacgtcgcataccctaagagtatgtccaaggaggccgtcgccatatgcaaggggctgatgacaaagcacccaggaaagaggcttggatgcgggcccgagggtgaaagggacataaaagaacacgcgttttttcgctacatcgactgggagaaattggagagaaaagagatccagccaccatataaacctaaggccagagacaaacgcgacacaagcaatttcgacaaggagtttaccaggcagcccgtcgagctcactcccacggacaaattattcattatgaacctggaccagaatgagtttgctggctttagttataccaaccccgaattcgtaatcaatgtatag

SEQ ID NO: 16834 - DNA, 786 bp, synthetic construct
  misc_feature 1..786: note = Description of Artificial Sequence: Synthetic coding sequence
  source 1..786: mol_type = other DNA
atgagagagagcgcacttgaacgggggccagtccctgaagcgccagccgggggcccagtgcatgccgtgacagtagtgacgctgctcgagaagctggccagtatgcttgagacacttcgcgagaggcaggggggattggcgcgccggcaaggcggtttagcgggcagcgtgcggcgcatccagtctgggctcggggccctgagtcggagtcatgatactaccagtaacaccttagctcagcttctagccaaagcagagagagtttctagtcatgcgaacgccgcacaggaacgggctgtacggcgcgccgcccaggtgcagaggttggaggccaaccacgggctattggtggcacgaggcaaactgcacgtcctgctctttaaagaagagggagaagtccctgccagcgccttccagaaggcccccgagccactgggacccgcagaccagagtgagctagggccggagcaacttgaagccgaggtaggggagagctcagatgaggagccggtggagagtcgagcccaacgtttgagaagaaccggcctacagaaagtgcagtcacttagacgagccttatccggtcggaagggccccgctgccccaccacccacccccgtaaaacctccacggttgggaccgggcaggtctgccgaagcacaacccgaggcccagcctgccctggaacccaccctcgaaccggagcccccacaggacactgaagaagacccggggcgaccaggggccgccgaggaagccctgctgcagatggagtcagttgcttag

SEQ ID NO: 16835 - DNA, 2214 bp, synthetic construct
  misc_feature 1..2214: note = Description of Artificial Sequence: Synthetic coding sequence
  source 1..2214: mol_type = other DNA
atggtggttttcaatggtcttctcaagatcaagatctgtgaggccgtgagtttgaagcctaccgcatggtccctgcgccatgccgttgggcccagaccacagacatttctgcttgatccatatatcgctctcaatgttgatgactccagaatcggccaaacagctacgaaacagaagacaaactctccagcgtggcatgatgagttcgttaccgacgtctgtaatggaaggaagatcgaactggctgtctttcacgacgcacccatcggatacgacgatttcgtagctaattgtacaatccagtttgaggaactactacagaacggaagccgccattttgaggactggatcgacttagaaccagaagggcgggtctacgttatcatagatctgtccgggtcatcaggagaggccccgaaggacaacgaagagagggtgttccgcgagcgcatgaggccaaggaagagacagggcgcagtgcggagaagggtgcatcaggtgaacggtcacaagttcatggcaacatatttgaggcagcctacgtactgtagccactgtcgagatttcatttggggggtaatcggcaagcagggctatcagtgccaggtctgcacatgcgtggtgcataaaaggtgccacgagctcatcattacaaaatgcgcagggctgaaaaagcaggaaacgcctgatcaggttggcagtcagcgcttctctgtgaacatgccgcataagtttgggatccacaattacaaagtcccaactttttgcgatcactgtggcagtctactctggggcctgcttaggcagggtcttcagtgtaaggtgtgtaagatgaacgttcaccgtcgctgtgagaccaacgtggcaccaaattgcggtgtggatgcgagagggattgccaaagtactggccgacttaggtgtaacgccagataagatcacaaacagcggtcagcggcgcaaaaagttaatcgctggggccgaatctccccagcctgcctctggatcatccccaagtgaagaggatagatctaagtctgcccctacttcaccatgtgatcaagagattaaggagcttgaaaacaacatccgcaaagcactgtcattcgacaatagaggggaggagcacagagccgcttctagtcccgacggacagctcatgtcccctggcgagaacggtgaggttcgccagggacaggccaaaaggcttggccttgatgaatttaacttcatcaaggtcctaggaaagggttcgttcggaaaggtgatgctggccgagctgaaagggaaggatgaagtatacgctgtcaaggttcttaagaaggacgtgatacttcaggatgacgatgtcgattgcaccatgaccgagaagaggattctggctctcgctcgcaaacatccatacttgacccagctctactgctgttttcagacgaaggaccgattatttttcgtcatggaatacgtaaacggcggagacctcatgttccagatacagcggtcccggaagttcgacgaacctagaagccgattttacgccgctgaggtgacaagtgccttgatgttccttcaccaacatggcgtaatctaccgcgaccttaaactggacaacatactcttagacgcagagggccattgtaaattagcagacttcggaatgtgcaaagaaggcatcttaaacggtgtaacgacaactacattttgtggaaccccagattacatagctccagagatcctgcaggagctggaatacgggccctcagtggattggtgggccctgggcgttctgatgtacgaaatgatggctggccagccgccattcgaggcagacaatgaagacgaccttttcgaatctatactgcacgacgacgtgctgtatcccgtatggctgtccaaggaggctgtgtcaatcctgaaagcgttcatgacaaaaaaccctcataaacgcttgggctgcgtggcctctcaaaatggcgaggacgcaatcaagcagcacccatttttcaaggagatcgactgggtactcctggaacagaagaagattaagcctcctttcaaacccaggattaagaccaagcgagacgtaaataatttcgaccaggacttcactcgtgaagagccagtattaactctggtggacgaggctattgtaaaacagattaatcaggaagagttcaaaggcttcagctacttcggggaggatcttatgccttag

SEQ ID NO: 16836 - DNA, 384 bp, synthetic construct
  misc_feature 1..384: note = Description of Artificial Sequence: Synthetic coding sequence
  source 1..384: mol_type = other DNA
atggtggtctttaacggcctgctaaaaattaagatttgcgaggccgtctcccttaagcccaccgcgtggtcacttcgacacgctgtcgggcctaggccacagacgtttctccttgatccttacatcgctctcaatgtcgatgactcgaggattgggcagaccgccacgaaacagaagaccaactctccggcctggcacgatgagtttgtcacagatgtgtgtaatggtcgaaaaatagaactcgcggtattccacgatgcccctattggctacgacgattttgtcgccaactgcacaatccagttcgaagaattgttacagaacgggtcgcggcactttgaagattggattgatctcgaaccagagggccgtgtgtacgtttag

SEQ ID NO: 16837 - DNA, 2094 bp, synthetic construct
  misc_feature 1..2094: note = Description of Artificial Sequence: Synthetic coding sequence
  source 1..2094: mol_type = other DNA
atggccggtcttgggcccggagtaggcgactccgaaggcgggccacggcctttattttgtcgaaagggagctttgcgtcagaaggtagtccacgaagtaaaatcacacaagttcacggctcgatttttcaaacagccaacattctgtagccactgtaccgacttcatctgggggatcggcaagcagggattgcaatgccaggtttgttccttcgtggtgcatagacgttgccatgaattcgtcactttcgagtgtcctggggcggggaaggggccacagaccgatgaccctagaaataaacacaaattcagactccactcctattctagccctaccttttgtgaccactgcggctcactgctgtatggactggtgcatcagggaatgaaatgctcctgctgcgagatgaacgtccacagaaggtgtgtgagaagcgtaccaagcctgtgcggggtggatcacactgagcgacgaggacggctgcagctagaaatacgcgctccaacagccgatgagatacacgttaccgttggcgaggctcgtaacttgataccaatggatcctaacggcttatcagacccatatgtgaaactcaaactcattcccgaccctcggaacctgaccaagcagaagactagaaccgtgaaagctacccttaaccctgtttggaacgaaacattcgtgttcaatctcaaacccggcgacgtagagaggcggttgagcgtagaagtctgggattgggatcgtacctctcgtaatgactttatgggggctatgtcttttggagttagcgagttactgaaagcccctgtggatgggtggtataagctgctgaatcaggaggaaggcgagtactacaacgtccctgtggcagacgcagacaattgtagccttctccagaagtttgaagcttgcaactaccccctggagctttacgagcgggtccgaatgggaccatcaagttccccaataccgtctcctagcccttcccccacagacccgaagcgctgcttcttcggcgcctctccaggccggcttcacatcagtgactttagcttcctcatggtgctgggtaagggtagctttggcaaagtgatgttggccgagcgccgtggttctgacgagctgtatgcaatcaagatacttaaaaaggatgtgatcgttcaggatgatgacgttgattgtactttagttgagaagagagttctggctctgggcggccgaggtccaggcggtaggccccatttcctcactcagctgcatagcacattccagacccccgatcgcttatacttcgtgatggagtacgtgacagggggcgatctcatgtaccatatccagcagctcggaaagttcaaagaacctcacgccgccttctacgcagccgaaattgccatcggattattctttctacataatcagggcataatctatagggatctgaaactggataacgtcatgctggatgctgagggacatatcaagattacagatttcgggatgtgcaaagagaacgtgttccccggcacaaccacgagaacattttgcggcacgcctgattacattgcacccgaaattattgcttatcagccgtacggaaaaagtgtcgattggtggagctttggggtcctgctgtatgagatgcttgccggtcagccaccctttgacggcgaggatgaagaggagttgttccaggccataatggagcagactgtcacgtatcccaaatccctcagtagggaggctgtcgccatttgtaaaggttttctgacaaagcaccccggcaaacggcttggctctgggcccgatggagagcccactatccgcgctcacgggttcttcaggtggattgactgggaacggctggagagattggagattccacccccattcagaccaaggccctgcgggaggtcaggagaaaactttgacaagtttttcacccgagccgcccctgcactcactcctccagaccggctcgtcttagccagtatagaccaggccgatttccaggggttcacatacgtgaatccagattttgttcacccggacgctcgatcccccacttctcccgtgcctgtccccgtgatgtag

SEQ ID NO: 16838 - DNA, 984 bp, synthetic construct
  misc_feature 1..984: note = Description of Artificial Sequence: Synthetic coding sequence
  source 1..984: mol_type = other DNA
atggcagggcttggtcccggcgtaggagattcagagggtggtccgaggcctctcttttgccgcaaaggagcgttgaggcagaaagttgtacacgaagtaaaaagtcacaagttcacagctcgttttttcaagcagcccaccttttgttcccattgcactgatttcatctggggtattggaaagcaggggctccagtgtcaggtgtgcagttttgttgtccacagaaggtgtcacgagttcgtcacctttgagtgccccggcgccgggaaagggccacagacagacgacccgcgtaacaagcataagttccgcctgcattcatacagttcaccgaccttctgtgatcactgtgggagcctactgtacggcctggtgcaccaaggcatgaagtgttcatgctgcgaaatgaacgtgcaccgaaggtgcgtgcgaagcgttccttctctttgtggcgtcgatcataccgaaaggagggggcggctgcagctggagatccgcgcgcccaccgctgacgaaattcatgtcactgtgggagaagccagaaatttaatccccatggacccaaatggcctctcagacccatacgtaaagctgaagctcataccagatccgaggaacctgaccaaacaaaagacacgcactgtgaaggcaacactgaaccctgtttggaatgagacctttgtgttcaatcttaaaccgggagacgttgaaaggcggctgtccgtagaggtgtgggactgggataggaccagcagaaacgactttatgggagctatgagcttcggagtgtcagagctgttaaaggccccagtcgacggttggctggtgaccacaccttggaactgtatgtccgggtgcggatgggccccattacctctgcctagtcccccactccctctggtgccaccgacgcctagcgccgcatcctccggccgggtgcaggacgcctgcactagcccaacctctgcatcctcttggttctag

SEQ ID NO: 16839 - DNA, 2133 bp, synthetic construct
  misc_feature 1..2133: note = Description of Artificial Sequence: Synthetic coding sequence
  source 1..2133: mol_type = other DNA
atggctgggttaggtcccggggtgggggacagtgagggaggaccaaggcctttgttttgtcgtaagggggccctgcgacagaaggtcgtgcacgaagttaagtcacacaaatttaccgcaaggtttttcaagcagccaaccttctgttctcattgcactgactttatatgggggatcggtaaacagggattacagtgccaagtgtgttccttcgtcgtgcataggcgctgccatgaatttgttacatttgaatgcccgggagccgggaagggaccacagacggacgatcctcgaaacaaacacaaattcaggctgcacagttattcaagccctacattttgcgaccattgcggaagcctcctttatgggcttgtacaccagggaatgaagtgttcttgctgcgaaatgaacgttcaccgtcgttgcgtaagaagtgttccaagcctgtgcggcgttgatcacaccgaacgtcgcggcagactgcagctcgagattagagccccaactgctgatgaaattcatgtgacagtaggagaggctcggaatctaatccctatggaccctaacggcctgtctgatccctatgtgaagctgaagctgattccagaccccaggaacctgaccaagcaaaagactaggaccgtgaaagctaccctaaatccggtatggaatgagacgtttgtattcaaccttaaacccggtgatgtcgagcgcagactgagcgtcgaagtatgggattgggatcgcacatcccgaaacgatttcatgggtgccatgagctttggggtgagtgaattgttgaaggcccctgtggacggctggtataaacttttaaaccaggaagaaggcgaatattacaacgtccccgtggccgatgccgataattgttctctgctgcaaaaatttgaagcctgcaattaccctctggaattgtacgagagggtgcgcatgggaccgagttcttctcccattccaagcccttccccttcaccaactgacccaaagcggtgctttttcggggcctccccagggagactgcacatatccgatttcagttttctcatggtcctcggaaagggaagcttcggcaaagtgatgctggcagagcgaagaggttcagacgagttgtacgccatcaaaatcctgaagaaagacgttatcgtccaggatgatgacgttgattgcacactggtcgagaagagagttcttgccctcggcggccgaggaccaggggggaggcctcacttcttgacacagctccactcgactttccagacgcctgatagattgtacttcgtcatggagtacgtcacaggcggcgatctgatgtatcacatacagcagctgggcaagtttaaagagccccacgcagctttctatgccgcggaaatcgcaattggactcttttttctgcataatcaaggaattatttatagagacctgaaactggacaatgtgatgctagacgctgaaggccatatcaaaatcaccgatttcggtatgtgcaaggaaaacgtgttccccggcacaaccactaggactttttgcggaacccccgattacatcgcaccagagattattgcctatcaaccatacggcaagagtgtcgactggtggagcttcggcgtgcttctgtacgaaatgctagctggccagcccccctttgatggagaagatgaggaagaactcttccaggccattatggagcagaccgtgacatatcccaaatccttatccagggaagcagtggctatttgtaaagggttcctgacaaagcatcctggaaagaggctcggcagcggacctgatggagagccaactatcagggctcacggattcttccgctggatcgattgggagagactggaacggctcgagattccaccaccctttagaccccggccttgcggtaggagcggagaaaatttcgataagttttttaccagagcagcacctgcactcactcccccagatcgcctcgtgttagccagcatcgatcaagcggacttccagggtttcacttacgtgaaccccgatttcgtccaccctgatgcacgtagtcccacttctcctgtccctgtccctgtcataagctgcactcctgcatttcagctttgcccaagaggcttctag

SEQ ID NO: 16840 - DNA, 1647 bp, synthetic construct
  misc_feature 1..1647: note = Description of Artificial Sequence: Synthetic coding sequence
  source 1..1647: mol_type = other DNA
atgccccggatctgtgatctccgcgtatctaggagatgggaaggacccccagacggacggtgcgagatgaacgtgcaccgccgctgtgtgcgctcggtaccgagtttgtgtggtgtggaccatacagaaagaagaggacgtcttcaactggagatcagggcccccactgcagacgaaatacacgtcactgttggagaggccaggaacttgatcccgatggatcccaatggtctgagcgacccatacgtaaagctcaagctgattccagatcccagaaatttaacgaaacagaagacaaggactgtgaaggccacgttgaatccagtgtggaacgagacattcgtgtttaacctcaagcctggggatgtggaaagaagactgtcagtcgaggtctgggattgggatcgaacaagtagaaatgacttcatgggtgcgatgtcattcggagtctccgagctcttaaaagcgccagtagacggatggtacaagctactgaatcaggaagagggcgaatattacaacgtgcccgtcgccgatgccgataactgtagcttactgcagaaatttgaggcctgtaattaccctcttgagctctacgagcgagtgagaatggggccatccagctccccaatcccctcaccgagcccctcacctaccgaccccaaacgatgtttttttggagcttcacccgggcgactacacatctctgatttctcattcttaatggtgctggggaaagggtctttcggcaaggttatgttggctgaacgcagaggaagcgacgaactttatgcgattaaaatattgaaaaaagatgtgatcgtccaagatgatgatgttgattgtacactggtagagaagagggtgttagctctgggtggaagaggcccaggcggtaggccccacttcctgacccaactgcattctacatttcaaacccccgataggctgtatttcgtaatggaatatgttacaggcggggatttaatgtaccacatacagcaactgggaaagtttaaagagccccatgctgcattttacgccgccgaaatcgccatcggattatttttcttacataaccagggcataatttacagagatctcaaacttgacaatgttatgctggatgccgaaggacacattaaaattacggatttcggcatgtgcaaagagaacgtgtttcctggtacaaccacacggacgttctgcgggaccccagactatatcgcacctgagattatagcataccagccctacggaaagtcggtggactggtggagcttcggtgtgctgctgtacgagatgttggcaggtcagttcctaactaaacatccaggcaagcgcctgggttctggacctgatggggagcctacaattagggcccatggttttttccgatggattgactgggaacgcctggagcgactggagataccccccccattcaggccccggccatgcggacggtctggcgaaaacttcgataagtttttcactcgagctgctcctgccctcacaccaccagatagattggtactggcgtccatcgatcaggcagacttccagggctttacttacgtgaatccagacttcgtgcacccggatgcacgctcaccaacttcccccgtaccggtgccagtgatgtag

SEQ ID NO: 16841 - DNA, 1779 bp, synthetic construct
  misc_feature 1..1779: note = Description of Artificial Sequence: Synthetic coding sequence
  source 1..1779: mol_type = other DNA
atgcccagtaggaccggccccaaaatggagggctccggtggacgcgtgaggctgaaagcgcactacggcggagacatttttataaccagtgtggacgctgctacgacgttcgaggaactgtgcgaggaagtgcgcgatatgtgtcgcctacaccagcagcaccccctgaccttgaaatgggttgactctgaaggagacccttgcacagtgtccagccagatggagctcgaggaagcattcagacttgcacgtcaatgtcgagacgaagggctgattattcacgtgttcccctcaactcctgagcaacccgggttgccatgtccaggggaggataagagtatctataggcggggcgcacgccgctggagaaaactctacagagccaatggtcatttattccaggcgaagagatttaacaggagggcgtactgcggacagtgttcagagaggatctggggactggcaaggcagggctataggtgtatcaattgcaaactgctggtgcataaacggtgccatggactcgtcccactgacctgtcggaaacacatggactctgtcatgcctagtcaggagccaccagtggatgacaaaaacgaagacgctgaccttcccagcgaagagacagacggcatcgcctacatatcctcgtcaaggaaacacgactctattaaggacgattcggaggacctgaagccagtcatcgacggaatggatgggattaagatttcgcaggggttggggctccaggactttgacctcatccgtgttattggacgcgggtcttacgctaaagtgctgctggtacgcctcaagaaaaacgaccagatatatgctatgaaagtcgtcaaaaaggaattggtgcatgacgatgaggacattgattgggtccaaacggaaaaacatgtgttcgagcaagcaagcagtaatccgtttctcgtgggtttgcactcctgcttccagactacttcccggctgtttctggttattgagtatgtgaacggaggggacctaatgtttcacatgcagcgccagagaaaactcccagaggaacatgcaaggttctacgccgccgaaatctgtatcgctttaaatttcctccacgaaagagggataatctaccgcgatttgaagcttgacaatgtgctgctggatgcagacggacacatcaagttaaccgactacgggatgtgtaaggaaggtctcggcccgggcgacacaaccagcactttttgcggcacacccaattacatcgctcccgagatcctcaggggcgaagaatacggcttcagcgtggattggtgggcactgggggttctcatgtttgagatgatggcgggaaggtcaccattcgatatcataacggacaaccccgacatgaatacagaggattacctgtttcaggttatcttagagaagcctatccgcatcccaaggtttctgtccgtcaaagcctcccacgtcctcaaggggtttctaaacaaagatcctaaggaaaggctcggatgtagaccccagactggattttcagacatcaaatctcacgccttctttcgatccattgactgggatctgcttgaaaagaaacaggccctccctcccttccagccccagatcaccgacgactacgggctcgataacttcgatactcagttcacatcagagccagtgcagctgactccagatgacgaagacgctatcaagcgcatcgaccagagcgagtttgagggtttcgagtacattaatcctctgctcttatcgacagaagagagtgtgtag

SEQ ID NO: 16842 - DNA, 1230 bp, synthetic construct
  misc_feature 1..1230: note = Description of Artificial Sequence: Synthetic coding sequence
  source 1..1230: mol_type = other DNA
atggactcagtgatgccatcacaggagcctcctgtggatgacaagaacgaagacgctgatctgcccagcgaggagactgacgggatagcgtacatcagcagctcacgcaagcatgactctattaaggacgattctgaagacctaaagccagttattgacgggatggatgggattaagattagccaaggactgggactgcaggactttgacttgatcagagtcattgggagggggtcctacgctaaggtcctgttggtgcgcttgaagaagaacgaccagatttatgccatgaaggttgtgaaaaaggaactggttcatgatgacgaggatattgactgggtgcaaaccgaaaagcatgtgtttgagcaagcttcctccaaccccttcctcgtcgggctccattcctgcttccagactactagtcgtctctttctggttatcgaatacgtgaatgggggtgatctgatgtttcatatgcagaggcagcgaaagcttcccgaggagcacgcccggttctacgctgccgaaatttgtattgcactgaatttcctgcacgagagaggcataatttatagagatcttaagctggataacgtgctgctcgacgcagacggacatattaaactgactgattacggaatgtgcaaagaaggcctgggtccgggcgatacgacttccacattttgcggtacccctaactatatcgcacctgagatcctgcggggggaggagtacgggtttagcgttgactggtgggccttgggggttttaatgtttgagatgatggctggccgaagtccttttgacattatcactgataatcctgacatgaatacagaggactatctgtttcaggttattctggaaaaacctatcagaatcccccgttttttgagtgtgaaagcaagccatgtcctcaagggctttttgaacaaggacccgaaagagagattgggttgtcgccctcaaactggattttccgatattaagagtcacgctttctttaggtcaatagactgggacctgctggagaagaagcaggctcttcctcctttccagccccagatcacagacgactatggtctcgacaactttgacacgcagtttacgtcagaacccgttcaactgaccccagatgacgaagacgccatcaagaggatcgaccaaagtgaattcgaaggttttgaatacatcaatcccctgttattatctactgaagagagtgtctag

SEQ ID NO: 16843 - DNA, 1230 bp, synthetic construct
  misc_feature 1..1230: note = Description of Artificial Sequence: Synthetic coding sequence
  source 1..1230: mol_type = other DNA
atggattccgtcatgcctagccaggagccaccagtagacgacaagaacgaagatgccgatctcccttctgaagagacagacggcattgcttatataagctcctcgcggaagcacgatagtatcaaggacgacagcgaggacctgaagcctgttatagatggtatggatggaatcaagatatctcagggcctgggtctgcaggatttcgatctcatccgggttattggaagaggcagctatgccaaggtccttctggtgcggttaaaaaaaaacgaccagatctacgcaatgaaggttgtcaaaaaagaacttgtccacgatgatgaggatattgattgggtacagactgagaagcatgtgtttgagcaggcatcctcaaatcccttcttggtgggactgcactcctgcttccaaactacttcccgactgtttctggtaatagagtatgttaacggaggagatttgatgttccacatgcagcgacagcgcaagttacctgaagagcacgctcgattttacgctgccgagatatgtatcgcactcaactttctccacgagagaggaattatatatcgagatctcaaactcgataacgtactcttggacgccgatggtcacatcaagttaactgactacggaatgtgcaaggagggtctgggtcctggggacacgacatcgacattctgcggaacacccaattacatcgctccagaaatactgaggggtgaggagtatggtttctctgtcgattggtgggctctcggtgtccttatgttcgagatgatggccgggagatcgccatttgatatcattacagacaacccagatatgaacacggaagattacttatttcaggtaatcttggaaaagcccattaggatccctagatttttatcagtgaaagcctcgcacgtgctcaaaggttttctgaataaagaccccaaagagcggttagggtgccgcccccagaccggattctctgacataaagagccacgccttttttcgctctatcgactgggatctcctcgaaaaaaagcaagctctgcctccgttccagcctcagatcacagacgattatggcctcgacaacttcgatacccagttcacaagcgagcccgtgcaactaactcccgacgacgaggacgcaataaaacggattgaccagagcgaatttgaaggctttgagtatatcaatcctctgctgctttcaaccgaagagtccgtgtag

SEQ ID NO: 16844 - DNA, 1467 bp, synthetic construct
  misc_feature 1..1467: note = Description of Artificial Sequence: Synthetic coding sequence
  source 1..1467: mol_type = other DNA
atgctcactcctaggaccgatgagagcatttacaggcgcggcgcccgcaggtggcgtaagctttaccgggcaaacgggcaccttttccaagctaagaggttcaatcggagggcctactgcgggcaatgttccgagcggatatggggcttggctaggcaaggctacaggtgtattaactgcaagttactggtccacaaaaggtgtcacggcctggtcccgttgacatgcaggaaacacatggattccgttatgcctagtcaggagcctcctgtcgacgacaagaacgaggacgctgacctaccctcggaggaaacggatggcatcgcctatattagttcctccaggaaacacgacagcatcaaggatgatagcgaggaccttaaacccgtgattgatggaatggacggaatcaagatttcacagggtttggggttacaggattttgatctgatacgcgtgattgggcgtggatcgtatgcaaaggtactgttagtgaggcttaagaaaaatgatcaaatatatgctatgaaggtagtgaagaaggagctggtccatgatgacgaggatatcgattgggtgcaaacggaaaagcacgtatttgaacaggctagtagcaaccccttcttagtgggactacactcttgttttcagacaacatctcggcttttcctggtcattgaatatgtaaacggtggggatctgatgttccacatgcagagacagcggaaattacctgaggagcacgcccgattttacgcagccgagatctgcatcgccctgaatttcctgcacgaaagaggcataatctatcgggatctcaagctggataacgtgctgctggatgcagatggacacatcaagctcacagactatggcatgtgcaaggaggggctcggccctggggataccacttccacattctgtggcaccccgaattacattgctcccgaaatcctgcgcggggaagaatatggcttcagcgttgattggtgggccctgggggtgctgatgttcgagatgatggccggaagatccccattcgatattattaccgacaacccagatatgaacaccgaggactacctctttcaggtgattctggaaaagcctatccgaattccacggtttttgagtgttaaggcctcccacgtgttaaagggctttttaaataaggatccaaaagaacgcctgggatgccgtcctcagacagggtttagcgatattaagtctcatgctttttttcgctccatagactgggatctgctggagaaaaagcaggccctgccccccttccaacctcagattaccgatgattacgggcttgataattttgacacacagtttacctccgaaccggttcagctcacgcccgatgatgaggatgccattaagcgaatcgatcaaagcgagttcgagggtttcgagtacatcaaccccctactgctttcaaccgaagaatccgtgtag

SEQ ID NO: 16845 - DNA, 78 bp, synthetic construct
  misc_feature 1..78: note = Description of Artificial Sequence: Synthetic coding sequence
  source 1..78: mol_type = other DNA
atggatagtgtgatgccctcccaggagcccccagtggatgataaaaacgaggacgctgacctgccctcggaagagtag

SEQ ID NO: 16846 - DNA, 249 bp, synthetic construct
  misc_feature 1..249: note = Description of Artificial Sequence: Synthetic coding sequence
  source 1..249: mol_type = other DNA
atggactctgtcatgcctagccaggaaccccctgtagatgataaaaatgaggacgccgacctgccgtctgaggaaacagacggcatagcttatatcagctccagccgcaagcatgattctatcaaagatgacagtgaagaccttaagcccgttattgacggaatggatggcatcaagatctcccaggggttaggtctacaagactttgacctaatcagggtcatagggcgcggaagttatgcaaaatag

SEQ ID NO: 16847 - DNA, 297 bp, synthetic construct
  misc_feature 1..297: note = Description of Artificial Sequence: Synthetic coding sequence
  source 1..297: mol_type = other DNA
atggattcggtgatgccgtctcaggagcctcccgtagacgacaagaacgaggatgctgatctgccgagtgaggagactgacggaatagcctatatctcctcgtctagaaaacatgacagcatcaaggatgacagtgaggacctcaagccggtgatcgacggcatggatggcataaagataagccaaggactgggcctccaggacttcgacttaataagagtgattgggagaggaagctacgccaaagtgctattggtgcggctaaagaaaaacgaccagatttacgcaatgaaatag

SEQ ID NO: 16848 - DNA, 330 bp, synthetic construct
  misc_feature 1..330: note = Description of Artificial Sequence: Synthetic coding sequence
  source 1..330: mol_type = other DNA
atggactctgtgatgccctcacaggagccccccgtcgatgacaagaatgaggacgctgatctgccgagtgaagagactgatggtattgcgtacatctcatcctctcgaaagcacgacagcataaaggacgattctgaggaccttaaaccagtaattgacgggatggacggtatcaaaattagtcagggcctgggacttcaggattttgatctgatcagagtcataggcaggggatcttatgccaaggttctcttggtgagactgaaaaagaatgaccagatttacgccatgaaggtggtcaaaaaggaactggttcacgacgatgaatag

SEQ ID NO: 16849 - DNA, 141 bp, synthetic construct
  misc_feature 1..141: note = Description of Artificial Sequence: Synthetic coding sequence
  source 1..141: mol_type = other DNA
atggactctgtcatgccaagtcaagaaccacccgtcgacgacaagaatgaagacgcagacctgccaagtgaggagactgacgggattgcatacatttcgtcctctcgaaagcacgacagtattaaggatgactctgaatag

SEQ ID NO: 16850 - DNA, 222 bp, synthetic construct
  misc_feature 1..222: note = Description of Artificial Sequence: Synthetic coding sequence
  source 1..222: mol_type = other DNA
atggactccgttatgccttctcaagagccaccagtggatgataaaaacgaggatgccgatttaccctccgaggagactgacggcatcgcttacatctccagttccagaaaacatgacagcatcaaagacgacagcgaggatctcaagcccgtgatcgatggaatggacggcattaaaatttctcagggactgggactgcaggactttgatttaatacggtag

SEQ ID NO: 16851 - DNA, 66 bp, synthetic construct
  misc_feature 1..66: note = Description of Artificial Sequence: Synthetic coding sequence
  source 1..66: mol_type = other DNA
atggacagcgtgatgccctcccaggagccaccagtggatgataagaatgaagacgccgatctgtag

SEQ ID NO: 16852 - DNA, 216 bp, synthetic construct
  misc_feature 1..216: note = Description of Artificial Sequence: Synthetic coding sequence
  source 1..216: mol_type = other DNA
atggacagcgtgatgccatcacaggagccgccggtggacgacaagaacgaagatgctgatctcccttccgaagagactgatggtattgcatatattagctctagcaggaagcatgactccattaaggatgacagtgaggatctgaagccagttatcgacgggatggacggcatcaagatctcacaaggcctggggctccaagactttgacctttag

SEQ ID NO: 16853 - DNA, 417 bp, synthetic construct
  misc_feature 1..417: note = Description of Artificial Sequence: Synthetic coding sequence
  source 1..417: mol_type = other DNA
atgatcagtctgactgacacacagaagatcgggatgggcctgacaggattcggggtcttcttcctctttttcggcatgatcctgttctttgataaggccttattggcgattggtaatgtcctctttgtggctggtctcgcattcgtgatagggctggagcggacctttagatttttttttcagaagcataaaatgaaggctaccggcttcttcctgggcggtgtttttgtggttctgatagggtggccactgatcgggatgatttttgaaatctacggcttctttctcctgtttaggggattctttcccgtggtggtgggctttatcaggagggtgccggtcctcggaagtttgctgaacctgccggggattcggtcattcgtggataaggttggggagtctaacaatatggtatag

SEQ ID NO: 16854 - DNA, 702 bp, synthetic construct
  misc_feature 1..702: note = Description of Artificial Sequence: Synthetic coding sequence
  source 1..702: mol_type = other DNA
atggactcaccagaggacgcggacctgttccacagcgaggagatcaaggcgccggaaaaagaggagttcctagcctggcagcacgaccttgaagtgaacgataaagctcctgcccaggccaggccaactgtcttcagatggacaggcggcggaaaagaggtatatctgtcaggttcgttcaataactggagcaaactccccctgacccgcagtcataacaattttgtggccatactggatctgcccgagggcgaacatcagtataaattctttgtcgacggacagtggacccatgatccttcagagcccatcgtgacgagtcagttgggtacagtaaacaatattatacaagtgaaaaaaaccgattttgaggtgttcgatgccctgatggtggattcccagaagtgctccgacgtatccgaattgtcctccagcccccctggcccttatcatcaggagccgtatgtgtgtaaacccgaggaacgattccgcgcaccacctatactcccaccccacctgctgcaggtaattctgaataaggacacgggaatctcatgcgatccggccctcctacctgagccaaaccatgttatgctgaaccacctgtatgcgctgtccataaaagatggtgttatggtgctgagcgctacgcaccgctataaaaagaagtacgttacaactctattgtacaagccaatctag

SEQ ID NO: 16855 - DNA, 813 bp, synthetic construct
  misc_feature 1..813: note = Description of Artificial Sequence: Synthetic coding sequence
  source 1..813: mol_type = other DNA
atgggcaacacttcgtcagaaagagccgcgctggagagacacggcggacacaagaccccacgacgggattcgtccggcggaaccaaagacggtgaccgccccaagatcctgatggactctccggaggatgcggacttgttccacagcgaagagattaaggcacccgaaaaggaagagttcctcgcctggcagcacgacctagaagtaaacgataaggctccggcccaggccaggccgacggttttccgctggacaggcgggggaaaagaagtctacctctcaggatcttttaacaactggtccaagctgccactaactcgaagtcataataactttgttgcgatattggaccttccagagggtgaacaccaatataagtttttcgtggacggccagtggactcacgacccgtccgaacccatcgttacatcccaactgggcactgtgaataatatcatacaggtcaaaaaaactgatttcgaagtctttgatgccttaatggtggactctcagaagtgtagtgacgtgtccgagctctccagttcgcccccaggcccttaccaccaggagccttatgtctgcaaacctgaagaacgattccgtgcccctcctatcttaccccctcacctgctgcaggtgatcctgaataaagatacgggtatcagctgcgacccggccctgcttcccgaaccaaaccacgttatgctcaatcacctgtatgccttgtccatcaaggacggcgtgatggtcctttctgcaacacatcgctacaaaaaaaagtacgtcaccactctcctctacaagcctatttag

SEQ ID NO: 16856 - DNA, 12384 bp, synthetic construct
  misc_feature 1..12384: note = Description of Artificial Sequence: Synthetic coding sequence
  source 1..12384: mol_type = other DNA
atggctggctcaggagcaggcgtccgatgctctctcctcagactgcaggagactctcagtgctgcagaccgctgcggcgcggccctggcggggcaccagttaatccggggcctgggccaggaatgcgttctttctagcagccccgcagtcttagcccttcagacatctctcgtgttttcccgcgacttcgggttactcgtgtttgtgcgtaaatcgttgaactctatcgaattccgagaatgccgagaggagatcctaaagtttctgtgtatctttcttgagaagatgggtcagaaaattgcaccatacagtgtcgagatcaaaaatacttgtacatcagtttataccaaggatagggcggccaagtgcaagattcccgccctcgatttactgattaaactgctgcagacgttcagatcctccagactgatggatgagttcaaaatcggtgagctgttctctaagttttacggcgaactcgctctaaaaaaaaagatccccgataccgttctggaaaaagtctatgaactgttgggtctgctcggggaggtccatcctagtgagatgattaacaatgctgagaacctcttcagggcctttctgggcgagctgaaaacccagatgacctccgctgtgcgtgaaccaaaactgcctgtcctcgccgggtgtctgaagggcctatcttctctactctgtaactttaccaagagcatggaggaggacccccaaacgtccagggaaattttcaattttgtgctgaaagccatcagaccacaaatcgatctcaagaggtatgccgtgccttccgcaggtttacgcctgttcgccctgcacgcttcgcagttcagcacctgcctgctggacaactacgtcagtctttttgaggtgctgctaaagtggtgcgcccatactaatgttgagttaaaaaaggcggccctgtctgccctggaatccttcttgaaacaggtatctaacatggttgcaaagaatgccgagatgcataagaataaactccaatactttatggagcaattttacggaattatccggaacgttgacagtaataacaaagaattgtctattgctatacgaggctacggtctgtttgcaggtccctgcaaggtcattaatgccaaggatgtggactttatgtacgtggagctgatacagcggtgcaagcagatgtttctgacacagaccgacacaggcgacgatagggtttaccagatgccaagctttttacagtccgtcgcttcagtactgctgtatctcgataccgtccccgaggtgtatacgcccgtcctggaacatttagtcgttatgcagattgattccttcccccaatactctcctaagatgcagctggtgtgctgcagggctatcgttaaagtgtttctcgctttggccgctaagggccccgtgctaagaaattgtatctccacggtagtgcaccagggattaatacgtatttgctcaaaaccagtggtcctgcccaaaggtcccgaaagcgaatctgaagatcacagagcgtccggtgaggtacgaacgggaaaatggaaggttccaacttacaaggattacgtggatctgtttaggcatctgctctcttccgaccagatgatggattcaatccttgccgacgaggcctttttcagtgtgaactctagctccgagtcactgaatcacctactttacgatgaattcgtcaagtccgtccttaaaatagtcgaaaaactggatttgaccctggagattcagacagtcggggagcaggagaatggtgatgaagcgccaggggtgtggatgatcccaacaagtgaccccgctgctaacctgcatcctgcgaagcctaaggatttcagcgcgtttatcaatctcgttgagttttgcagggaaatactgcccgaaaaacaagctgaatttttcgagccctgggtgtatagcttctcttacgaattgatactccagagcacacgcctaccgctgatttccggattctataaactcctgtcaattactgttcggaatgcaaagaagatcaaatattttgaaggggtctcccctaaatccctcaaacattcccccgaggaccccgaaaagtacagctgttttgcgttatttgttaaatttggcaaagaggttgctgttaagatgaaacagtacaaggatgaactcctagctagttgtctgacattcctcttgtcattgccccacaatattattgagctcgatgtcagagcctatgtgcctgctctgcagatggcttttaagctgggcctctcatacaccccactggctgaggtcggcttgaacgcgctagaggagtggagcatctacattgaccgtcacgtgatgcagccatactacaaggatatcctcccatgcctggacggctacctcaaaacatctgcactgtccgatgagacaaagaataattgggaagttagcgctctgagccgagcagcccagaagggattcaataaggttgtcctgaaacacttgaaaaagacgaagaacctatcctcaaatgaggctatatcactggaagagatccgaatccgcgtggttcagatgctgggttctttgggcgggcagatcaacaagaatttattaaccgttacctcaagcgatgagatgatgaaaagctacgtagcttgggacagggagaaacgactgtccttcgctgtgccttttcgcgaaatgaagcccgtcattttccttgatgtattcttaccacgtgttacggagcttgccctgactgccagtgaccgtcagactaaagtggcagcctgcgagttgctacacagtatggtgatgtttatgttgggaaaagctacccaaatgccggagggggggcagggagcaccaccaatgtaccagctttacaaaaggactttccccgttttactgagactggcatgtgatgtcgatcaagtaacccggcagctatatgaacctctcgtgatgcaactgatacactggtttactaataacaagaagttcgagagtcaggatactgtcgccttgctggaggcaattctagacgggattgtggaccccgttgattctaccttacgtgatttctgcggcagatgcatacgagagttcttgaaatggtccatcaagcagattacccctcagcagcaggagaagtccccagtcaatacgaaaagtctgttcaaacggctgtactctcttgcccttcatccgaatgccttcaagaggctcggggcctcccttgccttcaacaacatttaccgtgagtttagagaggaggaatccctggtcgagcaattcgtatttgaagcattagtcatttacatggagtccttagcactggctcacgctgatgaaaagtccttaggcaccatccagcagtgttgcgatgcaatcgaccatctctgcagaataatcgagaaaaaacacgtgtcactgaataaagccaaaaagcggcggcttccgcggggatttcccccgtctgcttcactctgtctgttagacctcgtcaagtggttactcgcccattgcggaaggcctcaaaccgagtgccggcataagtctattgagcttttttacaaattcgtgcctctgctgccaggtaaccgatcccctaatctctggctgaaggacgtgcttaaagaggagggagtgagctttttaattaacacttttgaaggcggggggtgcggacagccctcaggaatactggcccagccgacgctcctgtacagaggtccattcagcctccaggccacactgtgctggctggaccttctcctcgcagcccttgagtgttataacacattcataggagaaaggactgttggcgctttacaggtcctggggactgaggcgcagagtagcctgctgaaggcagtggccttcttcctggagagtatcgccatgcacgacatcatagcggccgaaaagtgttttggtaccggagctgctggaaaccgaaccagcccacaggagggcgaacgctataattactcaaagtgtactgtggttgtgaggattatggagtttaccaccacattactcaacacatcgcctgaagggtggaaattgctgaagaaggacttgtgtaacacccacctgatgagagtgttagttcagaccctatgcgagccagcctccatcggtttcaacatcggagatgtacaagtgatggcacacctgccggatgtgtgtgtaaacctaatgaaggcactgaagatgtcgccatacaaagacattctggaaacccatctgcgcgaaaaaataacagcgcagagcattgaggaactttgcgcggtgaatctctacggcccagatgctcaggtggatcggtcgagacttgctgcagtggtctctgcctgcaagcagctgcaccgcgccgggctactacataacatccttccatctcaaagcactgacctgcaccatagcgtgggaacggagctgttgagtttggtttacaagggtatcgcccctggagacgaaaggcagtgcctgccgtcattggatctgtcttgtaagcagctggcatctgggctgctcgagttggcctttgcattcggaggcctctgtgagcgactggtatctctcttgctgaatccagccgtgctatccaccgcgagcctaggcagttcacaaggatccgtgattcatttttctcacggtgaatacttttacagtttgttcagtgaaaccatcaacacagaattgctgaagaatttagacctcgctgtcctggaactgatgcagtcgtctgtagacaacaccaaaatggtctcagccgttctgaatgggatgctggatcaaagctttagggaacgagcgaaccagaagcaccagggcttaaagctagccacaacgattctccagcattggaaaaaatgcgattcctggtgggccaaggattcgccgcttgagactaaaatggcagttctggcactgttggcgaaaatcttgcaaattgattctagcgttagcttcaatacctcacacggcagcttcccagaggtgttcaccacttacataagtctgctggctgatacaaaactggatctccacctgaaaggacaggcagtcaccctcctgccgtttttcacaagcctgacagggggatctctcgaggaactgaggcgagtcctggaacagctcatagtggctcacttcccaatgcagagtcgggaatttccacccggcaccccaaggttcaataactatgtggactgtatgaagaaattccttgacgcactcgagctgtcgcaaagtcctatgctactcgagttaatgacagaggtgttgtgtcgggagcagcagcacgtcatggaggagctcttccaatcttctttcaggaggatcgcgcggcgggggtcttgtgtgacacaggtggggctgctggagagcgtttacgaaatgttccgcaaagatgaccctcgattatctttcacgaggcagtctttcgttgataggagcttgctgacactgctgtggcactgcagtctagatgcactccgcgagttcttcagcactattgttgtggacgcaattgacgtgttgaaaagtcgcttcactaaattaaatgagtcaacgtttgacacccagatcacaaagaagatgggttactacaaaattctggacgttatgtattctcgcttgcctaaggatgacgtgcacgctaaagaatcaaaaatcaaccaggtgttccacggcagctgcattacagaaggtaacgagttaactaagacattaatcaagctgtgttacgacgccttcacagaaaatatggcgggagaaaatcagctgcttgaacgtcgtaggctgtaccactgcgccgcttacaattgcgcaattagcgtgatttgttgcgtgttcaacgaattgaagttctaccagggcttcttattctcggaaaagccagaaaagaatctgctgatatttgagaatctaatcgatctgaaacgcaggtacaatttccccgtggaggtggaagtgcccatggagcgaaaaaagaaatatatagagatcagaaaagaggctagagaggctgccaatggcgactccgacggaccttcttatatgtcgtctctctcctacctcgcggactcgacactgtcagaagagatgtcacagtttgatttttcaacgggtgtccagagttacagttatagctcgcaggatcctaggcctgccacaggaagatttagaaggcgagagcagagagatcccactgtgcatgacgatgtgctcgagctggaaatggatgagctcaataggcacgagtgcatggccccactgactgccctggtcaagcacatgcacagaagcttaggtccccctcaaggtgaggaggactctgttccccgagacctgccatcctggatgaagtttttgcacgggaagctggggaaccctatagtgccactcaacatccggctttttcttgcgaaactggtgatcaatacggaagaagtcttccgtccatacgctaaacattggctgagcccccttttgcagctcgccgcatccgagaataacggcggcgagggtatccactacatggttgtcgaaattgtcgctaccattctgagttggaccggactcgctactcctacaggtgtgcccaaagacgaggtgctggccaaccgactcctgaacttcctcatgaaacacgtctttcaccctaagagggccgtgttccgccacaacctcgagatcattaaaaccctggtggagtgctggaaggactgtctctccatcccatacagattaatcttcgagaaattctctggtaaggatccaaatagtaaggacaactccgtcggaattcaactgttaggaattgtgatggccaacgatctgcccccctacgacccccagtgcggaattcagtccagcgaatatttccaagccttggttaacaatatgtcctttgtgagatataaggaagtatatgcagcggctgccgaagtgctgggcttaattcttcggtacgtcatggagaggaagaatattctggaagaatcactctgtgagcttgtcgcaaagcaactcaagcagcatcaaaacacaatggaggacaagttcatcgtctgtctgaataaggtcacgaagtccttcccaccactcgccgaccgcttcatgaatgccgtgttttttctgcttcccaagtttcatggggtactgaagacactctgcctggaagtggttctatgccgcgtagaaggaatgaccgaactgtattttcagctcaaatccaaagattttgtacaggtgatgcggcacagagacgatgagaggcagaaagtgtgccttgatatcatctataaaatgatgcctaagctgaagcctgttgagctccgggagctgctaaatcccgtggtggaatttgttagtcaccccagtaccacgtgtagggaacagatgtataacattctgatgtggatacacgacaattaccgcgaccccgaatcagaaacggataatgatagccaagaaatctttaagctggccaaagatgtgctgatccagggcttgattgacgagaatcccggcctccagctaattatacgcaatttctggtcacatgaaacaagattgccttccaatactctcgatcgcctgttggccctgaatagcctgtacagccctaagatcgaagtccatttcctgtccctggctacaaatttcctgctggagatgacttcaatgtctcctgattatcctaaccccatgttcgagcacccactgagtgagtgcgagtttcaagagtacacgattgattccgactggaggttccggagtaccgttttgaccccgatgttcgtggagacccaggcctcccaaggcactctccaaactagaactcaggagggcagcctgtcggcccggtggcccgtggcaggacagatcagggcaactcaacagcaacatgattttacccttacacagacagccgacggcagatcatcctttgactggctgaccggatccagcacagaccccctggtggaccataccagtccatccagcgacagtctcttgtttgcacacaagcgctcagagagactgcaaagggcccctctgaagagcgttggtcccgattttggcaagaagcgactgggactgccgggagacgaggtagacaataaggtgaaaggcgcggcaggccgaacagacctgctgcgcctgcgtcgaaggttcatgcgggatcaggagaaactctctttaatgtacgcccgaaagggagtggccgagcagaaaagagagaaagagatcaaaagcgagcttaagatgaagcaggacgcccaggtggtgctctataggtcgtatcggcacggtgatctgccagacattcagatcaagcactccagccttataactccactgcaggcggtggcccagcgcgatccaattattgccaaacagttgttcagttccctgttctcgggaatcctgaaagaaatggacaagtttaaaaccctgtctgagaagaataacattacacagaagttgttacaggattttaatcgttttctcaacaccactttctctttttttccaccgtttgtttcatgcatacaggacatttcctgtcagcacgcagccctactgagtctggaccccgccgcagtcagcgctggctgcctggcctcactgcagcagcccgtgggaatccgattactcgaggaagctttgctgcgcttgctgcctgccgaactaccagcgaagcgagtgcgtgggaaagcacgactgccacctgatgtactgcgctgggtcgaactagccaaactgtatcgaagtattggggaatatgacgtactaagaggtatcttcaccagcgaaatcggtactaaacagatcacgcagagtgccttgctggcagaggctagatccgactattccgaggcggcgaagcagtacgacgaagccctgaacaagcaggattgggttgacggcgaaccaacagaggctgaaaaggatttctgggaactcgctagtcttgattgctacaaccatctcgccgagtggaaatctctggaatactgctccacagcgtccattgacagcgaaaaccctcctgacctgaataaaatctggagtgagccattctaccaggagacatacctcccttacatgatacgtagtaaactcaaacttctactgcaaggtgaggcagaccagagtctgcttaccttcattgacaaggcaatgcatggcgagcttcaaaaggctatcttagaattgcattattctcaggagctctcgctgctgtacctgctccaggatgatgttgaccgcgccaaatattacattcagaacggcattcagtcttttatgcagaactattcctctattgacgttctgctacatcagtctaggctgaccaaactgcagagcgttcaggctcttaccgaaatacaggagttcatcagttttatttcaaagcaggggaatctgtccagccaagtgcctcttaagcgactcttgaatacctggaccaaccgttaccccgacgcgaagatggaccccatgaatatatgggacgatataatcacaaaccggtgtttctttctatcaaagattgaggaaaagttgaccccactccctgaggataatagcatgaacgtagatcaggacggcgacccctccgatagaatggaggtccaggagcaagaagaagacattagcagtctcattcggagctgcaagttctcgatgaagatgaaaatgatcgattctgctagaaaacagaataattttagccttgcaatgaaactcttgaaagagctgcacaaagaatctaagacgcgggacgattggctggtttcttgggttcaatcatactgtcggctttcgcactgccgcagtcggtcacagggctgtagcgaacaggtcctgaccgtcttaaaaaccgtttcccttctggacgaaaacaatgtgtcttcctatctcagtaaaaatatactcgcctttagagatcaaaatattctcttgggcaccacatatagaattattgctaacgcacttagcagcgagcctgcctgcctggcagaaattgaggaggacaaagcgcgacgcatcctggagctgtcggggagtagctccgaagattccgaaaaagttatagccgggctataccagcgcgcctttcagcacctctccgaggcagtacaggcagctgaagaggaggcccaaccaccgtcttggagctgcggacctgccgccggcgtcatagatgcttacatgaccctggcagacttttgtgaccagcagttgaggaaagaggaggaaaacgcgtctgttattgattctgcagaacttcaggcgtatcctgccctcgtcgttgaaaagatgctaaaagctctgaaactgaattccaatgaggcacgccttaagttccctaggttgctgcaaatcattgagaggtaccctgaggagaccctgtcattaatgacaaaggagataagctcagtaccttgctggcagttcattagctggataagtcacatggtcgccctgctggataaggatcaggctgtggccgtccaacactccgtcgaagagattaccgacaactacccccaagccatcgtatacccctttatcatcagcagcgaaagttactcttttaaggatacctctaccgggcataagaataaagagttcgtagcccggatcaagtctaagcttgatcaaggcggggtaatccaggactttatcaacgctctcgatcagcttagcaatccagaactgctgttcaaggattggtcaaacgacgtgcgggcagaactggccaaaacccctgtaaacaagaagaatatagaaaagatgtacgaaagaatgtatgccgccctaggtgacccaaaggcccccggactgggtgcttttagaagaaagttcattcagacgttcggcaaagagttcgataagcactttggaaaaggcggtagcaaattactgcgcatgaaactctcagactttaatgatatcaccaatatgctgctgctgaagatgaacaaggactcaaagcccccggggaacctgaaggagtgctccccttggatgagcgacttcaaggttgagtttctgcgtaacgaactggagattcccggccagtacgatggcaggggtaagccgttgcctgagtatcatgttcggatcgcggggtttgacgagcgggtcaccgtgatggcaagcttgagaaggcctaagcggatcataatccggggacatgatgagagggaacatccatttcttgttaaggggggtgaggatctgcggcaggatcagagagtggagcaattattccaggttatgaatggaatactcgcgcaggactctgcctgcagccagcgagccttgcagctgcgcacttatagcgttgtgcccatgaccagtaggctcggattgatcgagtggctggagaacacagttaccctcaaggatctgctgctaaatacgatgtcccaagaggaaaaggcagcttacctgagcgacccaagagcgcccccttgcgaatataaggactggttaacaaaaatgagcggtaagcatgacgtcggcgcttatatgttgatgtacaaaggagccaatcggacagagacagttacttctttccgcaagagggagtcgaaagtgccagccgacctgctcaaacgagcattcgttcgaatgtccacatctcccgaagcattccttgcactcaggtctcacttcgcctcctctcacgcccttatttgcatctctcactggattttaggaattggggaccgtcacctgaataattttatggtggcgatggagactggcggcgtgattgggatagatttcggccatgcatttggcagcgccacacagttcttgcccgtaccagaactgatgcctttcaggctcacaagacagtttattaacctgatgcttccaatgaaggagacgggtctgatgtattccatcatggtgcacgcccttagagcttttcggtccgatccaggccttctcaccaataccatggatgttttcgtgaaagagccctcatttgactggaaaaactttgaacagaaaatgcttaagaaggggggcagctggatacaggagattaacgtggctgagaaaaactggtatccccggcagaaaatttgctacgcaaagcgcaaattagccggagcaaaccccgctgtgattacgtgcgatgaactactgctgggtcacgagaaggccccggcttttagggattacgttgctgtggcgcggggatccaaggatcacaacattcgtgctcaggagcctgagagcggcttgtcagaagagactcaggtgaaatgtcttatggatcaggctaccgatcccaatatactcggtcggacctgggaagggtgggaaccttggatgtag

SEQ ID NO: 16857 - DNA, 12291 bp, synthetic construct
  misc_feature 1..12291: note = Description of Artificial Sequence: Synthetic coding sequence
  source 1..12291: mol_type = other DNA
atggctggctcaggagctggagtgagatgcagtcttcttcgcttacaagaaacactctccgccgccgatcggtgcggtgccgcactagccggacatcagctcattcggggtctgggtcaggaatgcgtattatcgtcctcaccggccgtgcttgctctgcaaacctctctagtgttcagcagagactttggacttctggtcttcgttagaaagtcccttaatagcattgaattccgcgaatgccgggaagagattctgaagtttctctgtatatttctggaaaagatggggcagaagattgccccatattcggttgaaataaagaatacctgcacatccgtttatacaaaagacagagcagctaaatgcaaaattcccgctttagacctcctgattaaactcctacaaacatttaggtctagccgtctaatggacgagttcaagataggggaattgttcagcaaattctatggagagcttgcccttaaaaagaagattcccgatacagtgcttgagaaagtttatgaattacttgggctgcttggagaggtgcaccccagtgaaatgattaataacgctgaaaaccttttccgcgctttcctgggagaactgaaaacacagatgacgtccgccgtccgcgagcccaagctaccggtgcttgctggctgtctgaagggccttagcagcctgctgtgtaattttaccaagagtatggaggaagacccccagacctcccgggaaatctttaacttcgtgcttaaggccatcagacctcaaattgacctcaagagatatgcagtgccatcagccggtttgcggctgttcgccctccacgcttctcagtttagtacttgtcttctggacaattacgtcagcctcttcgaagtgctgctcaagtggtgcgcacatactaacgtggaattgaaaaaggccgcccttagtgcattagagtcgtttctcaaacaggtatcgaatatggtggcaaaaaacgctgagatgcacaagaacaaactgcaatactttatggaacagttttacggcataatcaggaacgtggattcaaataataaagaattgagcatcgccattcgcggctatggactattcgccggcccctgcaaagtcatcaacgcaaaagacgtggacttcatgtacgtggaattgattcaacggtgcaaacagatgtttttaacccaaacagatacaggcgacgatcgggtataccagatgccgtcatttctgcaatccgttgctagtgtgctgctgtacctggacaccgtccccgaggtatacacacccgtgctcgaacacctggtggttatgcagatcgactcattcccccaatatagtccaaagatgcagctggtgtgctgcagagccatcgttaaggtcttcctggctcttgctgctaagggcccagtgctacggaactgcatttcgactgtagtccaccaaggactgattcgcatttgtagcaaacccgtcgtcctccccaaagggccagaatctgaatcagaagaccatagagccagcggggaggttagaactggtaaatggaaggtcccaacatataaagactacgtagatctcttccggcacctcctgtcgagtgatcagatgatggactccattctggccgatgaagcctttttcagtgtgaacagctcttctgagagtctgaaccatctcctttacgacgagttcgtcaaatccgtgctgaagatcgtggagaagctggatcttactttagaaatccagactgttggtgagcaagagaatggggacgaagcgcccggcgtatggatgatccctacctcagatccagccgctaacctgcatcccgccaagcctaaagatttcagtgctttcattaatctggtcgagttttgccgagagattctgccagagaaacaagccgaattcttcgaaccttgggtgtattctttttcctatgaactgatcctccagtcaactaggttacctctgatttcaggattttacaaactgcttagcattactgttcggaacgctaagaagattaaatacttcgagggtgtgtcgcctaagtcccttaaacactcaccagaggacccagaaaagtatagttgcttcgctctcttcgtcaagttcggcaaggaagtggcagtgaagatgaagcagtacaaagatgaactgctggcatcttgccttacctttttgctctcacttccgcacaacatcatagagctggatgtacgcgcgtatgtgcctgcactacagatggctttcaaactcggactgtcctacacgccattggccgaggtcgggttgaacgcacttgaggagtggtcaatatatatcgaccgtcatgtaatgcagccctactataaagatattcttccatgcctggatggttatctcaaaacatccgcactcagcgatgagacaaagaacaactgggaggtgtcggccctgtctagagccgctcagaaggggttcaacaaggttgttcttaagcatctgaaaaaaactaaaaacctcagcagtaacgaagcaatctcactcgaagagataaggataagagtggtgcagatgctaggatccctgggcgggcagattaacaaaaatctgctgacagtcacatcaagcgacgagatgatgaagtcctacgttgcttgggatcgggagaaacggctgtctttcgcagttccctttcgcgagatgaaacccgtgattttcttagacgtttttctgccaagagtgaccgaactggctctcactgcttcagaccgccagactaaggttgccgcttgtgaactgctgcatagcatggtgatgttcatgctggggaaggccactcagatgcctgagggaggacaaggtgcgcctccaatgtatcagctgtacaaacgcaccttccctgtccttctcagactggcgtgcgacgtcgaccaagttaccagacaactgtacgagccactcgttatgcagctgatacactggttcaccaacaacaaaaagttcgagtcccaggacacagtggcgctcttggaagcaattctggacggtattgtggaccctgtagactctactctcagagatttctgtggtcgctgcattcgggaatttttgaaatggtcaatcaagcagattacgccccagcaacaagaaaagtctcccgtcaataccaagtccctctttaagcgcctttattctttggccctgcaccctaatgccttcaagcggctgggcgctagcctggccttcaataatatctatagggagttccgagaggaggaatctttggtcgaacagttcgtgttcgaagcactggtcatatatatggaatccctcgcccttgcccacgccgacgaaaagtctttaggaactattcagcaatgctgtgatgccatcgaccacctgtgtagaatcatcgagaaaaaacacgtcagtctcaacaaagccaaaaagcgacgtctgcctagaggttttcctcctagtgcttctttgtgcctactggacctggtgaagtggttgttagcacattgcggccgacctcagacagagtgtcgccacaaatctatcgagttattttacaagttcgtcccgctcctgccagggaatcgtagtcccaacctctggctcaaagatgtgttgaaggaggagggagtctcctttctgatcaacactttcgagggaggagggtgcgggcagccttcgggcatccttgcccagcccacacttctgtaccgtggtccattcagtctgcaggcaactctatgttggctggacctgttactcgcagccctggagtgctacaatacttttattggagaacgtacggtgggagccttgcaggtgctggggaccgaggcacagtcctctttgctcaaggctgtcgccttcttcctggaatctatcgctatgcacgatatcattgccgctgaaaaatgttttggtactggcgcggccggcaacagaaccagccctcaggagggcgagcgatacaactatagcaaatgcactgttgtcgtccggatcatggaattcacaaccacattgttaaacacaagtccagaaggatggaaactacttaagaaagacctctgcaacacccacctcatgcgggtgttagtgcaaacattatgtgaacctgcctcaataggcttcaatatcggggatgtgcaagttatggcacatctgcccgatgtgtgcgtcaatctgatgaaagctttgaagatgtccccttacaaagatattctggagacccatctcagggagaagataactgcccagtcaatcgaagaactgtgcgcggtgaacctttatgggcccgatgctcaggtcgatcgatcacgtctggccgccgtcgtgtccgcgtgtaaacagcttcacagagccgggctgctccacaacatcctgcctagccaatctacagacctgcaccatagcgttgggacggagctgctgtcactggtctataagggcatagctccgggagacgagaggcaatgtctgcccagcctggacctgagctgcaagcaattagcctcagggctgctcgaattggctttcgcctttggcggcctgtgtgaacggctagtcagcttgctactgaatcctgctgttttgtctacagcctctcttggctcctcccaaggttccgttattcacttctcacacggagagtatttttactcattattttctgaaacaataaatacggagctcctcaagaacctagaccttgctgtcctggaattaatgcagtctagcgttgacaataccaaaatggtttcagcagtccttaatggtatgctggatcagtcttttcgggagagggctaaccagaaacatcagggtctaaagctcgccactaccatactgcagcactggaagaagtgtgacagctggtgggctaaggacagccccctggaaacgaagatggccgtgctggcactgctcgctaaaatcctgcagatagattcctccgtgtccttcaacaccagccacggcagctttcctgaggtatttactacctacatctctctgctggctgacacaaaactggacctgcatctgaaagggcaggccgtcacgttgttacctttttttacatctctcacgggcggctccctggaggagctgcgcagagttctggaacaacttatcgtcgctcatttccccatgcaatccagagagtttcctcctggcacacctaggtttaataattacgtcgactgcatgaagaaattcctggacgccctggaattgagccagtcccctatgctgctggagttaatgaccgaggtcctttgccgggagcaacagcacgtcatggaggaacttttccagagcagtttccggagaatcgcaaggagagggtcctgtgtgacccaggttggactcttggagagcgtttacgagatgttcagaaaggacgatccaagattaagcttcacccggcagtcatttgtggatcgctccctgctgactctcctctggcactgctctctggacgcgctgcgcgaattcttctccaccattgttgtggatgctattgatgttcttaagagtcgatttaccaagctgaatgaatctacttttgacacccagattaccaaaaagatggggtattataagatactcgacgtaatgtacagtcgccttcctaaagatgacgtccatgcaaaagagtccaagataaatcaggtattccacggtagttgtataaccgaaggcaatgaattaaccaaaaccctgatcaaattgtgctatgacgcgtttaccgagaatatggctggggagaatcaactcttagagcggcgccggctataccactgtgcagcttacaattgcgccatctcagtgatttgctgtgtctttaacgaacttaagttctaccaggggtttctattcagcgaaaagccagagaagaacctgttaatcttcgagaatttaattgatctgaaacgccggtacaatttccctgtggaggtcgaagtcccaatggaacgaaagaaaaaatatatcgagattcgcaaggaagcacgagaggcagctaacggagactctgatggaccttcatacatgtcttcactctcctacctggcagatagcactctgtcagaggaaatgtcccagttcgatttttcgacgggcgtgcaatcatattcgtacagtagccaggatcctagacccgctactggcagattccgccgacgggagcaaagggatcctaccgttcacgacgacgtgctcgaactggaaatggacgagctgaaccggcacgaatgtatggccccactcacagcccttgtcaagcacatgcatcgttctttgggaccccctcagggtgaagaggactccgttcctcgtgatctgccctcctggatgaaattcctccatggaaagctggggaaccctatcgtgcctctcaacataagactttttctggcaaaactcgtaatcaatacagaggaggtcttccggccttacgctaagcattggctgagccccctgcttcaactggctgcaagtgagaacaatgggggagaaggcatccactatatggtcgttgagatcgtggcgacaattttgtcgtggacaggtcttgcaacgcctacaggagtgccaaaagacgaagtgctggctaacaggctgctgaacttcttgatgaagcatgtgtttcacccgaagagggccgtttttaggcataacttggagataatcaaaacattagtcgaatgctggaaagattgcctgagtataccatacaggctgatcttcgaaaaattttccgggaaggacccgaatagcaaagataatagcgtgggcatccaactgctgggaatcgtgatggccaacgatctccccccctatgatccgcagtgcggtattcagagctctgagtactttcaggccctggtgaacaatatgagttttgtgagatataaggaagtctatgctgcagcagcggaggtcctggggctcatcctgagatatgtgatggaacgaaagaatatcttagaagagagcctctgtgaacttgtcgcaaaacagctgaagcagcatcagaatacaatggaggacaaattcatcgtgtgtctgaataaggtaactaagtcctttccgcccctcgccgaccgttttatgaatgctgtttttttcttgctcccgaaatttcacggagttctcaagaccctttgcttggaggtggtgttgtgcagggtcgaaggtatgactgagctgtactttcagttgaaaagcaaggactttgtgcaggtcatgcgtcatagagacgacgagcgtcagaaagtctgtttagatattatttacaagatgatgcctaagctcaaaccggtggaactgcgtgaactgcttaatccggtggtcgagttcgttagccaccccagcactacttgccgcgaacaaatgtacaacatcctgatgtggatccacgataactaccgagaccccgagagtgagactgacaacgactctcaggaaatcttcaagctcgccaaggacgttctcatccagggcctgattgatgagaacccgggcctgcagctgattatccgaaacttctggtcacatgagacaagactaccctctaatacgctggaccgcttactcgcactcaattccctttattccccgaaaatagaggttcattttctgtccctcgcgaccaattttctacttgaaatgacctccatgtctcccgactatcccaatcccatgtttgaacacccactcagcgagtgcgagttccaggagtataccattgacagcgactggcggttcagatcaaccgtgctaacccctatgttcgtcgagacacaggcttctcagggtaccctacagactcgaacccaagaaggttctctttcagcccggtggccggtggctgggcagatacgtgccacccagcagcagcacgatttcactttaacacagacagccgatggtcggtcctccttcgattggctgactggcagttcgacggatcctcttgtggatcatacctcacctagttctgatagtctcctgttcgcacataaaagatctgaaaggctgcagcgcgccccattgaaaagcgtcgggcctgattttggcaaaaaacgactcggtctgcccggcgacgaagtagataataaggtgaagggagccgcggggcgcactgacctcctcagattaaggcgccgattcatgcgggaccaggagaagttgtctcttatgtatgcaagaaagggggtggctgagcagaagcgggaaaaggagattaagtcggaactcaagatgaaacaagacgcacaggtggtgttatatcgcagctacagacacggagatctgcctgatatccaaataaaacactcaagtttaattactcctcttcaggcagttgcgcagagggaccctatcatcgccaagcagcttttcagctcactcttcagcggtatccttaaggaaatggacaaattcaagaccctgagtgagaaaaataacattacccagaaactgctacaggattttaaccgttttctgaacacaactttctctttttttccacccttcgtcagctgtatccaggacatttcctgtcagcacgccgctctcctgagcctcgaccctgctgcggtgagcgcaggctgtttagcttcacttcagcagcccgttggcatcagactgctggaggaggctttactgaggctgctcccggcagagctgccagcaaagagagtgaggggtaaggctcggctgcctcctgatgtgctgaggtgggtagaacttgcaaagctttatcggtctataggcgagtatgacgtgctacgcggaatctttacgagtgaaataggcacgaagcagataacccagtctgctctgctggctgaggctagaagtgactattctgaggcagccaaacagtatgatgaggctctgaataagcaggattgggtagatggagaaccaacagaagctgagaaagacttttgggagctggcgagcctggactgctacaatcacttagcggagtggaaaagtttggaatactgctccaccgcttccatcgatagcgaaaacccccccgatctgaacaagatatggagcgaaccattttatcaggaaacgtacctcccctatatgattagatctaagttaaagctccttcttcagggggaagccgatcagtctctgctgactttcatcgacaaggccatgcacggagaactgcagaaggcaatactggagctgcattatagtcaggaactttcactgctttacctgctgcaggacgacgttgaccgggcaaagtattacatccagaacggtatccagtccttcatgcagaactatagcagtattgacgtcctgctgcatcagtctcgcctgacaaagctccagtctgtccaggcgctgactgagatccaggaattcataagttttataagcaaacagggaaacctgagctctcaggtcccgttgaagcgtctactgaacacatggacgaacaggtatccagacgcaaagatggatccaatgaatatttgggatgatataataaccaatcgatgcttcttcctctctaagatcgaggagaaattgacaccacttccagaagataacagcatgaacgtcgaccaggatggcgacccaagtgaccggatggaagtgcaggaacaggaagaggatatcagtagtttaataaggtcctgtaagttttcaatgaaaatgaaaatgatagactctgcgagaaaacaaaacaattttagcctagctatgaagctgctgaaggaattgcacaaggagtcaaaaacaagggacgactggcttgtcagttgggtgcagagctactgccgcctcagccattgccgatcccggtctcagggctgttctgagcaggtcttaactgtcctcaagactgtgtctttattggacgagaataacgtgagctcatacctatcaaaaaatatactagctttcagagaccagaatatcctgctaggcaccacctaccgaatcatcgctaatgcactgtcatcggaacctgcttgcctggctgaaatcgaagaagacaaagccagaaggatccttgagttatctggctcgagttcagaagatagtgaaaaggtgatagccggtctgtaccagcgagcttttcagcatctgtccgaggccgttcaggctgcagaggaggaggcccagcctccctcctggagctgcggcccggccgcaggggtgatcgacgcctacatgacgctggctgacttttgcgaccagcaactgcgcaaggaggaagagaacgcgagcgtcatcgatagcgctgagttacaggcttatcccgctttggtggtggaaaaaatgctgaaggcactgaaattaaatagtaacgaagcccgtctgaagttcccacgacttctgcaaattattgagagatatccagaagaaacactcagtcttatgacaaaggagattagttctgttccatgttggcagtttatctcctggattagtcatatggttgccctgctggataaggatcaagcggtggccgttcaacattcagtggaggaaataacagataattacccccaggccatcgtatacccatttataatcagcagcgagagttatagctttaaagacacatccactggccacaagaataaagagttcgtggccagaatcaagagcaagctggaccaaggcggggttatccaggatttcatcaatgctcttgaccagttgtctaatcctgagctccttttcaaagactggagtaacgacgtccgggcagagctggctaaaacaccagtgaataagaaaaacatcgagaagatgtacgaacgaatgtatgccgccctgggggacccaaaagctcccgggctgggagccttccggcgaaaatttatccagaccttcgggaaagagtttgacaagcactttggtaaggggggctcaaaattgttgcgaatgaagctgagcgatttcaacgacattactaatatgctcctgctcaagatgaataaggacagcaagccacccggcaatttgaaggaatgctccccatggatgtctgatttcaaagtggagtttctgcggaacgagttagaaatacctggccagtacgacggtcggggcaagcccttgccagaatatcacgttaggattgctggcttcgatgaacgagtcaccgtgatggcctcactgcgccgccccaagaggattattatccggggacatgacgaacgggagcatccgttcctggtgaaaggcggagaggacttgcgacaggatcagagagtagaacagttgttccaggttatgaacggcattttggcccaggactctgcttgcagccaaagagcactgcagctccggacatactcagtggttcctatgacgtctagtgatccccgcgctcccccctgcgaatataaagattggcttactaaaatgtctggaaagcacgacgtgggagcctatatgcttatgtataagggtgccaacaggacagagacagtgaccagctttagaaaaagggagtcaaaggtgccggctgatctgctgaagcgcgccttcgtgcgaatgagtacctccccggaggcctttctggcactacgcagccatttcgcatcaagtcacgcgttaatttgtatttcccactggatcctcggcattggtgatcgccacctgaataatttcatggtcgcaatggaaaccgggggcgtgatcggaatcgatttcggacacgctttcggttctgctacccagtttctcccagtgcccgagctgatgccctttcgcttaacccgccaatttattaacctgatgttgccgatgaaggaaactggtctgatgtattcaatcatggtgcacgccctgagagccttcaggtcggaccctggcctgttgacaaataccatggatgtcttcgtgaaggaacccagcttcgattggaagaattttgagcagaagatgctgaaaaagggggggtcctggatacaggagatcaacgtggccgaaaagaattggtatcctcggcagaaaatttgctacgctaagagaaaattggccggcgcaaatcccgctgtgatcacgtgcgacgaactgctgcttggacacgaaaaagcacccgctttcagagactacgtcgccgtcgcacgaggctccaaggaccacaacatacgagcccaagagcccgaatctggattgtcagaagagacgcaggtgaaatgtctgatggaccaggccacagatcccaatatcttgggacggacttgggagggctgggaaccatggatgtag

SEQ ID NO: 16858 - DNA, 444 bp, synthetic construct
  misc_feature 1..444: note = Description of Artificial Sequence: Synthetic coding sequence
  source 1..444: mol_type = other DNA
atggctgcccagcgcctgggcaaacgagtcctgtcaaagctccaatcgccatctcgggcccgcgggcctgggggcagccctggcggattacagaaaagacatgcaagagtgacggtgaagtacgatcgccgggaattgcagaggcgcctcgacgtcgaaaagtggattgacgggaggctggaggaactatatcgtggaatggaggctgacatgcctgacgagatcaacatagatgagctgttggagctcgaaagcgaagaggaaagatctaggaaaattcagggactcctaaagtcgtgtgggaagcctgttgaggacttcatacaggagctgctggcgaagctgcagggactccaccgccagcctggcctgcgtcagccctccccctcacatgacggttccttgtccccattacaagaccgggctaggaccgcacacccatag

SEQ ID NO: 16859 - DNA, 363 bp, synthetic construct
  misc_feature 1..363: note = Description of Artificial Sequence: Synthetic coding sequence
  source 1..363: mol_type = other DNA
atggcagctcagcggctaggaaagagggttctgtcaaagttacaaagcccatcacgtgctcggggccctggcggctctccaggtgggcttcagaagaggcatgctcgggttacggtcaaatacgatcgacgagagcttcaaagacggctggacgtcgaaaagtggattgacgggaggctggaggaactctataggggaatgggtcttctgaaatcttgtgggaaacctgttgaagactttattcaggaattactggccaaactccaaggactgcacaggcagcctggtctgcgtcagccgtccccgagtcacgacggctccctgtctcccctgcaggacagagccagaacagcccacccttag

SEQ ID NO: 16860 - DNA, 2025 bp, synthetic construct
  misc_feature 1..2025: note = Description of Artificial Sequence: Synthetic coding sequence
  source 1..2025: mol_type = other DNA
atggctcccggccaggctcctcaccaagctacaccctggagagacgctcatcccttcttcttgctctccccggttatgggcctgctcagtcgggcttggtctaggttaagggggctggggcccctggagccgtggctggtggaagccgtgaaaggcgcagctctggtagaggcagggcttgaaggtgaagcacgtactcccctggctatcccgcacaccccctggggacgtcgacccgaagaggaagccgaggactcaggcggacccggagaggaccgcgaaaccctcgggctaaagacctcctcgtcactgcctgaagcctgggggctgctcgatgacgacgacggcatgtacggagaacgcgaggccacctccgtacctaggggtcagggctcccagtttgcagatggacagcgggcccccctaagcccatccctcctaatcagaacattacagggttcagacaagaaccccggtgaggagaaggccgaggaagagggcgttgcagaggaagagggtgttaataagttcagttatccgccgtcacatagggaatgctgccccgctgttgaggaggaggacgacgaagaggctgtgaaaaaggaggcacaccgcaccagtaccagtgccctgagccccggttcaaaacctagcacttgggtgagttgtccgggtgaagaggaaaatcaggcgactgaggataaaaggactgagcggtcaaagggcgcccggaagacatctgtgagcccgagatcttccggcagtgacccacgctcatgggagtaccgctctggggaagcaagcgaggagaaagaggagaaggcccacaaggagaccggcaaaggtgaggcggcacccggccctcagagttctgctccagcacagagaccacagctcaagtcttggtggtgccagccatctgatgaggaagaaggcgaggtgaaggccttaggagccgccgagaaggatggcgaggccgagtgccccccatgcattccgcccccttccgcattcttaaaggcatgggtttattggcccggggaagatactgaagaggaagaagacgaggaggaggatgaggactctgatagtggctctgacgaggaagagggggaagctgaggccagttcatcgacgccggctacaggcgtgttcctgaagtcatgggtgtatcagccaggcgaggacacagaagaggaggaggacgaagattcagatactggttccgccgaagacgaaagggaagctgagacctcagccagcacaccccccgccagcgctttcctcaaggcctgggtttacagacctggtgaagatacagaggaagaagaagatgaagacgtggattccgaagacaaggaagatgacagcgaagcagccctcggggaagccgagtccgatccccacccctcccatcccgaccagagagcccatttccgcgggtggggctatagaccagggaaggaaacagaggaagaagaagcagctgaggattggggagaggctgagccgtgtccatttcgggtcgcaatctacgttccgggggaaaaaccaccgcccccttgggcgcccccccgcttaccactacgtctccagcggcggttgaaacgccccgaaactcccacccatgacccggaccccgagacacccctgaaggcaaggaaggtgaggttctccgagaaggttacggttcacttcctggccgtgtgggctggtcctgctcaggctgcccggcaggggccttgggaacagctcgcacgcgatcggtctcgattcgctagaagaatcacccaggctcaagaagagctctcgccgtgcctgactcctgctgccagggctagggcatgggccagacttaggaaccccccactggctcctattccagctctgactcagactcttcctagtagttctgtgccgtctagtcctgtgcagacaacaccactgtctcaggcagttgctaccccaagtcggagttcagcagccgccgctgcagctctcgaccttagcggtagaaggggctag

SEQ ID NO: 16861 - DNA, 1545 bp, synthetic construct
  misc_feature 1..1545: note = Description of Artificial Sequence: Synthetic coding sequence
  source 1..1545: mol_type = other DNA
atgaaggccgaggaagaaggagtggctgaagaggaaggagtaaataaatttagctatcccccgtcccacagggagtgctgccccgcagtggaggaggaggacgacgaggaagccgtcaaaaaggaagcccatcgtacctccaccagtgccctttcccctgggtccaaacctagcacctgggtgtcatgccctggagaggaggaaaaccaagccaccgaggataagcgcaccgagcgctctaagggggccaggaagacaagcgtgtctccaagatcctccggaagcgatccacggagctgggaatacagatcaggtgaggcctctgaagagaaagaggaaaaggctcacaaggagacagggaagggggaggctgcacccggaccgcagagttctgcccctgcccagagaccacagctgaagagctggtggtgtcagccatctgacgaggaagagggggaagtgaaagctcttggagctgccgaaaaggacggggaagctgagtgccccccctgcattcctccaccatccgcgttcctgaaagcgtgggtatactggcccggcgaagatactgaggaagaggaggacgaagaggaagatgaggattctgatagcggcagcgacgaggaagagggggaagctgaagctagttcatccactcccgccacaggcgtctttctcaaatcatgggtttaccagccgggagaagacacagaagaagaagaagacgaggactccgacaccggctcagccgaggacgagagagaggcagaaactagcgcatcaacaccgcccgcaagcgccttcctcaaggcgtgggtatataggccaggtgaggacactgaggaggaggaggacgaggatgtcgattctgaagacaaagaagatgattccgaagctgcactcggggaggccgaaagtgacccccaccctagccaccccgaccaaagagcccacttcagagggtggggctatcgaccaggcaaggaaaccgaagaggaggaagccgccgaggattggggcgaagctgagccatgtcccttcagggtggctatttacgtgcctggggagaaaccgccacctccctgggctcctccccgcctgcccttacggttgcagcgccgcctgaaacggcctgagactcccacacacgacccagatccggagactcccctcaaagctcgcaaagtgcgctttagcgagaaagtaaccgtacattttctagccgtgtgggccggaccagcacaggcagctaggcaggggccctgggagcagctcgcacgggatagaagcaggtttgccaggcggataacgcaggctcaggaggagctgtccccttgtctcactccagccgccagggctagagcttgggcacgccttagaaatccccccctggcccctattcccgctctcacgcaaaccttaccttcttcttctgtaccctccagtcctgttcagacaacccccctttcccaggccgtggcgaccccctcacgcagctccgcagccgccgctgctgctcttgatctttccgggcgaaggggatag

SEQ ID NO: 16862 - DNA, 1899 bp, synthetic construct
  misc_feature 1..1899: note = Description of Artificial Sequence: Synthetic coding sequence
  source 1..1899: mol_type = other DNA
atgccgtggctagtggaggctgtcaaaggtgccgctttagtggaggcaggcctagagggggaggctcgaacccccctggctatcccccacacaccctggggaaggaggcctgaggaagaggcagaggattctggcgggccaggcgaagatcgcgaaactttaggactgaagacctcttccagcctgccagaagcgtggggattgctggacgatgacgatggtatgtacggcgagagagaggcgacctcagttccaaggggccaaggtagccagttcgccgacggacagagagcccctctgagtccctccctgctcatcaggacattgcaaggcagtgacaagaacccaggtgaggagaaagccgaagaagaaggagtagctgaggaagaaggagtcaacaaattcagttacccccctagccaccgggaatgctgtcctgccgtcgaagaggaagacgatgaggaagctgtcaagaaggaggcacaccgcacctcaactagcgctctgtcccctggcagtaaacccagtacttgggtctcctgtccaggagaagaggagaaccaggcaaccgaagataagagaaccgagaggagcaaaggggcaaggaaaactagtgtttcccccaggtcctcgggaagtgaccctaggtcatgggagtataggtcaggtgaggctagcgaagaaaaggaggaaaaggctcacaaggaaacaggcaagggagaggctgctcccggcccacagtctagtgcccctgctcagcgtccccagctcaaatcttggtggtgccagcctagtgacgaagaggagggagaagtgaaggctctgggtgcagccgagaaggacggcgaagccgagtgtccaccttgcataccccccccttcagccttcctgaaagcctgggtatactggcccggcgaggacactgaggaagaggaggatgaggaagaggatgaagattctgacagtggctcagatgaagaagagggtgaggccgaagctagttcatccacccctgcgactggggtattcctgaaatcatgggtctaccagccaggtgaagacactgaggaggaggaagatgaagattccgacacaggctcagctgaggacgaaagagaagccgaaacctccgcatcaaccccacccgctagtgctttcctgaaagcttgggtttacaggcctggtgaagatacggaagaggaagaagatgaggatgtagattctgaggacaaggaagatgatagtgaagcggcgctgggggaagcagaatccgacccacacccatcccaccccgaccagcgagctcattttcgcgggtggggatatcggccaggaaaagagactgaggaagaggaggccgccgaagactggggagaagcagagccttgtcctttcagagtagcgatctacgtcccgggggagaaaccaccaccaccttgggcgccacccagactccccctgaggctgcagcgacgcttgaagcgccctgagactcctacacatgacccagaccccgaaacccccctcaaggccagaaaggttagattcagcgagaaggttactgtgcactttttagctgtgtgggccggtccagctcaggctgccagacagggcccatgggaacaactcgcccgggaccggtcgagatttgcccgcagaattacgcaggcacaggaagaattgagtccctgcctcacaccagcagcacgtgctcgagcgtgggcaaggctcaggaatcccccgctggctccaatcccggcattaacgcaaacactgccatcatcatccgtcccctcatcccctgttcaaactaccccactctctcaggccgttgcaactccatcgaggtccagcgctgccgctgctgctgccctcgatctctctggtcgtagaggatag

SEQ ID NO: 16863 - DNA, 1671 bp, synthetic construct
  misc_feature 1..1671: note = Description of Artificial Sequence: Synthetic coding sequence
  source 1..1671: mol_type = other DNA
atggcaggcgcatctgaactcggcaccggaccaggtgcggccggaggagatggggacgacagcctgtatccaattgccgttcttattgacgagctccggaacgaagacgtccagctgcgactgaacagcatcaaaaagctcagcaccatcgcactagcattaggcgtggagcgcacgaggtctgaattgctcccgttcctgaccgatacaatctacgacgaggacgaggtgcttctggctttagctgagcagctgggcaattttaccggcctggtgggaggaccagacttcgctcattgcttactccctcctctcgagaacttggcaactgtcgaagaaacggtggtgcgcgataaagcagtggagagtttacgccagatctcacaggagcacactccggtagcattagaagcctacttcgtgcctctagtcaagcgcctcgcatccggcgattggttcacctctagaacaagcgcatgtggactcttcagcgtgtgttaccccagggcttctaacgccgtaaaggctgagattcgccaacagtttcggagcttgtgcagtgatgataccccgatggtacgcagagccgctgccagcaaactgggagaatttgccaaggtactcgaactcgattcggtcaaatcagagattgtccctttatttacgtctttggcaagcgacgagcaggactcggtgaggcttctggcagtcgaagcttgcgtgagcatcgcccaactcctgtcccaggacgatctcgaaactctggtcatgcctacattgagacaagccgctgaagataagtcttggcgagtcagatatatggtggcagatagatttagtgaattgcaaaaagccatgggtcctaagatcactctgaacgacctgattcctgcttttcaaaacctgctgaaggattgtgaagctgaagtacgagctgcggctgcccataaagttaaggagctgggtgagaacctgcctattgaggatagggaaacaattattatgaatcagatcttgccatacatcaagtgtcccgacgtgaggctgaacattatctcaaacctggactgtgtgaacgaggtgattgggataagacagctttcccagagtcttctcccagccatcgttgaacttgcagaggatgccaaatggagggttaggctggcaatcattgagtacatgccactgctcgcagggcaactgggcgtagagttttttgacgaaaagctcaactcactgtgcatggcatggctcgtggatcacgtttacgccatccgggaagctgctaccaacaacctgatgaagctggtgcagaagttcggcacagagtgggctcaaaatacgatagtccctaaggtgctcgtgatggccaacgaccctaactacctccaccggatgactacgctattctgcattaatgctctcagcgaggcatgtgggcaggagattacaacaaagcagatgctaccaatcgtgttaaagatggcaggcgaccaggtggctaacgttcgcttcaacgtggccaagagtctgcagaagattgggccgatactggataccaatgcactccagggggaggttaaaccggtcctgcagaaactcggccaggacgaggatatggacgtgaaatatttcgcccaagaggccattagtgtcctggctctcgcctag

SEQ ID NO: 16864 - DNA, 1770 bp, synthetic construct
  misc_feature 1..1770: note = Description of Artificial Sequence: Synthetic coding sequence
  source 1..1770: mol_type = other DNA
atggccgctgccgatggagatgactctctttacccaatagctgtgctgattgatgaattgagaaacgaggacgtccagcttcgcctgaattccatcaagaagttgagtactatcgccctggctttgggcgtggaaagaacccgatctgaactgttgccatttctgactgataccatttacgatgaagatgaggttttgctggcactcgccgaacagttaggcacctttactactctggtgggcgggcctgagtatgtgcattgtttattgcccccattggagagcctggcaacggtggaggagaccgttgtgcgcgacaaggcagtcgaatcattgagagcaattagccatgaacactccccaagcgacctcgaggcccacttcgtgccattggtgaagaggcttgcagggggagactggttcacctcaaggacgagcgcatgtggactgttcagtgtttgttacccccgagttagttctgctgtcaaggccgagctgagacagtattttcgtaatctctgctctgacgacacgcccatggtgcgacgggctgcagcaagtaagttgggagaatttgccaaagtgctggaactggacaacgttaaatctgagataatccccatgttcagtaatctcgccagcgacgaacaagattctgtcagattactggccgtcgaagcctgcgtgaacatcgcccaactgctaccgcaggaggatcttgaggccctggtgatgcccacgctccggcaggccgcagaggataaatcctggcgtgtgcgctacatggtggccgacaaatttacagagctacagaaggctgtcggaccagagattaccaagactgatctcgtaccggcatttcagaatttgatgaaggattgcgaggccgaagtgagagccgctgcctcccacaaagtgaaagagttctgtgaaaaccttagcgccgattgccgcgagaatgtaatcatgtcccaaatcttgccatgtatcaaggagctcgtgagtgatgcaaaccagcacgttaagagtgccctggcttccgtcataatgggcttaagtcctatcttaggtaaggacaacaccattgaacacctgctgcctttatttctggctcagttaaaagatgaatgtcccgaagtccgtctgaatattatctcaaacctagattgtgtgaatgaagttatcggcattcggcaactgtctcagtccctccttcctgccatcgttgagcttgccgaggacgcaaaatggcgcgtcaggttagctatcattgaatacatgcctctccttgcggggcagctgggcgtagagttttttgatgaaaagctgaactcgctgtgtatggcctggctggtggatcacgtctatgccatcagagaagctgctacctcaaatctcaagaagctggtcgagaaatttggcaaggaatgggcccacgctacaatcattccaaaggtgctggctatgagtggcgaccccaattacctccatcgcatgacgaccctgttttgtatcaatgtgttgagcgaggtgtgcggacaggatataacaacaaaacacatgctgccgaccgttctcagaatggccggtgatcctgtagctaatgtgagattcaacgtagccaagagtcttcagaagattggaccaatcctcgacaattccactcttcagagcgaagtgaagcctattctggagaaactcacacaggaccaggatgtggatgtcaaatatttcgcccaggaggctttgaccgttttgtcgctcgcctag

SEQ ID NO: 16865 - DNA, 1740 bp, synthetic construct
  misc_feature 1..1740: note = Description of Artificial Sequence: Synthetic coding sequence
  source 1..1740: mol_type = other DNA
atggcggccgccgacggcgacgatagcctctatcctattgctgttctcatagacgaactgcgcaacgaggatgtgcagctgcgactcaactcaattaagaagttgtccactatagccttggccctcggagttgagagaacgcgctctgagctgctgccgtttctcacggacaccatctacgatgaagatgaggtgcttctggctctggccgaacaactgggcacttttaccactctcgtaggcgggccagaatacgtgcactgccttcttcctccgctcgagtctcttgcaacagtggagtcactgagggccatctcccatgaacacagcccatctgatcttgaggcccactttgtgccgttagtgaaaaggctagccggcggtgactggttcacctcacggacatccgcttgcgggttgttcagcgtgtgttatccgcgcgtatccagcgccgtgaaggccgagttgaggcagtactttagaaacctgtgtagtgatgatacccctatggtgcgtagggccgccgcttccaaactgggcgaattcgccaaagtgcttgagctggacaacgtgaaaagtgagatcattccaatgttttcaaatcttgccagcgacgagcaggacagtgtgcgcctcctggctgtagaggcgtgcgtgaacattgcacagctgctgccccaggaagatctggaagctctggtcatgccaactctgcggcaggcagcagaggataagagttggagagtccggtacatggtggccgataagtttacagaactgcagaaggcagtgggacctgaaattacaaagaccgacctcgttccagcgtttcaaaatcttatgaaggactgcgaggctgaagtacgtgccgcagcctctcataaagtcaaagaattctgcgagaatctcagtgctgactgtcgggaaaacgtgatcatgtctcagatcctcccctgcatcaaagagcttgtttccgatgccaatcagcacgttaagtccgctctggcgagcgtaattatgggcctatctcctattctcgggaaggataacaccattgagcacttacttcctctgttcttagcgcagcttaaagatgagtgtcccgaggtgcgccttaacataatctctaacctcgactgcgtgaacgaggtgatcgggatccgccagcttagccagagcttgctgcccgcaattgtggaactcgcagaagacgctaaatggagggtgcgcctggcaataatagagtacatgccactgctggctggacagttgggggtggagttttttgacgagaaattaaattctctttgtatggcctggctcgtggaccacgtgtacgcgatacgcgaggcggctacttccaacctcaaaaagcttgtggaaaagttcggcaaggagtgggcacacgccaccattatccctaaggttctggccatgtccggcgacccgaactacctgcacaggatgaccacgttgttctgtattaatgtactctccgaggtgtgcggccaggacattaccacgaagcatatgcttcctacagtgctcaggatggctggcgacccagtggcgaacgttcgtttcaacgttgccaaatcactgcagaagataggacctatcctcgacaactctacccttcagagcgaggtcaagccaatactcgagaaactaactcaggaccaggacgtagacgtgaaatactttgctcaggaggcgcttacggttctgagtctggcatag

SEQ ID NO: 16866 - DNA, 471 bp, synthetic construct
  misc_feature 1..471: note = Description of Artificial Sequence: Synthetic coding sequence
  source 1..471: mol_type = other DNA
atggctgctgccgatggggatgatagtttgtaccccatcgcagtgcttattgacgagctaaggaacgaggacgtacagcttcgtttgaatagcaatcttaagaagctcgttgaaaagttcgggaaagagtgggctcatgctaccattataccgaaagttctggctatgagtggcgatcccaactacctccaccggatgacaacactgttctgcatcaatgtgctgagcgaggtgtgtgggcaagatatcaccaccaaacacatgctgccaactgtgctaaggatggctggcgaccctgtggccaacgtccggttcaacgtcgccaagagcttgcagaagatcggtccaattctcgacaactctacactccagagtgaggtgaaaccgatcctggaaaaacttacacaggatcaggacgttgacgtgaagtatttcgcccaagaggctctcacagtcctatctttagcatag

SEQ ID NO: 16867 - DNA, 1605 bp, synthetic construct
  misc_feature 1..1605: note = Description of Artificial Sequence: Synthetic coding sequence
  source 1..1605: mol_type = other DNA
atgcggactttttcttttgcttcaaccgcttcacggtcttgtcctccttcaccatggccactgggcttgaaaggacctgaggtgtccttttgcctcagcctccagcctccactggagtcccttgccaccgtcgaagagactgttgtgagggataaggctgtggagagcctaagggccataagccacgaacacagtccatctgacctggaggcacacttcgttcctcttgttaagaggctcgcaggcggggattggtttacctcacgcaccagcgcatgtgggctgttcagtgtgtgctacccacgcgtgagctctgccgtcaaggcggagctcagacagtacttccggaacctctgttcagatgacacccctatggttaggcgggcagctgctagcaagcttggagagtttgccaaagtgctggagcttgacaacgtgaaatctgagattatccctatgttttccaacctcgctagcgatgaacaggacagcgtgcgtcttctcgcagtggaagcctgtgtgaatatagcccagttgctgccccaagaagatctagaagctctcgttatgcccactttgcgccaggcggcggaggacaaatcctggagagtgaggtatatggtggctgataagttcacagaactgcagaaggccgtgggcccagagataactaagacggatctggtccctgcatttcagaacctgatgaaagattgcgaggcggaggtgagagcggcagcctcccataaggtgaaggagttttgcgaaaacctttctgccgactgccgcgaaaacgtgatcatgtctcagatcctcccatgtatcaaggaactcgtgtcggatgctaaccagcacgttaagtccgcccttgctagcgtgatcatgggtctgagccccattctcggtaaagataataccatcgaacatttactgcccttatttcttgcccagctgaaggacgaatgtcccgaagtgagactgaatattatcagcaacctggactgcgttaatgaagtcattggtattaggcaactgagccagtcactcctgcctgcgatcgtggaactggcagaggacgcgaagtggcgggttagactggccattatcgaatacatgcctctactcgcaggccagttgggggtggagttcttcgatgagaagttaaattctctctgtatggcgtggctggtggatcatgtctatgctatacgggaagccgcaacctctaacctaaaaaaattggtggaaaaatttggaaaagagtgggcccacgcgaccatcatcccaaaggtgctggccatgtcaggggatcccaactacctacatcgtatgaccaccctgttctgcatcaatgttttgagcgaagtatgtgggcaggacattactacaaagcacatgttgcccacagtcctgcggatggctggagatccggtggccaacgtgcgctttaatgtcgccaagagtctgcagaagataggcccgatactcgataacagtacactgcagagcgaagttaaacccatcctggagaagctcacccaagatcaggacgtggacgtaaagtacttcgcccaggaggccttgactgtactatctctagcctag

SEQ ID NO: 16868 - DNA, 2004 bp, synthetic construct
  misc_feature 1..2004: note = Description of Artificial Sequence: Synthetic coding sequence
  source 1..2004: mol_type = other DNA
atggccggggcaagtgagctgggaactgggcctggtgcagcaggcggcgacggggacgattccctgtaccccatcgccgtcctgatagacgagctgaggaatgaagatgtgcagcttaggctgaattcaattaaaaaactctctaccatcgcactagcccttggagtggaaagaacaagaagtgaacttcttcctttcttaactgataccatctatgatgaggatgaggttctgctagcgttggccgagcaactgggaaactttactggcctagtgggtggacctgactttgcccactgcttgctgcccccgctggagaacttggccaccgtggaggagaccgtggtcagggataaggctgttgagtctcttcggcagatttcacaagagcacaccccagtggctctagaagcgtacttcgtgcctttagttaagaggcttgccagtggagattggtttacatcccgaacgtcggcttgcggtctgttcagcgtttgctatccccgcgcatctaacgccgttaaggctgagatccgccagcagtttcggtcactgtgctctgacgatacacccatggtgcgccgggctgccgccagcaagctgggggaatttgccaaggtgctcgaactggatagcgtgaagtctgagatagtccctctctttacctcattggccagtgacgaacaagattccgttcgtctgctggcagtcgaggcatgtgtgtctatcgctcagctgttgagccaagacgatcttgagaccctcgtgatgccgactctgagacaggccgctgaggataaatcttggcgggttaggtacatggtggctgaccgtttctcagagttgcaaaaggctatgggaccaaagatcacacttaacgacctgatcccagcctttcagaacttgctcaaagattgcgaggcggaggtccgggctgccgcggcccataaggttaaagagttaggagagaatcttcctattgaggatagggaaacgatcatcatgaaccaaatactgccttacattaaggaactagtgtctgacactaatcagcatgtgaagagcgcacttgcttctgtgatcatgggactgtccactatcttggggaaggaaaacacaatagagcatctgttgcccctcttcttagcgcagctgaaggatgagtgcccagacgtacggctgaatataatcagtaacctggactgtgttaacgaagtgataggtatcaggcagctgtcccagtcactgctgccggccatcgtggagctcgccgaagatgccaagtggcgggtgcggttagccattatcgaatacatgcccctcctcgccggacaactgggtgtggagttttttgacgagaagttaaacagtctctgcatggcctggcttgttgatcatgtgtacgctatccgcgaggccgcgaccaataacctgatgaagctagttcagaaattcggaacagaatgggcccaaaatacaatagtgccaaaagttcttgtaatggctaacgacccgaattacttacaccgcatgaccaccctgttttgtattaacgctttgagtgaagcttgcggccaggaaatcaccacaaagcagatgctgccaatcgtgcttaagatggcgggcgaccaagttgctaacgtgcgcttcaatgtggccaagagtctccagaaaatcggcccgattctagacactaatgcgctccagggggaggtgaagcctgttctccagaaattagggcaggatgaggacatggatgtcaagtacttcgcacaggaagcaatcagcgtggtggcacagaggctccgcaagctcgagttccctgtgaaagatagcggagagccctccgtccctagagcagacaagaatcattttccccgtcctactgtaccgggcgaagacatgggtaaagggccggtgtaccagctgcgtggggatacacgcgacaccctggcgcagctgggcatcgccgagctggtccattttagccagtctaccgactag

SEQ ID NO: 16869 - DNA, 1425 bp, synthetic construct
  misc_feature 1..1425: note = Description of Artificial Sequence: Synthetic coding sequence
  source 1..1425: mol_type = other DNA
atggccggcgccagtgaactggggacggggcctggcgcagccgggggggacggggatgacagcttatatcctatagccgtgctcatcgatgagctgagaaatgaggacgtccagctccgcctgaattctattaaaaagctgtctacaattgccctggcattgggagtggaacgaactagaagtgaattgctgccattccttaccgacacaatctatgacgaggacgaggtgttgctagccctggcagaacaactgggaaacttcactggcctggtaggaggccccgactttgcccactgcctccttgactctgtccgactactagctgtggaagcctgtgtctccattgcgcagctgctgtctcaggatgatctggaaaccctggtgatgcctacactgcggcaggctgccgaagataagtcttggcgagtacgctatatggtcgcagacaggttcagtgaactgcagaaagcgatgggccccaagattactctaaacgatctgatacctgcttttcaaaatctcctgaaggattgtgaggccgaggttcgggcagccgccgctcacaaagtgaaggagctcggcgagaatctccccatcgaggacagggaaactataatcatgaaccagatccttccctatatcaaagagctggtgtccgatacaaaccaacacgtgaagtccgccttggcatcagtgatcatgggcttgtccaccattctgggaaaagagaacactattgagcacttactgcctctctttttggcccagctaaaagacgaatgtcctgatgtgcgtctaaacattatttcaaatctagattgcgtaaacgaggtcatcggcataaggcagctcagtcagagcctcctgcccgccattgttgaactggccgaggacgcaaagtggcgcgttaggttggctatcatagagtatatgcccctgctggcgggccagctcggcgtggagttcttcgatgaaaagcttaattcactgtgtatggcctggctggttgaccatgtgtacgctatccgggaagctgccaccaataaccttatgaagctagtgcaaaagttcggcactgagtgggctcagaacacaatcgttcccaaggttctggtgatggcaaatgatcccaactaccttcacaggatgaccacactcttctgcattaacgctttgtccgaagcatgcggccaggaaatcaccactaaacagatgttacccattgtattgaagatggccggagaccaggttgccaatgtgcggttcaacgtggctaagtctttacaaaagatcgggcctattttggacaccaacgcactgcagggggaggtgaaacccgtcctgcagaaattgggccaggacgaagatatggacgtcaaatactttgcccaagaagctataagtgtcttggccctcgcctag

SEQ ID NO: 16870 - DNA, 1365 bp, synthetic construct
  misc_feature 1..1365: note = Description of Artificial Sequence: Synthetic coding sequence
  source 1..1365: mol_type = other DNA
atggccggggcttctgaactgggaactgggcccggagcagccggaggcgacggagacgatagtttgtacccaatcgctgtcttgatcgatgaacttcgaaatgaagacgtgcagttgcggcttaactctatcaagaaactcagcacaatagcactggcccttggagttgagcgcaccagaagtgagttgctgccttttctgaccgataccatttacgatgaggacgaagtgttgttggcactagcagagcagctgggcaacttcaccgggttagtcggcggtccagattttgcccactgtctgctagatagcgttcgccttttagcagtggaggcgtgtgtgtccattgcacagctgttaagtcaggacgatcttgagactttggttatgcccactctgcggcaggcggccgaggacaagagttggcgggtgcggtatatggtggccgatcggttctcagaattgcagaaggccatgggtcctaaaataaccctaaacgatctgatccctgcattccaaaatctgctcaaggactgtgaagcagaggtcagagcagctgctgctcacaaggtaaaagaactcggtgagaacctgcccatcgaagaccgagaaacaataatcatgaaccagatccttccctacattaaggaattagtgtcagacaccaaccagcatgttaagagcgcccttgcctccgtgatcatggggctgtccactatcttgggcaaggaaaatacaatcgagcatttgttgccgctattccttgcccagctaaaggatgagtgtccagacgtcaggctaaacatcatatcaaatctggattgcgttaacgaagtgattggcatacgtcagctgtcacagtcgctcctgccagcaatagttgagctggccgaggacgcaaagtggcgggtgcgcttagctatcattgagtacatgccactgttagctggacagctcggcgtggagttcttcgacgagaagctcaatagcctgtgtatggcatggcttgtcgatcacgtctacgcaatcagggaagcagccacaaataacttgatgaaacttgtgcagaaatttgggaccgagtgggcccagaataccattgtgcccaaggttctggtgatggctaatgacccaaactacctgcacagaatgaccaccttgttctgcatcaatgcgctcagtgaagcctgcggccaggagattacgactaaacagatgctgccgatcgtaaaaaacggacgcagaccaagctccaaatgctccctgcagtgcggtcagatcagcacaaaagattggaccaactcccgctaccagtgcttcaccggccggtccgaagcctccacaaccgaggtcagaagcaggtag

SEQ ID NO: 16871 - DNA, 1812 bp, synthetic construct
  misc_feature 1..1812: note = Description of Artificial Sequence: Synthetic coding sequence
  source 1..1812: mol_type = other DNA
atggcaggcgctagcgagttagggaccggacccggcgctgccggaggggatggcgatgacagcctttaccctatcgccgtcctgattgacgaattaaggaatgaagatgtccagccccctctggagaatctcgctacagtagaggaaactgtggtccgagataaggcagtagagtcactgcgccagatcagccaagaacacacgcccgtggcactcgaggcatacttcgttcccctcgtcaagagactggcctcgggcgactggtttacaagcagaacttctgcatgcggcctgttctccgtatgctaccccagggctagcaacgctgtgaaagcagagatcagacaacagttcagatcactgtgcagtgacgatacgcctatggtgaggcgagccgcagccagcaagctgggagaattcgcaaaggtgctggagctcgatagcgttaaaagcgaaattgtccccctgtttacctcgctcgcttctgatgagcaggattctgttcgcctgctggctgtcgaagcatgcgtgtcaatagcccagcttctatcacaggatgaccttgaaactctggtgatgccaactctgaggcaggccgcggaagataaatcctggagagttcgttatatggtcgctgacagattctctgagctgcaaaaggctatgggtccaaagataacacttaatgatcttatcccggcctttcagaacctgttgaaagattgtgaggccgaggttcgcgctgctgccgctcataaggtgaaagagctcggtgaaaacctgcctattgaagaccgggagactattatcatgaatcagatactcccttatatcaaggagcttgtgagtgatacgaaccagcatgtgaaatcagccctcgcctcagtgatcatgggtctctccacaattttaggtaaggagaatactatcgaacatcttctccccctgttcttagcccagctgaaagacgagtgcccagatgtgcggttaaacatcatcagcaatttggactgcgtgaacgaagtgattggtatcaggcagctgagtcaatcacttctgcctgccatcgtggagcttgcagaggacgcaaaatggcgcgtgaggttagctataatcgaatacatgccgctgttggccggccagctcggtgtagagtttttcgatgaaaaactcaattctctatgtatggcatggctcgttgaccacgtgtatgccattcgggaagctgcgactaataatctgatgaaactcgtccagaagtttggaacagagtgggcccagaatacaattgtgcccaaagtgctcgtcatggctaacgatcctaattatttacataggatgaccacattgttttgtattaatgccctgagtgaggcgtgcggacaggagatcaccactaagcagatgctgcctattgttttgaagatggctggcgaccaagtcgctaacgttaggttcaacgtggccaaaagtcttcagaaaattgggcccatcctcgatacaaacgctctgcagggagaagtgaagcccgttctgcagaaattgggtcaggatgaagatatggatgtgaaatacttcgctcaggaagccatctctgtcgttgcacagcgattgcgcaaattggagttcccagtgaaagattccggtgaacccagcgtgccgcgggcagacaagaaccacttccctcgtccaaccgtccccggggaggatatgggaaagggaccagtgtaccagctccgcggcgacactagggatacgctcgctcagctggggattgcagaattggtccatttcagccagtcaacagactag

SEQ ID NO: 16872 - DNA, 1323 bp, synthetic construct
  misc_feature 1..1323: note = Description of Artificial Sequence: Synthetic coding sequence
  source 1..1323: mol_type = other DNA
atgatgcagcttaccttttggttgcgggtcccccctccttttagccactttaaacggcaatttcgctccctgtgctctgatgatacacctatggttcgacgcgccgctgcctcgaaactgggggagtttgccaaggtactggagctagatagcgtgaagagtgaaatcgtgccactcttcacaagcctggcgagcgatgagcaagatagcgtcagattactggccgtggaagcatgtgtaagtattgcacagttactgagccaggatgatcttgaaacccttgtgatgcctactcttagacaggccgcggaggacaagagttggagagtgcgctacatggtggcagatcgcttttcagaattgcagaaagctatggggcctaaaataacactcaacgacctcatcccggctttccagaacttgttaaaggactgcgaggctgaagtgagggcggccgcagctcataaagtgaaggagctgggggaaaatctgcccatcgaagatagagagacaattatcatgaaccagatcttaccctacatcaaggagctagtcagtgatactaatcagcatgttaagagcgccctggcgagcgttatcatgggtctgtcaacaattctggggaaggaaaacacaatcgagcatctgctccctttgtttctagcacaactcaaagatgagtgtccagatgtacgcctgaacattatttccaatctggattgtgtgaacgaagtgatcgggattcgacagctctctcagtccctgctccccgccattgtggagctcgcagaggatgcaaaatggcgtgtgcgcctggcgattattgagtatatgcccctgctcgcaggccagctcggagtggaattcttcgatgaaaagctgaacagtctctgtatggcctggctggttgaccacgtctacgcgattagggaggcagccactaacaaccttatgaaattggtgcagaaattcggaaccgaatgggcacagaacaccatcgttcccaaagtgctggtgatggctaacgaccctaactatctgcataggatgacaaccctcttctgcattaatgccctctccgaagcctgtggacaggagattaccactaagcagatgctccccatcgtcctgaagatggcaggtgatcaggtggcgaacgtcagatttaacgtcgccaagtcccttcaaaaaataggacccattctcgataccaatgccctgcagggtgaggttaagcctgttctgcagaagttgggccaggatgaagacatggacgtgaagtattttgcccaagaggccatcagtgttcttgccctggcgtag

SEQ ID NO: 16873 - DNA, 1806 bp, synthetic construct
  misc_feature 1..1806: note = Description of Artificial Sequence: Synthetic coding sequence
  source 1..1806: mol_type = other DNA
atggccggagcttctgaactcggtactggccctggcgcggctgggggggatggtgatgactctctgtatccaatcgcagtcctcatcgatgaattaaggaacgaagatgttcagctgcgcctcaattcaatcaagaagcttagcaccatagcgctcgccctcggcgtggagagaacccgatctgagctcttgccttttctcacagacaccatctatgatgaggatgaggtcctcctcgccctcgccgagcagctgggaaactttactggcctggtcggcgggccagattttgcacactgtctcctccctcctctagagaatctggcgacagtggaggagacagtggtaagagataaggctgttgaatcattgagacagatcagccaggagcacacaccagtagccctggaggcgtattttgtgcctctcgtcaagaggctggccagcggagactggttcacatcacggacctccgcgtgtgggctatttagcgtgtgctacccaagagccagcaacgcggtgaaggccgaaatacgacaacaatttcgctccctgtgtagtgatgatacgcctatggtgcgaagagccgccgccagtaagctcggagaattcgccaaggttctcgaactcgatagcgttaaaagtgaaattgtgcctttattcacctccctggctagtgacgaacaggattccgtaagactcttagctgtggaagcatgtgtctcaatagcgcagctgctgtctcaagacgatctcgaaacactggtgatgcccaccctccgacaggccgctgaagacaaaagctggcgcgtgcgctatatggtcgccgatagattttccgaattgcaaaaggctatgggcccaaaaataactctcaacgacctcattccagctttccagaacctcctgaaggactgcgaggccgaagttcgcgcggccgcagctcacaaggtgaaggaattaggcgagaacctgcccatagaggacagggagactatcataatgaatcagatccttccttatattaaggaattggtgagcgacacaaatcagcacgtgaagtcagctctggctagcgtaattatgggcctgtctactattctcggcaaggagaatacaatagaacacttgctccccctgtttctggcgcaactgaaagacgagtgcccagatgtgaggctgaatattatctccaacctggattgcgtcaatgaagtaatcgggatcaggcagcttagccagtcgcttctgccagctattgttgaattagctgaggacgcaaaatggcgtgtcaggctcgccataattgagtacatgccgctcttagctggacaactgggggtcgaattcttcgatgaaaaattgaatagtctttgtatggcctggcttgtcgaccatgtctacgcgatccgggaggccgcgactaacaatctgatgaagttggtgcagaagtttggtaccgaatgggcccagaacaccatcgtccccaaagtcttggtaatggctaacgatcccaactacttacacagaatgacaaccttgttctgtattaatgccctgagtgaagcgtgtggacaggagatcacaactaagcagatgctacctattgtcctgaagatggctggcgatcaggttgcaaacgttcggttcaatgtggccaaaagtctgcagaagattgggcctatcctggatactaatgctctccagggagaggtgaaacccgttttacagaagctggggcaagacgaggacatggatgtcaagtacttcgcgcaagaagcaatctcggtgctggctttggcatag

SEQ ID NO: 16874 - DNA, 1566 bp, synthetic construct
  misc_feature 1..1566: note = Description of Artificial Sequence: Synthetic coding sequence
  source 1..1566: mol_type = other DNA
atgagtggtcgtaggttccacttgagtactactgatcgcgtcattaaggccgtcccctttccccccacacagcggttgacctttaaggaagttttcgaaaatgggaagcctaaagtggatgtgttaaaaaatcacctggtaaaagagggaagactcgaggaagaagtagccctcaaaattattaatgatggcgccgcaatacttcgacaggaaaaaacaatgatcgaagtggatgctcctatcaccgtctgcggagacatccatggccagttttttgatttaatgaagcttttcgaagttggtgggagccccagcaatactcggtacctttttctcggggactacgtggaccgtggctacttttctatcgagtgcgtcctgtatctgtggagtctcaagattaatcatcccaaaacactgtttttactgaggggaaatcacgaatgtcggcacctgacagattacttcacattcaagcaggaatgtcgaatcaagtattccgagcaggtctacgacgcctgtatggagacatttgattgcctgcccctggctgccctgctcaatcagcagttcctttgtgtccacgggggcatgagtcccgaaatcacatcactggatgatataaggaaactggacaggtttacagaaccacccgcgtttggacccgtgtgtgacctgctgtggtctgatcctagtgaggactatggcaacgaaaagaccttggaacattacacccataataccgtccgcggatgctcatatttctatagttaccccgcagtgtgcgaattcctgcaaaataacaaccttctaagtatcatccgcgcccatgaggcccaggatgccggctatagaatgtaccgtaaatcacaggcgaccggatttccaagcctgatcacaattttctctgctccaaattacctggacgtttataataacaaagctgcagttttgaagtacgaaaataacgtcatgaatattcgccagttcaattgctccccccacccctactggctcccgaattttatggacgtgttcacttggtcactccctttcgttggtgaaaaggttacggaaatgctcgtgaacgtgctgaacatatgttctgatgacgagttaatctccgacgatgaagcggaggatcactacatacccagctaccagaagggctcaaccaccgtgcgtaaagaaattatcagaaataaaattcgcgccatcgggaaaatggcccgcgtgtttagtattctgcgccaagaaagcgaatctgttcttacccttaaggggttgacccccaccggcacacttcccctgggggtgctctccgggggcaagcaaacaatcgagacagcaaccgtcgaagcggtggaggctcgagaagcgatcaggggcttttctctgcagcataagatcagatccttcgaggaggcacgtgggttggacaggataaacgagaggatgcctccaaggaaggattctattcacgctggcggacccatgaagagtgtgacgtcagctcattcacacgccgctcacagaagtgaccagggcaagaaagcacactcatag

SEQ ID NO: 16875 - DNA, 1410 bp, synthetic construct
  misc_feature 1..1410: note = Description of Artificial Sequence: Synthetic coding sequence
  source 1..1410: mol_type = other DNA
atgagcgaacccaaggcaattgatccaaaactttcaaccacggatcgagtggtcaaggccgttccctttcccccatcccaccgtctgaccgccaaggaggtctttgataacgacggcaagccccgtgtcgatatattgaaagcccatttaatgaaggaaggtcggctcgaggagtccgtagcgctgaggattatcacggagggagcatctatattgaggcaggagaagaacctgctcgacattgacgctccggtcacagtatgtggggacattcacggtcaattttttgacctcatgaagctctttgaagttggagggtcccccgctaatacacgttacctgttcttgggcgactatgtggaccggggctatttttctattgagtgcgtgttatacctgtgggccctgaaaatattatatccaaaaacactgtttctactaagaggtaaccatgagtgcaggcacctgaccgaatactttacgtttaagcaggaatgcaaaatcaaatattccgagagggtgtatgacgcctgtatggacgctttcgattgtctgccattggctgctctgatgaaccaacagtttctgtgtgtccatggaggcttatctccggaaatcaataccctagatgacatccgcaaactcgaccggttcaaagagccaccagcgtacggcccaatgtgcgatattctgtggtctgaccctttggaagacttcggcaatgaaaaaacacaggaacattttactcacaatacagtaagggggtgttcttacttttatagctatcctgccgtttgcgagtttcttcagcacaacaacctcctgtctatcttgcgagcgcatgaggcccaggacgcaggttatagaatgtatcgcaagtctcagaccactgggtttccctctctgatcaccatcttttccgcacccaattacttggatgtgtacaacaacaaggttacggagatgcttgtcaacgtgctgaatatctgtagcgacgatgagttgggatccgaagaggacggatttgacggcgctaccgccgccgcacgcaaggaggtgattaggaacaaaataagggcgatcggcaagatggcacgcgtcttttcggttctgcgcgaggagtccgagtcagtgttgaccctcaaggggctgacgccgactggcatgctgccaagtggcgtcctttcgggcggaaaacagactttgcagtctgcaattaaaggattctcaccccagcacaaaatcacttctttcgaagaggccaaaggactggaccggatcaacgaacgcatgcctcctagaagggacgccatgccctcggatgccaaccttaactccatcaacaaagcccttacctcggaaaccaatggtactgacagcaacggtagtaactcctctaatatccagtag

SEQ ID NO: 16876 - DNA, 1536 bp, synthetic construct
  misc_feature 1..1536: note = Description of Artificial Sequence: Synthetic coding sequence
  source 1..1536: mol_type = other DNA
atgtctgaaccaaaagccatcgatcccaagctatctaccacagaccgtgtggtaaaggctgttcccttcccccctagtcatagactcaccgccaaagaggtcttcgataatgatgggaagccacgagtggatattttgaaggcacacctgatgaaagaagggcgcctcgaagaaagcgtggcgctgaggataattactgaaggtgcgtctatcttacgacaggagaaaaacttgctggacatcgacgcaccagtcaccgtgtgtggtgacattcacggtcagttcttcgatctaatgaagctttttgaggtgggggggagtcccgctaatacccgctatctctttttgggggactacgtcgaccgcggctacttctccatcgaatgtgtactgtatctgtgggccctgaagatcctgtacccaaaaactctctttctcctcagaggtaatcacgagtgtaggcatttgacagagtacttcaccttcaagcaagagtgcaagattaagtattcagagcgagtttatgatgcctgcatggacgcgttcgattgcctgcctcttgcagcactgatgaatcaacaatttctatgtgtgcacggcggactttccccagaaattaataccctggacgacatacgtaagctggaccggttcaaagagcctcctgcatatgggcctatgtgcgacattctgtggtctgacccactggaggacttcggtaacgagaaaactcaggaacacttcacacacaacacggtgagaggctgctcctacttttattcgtatcccgctgtctgcgagtttttacaacataacaatctgctcagcatcctcagagcacatgaagcacaagatgctgggtatcggatgtaccggaagtctcagacaaccgggttcccctcgctcatcacaatcttttctgccccaaattatttggacgtttacaacaacaaagccgctgtgctaaaatatgagaataacgtcatgaacatcaggcagttcaattgctcaccccacccttattggttgcccaacttcatggacgtgttcacctggtctctgccattcgtgggcgagaaggtgacagaaatgcttgtgaacgtgcttaatatctgttctgatgatgagctaggaagcgaggaagacggctttgacggcgctactgctgccgccagaaaggaggtgatacgtaataagattagagcaatcggcaagatggcacgagttttcagcgtactgcgggaagaatccgaatccgtgctcactctcaagggattgacacccacggggatgttgccctccggtgttctctccggaggcaagcagacattgcaaagcgcaatcaagggattttcaccccaacacaaaatcacttctttcgaagaggccaaaggtctggacagaatcaacgagagaatgcctccaagacgcgacgccatgcctagtgacgccaatctgaattctattaataaagccttgacttctgaaacaaacggcaccgactccaatggttcaaactctagcaacattcagtag

SEQ ID NO: 16877 - DNA, 1566 bp, synthetic construct
  misc_feature 1..1566: note = Description of Artificial Sequence: Synthetic coding sequence
  source 1..1566: mol_type = other DNA
atgtcagagcctaaggccattgacccgaagctgtccactacagatagggtcgtgaaagccgtgccttttcccccttctcacaggctcactgctaaggaggtgtttgataacgacggcaagccaagagtggatatcctgaaagctcacttaatgaaagaagggaggctggaggagtctgtagctttgcgtattattaccgaaggcgcatccatcctgcgacaggaaaaaaatctgttggatatagatgctcccgtaaccgtatgtggcgacatccatgggcagtttttcgacctcatgaaactcttcgaggtaggggggtcccccgccaatacccgttatttattcctcggggactacgtcgatagaggctatttctcaatcgagtgcgtgctttacctgtgggccctcaaaattctgtaccccaagactcttttcctccttcggggaaaccatgagtgccggcatttgacagaatacttcaccttcaagcaggaatgcaagattaagtactccgagagagtttacgatgcctgcatggatgcctttgattgcctgcctttggcagctctcatgaatcagcagttcttgtgcgttcatgggggtctatctccagagataaatacactggacgatattcggaaactagaccgctttaaagagccgcctgcttacggcccaatgtgcgacattctttggagcgacccattggaggattttggaaacgagaagacacaggagcactttacgcataacacggtgcgcggctgttcttacttctactcctacccagcagtgtgcgagtttcttcagcacaataacttactgagtatcctgcgcgcccatgaagcccaagatgcaggatatagaatgtatagaaagagccaaacaaccggatttcctagcttgatcaccatctttagcgcccccaactatttggacgtgtataataataaggctgctgtcctgaagtacgaaaacaatgtgatgaatattcggcaatttaactgctcccctcatccttattggcttccaaacttcatggacgttttcacctggtcactgcccttcgtgggagagaaggttactgagatgctggtgaatgtcctcaacatttgctccgatgacgagctgggaagtgaggaggacggttttgatggcgccactgcagctgcacggaaagaggtcatccggaataagatccgcgccatcggcaagatggcaagagtgtttagtgtgctccgggaggaatctgaaagcgtgctgactctaaaggggttgactccaactgggatgctgccaagtggcgtgctgagcggcggcaagcagacattacaatcggccaccgtcgaggcgattgaggccgatgaggctatcaaagggtttagcccccagcacaagatcacttcctttgaggaggccaagggcctggataggataaatgaaagaatgcctccgagaagagacgccatgccttcggacgcaaatctcaactctatcaataaagcgctgacctccgaaacgaacggaacagattccaacggaagtaatagctcaaatatacagtag

SEQ ID NO: 16878 - DNA, 1272 bp, synthetic construct
  misc_feature 1..1272: note = Description of Artificial Sequence: Synthetic coding sequence
  source 1..1272: mol_type = other DNA
atgaaactgtttgaggtcggcggttccccggcaaacacacggtatttgtttttgggcgactacgtggacagagggtacttttctatcgagtgtgtcctgtatctttgggccctcaaaattctgtacccgaaaacactgttcttgctgagggggaaccatgaatgtcggcatctaactgagtatttcacgttcaagcaggagtgtaagataaaatactctgaacgtgtctatgacgcttgtatggatgctttcgactgtctgcccctggcagctctgatgaatcagcagttcctgtgcgtgcacgggggactgagcccagagattaataccctagatgatattcgcaaattggaccgctttaaggagcctcccgcttacgggccaatgtgcgacatactgtggtctgaccccctagaagattttggcaatgagaagacacaggagcattttactcacaacacagtgagggggtgttcctatttttattcatatcccgccgtctgtgagtttctgcaacacaataatctattaagcatcttgcgcgctcacgaggcacaagacgccggctaccgaatgtaccggaaatcacagacaaccggcttcccttctctgataacaatctttagcgccccgaactatctcgacgtgtataataacaaggctgctgtgctgaaatacgaaaataacgtcatgaatatacggcagtttaattgttcccctcatccgtattggttgccaaattttatggacgttttcacgtggagcctgccatttgttggcgaaaaggttactgagatgctcgtaaacgtactcaatatttgtagtgacgatgagctcggaagcgaggaagacggcttcgacggggcgacagcagccgctagaaaggaggtgattcgtaataaaatcagagccattgggaagatggccagagtcttttccgtgctcagagaggagtccgagtccgtcctcactctcaaaggcttgactcctacggggatgctgccgtcgggggtgctgtcaggaggtaaacagacactgcagtccgccaccgtggaagctatcgaggctgatgaggccattaagggcttttcccctcagcacaagattacatcatttgaagaggccaaggggctggacaggattaacgaaagaatgccaccaagaagggacgccatgccttctgatgctaatctcaatagcattaataaagcactcacatctgagactaacggtaccgactctaatggctcaaattccagtaacattcagtag

SEQ ID NO: 16879 - DNA, 870 bp, synthetic construct
  misc_feature 1..870: note = Description of Artificial Sequence: Synthetic coding sequence
  source 1..870: mol_type = other DNA
atgtcggaacccaaggctatcgatccaaagctgtcgacaactgacagagttgtgaaagccgtaccttttcctccaagccatcgcctgacagcgaaagaggtcttcgacaacgacggcaaaccacgggtggatatcctcaaggctcacttgatgaaggagggcagactggaggaatccgtggctcttcggattatcacagagggggcatcaatcttgagacaggaaaagaatcttctggacatcgacgcccccgtgactgccgcggtgctgaaatacgaaaacaatgttatgaacatccggcagtttaattgctcgcctcatccctattggctgcctaatttcatggacgtgtttacgtggagcctgccttttgttggcgaaaaggtcactgagatgctggttaatgtcctcaacatttgcagtgacgatgagctgggatcagaggaggacggatttgacggagcgacagctgcggcaaggaaagaggtcataaggaacaaaatccgggcgattgggaaaatggcacgtgtgttttccgtactgcgggaggagagcgaatcagttctgacacttaaaggcttgaccccgaccggtatgctgccgagcggcgttctgtctggtggtaaacagacactccagtctgctaccgtggaagccatagaagctgatgaagctataaaggggttttctcctcagcataaaatcacaagcttcgaagaggctaaaggcttggacaggataaatgaaagaatgccgcccaggcgggacgccatgccctcagacgcgaaccttaacagcatcaacaaggccctgacgagtgagactaatggtacggactccaatggctctaactcaagtaatatacagtag

SEQ ID NO: 16880 - DNA, 1365 bp, synthetic construct
  misc_feature 1..1365: note = Description of Artificial Sequence: Synthetic coding sequence
  source 1..1365: mol_type = other DNA
atgtcagagccaaaagccatcgatcccaagctaagcaccacggacagagtggtgaaggtgtgtggggacatccatggacagttcttcgacctcatgaaactttttgaggtgggcggcagtcccgccaatacacgttacctctttctaggggactatgtggaccgcggttacttcagcattgagtgcgtactgtatctgtgggcgctcaagattttgtatcccaaaaccttgtttctgctacgtgggaaccacgaatgccgccatttgacagagtatttcacttttaaacaggaatgcaaaattaagtattctgagcgagtgtacgatgcctgtatggacgcatttgattgccttcccttggccgcgcttatgaaccaacagtttctctgtgtgcatggtgggctttcccctgagatcaatactctcgatgacatcagaaagcttgaccggttcaaggagccacctgcgtacggacctatgtgcgacatcctttggtcggatcccttagaggacttcggtaacgagaaaactcaggagcattttacgcataacacagtgcgtggttgttcctacttctacagctaccctgccgtttgtgaatttttacagcataataatctgctgagtatcctgagggctcacgaagctcaggacgccggttaccgtatgtaccgaaagagccaaacaacaggctttccttcgctgattactattttctccgctcccaactatctggacgtttataataacaaagctgccgtgctgaagtatgagaacaatgttatgaatatccgccagtttaactgttcacctcacccatactggctgcccaactttatggacgttttcacttggtccctgccatttgtgggcgaaaaagtgaccgaaatgcttgtaaacgtcctaaacatctgctccgatgatgaacttggtagtgaggaggatggcttcgatggagcgacggcagccgcaaggaaggaagtcattcgaaacaaaatacgtgctatcggcaaaatggcaagggtcttcagcgtcctgagggaggagtctgagagcgtactgactctcaagggcttaacacctactggcatgctgccctctggcgtcctgtcaggaggaaaacagaccctgcaaagcgcaaccgttgaggcaattgaggccgatgaggccatcaagggctttagtccccagcataagatcacctcctttgaggaggccaaaggactggatcggattaatgaacgtatgccaccacgccgcgatgctatgccgtctgatgctaatctaaacagtatcaacaaggcactgaccagcgaaacaaacggtacagactccaacggctctaattctagcaatatccaatag

SEQ ID NO: 16881 - DNA, 399 bp, synthetic construct
  misc_feature 1..399: note = Description of Artificial Sequence: Synthetic coding sequence
  source 1..399: mol_type = other DNA
atgaaagaagggaggctggaggagtctgttgcacttcggatcattacagagggtgcttcaattcttaggcaggagaagaacttgctagacattgacgcgcctgtgaccgtatgcggggatatccatggccagttttttgatctgatgaagcttttcgaggttggcggttcaccggccaatacacgctatctctttctaggcgactacgtagacaggggatatttttcaatagagtgtgttctgtacctgtgggccttaaagatcttataccctaaaactctgttcctactaaggggcaaccacgaatgtaggcacctgacagagtacttcacatttaaacaagagtgtaagatcaaatactccgaacgagtatacgacgcttgcatggatgccttctag

SEQ ID NO: 16882 - DNA, 444 bp, synthetic construct
  misc_feature 1..444: note = Description of Artificial Sequence: Synthetic coding sequence
  source 1..444: mol_type = other DNA
atgaaagaagggcgtttagaggagagcgtggctctccggatcattacagaaggggccagcatcttaagacaagaaaagaacctgctagatatagacgcaccagtgactgtttgcggcgatattcatggacaatttttcgacctcatgaagctgttcgaggtcgggggcagccctgccaatacgcggtaccttttcttaggcgactacgttgacaggggatacttttccatcgaatgtgtgttgtacctgtgggccttgaagatactctacccaaagactctcttcctgctcagaggaaaccacgaatgccggcatctgactgagtactttaccttcaagcaggagtgcaaaataaagtactcagaaagggtttatgacgcctgcatggatgccttcgattgcctgccactagcagcccttatgaaccagcagttcctgtgctag

SEQ ID NO: 16883 - DNA, 1491 bp, synthetic construct
  misc_feature 1..1491: note = Description of Artificial Sequence: Synthetic coding sequence
  source 1..1491: mol_type = other DNA
atggctgcacccgaacctgcacgagccgccccgcctccaccacccccacctcctccacctcccggtgccgatcgggtggtgaaggctgtcccgttcccacccactcatcgccttacctcagaggaagtgttcgacctcgacggcatcccacgcgtcgacgtgttgaaaaatcacctggtgaaggaggggcgggtcgacgaagagatcgctctgcgtatcataaatgagggagctgccattttgcgacgggaaaaaacaatgattgaggttgaagcacccatcacagtgtgtggagacatccatggacaattctttgatcttatgaaactcttcgaagttgggggcagtccggcgaacacccgctatctctttctgggcgactacgtggaccgaggctacttcagcatagaatgtgtgctgtacctgtgggtcttgaagatcctgtacccttctacactgtttcttttgcgggggaaccacgaatgccgccatctcaccgagtacttcacatttaagcaagagtgcaaaataaaatactcggagcgggtgtatgaggcttgcatggaagccttcgattccctgccgttggctgccctgctgaatcagcagtttctttgcgtccacggagggctgagtcctgaaatccacaccctggatgacatccgaagactcgacagattcaaagaaccccccgccttcgggcccatgtgtgaccttctgtggtccgacccatctgaagattttggcaacgagaaatcacaggagcatttctcccacaataccgttagaggatgttcttatttttataactaccctgccgtgtgcgagtttttacagaataacaacctgttgagtattattcgagcacacgaggctcaggacgccggctatcggatgtaccggaaaagtcagacaacagggtttccaagccttataactatcttctcggctcccaactacctagacgtgtataacaataaggccgccgtgctgaaatacgaaaacaatgttatgaatatccgccaattcaactgctcaccccacccttactggttaccgaattttatggatgtcttcacatggtcgctgcccttcgtgggcgagaaggtgaccgagatgctggtgaacgtgctgtccatctgctcagacgacgagctgatgaccgagggagaggatcagttcgatggcagtgccgccgcgcggaaagaaattatacgcaacaagatacgtgcaataggaaagatggcgagagtgttttcagtcctgagagaggagtctgagtcagtcttgactctgaaaggactgacacctactggaatgcttccaagtggagtccttgctggcgggcgccaaacactgcagagcggtaacgatgtgatgcaattggccgttccccaaatggactggggcacacctcattcctttgcaaataatagccataacgcttgtagagagtttctattgtttttcagctcgtgtctttcaagctag

SEQ ID NO: 16884 - DNA, 1575 bp, synthetic construct
  misc_feature 1..1575: note = Description of Artificial Sequence: Synthetic coding sequence
  source 1..1575: mol_type = other DNA
atggcagcaccagagcctgcaagggccgcccctcctccaccacccccgccgcccccccccccgggggcagatcgcgtggtaaaagccgtcccatttcccccaacacatcggctgacctctgaggaggtcttcgatctagatggaatcccccgtgttgatgtgctgaagaaccatctcgtaaaggagggccgcgtggacgaagagattgccctacgtatcattaacgagggcgcggccatactccggagggagaaaacaatgatagaggttgaagcccccatcacagtatgtggggatattcacggacagttcttcgacctgatgaagctgttcgaagtcggagggtcacctgctaacacgagatatttatttctcggggactacgtggataggggatatttcagcatcgagtgtgtactttatctctgggttctgaaaattctctatccttcaacactgtttctgcttaggggcaaccatgaatgtagacatctgaccgaatactttacattcaagcaggagtgcaaaatcaaatattcagagcgcgtgtatgaggcttgtatggaggcctttgactcacttcccttagccgccctcttaaaccagcagtttctctgtgttcacggtggcctcagtcctgagattcatacgctggacgatatcaggagactggaccgctttaaggagccacccgcgtttggaccaatgtgtgatttgctgtggagtgatccttccgaggacttcggaaacgaaaagtctcaggagcacttcagccataacacggtgagaggatgctcttacttttataactaccctgctgtgtgtgaattcttacagaacaacaacctgctctccatcattagggcacacgaagctcaggacgccggctaccgcatgtacaggaagagtcagaccaccgggttcccatctctgataactatttttagtgctccaaattacttagacgtctacaataacaaggcagcggttctgaaatatgaaaacaatgtcatgaacatccgccagttcaattgttcaccccatccctactggctgcctaatttcatggatgtgtttacgtggagcctgccattcgtcggcgagaaggtaaccgagatgctggtgaatgtgcttagtatctgtagcgacgatgaacttatgaccgagggagaggaccaattcgacggcagcgctgccgccagaaaagagatcattaggaacaagattagggccatcggtaaaatggcacgagtgttcagcgtcctgcgtgaagagagcgaaagtgtgttgaccctgaaggggcttaccccaaccgggatgttaccttctggtgtgctcgccggtgggcggcagacactccaatccgccaccgtggaggcgatcgaagcagagaaggccatcaggggattcagccccccgcaccgtatttgttctttcgaagaggccaagggcttggatcggattaatgagaggatgcctccgcgcaaggatgcagtgcagcaggatgggtttaatagtcttaatacagctcacgcaaccgaaaatcatggcacggggaatcacaccgctcagtag

SEQ ID NO: 16885 - DNA, 1545 bp, synthetic construct
  misc_feature 1..1545: note = Description of Artificial Sequence: Synthetic coding sequence
  source 1..1545: mol_type = other DNA
atggccgctcccgaacctgcccgcgctgctccacccccacctcctcctcccccacctcctccaggcgccgaccgagtggttaaagccgttccgttcccccccacccaccggctgacctcagaggaagtgtttgatctcgacgggattccgcgggtggatgtcctgaaaaatcacctcgtcaaggagggtagagtcgacgaggagatagccttaaggatcatcaatgagggggctgctatccttaggagagagaagaccatgattgaagtggaggcgccgattactgtgtgcggtgatatccatgggcaattcttcgaccttatgaagctgttcgaagtcggcgggtccccagctaacaccagatatctctttctgggtgactatgttgaccgaggctatttctctattgagcatgtcctgggcacagaagacatttccattaatccccacaacaacattaacgagtgcgtgttgtacctgtgggtactgaaaattctgtatcctagcacattgttcctcctacgcggaaatcatgaatgccgccacctgactgaatacttcacttttaaacaggagtgcaaaatcaagtactccgagagggtctatgaggcatgcatggaagcctttgatagcttaccactggctgccctgttgaatcagcagtttctatgtgtacacgggggcctaagtcctgagatccacaccctggacgatatacgtaggctcgaccggtttaaggagcctcctgccttcggacccatgtgcgacttactgtggtctgatcctagcgaagacttcggcaacgagaaaagccaggaacactttagccacaacaccgtaagaggatgttcctatttttacaactatcccgcagtgtgcgagtttcttcagaataataacctcctcagtatcattcgcgcacatgaagcccaggatgcaggttatcgtatgtaccgcaagtcacagactaccggcttcccctcattgattactattttttcagcccccaattacctggatgtctacaacaacaaagcagcagtacttaagtatgaaaacaatgtaatgaacatcaggcagttcaactgttcaccacacccgtactggcttcctaatttcatggacgttttcacatggtcgttaccattcgtaggtgaaaaagtgaccgaaatgctcgtgaacgttctgagtatttgctccgacgacgagctaatgactgaaggagaggatcagttcgatggctctgcggctgctcgtaaagaaattattaggaataaaattcgggccatcggcaaaatggcacgcgtattctctgtcctgcgagaggaatccgagtcagtcctgaccctcaaaggcctgacacctaccggcatgctgccaagcggagttctagcgggaggtcggcagaccctccagtcgggcaacgacgtgatgcaattagccgttccacagatggactggggtaccccccacagcttcgctaacaattcccacaacgcttgtcgtgaatttcttctattctttagcagttgtttatcatcttag

SEQ ID NO: 16886 - DNA, 591 bp, synthetic construct
  misc_feature 1..591: note = Description of Artificial Sequence: Synthetic coding sequence
  source 1..591: mol_type = other DNA
atgaacattcgccagtttaactgctctcctcacccctattggcttcccaacttcatggatgtgttcacatggtccctcccgttcgttggcgagaaagtgacggagatgttggtgaatgtgctatcaatctgcagcgacgacgagctgatgactgaaggggaggatcagtttgatgagcgtctcatttacgggaacaaaaagggtagcgccgcggcaaggaaggagatcattagaaataaaatcagagcgataggaaaaatggctcgcgtgtttagtgtgctccgcgaagagagcgagagtgtgctgacactcaagggcctcacccccactggaatgctccctagtggagtgcttgccggggggcgacagaccctgcagagcgcgaccgtggaagcaattgaagccgagaaggctatcagaggattttccccccctcacagaatctgctcattcgaggaggctaaaggtctggacagaatcaatgaacgcatgccgccacgtaaggatgctgtgcagcaagacggatttaactctctgaataccgctcacgccaccgagaatcacgggactggcaatcatacggcccagtag

SEQ ID NO: 16887 - DNA, 1548 bp, synthetic construct
  misc_feature 1..1548: note = Description of Artificial Sequence: Synthetic coding sequence
  source 1..1548: mol_type = other DNA
atggctgcgcccgagccagccagagctgctccccctccaccgcccccaccccctccgcctcccggtgctgacagagtcgtgaaagcagtcccatttcctcctacccatcggctcacttcagaagaagtgttcgacctggatggcattcctcgggtcgatgtgctcaagaaccacctcgtgaaggagggcagggtagatgaagagatagctctacggatcattaatgagggtgccgcaatattacgtagagaaaaaacgatgatcgaggtcgaggcacctatcacagtctgtggcgacatccacggccaattttttgatctgatgaaactttttgaagttggcggatctcccgctaacaccaggtatctgttcctgggggactacgttgaccgcggatactttagtattgagtgcgtgttgtacctgtgggtcctgaagatcctgtacccaagtactttgtttttgcttcgcggcaatcacgagtgtcgccacttgaccgaatacttcacctttaagcaggagtgcaagattaagtactctgagcgcgtttacgaggcatgtatggaggccttcgattcactacctctggccgcgctattgaatcaacagttcctatgtgtccacgggggcctgtcaccggagattcacaccctggacgatatcaggcgcctggaccggttcaaagaacccccagctttcggacccatgtgtgatctactgtggtcagacccctcagaagactttgggaatgagaagagccaggagcacttcagccataacaccgttaggggatgctcatatttctacaattatcctgccgtatgcgagttcctccagaataacaatctgctgtcaatcatcagggctcacgaagctcaagatgccgggtacaggatgtatcgcaagtcgcagacaacaggttttccaagtctgattactatcttctcagcgcccaattatctcgacgtttataacaataaggctgccgttctaaaatatgaaaacaatgtgatgaacatcagacagtttaactgcagtccccatccatattggctgccaaactttatggacgtctttacctggagcttgccattcgtgggcgagaaggtgaccgaaatgcttgtgaatgtgcttagcatctgcagtgatgatgagctaatgaccgaaggtgaagatcaattcgatgtggggtctgcagccgctcgcaaggagattatcaggaataaaattcgcgcaatcggaaagatggcccgggtgtttagcgtactgcgtgaagaatccgagagcgttcttacactgaaagggctgacacccaccggaatgttgccaagcggcgtgttggccggtggaaggcagaccctgcagagtgccatccggggcttcagcccaccccataggatctgttcattcgaagaagcaaaaggcctcgaccggatcaacgagcggatgccccccagaaaagacgcagtgcaacaagacggcttcaactctctgaatacagctcacgccactgagaaccacggcacgggtaatcacaccgcccaatag

SEQ ID NO: 16888 - DNA, 1578 bp, synthetic construct
  misc_feature 1..1578: note = Description of Artificial Sequence: Synthetic coding sequence
  source 1..1578: mol_type = other DNA
atggccgctccagaacccgcgcgcgccgcgcccccccctccccccccacctccccctccccccggtgcagatagggtggtaaaagcggtaccctttccgccgacacatcgccttacctcagaggaagtctttgacctcgacggcatccctcgtgtcgacgtactgaaaaaccatttagtgaaggagggaagggtcgatgaagagatagctttacgaattattaacgagggagctgctattctccggagggagaagactatgatcgaggtcgaagctcctattacggtgtgcggcgacatccatgggcagttcttcgaccttatgaagctctttgaggttggcgggtctcctgcaaatacccggtatctattcctcggtgattacgtggacagaggttacttctcgatagaatgcgtcctatacctgtgggtgctgaagatactatacccttcaaccctgttcctgctcaggggaaatcacgagtgcagacacctgaccgaatattttacattcaagcaggaatgcaagatcaaatattctgagcgcgtttacgaggcttgcatggaggctttcgatagcttaccactggccgccctgctgaatcagcagttcttatgcgtgcatggcggcctctctcctgagatccatacattggacgacatccgcaggctggatcggtttaaagagcctcccgcgttcggacctatgtgtgatctgctttggtcagatccatccgaagattttggtaacgagaaaagccaggagcacttctctcataataccgtgcgtggctgctcctatttttacaattatcctgccgtgtgtgaatttttacagaacaacaaccttctttcaatcatccgcgcacatgaagcacaggacgcggggtaccggatgtatagaaaatcacagaccacaggcttcccatcactgataactatattcagtgccccaaactatctggacgtgtacaataataaggccgctgtactgaagtacgaaaataatgtcatgaacatacggcagtttaactgtagtccacatccttactggttgcccaacttcatggacgtatttacgtggagcctgcctttcgtcggcgagaaggtgaccgagatgttagtgaacgttctgagtatatgctctgacgacgaattaatgacagagggtgaagaccagtttgatgtggggtcggccgccgcccgcaaggagattattcggaataaaatcagagctattggcaaaatggccagggtattttccgtgctccgggaggaatccgagtctgtgctcaccctcaagggacttactcctacaggtatgttaccctcaggagtactggctggggggcgacagactctgcagagcgctaccgtggaagccatcgaggcagagaaggctattcgcgggttctctcctccacacagaatatgttcgtttgaggaggccaagggcctggacaggataaacgaacgcatgcctccccgaaaggacgccgtgcagcaggatggattcaatagccttaatacagctcacgcaacagaaaaccatggcaccggcaaccacactgcccaatag

SEQ ID NO: 16889 - DNA, 561 bp, synthetic construct
  misc_feature 1..561: note = Description of Artificial Sequence: Synthetic coding sequence
  source 1..561: mol_type = other DNA
catccttactggttgcctaatttcatggatgtgtttacatggtcccttcctttcgtaggagagaaggtaacggaaatgctcgtgaacgtgctgtctatctgcagcgatgacgaactcatgaccgagggtgaagatcaatttgacgaaaggctcatatatgggaacaagaaaggcagcgccgcagctaggaaagaaatcataagaaataagattagagccattggaaagatggctcgcgtttttagtgttctgcgggaggagtctgagtcagtgctgactctgaagggactgacaccaaccggcatgctcccttccggggttcttgcggggggccggcaaaccctccagagtgccacagtagaagccattgaggctgaaaaagcaattaggggcttttccccgccgcataggatctgtagctttgaggaagctaaaggcttggatagaattaacgaaagaatgccgcctagaaaagatgctgttcaacaagatgggttcaattctttgaacacagcgcacgcaactgagaatcacggaacaggaaaccataccgcccagtag

SEQ ID NO: 16890 - DNA, 459 bp, synthetic construct
  misc_feature 1..459: note = Description of Artificial Sequence: Synthetic coding sequence
  source 1..459: mol_type = other DNA
atgctggttaacgtgttatctatttgctcagacgacgaactgatgactgagggcgaagaccagtttgatggaagcgctgccgcacgaaaggagatcatccgaaacaagatccgcgccatcggaaagatggcccgcgtatttagcgttctaagagaggagtccgaatctgtcctcacgttaaaagggctgaccccaaccgggatgttgccctccggggttctggcaggcggacggcaaacactgcagtctgccactgtggaagccatagaggctgaaaaagccattcggggtttcagtcctccacaccgaatctgcagcttcgaggaggcaaagggcttggataggattaatgagcgcatgcctccccgcaaagatgccgtgcaacaggatgggttcaatagcctgaatactgcgcacgccaccgagaaccatggtacaggcaaccacaccgcccagtag

SEQ ID NO: 16891 - DNA, 1236 bp, synthetic construct
  misc_feature 1..1236: note = Description of Artificial Sequence: Synthetic coding sequence
  source 1..1236: mol_type = other DNA
atgattgaggtggaggccccgatcacagtttgtggagatatacacgggcaattcttcgacctgatgaagttgttcgaggtagggggttcccctgcaaacacacgttacctttttcttggggattatgtggaccgcggctatttctcgatagagtgtgtcctctacctgtgggtgctgaagattctgtatccgagcaccttattcctcttgaggggtaaccacgaatgcaggcaccttacagaatatttcacatttaaacaggagtgtaagataaaatacagcgagcgagtgtacgaggcctgcatggaggcattcgattcactgcctcttgccgctctcttgaatcagcagttcctgtgtgtgcacgggggattgagccccgaaatccatacccttgatgacatccgcagacttgatcggtttaaagaaccacctgcttttgggcctatgtgcgatctgctgtggtccgacccttctgaggacttcgggaacgagaagtcgcaggagcatttcagccacaacactgtccggggatgttcctacttctacaattaccctgccgtctgtgagttcctccagaataataaccttctgagcatcattcgagctcatgaggcacaggacgccggctaccggatgtatcgcaaatcacagaccacaggttttccctcgttgatcacaatcttcagtgcccctaattacctggatgtgtataacaacaaggccgccgtgttgaagtacgaaaacaatgtcatgaacatcagacaatttaactgcagtccacatccctattggctacctaactttatggacgtttttacttggtcccttcccttcgttggggagaaagtgacagaaatgctggttaacgtgctgagtatctgttccgatgatgagctgatgactgagggagaggatcaattcgatgtcggctcagccgccgcccggaaagagatcatcaggaataagattagagcaatcgggaaaatggcgagagtcttctctgtgctgagggaggagtctgagagtgtgttgacacttaagggcctgactccaaccggcatgttgccttctggagtgctagctggggggaggcagaccctgcagtcaggcaatgacgtgatgcagctggctgtgccccagatggattggggaactccccatagctttgccaacaatagtcataatgcctgcagggaattcctcctcttcttcagttcgtgcctgagctcctag

SEQ ID NO: 16892 - DNA, 1539 bp, synthetic construct
  misc_feature 1..1539: note = Description of Artificial Sequence: Synthetic coding sequence
  source 1..1539: mol_type = other DNA
atgtcaggtcgaagatttcacttatcaacaacagatcgcgtcatcaaggcggtgccctttcccccgacgcagcgactcacctttaaagaggtctttgaaaacgggaagcctaaagtggatgtgctgaagaaccacctggttaaggagggcagactggaggaagaggtagccctgaagattatcaacgacggagctgcaatcctccgtcaggagaaaaccatgatcgaggtggatgcgccaattacagtctgcggggatatccacgggcagttcttcgacctgatgaaactgttcgaagtgggcggctcccctagcaacacccgatatctttttctgggcgactatgtagaccgaggctacttcagtatcgagtgtgtactttatctgtggtctttaaagatcaaccaccccaagacgctttttcttctccggggtaatcacgagtgcagacatcttactgattactttacctttaaacaggagtgccgcataaaatactcggagcaagtgtatgacgcttgtatggagaccttcgactgcctcccactggcagcactccttaaccaacaattcctgtgtgtgcatggcggcatgtctccagagatcaccagcctcgacgatattaggaagttggatcggttcaccgagccccctgcttttggacctgtctgtgacctgctctggtcagaccctagcgaggactacggaaacgagaaaacactcgagcattacactcataatacagtgcgcggatgctcctatttctactcataccccgcggtgtgtgagttcctccagaataacaacttactcagcatcatcagggctcatgaggcccaggatgcgggataccgcatgtatcgaaaaagtcaggccaccggatttcccagcctcatcactatctttagcgcccctaattacctagacgtttacaacaataaggctgctgtgttgaaatacgaaaataatgtcatgaacatcagacaattcaattgtagcccgcacccttattggctcccaaacttcatggatgtgtttacctggtcccttccttttgtcggcgagaaagtgaccgaaatgttggttaacgtccttaacatctgctccgatgacgagttaatctcggacgatgaggccgagggatccacaacagtgcggaaagaaatcatccgaaataaaattcgggcaattggcaagatggcccgggtgtttagtatccttcgacaggagtccgagtcagtgttgaccctgaagggactgactccaaccggaactctccccttgggagtcctgagtggcgggaagcaaaccattgaaacagccacggtagaggcagtggaggcccgggaagcaattagaggctttagcttgcagcacaagatccggtccttcgaagaggcccgaggcctggaccgcataaacgagcgcatgccgccccgcaaagattcaatacatgcaggtggaccaatgaagtccgtcactagcgcacactcacacgctgctcataggtccgaccagggaaagaaggcccatagttag

SEQ ID NO: 16893 - DNA, 1509 bp, synthetic construct
  misc_feature 1..1509: note = Description of Artificial Sequence: Synthetic coding sequence
  source 1..1509: mol_type = other DNA
atgtccggacgtcgcttccatttgtccaccaccgacagggtgatcaaggccgtgccattccctcctactcagagattgacttttaaggaagtatttgagaacggaaaacccaaagtagatgttcttaagaaccacttggtcaaagagggacggctcgaagaggaagtggccctgaagataatcaacgacggggccgctatcctgaggcaggaaaagactatgattgaggtggatgctccaattactgtttgcggagatatacatggacagttctttgacctgatgaaactgttcgaggtaggagggagcccctcaaatacccgatatctctttcttggagattatgttgaccgcgggtacttttccatcgagtgtgtgctctatttgtggagtctcaaaatcaaccatcctaaaaccctttttctgcttcgcggcaatcatgagtgccgccatctgactgattatttcacgttcaagcaagagtgtcgcataaagtacagcgagcaggtctacgacgcctgcatggaaaccttcgattgcctgcctcttgctgccctgctgaaccagcaatttctctgcgtgcacggggggatgtcacccgagattacctctctggatgatatccgcaagctggatcgcttcacagagccgccagcttttggccccgtgtgtgatttactgtggtctgacccatccgaagactatggcaatgagaagaccctggagcactatacacacaatacagtgcgtggctgctcctatttctactcctaccccgccgtgtgcgagttccttcagaacaataatctgctatccatcatcagagcccacgaggcccaggatgccggctaccggatgtatcgcaaatcccaagctacagggtttccaagtctcatcaccatcttctctgcccctaactatctggacgtctataacaacaaggcggccgttctgaagtacgagaacaatgtcatgaacattcggcagttcaattgctcaccacacccatactggctgccaaactttatggatgtgtttacctggtcactgccgttcgtgggcgaaaaagtgaccgagatgctggtaaatgtgctgaacatttgctctgatgatgaactgatctccgacgatgaagccgaggggtctaccaccgtcaggaaagagatcatccgtaataaaatccgcgccatcggcaagatggcacgcgttttcagtattctgcgccaagagtctgaatccgttttgacattgaagggtttgacaccaacaggcacattgcctctgggcgtcctcagcgggggcaaacagaccattgaaacagccatccgcggattctctctgcagcacaagatccgctcgttcgaggaggcccgaggtctcgacagaatcaatgaacgaatgccaccgcgtaaggattccattcatgccggtgggcccatgaaatctgtgactagcgcccactcacatgctgctcacagaagcgaccaaggaaaaaaagcccacagttag

SEQ ID NO: 16894 - DNA, 345 bp, synthetic construct
  misc_feature 1..345: note = Description of Artificial Sequence: Synthetic coding sequence
  source 1..345: mol_type = other DNA
atgtattacaaatttagtggttttactcaaaaactggcaggtgcctgggcttccgaggcctattcaccacagggcctcaagcccgtcgtgtcaactgaggccccccccatcatattcgcaacaccaactaagctgacctcagacagcactgtgtacgattatgccggtaagaataaggtgcctgaactgcaaaagttcttccagaaagccgacggagtgccagtttacttaaagcgcggactccccgatcagatgctctacagaacgacaatggctcttaccgtgggtggcactatttactgtttgatagcgctgtatatggcctcacagcccaaaaataaatag

SEQ ID NO: 16895 - DNA, 522 bp, synthetic construct
  misc_feature 1..522: note = Description of Artificial Sequence: Synthetic coding sequence
  source 1..522: mol_type = other DNA
atgagtactatgggcaatgaggcgagttaccccgctgaaatgtgtagccactttgataacgacgagataaaacgtcttgggcgccgattcaaaaagcttgacctggacaaaagcggctctctgagcgtcgaggagttcatgtccctgccagaactcagacacaaccctttggtccggcgagtgatcgatgtgttcgatactgacggggatggcgaggttgacttcaaggagttcattttgggcacatctcagttctctgtaaagggagacgaggagcagaagctgagatttgcatttagcatctatgatatggataaggacggttacatcagcaatggagagttattccaggtgttgaagatgatggtaggaaacaacctcactgactggcaattacaacaattggtggacaaaacgatcatcatattggacaaggatggagacggtaaaatctcattcgaagagtttagtgccgtcgtgcgggatcttgaaatccataagaaactggtacttatcgtctag

SEQ ID NO: 16896 - DNA, 420 bp, synthetic construct
  misc_feature 1..420: note = Description of Artificial Sequence: Synthetic coding sequence
  source 1..420: mol_type = other DNA
atgtctactatggggaatgaagccagctatcctgctgagatgtgttcacactttgacaacgatgaaatcaaaaggcttggcagacgatttaaaaaactggacctcgacaagtctggcagtctgagcgttgaggaatttatgtcactgccagagctgcgtcataacccactggtaaggcgagtgattgatgtctttgataccgatggagacggtgaagtcgatttcaaagagttcattctgggtacctcacagttttctgtgaaaggcgatgaggaacagaaattacgatttgccttttctatttacgacatggacaaggatggatacatctcaaacggtgaactgtttcaggtactgaaaatgatggtagggaataacctaaccgactggcagctccagcagctggtgctcatagtgtag

SEQ ID NO: 16897 - DNA, 1818 bp, synthetic construct
  misc_feature 1..1818: note = Description of Artificial Sequence: Synthetic coding sequence
  source 1..1818: mol_type = other DNA
atggcgggtctctattcactgggagtttccgttttcagtgaccagggcggccgaaaatatatggaagatgtgacacagattgtggtggaacccgagcctaccgccgaagagaaaccgagccctcgccgctcgctctcccaaccattacccccaaggccctctcccgcagccctacctgggggggaggttagtggcaaggggccagccgtggctgctcgtgaagcccgcgaccctctgccagacgcgggggcaagcccggccccgagccgttgctgtcgccggcgcagctcagtggcatttttcgcagtttgtgatggacacggcggacgggaggcggcccagtttgccagagagcatctttggggctttatcaaaaagcagaaggggttcacttctagtgagcctgcaaaggtctgcgctgctattagaaagggttttctggcctgccacttggccatgtggaagaagctggccgagtggccgaagacaatgacagggttgccatcaactagcggcactaccgcctctgtggtgatcatcaggggaatgaaaatgtacgtcgctcacgtgggagacagcggggttgttctaggtatacaggatgatcctaaagatgacttcgtgcgggccgtggaggtgacccaggatcacaagcccgaactgcccaaggagagggagaggatcgagggactcggcggtagtgtgatgaacaagagcggtgtcaatcgtgtggtatggaaacgcccacgcttaactcacaacggccccgttagaaggagtacagtgatagaccagattcccttcctggcggtcgcacgggccctgggcgacctctggtcctacgattttttttccggcgaatttgtggtgtcaccagagccggatacgagcgtccatacccttgacccccagaaacacaagtacatcattcttggaagcgacggtttgtggaacatgattcctcctcaagacgcaatctctatgtgccaggaccaggaggaaaagaagtacctcatgggggagcacggccaatcctgcgccaagatgttagtgaaccgggcccttggacgttggcgccagcgaatgctgcgggccgataacacctcagccattgtgatctgtatttcacctgaggtggacaatcaaggcaattttaccaatgaggatgagctttatctcaacctaacggactcaccgtcctataacagtcaggaaacctgcgttatgacaccatcaccatgctcaacacctcccgtgaaaagccttgaggaagatccttggccaagggtgaactcaaaggaccacatccccgcactggtccgaagtaacgccttctctgagaacttccttgaggtctccgccgagattgcgcgggagaatgtgcagggtgttgtgattccctcaaaggatcccgaaccactggaggaaaactgcgccaaagcgcttaccctgcggatccatgacagcctgaacaattcgctgcctattggattagtgcccactaactccaccaatacggtcatggaccagaagaacctcaagatgagtacacctggacagatgaaagcgcaggagattgaaagaaccccaccaacaaacttcaagcggacactcgaggaaagtaactcaggtccactgatgaaaaaacacagacggaacggactctcaaggagctcgggagctcagcctgcgtccctgccgaccactagtcagcggaaaaacagcgtgaaactcacgatgaggcgaaggctgcggggacagaaaaaaatagggaacccactacttcatcaacacagaaaaaccgtgtgtgtgtgttag

SEQ ID NO: 16898 - DNA, 1293 bp, synthetic construct
  misc_feature 1..1293: note = Description of Artificial Sequence: Synthetic coding sequence
  source 1..1293: mol_type = other DNA
atggcaggtttatacagtcttggagtgagtgtattcagtgaccagggaggccgtaagtacatggaagatgtgactcagattgttgtggagcctgaaccgactgctgaagagaaaccctctccacggaggagcttgagccaaccgctccctcctcgaccatcgcctgccgctctgcccggcggcgaggtgtccgggaagggaccagcggtcgccgcgcgtgaggcacgtgacccgcttcctgatgccggagcctcgcctgcaccctcacggtgttgcagacggcgtagctctgtggctttttttgcagtgtgcgatgggcatggcggacgtgaggcagcccagttcgccagggaacatctttggggttttatcaaaaagcagaaaggcttcaccagcagcgagcctgcaaaggtgtgcgccgcaatccggaaaggattcttagcgtgccacctggctatgtggaagaaactggctgaatggcccaagacaatgactggcctgccttccacaagcggtaccactgcgagcgtggtgattattcgggggatgaagatgtacgtcgcgcacgtgggcgacagcggcgtggtactcggaatccaggacgatccaaaagacgacttcgtgcgggcagtggaggttactcaagatcataagccagagctgcctaaggagcgggagcggattgaaggcctcggaggatcagttatgaacaagagcggagtgaatagagttgtgtggaagaggccaagacttacccacaacgggccggtgagaaggagcacagtaatagatcaaattccttttctggctgtggcacgggctctgggggatctgtggtcatacgacttcttttcaggagaatttgtggtgagcccagagcccgacaccagcgttcacaccctcgaccctcaaaaacacaaatacataatcctcggctctgatggtctgtggaacatgattcccccccaagacgctatctcgatgtgtcaagatcaagaagaaaagaagtacctcatgggggaacatggacaaagttgcgccaagatgctggtgaaccgagcgctcggaaggtggagacagagaatgctgagggccgacaacacttcggccattgtgatctgtatctctcccgaggtggacaatcagggcaactttacaaatgaagacgaactgtacctaaacttaaccgactcaccctcatacaattcccaagagacgtgcgtaatgacgccaagcccttgttcaacgccgcccgtgaaggactttggcttcgaattggactcccgtaaatag

SEQ ID NO: 16899 - DNA, 837 bp, synthetic construct
  misc_feature 1..837: note = Description of Artificial Sequence: Synthetic coding sequence
  source 1..837: mol_type = other DNA
atgtggaaaaagctagctgaatggcctaagactatgaccgggttaccctctacctccgggaccacagcgtccgtggtcatcatccggggcatgaaaatgtacgtggcacacgttggggattcaggcgtggtgctggggattcaggacgaccctaaagacgacttcgtacgcgctgtagaggtcacccaagaccataaaccggaactcccgaaagagagggaacgaattgaagggttaggggggagtgtgatgaataaatcaggggtaaatcgggtagtgtggaagcgaccgaggcttacacacaacggtcccgtaaggcgctcaaccgtgatcgatcagatacctttcttagctgtcgcacgcgccttaggcgatctgtggagttatgacttcttttcaggcgaatttgtagtgtcccctgaaccggacacatccgtgcatacactggatccacagaagcataagtacattatcttaggctctgacggtctgtggaacatgattccaccccaggacgccatctctatgtgccaggatcaagaagaaaagaaatacctgatgggcgaacatggacagagttgtgccaagatgctggtgaatcgcgccctgggccgatggcggcaacgcatgctccgggccgacaacacctcggcaattgtcatctgcatctcgcccgaggttgataaccagggaaatttcacaaacgaagacgaactgtacctgaatctgactgattcaccctcttacaactctcaggagacctgtgtcatgactccctcaccctgctcaactcctcccgtcaaagactttggtttcgaactggacagtaggaagtag

SEQ ID NO: 16900 - DNA, 3432 bp, synthetic construct
  misc_feature 1..3432: note = Description of Artificial Sequence: Synthetic coding sequence
  source 1..3432: mol_type = other DNA
atgtatttgtggctaaagctattagcattcggcttcgcttttttagatacagaggttttcgtcaccggccaaagtccaacaccgtccccaaccgatgcttacttaaatgcatccgagaccaccactctcagtcctagcgggtctgcagtgattagcacaactacgatagcaactaccccctcaaagccgacctgcgatgagaaatacgctaacattacagttgactatctgtataacaaagaaacgaaactttttaccgccaaacttaacgttaatgaaaacgtggaatgcggaaataacacttgtaccaacaacgaggttcacaacttgactgagtgcaagaacgcctctgttagtatatcacataacagctgcactgctcccgacaagacattgatcctcgacgtgccacccggggtcgagaagttccagctacatgactgtacccaggtggagaaggccgatacaaccatttgcctgaagtggaagaacattgagaccttcacctgcgatacccagaacattacttatcggttccagtgtgggaatatgatcttcgacaacaaagagataaaacttgagaacctggagcctgagcacgagtacaagtgtgactccgagatactctataataatcataaattcactaacgcttcgaagatcataaagacagatttcggcagccctggcgagccccagatcattttctgccgttctgaggcagctcatcaaggagtgatcacctggaatccccctcaacggtcattccataacttcacgctctgctacatcaaagagaccgagaaggattgtttaaacctggacaaaaacctgattaaatatgacctccagaatctgaagccctataccaaatatgtcctgagcctccacgcatatataatcgccaaggtccagcgcaatggcagtgccgctatgtgccactttaccactaagtctgctccgccatcccaggtgtggaacatgactgtctctatgaccagtgacaactctatgcacgtgaaatgcaggccaccgcgggaccggaacgggccccatgaacggtaccatctggaggtagaggccgggaacaccctagtgcgcaatgagtcccataagaactgcgattttcgagttaaagacctccagtattccacagattacacgtttaaggcctatttccacaatggagactaccctggagagccattcatactgcaccacagtacatcgtataactccaaggctttaatagcattcctggcatttctcattattgtcaccagcatcgcattgctggtagtcctctataagatttacgacctccacaaaaagagaagttgcaacctggacgaacaacaagagctggtcgagcgggacgacgaaaagcagctgatgaatgttgagcccattcacgccgacatcctcctggagacatacaagcggaagatcgccgatgagggccgcctctttttggcagaatttcagtccatcccacgcgtctttagtaaattccccatcaaggaggctcggaagcccttcaaccagaacaagaaccgatatgtggatatcctcccatacgattacaaccgtgttgagctgagtgagataaacggggacgccggcagtaattatatcaatgctagctatatcgacggcttcaaggaacctcgcaaatatattgcggctcagggccccagagacgagactgtggacgatttctggagaatgatttgggagcagaaagcaacggtcatagtgatggtgactagatgtgaagaaggcaatcggaataagtgcgccgagtactggccctccatggaggaggggactagagcatttggtgatgtggtcgtgaaaatcaaccagcataaaaggtgcccagactacatcattcagaagcttaacatagtcaataagaaagagaaggccacagggcgcgaggtaacccacatccaattcacatcttggcctgaccatggagtccctgaggacccacatctgctcctgaagttgagaagacgggtaaacgcattttctaatttcttttcagggcctatcgtagtccactgctccgctggagtcggacgtacaggaacatacataggcattgacgctatgctcgaaggtctggaagccgagaataaggttgatgtctatggctacgtggttaagctaagacgtcagcgctgcttgatggtccaggtggaagcacagtatatcctgatccatcaggctctcgtcgagtacaatcagtttggtgagacagaggtcaacctcagcgagctgcatccttatttgcacaatatgaagaagagagatccaccctcagaaccatctcctctggaagctgaattccagcggctgcctagctaccgaagttggcgcactcagcacatcggtaatcaggaggagaataaaagtaagaaccgcaattctaacgtaattccatatgactataaccgagttcctcttaaacatgagctggagatgtctaaggagagcgaacacgatagcgacgaatcaagtgacgacgacagcgactccgaggagccatctaaatatatcaacgcctcctttatcatgtcctactggaagcctgaagtcatgatcgccgctcagggccccttgaaagagaccataggcgacttttggcagatgatcttccaaaggaaggtcaaagtcatcgtaatgctaacagagctgaaacatggcgaccaggaaatctgcgcccagtactggggcgagggtaaacagacatatggcgacattgaagtggacctgaaggatactgataaatcatctacatacactttgcgggtctttgagctgagacactcgaaacggaaagactcgcgcaccgtgtatcagtaccagtatacaaactggagcgtcgaacaactgccagccgagccaaaagagctcatcagtatgattcaggttgtgaaacagaaattacctcagaagaactcatctgaggggaataagcaccataagagcaccccgctgctgatacactgtagggatggtagccaacaaactggcattttttgtgctctactgaatctcctcgagtctgcggagacggaggaagttgtggacatattccaggtagtaaaagccctgcgtaaggcacgtccaggaatggtttccacatttgaacagtatcagtttctttatgacgtcattgcatccacctacccagcccagaacggtcaagttaaaaaaaacaaccaccaggaagacaagattgaatttgacaatgaggtggataaggtgaaacaggacgccaattgcgtgaatcctctaggcgctcccgaaaagctgcctgaagcgaaggagcaggccgaaggcagcgagcccacttccggaacagaaggtcctgaacacagcgttaacgggcccgcttcccctgcgttgaaccaaggttcatag

SEQ ID NO: 16901 - DNA, 105 bp, synthetic construct
  misc_feature 1..105: note = Description of Artificial Sequence: Synthetic coding sequence
  source 1..105: mol_type = other DNA
atgtacctgtggctgaagttgctcgcttttggtttcgccttcctggacaccgaagtgtttgtaacaggacaatcacctaccccgtcccccaccggtaaaaattag

SEQ ID NO: 16902 - DNA, 447 bp, synthetic construct
  misc_feature 1..447: note = Description of Artificial Sequence: Synthetic coding sequence
  source 1..447: mol_type = other DNA
atggcacgcatgaacaggccagcccccgtggaggtgacctacaagaatatgaggtttctcatcacccataaccccaccaatgccacccttaataagttcatcgaggagctgaagaagtacggcgtaacaactatcgtgagggtgtgcgaggccacatacgatacaacgctcgttgaaaaagagggcatccacgtgctcgactggccctttgatgatggcgcacctccttccaatcagatcgtggatgattggctgagtcttgtcaaaattaagtttcgggaagaaccagggtgttgcattgcagtgcactgcgtcgctggactcggccgcaagcgtagaggagccttcaattcaaagcagctcctatatttagaaaagtacaggccgaagatgagacttcgctttaaagattctaacggacaccggaacaactgctgcatccagtag

SEQ ID NO: 16903 - DNA, 447 bp, synthetic construct
  misc_feature 1..447: note = Description of Artificial Sequence: Synthetic coding sequence
  source 1..447: mol_type = other DNA
atggctcgcatgaaccggcctgccccggttgaggtgacctacaagaatatgaggttcctaattacgcataatccgactaatgccactctcaacaagttcattgaagagctgaaaaagtacggagtaaccactatcgtgcgtgtatgcgaggccacgtatgatacgacactcgtggaaaaggaaggaatacacgtgctagactggcccttcgatgatggggcaccccccagcaatcagatcgtggatgattggctttcactggtaaagatcaagttcagagaggaaccgggatgttgcattgccgtgcactgcgtggcaggcctgggccgcaagcggaggggcgcctttaattcaaagcaattactgtacctggaaaaatatcgcccaaaaatgagactacgctttaaagattccaacggccaccgaaataattgttgcattcagtag

SEQ ID NO: 16904 - DNA, 522 bp, synthetic construct
  misc_feature 1..522: note = Description of Artificial Sequence: Synthetic coding sequence
  source 1..522: mol_type = other DNA
atggctcggatgaaccgccccgcgccagtggaagtcacttataagaatatgagattcctgataacccataacccaactaacgctactctcaacaaattcatcgaggaattgaagaaatacggagtgactactatcgtgcgcgtgtgcgaagctacatacgatactacgctggtggaaaaagagggcattcacgtcttagactggccatttgacgatggtgcgcctccgagtaaccagatcgtagatgactggctgagcttagtgaaaatcaagtttcgcgaggaacccgggtgctgtatcgcagtccattgcgtcgccggtctaggtagagctcccgtgttggtggcgcttgccctcatcgagggaggaatgaaatatgaagacgccgtccagttcatccggcagaagagaaggggggcgttcaactccaaacagctactttacttggagaagtacaggcccaagatgagactcaggttcaaggattcaaacggacacaggaataattgctgcatacaatag

SEQ ID NO: 16905 - DNA, 1308 bp, synthetic construct
  misc_feature 1..1308: note = Description of Artificial Sequence: Synthetic coding sequence
  source 1..1308: mol_type = other DNA
atggaaatggaaaaggagtttgagcagatcgataaatccggttcctgggctgctatctatcaggatatcagacatgaggcctccgactttccatgcagggttgctaaactgcctaagaataaaaaccgaaacaggtaccgcgacgtgagccctttcgaccactcccggatcaaactgcaccaggaggacaatgattatattaacgccagcctcattaagatggaagaagcccagagatcatacatcctgacacaggggccattgcctaacacttgcggccatttttgggaaatggtgtgggaacagaaaagtcgaggcgtcgttatgctcaatcgcgtgatggaaaaagggagcctgaaatgcgcacagtattggcctcagaaggaggagaaggaaatgattttcgaggataccaacctgaagctgactctgatctccgaggatattaagagctattacacagtacgtcagttagagctcgagaatctgacaacgcaagagacgcgcgagatattacactttcattatacgacgtggcccgacttcggggtgccagaatcccccgcctcattcctcaatttcctgttcaaagttcgagagtccgggtccctctctccagaacatggaccagtggtggtacattgctcagctggcatcgggcgtagcggcacgttctgcctggcagacacctgcctcctgctgatggacaagagaaaggaccccagcagcgtggatataaagaaagtgcttctggaaatgcggaagtttaggatgggccttatacagactgcagaccagctgcgattttcttacctcgcggtgattgagggagccaaatttatcatgggggacagtagtgtgcaggaccagtggaaagagttaagccacgaggatctggaaccgcccccggaacatataccacccccccctcggccgccgaaacggattctggagcctcacaacggaaagtgtagggaattttttcccaatcatcagtgggtcaaggaggaaacccaagaggataaggattgcccaataaaggaagaaaagggtagtccactgaatgcggccccgtatgggatcgaaagcatgtcccaggacactgaagttagaagcagggttgtcggtgggagcctgcgcggggcgcaagcagcgtccccggccaagggtgaacccagcctgcccgagaaggacgaggatcacgcactatcttattggaagccttttctggtgaatatgtgtgtcgccaccgtgctaacagccggggcctatctgtgctaccgcttcctattcaatagcaatacatag

SEQ ID NO: 16906 - DNA, 1089 bp, synthetic construct
  misc_feature 1..1089: note = Description of Artificial Sequence: Synthetic coding sequence
  source 1..1089: mol_type = other DNA
atggaggaggctcagcgttcctatatcctgacacaaggcccattgcccaatacttgtggacatttctgggaaatggtctgggaacagaagtctagaggagtcgtgatgctgaatcgcgtgatggaaaagggatccttaaaatgtgcccagtattggcctcaaaaagaggaaaaagagatgatttttgaagacacgaatttgaaactcactctcattagtgaagacattaagagctactacaccgtgagacaactagaattggaaaaccttaccacacaagagactcgagaaatcctacacttccattatacaacctggcctgacttcggcgtccctgaatctccagcttccttcctaaactttttgtttaaggtgcgagaatccggatccttgagtcccgaacatggcccggttgtagtacattgttctgcaggtattggccgctccggcacgttctgtctcgctgatacctgtctcctgttgatggataagagaaaagatcctagctctgtggatatcaagaaagtacttttggagatgagaaaattcaggatgggcctcattcagacagctgaccagctcaggttcagttatctcgcagtgatagaaggggctaaatttataatgggcgactccagtgtacaggatcagtggaaagaactgagtcacgaggacctggaaccaccgcctgagcacattcccccccccccacgtcctcccaagaggatcctggaaccccacaacggaaagtgtagagagtttttccctaatcaccagtgggttaaagaggaaacgcaggaagacaaggactgtccaataaaggaggagaagggatccccattgaacgccgcaccatatgggatcgagtcaatgtcacaagacaccgaggtgcgttctagagttgttggcggctccctcaggggagcacaggctgccagcccggctaagggggagccaagtctacctgagaaggatgaggatcacgcgctctcatactggaagcccttcttggtgaacatgtgcgtggctaccgtgctcaccgctggggcgtatctatgttacaggtttctgtttaatagcaacacctag

SEQ ID NO: 16907 - DNA, 1782 bp, synthetic construct
  misc_feature 1..1782: note = Description of Artificial Sequence: Synthetic coding sequence
  source 1..1782: mol_type = other DNA
atgacctcacgacgatggtttcaccctaatatcacaggcgtggaggccgagaacttgttgctgaccagaggagtagatggttcctttctcgcccggccatccaagtctaaccctggggattttaccttatccgtgcgtcgcaatggtgctgtgacacacatcaaaatccagaatactggggattactatgacctgtacggcggcgaaaagtttgcgacattggctgagctggtacaatattacatggaacatcacggacagctgaaggaaaagaatggagatgtgattgagctcaagtatcccctaaattgcgcagatccgactagcgaaagatggttccacggccacctgtcaggtaaagaagctgaaaagcttttgaccgagaagggcaagcacggatcctttctggttcgggagagccagtcccatccaggcgacttcgtcctctccgtccgcactggcgacgacaaaggggagagcaacgatggcaagtctaaggttactcacgtgatgattagatgccaggagcttaagtacgatgtcggtggcggtgagcggttcgactctttaacagatcttgtggaacactacaaaaagaacccaatggtggaaacattaggcacagttctgcaattaaagcaacccctgaacacaacccggataaacgccgccgagatcgagagtcgggtccgggagctttctaaactcgcggagaccactgataaggtgaaacaggggttttgggaggaattcgagactctgcaacagcaggaatgtaaactcttatactcgcggaaggagggccagcgccaagagaataaaaataaaaatcggtataaaaacattctgccgtttgaccacacacgtgtcgtcctccatgacggagatcccaatgagcccgtgtcagattacattaacgccaacatcatcatgccagaattcgagactaagtgcaacaatagcaagcctaaaaaatcctatatcgccacccagggatgcctacagaacactgttaacgacttttggagaatggtgttccaggaaaactctagggtgattgtgatgaccactaaagaagtcgagagaggcaaaagcaaatgtgtgaaatattggcctgatgagtacgccctcaaagagtatggggtcatgcgggtacggaacgttaaggaatctgcagctcatgattatactctgcgggaattgaaattaagtaaggttggccagggtaataccgagcgtaccgtgtggcaataccattttcgaacatggcccgatcatggcgtgccgtcagatccgggaggggtcctggatttccttgaagaagtgcatcataagcaggagagcatcatggacgcaggtcccgtggtggtgcactgttcagcaggtatcggccgaacaggtacttttatagtgatcgatatcctgatagatatcatccgcgaaaagggagtagattgcgacatagatgtgcctaaaaccatccagatggtccgcagtcagcggtcaggaatggtacagaccgaagcacaatataggttcatctatatggctgtgcagcactacattgagacactgcagagaagaatcgaagaagaacaaaaaagcaaaaggaagggtcatgagtatacaaacatcaagtatagtctcgcggatcagactagtggtgatcaaagcccactccctccctgtacgccgaccccaccttgcgccgagatgcgcgaggatagcgcacgcgtctacgagaatgtaggcctcatgcagcaacagaaatcttttcgctag

SEQ ID NO: 16908 - DNA, 651 bp, synthetic construct
  misc_feature 1..651: note = Description of Artificial Sequence: Synthetic coding sequence
  source 1..651: mol_type = other DNA
atgaccagtaggcgctggttccacccaaacatcaccggggtagaagccgagaatttactgctcactcggggagtggacgggtctttcctggcaagaccgagcaaatccaatcccggtgacttcaccctgagcgtcaggcgcaatggcgctgtcactcacatcaagattcaaaacacaggggactactacgatttgtacggaggcgagaagttcgctaccctggccgagcttgtgcagtactatatggagcaccatggacaactcaaggagaagaatggcgatgtaatcgaactaaagtaccccctgaactgcgccgaccccaccagcgaaagatggttccacgggcacctaagtggtaaggaagccgagaaactccttacagagaaagggaagcacgggtcattcctggtgagggaatctcagagccatcctggcgacttcgttctgtcagtgaggacgggagatgataagggcgagtcaaatgacgggaaatcaaaggttacccatgttatgatcaggtgccaagaacttaagtacgacgtgggcggcggggaacgatttgattcccttaccgacctcgtggagcattacaaaaaaaatcctatggtggagaccctcgggactgttctgcagctaaagcagcccctttag

SEQ ID NO: 16909 - DNA, 1383 bp, synthetic construct
  misc_feature 1..1383: note = Description of Artificial Sequence: Synthetic coding sequence
  source 1..1383: mol_type = other DNA
atgacgtctcgtagatggttccatccgaacattaccggcgttgaggccgaaaacctgctcctgacacgcggagtggatggctccttcttggcaaggcccagtaagagtaatcccggggacttcacactatctgtccgcagaaacggagccgtcacgcacattaagattcagaacacaggcgactactacgacctgtacggtggtgagaagttcgccactctggctgagctcgttcagtattatatggagcaccatggacagcttaaagaaaaaaacggggatgtgattgagctgaaatatcctcttaattgcgcagaccctacatcggagcggtggttccacgggcatctgtcgggaaaagaagccgagaaattgctgactgagaagggaaagcatggaagctttctcgtgcgcgaatcccagtcccatccaggggactttgtgctgtccgtgcgtacaggcgacgacaaaggtgagagcaacgacggcaaatcgaaggtcacccatgtgatgatcaggtgccaggagctgaaatatgatgtgggtggcggagagcgttttgactccttaacggacctggtggagcattacaaaaagaatcccatggtcgagacactcggtactgtcttacaacttaagcagcccctgaataccacacgaattaatgccgccgagatagaatctcgagtgcgggaactgtctaagctggccgaaacaactgacaaagtgaagcagggtttctgggaggaatttgagactctccagcaacaagagtgtaaattgctttactctcgcaaagaggggcagagacaggaaaataagaataagaatagatacaaaaatatattgccattcgatcacacaagggtcgtgctgcatgacggagatcccaacgagcctgtttctgattatataaacgccaacataataatgcctgaatttgaaacaaagtgtaataacagtaaacctaagaaatcctatatagccacgcagggatgtctgcagaatacagtaaacgacttctggcggatggttttccaagaaaacagccgcgttattgtgatgactactaaagaagttgagcgcgggaaatccaagtgtgtgaaatattggccggacgagtacgccctgaaggaatacggagtgatgagggttagaaatgtaaaggagtccgcggcgcacgactacacacttcgtgaactcaagcttagtaaagtgggacaggggaatactgaacgtacagtctggcagtatcacttccggacgtggcccgaccacggcgtgccttcagaccctggcggcgttctggacttcctggaggaagtccaccacaaacaggagtccatcatggacgcaggcccagtggtggtccattgcaggtag

SEQ ID NO: 16910 - DNA, 723 bp, synthetic construct
  misc_feature 1..723: note = Description of Artificial Sequence: Synthetic coding sequence
  source 1..723: mol_type = other DNA
atgtacctctggctgaaactgctggccttcgggttcgcctttctggatactgaagtgttcgtcaccgggcaatcacccacgccaagcccgacaggccacctccaggccgaggagcagggaagtcagtcaaagtcacccaatctcaagagtagggaggccgactcatccgctttctcttggtggcccaaggctcgcgagcccctgaccaaccactggcgcttaacaaccgccaaaatgccaagcgtaccgctgagctccgatcctttaccaactcacacgactgccttctcccctgcctcaacgtttgagcgcgaaaacgatttctctgaaacaactacgagcctgtcgcccgataatactagcacacaggtttcgcccgattctctggataatgcgtccgcattcaataccactggagtatcgtcagtgcagactccccacttacccacccatgctgacagtcagactccaagcgccggcacagacacccagaccttctcaggatccgccgcaaacgccaagctgaacccaacgcccggaagcaacgcaatttctgatgtgccgggcgaacgctccactgcctccacatttcctactgatcctgtctctcccttgactacgacgctgtctctagcacaccattctagcgcggcattacccgcccgcacctcaaatactactatcactgctaatacttccgatgcttacctgaacgcttcttag

SEQ ID NO: 16911 - DNA, 3432 bp, synthetic construct
  misc_feature 1..3432: note = Description of Artificial Sequence: Synthetic coding sequence
  source 1..3432: mol_type = other DNA
atgtacctctggctgaagcttttagcctttgggtttgccttcttagatacggaggtcttcgttaccggtcagagcccgacccccagtccaacagacgcttacttaaacgcctccgagacaactaccctgtctccgtctggaagtgctgtgatatctacaaccaccatcgccaccactccatccaagccaacatgcgatgagaaatacgcaaacataaccgtggactacctctataacaaggagaccaagttgttcacagcaaagctgaacgtcaatgagaacgtagagtgcggcaataacacatgcactaataatgaagtacacaatctcaccgagtgcaaaaatgcttccgtatccatctctcataatagctgcaccgcacccgataaaactcttattctcgacgtgccccccggcgtcgagaaatttcagttgcatgactgtacacaggtggagaaggctgacacaactatctgcttgaagtggaagaatatcgagacattcacgtgtgatactcagaacattacgtacagatttcagtgtggtaacatgatttttgataacaaagaaattaagctggaaaacctggagccggaacatgagtacaagtgtgattccgagatcctatacaataatcataagtttacgaacgccagcaagattattaaaaccgactttggctctcctggggagccgcagatcatattttgccgcagcgaggctgcccaccagggcgtcatcacttggaacccacctcagagaagcttccacaacttcacactgtgctatattaaggaaacagagaaagactgcctgaacctggataaaaatttaataaaatatgaccttcagaatttgaagccttataccaagtatgtgctgagtttgcatgcctacatcatagcaaaggtgcagaggaacggttcagccgctatgtgtcactttactaccaaaagcgcccccccttcacaggtctggaacatgactgtctcaatgaccagcgataactcaatgcacgtcaaatgcaggccaccaagagacagaaatggaccgcatgagagataccacttggaggtggaagctgggaacaccctggttaggaacgagagccacaaaaattgcgactttcgtgtcaaagacttacagtatagtactgactatacatttaaggcctatttccacaatggcgactacccgggcgaaccgttcatccttcatcattcaacaagctacaatagcaaagccttgatcgccttcctagcctttctaattatagtaaccagtatcgccttactggtggtcctgtataagatttatgacctccacaaaaaaagatcttgcaatctggacgagcaacaagagctggtcgagagagatgacgagaaacagctgatgaacgtcgagcccatccacgcagatattttgctggagacatacaagaggaaaattgccgacgagggcaggctctttctggctgaattccaatcaattccgagggtgttcagcaagtttcccatcaaggaggcacgcaagccttttaatcaaaacaaaaaccggtacgtagacattctgccttacgactacaaccgtgtggagctgagtgaaatcaacggtgacgcaggttccaattatatcaatgcaagttacatcgacgggttcaaagaaccaagaaagtacatcgccgcccagggtccgcgcgacgagacggtggacgacttctggaggatgatctgggagcagaaggccacagtgattgtgatggtgacccgatgtgaggaaggcaataggaataaatgtgcagagtactggcccagtatggaggaaggcacgcgtgctttcggcgacgtcgtagtcaagataaaccagcacaagcgctgccccgattacatcatccagaagcttaacatcgtaaataaaaaagagaaggctactggcagagaggtgacacatattcaatttactagctggcctgatcacggcgttccggaggaccctcacctcttactgaagctcagacgaagagtcaatgcattctctaatttcttctcaggcccaatcgtcgtgcactgtagtgccggtgtaggccggactggcacgtacatcggtatcgacgctatgttagaggggttggaggctgagaataaggtcgacgtgtatggatacgttgtgaaattgcgccggcagcggtgcctgatggtgcaggttgaagctcagtacatccttatccatcaggccctcgtggaatataaccaatttggcgagacagaggtcaatctgagtgagctgcatccttacctccacaacatgaagaagcgggatcctccctctgagcctagccctctagaggccgaatttcagaggttaccttcctatcggtcatggcgtacacagcacattggcaatcaagaggagaataagtcgaagaatcgaaacagcaacgttattccatatgactacaaccgggtgcctctgaagcatgaattagaaatgagcaaggagagcgagcatgacagtgatgaatcaagcgatgacgattcagactccgaagaaccttcaaaatacatcaatgccagctttatcatgtcgtactggaaacctgaggtgatgatcgcagcacagggccctcttaaagagactattggggatttttggcaaatgatattccaacggaaggttaaggtcattgttatgttgaccgagctgaagcatggagaccaagaaatttgcgcccagtactggggagagggaaagcagacctatggcgatattgaggtggatctgaaagacacggacaaatcgagcacctataccttgcgcgttttcgagctgcggcatagtaagcggaaggactctcgcactgtctaccaatatcagtatacaaattggagtgtggagcaactgccagcagagcccaaggagttgatatccatgatacaggtggtgaaacagaagttgcctcagaaaaacagcagtgaggggaataagcatcataaatcaacgccccttctgatccattgtagggacgggtctcaacaaaccggcatcttctgcgctctgctcaatctgttagagtcagcggaaacagaagaagtcgtggatatatttcaggtggtgaaagccctgcgcaaagctcggcccggaatggtgtccacattcgaacagtatcagtttctctacgacgtgattgcctcgacctaccccgcacagaacggtcaagtgaaaaagaacaatcatcaggaagacaagattgaattcgataatgaggtggataaggttaagcaggatgctaactgtgttaacccattgggggcccctgaaaagctgccagaggccaaagagcaggctgagggctccgagcccacatccggaaccgaggggcccgaacacagcgtgaatgggcccgccagtcctgctctgaaccagggaagctag

SEQ ID NO: 16912 - DNA, 3771 bp, synthetic construct
  misc_feature 1..3771: note = Description of Artificial Sequence: Synthetic coding sequence
  source 1..3771: mol_type = other DNA
atgtatttgtggcttaaactgctggcattcggattcgcgttcttggacacagaggtctttgtaactggtcagtcgccgaccccatctcctacaggcctgactactgcgaagatgccatctgtgccattgtcctctgaccccctgcctactcacactactgccttttcgcctgcttccaccttcgagcgggagaatgacttcagcgagaccaccacatccttatcacccgacaacacgagcacccaggtgtcacccgattccttggataatgccagcgcctttaatacgaccggagtgtcctccgttcagaccccccatctgccaacgcatgccgattcccagacgccctcggccggtactgacacccaaacattctctgggtcggctgccaatgccaaattaaatccaaccccgggctcaaacgccatcagcgacgcttatctgaatgcctctgagactaccacactgtctcctagtgggtcggctgtcatctccacgactactattgctaccacacccagcaaaccaacctgcgacgaaaaatatgctaacattaccgtggactacctgtacaataaggaaactaagctgtttacagccaaactgaacgtcaacgaaaacgtggaatgcggcaacaatacttgcaccaataatgaagttcataacttaacggagtgtaagaacgcctctgtaagtattagccataacagctgcaccgcgccagacaaaacactgatcctggatgtgcctcctggtgtcgagaagtttcaactgcacgactgcacacaggtggagaaggcagacaccaccatttgccttaaatggaaaaatattgaaaccttcacctgcgacacccagaacataacatataggttccagtgcgggaacatgatcttcgacaacaaggagataaaactcgaaaatcttgagcccgagcatgagtacaagtgcgacagcgagatcctttacaataatcacaagttcacaaatgcttctaagattataaagactgactttggatcgcctggagaacctcaaatcatattttgtcgcagtgaggccgcccaccagggggtgatcacctggaacccccctcagagatccttccacaatttcacactatgctacataaaggaaaccgagaaggattgtctgaacttggataagaacctgattaagtacgacttacagaatcttaagccgtataccaagtacgtcttgtctctccacgcatatattatcgccaaagtgcagcggaatgggtccgccgccatgtgtcacttcaccactaagagtgcccctccctcacaggtgtggaacatgactgtatctatgacgtccgataattctatgcacgtcaaatgccgcccaccgcgcgacagaaacggtccccatgaacgataccatcttgaggtggaggcgggcaataccctggtcaggaacgagagccacaagaattgcgacttcagggtgaaagacctgcagtatagtacagactacacatttaaagcgtattttcataacggtgattatcccggggagcctttcattctccaccactccacaagctacaattccaaagccctgatcgcgttcctggcatttctcataatcgtgacaagcattgctcttctggtagtgctttataagatttacgatcttcacaagaagcggtcttgcaacctggatgagcagcaagagttagtcgaacgtgacgatgagaaacagctcatgaatgtggagcctattcacgccgacatcttgctggaaacttacaagcggaaaatcgccgatgagggtagactgttccttgctgaatttcagagtattccgagagtcttctcaaagttcccaattaaggaggcaagaaagcctttcaatcagaataaaaaccggtacgtggacatcttaccatacgactataacagggtagagctgtctgagatcaatggagacgccgggtccaactacattaacgcatcctacattgacggctttaaagaaccgcgcaagtatatcgccgcacagggcccgagagacgaaactgtcgacgatttttggagaatgatttgggagcagaaggcaaccgtgattgttatggtcactcggtgtgaggaagggaataggaataaatgcgcagagtactggccttctatggaggaaggtacacgggctttcggtgatgttgtcgtgaagattaatcagcacaagcggtgtcccgactacatcattcaaaaactgaatatagtgaataagaaagagaaggccacgggtagggaagttacgcacatccagttcaccagctggcctgaccatggcgtcccggaggatcctcatctgttgcttaagcttaggaggagggtgaatgccttttccaactttttcagtgggccaattgtcgttcactgtagtgctggagtgggccggaccggaacgtatataggcattgacgcaatgctcgagggattagaggcagaaaacaaggtggatgtgtatggctacgtggtgaagttacggagacaacggtgtctaatggtgcaggtggaagcgcagtacattctcattcatcaggcgctcgtggagtacaatcaatttggggaaactgaagtcaacctctctgagctgcacccctatttacacaacatgaagaagagagatccccctagcgaaccgtcccctctggaagcagagttccagaggttgccctcttatcgctcctggcggacacagcacatcgggaatcaagaggagaataagtctaaaaaccgcaacagcaatgtcattccttatgactataatcgagtacctctgaagcacgaacttgagatgtccaaggagagtgagcatgactccgacgaatctagtgatgacgactctgacagcgaggagccctccaaatatataaacgcatcctttatcatgtcttactggaaacccgaggtgatgattgctgcccaggggccactcaaagagaccattggcgatttttggcagatgatctttcagcgaaaagtgaaggtgatagttatgctgactgagcttaagcacggcgatcaggagatctgtgcccagtactggggtgaaggaaagcagacatatggtgatatagaagtggacctgaaggatacagacaagtcatccacctatactttgagggtgttcgagctgcgtcatagtaagagaaaggacagccgtaccgtgtaccagtaccagtataccaactggtctgtagagcagctccccgccgagcctaaggagctcatatccatgatacaggtcgtgaaacagaagctgcctcaaaaaaactcttccgagggaaataaacaccataaaagcacaccacttcttatccactgtagagacgggtctcagcagacaggcatcttctgtgctctgctgaacttactggaatcagctgagacggaggaagtcgttgacatctttcaggttgtgaaggcgctgcggaaggctaggccgggaatggtgtcaacgtttgaacaatatcagttcttatatgacgttatcgccagtacctatccagcgcagaatggccaagtcaagaaaaacaatcatcaggaagacaagatagaatttgataatgaggtggataaagtgaaacaagatgccaactgcgttaacccgctgggagctccagagaagctgccggaagccaaggagcaggcagagggtagcgagcctacatctggtactgaagggcccgagcactctgtgaatggacccgcctcaccagcactgaaccaaggatcctag

SEQ ID NO: 16913 - DNA, 2208 bp, synthetic construct
  misc_feature 1..2208: note = Description of Artificial Sequence: Synthetic coding sequence
  source 1..2208: mol_type = other DNA
atgaccatgtatctgtggcttaaactgctcgcctttggtttcgcattcctggatacggaagtctttgtgaccggacagagtcctacccctagtcccactggagtctcgtccgtgcagacaccgcaccttcctacccacgctgattctcaaacaccctccgcgggtaccgacactcagaccttttcaggctccgctgcaaatgccaaactgaacccgaccccagggtcgaatgctatctccgatgtcccgggagagcgttctactgcctcgacatttcctacagaccctgtctcccctttgacaactaccttgtcactggctcatcactcttctgcagcccttcctgccagaacgagcaatacgacaattaccgcgaacacctctgatgcatatttgaacgcgagtgaaactactactctctccccttccggttctgccgtgatttcgacaactactattgcaaccactccatctaagccaacatgcgatgagaaatatgccaacataacagtggactacctttacaataaagagactaaactgttcacagccaaactcaatgtgaatgagaatgttgagtgcggaaacaatacgtgcactaataatgaagtgcacaatctgaccgaatgtaaaaatgcttccgtgtctattagccataactcctgtactgcaccagacaagaccctaatccttgatgtaccaccaggagtcgagaagtttcagctgcacgactgtactcaagtcgagaaagccgatactactatctgtcttaaatggaagaacattgagacttttacctgcgatacccagaatatcacatatagatttcagtgcggaaacatgatcttcgacaataaggagatcaaactagaaaacttggaacccgagcacgagtacaagtgcgactctgagattctgtacaacaatcacaagttcacgaatgcctcgaaaatcatcaagaccgacttcgggtcccccggcgagcctcagatcatcttctgccgatcagaggctgcacatcaaggtgtgatcacctggaatcctcctcaacggtcctttcacaacttcactttatgttacatcaaagagacggaaaaggactgtctgaaccttgataaaaacctgatcaagtacgatctgcagaacctgaagccatatactaagtacgtgctatccctgcacgcgtacatcatcgccaaggtacaacggaacgggtcggcagcgatgtgccattttaccacaaagtccgcacctccttcccaggtatggaacatgacagttagtatgacttcggataatagtatgcacgtcaagtgtaggcccccaagggatcgcaatgggccgcatgagaggtaccacttggaggtggaagctggaaacaccctcgtacgcaacgagagtcacaagaactgcgactttagagttaaggacctgcagtactcaacagactacacatttaaggcatactttcataacggcgactacccaggagagccattcatcctccatcacagtaccagttataatagtaaggctttaattgcattccttgccttccttatcatcgtgacctctatcgcacttcttgtcgtcctttacaaaatctacgacctccacaaaaagcgctcctgcaatctcgacgagcagcaggaactggtcgagagagacgatgaaaagcaactgatgaacgtggagcccatccacgcagatatcctgctagaaacgtacaaacgaaaaattgccgacgaaggccgtctcttcctggccgagttccagtctattccccgcgttttctctaagtttcccatcaaggaggccaggaagccatttaaccaaaacaaaaaccggtatgttgacattctaccctacgactataatagggtcgagctttccgagataaatggggacgccggcagcaactatattaatgctagctacatcgacgggtttaaagaaccccgcaagtatatcgccgcccaaggacccagggacgagaccgtggatgatttctggcggatgatctgggagcagaaagccactgttatcgtaatggtgactagatgtgaagaaggcaatcggaataaatgtgcagaatattggccatcaatggaggaggggaccagagcctttggcgacgtggtcgtgaagattaatcagcacaaacgctgtccagactatattattcaaaaactcaacattgtgaattag

SEQ ID NO: 16914 - DNA, 2202 bp, synthetic construct
  misc_feature 1..2202: note = Description of Artificial Sequence: Synthetic coding sequence
  source 1..2202: mol_type = other DNA
atgtatctgtggctcaagctcctcgcctttggtttcgcctttctggatacagaggtgtttgtgaccggccagtccccaaccccgtcacccacaggagtttcatctgttcagactccccatctcccgactcatgctgactcccaaaccccttccgccggcacagacacacagaccttttccggaagcgctgccaatgctaagctcaatcccactccgggaagtaatgccatttcggacgttccaggtgaacggtctacagcatctacattcccgacagaccctgtttcccctctgactactacgctctcccttgctcatcattctagcgcggcccttccggctagaaccagcaatactacgatcacagcgaacacctccgatgcttacttaaacgctagtgaaacgacaactctgtccccaagcggctctgccgttatttctacaactaccattgccactacaccttctaaaccgacctgcgatgagaagtatgcgaacatcaccgttgactacctctataacaaggaaaccaaactcttcactgcaaagctcaacgtgaatgaaaacgtcgagtgcgggaacaacacctgtactaataacgaagtgcacaacctgactgagtgtaaaaacgcttccgtttctatttctcacaatagttgcaccgccccagacaaaacgctgatattggacgtgccccctggtgttgagaagtttcagttacatgactgtactcaagtggaaaaagccgataccaccatctgcctgaagtggaagaatatagaaaccttcacctgcgatactcagaatattacttacagatttcagtgtgggaatatgatcttcgacaataaggagatcaaactggaaaatctcgagcccgaacacgaatataagtgcgacagtgaaatcctgtacaacaaccacaagttcactaacgcttcaaagattattaaaaccgattttggaagtccaggggaaccgcagatcatcttttgtcggtccgaggccgctcatcaaggggtcataacatggaatcctccacagcggtccttccacaatttcacgttatgctatatcaaggaaactgagaaggattgtctgaatttggataaaaacctgatcaaatatgatctacagaacctgaagccttataccaagtacgttcttagcctgcacgcctatatcattgcaaaggtgcagcggaatggtagcgcagcaatgtgccattttaccactaagtcggcgcctccctcccaagtgtggaatatgaccgtgtccatgacctctgacaatagcatgcacgtgaagtgtaggcctccacgcgacaggaacggcccccatgagcgttatcatctagaggtggaagccgggaacacactggtccgcaacgagagccataaaaattgcgacttcagggtcaaagacttgcaatattcaaccgattatacattcaaggcatacttccacaatggcgattacccaggcgagccctttatcctgcatcacagcacttcttataattcaaaggcattgattgcttttctcgcattcctgatcatagtgacaagcatcgctttacttgtcgttctgtataaaatctacgatctgcataaaaaacggtcatgtaaccttgacgagcagcaagagctcgtcgagagggacgacgaaaaacaattaatgaatgtggagcccatccatgcagacatattgctggaaacctataagcgaaaaatcgcagacgagggacgcttatttttggctgagtttcagagtatccccagagtctttagcaaattccctatcaaggaagccaggaagccattcaatcagaataagaatcgctacgtggacattctgccctacgattacaaccgagtggaacttagtgagatcaacggcgatgccgggtctaattacatcaatgcctcctatattgatggctttaaggaacctcggaagtacatagccgcccagggccctcgggacgagacagttgatgatttttggaggatgatctgggagcagaaagctacagtcatcgtcatggtgacaaggtgtgaagagggcaacagaaacaaatgcgccgaatattggcccagtatggaagagggcactagggcatttggagacgtggtcgttaaaatcaatcagcataagaggtgccctgactatatcatccagaagctcaacatcgtaaattag

SEQ ID NO: 16915 - DNA, 3921 bp, synthetic construct
  misc_feature 1..3921: note = Description of Artificial Sequence: Synthetic coding sequence
  source 1..3921: mol_type = other DNA
atgactatgtacctatggttgaaattactggcctttggatttgctttcctcgacacagaggtgttcgtgaccgggcagagtcccacaccaagccctacaggactaacaactgcaaagatgcccagtgtgccccttagcagtgaccctctgcccacgcacaccacagcattctccccagccagtaccttcgaaagggaaaacgatttttcagagaccaccaccagccttagccccgataatacatccacccaagtaagcccagattctctagataacgcgtcagcctttaacaccacaggcgtctccagtgttcagaccccccacttgcctactcacgcagactcgcaaacaccatctgcaggaactgacactcagacttttagtggatccgccgccaacgccaaattgaatcccactcctggaagcaatgctataagcgacgtgcccggcgagcggtcgacggcgagcacctttcctacagacccggtatcccctctcactaccacactcagtttagctcaccattccagtgccgcgctgcctgcaaggacgtctaatactacaattaccgccaatacatcagacgcctacttgaacgcatcagagaccactacactgtctccatccggctccgcggttatatccacaaccactatcgccacgacgcccagcaagcctacctgcgatgagaaatacgctaacataactgtggactatctttacaacaaggagaccaagctctttaccgctaaactgaacgtcaacgagaatgttgaatgtgggaacaacacttgtaccaacaacgaggtacataatttgaccgaatgtaaaaatgccagcgtttccatctctcataatagctgtacagcgccggataagactttaatcctggatgtgccgcctggggtggagaagttccagctccacgactgtacccaggtagagaaagccgacaccacgatttgcctaaaatggaagaacatcgaaacttttacttgcgatacacaaaatataacataccgctttcagtgcggcaacatgatctttgacaacaaggagataaagctcgaaaatctggagccagagcacgagtacaagtgcgactccgagatcctgtacaacaaccacaagtttaccaacgcctctaagattatcaagactgattttggatctcccggagaaccccagatcatcttctgcaggtccgaagcggctcatcagggagtcattacctggaacccccctcagagatcgttccacaattttacactgtgctatattaaggagaccgagaaagattgtctgaacttggacaaaaacctgattaaatacgatctgcagaatttgaagccgtataccaagtacgtgcttagtctgcatgcctatatcatcgcaaaggtccagcgtaacgggtccgcagctatgtgccacttcacaacaaagagcgcccctccaagtcaggtctggaatatgaccgtaagtatgacgagcgacaactctatgcacgtcaagtgccgacccccccgagacaggaatggtccccatgaaaggtatcatttggaggtggaagctgggaacactctggtccggaacgagagccataagaactgcgacttcagggtcaaggacttacaatattcgaccgattacacatttaaagcatactttcataatggagactatccaggtgagccctttatcttgcaccattcaacgagttacaactcgaaggctctgatcgccttcctggcatttctcatcatcgtaacatcaatcgccttgctggtggtgttgtacaaaatctacgatctccacaagaagaggtcttgcaatcttgacgaacagcaggaactcgtggagcgcgacgacgagaaacagctgatgaatgttgaacccatccacgctgatattctgctggagacctacaagcgcaaaatagccgatgaaggccgtttatttctggctgagttccagtccatcccaagggtgttctctaagttccccataaaggaggcccgcaagcccttcaaccagaataaaaaccggtatgttgacattctgccctatgattataacagggttgagttatccgagatcaatggagacgcgggctctaactatattaacgccagttatatcgacggctttaaagagcctcgaaaatacattgctgcgcagggaccccgggacgaaacagttgacgatttctggcgtatgatctgggagcagaaggccaccgtcatagtgatggttacaaggtgtgaagagggcaaccgaaataaatgcgcagagtattggcccagcatggaggagggtacaagggccttcggagacgtcgtcgttaagattaatcagcacaagaggtgccccgattatatcatccaaaaactgaacattgtgaacaagaaagaaaaagccactggacgagaggtgactcacatccaatttacctcgtggccggatcatggggtccctgaggatccccacttgctcttaaagttgcgaaggcgggttaacgctttcagcaactttttttctgggccaatcgtggtccattgctcagcaggtgttgggagaaccggcacctacatcgggattgatgccatgctcgaaggattagaggccgaaaacaaggtcgacgtgtacggttacgtggttaaattgaggcggcagaggtgtcttatggtgcaggtggaagcccagtatatcctcattcaccaagctctggtggaatacaaccaatttggagaaaccgaggtgaacctaagcgagctgcacccctacctgcacaacatgaagaagagagatcccccatccgagccctccccactggaggccgaattccagcgcctaccttcttaccggtcatggagaacacaacatatcgggaaccaggaggaaaacaagtccaaaaatagaaactctaacgtgatcccatatgattacaatagagtgcctttgaagcacgagctggagatgagcaaggaatcagagcacgactctgacgaaagtagtgacgacgattccgactctgaggaaccctccaagtacattaacgcgagttttattatgagttattggaaacccgaagtcatgatcgcggcccagggcccactgaaagagaccatcggcgatttctggcaaatgatctttcaaagaaaggtaaaagttatcgttatgctcaccgaactaaagcacggtgaccaggagatttgtgctcagtattggggtgaggggaaacaaacctatggtgacattgaagtagacttgaaagataccgataaaagctctacctatacgttgcgcgtgtttgagttgagacactctaaaagaaaagactcaagaaccgtttaccagtatcagtacactaattggtccgtggagcagctacccgccgagccgaaggaactcatctctatgatccaggtggtcaagcaaaagttaccccagaaaaattcctctgaaggcaacaaacatcacaagtctacccccctgttgatacactgcagagatggatctcaacagactggcattttctgtgccctccttaacctgctcgaatcagccgaaacggaggaagtggtcgacatattccaagtggttaaggcacttaggaaagcaagaccaggcatggtgagcacttttgagcagtaccagttcctgtacgatgtgattgctagcacttaccctgctcagaatggccaggttaagaagaacaaccaccaggaggataagatagagttcgacaatgaggtagataaagtgaagcaagatgcaaactgtgttaatcccttgggcgctccagagaagctgcccgaggccaaggagcaagcagaggggagcgagcctacctccggaacagaaggccccgagcacagtgtcaatggacccgcctctcccgcgctgaatcagggctcttag

SEQ ID NO: 16916 - DNA, 441 bp, synthetic construct
  misc_feature 1..441: note = Description of Artificial Sequence: Synthetic coding sequence
  source 1..441: mol_type = other DNA
atgtacttatggcttaaattgcttgccttcggattcgcctttctagataccgaagtgttcgtaacagggcagtcgcctactccttctccgactgacgcttacttgaatgcttcagagactactacattgagtccctctggcagcgctgtcatcagcacgacaacaatcgcgacaacaccaagcaagcctacttgcgatgaaaagtacgccaatatcaccgtggactacttatacaacaaggaaacgaagctcttcactgcgaagctgaacgtgaacgaaaacgtggagtgtggaaacaatacctgcacgaacaatgaggtccacaatctgactgagtgcaagaacgctagtgtttcgatttcgcataatagctgtacagcacccgataagaccctcatcctggacgtgccacccggagtcgagaagttccaactgcattag

SEQ ID NO: 16917 - DNA, 351 bp, synthetic construct
  misc_feature 1..351: note = Description of Artificial Sequence: Synthetic coding sequence
  source 1..351: mol_type = other DNA
atgtatctgtggctgaagctccttgctttcggtttcgctttccttgacactgaagtctttgtgacaggtcagtctcccacccctagtccaacaggccttacgaccgcaaagatgccttcggtccctctctctagcgatcccctgcctacccacactaccgctttctctccagctagcaccttcgagcgcgagaatgatttctctgagactaccacaagcctctcgccagacaatacttctacacaggtatcccctgactctctcgataatgccagtgcattcaatacgaccggagtgagctctgtacagactcctcaccttcctacccacgctgattctcagaccccttag

SEQ ID NO: 16918 - DNA, 3915 bp, synthetic construct
  misc_feature 1..3915: note = Description of Artificial Sequence: Synthetic coding sequence
  source 1..3915: mol_type = other DNA
atgtacctgtggctgaagctactcgcttttggtttcgcctttttggacaccgaggtcttcgtgacgggccagagtccaacgccgtcccctaccggtctgaccaccgctaagatgccatcagttccactatcctcagatcctttgcctactcacactacagcattctcccctgccagcacctttgagcgagaaaacgatttcagcgaaactacgacatccctctcccctgacaacactagtactcaggtcagtccagattccctcgacaacgcgtccgcttttaacacaactggtgtaagctcggtacagaccccacaccttcctacacacgctgactcacagactccgtcagctgggacagatacccaaaccttctcaggctcagccgccaacgcaaagcttaatccgacacctgggtccaatgccatctctgacgttccaggcgagagatctaccgcctctaccttcccaacggaccctgtatccccgctcacgactacactttcacttgcccatcactcaagtgcagccctgcctgctcgaacttctaacaccactataacagcaaatacatcagacgcgtacctgaacgcctcagagaccacgactcttagcccgtctggcagcgctgtgatctcaacgacaactatagccaccactccgagtaaacccacctgcgacgagaagtacgctaacattacagtagactatctgtacaacaaagagacaaaactcttcactgccaagctgaacgtcaatgagaatgtggagtgcgggaacaatacatgcaccaataacgaggttcataatctcactgagtgcaagaacgcctctgtgtcgatttcccacaactcatgtacagctccggacaagacactcattctagatgtcccaccaggagtggagaaattccagttgcatgactgtacccaggtggaaaaggctgatactaccatctgtttaaagtggaaaaatattgaaaccttcacttgcgatacacagaatatcacttatcggttccaatgtggcaacatgatctttgacaacaaggagatcaagttggagaatctggagcctgagcacgagtataaatgtgactccgagatactgtataataatcacaagtttaccaacgccagcaagattatcaaaactgattttggatcgccaggggaaccacagattattttttgtcgttccgaggccgcacaccaaggcgtgatcacgtggaacccgcctcagcgtagctttcataattttactctctgctacatcaaagagaccgagaaggactgtctgaacttggacaaaaatctgattaaatacgatctacagaacctcaagccttacactaagtacgtgctgtctctgcatgcatatataattgctaaggttcagcgaaacgggagcgccgctatgtgccatttcaccaccaaaagcgccccgccaagtcaggtttggaatatgacagtgtccatgaccagcgataacagcatgcatgtaaagtgccgcccaccaagagaccgcaacggcccgcatgaacggtatcacttagaggtagaagcggggaataccctggtcaggaacgagagtcataagaactgcgattttcgggtgaaggatctccagtacagtacagactacaccttcaaggcctatttccataacggagactatcctggcgaaccttttattcttcaccacagtacatcttacaatagtaaagcgctgattgcctttttagccttcctgataatcgttactagcatcgcactcctggtggtgctgtataagatctatgatcttcataaaaaacgcagctgcaatctcgatgaacagcaggaactggtggagagggatgacgaaaagcagctgatgaatgtggagcctattcacgctgatatcttgttggaaacctacaagcgaaaaatagccgacgagggtaggctattcctggccgaatttcagagcatcccacgcgtatttagcaagttccctatcaaagaggctagaaagccctttaaccagaacaagaaccgttacgtcgatatcttaccttatgactataacagagtggagctgagtgaaattaatggcgacgccggttcgaactacatcaatgcctcctacatcgatggatttaaggagccgagaaaatacatcgcagctcagggcccccgcgatgaaacagtggacgatttttggcgcatgatttgggagcagaaagccaccgtcattgtcatggtcacccgttgcgaggagggcaaccggaacaagtgcgcagagtattggccctccatggaggaagggacccgagcattcggcgatgtggtggtgaaaataaatcagcacaagcggtgccccgactacattattcagaagctaaacatcgtcaacaaaaaagagaaggccacagggcgggaggtgactcacatccagtttacaagctggcctgaccatggggtacctgaggatccccatctgcttctgaaactacggcggcgcgtgaacgctttctcaaactttttttctggacccattgttgttcactgcagtgccggtgtcggaaggaccggaacctacatcggcatcgacgccatgctcgaggggctcgaggctgaaaataaggtggacgtgtacggatacgttgttaaactgaggcggcagagatgccttatggtccaggtagaagcacagtatattcttatacatcaggcgctcgtggagtataaccagtttggagaaacggaggtgaatttgtccgagctccacccgtacttgcacaatatgaaaaagagggacccgcccagcgaacccagtccgctagaagccgaatttcagcggctccccagctatcggtcttggagaacccaacacatcggcaatcaagaagagaataaatcaaaaaacaggaactcaaatgtcattccctatgattataatcgcgtcccgctcaagcatgaactggaaatgtcgaaggagtccgagcatgatagcgatgagagctccgacgatgattccgactccgaagagcccagcaagtatatcaacgcctctttcatcatgtcctactggaagccggaggtaatgatagccgcccagggacctctgaaggagactataggagatttctggcagatgatcttccaacgtaaagtgaaagtgatcgtgatgctcactgagctgaagcacggggaccaagagatctgtgctcaatattggggcgagggaaaacagacatacggagacatcgaggttgacctcaaggacaccgacaaaagttcaacgtatactctgagagtattcgaattgagacactctaagcggaaggacagccggacagtgtaccagtaccagtacacgaactggtctgtagagcaattgcccgcagaacccaaagaattgatttccatgatacaggtggtcaaacagaagctaccacagaagaactcttctgagggaaacaaacaccacaagtcaacaccgctactcattcattgtagggacgggtctcaacaaaccggcattttttgcgcactacttaacctattggagtcagccgaaaccgaggaggtagtggacatcttccaggtcgtgaaggcccttcgcaaagcaaggcctgggatggtctctacgttcgagcaatatcagttcctgtacgacgtgatcgccagcacttacccagcccagaatgggcaagtgaaaaagaacaaccaccaggaggataaaattgagtttgacaacgaagtcgacaaagttaagcaggatgccaattgtgtgaatcctctcggcgcccccgagaagcttccggaagcaaaagagcaggcagaaggcagtgaacctacgtctggtaccgagggtcccgaacactcagtcaatggccccgcctcccccgcgctcaaccagggaagttag

SEQ ID NO: 16919 - DNA, 1797 bp, synthetic construct
  misc_feature 1..1797: note = Description of Artificial Sequence: Synthetic coding sequence
  source 1..1797: mol_type = other DNA
atgtacctatggctgaaactcctggcgtttgggttcgcttttcttgataccgaagtcttcgtgacaggccagtcgcctaccccttcccctaccggggtgagttccgttcagaccccgcacttgccaacacacgccgactctcagactcccagtgccggtaccgacactcagacctttagtggtagcgccgctaatgcgaaactaaacccaactcccggatcaaacgccataagcgatgcctacctcaacgcgtctgagacaaccacgctgtccccctctggaagtgccgtgatttccactacaactatagccacgacacccagtaagcctacatgtgatgagaaatatgcaaacatcacagtggactacctgtataacaaagaaacaaagctttttacagctaaactgaatgttaatgaaaacgtggagtgtgggaataacacctgcactaacaatgaggtgcataatctcactgaatgtaagaatgcgtcagtgagtatcagccataacagttgcaccgcccccgataagaccttaattctggacgtgcccccaggcgtggagaagttccagctgcatgattgtacccaggtcgagaaagccgatacaacaatatgtctcaaatggaagaacattgaaacctttacctgcgacacacagaatataacttataggtttcaatgtggcaatatgattttcgacaataaggaaattaaactggagaacttggagccagagcatgagtacaaatgcgattccgagattctgtataataaccataagttcactaacgcctcaaaaattatcaagaccgactttggaagtcccggcgagccccaaatcattttttgcagaagcgaggccgcacaccagggcgtgatcacctggaacccacctcagcggtctttccacaactttactctctgctatattaaggagaccgagaaggattgtctcaacctggacaagaacctcattaagtatgatctgcaaaatcttaaaccatatacaaagtacgtgttgtccctgcatgcttatatcatcgcgaaagtgcagcgaaacggatctgctgccatgtgccatttcacaacgaaatctgcccccccatcacaggtatggaacatgacagtgagtatgacgagcgataacagcatgcacgttaagtgtcgcccaccgcgcgaccgcaatgggcctcacgagcgctaccatttggaggtggaggctggaaatactctggtgcggaacgaaagccacaagaactgcgattttcgggttaaagatctgcagtattcgacagactacacctttaaagcttattttcataacggggattatccaggggagccttttattctacatcactccacatcatacaacagtaaagcccttatcgcttttctcgcatttctgattatcgtgaccagcattgccctgctggttgtactttataaaatttacgacctccataagaagagatcctgtaacctggatgagcagcaggagttggtcgagagggacgacgaaaagcaattaatgaatgtggagcctatccacgctgacatcctgcttgaaacatataagcgaaagatagcggacgaaggtcgcctgtttctagccgagtttcagagcattccgcgagtgtttagtaagttcccaattaaggaggctcggaaaccattcaaccaaaacaagaatcgatacgtagatatcctgccctatgactataatagagtggaactgtccgaaataaacggggatgcaggaagtaactacattaacgccagctatattgattag

SEQ ID NO: 16920 - DNA, 2271 bp, synthetic construct
  misc_feature 1..2271: note = Description of Artificial Sequence: Synthetic coding sequence
  source 1..2271: mol_type = other DNA
atgtatctctggctgaaattactggcatttggtttcgcatttctcgacacagaggtctttgtgaccggccagtctcctacacccagccctaccggcctgaccaccgccaaaatgcctagcgtgcccttgagctctgacccacttccaacgcacacaactgctttcagtccagccagcaccttcgaaagagagaatgatttttcagaaaccacaacgagtctttctcccgacaatacgagcacacaggtgagtcccgatagtctggataatgcgtcggcatttaataccaccggggtgtcctccgtgcaaaccccccatctacctacccacgccgattcccagacaccaagtgcaggcaccgatacccaaacattttccggatctgctgccaacgccaagctgaatcccaccccgggcagcaatgctatatccgacgcatacttgaatgcctccgagacaaccactctgtcacctagcggcagtgccgtcattagtactacgacaattgccactacccctagcaagcccacatgcgatgaaaaatacgctaacatcactgtggactacctgtacaataaggaaactaaactttttactgctaagctaaacgttaacgagaatgtagagtgcgggaacaatacatgtactaacaatgaagtgcataatttgaccgagtgtaagaatgccagtgtcagcatttctcacaacagctgcacagcgccggataagactctgattctggacgtgcctccaggagttgaaaagttccaactccacgactgtacacaggtggagaaggcagatacaacaatttgtcttaagtggaaaaatattgagacattcacatgtgatacccagaacatcacttataggttccaatgcgggaacatgatcttcgataataaggagattaaattggagaatctggaacccgagcacgaatataagtgcgacagcgaaatcctttataacaaccacaaattcactaatgccagtaaaatcattaagactgacttcggatcacccggggagcctcagatcattttctgtcgatccgaggccgcgcatcaaggggtgattacttggaatccaccccagagatcttttcacaactttacactgtgctatataaaagagacagaaaaggattgcctgaacctggacaagaatctgattaaatacgatctgcagaacctgaaaccatatactaagtacgtgctgagcctccatgcctatatcatagcaaaggtccaacggaacgggagcgcagctatgtgccacttcactacgaagtcggctcccccctcccaggtgtggaatatgaccgtgagcatgacatccgataattccatgcatgtgaaatgtagaccaccaagggatcggaacggtccacatgagaggtaccacttagaggtggaagcgggcaacactctcgtgcggaatgagtctcataagaactgcgacttcagggtcaaagacctgcagtatagcacagactatacctttaaggcttacttccacaacggcgattatccaggagagccttttattttacaccactctaccagctacaactccaaagcacttatcgcctttctggctttcctaattattgtgacatctatcgctctgctggtcgtgctctacaagatttatgacctgcataaaaaacggagctgtaatttagacgaacaacaggagctggtggagagagacgacgaaaagcagttgatgaacgtagaacccattcatgcagatatcctactcgagacatataaacggaagatagccgatgaggggcggctcttcctggcggagttccagagcatcccaagggttttctccaaatttccgatcaaagaagcccgtaagcccttcaaccaaaacaaaaacaggtatgtcgacatcctgccctacgactacaacagggttgagctgagtgaaattaacggcgatgccgggtcaaactacatcaatgcctcctatattgacggcttcaaagaaccgcgaaagtacattgcagcacagggacctcgggacgagactgtcgacgatttctggagaatgatttgggaacagaaggcgaccgtgatcgtgatggtgacacggtgtgaggaaggaaacaggaataaatgcgccgagtactggccatccatggaagagggaacacgggcttttggtgacgttgtcgtcaagatcaatcagcataagcgttgtccagactacatcatacagaagctgaacatcgtcaacaaacagaaaagcaaatag

SEQ ID NO: 16921 - DNA, 1662 bp, synthetic construct
  misc_feature 1..1662: note = Description of Artificial Sequence: Synthetic coding sequence
  source 1..1662: mol_type = other DNA
agtgactacatgatcattaagaagaaatccaactatgaagtgttggaaaaagacgttgggctgaagagatttttccccaagtcactactcgatagtgtcaaagcgaaaacacttcgcaagctgatccaacagacctttaggcagtttgccaacctgaatagagaagaaagtattctgaagttttttgaaatcctgagccccgtctaccgttttgataaagaatgctttaaatgtgcgctgggcagtagctggataatatcggttgagctggcaattgggcccgaggaggggattagttacttgaccgacaagggttgtaaccccacccacctggctgactttacccaggtccagacaatacaatattcaaactctgaggacaaggataggaagggcatgttacagctcaagattgcaggtgcgcccgagccgctaactgtaactgcacctagccttactattgctgagaacatggccgacctgatcgacggatactgcagattagttaacggaacatctcagtcatttatcatcaggcctcagaaggagggggaaagagccctgccaagtattcctaagttggcaaactcagaaaaacagggcatgaggacccacgctgtatctgtgagcgaaaccgacgattacgctgaaattatagatgaggaagacacttacactatgccttctaccagggactatgagatccagagagagcgcattgagctgggacggtgtataggggaaggtcagttcggggatgtgcaccagggcatatatatgtcacctgagaacccagccctggcagtggctatcaagacatgcaaaaattgcacctccgacagcgtcagggaaaagttcctgcaggaagcctgccactacacatctctgcactggaattggtgcagatacatctctgaccccaatgtggactgccctgatccacggaacgcggaagtcaccatgagacagttcgaccacccacacattgtcaagctgattggggtcatcacagagaatccggtatggataatcatggagctgtgtacgctgggggagctgcgctctttcctccaagtgcggaagtatagtttagatctggcctcactgatcttatacgcctaccaactgtccaccgctctggcgtacctggagagcaagagatttgtgcaccgcgacatcgccgcccgaaatgtccttgtttcaagcaatgattgcgtaaagctgggtgactttgggctgagccgttatatggaggactctacatactataaggcctccaaaggtaagttacctatcaagtggatggctcccgagtccattaacttccggcggtttacctctgcgtccgatgtgtggatgttcggtgtttgcatgtgggagatcctgatgcacggtgtgaaaccatttcaaggagtcaagaacaatgacgtgattggtagaatcgagaatggtgagagactccctatgcctcctaattgcccgcccaccctttacagtttaatgaccaaatgttgggcgtacgacccctcccgtcgccccaggttcaccgagcttaaggcccagctgtcctttcaaaaccctgctcagatgttgcccgcatctggccgtctgcccaaccagccctgccccgagcgtgagaactacagctttgccacattttag

SEQ ID NO: 16922 - DNA, 2931 bp, synthetic construct
  misc_feature 1..2931: note = Description of Artificial Sequence: Synthetic coding sequence
  source 1..2931: mol_type = other DNA
cggagtttcattatcttgaaggcaatcgtgtcccagcctccggggccagtgctgtctggcatggagatgctgctgatgagcggctacgagctgcgaattaggtatctgcctaaggggtttctgaaccagttcaccgaagataaaccgaccctcaacttcttttatcagcaggtgaaaagtgactatatgctggagattgccgatcaagttgatcaggagattgctctaaaactaggctgtctggagattcgtcgctcatattgggagatgcgggggaacgccctcgagaagaagtctaattacgaagtcctggaaaaggacgtgggacttaagcgcttctttccgaagtcactgctggacagtgtgaaggccaaaacactgcgcaaacttatccagcaaaccttccgacagtttgctaatctgaacagagaggagagtatcctgaagttcttcgagatactgtcccctgtgtatagatttgacaaagagtgctttaagtgcgctctggggtcttcatggattatatcggttgaactggctatcgggcctgaagagggaatatcatatctgacagataaggggtgtaatccgacccacctggcagacttcactcaggtgcagactatacaatacagcaactccgaagataaggatcggaaaggtatgttacagctgaaaattgctggcgccccagagccgctaacggttactgctccgtccctgaccatcgccgaaaatatggctgatttgattgatggatattgtcgcctagtcaatggaacctctcagtcgtttataatcagaccgcagaaagagggggagcgagcgttgccctccattcccaaattggcaaactcagagaagcaggggatgcggacccacgctgtttctgtatctgatgagattcctggagcggagacggatgattatgctgagatcattgatgaggaggatacctatactatgccatcgatcaaatcttactgcatagacgtcgcacgagactacgaaatacagcgggagcgcatcgaactcggacggtgtatcggggaaggacaattcggtgacgtccaccagggcatttatatgagtcccgaaaatccggccctggctgtggccatcaaaacctgtaagaattgtacgagcgactcagtgcgggagaaattcttacaggaagccctaacaatgcgccaattcgaccacccccacatcgtgaagctgattggtgtaatcacagagaatcccgtttggatcatcatggagctgtgcacgttgggcgaactgaggtcttttctgcaagtgcgtaaatattctctggacctcgcctccttaatcctctatgcttaccaactctctacagctcttgcttatctcgaaagtaagcgatttgttcacagggacatcgccgctcggaatgtcctggtgagcagcaatgactgtgttaagttaggcgacttcggtctgtcacgctacatggaggactccacgtattacaaagcctctaagggaaagttacctatcaagtggatggctccagagagtatcaactttaggcgctttaccagtgcaagcgacgtttggatgtttggagtgtgtatgtgggaaatcctgatgcacggcgttaagccattccagggcgtaaaaaataatgacgtaattgggcgcattgaaaacggtgagagactccccatgcctccaaactgtcctccgacgttatactctctgatgaccaagtgttgggcctatgacccctcacgccgtccccgctttaccgagttgaaagcgcaactgagcacaattcttgaagaagagaaagcccagcaagaggagcgcatgaggatggaatcacggcggcaagcgactgtctcctgggactccggtggaagcgacgaggccccccccaaaccctcaaggccaggctaccctagtcccaggagctctgagggattttatccctcaccccagcacatggttcagaccaaccattaccaggtttctgggtatcccggcagccacggcataacagcaatggccgggtccatctatccagggcaggcgagccttctcgatcaaaccgatagctggaaccatcggcctcaagagattgcgatgtggcagcctaacgtggaagactctaccgtgctagaccttcgcgggatagggcaagttctaccaactcacttgatggaggagaggttaattcggcaacaacaggagatggaagaagatcaacggtggcttgagaaggaggagaggttcctgaagcccgacgttaggctgagcagaggcagtattgaccgggaagacggttctcttcagggaccgattgggaatcagcatatctatcagcctgtgggaaagccagatccggccgcccctccaaagaaacctcctcgaccaggcgcacctggccacctcggaagcttggctagcctctcctcaccagccgattcttataacgaaggcgtgaagccccttagactgcagcctcaggagatcagtccaccgccaaccgctaatctggaccgcagtaacgataaagtttacgagaatgtaacagggctagtgaaagctgttatcgagatgtcgtctaaaatacagcccgccccgcctgaggagtacgttcccatggttaaagaggtgggtctggccttgcgcactctgctcgccaccgtcgatgaaacaatacctctgttacctgccagcacccatagggagatcgaaatggcgcaaaaacttcttaattctgatttgggcgagcttataaacaagatgaaactcgctcagcagtacgttatgacgtccctccaacaggagtataagaaacagatgctgacagctgcccatgccctggctgtggatgctaaaaacctcctcgacgtgattgaccaagcaagattaaagatgctgggccagacgcgacctcattag

SEQ ID NO: 16923 - DNA, 3024 bp, synthetic construct
  misc_feature 1..3024: note = Description of Artificial Sequence: Synthetic coding sequence
  source 1..3024: mol_type = other DNA
aaggcagaatatgacaggtacttggcgtctagtaagatcatggccgccgcctaccttgaccccaaccttaaccacactcctaaggaatggaagtacgagctcagaatccgctatttacccaagggattcttaaatcagttcaccgaggataagcctactctcaacttcttttatcagcaggtgaagtcagattacatgttggaaatagccgatcaggtggaccaggagatcgctctgaagctggggtgtctcgagatccgccggagctactgggagatgagaggcaacgcactcgagaagaagagtaactacgaggtgttggaaaaagatgttggcctaaagcgcttcttccccaaaagcctgctagactcagtcaaagcaaagacgttgcgaaagctgatccaacagactttcagacaattcgccaatttgaacagagaggagtcaatcctgaagttttttgaaattctgagccccgtgtataggtttgacaaagagtgctttaagtgtgccctgggatcctcttggatcatttcagttgagttggccattggcccggaagaggggatctcatatttgacagataaaggctgcaacccaacccacttggcggatttcactcaggtgcagacaatccagtactcaaacagtgaggacaaagacagaaaagggatgctccagctgaagattgccggcgcgccggagcccctgaccgttacagccccttctcttaccattgccgagaatatggccgatctgatcgatgggtattgccgccttgttaatggaactagtcaatcatttatcattcggccacagaaagagggagagcgcgccttgcctagcatccctaagctggccaattctgagaagcaggggatgaggacgcacgcagtctcggttagtggagtgtctcattgccaacacaaggtgaagaaggcccgtcgtttccttcccctggtcttctgcagtcacgatccacctagtactgatgaaatcagtggcgacgagacggatgattatgccgaaattatcgatgaagaggacacatacacaatgccatccatcaagagctactgtattgatgtggctcgggactatgagattcagcgggaaagaattgagctgggacggtgcataggcgaaggccaatttggggatgtccaccagggtatctatatgtctcccgagaaccctgccctggctgtcgctattaaaacttgcaaaaattgcacaagcgacagcgtaagagaaaaattcctgcaggaagcgcttaccatgcggcaatttgatcaccctcacatcgtcaaactcatcggagttattacagagaatcccgtttggattataatggagctttgcactttgggagagctccgctcgttcctccaggtccgaaagtatagtttggatctggcctcattaatcctgtatgcctatcagctctctacggcactcgcatacctcgagtctaagcggttcgtacatagagacattgcggccaggaacgtgctcgtcagtagcaatgactgtgtgaaactaggcgacttcggcttgtctcgttacatggaggacagtacttactacaaggcctctaagggtaaactgcccataaagtggatggcacctgaaagcattaacttccggcggtttaccagcgcctcggacgtttggatgttcggggtctgcatgtgggaaatactcatgcatggggtgaagccatttcagggagtcaaaaacaacgacgtgatcggacgaattgaaaatggcgaaagactaccaatgccccccaattgccctcctaccctgtactcactcatgaccaagtgctgggcttatgacccatctcgtcggccaaggtttacagagcttaaagctcagttatctactattttggaggaagagaaagctcaacaggaggaacgaatgagaatggaaagcagacgtcaggcaactgtctcgtgggacagcggggggagtgatgaggccccaccaaagccaagccgccccgggtatccgtcccccagaagctcagaaggtttctacccaagtcctcaacacatggttcagacgaaccactatcaggtgtctgggtatcctggaagtcacggtattacggccatggccggcagtatctatcctggtcaggcatccctgctggatcaaaccgactcttggaatcatagacctcaggagatcgccatgtggcagcccaatgtcgaggatagtactgtcctcgacctgagaggtatcgggcaggtgcttccaactcacctgatggaggaaaggttgatccgacagcagcaggaaatggaagaggatcagaggtggttggagaaggaagaaagattcctgaagccggacgtgaggctgtcccggggcagcatcgaccgcgaggacgggtcactacagggacccataggcaatcagcatatttatcagcccgtgggaaagccggacccggctgctccgcccaagaaaccaccccgaccgggagcccccggacatctcggctctctggccagtctgtccagccctgccgactcgtacaacgagggtgttaagccactgcggttgcagccacaggaaatttcgcccccacctaccgcgaacttggatcgtagcaatgacaaggtatacgagaacgtgaccggattagttaaagcggttatcgaaatgagtagtaaaattcaaccagcaccgcctgaggaatatgtgcccatggtgaaagaggttggcctcgccctcaggacgctcctcgcaacagtggatgaaaccattcccctcttacccgccagcacccatcgtgaaatagaaatggctcagaaactgttgaactccgatttgggcgagctaattaataaaatgaagctggcccagcaatatgtcatgaccagcttgcaacaagaatacaaaaaacaaatgcttacagccgctcacgctctagccgtagatgctaagaatctgcttgacgtcattgatcaagcgcgcctaaaaatgctgggacagactaggccccattag

SEQ ID NO: 16924 - DNA, 3198 bp, synthetic construct
  misc_feature 1..3198: note = Description of Artificial Sequence: Synthetic coding sequence
  source 1..3198: mol_type = other DNA
atggctgcggcttacttggaccccaatttaaaccatacgcccaacagctccacaaagacacacctcggaacaggaatggagcgatctcctggcgcgatggagagggtcctgaaggttttccattattttgagagcaattctgaacccaccacgtgggctagtatcattcgccacggcgacgccactgatgtccgggggatcattcagaagatcgtggattcacacaaagtaaagcacgtcgcctgctacgggtttcgtctgtcacacctgcgctctgaggaggtgcactggttgcatgtagatatgggagtatcttcggtgcgcgagaagtacgagctcgctcacccaccagaagagtggaagtatgagttgcggataagataccttccaaagggctttctgaatcaattcaccgaggataaaccaaccctgaacttcttctatcagcaggttaagtctgactatatgttagaaatcgccgaccaggtggaccaggaaattgctctcaaattaggctgtctggaaattagaagatcatattgggaaatgaggggtaatgctcttgaaaagaagagtaactacgaagttctggagaaagacgtcggcctgaagagattcttcccaaaatctcttttagattccgttaaggctaagaccctgcgcaaattgatccaacagacctttcggcagttcgcgaatctgaaccgtgaagagagtattctcaaattttttgagattctatcccccgtctaccggtttgataaagagtgctttaaatgtgctctgggttctagttggatcatttctgttgaactggccataggccctgaagaggggatctcttacctgacagataaggggtgtaacccaacacacctggcagactttacacaagtgcagacaatccagtactccaattctgaagacaaggatcgaaaaggaatgttgcaactgaaaatcgcaggggcccctgaaccccttaccgtgacagctccttccctgaccattgccgagaatatggccgatttaatcgacggatattgtcgcctcgtgaatggaaccagtcagagtttcattatcaggccccaaaaggagggcgagagggctctgccatcgattcctaaactggctaatagcgagaaacaaggtatgagaactcatgcggtttctgtgagcgagaccgatgattatgccgaaatcattgatgaagaggatacatataccatgccatccacgagagattatgagatccagcgcgaaaggatcgagcttgggcgctgcatcggagagggccagttcggcgatgtacaccaaggaatctacatgtcacccgagaatcccgctctcgctgtcgccatcaaaacgtgcaagaattgcacaagcgattctgtgcgtgaaaaattcttgcaggaggctctcaccatgcgccaattcgaccacccccacattgtgaaactcattggagtaattactgagaacccggtgtggataattatggagctgtgtaccctaggagaactccgcagcttccttcaggtgaggaaatacagtttggacctggcatctttgatcctttacgcataccaactgtccaccgccttggcatacctcgaatctaaacgcttcgttcaccgcgatattgctgcccggaacgttctggtgtccagtaatgattgcgtcaagttaggagacttcgggctatctcgctatatggaggacagtacttattataaagcgtcaaagggaaaactccccatcaaatggatggctccagagagcattaattttcgaagatttacgagtgcaagcgatgtgtggatgttcggggtgtgcatgtgggaaattctgatgcatggggtaaagccattccaaggcgttaaaaataatgatgttattggacgcatagagaacggcgaaagactcccaatgcccccgaactgcccaccaaccctgtactctctaatgacgaaatgctgggcttatgatccctcaaggcgtcccagatttaccgaactgaaggctcaactgtccaccatcctcgaggaggagaaagctcaacaggaggagcgcatgagaatggagtctcggaggcaagcaacggtctcctgggattccggcggtagcgatgaagccccacccaagccaagccgaccaggttacccttcaccgaggtccagtgagggcttctacccctccccacagcacatggtgcagacgaaccactaccaggtgtcgggatatccggggtcgcatggaattactgcaatggctggaagtatctacccgggtcaggcctcactgctggatcagactgattcctggaaccaccgcccccaggaaatcgctatgtggcagccaaacgttgaggactccaccgtgctggacctcaggggcatcggtcaggtcctgcctactcacttaatggaggaaagactgatccgacagcagcaggagatggaagaggatcagagatggctcgagaaagaggaacgatttctgaagccggacgtgaggcttagccgtgggagtattgacagagaggatggatctctgcaaggcccaattggcaatcagcacatctatcagcccgtaggaaaaccaggcaaggaagaaaagaactgggcagaaaggaatccagccgcgccacctaagaaaccacctagaccgggggctccaggccatctaggctctcttgcatccttaagctcccccgccgacagctacaatgagggcgttaagcctaatcagctgcagccccaagagatctctccacccccaaccgccaatctcgataggtctaacgacaaggtatatgagaacgtgacaggccttgttaaggcagtaattgagatgtccagtaaaatacagcccgcgccgccagaggaatacgtgccgatggtcaaggaggtgggcctggccctcagaactctgttggcaaccgtggatgagacaatccccctgcttcctgcctcaacccatagggaaatagagatggcacagaaactgctaaacagcgacctcggtgaactgattaacaagatgaaacttgcccaacagtatgtgatgacttccctgcagcaggagtataagaagcagatgctcactgcggcacatgctttggctgtcgatgcaaaaaatcttcttgacgtcattgatcaggcacggctgaaaatgttggggcagactagacctcattag

SEQ ID NO: 16925 - DNA, 2253 bp, synthetic construct
  misc_feature 1..2253: note = Description of Artificial Sequence: Synthetic coding sequence
  source 1..2253: mol_type = other DNA
atggccgatcttatcgatgggtactgtcgcctcgtcaatggaacgtcgcagtcgttcattattcgcccgcagaaagagggcgaaagagccctcccaagtatcccgaagctggccaacagcgaaaagcagggtatgagaacccatgccgtgtccgtgagtggagtgtctcactgtcagcacaaagtcaaaaaggccaggcggttcctcccacttgtattttgttctcatgaccccccctccacggacgaaataagtggcgatgagaccgatgactatgccgagataatcgatgaggaggatacatatactatgccttcaacccgggactacgagattcagcgggaacgaattgagcttggccgctgcattggggaaggtcagttcggcgacgtgcatcagggcatctatatgtctccagaaaaccccgccttggcggtggcaattaagacctgcaagaactgtaccagtgactctgtgcgagaaaagttcctgcaagaagccttgacaatgaggcagtttgatcatcctcatattgttaagctaatcggagtcataactgagaacccagtgtggattatcatggagctgtgtactctgggagaactgaggagtttcctccaggtgcggaagtactctctcgatttagcgagtcttatcctgtatgcctaccaattgtctacagccctggcttatctcgaaagcaagcgtttcgtgcatagagacatcgccgcccgtaatgtccttgtaagttccaatgactgtgtgaagctaggagatttcgggttaagtagatacatggaggactcaacatattacaaagcatccaaaggcaaattacctattaaatggatggctccagagtctatcaatttccgtaggtttacttcagcctcagacgtttggatgttcggagtctgcatgtgggaaattctgatgcacggagtgaaaccgttccagggtgtgaagaataatgatgtaataggacggatcgagaacggcgaaaggcttccaatgcccccaaactgtccccctaccctctactcattgatgaccaaatgctgggcttatgatccgtctagacgcccaagattcaccgaactcaaagcgcaattgagcaccatcctggaagaggagaaagcgcagcaggaggagcgaatgcggatggagagtaggcgccaagctacagtgtcgtgggactctggggggtcagatgaggccccaccaaaaccaagcaggccagggtatcccagtccaaggtcttccgaaggcttttacccatccccgcagcacatggttcagacaaaccattaccaggtctctggctacccaggctcacacggcataaccgctatggccggttccatctatccggggcaagcctctcttctggatcaaacggattcttggaaccacaggcctcaggagattgccatgtggcagccaaacgtggaagacagcactgttttggaccttagggggatcggtcaggttctgcctacacaccttatggaagagcggttgattcggcagcagcaggaaatggaagaagaccagcgctggttggagaaggaagaaaggtttctgaagcccgatgtgagacttagcagaggaagcattgacagagaggacggctccctgcagggtccaattggcaatcagcacatttatcaacccgttgggaagcccgaccctgccgctcccccaaagaaacccccgcgacctggagcacctgggcacctcggtagcctggcttccctgtcctctccagcagactcatataacgagggagtgaaaccttgtaggttgcagcctcaagagattagcccccccccaacagccaatttggacaggtccaatgacaaggtttacgaaaatgttaccggtctcgtgaaagccgtgattgagatgtcttccaaaatacagcctgccccccctgaggagtacgtgccaatggtgaaagaggttggcctggcactgcgcacgttactggccaccgtcgacgaaactattccactgctgcctgcatcaacgcacagagaaattgaaatggcccagaaactcctgaattccgacctcggagaactgataaacaagatgaagctggctcaacagtacgttatgacctcattgcagcaggaatacaagaagcaaatgctcacagcggcccacgccctcgcagtggacgcgaaaaacctgcttgacgtaattgaccaagcacgactgaaaatgctgggtcaaactcgaccccattag

SEQ ID NO: 16926 - DNA, 1089 bp, synthetic construct
  misc_feature 1..1089: note = Description of Artificial Sequence: Synthetic coding sequence
  source 1..1089: mol_type = other DNA
atgcgcatggaatctagacgccaagcaaccgtgagctgggattctgggggaagtgatgaagctcctcccaagccttcgaggcccggctatccttcgcctcgctccagtgaaggtttctaccctagcccccagcacatggtccagactaatcattatcaggtatctggatatcccggatctcatgggatcactgccatggctggctctatctacccagggcaggcaagcctcttagatcaaacggattcctggaatcatcgccctcaggaaatcgccatgtggcagcccaatgtggaggactccacagttctggaccttagaggtatcggtcaggtgctgccaactcatctgatggaagaacgtttgatcaggcagcagcaggaaatggaggaggatcaacgctggttagagaaggaagagaggttcctgaaacccgacgtaaggctctcccgcgggagtattgatagggaagatgggagcctgcagggacccatcgggaatcagcatatataccaaccggtgggcaaacctgaccctgccgcgccaccgaaaaagcctccccggcctggcgctccagggcatctcgggagtttagctagcctgtcttcccccgcggacagctataatgagggcgtaaagctgcagccccaggaaatcagcccaccaccaaccgccaacctggatagatccaatgataaggtctacgagaacgttacaggcctggttaaagcagtcatcgagatgagcagcaaaatacagcccgccccccccgaggaatacgttcctatggtgaaggaagttggtctcgccttaaggactctactcgcgacagtggatgaaaccatcccattgttacccgcaagcacccaccgcgaaatcgagatggcccagaagctactgaattccgatctcggggaactgattaacaaaatgaagttggcccaacagtacgtgatgacgtcacttcagcaggagtataagaaacagatgctcacggcggctcacgctctcgctgtcgacgcaaaaaatcttttagacgtgattgaccaagcaagacttaagatgttaggacaaacgagacctcactag

SEQ ID NO: 16927 - DNA, 354 bp, synthetic construct
  misc_feature 1..354: note = Description of Artificial Sequence: Synthetic coding sequence
  source 1..354: mol_type = other DNA
atggccgctgcttacctggatcccaatctcaatcataccccaaactcttcaaccaaaacacatttaggtacggggatggaaagatcaccgggggcaatggagcgcgtgcttaaagtcttccactacttcgagtctaattctgagcctaccacctgggcctccatcattaggcatggcgacgcaaccgatgtgaggggtatcatccagaagatagtggactctcacaaggttaaacacgtggcttgctatggttttcgcctgtcccacctcaggtcggaggaagtgcactggctccacgtagatatgggggtatcctcagtgcgtgaaaagtacgaactggcacacccaccatag

SEQ ID NO: 16928 - DNA, 3291 bp, synthetic construct
  misc_feature 1..3291: note = Description of Artificial Sequence: Synthetic coding sequence
  source 1..3291: mol_type = other DNA
atgcttctcgaactagcgggccaggaggctctgaaacctgccggcgctatctacatggaaaaatctggctgttctccattcccagtatgctgggccaaggagtacgatcgttacctcgcctcctcgaaaatcatggccgccgcttacctcgacccgaatttaaatcatacgccaaacagttccactaaaacccacctggggaccggcatggaacgctcgcccggagcgatggagcgtgtgttgaaggtgttccattatttcgagtcaaatagcgagccaactacctgggcctccattattcggcatggcgacgctacggacgtgaggggcatcattcagaaaatcgtggatagccacaaggtaaagcacgtcgcctgttatggattcaggctgagccatctaagatccgaggaggtgcattggcttcatgtcgacatgggggtgtcatccgtacgggagaaatatgaactggcgcacccccccgaggagtggaagtacgagctcagaatcagatatctacccaaaggctttctgaatcaattcaccgaggataagcccacacttaattttttctatcagcaggtcaaaagtgattatatgttggagatcgctgatcaggtggaccaagagatcgccctgaaacttggctgtttggaaattcgacgcagctactgggagatgcggggcaacgcactcgagaaaaagagcaactacgaagtgcttgaaaaggatgtcgggttgaaacggtttttcccaaaatcgctgctggattctgtcaaagctaaaactctgcgcaaactaatacagcagacgttcaggcagtttgccaacctgaatagggaagagagtatcctgaagttctttgaaatactgagcccagtttacaggttcgacaaggagtgcttcaaatgtgccctcgggagttcctggattatctctgtcgaactagcaattggtcctgaagagggcattagctatctcactgacaagggctgcaatcctacgcacctggcagacttcacacaggttcagacgatccaatactctaatagcgaagataaggatagaaagggcatgttgcagctaaagatcgcgggcgcaccagagcccctgactgtgacagctccttctctgaccatcgcagaaaatatggccgatctgattgacgggtattgtcggctggtcaatggcacgtcgcagtcttttattatcaggccacagaaagaaggggaaagggctctcccctcaattccgaaattagctaactccgagaagcagggcatgagaactcatgccgtctccgtgtcggagaccgacgattacgccgagatcattgatgaagaggacacctatactatgccatcaacgcgggactacgagattcagcgggagcgcattgaactgggtaggtgtattggtgagggtcagtttggagatgtacaccaaggtatctacatgtcgcccgaaaaccccgcgcttgccgtagctattaaaacctgcaagaattgtactagcgactcagtgcgggaaaaattcctgcaggaggccctaactatgcgtcagttcgatcacccccacattgtgaagctaattggtgtgattactgagaaccccgtgtggattattatggagctttgcactctgggagaattgaggtcctttcttcaagtgagaaagtattccctggacctggcgtctctgatactttatgcatatcagctctctacagctctggcataccttgagtctaaacgattcgttcatagggacatagccgcacgtaacgtgctcgtgtcttctaacgattgtgtcaaactgggtgatttcggattgagccgctacatggaagactctacctactacaaagcctccaagggtaagctgccaattaagtggatggcccctgaatccatcaatttccggcgctttacctctgccagcgacgtgtggatgttcggggtctgcatgtgggaaattcttatgcacggagtgaagccatttcaaggagtgaagaacaatgacgtaattgggaggatcgaaaatggcgaaaggctgcccatgccgccaaattgtccccctacgctgtactctctaatgacgaaatgctgggcctacgacccttcacggcgcccccgcttcaccgagctcaaggcccagttgagtactatcctcgaggaagagaaggcacagcaagaggaaaggatgcggatggaaagccgtcggcaggccactgttagctgggattccggcggctctgatgaagcccctcccaagccgagtcggcctggatatccatccccgcgttcatcggaaggcttttatcccagcccccagcatatggtccaaactaatcactatcaggtttccggttacccaggcagccacggaataactgctatggctggatccatctatccaggccaagcttctctgttggatcaaactgacagctggaaccatcgcccacaggaaatcgcaatgtggcagcctaatgttgaagactccactgttctagacctccgaggcatcgggcaagtgctgcccactcaccttatggaagaaagattaataaggcaacagcaggagatggaggaggatcagagatggttggagaaagaagaacggtttctcaaacccgacgtacggttgagccgcggtagtatcgacagggaggatggcagcttacaggggcctatcggaaatcagcacatttatcagccagtgggcaaacccgatcccgccgcaccaccaaagaaacctcctcgccctggcgcacctggccacctgggaagcctggctagtctgtcaagcccagcggattcttacaatgaaggcgtcaagctgcagcctcaggaaattagccccccccctacagctaacctggatagatcaaatgacaaggtctacgaaaacgtcacaggtcttgtgaaggctgtaatagaaatgtctagcaagatccagcctgctcctccagaggagtacgtgcccatggtgaaggaagtaggactggcccttcgcaccctgctcgctacagttgatgaaactattcctctgcttccagcatctacacaccgcgagatcgagatggcacagaaactgttaaactcagatctaggggagttgataaataagatgaaactggcccagcagtacgttatgactagtctgcagcaggagtacaaaaaacagatgctaaccgcagcacacgccttagccgtggacgccaaaaatctcctggacgtcatagatcaggcgcgtctaaagatgctgggccaaactcggcctcactag

SEQ ID NO: 16929 - DNA, 3291 bp, synthetic construct
  misc_feature 1..3291: note = Description of Artificial Sequence: Synthetic coding sequence
  source 1..3291: mol_type = other DNA
atgcttctcgagcttgccggtcaggaagccctaaagcccgctggggccatctatatggaaaaatcgggctgctcaccatttcccgtatgctgggcgaaagaatatgacagataccttgcgtcctcgaagattatggccgcagcatatctggatcccaatctgaatcatactcctaacagttctaccaaaacacatctaggcaccgggatggagcgtagtcctggagcaatggagcgggtcctcaaggtgttccattacttcgaaagtaactccgagcccaccacatgggcctcgatcattcgccatggcgacgctactgatgtgcgtggcatcatacagaagattgtggattcacacaaggtaaagcacgtggcttgctatggctttcggctgtcacatttaagatccgaggaggttcattggctgcacgtggatatgggcgtctcttcagtgagggagaagtacgagctggctcatcccccggaggagtggaaatacgagctaaggatccggtatcttcctaaggggttcttaaaccaattcactgaggacaagccaacgctgaattttttttaccagcaggtcaaaagtgattatatgctcgaaatcgcagaccaggtggaccaagaaattgcccttaagctgggatgccttgaaatccggcgctcttactgggaaatgaggggtaacgccctggagaagaagtctaactatgaggtgctggagaaagatgtgggcttaaaacgtttcttccccaagtccctcttggactcagttaaggcaaaaacactcagaaagctgatacagcagacgttcagacagtttgctaacctcaacagggaggagtccattctcaagttttttgagatattgtcacctgtgtacaggttcgacaaggaatgctttaaatgtgctcttggaagttcttggatcatctctgtcgagctggccatcggcccagaggaaggaatctcctatcttactgacaaggggtgtaatcccacccatctggcagacttcacacaagtccagaccatccagtactcaaactctgaagacaaagaccgtaagggcatgctccagctgaagatagcaggggctcctgaacctctgactgtaacggcgccttcccttaccatagctgagaacatggcagatctgatcgacggctattgtcgcctcgtcaacggtacctcacagagttttattatccgcccacagaaagaaggagaacgtgccttgcctagtataccaaaactggccaactcagaaaagcaggggatgcggacccatgccgtctcagtcagcgagactgacgactacgcagagattattgacgaagaagacacttatacaatgccttcaacaagggattatgagattcagcgagaaagaattgagctgggtcggtgcatcggcgaaggccagtttggcgacgtccatcagggcatctatatgtcccctgagaaccccgccctcgccgtggccatcaagacttgtaagaactgcacaagcgatagcgtgagggagaagttcctacaagaggcactgacaatgcggcagttcgaccaccctcatatcgtgaagctgatcggcgtgataaccgagaaccctgtctggatcataatggagctgtgcacgctcggtgagctccgcagctttcttcaggtgaggaaatacagtctcgatttagcaagcctgatcttatatgcctatcagctgagcaccgccctcgcttatcttgaatccaagcgtttcgttcaccgggacatcgctgcccggaatgtactggtgtcaagcaatgactgcgtgaagctaggagattttggcctcagtaggtatatggaggactcaacctattacaaagctagcaagggtaaactgcctattaagtggatggcacctgagagcatcaacttccgtcgcttcacttccgcttccgacgtatggatgtttggcgtatgtatgtgggagattctgatgcatggcgtgaagcccttccaaggcgtgaaaaacaacgatgtgattggcagaatagaaaatggagaaagactccccatgccgccaaattgccccccaaccctgtattccctaatgactaagtgctgggcctatgacccatcacgccggccacgcttcacggagctgaaggcacagttgtcgacaattctggaagaggagaaagcgcaacaagaggagcggatgcgcatggaaagccgacgtcaagcaaccgtctcatgggattccggcggatccgacgaggctccacccaagcctagccgtcccgggtacccatcaccacggtcttctgaagggttctacccgagccctcagcacatggtgcaaaccaaccattaccaagtgtcggggtaccccggctcacacgggatcacagccatggctgggtccatatacccaggacaggcctccctgctggatcaaaccgactcctggaaccatcgtccgcaggagattgcaatgtggcagccgaacgtggaagatagtactgtgctggatttgagaggcattggacaggtgctgcctacacacctcatggaggagaggctaattagacaacagcaggagatggaagaggaccagaggtggctggaaaaagaggagaggttcctgaagcctgatgtgcgcctgtctcgaggatccattgatcgtgaggatggttcactccagggtccgataggaaatcagcatatttatcagcccgttggtaagcccgaccccgctgcccctccaaagaaaccccccaggccaggagcccccgggcacctgggctcgcttgcatctttgtcctctccagccgattcttataatgaaggagttaaactacagcctcaggagatttcaccacctcctacggccaacctggatcgctccaacgacaaggtatacgagaacgtgacagggctcgtcaaggcggtgatcgagatgtcgtcaaaaatccaacctgcaccacccgaagagtacgttccgatggtgaaagaggtgggactcgcactgagaactctgttggccacagtggacgagacaatcccactactgccagcttctacccatagagagatcgaaatggcacaaaaactgctgaatagcgacttgggcgagctgataaataaaatgaagctcgcccagcagtacgtcatgactagcctccaacaagaatataaaaagcaaatgctgaccgctgcccacgctctggcagtggacgccaagaacctgctagacgtgattgaccaagccagacttaagatgctgggccagacaaggccgcactag

SEQ ID NO: 16930 - DNA, 2043 bp, synthetic construct
  misc_feature 1..2043: note = Description of Artificial Sequence: Synthetic coding sequence
  source 1..2043: mol_type = other DNA
atgaagtaccaggaggtccgatgccttacttcattcaacatttctgtgtctttccccgcagagaccgacgactacgccgaaatcatcgatgaggaagatacctacactatgcccagtaccagggattatgagattcaacgcgagagaatcgagctgggcaggtgtatcggtgagggccagtttggggatgtgcaccaaggaatctacatgagccctgagaaccctgcactggctgtcgctatcaaaacttgcaagaattgcacctcagactctgtacgggagaagttcttgcaagaagcgttgaccatgaggcagttcgaccacccacacatcgtaaagctgattggagttattactgaaaaccccgtgtggatcattatggagctgtgcacacttggcgagctcaggtcttttctccaggtgcgtaaatattccctggatttggcgtcactgatcttatatgcctatcagctgtctacagccctggcctaccttgagagcaaacggttcgtgcacagggatattgcagcacgaaatgtgttggtctcaagcaacgactgtgtcaagctaggcgatttcggattgagtcgttacatggaggactcaacctactacaaggcatcgaagggtaagttacccattaagtggatggcgccagaaagcatcaattttcgcagattcacgtcggcatctgatgtctggatgttcggagtttgtatgtgggaaatcctcatgcacggggttaagccatttcagggggtgaagaacaatgatgttatcggcaggattgaaaatggggagagactgcctatgccccctaactgtccacctacgctgtatagcctgatgactaaatgctgggcatatgatccaagtcgtcgaccacgtttcacggagctgaaggctcagctcagtacaatcttggaagaagaaaaagcccagcaggaggagcgcatgcgaatggagtcacggaggcaggccaccgtgtcttgggatagtggaggctcggatgaggccccccctaaaccctcaagaccaggctacccgagccctcggtcatcggaaggtttctacccatctccccaacacatggtccagacgaaccactaccaggtctccggctaccccggctcccacggcatcacagctatggcgggcagtatatatcctgggcaggcctctctgctggatcagactgattcctggaaccaccgtccgcaagagatcgccatgtggcagccaaacgtggaggattctaccgtgcttgacctcagaggaatcgggcaggtattgcccactcacctgatggaggaaaggttaattaggcagcagcaggaaatggaggaggaccagaggtggctggagaaggaagaacgttttttaaagccagatgtgcggttgtccaggggaagtatcgacagggaagatggaagtctgcagggtcccatcgggaatcaacatatctaccaaccggttggtaaaccggatcctgccgcccctcccaaaaagccacccagacccggtgccccgggccacctggggagcctggcgtcgctctccagtcctgctgacagttataacgagggtgtgaagctgcaaccccaggagatctccccacctcctactgctaacctggaccggagtaacgataaagtatacgagaatgttactggcctggttaaggccgtgattgaaatgtcttctaagatccagcccgccccccccgaggaatatgttcccatggtcaaagaggttggtcttgcactgcgtacccttctggcaacggtggacgagacgattccgttactgcccgcttccactcatagagagattgagatggctcagaaactactgaattctgatctaggtgaactgatcaacaaaatgaagctggctcagcagtacgtaatgactagcctccagcaggagtacaaaaagcaaatgctcactgcggcccacgccttggcagtagatgcaaagaatttgcttgatgttatagaccaagcccgacttaagatgctcggccagactcggccgcactag

SEQ ID NO: 16931 - DNA, 3054 bp, synthetic construct
  misc_feature 1..3054: note = Description of Artificial Sequence: Synthetic coding sequence
  source 1..3054: mol_type = other DNA
taatatgatcgctacttggccagtagcaaaattatggccgccgcttaccttgacccaaacctgaaccacactcccaactccagcactaagactcacctggggactgggatggaacggtccccaggggcgatggaacgtgttctgaaggtattccactactttgaaagcaatagcgagccaacaacgtgggcttccataatccggcatggcgatgccaccgatgtgagaggcatcatccaaaagatcgtggactcccacaaagtgaagcacgtggcttgttacggatttcgtctttcccatctgcggagtgaagaggtccactggttgcacgttgacatgggtgtgtctagcgtaagggagaagtacgaacttgcccatcctccagaagagtggaaatatgaactgcggatacgttatcttccaaaagggttcctaaaccaatttaccgaagataagccaaccttgaacttcttctatcagcaggtgaagtcggactatatgctcgaaatcgcggaccaggtcgatcaggaaatcgcattgaaattggggtgtctggagatccggcggtcttattgggagatgagaggaaatgctctggaaaaaaagagtaactacgaggtgttagagaaggatgtgggcctgaaaagattctttcccaaatcgctgctggactcagtcaaggccaagaccttgcggaaattgattcagcaaacattccgacagttcgcaaatttgaatcgggaggagagtattttgaaattttttgaaatactgagtccagtctaccggtttgacaaggagtgctttaaatgtgccttaggctctagctggatcatcagtgttgaactcgcgattggtccggaagaaggtatatcttacctgacggataagggctgcaaccctactcacctggccgactttactcaggtacagactattcagtacagcaacagcgaggataaggatagaaagggaatgctgcagctgaagattgccggggccccagagcctctgaccgtcactgctccctctctaaccattgcagagaatatggctgacctgatcgatggttactgcagactagttaatgggacctcacagtctttcataattcggcctcagaaggaaggggagcgggcattgccatccatccccaagctcgcaaattccgagaaacaaggcatgcgtacgcatgcagttagtgtgtctgaaaccgatgattatgccgaaattatcgacgaggaggacacatacaccatgccatctactcgagattacgagattcagcgggagcgcatcgagttgggccgctgcatcggggaagggcagttcggagacgtgcaccagggaatttacatgtcgccagagaatccagcattggctgtggctatcaaaacatgtaaaaattgtacatccgattccgtcagggaaaaatttctccaggaagcccttacaatgcgccagtttgaccacccacatatcgttaagctgattggtgtcatcaccgaaaaccctgtgtggataattatggaactgtgtaccttaggcgaactgagatcgtttctccaagtgaggaagtatagcctggacctggctagtcttatactttacgcatatcagttgagcacagccctggcatacctagagtccaaacgttttgtgcatagggacatcgccgctagaaatgttttggtcagttctaacgattgcgtgaaactgggagactttggcctgtcacggtacatggaggactcaacatactataaggccagcaaagggaaattacccatcaagtggatggcaccagagagcataaactttcggagattcaccagcgcaagcgacgtttggatgtttggcgtatgcatgtgggaaatcctgatgcatggtgtgaagccttttcagggcgtcaagaacaacgatgtgattggcagaattgagaacggcgagcggctaccaatgccccctaactgcccacccacactgtactccctaatgactaagtgctgggcgtatgatccaagtagaagacctcggtttacggaactgaaggcgcagctgtcgacaatcctagaagaagagaaggcccagcaggaagagaggatgaggatggagtcccggcggcaggctacagtgtcctgggattcagggggtagtgatgaagctcctcctaagccgtctagacctgggtatcccagccctcggtcctctgaagggttttatccgtcaccacaacacatggtgcaaaccaatcactaccaggatagcactgtgctggacctcaggggcatcgggcaggtgctgcccacgcacttgatggaagagcgcttgattcgacaacagcaggaaatggaagaggaccagcgatggctggaaaaggaggagcgcttcctgaagccggatgtgcggttaagccgaggctctatcgaccgcgaggacggcagtttgcagggcccaatcgggaaccagcacatataccagccagtgggcaagcctgacccagccgccccccccaagaaacctccccgccccggtgcaccgggccatctgggcagcctggcaagtttgtcatcgcctgccgacagctacaacgagggggtcaaattacagccgcaagaaatttccccgcctcccacagccaacttggacaggtcaaacgacaaagtctatgagaacgtcaccggcttggtaaaggcagtcatcgagatgagttctaagatccagcctgctccaccggaggaatacgttcccatggtcaaagaggtcggcttggcccttagaacactgttggccaccgtggatgagaccatacctctgctacccgcgtctacccaccgggaaattgagatggcccaaaagctgttgaacagtgacctcggcgaactgataaacaagatgaaactggcccaacaatacgttatgacaagcctgcaacaggagtataagaagcagatgcttaccgccgcccatgcgctcgctgtggatgccaagaatctgctggacgtaatcgaccaggccaggcttaaaatgctggggcagactcgccctcactag

SEQ ID NO: 16932 - DNA, 354 bp, synthetic construct
  misc_feature 1..354: note = Description of Artificial Sequence: Synthetic coding sequence
  source 1..354: mol_type = other DNA
atggccgccgcctatctggacccaaacctcaaccacacccctaactcttcaacaaaaacccacctggggactggcatggaacgcagccctggggccatggaacgtgtgctgaaggtgtttcactatttcgaatccaattccgaacctacaacctgggcttccattatccggcatggtgatgccactgatgttcgggggatcatccagaaaatcgtcgacagccacaaagtaaagcacgtggcctgctacggctttcgcttatctcaccttcgatcagaagaagtgcactggttgcatgtggacatgggagtaagctccgtcagggaaaaatacgaactcgctcaccctccctag

SEQ ID NO: 16933 - DNA, 471 bp, synthetic construct
  misc_feature 1..471: note = Description of Artificial Sequence: Synthetic coding sequence
  source 1..471: mol_type = other DNA
atggccgccgcttaccttgacccaaacctcaaccacaccccgaacagctctaccaaaacccatcttggcaccgggatggagagatcccctggcgcaatggaaagagtgctcaaagtttttcactatttcgagagtaacagcgagcctacaacatgggcctctataattcgccacggcgatgccacagatgtcagagggatcatacagaagatagtcgactcacataaagtgaagcacgtggcatgctatggctttagactaagccacctgagatctgaagaggtgcactggctccacgtggacatgggcgtcagctcagttcgggagaaatatgagctggctcatcccccagaggaatggaagtatgagctcaggatacgctatctccccaaaggattcctgaaccaatttacagaagataagcctacactgaacttcttctaccagcaggtaaagtccgactatatgtag

SEQ ID NO: 16934 - DNA, 3159 bp, synthetic construct
  misc_feature 1..3159: note = Description of Artificial Sequence: Synthetic coding sequence
  source 1..3159: mol_type = other DNA
atggcagccgcctacctggatccaaatctaaaccatacgccaaatagcagcaccaagactcacctcggaaccgggatggagcggagcccaggcgcaatggagagagttctaaaggtgtttcactacttcgagtccaacagcgaacccactacctgggcatcaattatcaggcatggcgacgccaccgacgttcgcggaataatacaaaaaatcgtggactcacataaggtgaaacatgttgcatgttacggttttagattgtcccacctcaggtcagaggaggtgcattggctgcacgttgatatgggggtctcctccgtcagggagaaatacgaattggctcatcctcccgaggagtggaaatacgaactgcggatccgatacttgcccaagggattcctaaaccagtttaccgaagacaagcctacacttaacttcttctaccagcaggtgaaaagcgactacatgcttgagatcgccgaccaagtagatcaagagatagccctcaaactgggatgcttggaaataaggagaagctattgggaaatgcgggggaatgccctggagaaaaaaagtaactacgaggtgctcgaaaaggacgtaggtcttaaacgcttcttccccaagtctctccttgacagtgtcaaagctaagaccctgcggaagctgatccagcagacatttcgccagttcgccaatctgaaccgagaggagtccatactgaagtttttcgagatactcagccccgtttataggtttgacaaagaatgctttaaatgtgcactggggtcctcatggatcatctctgtggaactggcaatcggtccagaggaaggcatatcctatttaacagacaaggggtgcaatcctacacatctcgcagactttactcaggtccagaccatccagtattcaaatagtgaggataaggatcggaaaggcatgctacagctgaaaattgcaggtgcaccagaaccacttactgtaacagcgccaagtctgactatagccgaaaatatggctgaccttattgacgggtactgtcggctggtgaatggaactagccagtcttttatcattcggccccagaaggagggagagagggctctcccttcaattcctaagctggcaaattctgagaagcagggaatgaggacccacgcggtgagtgtaagcgaaactgacgactatgctgaaattattgatgaagaggacacttacaccatgccgagtactcgagattacgaaatccagcgagaacgaatcgagctgggacgctgcattggggaggggcagtttggggacgttcaccagggcatatacatgtctccggaaaatcccgctctggcagttgcaattaaaacatgtaaaaactgcactagtgatagcgttagagaaaagtttctccaggaggcactgaccatgaggcaattcgaccacccccacattgtcaaacttatcggagtgattaccgaaaatcccgtctggatcatcatggaactctgcacactgggcgaactccgcagctttctccaggttcgaaaatatagcctggacctggcgtcgctgattctttatgcttaccagctctctacggcccttgcctatctggagagcaagcggttcgtgcatcgggacatagccgctcgcaacgtgcttgtctcatccaatgactgtgttaagctgggcgatttcggcctgtctagatacatggaggacagcacttattacaaggccagcaagggcaaattacccataaaatggatggctccagaatccatcaactttcggcggtttacttccgccagtgatgtgtggatgttcggcgtctgtatgtgggagattttgatgcacggtgttaagcccttccagggggtaaagaataacgatgtaatcggcaggatcgaaaatggcgaacgccttcctatgcctcctaattgcccgccaaccctttacagcctgatgacaaagtgctgggcttatgacccatctcggcgaccccggtttactgagctgaaggcccagctgtctactatcctggaagaggaaaaggcccagcaggaggagagaatgcgcatggagtcaagacggcaggcaaccgtctcatgggatagcggggggtcggatgaggcccccccaaagccatcgcggcccggctatccctcccctaggagtagcgagggtttttacccaagcccccagcacatggtccagacaaatcactaccaggtttctgggtatccggggagccatggtatcactgcaatggctggtagcatatatcccggccaggcttcattgttggatcagaccgactcatggaaccacaggccacaggaaatcgctatgtggcagcccaacgtcgaggatagtaccgtgctggacctgcgaggaatcgggcaagttctgcccactcacctgatggaggaaaggttgatacgccaacaacaggagatggaggaggaccagaggtggttggagaaggaagagcggttcttgaagcccgacgttcggctgtcgagaggatccattgaccgggaagacggctccctgcagggtccgattggaaaccagcacatctaccaacctgtgggaaagcctgatcctgccgccccccccaaaaagccgcctaggccaggtgccccaggacacttaggctcccttgctagtttatctagccctgccgacagctacaatgagggcgtaaaactccagcctcaggaaattagccccccacccacagccaatctcgataggagcaatgacaaagtatatgagaatgtaaccggcttggtcaaggccgtgattgagatgtcctcaaagattcagccagctccccctgaggagtacgtcccaatggtaaaggaggtcgggctggcattaaggactcttctggctacggtggacgaaaccatccccctgcttcccgcatctacccaccgagaaatcgagatggcccagaaactcctgaatagtgaccttggtgaactgatcaataagatgaagcttgcacagcagtacgttatgaccagcttacagcaagaatataagaagcagatgctaaccgcggcacacgcactcgcagtggacgccaaaaatctactggatgttatagatcaggcaaggctcaaaatgctgggccagacacggccccactag

SEQ ID NO: 16935 - DNA, 198 bp, synthetic construct
  misc_feature 1..198: note = Description of Artificial Sequence: Synthetic coding sequence
  source 1..198: mol_type = other DNA
atggccgccgcctaccttgaccccaacctgaatcatacgcctaattcctctactaagactcacctggggaccggcatggagcgatccccaggcgcaatggaaagagtgctgaaggtgttccactacttcgagtctaacagtgaaccaacaacctgggctagcattatccgtcacggggacgctaccgatgtgagatag

SEQ ID NO: 16936 - DNA, 324 bp, synthetic construct
  misc_feature 1..324: note = Description of Artificial Sequence: Synthetic coding sequence
  source 1..324: mol_type = other DNA
atggccgctgcttatttagaccctaatctaaatcacactcccaatagcagcactaagacacacctcggcacgggtatggaacgcagccctggggctatggagagagtactgaaagtctttcattattttgagagcaacagcgagccaacgacatgggccagtatcatcaggcatggggacgccacagatgtgaggggaattattcagaagattgtcgactcgcacaaagtgaagcatgtggcctgttatggatttagattatcacacttgagatccgaagaagtgcactggcttcatgtggatatgggggttagctctgtgtag

SEQ ID NO: 16937 - DNA, 360 bp, synthetic construct
  misc_feature 1..360: note = Description of Artificial Sequence: Synthetic coding sequence
  source 1..360: mol_type = other DNA
atggccgctgcttatctcgaccccaatctgaaccacactccaaacagtagcaccaagactcatctgggaaccggaatggaacgttccccaggggcaatggagagagtactcaaagtgtttcactattttgaatctaatagtgagcctactacatgggccagcattattcgccacggtgacgccactgatgtaagagggattatccagaaaattgttgacagtcataaggtgaaacacgtcgcctgttacggattcaggttaagccatctgagatctgaagaggtgcactggctgcacgtcgatatgggggtctcatcagtacgtgaaaaatacgagttggctcatccaccagaggaatag

SEQ ID NO: 16938 - DNA, 2262 bp, synthetic construct
  misc_feature 1..2262: note = Description of Artificial Sequence: Synthetic coding sequence
  source 1..2262: mol_type = other DNA
gccgagaacatggccgacctcatcgacgggtactgtagactcgttaacgggacaagtcagagctttattattcgcccacaaaaggagggggagcgcgccctgccaagtatccccaagctcgcaaactcagagaaacaggggatgcggacccacgccgtatcagtttcgggggtgagccattgccagcacaaggtgaagaaggcaagaagattcctgccactcgtcttctgctctcacgatccaccttctacagatgagatctcaggcgacgaaaccgacgattacgctgaaatcatcgatgaagaggatacttacaccatgccaagtacccgggattatgagatacagagagagaggatcgaactgggccggtgtattggggaaggacagtttggtgacgtccatcagggaatttacatgagccctgaaaacccagcgttggccgtggccattaagacctgtaaaaactgcacatctgactctgtgagagaaaaatttctccaggaggcattaaccatgcggcaattcgatcatccacatattgtcaagttgattggagtgattactgagaacccagtttggataatcatggaactctgcaccctcggggagctgagatcgttccttcaggttcgaaaatactcgctggacctggcctcacttatcctctatgcctaccagctttccaccgcactggcatacctcgaatccaagagattcgtccaccgcgatattgcagccagaaacgtgctcgtcagctctaacgactgcgtgaagctgggggacttcggtctctcaaggtatatggaagactcaacctattacaaagcttctaagggaaagctccccattaagtggatggcgcccgagtctatcaacttcaggaggttcacaagcgcttccgacgtttggatgttcggagtttgcatgtgggaaatactgatgcacggcgttaaaccatttcaaggagtgaaaaacaacgatgtaattggacgtatcgagaatggggaaaggttacccatgcccccgaattgtcctcctaccctttattccctgatgaccaagtgttgggcctacgacccttctagacgtcctcgttttactgagttaaaggcccagctttcgacaatccttgaggaagaaaaagctcaacaggaagagcgcatgaggatggagagtcgacgccaggccaccgtgtcctgggatagcggtggctctgacgaagcgcccccgaaacccagccgtccaggctaccccagtcctaggtcttcagagggattttatcccagccctcagcacatggtccaaacaaatcattatcaggtgtcagggtacccaggtagtcacggtattaccgccatggccggctccatctatccaggccaggcttctctgctggatcagactgacagttggaaccatagaccacaggagatcgccatgtggcagcccaatgtagaggactccacggttctcgatctgagaggcattgggcaagtgctccccactcatctgatggaggagaggctcatacgacagcaacaggaaatggaggaggatcagcgatggttggaaaaggaagaacgcttcctgaagcccgatgttaggctatctcgcgggtcgatagatcgggaggacgggtcgctgcagggaccaatcgggaaccaacacatttatcagcctgtcggaaagccagaccccgccgcaccccccaagaaacccccacgcccgggcgcccctggtcatcttggatcattagcctcactcagctccccggctgactcgtacaacgaaggggtgaaaccatggcgccttcagccacaggagatttcaccaccccctaccgctaatttggatcgctccaacgataaagtttatgagaatgtgactgggttggtcaaggctgtcattgagatgagttcaaagattcagcctgcgccaccagaggagtatgtacccatggtgaaggaggtcggcttagccttaagaactctgcttgctacggtggatgagaccatccccctattgcctgcaagcacccaccgcgaaatagaaatggcacagaaactactgaactcagaccttggtgagctcatcaataagatgaaactcgcccagcagtatgtgatgacctcacttcagcaagagtataaaaaacagatgctgacagcagcgcacgcactggctgttgatgccaaaaacctcctcgatgttattgaccaggctcgacttaaaatgttaggccaaacgaggccgcattag

SEQ ID NO: 16939 - DNA, 3159 bp, synthetic construct
  misc_feature 1..3159: note = Description of Artificial Sequence: Synthetic coding sequence
  source 1..3159: mol_type = other DNA
atggcagccgcctatcttgacccaaacctcaaccacacacctaatagttccactaagacgcaccttggcaccggtatggagcgaagtccgggggccatggagcgcgttctgaaggtattccactattttgagagtaactcagaaccaaccacttgggcctcaatcattcggcatggcgatgcgaccgacgtgcgaggaatcattcagaagattgtggattcccacaaagttaagcacgtcgcatgctatgggttccgactcagtcatctccgatcagaggaggtgcattggcttcacgtggacatgggcgtgtcaagcgtccgggaaaagtacgaactcgcccaccccccggaggaatggaagtacgaactgagaatcagatacctgcccaaaggttttctcaatcagttcacggaagacaaacctactctgaacttcttctaccagcaggtcaaaagcgactatatgctcgaaattgcagaccaagttgaccaggagatcgccctgaagctgggctgtctcgagattagacgctcttactgggagatgagagggaatgcccttgagaaaaagtctaactacgaggttctggagaaagacgtgggcctgaaacggttttttcctaagtccttgttagactccgtgaaggccaagacgctcagaaaactcattcagcaaacgttccggcagttcgctaatctcaacagggaagagagcattctgaaattcttcgaaattcttagtccagtctacaggttcgacaaagagtgttttaagtgcgctctcggctcttcctggattatcagtgttgaattggcgatcggccccgaagaaggaatttcatatcttacagacaagggatgtaaccctactcatttagctgacttcacccaggtgcagaccattcagtacagcaactcagaagacaaggacagaaagggaatgctgcagcttaagatcgctggcgctcccgaaccgctgacagttaccgccccctccctgacaattgctgaaaatatggcagacctgatagacggatactgtaggctggttaacggaactagtcagtcttttattattaggccccagaaggagggtgaacgggcactgccaagcatccccaagctcgctaattcagaaaaacagggaatgagaacccacgcggtgtccgtgtctgagactgacgattatgccgaaattattgatgaggaagacacatacactatgccctccacacgtgactatgagattcagagagagcgcatcgagctcggcaggtgcattggcgaggggcaattcggggatgtgcatcaggggatttatatgtctcccgagaatcctgccctcgcagtggccatcaagacatgcaagaactgcacctcagattcagtgcgtgaaaagtttctccaggaggcccttaccatgagacagtttgatcatccccacatcgttaaattgatcggggttataactgagaaccctgtttggatcatcatggaactgtgcactcttggtgagctaaggagttttttacaggtcagaaagtactccctggaccttgcttcgctgatactttacgcataccagctctcgacagctctcgcctatttagagagcaagagattcgtccatcgggatattgccgcgagaaatgtccttgtctcaagtaatgattgtgtgaagctcggcgacttcgggctatcccggtatatggaagactctacatactataaagcctccaaaggcaaactccccatcaagtggatggccccggaaagtatcaattttagacggtttacatcggcttctgatgtttggatgttcggcgtgtgcatgtgggaaatactgatgcacggtgttaagccctttcagggcgtgaaaaacaatgacgtgattggccgcattgaaaatggtgagagactccccatgccccccaactgcccacctactctgtactccctgatgacaaaatgctgggcatacgatccatcccgccgccctcggtttaccgaattaaaagcccaactctctaccatattggaggaggagaaagcccagcaggaggagcgtatgcgaatggaatctcgtcgacaggcaacagtatcctgggacagcggcgggagcgacgaagctccaccaaagcccagcaggccgggatatccctctccccggtcctcagagggcttctacccatcacctcagcacatggtccagacaaaccactaccaggtgagtggatatccggggagtcatggaatcaccgctatggcaggatccatctaccctggtcaagcgagcctgctcgaccagactgactcctggaaccaccgtcctcaggaaatcgcaatgtggcagcccaacgtcgaagatagtaccgtgcttgacctccggggcatcgggcaagtgcttcctacccacctaatggaggagagactgatcagacagcaacaggagatggaggaggatcagaggtggctggagaaagaggaacgctttctgaagcccgatgtgcggctttctaggggtagcattgaccgggaagatgggtctctgcaaggcccaatcgggaaccagcacatctatcagcctgtgggcaaacccgatcctgccgcacctccaaagaaacctccccgaccgggcgccccgggacatctgggcagtctggcctctctgagctccccagccgactcttacaacgaaggcgtcaagctgcagccacaggagatcagcccgcctcctaccgcaaatctggacagaagcaatgacaaagtttatgaaaacgtaaccggattagtcaaagccgttatcgagatgtctagtaaaatccagccagcacctcctgaagaatacgtccccatggtaaaagaggtggggctcgctcttagaacccttcttgcaaccgtggatgagacgattcccctgctgcccgcctctacgcatcgtgagatcgagatggctcagaagctgctgaactccgacctgggagagctaattaataaaatgaagttagcacagcaatacgtcatgacaagcctgcagcaggaatataaaaaacaaatgcttaccgcagcccacgctctcgccgtcgacgccaagaatctgctggacgtgatagaccaggcacgcctgaaaatgttgggccagactaggccacactag

SEQ ID NO: 16940 - DNA, 2175 bp, synthetic construct
  misc_feature 1..2175: note = Description of Artificial Sequence: Synthetic coding sequence
  source 1..2175: mol_type = other DNA
attgctgagaacatggcagaccttatcgatgggtattgccggcttgtaaatggcacctctcaatcatttatcatcagacctcagaaagagggagaacgggcccttccatccattcctaagctcgcaaacagcgagaaacagggcatgcggacccacgccgtgagcgtatcggaaaccgatgattacgccgaaatcattgatgaggaagacacctacacaatgccttcgaagtcttacgggatagacgaggccagagactatgagatacagcgtgaacgcattgagttgggaaggtgcatcggagaggggcagttcggtgacgtgcatcagggaatttatatgagcccggagaaccctgccctggcggtcgctataaagacctgcaagaactgcaccagtgattccgttagagaaaaatttcttcaggaagcactcaccatgcgccagttcgaccaccctcacatcgtcaagcttattggtgtcatcaccgagaacccagtgtggattatcatggagctgtgcaccttaggcgagctacgctccttcctccaggtaagaaaatacagcctcgacctggcaagtctcattctttacgcatatcagctgagtacagcccttgcctatttggagtcaaaacggttcgtacaccgtgatatcgcggccaggaacgtgctcgtttcgtcgaacgactgtgtcaaactcggcgatttcggtctgtcgcggtatatggaggactctacatactataaagcatccaaggggaaactgcccatcaagtggatggcccctgaatcgatcaactttcggcggttcaccagtgcatccgatgtgtggatgttcggggtgtgtatgtgggaaatactgatgcacggcgtgaaaccttttcagggcgtgaagaacaatgatgtaattgggagaattgaaaatggcgagagactgcccatgcctcccaactgtccacctacactgtactcccttatgacaaagtgctgggcctacgacccgagcaggcgaccaagattcacagaactgaaggcccaactgtccactatcctcgaggaagagaaagcacagcaagaggagcggatgaggatggaatctcgccggcaagccactgtttcctgggacagtggcggctccgacgaagctcctcccaagccatcccggcccggatatccgagcccccggtccagcgaaggattctaccccagcccccaacatatggttcaaacgaaccactatcaggtgtctggatatccggggtcccatgggatcacagcaatggctggctccatttatcctgggcaggcctccctgttggaccagaccgactcttggaatcaccgtcctcaggagatcgcgatgtggcagcccaatgtggaggacagtaccgttttggatctccggggcattggccaggttcttccgactcacctcatggaagagcggctgatcagacaacagcaggagatggaagaggaccagcgctggctcgaaaaggaagaacgcttccttaagcccgatgttagactttccaggggctctatagacagagaggatggcagcctgcagggtccaatcgggaaccagcatatctatcagccagtgggtaagccagaccccgcagccccccccaaaaaaccccctaggcctggggcacccggacatttgggatctctcgccagtttgagtagcccagccgacagctacaacgagggcgttaaactccaaccacaagagatttcacctcctcctacagctaatttagacagaagcaatgataaagtgtacgaaaatgtgacagggctggttaaagccgtgattgaaatgtcaagtaaaatccaacccgccccccccgaagagtacgtgcctatggtgaaagaagtcgggctcgccctgcggactctgctcgcaaccgtggacgaaacaattcccttacttccagcatcgacacacagggaaatagaaatggcgcagaagctgctgaattcagacttgggtgagctcataaataagatgaagctggcccagcaatacgtcatgacttccttacagcaggaatacaaaaaacaaatgcttaccgcagcgcatgcactggctgtcgacgcaaagaatctccttgacgttatcgaccaggccagactcaagatgttgggtcaaacgcgaccacactag

SEQ ID NO: 16941 - DNA, 363 bp, synthetic construct
  misc_feature 1..363: note = Description of Artificial Sequence: Synthetic coding sequence
  source 1..363: mol_type = other DNA
atggccgctgcttacctggaccccaacctcaaccacacaccgaattcttctacaaaaacccacctggggaccgggatggaacgctccccaggggctatggagcgtgttttaaaagtctttcactattttgaatcaaactccgaacccaccacctgggcatcaataatccggcacggcgacgctacggacgtcaggggcatcatccagaagatcgtagactcgcacaaagtgaaacacgtggcctgttacggcttcaggcttagccatctccgaagtgaagaggtgcactggctccatgtcgatatgggggtctcctcagtcagggagaagtacgagctggcacatcctccagaagaatggtag

SEQ ID NO: 16942 - DNA, 156 bp, synthetic construct
  misc_feature 1..156: note = Description of Artificial Sequence: Synthetic coding sequence
  source 1..156: mol_type = other DNA
atggccgctgcctatctggatccaaatctaaaccacacaccaaactccagcacaaaaacccaccttggcactggtatggagcggagtccgggcgctatggagagagttctgaaggtcttccactacttcgaaagcaactctgagccaactacatag

SEQ ID NO: 16943 - DNA, 3021 bp, synthetic construct
  misc_feature 1..3021: note = Description of Artificial Sequence: Synthetic coding sequence
  source 1..3021: mol_type = other DNA
atggcagccgcctacttagatcccaacctgaatcacacacccaattctagtaccaagacccatctgggtaccggtatggagcgatcaccgggcgctatggaaagagtactgaaggtatttcactacttcgagagcaacagcgaaccaacgacctgggcctccatcatcagacacggcgatgctacagatgtgagaggaattatccagaagatcgtcgattcccacaaggtgaaacacgtggcctgctacgggttccggctctctcacctccgttctgaggaggtccactggcttcatgtggacatgggcgtgtcatctgtgagagagaagtacgaacttgcccatccaccagaggagtggaaatatgagcttagaattcggtacctccctaaaggattcctgaatcagttcacagaagataagcctaccctgaattttttctaccaacaggtgaagtcggattatatgctcgaaattgccgaccaagtggaccaggagatcgctttaaaactgggttgcctagaaattaggcgaagctactgggagatgagggggaatgcgttggaaaaaaagtccaactacgaagtgctggaaaaggacgttggcctcaaaaggtttttccctaaatctcttttggacagcgtcaaagccaagaccttaagaaaactgattcaacaaacattcaggcagttcgcaaacctaaaccgcgaagagtcaatcctgaagttttttgaaatactgagccctgtgtaccgctttgacaaagaatgtttcaagtgcgcactggggagttcttggatcattagcgtggagttggcgattggcccggaagagggaatttcctacctgaccgataagggctgtaaccctacacacctcgccgactttacccaggtgcaaactatccagtactctaatagcgaagacaaggaccgaaaggggatgctgcaactgaagattgccggagctcccgaacccctcaccgttactgctcccagccttactattgctgagaatatggccgatctgattgatggatattgtcgcctggtgaatgggaccagccaatccttcatcatccgtccccagaaggaaggcgagcgggctttaccgagcattcccaagctggccaattccgagaagcagggcatgcgtacccacgctgtctcagtatctgaaaccgacgattatgccgagatcatcgacgaagaagacacctatacaatgcctagcacacgggactacgagatccagagggagcgaatcgagttgggtcgatgcatcggtgagggacaatttggtgacgtgcaccagggcatctatatgtccccagagaatcccgccctcgctgtggctatcaagacttgtaagaattgtacatctgactctgtcagagaaaagttccttcaggaggctctaaccatgcgtcaatttgaccatccccacatcgttaagctcatcggcgtcattaccgagaaccccgtgtggatcatcatggaactgtgcactctcggagaacttagaagttttttgcaagtgcggaagtattcccttgaccttgcatcacttattttatacgcctatcagttgtctacagccctggcatacttagaatcaaaaaggtttgtccatagggatattgccgcccgtaacgtgttggtgagctcaaacgactgcgtcaaactgggagacttcgggctgagcagatatatggaggactcaacctactataaggcctccaagggaaaactgcccattaagtggatggccccagaaagcataaactttcggcgtttcacctccgcctccgatgtgtggatgtttggggtctgcatgtgggaaatcctgatgcatggagtcaagccattccagggggtgaaaaataacgatgtcatcggccgaatcgaaaacggggaaaggttgcctatgccacctaactgtcctcctaccctgtatagtcttatgacaaaatgttgggcttatgatccttcacgtagacctcggttcactgagctgaaagcacaactgtcaacgatcctcgaggaggaaaaggcacaacaagaggagcggatgaggatggaatcccgacgtcaggccactgtgtcatgggatagcggtggcagtgacgaagcccctcccaaaccttcccgccctggttacccctccccccggtccagcgaaggtttctatccctccccgcagcatatggttcagactaatcattatcaggatagtacagtccttgaccttagaggcattggacaggtcctacccactcacctcatggaggaacgtcttattcgccagcagcaggagatggaagaggaccagagatggctggagaaagaggagcgttttcttaagcccgacgtgaggctctccaggggcagtattgaccgggaggacggatcgctgcaaggacccattggcaatcagcacatctatcaacctgttggtaaacccgatcccgccgcccccccaaaaaaacccccaaggccaggcgcgcccggccatttgggctccctggcctctctctcctcacccgctgactcctataacgaaggggtgaagctgcaaccccaggaaataagtccaccgccaaccgctaaccttgacaggtctaatgacaaagtatacgaaaacgttaccggattggtaaaggcagtcatcgagatgagctcgaaaattcagcccgctcctcctgaagagtacgttccaatggtgaaagaggtcgggttagctttgaggaccctgttggctacggtcgacgaaaccattccactcctgcccgcctcaactcatagagagatcgagatggcacaaaaattgctcaatagcgaccttggcgaactgatcaacaagatgaaactcgcccagcagtacgtgatgacgtcactgcaacaagagtataagaagcagatgcttaccgctgctcacgcactggccgtggacgcgaagaatctgctggatgtcatcgatcaggcaaggctgaagatgctcgggcagaccagaccgcattag

SEQ ID NO: 16944 - DNA, 2163 bp, synthetic construct
  misc_feature 1..2163: note = Description of Artificial Sequence: Synthetic coding sequence
  source 1..2163: mol_type = other DNA
atggcagatcttatagatggctattgtaggctggtgaacggtaccagccagtcctttatcatccggccacaaaaagagggggagagagccctgccgtcaatcccaaagctggcaaacagcgagaagcagggcatgcggacacatgcagtttccgtgtctgaaacagatgactacgcagagatcatcgacgaggaggatacgtacacaatgccttctaaatcttacggaatcgatgaggcgcgagattatgagatccagcgggagcggatagaactgggaagatgcattggagaagggcagttcggcgatgtgcaccagggaatctacatgtcccccgaaaacccagccttagcagtcgcaatcaagacctgcaagaattgcacctcggattctgttagggagaagttccttcaggaagccttgacaatgcgtcagttcgaccatccccatattgttaaattaattggagtcataacagaaaatcccgtatggatcatcatggagctatgcacacttggagagctgcgctctttcctccaggtcaggaagtattctctggacctggcctcgctaatactctatgcttatcagctgtctacagctcttgcctacctggaatctaagcggtttgtgcacagagacattgcagcccggaatgttctcgtgagcagtaacgactgcgttaagttgggtgacttcggcttaagccgatacatggaggactccacttactataaggcgtccaagggaaaattgcccattaagtggatggctccagaaagtataaactttaggcggtttacctccgcatccgacgtttggatgttcggtgtgtgtatgtgggagatactgatgcacggggtgaagccatttcagggtgtgaagaacaacgacgtgattggacgcatcgaaaatggcgagagacttccgatgcccccaaactgtcctcctacgttgtactcactcatgacgaaatgttgggcttatgatccttccagacggcctaggttcaccgaattgaaagcacagttatccactattctagaggaggagaaggcacagcaggaagaaaggatgagaatggagagtcgcaggcaggccactgtgtcctgggattctggcggctccgatgaagcccctcctaaacccagccgccccggttaccctagcccaaggtcttctgaggggttctacccctcgcctcaacatatggtgcagaccaatcattaccaggttagtggatatcccgggtcccacgggatcacagccatggctggcagcatttatcctggacaggcctcactcctagatcagacagactcttggaatcaccggccacaggaaatcgccatgtggcagcccaacgttgaagacagcacggtgctagacttgaggggcatcggtcaggtcttgcccacccacctgatggaggagaggctgatccgccagcagcaggagatggaagaggaccaacgttggttagagaaggaggagagatttctgaagccggatgtgagattgtctcggggatccatagacagggaggacgggtctctgcaaggaccaattggtaaccagcacatctatcaacccgtggggaagcccgaccccgctgccccacctaaaaaacccccacgcccaggcgcaccaggccacctgggctctctcgcaagtctgagttcccccgccgacagctacaacgaaggtgttaaactccagccccaggagatctcacctccccctaccgcaaatctcgatagaagcaacgacaaggtgtacgagaatgttacaggcctggtcaaagccgtcatcgagatgtcaagcaaaatccagcctgccccaccagaggagtacgtgcctatggtgaaggaagtgggtctggctctaaggacgctactggctaccgtcgatgaaacaattccgctcctcccagcaagcactcatagagagattgaaatggcccagaagctcctcaacagcgatctgggagaattgattaacaaaatgaaattggctcaacagtatgtgatgacttccctgcaacaggagtataagaagcagatgctcacagccgcacacgcccttgccgtggatgcaaagaatctgctcgatgttattgatcaagccaggctgaaaatgcttgggcagacacgcccccattag

SEQ ID NO: 16945 - DNA, 3198 bp, synthetic construct
  misc_feature 1..3198: note = Description of Artificial Sequence: Synthetic coding sequence
  source 1..3198: mol_type = other DNA
atggctgcagcatatctcgaccctaacctgaaccataccccaaattcttcaacaaagacacacttgggcactggcatggagcgatctcccggtgccatggaacgtgtgctgaaagtattccactacttcgaatcgaactccgaaccaaccacttgggcatctataatcaggcacggggacgccacagacgtacgaggcattattcagaagatcgtggactctcataaagtgaagcatgttgcttgttacggatttcgtctcagccaccttcgcagtgaagaggtacactggctgcacgtggacatgggagtctcctcagtgagggagaaatacgagctcgcacatcccccggaggaatggaaatacgaattacggataaggtacttgcctaagggcttcctcaatcagtttaccgaagataaacccacacttaatttcttttatcaacaggtaaaatccgactacatgctggaaattgccgaccaggtggatcaggagattgctctgaagctcggctgcctggagattcggcgttcttattgggagatgcggggaaacgcactggagaagaagtcaaattacgaagtcctggagaaggacgtgggactgaagcgcttctttcccaagtccctcctggactctgtcaaggccaaaaccttgcgaaagcttattcagcaaacttttaggcaatttgctaatctgaacagggaggagtctatcctaaaattttttgaaatcctgagtcccgtgtacaggtttgacaaggagtgttttaaatgtgctctgggcagctcatggatcatctccgtagaactggctattggcccggaggaaggaatctcctatctcaccgataaaggttgcaatccaactcatctagccgatttcacccaagtgcagacaatccaatacagtaattcggaagataaagacagaaagggcatgctgcaacttaagatagctggtgcccccgagcccctcaccgttacagcacccagtctgaccattgcagagaatatggccgatctaatcgacggctactgccggctggttaatggaaccagccaatcgttcataataaggccacaaaaggaaggagagagggccctacctagcattcctaagcttgcaaattcagagaagcagggaatgagaacccacgctgtctcggtctctgaaactgatgattatgctgaaatcatagacgaggaggacacctacacaatgccctcaacacgtgactatgaaatccagcgcgagcggatcgagctcggacggtgcattggggagggccagttcggtgatgtgcatcagggcatctatatgagcccagagaacccagcccttgctgtcgctattaagacatgtaaaaactgcacttccgactccgtgagggaaaagttcttgcaggaggcgctcacaatgcgacaatttgaccatccccatattgtgaagcttataggggtgatcaccgagaaccccgtgtggatcataatggagctgtgcactttgggtgagctgcggagttttttacaggtgcgaaaatactccctggacctggccagcctgatactgtatgcctaccagttgtccactgcactcgcctatctggagtccaaacggtttgttcaccgggatatagctgctagaaacgttctggtaagctctaacgattgcgtgaagttgggcgatttcggcctctcacgatacatggaggattctacatactataaagcatcgaaggggaagctgccgattaagtggatggcccctgaaagtattaattttcggcgttttaccagtgcatccgacgtctggatgtttggcgtctgcatgtgggagattctcatgcacggcgtgaaaccttttcagggggttaaaaataacgatgtcattggccgaatcgaaaatggtgagaggctgcctatgccccccaattgcccccctacattatacagtcttatgaccaaatgctgggcttatgaccctagcaggcgccctcgtttcacagaattgaaagcacagctgagtaccatcctcgaggaagagaaggctcaacaggaggagagaatgcgtatggagtcacgacggcaagcaacggtctcctgggatagtggcgggtcggatgaggctccgcccaaaccgtcacgccctggttatccctccccgcggtctagtgaagggttttacccaagcccacaacatatggttcagaccaaccactaccaagtgtccggatacccagggtcacacgggatcacagctatggctggctctatataccccggacaggctagtcttctggatcagacggacagttggaatcatcgcccccaagaaattgctatgtggcagccaaatgttgaggattctaccgttttagacctgagaggcataggacaggtgttacccacacacttgatggaggagcgcctaatccgacagcagcaagaaatggaagaagaccaaaggtggttagagaaagaggaacgattcctgaagcccgatgtaagactttcacggggctcaattgatcgggaagacggcagcctgcagggccccattgggaatcagcacatttaccagccagtgggaaagccgggaaaggaggaaaagaattgggctgaacgcaatcccgccgcgcccccaaagaagccgcctagacctggcgcacctggacatctgggatccctggcaagcctgtcttctcccgccgactcttacaatgaaggtgtcaaaccgtggcgactgcagccacaggaaatctccccacccccaacagctaaccttgatcgctctaacgataaggtctacgaaaacgtgacaggtctggtcaaagccgtgattgaaatgtcaagcaagatacaacctgcccctccagaagagtacgttccaatggtgaaggaggtgggactagctttgagaacactgctagctaccgtcgatgagaccatacccctgttgcccgcttcgacgcaccgagagattgagatggctcagaagctgctgaactccgacttgggagaactgatcaacaaaatgaagttggctcagcagtacgtgatgacctcccttcagcaagaatacaaaaagcagatgctgaccgctgcccacgcactggccgtggatgcaaaaaatttgctggatgtgattgatcaggcacggctaaagatgcttgggcagaccagaccacactag

SEQ ID NO: 16946 - DNA, 2904 bp, synthetic construct
  misc_feature 1..2904: note = Description of Artificial Sequence: Synthetic coding sequence
  source 1..2904: mol_type = other DNA
atgtccggagtctccgaacctcttagtcgggtgaaattagggacccttagaaggccagaagggccagcagaacctatggttgtggtgccagtcgatgtggaaaaagaggacgttaggattctcaaggtatgcttttacagtaattcctttaatcctggcaaaaattttaaactggttaagtgcacagtgcagactgagattcgcgagatcataacctcgatactactcagcggcaggattgggcccaatatccgactcgctgagtgctatggactgcgattgaaacatatgaagtccgacgagatccactggctgcatcctcagatgactgtgggcgaagttcaggacaagtacgaatgcctacacgtagaggcagagtggcgctacgatcttcaaatccgctatctacctgaggacttcatggagtcacttaaagaggaccgcacaacgcttctctatttttatcaacagctgcggaacgactatatgcagagatacgcgagtaaggtctccgagggcatggctctacaattgggttgcctcgaattaaggagattctttaaagatatgccccataacgccctggacaaaaagtcaaactttgagctcctggagaaagaggtgggccttgacctgtttttccccaaacaaatgcaagaaaacttaaagccaaagcagttccggaagatgatacagcagacatttcagcaatatgcttcactgcgggaagaggagtgtgttatgaagttcttcaataccctggccggcttcgctaacattgaccaggaaacctatcggtgcgagctcatccagggatggaatattactgtggacctggtgataggaccgaaaggcattaggcagctgaccagccaggacgccaaacctacatgccttgcagaatttaagcagatcagaagtataaggtgcctgccacttgaggagggacaggctgtactgcagctgggaattgagggcgccccgcaagcgctgagcattaagacaagtagcctagcagaagctgaaaacatggcggatctgatcgatgggtactgtaggcttcagggcgagcaccagggcagccttataatccaccccagaaaagacggagagaagaggaactcactacctcaaattcctatgctcaacctcgaggcaagacggagtcacttaagcgagagctgcagtatcgagtctgacatttatgccgagatccctgacgagaccctgcgacgtcctgggggcccccagtatggtatcgctagagaagacgttgtccttaatcgcatcttgggggaggggttctttggggaggtttacgagggggtctataccaaccataaaggagagaaaattaacgtcgccgtcaagacatgtaagaaggattgcaccctggacaacaaagagaagttcatgagcgaggccgtcatcatgaaaaatcttgatcacccgcatatcgttaagttaattggaataattgaggaggagcctacatggatcatcatggagctttacccgtacggtgaactgggacactatttagagcggaacaagaactctctgaaagtgctgaccctggtgctatactccctgcagatttgcaaggctatggcatatctcgaatcaatcaattgcgtgcacagagatatcgccgtgagaaatatactggtggccagtccagagtgcgtgaagttgggcgatttcggtctctcccgctacatcgaggacgaagactactataaggccagcgtcacccgcctgcccataaagtggatgtctcccgaatctatcaacttccgccgtttcaccacagcctccgatgtttggatgtttgccgtttgcatgtgggaaatactttctttcggcaagcagccatttttttggctggagaacaaggacgtcatcggcgtcctggagaagggcgatagactccctaagcccgatctttgcccaccagtgctgtatacgttgatgacccgctgctgggattacgacccgagcgacagacccaggtttacagagctcgtttgtagtctatcggacgtgtatcagatggaaaaagacattgcaatggaacaagagcggaatgctcggtacaggaccccgaagatcttagagccaacagctttccaggagcccccaccaaaaccatcacgtcccaagtatcgcccccctcctcagaccaacctgctagcccccaagctccagtttcaggaagaggactttattcagccatcttcaagggaggaagctcagcaactgtgggaggcggagaaagtcaagatgcgccagattttggacaaacagcagaagcagatggtggaagactaccagtggttgcggcaggaggagaaatcactggatccgatggtgtacatgaacgacaaatcccctctgacaccagaaaaggaagttggctatctggaattcaccggccctcctcagaagcccccgagactcggcgcacaaagcattcagcccactgcaaacctggatcgcactgatgaccttgtgtacctgaatgttatggaactggttagggctgttcttgagctgaaaaatgagctatgtcagttgccacccgagggctacgttgttgtggttaaaaatgtagggcttacattgcgaaagctgatcggaagtgtggatgacctgttgccttctctcccctcatcctcacgtacagagattgaaggcactcagaagctgctgaacaaggacctggctgaattaattaataagatgaggttggcgcagcagaatgcagtgacctctctctccgaagagtgcaagcgccagatgttaacagccagtcacacactcgcagttgatgcgaaaaacctgctcgatgcagtggaccaggccaaggtgctggctaatctggcacacccccccgcagaatag

SEQ ID NO: 16947 - DNA, 3030 bp, synthetic construct
  misc_feature 1..3030: note = Description of Artificial Sequence: Synthetic coding sequence
  source 1..3030: mol_type = other DNA
atgtcaggcgtgagtgaacccctgagcagagtcaagctggggaccctgcgccgtcccgagggacccgctgaaccaatggtggtcgtgcccgtggatgtcgaaaaggaagatgtgagaatactaaaggtgtgcttttatagcaactcctttaacccgggcaagaatttcaagctggtgaaatgcaccgtgcagaccgaaatcagagagatcattacctccatccttctttcaggtagaatcggacctaatatcaggctcgccgaatgctacggcctgaggctgaagcacatgaagtccgatgaaatccactggttgcatccccagatgactgtgggagaggtccaagacaaatacgagtgtctgcatgtggaggctgagtggcggtacgatctgcagattaggtatcttcccgaggactttatggaatcactgaaagaggatcggacaacgcttctatatttttaccagcagctgcggaacgattacatgcagagatacgcttctaaagtcagtgaaggcatggccctgcagctgggttgcctagagttgcgcagattttttaaggatatgcctcacaatgccctggacaaaaagagcaactttgagcttcttgagaaggaggtgggtctcgaccttttcttcccgaaacagatgcaggaaaatcttaagccgaaacagttcaggaagatgatacaacagacattccaacaatacgcgtcgctgcgcgaggaggaatgtgtcatgaaattctttaacacattggccggtttcgcaaacattgaccaggagacatatcgatgcgagttgatccagggatggaatatcacagttgatctggtcattggtcctaagggtattcgccagctgacttcccaggatgcgaagccgacgtgcttggccgaattcaagcaaatccgctccatccgctgcctgcccctagaagaagggcaggccgtgcttcagcttggcatcgaaggcgctcctcaggccctctctatcaagacatcctctctggcggaggcagaaaacatggccgacctcattgatggctattgccgccttcagggggagcatcaaggatccctgatcattcacccacggaaggacggcgagaagcgcaactcccttccccagatccccatgctcaatttggaagcccgccgtagccacttatctgaatcttgttcaatcgaatctgacatctacgccgaaataccggacgagaccttgagaagaccgggtgggccacaatacggtattgcccgcgaggacgtggtccttaatagaatcctgggcgaggggttttttggtgaagtatacgagggcgtgtatactaaccacaagggggagaagatcaatgtggcagtaaagacatgtaagaaagattgtacattggacaataaagaaaagttcatgagcgaggccgttattatgaagaatctcgaccacccacatattgtcaagctgattgggattatcgaagaagaaccaacctggatcatcatggagctttatccatacggggagttggggcactatcttgagcgaaacaaaaacagcctgaaagtgctaacacttgttctgtacagtctgcagatatgcaaggcaatggcatacctcgaatctattaattgcgtccaccgtgatatcgccgtgcgtaatattctggtggccagtcccgaatgcgttaagcttggagactttggcctgagcaggtatatcgaagacgaggactattacaaggcctcagttacccgtctcccgataaaatggatgtcaccagagtcaattaacttccggcgctttacgaccgcctccgacgtgtggatgttcgccgtgtgtatgtgggagatcctgtcctttgggaaacagccatttttttggctcgaaaataaggatgtgattggggtgctggagaagggggatcgcctgcctaaacccgacctgtgcccccccgttctgtacactctcatgacccggtgctgggactacgacccgtctgaccgcccaaggtttacggaactcgtctgtagtctcagtgacgtgtaccagatggagaaagatatagccatggagcaagaacgaaacgcccgataccgtaccccaaagatcttagagcctacggcctttcaagaaccacccccaaagccctcgaggccaaaatacaggccccccccccagaccaatttactggcacccaaattgcagtttcaagtcccagagggcctttgcgcaagctctcccacactgaccagccctatggagtatccttcgcctgtgaattcactgcacacaccacctttgcaccggcataatgtgttcaaaaggcattccatgagggaagaggactttatacagccaagttctcgggaggaagcgcagcagctgtgggaagctgagaaggtcaagatgcgacagatcctggataagcagcagaagcagatggttgaggattaccaatggctaagacaggaagagaagagcctggacccgatggtttatatgaacgacaaatcccccctcacaccagagaaggaggtcggatacctggaattcaccggcccccctcaaaagcccccgagactgggggctcagtcaattcagcccacggcaaatctcgatcgaacagacgatttggtgtatttaaatgttatggagctggtcagagccgttttggagctgaaaaacgaactgtgtcaactgccccccgagggatatgtagttgtggtgaaaaatgtaggcctaaccctgcggaagctaatcggttccgttgatgacctactcccctcgctcccttcatcaagtcgaaccgaaatcgaagggacccagaagctcctcaataaggatctggccgagctcatcaataagatgcgcctcgcacaacaaaatgccgttactagcctttctgaggaatgtaaaaggcagatgctcacggctagccacacccttgcagtagacgccaagaacctgctggatgctgtggaccaagcaaaggtactggccaacctggctcatcccccagccgaatag

SEQ ID NO: 16948 - DNA, 3030 bp, synthetic construct
  misc_feature 1..3030: note = Description of Artificial Sequence: Synthetic coding sequence
  source 1..3030: mol_type = other DNA
atgtctggggtgtccgaaccattgtctagggtcaaactcgggacactgagaaggcccgaaggcccagccgagcccatggtcgtggtgccagtcgatgtggagaaggaggacgtgagaatcttaaaggtatgcttctactctaactctttcaaccccggaaagaacttcaagttagtcaaatgtaccgtacaaactgaaattagggagatcatcacttctatccttctgagtggaaggattgggcccaatatccggctggctgagtgttacggcttgcggctgaagcacatgaaatctgatgagattcactggttacatccacagatgactgtcggcgaagtccaggataagtatgagtgtcttcatgtcgaggctgagtggagatacgaccttcaaataagatacttgcccgaggatttcatggaaagtctgaaggaagaccgcacgaccttgctttacttttatcaacaacttcggaacgactatatgcagagatacgccagtaaggtaagtgagggcatggctctccagctagggtgtctggaactgcgcaggttcttcaaggacatgccccacaatgcacttgataagaagtctaactttgagcttttggaaaaagaagttggtctggacttgttttttcctaagcagatgcaggagaacctgaagccaaaacagtttagaaaaatgatacaacagacttttcagcagtatgcctccctacgggaggaagagtgtgtgatgaaattttttaacacactggctggatttgctaatatcgatcaggagacttataggtgtgaactcattcagggatggaatatcacagttgatttggtaattggcccgaaggggattcggcaactgacctcccaggatgctaaacccacctgcctcgccgaattcaaacagatacggtctataagatgcttgcctttagaggagggccaggctgttttgcagctgggaatagagggcgcgccccaggctttatcaatcaagacttcaagtctcgcagaagcagagaacatggcagacctgatcgacgggtattgtcgtttgcagggagagcaccaggggtccctgattattcatcccagaaaggacggcgaaaagcgtaatagcttaccccagattccgatgttaaacctcgaggcccggcggtctcatctaagcgaatcatgcagtatagaatctgatatttacgctgagatacctgacgaaacactgagaaggccgggggggccccagtacggaatcgccagggaagacgtcgtgctgaaccggatccttggggaaggcttctttggcgaagtctatgaaggagtgtacacaaatcataagggcgagaagatcaacgtcgccgtcaagacctgcaagaaggattgcaccctcgataacaaagaaaagttcatgagcgaggcggtaattatgaagaatttagatcatccccatattgtgaagctgataggcatcatagaggaggaacctacatggatcatcatggaactctatccgtatggggagctggggcattacttggaaagaaataagaacagcctgaaggtgctcacactggtgctttattccctccaaatctgcaaggcgatggcctatctagagtctattaattgcgtacatcgcgatatagccgttagaaatatcctggtcgcctcccccgagtgtgtcaaacttggagacttcgggctgtctcgatatattgaagatgaggattactacaaggcttctgtaactaggctcccaattaaatggatgtctccggaaagtatcaattttaggcgttttaccactgcctcagatgtctggatgttcgccgtatgtatgtgggagattctgtcatttggcaagcaaccctttttttggctagagaataaagacgtgattggagtactggagaagggcgaccggctgccaaaacctgacctctgtcctcctgtgctgtacaccctgatgactaggtgttgggactacgacccttccgaccgccctagattcacagaattggtttgcagtttatcagatgtctatcagatggaaaaagacattgcaatggagcaggagcgcaatgcaagatatcggacccccaagattctggagcctaccgcctttcaggaaccaccccctaagccgagtaggcctaaatatagacccccaccccagaccaaccttctggcacccaagctacagttccaggtgccagaaggcctttgtgccagctcccccactctgacgtctccgatggagtatccctccccggttaactccctccacacaccgcccctgcatagacacaatgtgtttaagcgccattccatgcgggaagaggacttcatccagccctccagtagggaggaggcacagcagctgtgggaggctgagaaggtcaagatgagacagattctggacaaacaacagaagcagatggttgaggactaccagtggcttcgccaagaggagaaatcccttgaccctatggtgtacatgaatgacaaaagccccttaacgcctgagaaggaagttgggtacctggagttcactggcccccctcaaaagcctcctcgactgggtgcacagagcatccaacccacagcaaatttagatagaacggatgatctcgtttatctgaatgtgatggagttggtgagagctgttcttgagcttaagaatgagctctgtcagctgccacctgaagggtatgtcgtggtggttaagaatgtcggtctgaccctccgaaaactgatcggctcggtggacgacctgctgccctctttgccctcctctagtaggaccgagatagaagggacccagaagctcctgaacaaagatctggccgagcttatcaacaagatgagactggcccaacagaatgccgtgacaagtctttcagaagagtgcaagcgccagatgttgacagctagccataccctggcagtagatgctaagaacctgctcgacgccgtggaccaggccaaagtccttgccaatcttgcgcatcccccggccgagtag

SEQ ID NO: 16949 - DNA, 2904 bp, synthetic construct
  misc_feature 1..2904: note = Description of Artificial Sequence: Synthetic coding sequence
  source 1..2904: mol_type = other DNA
atgtctggggtgtcagagcctctctcgcgggtaaagttaggaacgctgcgcagaccagaggggcctgctgagcccatggtagtggtacccgtggatgttgaaaaagaggacgtccggatcctgaaggtctgcttctatagtaattcctttaacccaggcaaaaactttaaattagtgaagtgtaccgttcagaccgagattagggagattattacgtctatccttctttcgggtcgaatcggacctaacattcgcctcgccgagtgttacgggctaagactgaagcatatgaagtctgacgagattcactggctccacccgcagatgaccgttggtgaagttcaggataagtacgagtgtctgcacgtggaagcagagtggaggtacgatctgcaaatccgatatctgccggaggattttatggaatccctaaaagaagataggactactctgctgtatttctaccagcagctgaggaatgattacatgcagcggtatgccagtaaggtgtctgaaggtatggctctgcagctcggctgtctcgaactgcgccgcttttttaaggatatgccgcataacgctttggataagaagagcaatttcgagctgctcgaaaaagaagtcggcctggatctgttttttccaaagcaaatgcaggaaaatttgaagccaaaacagttcagaaagatgattcagcaaacgttccagcagtatgcctcgctgagagaggaggaatgcgtgatgaaattcttcaatactttggcgggcttcgcaaacatcgatcaggaaacttacagatgtgagcttatccaagggtggaacataacagtggacctggttattgggccaaagggaattcggcaactgacttcacaggacgcaaagcccacatgtctcgcagagttcaaacagattagaagcatcagatgcctgcccctggaagagggacaggctgtcctgcagcttggtatcgagggagctccccaggccctgagcatcaagaccagctccctggccgaagccgagaacatggcggacttgatagacggctactgtagactgcagggcgagcatcagggctcacttatcatccatccaagaaaggatggcgagaagcgcaattccttaccacagatacccatgctgaacctcgaagccagaaggtctcacctgtctgagagctgttctattgagtccgacatctatgcagaaattcctgacgaaaccctgcgtcgccccggcgggcctcaatatggtatcgcccgggaggacgtcgtactaaatagaatcctgggcgaaggcttcttcggggaagtttacgaaggagtttacacgaaccacaagggagaaaaaattaatgtggcagtcaagacttgcaagaaagattgtactcttgataataaagagaaattcatgtccgaggccgtgataatgaagaatctcgatcacccccacatcgtgaagttgattggaattatcgaagaggagcctacatggatcattatggaactttatccttacggtgaattggggcattacctcgaacgcaataaaaacagcctgaaggtgctcaccttggtgttgtatagtttacaaatctgcaaggccatggcttatctggagtccattaattgcgtccacagggacattgcggtgcggaacattctagtagctagccccgagtgcgtgaaattaggggactttggcctgtccaggtacattgaagatgaagactactataaggcttctgtcacgagactgccaattaagtggatgtcacctgaatcaataaatttccgtagattcacaactgctagtgatgtctggatgtttgccgtctgtatgtgggagatcctatcctttggaaaacagccgttcttttggctggagaacaaagatgtaatcggcgtcctagagaagggcgacagactgccaaagcccgacctatgtccacccgtgttgtacaccctgatgactagatgctgggattatgatccttccgacaggcctcgctttaccgagctggtttgcagcttgagcgatgtgtaccaaatggagaaagatatcgcgatggaacaagaacgcaacgcacgttaccgaaccccaaagatattagagccaacagctttccaggaaccaccgcccaagccatcccgaccaaaataccgaccgcctccccagaccaacttgctggccccaaaactccaattccaggaagaggattttattcaaccatcctctcgggaggaagcccagcagctttgggaggccgagaaagtgaagatgcgtcaaattctggataaacagcagaagcagatggtagaagattatcaatggctacgacaggaagagaagtcattagacccaatggtgtatatgaacgacaagagtccgctgactccagaaaaagaagttggttacctggagtttacgggaccgccgcaaaaaccccctcgtctgggcgcacagagtatacagccgactgccaatcttgatcgaaccgatgacctcgtgtatctgaacgtcatggaactagtcagagcggtcctggagctgaagaatgagctttgccagcttccccccgagggctacgtggtggtcgtcaagaacgttggcctgaccctccgcaagcttataggaagcgtggatgacctccttcccagcctgcctagctcgtcaaggacagaaatcgagggcacccagaaactgttgaacaaggatctcgcggagctgattaataagatgaggctggcacagcagaacgcggtcacgagcctgtcggaggagtgtaaacgccaaatgctgacagccagtcatacgcttgcggtggacgccaagaatctacttgacgctgttgaccaagctaaggtgcttgcaaatctcgcacacccacccgccgaatag

SEQ ID NO: 16950 - DNA, 2904 bp, synthetic construct
  misc_feature 1..2904: note = Description of Artificial Sequence: Synthetic coding sequence
  source 1..2904: mol_type = other DNA
atgtccggggtgagcgagccactgagtagagtaaaactggggacattaagaaggccagaaggcccagctgagccgatggtggtggtaccagttgatgtggaaaaggaggacgttcggattctgaaggtatgtttctacagtaactcattcaaccccggaaagaattttaagttggtaaaatgtactgtacaaacagaaatccgggaaatcattacttccatcctgctcagcgggaggatcgggccaaacatccgcctggccgagtgttacggcctacggctgaaacacatgaaatccgatgagatccactggcttcatccccagatgacagtgggcgaggtgcaggacaagtacgagtgccttcacgtggaggccgaatggagatacgacttacaaatcaggtatttgcccgaggatttcatggagtccctgaaagaagataggaccactctcctctacttctaccagcagctccgaaatgattacatgcagcgctatgcctccaaggtttctgaaggcatggccttgcagctgggctgtctggaactaagacggtttttcaaagacatgccccacaatgcattagacaagaaaagcaactttgagcttctggagaaagaggtgggcctcgatctgttttttccgaaacaaatgcaggagaatcttaaaccgaagcagtttaggaaaatgatccagcaaacttttcagcagtacgcgagcctgcgcgaggaagagtgcgttatgaaatttttcaacactcttgctggctttgctaacatcgatcaggaaacgtatcgatgcgagctcatacaggggtggaacattacggtcgatctggttattggtcccaaggggattagacagctgaccagccaggatgctaagcccacttgcctggcagagttcaagcaaatcaggagcataaggtgccttcccctagaagaagggcaggccgtccttcagcttggtatagagggagcgcctcaggctttatccattaagacatcttcactcgcagaggctgagaacatggccgatttaatagatgggtattgccggctgcagggggagcatcaggggtcactgatcatacaccccagaaaggacggtgagaaacggaattccttaccacagattcctatgctgaacctggaggcaaggcgcagtcacctttctgagtcttgttctattgagtctgacatctatgctgagataccagacgaaacccttcggagacctggcgggccccagtacggcatagccagagaagacgtggtgttgaaccgaattctgggagaaggcttttttggggaagtgtatgagggcgtgtacactaatcacaagggagagaaaatcaacgtggccgttaaaacatgtaaaaaggattgtaccctcgacaataaggaaaaattcatgtcagaggcggttatcatgaaaaacctcgaccacccccatatagtgaagctgattggaatcatcgaagaagaacctacatggatcatcatggaactgtatccctacggcgagctgggacactatctggagagaaataaaaattcccttaaagtcctgacactagtgctttactcccttcagatctgtaaggccatggcctatctggagtcaattaattgtgtgcaccgcgatattgccgtccgcaacatcctggttgccagcccggaatgcgtaaaactgggggatttcgggctgtctcgctatattgaagatgaagactattataaggcctccgtaaccaggttgcccattaagtggatgtcaccggagagcatcaattttagacgcttcacaacagcaagtgacgtgtggatgtttgccgtctgcatgtgggaaatcctgagcttcgggaagcagcctttcttctggctggagaataaggacgtgattggggtgctggagaagggtgataggttaccaaaaccggacttatgccctcccgtgctatatacccttatgacccgttgctgggactacgatccctctgatcgccctcgtttcaccgagctggtctgctctctgtccgatgtgtatcaaatggagaaggacatcgccatggagcaggagcggaacgcccgttaccgcacgcccaagatattagagccgacggccttccaggagccaccccccaagccttctaggcctaagtataggcctcccccgcaaaccaaccttcttgcacccaagctgcaattccaggaggaggatttcatccagccttcgtccagagaggaggcccagcagctgtgggaggcagagaaagtaaagatgcggcaaattctcgacaagcaacagaagcagatggtagaggattaccaatggttacgccaggaggaaaagtccctcgaccccatggtgtacatgaatgacaaatccccactgacgccggaaaaggaggtaggctatctggagttcacaggacccccccagaagccgccccgcctcggcgcacagtccattcagcctactgccaacttagataggaccgacgatctggtgtacctaaatgtgatggagctggtgcgcgcagtgttggagctcaagaacgaactttgtcagctgcctcctgagggatacgtcgtggtagtgaagaacgtcggcctgactctgcggaagttgattggatccgtggacgacctcctgcctagtctcccaagtagctctcgtacggaaatagaaggaacacagaaactgctgaataaagacctggctgaattaatcaacaagatgagactggctcagcagaacgccgttacctccctctcagaagaatgtaagaggcaaatgctcacggcatctcacacacttgcagtggatgctaaaaacctgctggacgccgtcgatcaggctaaggttctggccaatctcgcacatccaccagcggagtag

SEQ ID NO: 16951 - DNA, 2409 bp, synthetic construct
  misc_feature 1..2409: note = Description of Artificial Sequence: Synthetic coding sequence
  source 1..2409: mol_type = other DNA
ctcctccctgaacggatgagcggagtgagtgagcccctctcaagagtgaagctcggaacactgcgaaggcccgagggtcccgcggaaccaatggtagtcgtgccagtcgatgtggagaaagaagatgtcagaatcctgaaggtctgcttttatagtaactccttcaatcccgggaagaattttaagctggtaaaatgtactgttcaaaccgaaattcgggagatcataacttccattctgctctctggaaggatcggaccgaacatcaggctcgcagagtgttacggattgcgcctcaaacatatgaaatccgatgagattcactggctgcaccctcaaatgacagtcggggaggtgcaggataaatacgagtgcttgcatgttgaagccgagtggaggtacgacctgcagattcgctatcttccagaagatttcatggaatccttgaaggaggaccgtaccaccctgctttatttttaccagcagcttaggaacgactacatgcaacgctatgcttccaaggtgagcgaaggaatggcactacagctgggctgtctcgaactcagaagattctttaaagatatgccccacaatgctttagacaaaaaaagtaattttgaactgcttgaaaaagaggtaggactcgacttattttttccaaaacagatgcaggagaatctaaaacccaagcagtttaggaaaatgatccagcagactttccaacagtacgcttccctgcgcgaggaagagtgtgtgatgaagttttttaacacactagcgggctttgcgaatatcgaccaggaaacatacaggtgtgagctaattcagggatggaatatcacagttgatctagtaattggcccaaaaggcattcgacaacttacatcacaggacgctaagcccacgtgtttggctgagttcaagcaaattcgcagcattcggtgtctccctcttgaggagggtcaggcagttttgcagcttggaattgagggcgccccgcaggccctgtccattaagacaagttcccttgcagaggcagaaaacatggctgatctgattgatgggtactgtcgccttcagggcgagcaccaaggaagcctaataatccacccgcgtaaggacggtgagaagagaaacagtttaccccaaatcccaatgttgaacttggaagctaggcgctcccacctcagcgaaagctgttcaattgagtccgacatttacgccgagatccccgatgaaacgctgcgccggcctggcggtccgcaatatgggatagcccgtgaggacgtggttctcaataggatattgggggagggcttctttggtgaggtttacgaaggtgtttacacgaaccacaagggtgagaagatcaatgtcgctgttaaaacgtgtaagaaggactgtacattggacaacaaagaaaagtttatgagtgaggcagtaatcatgaaaaacctagatcacccacatattgtgaaactgatcggcataatcgaggaggagcctacctggataatcatggaactttacccatacggtgagctgggtcattatcttgagaggaataaaaacagtctgaaggttctgactctcgtgttgtatagcttgcagatttgcaaggcaatggcttacctggaatcgatcaactgcgttcatcgagatattgccgtgagaaatatcctggtcgcttcgcctgaatgtgtgaagcttggagacttcggactgtcccgctatattgaagacgaagactattacaaagcgtccgtcactcggctgcccatcaaatggatgtccccggaaagcattaacttcagacggttcactaccgctagtgacgtgtggatgttcgccgtatgcatgtgggagattctcagttttggaaagcaaccctttttttggttggagaacaaggacgtaattggcgtccttgagaaaggagatcggctccccaaacctgatctttgcccacctgtgctgtacactctgatgacaaggtgttgggattacgatccctcagacagaccccgatttacagagctggtgtgcagcctgagcgacgtgtaccaaatggaaaaggacatcgccatggagcaggaacgtaacgcccgctaccggacaccaaaaatcctggaacctactgcattccaggaaccccctccaaagccctctaggcccaaataccggccgcctccacaaacaaatcttctcgcaccaaaactgcagttccaggtaccagagggtctttgcgccagttcgcccacactgacaagtcccatggaatatccatcccccgtcaactccctgcataccccaccgctccatcgtcataacgtgtttaagcgccactctatgcgcgaggaggactttatccaaccatcatcccggggccctgcggctgtgggaggatag

SEQ ID NO: 16952 - DNA, 3030 bp, synthetic construct
  misc_feature 1..3030: note = Description of Artificial Sequence: Synthetic coding sequence
  source 1..3030: mol_type = other DNA
atgagcggagtttcggaacccctgagtcgagtcaaactcggaactcttagaaggcccgaaggcccagccgagccgatggttgtcgtgcctgttgacgtggaaaaagaggacgtgcggattctgaaagtgtgcttctactctaattctttcaatcctggcaagaactttaaactggtgaaatgtactgtccaaacggagattagagagattattacctccatcctgctctcaggccgaattggccccaacatccgacttgccgagtgttacggtcttcggcttaagcacatgaaatctgatgagattcactggctgcacccccagatgacagtgggcgaggtacaagacaaatatgagtgtctgcatgtggaagctgagtggagatatgacctgcagattcgctacctgcccgaagattttatggaaagtcttaaggaggataggactactcttctgtatttctatcagcaactccgcaacgactatatgcagagatacgcatccaaggtgtcagagggcatggccctgcagctagggtgcctcgagctgcgccgatttttcaaggacatgcctcataatgccctggacaagaaatccaatttcgaactgctcgaaaaagaagttggcctggacctgtttttccccaaacagatgcaggagaatcttaagcccaagcagttccgaaagatgatacaacaaacatttcaacagtatgcgagcctccgggaagaggaatgtgtgatgaagttcttcaacaccttggccgggttcgctaatatcgatcaggagacatacagatgtgagttgatccaaggttggaacattacagtcgatctcgtaatcggtcccaagggcatcaggcagttaacttctcaggacgctaagcctacctgtctcgctgagttcaagcagattaggtctatacgctgccttccgctcgaggagggccaggcagtgctgcagctagggatcgaaggggccccacaggccctctccatcaaaacttctagtctggcggaggctgagaacatggctgacctaattgatggttactgcagactccagggcgagcaccagggcagcttgatcatccacccccggaaggacggcgaaaaacgaaattctcttccccagatcccaatgctgaatctggaggcccggcgcagtcacctcagcgaaagttgttccattgaatcagacatctacgccgagatccccgatgagaccctgaggagaccagggggaccccagtacggtatcgctcgagaagatgtggtcctaaatcggatccttggcgagggattcttcggggaagtttacgaaggagtgtacaccaaccacaaaggcgagaagatcaacgtcgccgtcaagacgtgtaagaaagattgcacactggataacaaagagaagttcatgtcagaggccgtcataatgaagaatctggaccatccacacatcgtgaaactaatcggcattatcgaggaggagccaacatggatcattatggaactttacccctatggggaactgggacactatttagagcggaacaaaaacagcctaaaggtgcttaccttagtgctgtattcattacagatatgcaaagccatggcatatctggaatcaatcaactgcgtccatcgagacatcgccgttagaaacattctcgttgcaagccccgaatgtgtcaaactgggcgactttggtctgtccaggtacatcgaggacgaagactattacaaagcgagcgtcacccggctgccaatcaagtggatgtctccggagagtatcaactttaggcgtttcaccactgcgagcgacgtgtggatgttcgccgtgtgcatgtgggaaatcctctcatttggtaaacagccatttttctggctcgagaacaaggacgttattggtgtgcttgagaagggcgatcggctgccgaagccagacctttgcccacctgtgctgtacacactgatgaccaggtgttgggattacgatccctccgatcggccccgcttcaccgagctggtttgttccctgagcgacgtgtaccagatggaaaaagacatcgcaatggagcaggagaggaacgcccgctataggacacccaaaatcctggaaccgaccgccttccaggaaccacctccaaagccgtccaggcccaaatacaggccacctcctcaaacaaacttgctggctccgaaactccagtttcaagtgcctgagggtttgtgcgcctctagccccacactcacctcccccatggaatacccttctcctgtcaacagcctccacacccctccgctgcatcgccacaatgtgttcaaacggcactctatgagggaggaggatttcatccaaccgagttcccgggaggaggcccagcagctctgggaggccgagaaagtgaaaatgagacagattctggacaagcagcagaagcaaatggtggaggactatcaatggctgaggcaggaggagaaatccctggatccaatggtctacatgaatgacaaatctcccctgacgcccgagaaagaggtcggctacctggagttcacaggacctccccagaagccaccccgcctgggtgcgcagtcaatccagcctactgcaaatctggaccgtaccgacgatcttgtatatctgaatgtaatggagcttgtgagggcagtcctggagctgaagaatgagttgtgtcagttgccgcctgaaggctatgtggtcgttgtcaagaatgtagggttgaccctccgcaaactgatcgggtcggttgatgatctgcttcctagcctgccttcttcaagtcggaccgaaatagagggaactcagaagctgctgaataaggacttggcagagttgatcaacaagatgcgcctcgcacagcaaaatgctgtaaccagtctctcggaagagtgtaaaagacagatgctcacagcctcacacaccctggcagttgacgcaaagaatctgctcgacgctgtcgaccaggcaaaggtcctggccaacctggcacatccgccagcagagtag

SEQ ID NO: 16953 - DNA, 969 bp, synthetic construct
  misc_feature 1..969: note = Description of Artificial Sequence: Synthetic coding sequence
  source 1..969: mol_type = other DNA
atggctgaccgcgacagcggatccgagcaaggaggggctgccttgggttctgggggttccctcggtcatcctggatccggcagcgggtccggcggcgggggcggcggcggaggcggcggcggtggaagtggcggcggcggaggcggagcgccaggcggtcttcagcatgaaacccaggagcttgcatctaaacgagtggacatacaaaacaagagattctatttagatgtaaagcagaatgccaaaggccggttcttaaagatcgcagaggttggcgccggaggaaataagtctaggcttaccctatcaatgtccgtagccgtggagtttagagactacctaggggatttcattgagcactacgcacagctgggcccgagccagccgccagatctggctcaggcgcaggacgaaccgcgaagggccctaaagtccgagttcctggttagagaaaaccggaagtactatatggatctgaaagaaaatcaacgggggagatttctgcggatcaggcagaccgttaatcgcggcccgggacttggctcaactcagggtcagacaattgccctccccgcccaggggttgattgagttccgagatgcgctggcaaagctgatcgatgattacggagtcgaggaggaacccgctgagctccccgaggggacttctttgacggtcgataacaaacggttcttttttgatgtcggaagcaacaagtacggggtcttcatgcgtgtatcagaagtaaagcctacttatcgaaattctatcaccgtgccctataaggtgtgggccaagtttggccataccttttgcaaatattcagaggaaatgaaaaagattcaagaaaagcagcgcgaaaagagagccgcatgcgaacagctgcatcagcagcagcaacaacagcaagaggaaacagctgccgctaccctgcttctacaaggagaggaagagggtgaagaagattag

SEQ ID NO: 16954 - DNA, 588 bp, synthetic construct
  misc_feature 1..588: note = Description of Artificial Sequence: Synthetic coding sequence
  source 1..588: mol_type = other DNA
atgggtagagcccgcgacgccatactcgatgccctggaaaacttgacagccgaggaactcaagaagttcaagctgaagctgctgtctgtgccacttcgcgaagggtacgggcgcatccccagaggagcccttctgagtatggatgcgctggacctgaccgataagctggtttccttttatctagagacctatggagcagagctgacagcaaacgtcctcagagacatgggactgcaagaaatggccggccagttgcaggccgcaactcatcagggatccggcgctgcgcccgccgggattcaagcacccccccagtccgccgctaaacccggtctgcactttatcgaccaacatcgggcagccctgatcgccagggtcaccaacgttgaatggctcttggatgcactgtatggtaaggttctgaccgatgagcagtaccaggcagtgagagccgaacccactaatccttctaaaatgcgaaagctcttttcctttacacctgcttggaattggacatgcaaggatcttttgctccaggcactgcgcgaaagtcaatcctatctggtggaggatttagagagatcttag

SEQ ID NO: 16955 - DNA, 531 bp, synthetic construct
  misc_feature 1..531: note = Description of Artificial Sequence: Synthetic coding sequence
  source 1..531: mol_type = other DNA
atgggccgtgcgcgcgatgccatcctggatgcgctcgagaatctgacggccgaggagctcaagaaattcaagctaaaactcctgtctgtaccactgcgggaggggtatggaagaatccctaggggagccttattgtccatggatgccttggatctgaccgataagttggtctctttctacttagagacttacggagcagagctgactgcaaatgtcttgcgagacatgggacttcaggaaatggccggacaattgcaggccgctacccatcagggcctgcacttcattgaccagcacagggctgcgcttattgccagggtcactaatgtggaatggcttttggacgcactgtacggaaaagtgctcaccgacgaacagtaccaggcggtgcgggccgaaccaaccaatcctagtaaaatgcgcaaacttttctcctttaccccagcttggaactggacttgtaaagatctccttctgcaagccctccgggaaagtcagagctatttagttgaggacctcgaacggagctag

SEQ ID NO: 16956 - DNA, 408 bp, synthetic construct
  misc_feature 1..408: note = Description of Artificial Sequence: Synthetic coding sequence
  source 1..408: mol_type = other DNA
atgggacgtgctagggacgcaatacttgacgccctcgagaacctgacagcagaggagctcaaaaaattcaaactgcaagctgccacccatcaggggagcggcgcagcaccggccggcatccaagcccctcctcagagcgccgccaaaccgggtcttcactttatcgatcagcatcgcgccgcactcattgcacgcgtcactaatgtagaatggctcctggacgccctctatggcaaagtcctcaccgacgagcagtatcaggcggtgcgagctgagcctacaaatccatctaagatgagaaagctctttagcttcacacctgcgtggaattggacttgcaaagatctcctgctccaggccctaagggaaagtcagtcttatctggtcgaggatctcgagcgaagctag

SEQ ID NO: 16957 - DNA, 1311 bp, synthetic construct
  misc_feature 1..1311: note = Description of Artificial Sequence: Synthetic coding sequence
  source 1..1311: mol_type = other DNA
atgcggctcgcccggctgttacgcggggctgcactggctggcccaggaccaggactcagggctgccggctttagtcggagtttctcttctgactccggttcgtccccagcatcggagcggggcgttccggggcaggtggacttctatgctcgatttagtccctccccactgagcatgaagcagtttctggactttggctcagtcaatgcatgcgagaagacgagtttcatgtttcttcgccaggagttgcctgtgcgcctggccaatataatgaaggagatcagcctcttacccgacaacctgctccgtaccccctcagtgcaactcgtgcagagctggtacatacagtcgctgcaggagcttctggatttcaaagacaagagcgccgaggatgcaaaagccatctatgatttcacggacacggttatcagaattaggaatcggcacaatgatgtgatacccacaatggcccaaggggtcatagagtacaaagagtcatttggcgtggacccggtgacatcccagaatgtgcagtattttttggacagattttacatgtcacgaatctccatcaggatgctcctgaaccaacattctctgctgttcggggggaagggaaaagggagtccaagtcatagaaagcacattgggtccatcaaccctaactgcaatgttcttgaggtgatcaaggatggctacgaaaatgctcgccgcttatgtgatttgtattatatcaactcacccgaactcgaattggaggagcttaacgctaaatcaccagggcagcccatccaggtagtttacgtcccatcccacctctatcatatggtgttcgaattgttcaagaatgctatgagagccaccatggagcatcacgctaaccgaggcgtgtatcctcctatccaagtccacgtgacactgggaaacgaggacctgaccgtgaagatgtcagacagggggggcggggtgcccttaaggaagattgacaggttatttaactacatgtactctacagctccccggccgagggtggaaaccagtagggcggtcccgctcgccgggtttggctatggactacccatttcccggttatatgcccagtatttccagggagacctgaagctatactcactggagggctatgggacagacgcagtgatatatataaaggccctctctactgattctatagagaggctgccagtttacaataaggcggcatggaaacattacaataccaaccatgaggcggatgactggtgtgtgccctcaagggaacccaaagatatgactacgtttcgtagtgcgtag

SEQ ID NO: 16958 - DNA, 1371 bp, synthetic construct
  misc_feature 1..1371: note = Description of Artificial Sequence: Synthetic coding sequence
  source 1..1371: mol_type = other DNA
atgcgcctggcccgtctgctgcggggggccgcattagccgggcccgggccgggactgcgggcggctgggttttcacggagtttttctagtgatagcgggagcagccctgcttctgaaaggggagtcccaggccaagttgatttttacgcccgcttttcgccctcgcctctcagcatgaagcagtttctggatttcggatccgttaatgcgtgtgaaaagactagttttatgtttctgcgccaggaacttccagtaagactggccaatatcatgaaggagatcagcctgctaccagacaatcttctcagaactcccagcgtccagctggttcaaagctggtacatccagtccctgcaggaactactagatttcaaggataaaagtgctgaagatgccaaggctatctatgagaggccaagacggacatggcttcaagtgagttctctctgctgcatggcttgcaaaatgatcttcaccgacaccgtcattcgaatccggaataggcataacgacgtcattcccaccatggcgcagggagttatcgaatataaggaaagttttggagtcgatccggttacgtcccagaatgtgcagtactttctcgatcggttttatatgtccagaatttcaattcgtatgttgctcaatcagcattctctgctatttggcgggaaagggaaggggtctccttctcatcggaagcatataggaagcatcaatcctaactgtaatgtcctcgaggtcattaaagatggctacgagaacgctagaaggctctgcgacttgtactatatcaactcccccgagctggagctcgaagagctgaatgcaaaatctccagggcaaccgatccaggtggtgtacgttccaagtcatctgtaccacatggtgtttgagttgttcaaaaacgctatgagggcaacaatggaacatcacgccaacagaggcgtgtaccctcctatccaagttcacgtgacacttggtaatgaggatttgaccgtgaaaatgagtgaccggggggggggagttccccttaggaaaatagatcggttgtttaactacatgtactcaactgcaccacgacctagagtcgagacgtcccgcgccgtccccttggccggattcggctacgggctgcccatctcccggctttacgctcagtacttccagggagacctcaagctctactctcttgaggggtatggcacagacgctgtgatctatatcaaggcactgtcaaccgactccatcgagcgcttgcccgtctacaataaggcagcctggaagcattacaataccaatcatgaggctgacgactggtgtgtacccagccgggagccaaaagacatgacaaccttccgctccgcctag

SEQ ID NO: 16959 - DNA, 1311 bp, synthetic construct
  misc_feature 1..1311: note = Description of Artificial Sequence: Synthetic coding sequence
  source 1..1311: mol_type = other DNA
atgcgcttggccagattgttgcggggggctgccttggccggacctggccctgggttgagagcggctggcttctctcgatcattttcatcagattccgggtcctccccagccagtgagcgtggagtccctggccaggtcgacttttatgctcgcttcagcccaagtccgctctctatgaagcagtttctggactttgggtctgtgaatgcatgtgagaagacctcatttatgttcctaagacaagagctgccagtccggctggcaaacatcatgaaggaaatttccttgctgcctgacaacttactgcgcactccaagcgttcagctggtgcaaagctggtacattcagtcccttcaagagctcttagatttcaaagacaagtctgccgaagacgccaaggcgatatatgattttacagacacagtgattcgaatccgtaatcgccacaacgacgtgattcccactatggcacaaggagtgattgagtataaggagtcttttggggtggatcccgttacatctcaaaatgtgcagtattttctcgaccgtttttacatgagccgaatctctatcaggatgttattaaaccagcactcgcttctctttggaggaaagggaaaggggtcacctagccatcgcaagcacatcggcagcatcaaccccaattgcaacgtcctggaagtcatcaaggacggctacgagaacgctagaagactatgtgacttatactatatcaattcacctgagttggagctcgaggagttgaatgccaaaagtcctgggcaaccgattcaggtcgtctatgtgccctctcacctgtaccacatggtgttcgaattattcaagaacgcgatgcgggcaacgatggaacaccatgcgaacagaggtgtgtatccacctatccaagtccatgtgaccctgggaaacgaggatctcacagtgaaaatgtccgatagaggcggcggagttccactgaggaagatcgatagactgttcaattatatgtattcaacagctccccggccccgggtggaaacatctcgagctgtccctctggctggatttggctatgggttgccgatctctcgtctatacgcccagtactttcagggtgacctgaagctgtactctctcgagggctatgggaccgacgcggtgatttacatcaaggcattgtcaactgatagcatcgaacgcctgccagtctacaataaggccgcctggaagcactacaataccaaccacgaggcagatgactggtgcgtcccgagcagagagccaaaggatatgacaacctttagatcagcatag

SEQ ID NO: 16960 - DNA, 1083 bp, synthetic construct
  misc_feature 1..1083: note = Description of Artificial Sequence: Synthetic coding sequence
  source 1..1083: mol_type = other DNA
atgttcctcagacaggagctgccagtgcgactggccaacattatgaaggagatctcactgctgcctgacaatttgctgcgcactccgagcgtccagctggtgcagtcctggtacatacagagcctgcaggagctgcttgatttcaaagataagagcgcagaggacgctaaagccatttacgactttaccgatactgtcatccgtatacgaaataggcataatgatgtgattcccactatggctcagggcgtgatcgaatataaggaatcttttggagtggaccccgttacctcacagaacgtacaatacttcttagaccgcttctacatgtccaggatctccatcaggatgcttctcaatcagcattcactcctgttcggtggcaaaggcaaggggtccccaagtcaccgaaagcatatcggatccataaatcccaattgtaatgtgctagaagtcatcaaggacggctatgagaacgctcggaggctctgtgacttatattacatcaatagtcctgaactggagctcgaggaactgaatgccaaaagtccagggcagcccatccaggtggtgtacgttccaagtcatctttaccatatggtgtttgagctgtttaagaacgcgatgcgagctactatggagcatcacgccaatagaggtgtgtatcccccaatccaggtgcacgtgactcttggcaacgaagacctgacagtgaagatgtccgatcgaggtgggggtgtccctctgagaaagatcgacaggctgttcaattacatgtatagcacagctccaaggccgagggtggaaacaagccgagcagtgcccctagctggattcgggtacgggctccccatttcccgcctgtacgcccaatattttcagggcgatctcaaactatactccctggaggggtacggcaccgatgcagtcatctatatcaaggcccttagcaccgactctatcgaacggctccctgtttacaacaaggccgcctggaagcattataacaccaaccacgaagccgacgactggtgcgtcccatctagagagcctaaagatatgactacatttcggtcagcgtag

SEQ ID NO: 16961 - DNA, 846 bp, synthetic construct
  misc_feature 1..846: note = Description of Artificial Sequence: Synthetic coding sequence
  source 1..846: mol_type = other DNA
atggcacagggagtcatcgagtataaggagagctttggcgtcgatcctgtcacttctcagaacgtgcagtacttcctggataggttttatatgagccggatttcaatccggatgctcctcaatcagcatagcttgttgttcggcggaaagggaaagggcagtccctctcaccgaaaacacattggctccatcaaccccaactgtaatgtcctggaagtgatcaaggatgggtatgaaaacgcccgcagactttgtgatctgtattacatcaactcgccagagctggaattagaggagctgaacgctaagagccccggccaaccaatacaagtggtgtacgtgccgagtcatctctaccacatggtctttgaactttttaagaatgccatgcgtgcaactatggaacaccacgcaaatcggggtgtatatccaccgattcaggttcacgtcaccctgggcaacgaggacctgacagtcaaaatgtccgatcgggggggaggagtgcccctccgaaagatcgaccgactgtttaattatatgtactctactgctcctcgcccccgagtggaaactagccgggcagtgcctctggcaggcttcggctacggactccctatttcaaggctgtatgcccagtattttcagggagaccttaaactttacagtttagaggggtacggcactgatgccgtgatttatattaaggccctctctaccgattctatcgagcgactgcctgtctataacaaggccgcttggaaacattataacaccaatcatgaggcagacgattggtgcgtgcctagtcgggaacctaaagacatgacaacttttcgtagcgcatag

SEQ ID NO: 16962 - DNA, 1032 bp, synthetic construct
  misc_feature 1..1032: note = Description of Artificial Sequence: Synthetic coding sequence
  source 1..1032: mol_type = other DNA
atgaaggaaattaacttgctcccagaccgtgtcttgagtacacccagcgtgcagctcgtgcaaagctggtatgttcagagcctcctggacatcatggaattccttgacaaggacccagaagaccacagaactttgagccagtttacagatgcgttagtcacgatccgtaatcggcacaatgatgttgtcccaactatggcccaaggtgtgctggaatataaggatacgtacggagacgacccagtcagcaatcagaatatccaatactttttggataggttctacctttcaagaattagtattcggatgctgattaaccaacacactcttatcttcgacggtagcacaaaccccgcccacccaaagcacatcgggtctatcgacccaaattgcaacgtgtccgaggtggtgaaagatgcatatgatatggcaaaactcctgtgtgataagtattacatggccagtccagatttagagattcaggaaataaacgcagccaacagtaagcagccaattcacatggtgtacgtaccatctcacctgtaccatatgctgttcgaactattcaagaatgccatgcgagccaccgtggagtcgcacgaaagcagtctgatattgccccctatcaaggttatggtcgccctgggcgaggaggacttatctatcaagatgagtgaccgcggcggaggggtcccactgcggaagattgagcgcctgtttagttacatgtactcaacggctccaaccccacagccaggaacaggcggaacaccactcgctggtttcggctacggcctccctatttcacgcctgtatgccaagtatttccagggagacctgcagctattttcaatggaaggtttcggaacagatgccgtgatttacctgaaagccctaagcaccgattcagtagagaggttgcctgtttataataaaagcgcctggcggcactatcagaccattcaggaagccggcgactggtgtgtaccttctaccgagccaaagaacacttcaacatacagggtttcgtag

SEQ ID NO: 16963 - DNA, 1224 bp, synthetic construct
  misc_feature 1..1224: note = Description of Artificial Sequence: Synthetic coding sequence
  source 1..1224: mol_type = other DNA
atgcgatgggtgtgggcccttcttaaaaatgcttccctggcaggcgcgcccaagtacatcgaacacttttctaagttctccccaagcccattgtccatgaagcagttcctggatttcggatcctccaatgcctgcgaaaagacatctttcacctttctcaggcaagagctacctgtcagactcgctaatattatgaaggaaattaacctgctgccagacagggtgctgtctaccccaagcgtacagttggtccagagttggtacgttcagagcttgttagacattatggaattcttggacaaggatcctgaagaccatcgcacccttagccagtttacagacgccttagtgaccatcaggaacaggcacaatgacgtggttcccaccatggctcagggcgtcctggaatacaaggatacatacggggatgatcccgtatccaatcagaacatccagtacttccttgaccgcttttatttgtctagaatttcgatacggatgctgattaaccagcacaccctcatatttgacggatctactaaccccgctcaccccaaacatatcggcagtatcgatcctaattgtaatgtctctgaggtggtgaaagatgcttacgatatggccaaactgttatgtgataaatactacatggccagcccggatttggagatacaggagataaacgccgccaacagtaagcagcctattcacatggtctatgtccctagtcacttataccatatgttgtttgaactctttaagaatgcaatgcgggcaaccgtcgagagtcacgagtcctcattaatcctgcccccaatcaaggtgatggtggccctcggagaggaagacctgtctattaaaatgagcgatcgtggggggggagtgcctctcaggaaaatagaaaggctgttcagttacatgtactccacagcaccaactccccagcccggcacaggaggcactccccttgctgggttcggctatggcctgccaatctccaggttatacgctaaatatttccagggggatctccagctgttcagcatggagggcttcgggacagatgcagtgatatacctgaaggctcttagcaccgactccgtcgaaagacttcccgtgtataacaagtcagcttggagacattatcagaccatccaggaggccggggactggtgcgtcccaagtactgagccgaagaacacaagcacttaccgcgtaagttag

SEQ ID NO: 16964 - DNA, 849 bp, synthetic construct
  misc_feature 1..849: note = Description of Artificial Sequence: Synthetic coding sequence
  source 1..849: mol_type = other DNA
atgcctctgctcacgcagcagattcaggatgaggacgatcagtacagcctagtcgctagcttggacaatgtaagaaatttgtcaacaattttgaaagccattcattttcgtgaacacgcgacgtgctttgcgaccaagaatggaattaaagtgactgtggagaacgccaagtgtgtccaagcaaacgcttttattcaggccggaatctttcaggagtttaaggtgcaagaagagagcgtgacatttagaatcaacctcacagtgctgctggactgtctaagcatcttcggaagttcacctatgcccggaactttgacagccctgaggatgtgttaccagggttacggataccccctgatgctatttttagaggaaggcggagtcgtgacagtgtgcaaaataaacacccaggagccagaggagacacttgacttcgatttttgtagcactaacgtgataaataaaatcattttgcagagtgaggggctgagggaggcattctctgagcttgatatgacttcagaggtcctgcagatcactatgagccctgataagccatactttcgcttgtccacatttggtaacgcagggtcctcccacttggattaccctaaggactccgacctgatggaagcattccactgcaatcagacacaagttaatagatacaagatctctctgctaaaaccttccactaaggctttggttctgtcgtgcaaggttagcatccgtacagacaataggggctttttgtctctgcagtatatgatccggaacgaggatggccaaatttgtttcgtggagtactattgctgccccgatgaggaagtaccagagtccgagtcgtag

SEQ ID NO: 16965 - DNA, 849 bp, synthetic construct
  misc_feature 1..849: note = Description of Artificial Sequence: Synthetic coding sequence
  source 1..849: mol_type = other DNA
atgcctctcttgacacaacagatccaggatgaggacgatcagtattcactcgtcgcgtcacttgacaatgtacggaatctgagcacaatcctcaaagcaatccacttcagagaacatgctacatgctttgcaaccaaaaacggaataaaagttactgtggagaatgccaaatgtgtccaggcgaatgctttcatccaagcaggcattttccaagagttcaaggttcaggaagagtctgtgactttccgcatcaatctgactgtgctgttagattgcttaagcatcttcggctctagcccaatgcccgggacccttaccgccctgcgcatgtgctaccaagggtacggatatcctctgatgctcttcctggaagagggcggcgtcgtaacagtatgtaagatcaatacacaggaacctgaggagacactggacttcgacttctgctccacaaatgtgattaacaagatcatcctgcagagcgagggcttgcgggaagcattttcggaactggatatgacttctgaggttctccagattacgatgtcccccgataaaccctatttccgcctgagtacttttggaaatgctgggagtagtcacctcgattacccaaaagacagcgatttgatggaggccttccattgcaaccagacccaagtcaatcgctacaaaatttcactgctgaagccttctaccaaagcgctggtcctgagttgtaaagtgtccattaggacagataatcgggggttcctgtccttacagtacatgatcaggaacgaggatgggcagatctgctttgttgaatactactgctgccctgacgaagaggtgcctgagtctgaatcttag

SEQ ID NO: 16966 - DNA, 741 bp, synthetic construct
  misc_feature 1..741: note = Description of Artificial Sequence: Synthetic coding sequence
  source 1..741: mol_type = other DNA
atgcccctgctgactcagcagattcaagacgaggatgatcaatactctctcgtggcctcactggacaatgtgcggaacttgagcacaatccttaaggctatccacttccgggagcacgctacctgctttgcgactaaaaacggaatcaaggttactgtcgagaacgccaagtgcgtgcaggccaacgcattcatccagggcactttgaccgccctaagaatgtgctatcaaggctatggatatcctctaatgctattcttggaagagggcggcgtcgttaccgtttgtaaaataaatactcaagagccagaagaaacgctcgactttgacttttgctctacaaacgtgatcaacaaaattattctgcagtcagaagggctgcgcgaggccttttccgaactagatatgacttcagaggtgctgcagatcacaatgtccccagacaaaccttattttcggctgagtacattcggaaacgcagggagttcccaccttgattatcccaaggactctgacttgatggaggccttccattgtaatcagacacaagtgaatcgctataaaatcagccttttaaaaccgtcgaccaaagccctcgtcctctcctgtaaagtgagcattcgcacagataacaggggcttcctgagcctgcaatacatgattaggaatgaagacggtcagatctgcttcgtcgagtactactgttgtcctgatgaggaggtccctgagtctgaatcatag

SEQ ID NO: 16967 - DNA, 1755 bp, synthetic construct
  misc_feature 1..1755: note = Description of Artificial Sequence: Synthetic coding sequence
  source 1..1755: mol_type = other DNA
atgaaccagcacgaactggctgtgcacaaaaagaagatcgaggaagtcgagacatggcttaaggctcaggtgctcgaacgacagcccaaacagggtggatcaattctgctgatcacagggccacctggatgtgggaaaacaaccacactgaagattctttccaaagaacatggtatccaggtccaggagtggatcaaccctgttctgcccgatttccagaaggatgactttaaggggatgttcaacaccgaaagctccttccatatgttcccataccagtcacagatcgcagtctttaaggagtttttgctgcgcgctacaaagtacaacaagctccaaatgctcggggacgaccttcggaccgacaagaaaattatcttagttgaggacctgcccaatcagttttacagagatagtcacacactccacgaggttcttaggaaatacgtgagaatcggcagatgtccgctaatctttatcatatccgatagcctgagtggcgacaataatcagagattgctatttccaaaggagatccaagaagaatgctctatctcaaacatcagcttcaacccagtcgcaccaacaatcatgatgaagtttctgaatcgaatcgttaccatcgaggctaataagaacggagggaaaattacggtgcctgacaagactagtctcgaactattgtgccagggctgcagcggggacattaggagcgccattaatagcctgcaatttagctcgtcaaagggcgagaacaacctccgccctagaaagaagggcatgtcattaaagtccgatgcggtgctgagcaagtcaaaacgaaggaagaagcccgatagggtatttgagaatcaggaggtgcaggcaatcggcggaaaggacgtatcattgttcctattccgcgcacttggaaaaatcctttactgcaagcgggccagtctgactgaactagactctcctaggctcccctcccacctgtctgagtacgagagagatacactgctcgtggaaccagaagaagtggttgaaatgagccatatgccaggggacctattcaacctctatctgcaccagaattacatcgactttttcatggaaattgatgacatagtgcgagcctccgagttcctaagcttcgcagacattctcagcggtgattggaacacgagatcattgctaagggaatacagcacctctatcgccacacgtggcgtgatgcactccaacaaagcacgcgggtatgcccactgccaggggggaggatcgagttttcgaccgcttcacaagccacaatggttcctgatcaataagaagtacagagaaaattgtctggctgcaaaagccctgtttcctgacttctgtctccccgcgctgtgtctgcagacacagttgttaccctatcttgccctgcttaccattcccatgcgaaaccaggctcagatctccttcattcaggatattggccgcctcccactgaaacgccatttcggccgcctcaagatggaggccctgaccgatagagaacatgggatgatcgacccagacagcggggacgaagctcagctcaacggcggacattcagcagaggagtcactgggcgaacccacccaggcaactgtgcccgagacctggtccctcccactgtctcagaactctgcatctgagctacccgcctcacaacctcagcccttctctgcccaaggcgacatggaagagaacattatcatcgaggattacgaaagtgacgggacatag

SEQ ID NO: 16968 - DNA, 2013 bp, synthetic construct
  misc_feature 1..2013: note = Description of Artificial Sequence: Synthetic coding sequence
  source 1..2013: mol_type = other DNA
atgaaccaagtaaccgattgggtggacccctcattcgatgacttcctggagtgttccggcgtatccaccattacagctactagcctgggcgtcaataactcaagccatcgtagaaaaaacggtcctagtaccttggaaagtagtcgattccctgcacgcaagcgggggaatctgtcttccttggaacagatttacggcctagagaactccaaagaatatctttctgaaaatgaaccctgggtggataaatataagccagagactcaacatgaactggctgttcacaagaaaaagatcgaggaagtggagacatggttgaaggcgcaagtattggagcgccagccaaagcagggcgggtcaattctgctgataacaggccctcccggctgtgggaagactacaacattaaagattctgtccaaggagcacggcatccaggtgcaggaatggattaatccagtgctacctgactttcagaaggacgacttcaaaggaatgtttaataccgaatctagcttccacatgtttccctaccagagccagatcgcagtttttaaggaattcttacttcgggcaaccaaatacaacaagctacagatgcttggagatgatctgcgcaccgataagaaaataatcctggtcgaggacttgccgaaccagttctaccgggattcccataccttacacgaggtcctgcgcaagtacgtgcgaattgggagatgcccactcattttcattataagtgattctttgagcggtgacaataatcagcggttgctattccccaaagaaatccaggaggaatgtagcattagcaacatctcatttaaccctgtagcacctactatcatgatgaaattcctcaaccggatagttactattgaagccaacaagaacggcggaaagataaccgtccctgacaagacttcactggaactgctttgtcagggatgctccggtgacattcgtagcgcaatcaacagccttcagttcagttcatctaagggcgaaaacaatcttagaccaaggaagaagggtatgtccctgaaaagtgatgccgtattgagcaaatctaagagacgcaaaaagcccgatcgagtctttgaaaatcaagaggtgcaggccataggcggaaaggatgtgtcactctttctgttcagggccctgggcaaaatcctgtattgcaagcgagcctccctcacagagctggattcaccccggctcccatctcatttaagtgagtacgaacgggataccttacttgtcgaacccgaggaggttgtggaaatgagccacatgccgggtgatctgttcaatttgtacttacaccaaaactatattgacttcttcatggagatcgatgatatcgtgcgggcaagcgagttcctcagctttgccgatattctgagtggcgactggaatacacggtctcttctgagagagtactcaacttcgattgccacccggggtgtcatgcattccaataaggccagaggatacgcacattgccagggcggcggtagcagcttcagacccttgcataagccacaatggtttttgataaataagaagtatcgggaaaactgcctggccgccaaggcgctcttcccagacttctgcctccctgccttatgtctgcaaacacagctcctgccctatctggctctgctgacgataccaatgcgcaatcaggcccagatttcgtttatccaggatattggcaggctgcctctcaaaaggcatttcgggcgtttaaagatggaggccttgaccgatcgtgagcacgggatgattgaccctgattcaggggatgaggcgcaactaaacggcggccactctgctgaggaatccctgggtgagcccactcaggccactgtgccagagacatggtctcttccgctctcacagaatagcgctagcgagttgcctgcctcgcaacctcaacccttttccgcacagggcgacatggaggaaaacatcattatcgaggattacgaaagtgatggcacgtag

SEQ ID NO: 16969 - DNA, 2013 bp, synthetic construct
  misc_feature 1..2013: note = Description of Artificial Sequence: Synthetic coding sequence
  source 1..2013: mol_type = other DNA
atgaatcaggtgactgactgggttgacccaagctttgacgactttcttgagtgctccggagttagcaccataacagctacatcgctgggcgttaataactcgagccaccgcagaaagaatggaccctcaaccctagagtcttcccggtttcccgctaggaaacgtggcaacctgagttctctcgagcaaatttatgggctggaaaactcaaaagagtaccttagtgaaaatgaaccttgggtcgacaaatacaaaccggaaacccaacacgaactagcagtgcataagaaaaagatcgaagaagtcgagacatggttgaaagctcaagttttggagagacagcctaagcagggcggcagtattctactgatcactgggccccccgggtgtgggaagacaactaccctgaagatactgagcaaagaacatggtattcaggtgcaagagtggatcaacccggtccttccagacttccagaaggacgacttcaaagggatgttcaatacggaaagtagtttccatatgtttccctatcagtcacaaatagccgtatttaaggaatttctcttgagagccacaaaatataataagctgcagatgctgggcgacgacttgaggaccgacaaaaaaattatcttggttgaggatctgccgaatcagttctatagagactctcatacactgcatgaggtcttgcgtaagtacgtcagaataggccgttgccctttaattttcataatctccgactcgctgtctggcgataacaatcaacgcctgctgttccccaaagaaatacaagaagaatgcagcatcagtaatatctcctttaatcctgtggctccaactatcatgatgaagtttctcaaccgcatcgtaactatcgaagccaacaagaacggaggaaagattactgtcccagataagacgagtctggagctgctttgtcaggggtgttccggggatattcgctcggcaattaactcgctccagttttccagcagcaagggtgaaaacaacctgagacctcgtaaaaaggggatgagcctgaaatcggatgcagtactttctaagtctaagaggaggaaaaagccagatagagtgttcgagaatcaggaggtccaagcaatcggggggaaggatgtctccctatttctgttccgcgcgttggggaaaatcctctactgcaagcgggcaagcttgaccgaactggacagtcctcgactgcccagtcatctgagtgagtatgagcgggacacactcctggtcgagcccgaagaagtggtcgagatgtcccacatgccaggagatctgttcaatctctacttacatcagaattacatcgatttttttatggagatcgacgacatcgtccgggcatcggaattcttgagctttgccgatatcctcagtggcgactggaacactcgatcattactgagagaatattccactagcattgccacccgaggcgtgatgcacagtaataaggctcggggatatgcccattgtcaggggggtggtagttcattcagacctctccacaagcctcaatggttcctcattaataaaaagtaccgagagaattgcctcgctgccaaggctctgtttccggacttttgcctgccagctctgtgtttgcagacccagctgctgccttacctcgccctgctgactatccccatgcgtaaccaggcccagatttccttcattcaggatatcgggagactgccgttaaagcgccatttcgggcgtcttaagatggaagctttaaccgaccgagagcacggtatgatcgatcctgactcaggagacgaggcccagctcaatggcggccactccgcagaagagtccctgggagaacctactcaagctacagtccctgagacctggtctctgccgcttagccagaactctgcttccgaactgccagcatctcaaccgcaaccattcagcgcacagggagatatggaggaaaatattatcatcgaagattacgagagcgatggcacttag

SEQ ID NO: 16970 - DNA, 2013 bp, synthetic construct
  misc_feature 1..2013: note = Description of Artificial Sequence: Synthetic coding sequence
  source 1..2013: mol_type = other DNA
atgaatcaagtaacagattgggtggatccgagtttcgatgacttccttgagtgctccggggtgagtactatcacggccacttctctaggggttaataacagttctcaccggcggaagaatgggcccagcaccctggaatcatctaggttccctgctaggaaaagaggaaatttgtctagtttagagcagatctacggtctcgagaattctaaggagtacctaagcgagaatgagccatgggtcgataagtacaagccagagactcagcacgaactcgccgtgcacaaaaaaaagatcgaggaagtagagacctggttaaaggcgcaggtgctcgagagacagccgaagcaaggcggatcgatcctgctgattaccgggccaccagggtgcggtaaaacaactactttgaagatactgtctaaagaacacggtatccaggtgcaagagtggatcaaccccgttctgcctgacttccagaaggacgacttcaagggcatgtttaacaccgagtccagcttccacatgttcccctaccagagccagatcgccgtatttaaagagtttctcctcagggccacaaagtataacaaactgcagatgttaggagacgacctgagaactgacaagaagatcatactcgtagaggaccttccaaaccaattttacagagattctcacactctccatgaagtgctcaggaaatacgtgcgcatcgggcggtgccccctgatcttcatcatttcagattccctttccggggataataaccagaggttactcttccccaaggagatccaggaagagtgctcaatctcaaacatcagtttcaatccggtggcaccgacaattatgatgaaatttctgaacaggatcgtcactatagaggccaataagaacgggggcaaaatcactgtgcccgacaaaacctccctggagctgctttgtcaagggtgttccggcgacatccggagcgccatcaattcgctgcagttcagtagctcaaagggagaaaacaatctgcgcccccggaaaaaaggaatgtctcttaagtccgatgctgtcctgagcaagagcaagagaagaaagaaacccgatagagtcttcgaaaaccaggaagtgcaggcaataggcggtaaggacgtgagcctgttcctttttagggctctggggaagattctttattgtaaaagggcttccctgactgaactcgactccccacggctgccgtcccaccttagtgagtacgaacgagacacattattagtggagccggaggaggtggttgaaatgagccacatgcccggtgatttgtttaacttgtatttacaccaaaactatattgactttttcatggagattgatgatattgttcgagcctctgagttcctgagcttcgctgatattttatctggcgattggaatacaagaagtctgctgagagaatactctacctcaattgcgacccggggggtgatgcattcaaataaggctagaggatacgctcactgccagggggggggttcctctttccgcccactgcacaagccacaatggtttctgattaataaaaagtatagggagaattgtctcgctgcaaaagccctgtttccagacttttgtctcccggctctgtgtttacagacacagcttctcccgtacctggcactcctgaccatcccaatgagaaatcaggctcagatctcctttatccaggatattggacgtctgcctttaaaacgccatttcggtagattgaagatggaagccttaacagatagggaacatggcatgattgatccggacagcggcgacgaggcacagctgaatgggggtcactccgctgaggagtctcttggggaacccacccaggccaccgttcccgaaacatggtcgttgcccctgtcccagaactctgcctcagaacttccagcctcccagccccagccattttctgcccagggagacatggaagagaacattatcattgaggattatgagtccgacggcacttag

SEQ ID NO: 16971 - DNA, 2013 bp, synthetic construct
  misc_feature 1..2013: note = Description of Artificial Sequence: Synthetic coding sequence
  source 1..2013: mol_type = other DNA
atgaatcaggtgactgattgggtcgacccttcatttgatgacttcctcgagtgctcaggcgtgagcaccataacagccaccagtctgggggtgaacaactctagccatcggcgaaaaaatggaccgtccaccctggagagcagcaggtttcccgcacgaaagcggggcaacttgtcctctctggaacaaatatacggtcttgaaaatagcaaggagtatctgtcggagaacgaaccttgggtggataaatataaacccgagacccagcatgagctggccgtccacaaaaaaaaaatcgaggaggttgaaacctggcttaaggctcaggtcctggaacggcagcctaaacagggtggctccattctcctgattactgggccaccaggatgcggaaagaccacaactctgaagattttgtcaaaagagcatggaatccaggtgcaagaatggattaatcccgtgctgccagactttcaaaaagacgatttcaagggaatgtttaataccgagtcctccttccacatgttcccatatcaatcacagatcgcggtcttcaaggagtttttattacgtgccacgaaatacaacaaactacagatgttgggggacgacttaaggacggataagaagataattctggtcgaagacctgcccaatcagttttatagagactctcacacgttgcacgaggtccttcgaaaatatgtgaggatcgggaggtgtccactgatcttcattatctcagacagcctgtccggagacaacaatcaacggctccttttccccaaggagatccaggaagagtgttccattagtaatatttcatttaacccggtagctccaactattatgatgaaatttctgaatcgaattgtcactatcgaggctaacaaaaacggaggcaagataactgtccctgacaaaacatcccttgaactgctttgccagggttgctcaggcgacatccggagcgcgattaatagtctccaattctctagtagcaagggcgaaaacaacctcagacctaggaaaaagggaatgtctttgaagtctgatgctgttctgagcaagagtaaacgtcggaaaaagcccgacagagtttttgaaaatcaagaggttcaggccatcggggggaaggacgtgtcattattcctattccgcgcattgggaaagatcctctattgtaaaagggcttccctaacagaacttgatagcccaaggttaccgtcccatttaagcgaatatgaacgcgatactcttttggttgaacccgaggaggtagtggaaatgagtcacatgcctggcgacctgttcaacctgtatctccaccaaaactatatcgatttcttcatggagattgatgatattgtccgggcctcggagtttttgagcttcgccgatatcctgtcaggggactggaacacacggagcctcctgagagaatactctacttcgatagccaccagaggggtgatgcacagtaacaaggctaggggctacgcacactgccaaggcgggggcagctcattccggccactacacaagcctcagtggtttcttataaacaaaaagtatcgcgagaattgtttggcagccaaagctctgttcccagacttttgccttcccgctttgtgcctgcaaacccaactattaccttacctcgcccttctaaccattccgatgagaaatcaagcccagatctcttttattcaggatattgggagactgcccctgaagaggcactttggacgcctgaaaatggaagcccttacggatcgggaacacggcatgatagacccggacagcggtgacgaagctcagcttaacggcggccactccgccgaagagtctctcggagagcccacccaagccacagtgcctgagacttggagcctgcccctgtcacagaattctgcctcagaattacccgcgtcccagccccaacccttttcagcacaaggagacatggaagaaaatattatcatcgaagattacgagtctgacggaacttag

SEQ ID NO: 16972 - DNA, 1518 bp, synthetic construct
  misc_feature 1..1518: note = Description of Artificial Sequence: Synthetic coding sequence
  source 1..1518: mol_type = other DNA
atgtttaataccgaatcctcattccatatgttcccttaccagagtcagattgccgttttcaaagaatttttactgcgcgctactaaatacaacaaactacaaatgctgggcgatgacctccggacggataagaagatcatactggtggaggacctccctaaccagttttaccgagattctcataccctgcatgaagtgcttaggaaatacgtgcgaatcggacgttgtcccttgattttcattatctcggattctctctcaggagataacaatcagagactgctgtttccgaaagaaatccaggaagagtgttcaatctctaacatcagcttcaatcctgtggcccctaccatcatgatgaaattcctgaacaggattgtgacaatcgaggccaataagaatggcggcaaaattacggtacctgataagacaagcctggagctcttgtgtcaaggctgctccggcgatatccgctccgctatcaacagtcttcagtttagcagttccaagggggaaaacaacctcaggcctaggaaaaaaggtatgtccctgaaaagtgatgccgtgctcagcaaatccaagcgtagaaaaaagccagaccgtgtgttcgaaaatcaggaggtgcaagcaattgggggcaaggatgtctcattgttcttatttcgcgctcttggcaaaattttatactgcaagagagcgagtttaaccgagctggactcacctcggctgcctagccacttgagtgaatacgaacgcgatacgctcctcgtggaaccagaggaggttgtggaaatgagccatatgcctggggacctgtttaatttgtatctgcatcaaaattacatcgatttctttatggaaattgatgacattgtgagagcttctgaattccttagctttgctgacattttgtctggcgactggaatacacgctcgctactccgcgagtatagcacaagtatagccactcgcggcgtgatgcacagcaacaaggctagagggtacgcacactgccagggcgggggctctagctttaggccgctgcacaagccccagtggtttctgataaataagaagtatcgcgagaactgtcttgcagcaaaggcgctctttcctgatttttgtctccccgcactctgtctgcaaacacagctgctgccttaccttgcgctgctcacaatccccatgcgcaatcaggcacagatcagttttatccaagatataggaaggctgcccctaaaacggcattttggtagattgaaaatggaggcgctcacagatagggagcacggcatgattgacccagattccggtgacgaagctcaacttaacggaggccattctgctgaggaatcactgggagaacctacacaggccacagtgccggagacctggtccctgcccctgtctcagaatagtgcctcagaattaccggcaagtcaaccccagcctttctccgcgcagggagatatggaagagaatatcatcatcgaggactatgagtcggacgggacatag

SEQ ID NO: 16973 - DNA, 2013 bp, synthetic construct
  misc_feature 1..2013: note = Description of Artificial Sequence: Synthetic coding sequence
  source 1..2013: mol_type = other DNA
atgaaccaagttaccgactgggtcgatccaagctttgacgacttcttggagtgtagcggcgtatccaccatcacagcaacatctctcggcgttaataacagctcacataggcgcaagaatggccccagtaccctggagtcaagccggtttccagcacggaagaggggtaatctgagtagccttgaacagatctacgggctggagaactctaaagaatatctgtccgagaatgagccgtgggtcgacaaatataagcctgagacccagcacgagctcgcagttcataaaaagaagattgaagaagtggagacctggctcaaggcccaagtcctcgagcgccagcccaagcaaggcgggtcaattctccttattactggcccccctggctgtggaaaaacaactaccctcaagattctgtcaaaagaacatggcatccaagtccaggaatggatcaatcctgtgttgcccgacttccaaaaggatgattttaaaggaatgttcaatactgaaagctctttccacatgtttccgtaccaatctcagatcgctgtatttaaagagttcctcttgcgggccacgaagtacaacaagttacagatgttgggtgatgacctgagaactgacaagaaaatcatcttggtggaggatttgccaaaccaattttatagggattctcatacactgcacgaggtgctgcgaaaatatgtgagaatcgggcgctgccctttaatctttataatttcagattctctgagcggggataataatcagcgcctgctttttcccaaggagatccaggaggagtgcagcattagcaacatcagttttaatccggtggctcctaccattatgatgaagttcctgaaccgaatagttactatcgaagccaataaaaacggcggaaagataaccgtcccagataaaacctctctcgaactgctgtgccaaggatgttccggtgacattcgcagtgcgatcaactcgctgcaattttctagttccaagggtgagaacaacctgaggccaaggaagaagggaatgagcctcaagtccgacgcagtgctgtcgaagagtaagcgccggaagaaaccagatagagtgtttgagaatcaggaagttcaggcgattgggggaaaagatgttagcctctttctttttagggcattaggcaaaattctgtattgtaagagagcgagcctgacagaactagacagcccaagacttcccagccacttgagcgaatacgagcgtgacacactgctcgtcgaacccgaggaggtagtggaaatgagccacatgccaggggaccttttcaacctctacctgcaccagaactacatcgactttttcatggagatcgatgacatcgtgcgggcgagtgaatttttgtcattcgctgatattctttccggcgactggaacacacggtcccttcttagagaatattctacatcaattgccactcgtggggttatgcatagtaataaggcacggggctacgctcattgccaaggcgggggtagctcattcaggcccctgcataagccccagtggttcctgatcaacaagaaatatcgcgagaattgcctggctgcaaaagccttgtttcctgatttctgcctgcctgccttgtgtctgcagactcaactgctgccgtacctggccctgctgactatccccatgcgaaaccaggcccaaatttcctttatccaagatattgggcgtttgccccttaaacgacatttcggccggctcaaaatggaggctctgactgatcgagagcacgggatgatagatcctgactccggcgatgaggcccagttgaatggaggacattcagccgaggagtctcttggtgaaccaacacaagccacggttcctgaaacgtggagcctgcccctgagccagaattcagcaagtgagctacccgcctctcaaccccagcccttttctgcccaaggcgatatggaagagaacattatcatagaggattatgagtcagacggcacttag

SEQ ID NO: 16974 - DNA, 2046 bp, synthetic construct
  misc_feature 1..2046: note = Description of Artificial Sequence: Synthetic coding sequence
  source 1..2046: mol_type = other DNA
atgagcaagacgtttctccgcccgaaggttagtagcactaaggtgaccgattgggttgatccaagttttgatgacttcctcgaatgttccggagtcagcaccattaccgctactagcctcggcgttaacaactctagtcaccgaaggaaaaatggccctagcacacttgaatcaagccgattccccgcccggaagcggggaaatctgtcctcactggagcaaatctacgggctggaaaatagtaaggagtacctcagcgagaacgagccttgggtggataaatacaaaccagagacccagcacgagcttgcggtccataagaaaaagatcgaggaggtggagacttggctaaaagcccaggtgttagagaggcagcctaaacagggcgggtccatactcctcattaccgggccacctgggtgcggaaagaccaccacactcaaaattctgtccaaggaacatgggatccaggtgcaagagtggatcaacccagtgttaccggatttccagaaggacgacttcaaaggtatgtttaatactgagtctagcttccatatgttcccttaccagtctcagatagctgtgttcaaggagtttctcctgcgggccacaaaatacaacaagctccagatgctcggggacgacctgcggacggataaaaaaatcatcctagtggaggacttgcccaatcaattttaccgagacagccacacccttcatgaagtgctacgaaaatacgtgcgaatcggacggtgcccactgattttcattatttctgattctttgagtggcgacaacaatcagcgcttactgtttcccaaggaaatccaagaggaatgctccatttccaatatcagtttcaaccccgtggcacccaccattatgatgaagtttctcaatcgaattgtgacaattgaggcaaataagaatggaggaaagataaccgtccccgataagacatcactggaactcctgtgtcaaggctgcagcggcgatatcaggtcggctatcaactctcttcaatttagttccagtaaaggagaaaacaacctccgcccccgtaagaaaggtatgtcactaaagtccgacgcggtcctctccaaatcaaagcgccgcaaaaagcccgacagagttttcgagaatcaggaagtccaggccatcggaggtaaagacgtgagtctgtttctgttcagagcactgggtaagattctatattgcaaacgtgcaagcctgacggaactagactcccctcgcctgccatcgcacctgagtgaatacgagcgggacaccctgctggttgaaccggaggaggtggtggagatgagccatatgccaggcgatctttttaatctctacctgcatcaaaattacatcgattttttcatggagattgacgacatcgtccgtgcctctgagtttctctccttcgctgacatactctccggagactggaatactagatcactgcttagggagtactccacttcaattgcgactaggggcgtgatgcatagtaacaaggcccggggatatgctcactgccaagggggtggttcgagcttccggcctctgcacaagccccagtggtttctcatcaacaagaaataccgcgagaactgcctggctgccaaagcactttttccggacttttgtctacctgcattatgcctgcaaactcagctcctcccttatttggccctactgaccattcctatgaggaaccaggcccagatatctttcattcaggatattggtcgactgccactgaaaaggcattttggaagactgaaaatggaagctcttactgatagggagcacggtatgatcgacccagactcaggtgatgaagcacagctaaacggagggcatagcgcagaagaatcattaggagagcccacccaggccaccgtccccgaaacctggtccctgcccctgtcccagaattccgcctccgagctgcccgcgagccagccccaacctttctccgcccagggagatatggaggaaaacataatcattgaggattatgagagtgatggaacctag

SEQ ID NO: 16975 - DNA, 510 bp, synthetic construct
  misc_feature 1..510: note = Description of Artificial Sequence: Synthetic coding sequence
  source 1..510: mol_type = other DNA
atgaatcaggtgacagattgggttgatccatccttcgacgactttctcgaatgcagtggtgtgagtactattacagctacaagcctgggcgtaaataattccagtcacagaagaaagaacggacccagcactctggagagcagcagatttccagcacgaaagagaggaaatttatcatcattggagcagatttatggactcgagaacagtaaagagtatttgtcagagaacgaaccctgggtcgataagtacaagccagaaacccagcacgagctggctgttcacaagaaaaagatcgaggaggttgagacctggctcaaggcgcaggtcctggaacgccagcctaaacagggaggctctatcctcttaattacaggcccacctggatgtggcaagacgacaaccttgaagattctgtccaaggagcatggcatccaggttcaagagtggattaacccggtcctccctgacttccagaaagacgacttcaagggtatgtttaacacctag

SEQ ID NO: 16976 - DNA, 66 bp, synthetic construct
  misc_feature 1..66: note = Description of Artificial Sequence: Synthetic coding sequence
  source 1..66: mol_type = other DNA
atgaaccaagttacagactgggtggatcccagtttcgacgattttctggagtgctccggggtctag

SEQ ID NO: 16977 - DNA, 2046 bp, synthetic construct
  misc_feature 1..2046: note = Description of Artificial Sequence: Synthetic coding sequence
  source 1..2046: mol_type = other DNA
atgtcgaagacctttctccgcccaaaggtgtccagcaccaaggttaccgattgggtcgacccaagctttgacgacttcctcgagtgcagcggggtctcaaccatcacggcaacctctctgggcgtgaataattccagtcaccggaggaagaacggcccctcaaccttggagagctcccgattccccgctagaaaaaggggaaatcttagctctctcgaacagatttatggcctggagaattcaaaggagtatctttctgagaacgagccctgggtggataagtacaagcctgagacccagcacgagctcgccgtgcacaaaaaaaaaattgaagaggtagaaacatggctcaaagctcaggtgttagagagacagccaaagcaaggcgggtctattttgctgattacaggcccaccaggatgcggaaaaaccacgaccctcaagatcctgtcaaaggagcatgggatccaggtacaggagtggattaaccccgtccttccagatttccagaaggacgacttcaaaggaatgttcaacacagaaagttctttccacatgtttccctaccagagccagatagcggtgtttaaggagttcctgctgcgggccaccaagtacaataagcttcaaatgttaggggacgatttacgtacagacaagaagatcatcttagtggaggacctgccgaatcagttttacagagacagtcacaccctgcatgaggtgctgaggaaatacgtgagaataggacgctgtccactgatcttcatcatatctgactctttgagcggcgataacaaccagcggctgctattcccgaaggagattcaggaagagtgctctatctcgaacatatcattcaaccccgtcgcccctaccattatgatgaaatttttgaacagaattgttaccatagaggctaacaaaaacggcggcaagattacagtcccagataaaacgagtttagaactgctatgccaaggctgcagtggtgatataaggagcgctatcaattctttacagttcagcagtagcaaaggcgagaacaacctgcgccccaggaagaaggggatgtccctgaagtctgatgccgtactgtccaagagtaaacggcgaaaaaagcctgatcgggtcttcgagaatcaggaagtccaagccatcggcggtaaagacgtttccctcttcctctttagggctcttggtaaaatattgtattgtaagcgagcttcactcaccgaactcgattcccctcggctcccttcccatctcagtgagtacgagagagataccttactcgtggagccggaggaagtcgtggagatgtcacacatgccgggtgacctgtttaatctttacctgcaccagaactatatcgatttttttatggagattgacgacatcgtaagagcatctgagttcctgtcgttcgccgacattctgtccggggactggaatacaaggagcctgctgcgcgaatattctacttcaatcgcaacgagaggggtcatgcatagtaataaggctcggggctatgctcattgccagggaggcggatcatcattccggccgctgcacaagccccagtggtttcttatcaataaaaagtaccgggaaaattgcctcgcagcgaaagccctgttcccggatttctgcctgcccgctctgtgcctgcagacacagctcctaccttacttggcccttctgaccatacctatgcgtaaccaggcccagatttcatttatccaagacataggaaggcttcctctgaagcgtcactttggacggctcaagatggaagcactgacagatcgcgagcatggtatgatcgacccggatagtggagatgaggcacagctgaacggcgggcactccgccgaggaatcacttggagagcccacgcaggccacggttcctgagacttggtccttgcctctaagtcaaaattcagcatctgagctccctgcctcccagccacaacctttcagtgcccagggggatatggaggagaatattatcatagaagactatgaatcagatggtacttag

SEQ ID NO: 16978 - DNA, 1518 bp, synthetic construct
  misc_feature 1..1518: note = Description of Artificial Sequence: Synthetic coding sequence
  source 1..1518: mol_type = other DNA
atgttcaataccgaaagtagttttcatatgtttccctaccagtcccagatcgcggtgttcaaggagttcctattgcgcgcgacaaagtataacaaactgcaaatgcttggcgatgaccttaggactgacaagaaaattatattggttgaggatttgcctaaccaattctatcgggattcacacaccctgcacgaagtattaagaaaatatgtgcgaattggccgctgccctctaattttcatcatatctgactcactgtcaggcgacaataatcaacgcctcctctttcctaaggaaattcaggaagaatgctctattagtaatatatcatttaatccagtcgccccaactatcatgatgaagttcctgaatagaatcgtcaccattgaagccaataaaaatggcggtaagattaccgtccccgataagacaagtttggaactcctgtgccagggctgctctggagatatccggtcagctataaattctctgcagttcagtagctctaaaggagagaacaacttgcgccctcgtaagaagggaatgagcctgaagtccgacgcagtcctgtctaaaagtaagaggagaaagaaacccgaccgggtttttgagaatcaggaggtgcaagctatcggcgggaaggacgttagcctttttctatttcgcgccttgggcaaaattctgtactgtaagagagcatcactgactgaactagatagtccccggctccccagccacttatctgagtacgagagagatacacttctggtcgagcccgaggaagtggtcgagatgtcacacatgccaggcgatctgttcaatctctatctccaccagaactatatagacttctttatggagattgacgacattgtgcgggcttcagagtttctgagcttcgcagacatactctcaggagattggaatacaaggtcactactaagggaatactcaacgtctattgcaactcgaggtgtgatgcactcaaataaagctcgggggtacgcccactgtcaaggaggtggatcgtctttccggccactgcataagccacagtggtttctgataaacaaaaagtaccgagaaaattgtctcgctgcaaaggcattattcccagatttctgtctccctgccctctgcctgcagacacagctgttaccatacctggctctgctgactatcccgatgaggaatcaggcgcagatcagcttcattcaggacatcggcagactccctttgaagcgtcactttgggagattgaagatggaggcattgacggacagggaacacggaatgatagaccccgacagtggagacgaggcccaactgaacggaggccactccgctgaagagtctcttggggaacctacccaggcgactgtgccggaaacttggagccttcctctgtcacagaactcagcctcagagctaccagcgagtcaacctcaacccttcagcgctcagggcgatatggaggagaatataatcattgaggactatgagagtgatgggacatag

SEQ ID NO: 16979 - DNA, 1488 bp, synthetic construct
  misc_feature 1..1488: note = Description of Artificial Sequence: Synthetic coding sequence
  source 1..1488: mol_type = other DNA
atggacagtctggctgagtcgaggtggccgcccggtctagccgtgatgaaaaccattgacgatctgctcagatgcggcatctgttttgaatacttcaatattgcaatgatcattccacagtgttctcacaactactgttcactgtgtataaggaagtttctgagctacaagacacagtgccccacctgctgcgtcactgtcactgagccagatttgaaaaacaacaggatattagacgagctggtgaagagcctgaattttgctaggaaccacctgctacagtttgcacttgagagtccagcaaaatctccagccagtagctcttccaaaaatcttgccgtcaaagtttacactcccgtggctagccgccaaagcctcaagcagggctcccgcttgatggataatttccttattcgcgaaatgtcaggctcgacatccgagctcctgatcaaggaaaacaagtctaagtttagtcctcagaaagaagcgtcccctgccgctaaaacaaaggagacccgatctgtggaggagatcgctcctgatcctagcgaagccaagaggcccgagccaccatctacaagtactctgaaacaggtgacaaaagtcgattgcccagtctgtggtgttaacattccagagagccatatcaacaaacatctcgactcatgcctgagtcgggaggaaaaaaaggaaagcctgcgtagttcagtacataagagaaaaccactccctaaaacagtctataacttgctgagtgatcgggacctgaaaaagaaactcaaggagcatgggctaagcattcaggggaacaagcagcagctcatcaagcgtcaccaggagtttgttcatatgtacaatgcccaatgtgacgctctgcatccaaaatccgcagctgaaattgtccgagagattgaaaacatcgagaaaacccggatgaggctggaggcttcaaaactcaacgagtctgtgatggtcttcacgaaagaccagacggaaaaggagattgacgagatccattctaagtaccgaaaaaagcacaaatctgaattccagctgctggttgatcaggccaggaaagggtacaaaaagatcgctgggatgtcccagaagacagtcacaatcaccaaggaagacgagagcacagagaagttgagcagtgtgtgcatgggtcaggaagataatatgacatccgtcactaaccacttctctcagagcaagctagatagtccagaagagctggagccggacagagaggaagatagctcctcttgtatcgacatccaggaggtgctgtcttcaagcgaaagcgattcttgcaatagttctagttcagacatcatccgggacctgctggaagaggaggaggcttgggaggcttcccacaagaacgaccttcaggacaccgaaatttccccaaggcagaatagacgcactcgcgccgcagaatcagccgagatcgagccaagaaacaaacgaaataggaattag

SEQ ID NO: 16980 - DNA, 279 bp, synthetic construct
  misc_feature 1..279: note = Description of Artificial Sequence: Synthetic coding sequence
  source 1..279: mol_type = other DNA
atggatagcctcgcagagagccgttggcctcccgggctggccgtaatgaagacaatcgacgacctcctcaggtgcggaatatgcttcgagtactttaatattgccatgattataccacagtgttctcacaactactgcagcctgtgtatccgaaaattccttagttacaagactcagtgccccacctgttgcgtgactgtgacggagccagatctgaagaataaccgcatactggatgaactcgtcaagtccctcaattttgcaagaaaccatctttag

SEQ ID NO: 16981 - DNA, 1092 bp, synthetic construct
  misc_feature 1..1092: note = Description of Artificial Sequence: Synthetic coding sequence
  source 1..1092: mol_type = other DNA
atggccgtaacgataacattgaagactctccagcagcagacattcaagattaggatggagcccgacgaaaccgtcaaagtgttgaaagaaaagattgaagccgagaaggggagggacgcgtttcccgttgcaggccagaaacttatctacgcaggaaagattctgtccgacgacgtaccaatcagagattacagaattgatgagaaaaacttcgtggtggttatggtaaccaagaccaaggccggacagggaacctcagcaccccctgaagcatcacctacagcagcgcctgagtcatccacttcttttcctcccgcacctacctctggcatgtcacatcccccaccagccgcaagggaagacaagtccccttcagaagaatcggcccccacaacttccccagagtcagtctcaggaagcgtacctagttccggatctagtggacgcgaggaagacgcagccagtactctggtgacggggagtgaatacgaaaccatgctgactgagattatgtcaatgggatacgaacgggagagggtcgttgctgccttgcgtgcttcctataataacccccaccgggcagttgagtatctactgacaggaatcccaggctctcctgaacccgagcacggaagcgttcaggagtcacaggtgtctgagcagcctgcgacggaggcggctggcgagaaccccctggagttcctgcgcgaccagccccaattccagaatatgcggcaagtgatccagcaaaatcccgctcttctcccggctctcttgcagcaacttggtcaagagaatcctcagctgttgcagcagatctccaggcaccaagagcaatttatccaaatgctcaacgaaccgcctggagaacttgccgacattagcgacgtggaaggggaggtgggcgccatcggagaagaagccccccagatgaattacattcaggtgacaccccaagagaaggaagctatcgaacgactaaaggcactgggatttccagaatccctggtcatccaggcatattttgcgtgtgaaaagaatgagaatttggcggcaaatttcctgttgtctcagaacttcgacgatgaatag

SEQ ID NO: 16982 - DNA, 597 bp, synthetic construct
  misc_feature 1..597: note = Description of Artificial Sequence: Synthetic coding sequence
  source 1..597: mol_type = other DNA
atgcttacagagatcatgagtatgggatatgagcgcgagcgtgtggtcgcagctctgagggctagctataataatcctcatcgagccgtcgagtatcttctcactggtatccccgggtcccctgaaccagagcacggttcagtgcaggaatctcaagtaagcgagcagcccgctaccgaggctgccggagagaaccctctggagtttctaagagatcagccccaatttcagaacatgcggcaagtaattcagcagaatccggctctgcttcctgctttgctgcagcagctcgggcaggaaaacccccaactcctacagcagatttcaaggcaccaggaacagtttattcagatgttgaacgaacctcctggcgagcttgccgacatctcggacgttgagggggaggtcggggccataggcgaagaagccccacaaatgaattatatacaggtgacacctcaagagaaagaagcgatcgagaggcttaaagctctgggattcccggaatcactagtaatacaggcttactttgcttgtgagaagaacgagaatttagctgcgaactttttactgtcacaaaacttcgatgacgaatag

SEQ ID NO: 16983 - DNA, 1092 bp, synthetic construct
  misc_feature 1..1092: note = Description of Artificial Sequence: Synthetic coding sequence
  source 1..1092: mol_type = other DNA
atggctgttacaattactttgaaaactctgcaacagcagacgtttaaaattagaatggaacctgacgaaactgtcaaggttctgaaggaaaagattgaggccgagaagggcagggatgcctttccagtcgcgggccagaaattgatttacgctgggaagatcctgtcagatgacgtcccgatacgcgactataggattgacgaaaaaaactttgttgtggtaatggttactaagaccaaagctgggcaggggacatccgcacccccagaggcatctcctaccgcagctccagaatcgagcacatcctttcctcctgcacccacgtctggaatgagccatccacctccggctgcccgagaggataagtccccgtcagaagagagcgctccaacaaccagtcccgagagcgtgtccggatccgtcccatcctccgggagtagcgggagagaggaagacgctgcctccactctggtcaccgggtccgagtacgaaacgatgctaaccgagatcatgtccatgggatatgagagggaacgagtcgtggctgcactccgcgccagttataacaacccccatagggcagtggaatatctgttaactggcatccccggttcgcccgaaccggaacatggatcagtccaggaatctcaggttagcgagcaacccgccactgaagccgccggcgaaaatcctctcgaatttctgagggatcaaccacagttccagaatatgcggcaagtgattcagcaaaatcctgcactcttgccggctctcttacagcagcttggccaggaaaaccctcagctcctgcagcagatatctcgacaccaggagcaattcatccagatgctgaatgagcctccaggagagcttgcagatattagcgacgtggagggtgaggtgggagccatcggggaggaggccccccagatgaactacatacaagttacgccccaagaaaaggaagctatcgagaggttgaaggccctgggtttccctgagagcctcgtgattcaggcctattttgcttgcgagaaaaacgaaaatcttgcagctaattttctattgagccagaattttgatgatgaatag

SEQ ID NO: 16984 - DNA, 927 bp, synthetic construct
  misc_feature 1..927: note = Description of Artificial Sequence: Synthetic coding sequence
  source 1..927: mol_type = other DNA
atggccgttactattacattgaagacgctgcagcagcaaacatttaagattcggatggagcctgacgagaccgtcaaggtactgaaggagaaaatcgaggccgagaagggtcgcgatgcattcccggtggctgggcagaaactcatctatgctggaaagattctgagcgatgatgtgcccatacgcgattatcgcatcgatgagaagaactttgtcgttgtaatggtgacaaagactaaggctgggcaaggaacctccgcaccccctgaggcgtcaccaactgcggcccctgaatcatcaacctcatttcctcccgcacccacttcagggatgtcacacccaccgcccgcagcaagagaggacaaatcaccaagtgaagagtcagccccaacaaccagcccggaatctgttagcggctctgtgccttcgagtgggtcttccgggagagaagaggatgccgcctctaccctcgtgacaggctccgagtatgaaaccatgctcaccgaaattatgtccatgggctatgaaagggagcgggtcgtggcggctctgcgcgcaagctacaacaacccacacagggcggttgaatatctattgaccggaatcccaggatcgcccgaacccgaacacggatccgtgcaggagagccaggtctctgaacaacccgctactgaagccgcaggagaaaatcccctggagttcctccgcgatcagccccagtttcagaatatgagacaggtcattcagcaaaaccccgctctcttgccggccctcctgcagcagctcggtcaagagaatccacaactgctgcagctgaaggctttagggttcccagaaagtcttgtcatccaggcttacttcgcctgcgagaagaacgaaaaccttgcagccaactttcttttgtcccaaaacttcgacgatgagtag

SEQ ID NO: 16985 - DNA, 1230 bp, synthetic construct
  misc_feature 1..1230: note = Description of Artificial Sequence: Synthetic coding sequence
  source 1..1230: mol_type = other DNA
atgcaggtgacactcaagaccctgcagcagcaaactttcaaaatcgatatcgaccccgaggagactgtgaaggccctcaaggaaaaaatcgagtcggagaagggaaaagatgccttccccgtggccggacagaagcttatatatgctgggaagattctgaatgacgacaccgctttgaaagaatacaaaatcgatgagaagaacttcgtcgttgtcatggtaacgaagccaaaggccgtgagcacaccagcccccgctacaacacaacagagcgccccagcctcgaccacagcagtcacatcgtcaactactactaccgttgcccaagctcccacgccggtcccagccctggctcctactagcacaccagcaagcatcacccccgcaagcgcaaccgcttcctctgaaccagcccccgcctccgcggccaaacaggagaaaccagccgagaagcccgccgagacccccgttgccacatctccaactgcaactgatagcacatccggagactctagtaggtccaacttgttcgaagatgccacaagtgcgctggttactggccagagctacgagaatatggtgaccgagattatgagcatgggctatgagagagaacaggtcattgccgctttgagggccagctttaacaatcctgaccgcgccgtggagtacctgcttatgggtataccaggggacagagagtcgcaggccgttgtcgacccgccccaggctgcgtcaacgggagcaccccagtccagcgctgtcgcagctgcagcagctaccaccaccgccaccaccacgaccacatccagcggggggcacccactcgagttcctgcgtaatcagccccaattccagcagatgcgccaaattatccagcagaatcctagccttttgcccgctttgctccagcagatcgggcgcgaaaatcctcaactccttcagcagatctcccagcaccaagagcacttcatccaaatgctgaacgagccagtccaagaagccggtgggcaggggggtggcggagggggaggttctggcgggattgcggaagctggaagcggccatatgaattacatacaggtgacaccccaggaaaaggaagcgatagagcgcctcaaggccctcggatttcctgaaggcctggtgattcaggcttacttcgcctgtgagaaaaacgaaaatcttgccgcaaacttcttgctgcagcagaatttcgatgaggactag

SEQ ID NO: 16986 - DNA, 519 bp, synthetic construct
  misc_feature 1..519: note = Description of Artificial Sequence: Synthetic coding sequence
  source 1..519: mol_type = other DNA
atggtgaccaagccaaaggcagtttccacccccgcacctgcaacgacccagcagtccgcgcccgccagcacgaccgctgttacctccagcaccaccacaaccgtcgcccaagcgcccacccccgtgcctgcgctggccccaaccagcacaccagccagtatcacaccagcatccgccaccgctagtagcgagccagcacccgcatccgcggctaaacaggagaagcccgccgaaaaaccagcagagactcctgtcgcgacttctcccaccgcaaccgattcgacctctggagattctagtagaagcaacttgttcgaagatgccacaagcgcactcgtgactggacagtcctatgagaacatggtaaccgagattatgtctatgggttacgaacgcgaacaggtcatagccgcactgcgcgcctcattcaataaccctgaccgggctgtggagtaccttttgatgataattgttaagacagggaacaagaagaaaaagcaacctcttctgggaaagtag

SEQ ID NO: 16987 - DNA, 1014 bp, synthetic construct
  misc_feature 1..1014: note = Description of Artificial Sequence: Synthetic coding sequence
  source 1..1014: mol_type = other DNA
atggtcactaagccaaaagctgtgagtacaccagctcctgccacaacacagcagtctgccccagcgtccaccacagcagttacctcgtccacgaccactactgtggcccaggctcctacccccgtccccgcgttggcccctacatccacccccgcaagcattactccagcaagcgcgaccgcgagcagcgagcctgctcccgcctctgcagcaaagcaggaaaagccagcagaaaagccggccgaaactccagtggcaacctccccgaccgccaccgattccacatccggggatagttcacggtctaatctctttgaggacgctacctccgctttggtcaccggtcagtcatacgaaaatatggtcacggaaattatgagtatggggtacgaacgggaacaagtcattgccgccctgcgagcttccttcaataatcccgaccgcgccgtggagtatctgctcatgggaattccaggagatcgcgaatcgcaagctgttgtggatcccccccaggcagcttccaccggcgcaccccagtcatctgccgtcgcagcagccgctgctactacaactgcaaccacaaccacaaccagcagtggaggccatcccctggagtttctgcggaatcagccgcagttccagcagatgcgacagatcatccaacagaatccatcacttctgccagccttgttgcaacagatcggcagggaaaaccctcagttgttgcagcaaatttcacagcatcaggagcacttcatacagatgttgaatgaacccgtgcaggaggcaggaggtcaaggcggcggtggagggggaggctctggagggatcgcagaggcggggtcaggccacatgaattatatccaggtgacccctcaggagaaagaggctatcgaaagactgaaagctctggggttcccggagggactggttatccaggcatactttgcttgcgaaaagaacgagaacttggccgctaattttctactgcaacagaactttgatgaggactag

SEQ ID NO: 16988 - DNA, 441 bp, synthetic construct
  misc_feature 1..441: note = Description of Artificial Sequence: Synthetic coding sequence
  source 1..441: mol_type = other DNA
atgcaggtcaccctgaagacactgcagcaacagactttcaaaattgatattgaccctgaggaaactgtcaaggcccttaaagaaaagatcgaatcagagaaggggaaggacgccttccccgttgcaggtcagaagcttatctatgccgggaagatcctgaacgatgacaccgccctgaaagagtacaaaattgacgagaagaatttcgttgtggtaatggtgactaagcccaaagctgtgagtaccccagccccggccacaacccaacagtccgctcctgcatcgactacagccgtgacctccagcaccactactaccgttgcccaggccccaacccctgtcccagctctggcgcctacgtccacacctgccagcatcaccccagcaagcgccacagccagtagcgaacctgcccccgcctccgcagcgaaacaggagtag

SEQ ID NO: 16989 - DNA, 243 bp, synthetic construct
  misc_feature 1..243: note = Description of Artificial Sequence: Synthetic coding sequence
  source 1..243: mol_type = other DNA
atggtcaaggcgctcaaagagaaaatagaatccgagaaaggaaaggacgcattcccagtggcaggtcaaaaattgatttatgccgggaaaattcttaatgatgatacagctttgaaagaatataagattgatgagaagaattttgtcgtcgtgatggttaccaaaccaaaggccgtctctacacctgctcctgctacgactcagcaatcagccccagcctccaccaccgctgtcactagctag

SEQ ID NO: 16990 - DNA, 345 bp, synthetic construct
  misc_feature 1..345: note = Description of Artificial Sequence: Synthetic coding sequence
  source 1..345: mol_type = other DNA
tgaacggcctcatcagagcctgccccagcatcagcggcaaagcaggagaagcccgcggagaaacctgctgagactcccgtcgccacgtcccctacagccaccgatagcacctctggagatagctcaaggtccaacctcttcgaggatgcaacaagcgctcttgtgaccggacaaagttacgagaatatggtgacagaaatcatgtccatgggctacgaacgcgaacaagtgattgccgcactgagagcgtcatttaataaccctgaccgcgctgtggagtacctgctgatgataatcgtaaagacaggcaacaaaaaaaagaaacaaccattgcttggcaagtag

SEQ ID NO: 16991 - DNA, 3939 bp, synthetic construct
  misc_feature 1..3939: note = Description of Artificial Sequence: Synthetic coding sequence
  source 1..3939: mol_type = other DNA
atgtctcgaatagagaagatgtcaattctgggcgttagatcatttggaatagaagacaaagacaaacaaattattaccttctttagcccattaacaattctggtgggaccaaatggcgctggcaaaacaacaattattgaatgcctaaaatacatctgcaccggggactttccgcctggaacgaaaggaaatacattcgtccatgacccaaaagtagctcaggaaacagacgtccgggctcagatccgccttcagtttagggacgtgaacggagaacttattgccgtccagcgctctatggtctgcacacagaagagtaaaaaaacagaatttaaaaccctcgagggggttatcacccgaactaaacacggggaaaaggtctcccttagtagtaaatgtgccgagatagatcgcgagatgatttcatctttgggagtctcaaaagccgtgctgaataatgtcatcttttgccaccaggaagatagcaactggccactctctgaaggcaaagcactgaagcagaaattcgatgaaattttttctgctacacgttatataaaggctctcgaaacactccgccaggtgaggcaaactcagggccagaaagtgaaagaatatcagatggaactaaagtatctgaaacagtataaagagaaagcatgcgagattagggaccagatcacctccaaggaggcccagctcacatcttcaaaggagatcgtgaaaagttatgaaaacgaactcgacccgctaaagaaccgattgaaggaaattgaacataacctctcgaaaatcatgaaactagacaatgagattaaggctctggattctcgcaaaaagcaaatggaaaaagataacagcgaactcgaggagaagatggagaaagtcttccagggcactgatgagcaactgaatgatctgtaccacaatcaccagaggacagtcagggagaaagaaaggaagctggtggattgccatagggagctggagaaacttaacaaagagtcacggctcctgaatcaggagaagtccgagctgctcgtggaacagggccgcctgcagctgcaggcagatcgacaccaggagcacattcgtgctagagattcactaatccagtcgctggctacgcaactggaactggatggcttcgagcggggccctttttccgagcgccagattaaaaactttcataaacttgttcgagaaaggcaggaaggcgaagccaagactgccaaccagctgatgaacgatttcgctgagaaggaaaccttaaaacagaagcagatcgatgaaatccgcgacaagaagacaggtttgggtaggattatcgagcttaaaagtgagatcttgtcaaaaaaacaaaacgagctcaaaaatgtgaaatatgagctgcagcaactggagggtagtagcgatcggatcctggagctggatcaagagctgataaaagcggaacgagagctgagcaaggcagaaaaaaactccaacgtggagactctaaaaatggaagtcatctctctacaaaatgagaaagccgacctggatcgtaccttgcggaagcttgaccaggaaatggaacagctcaatcatcacacgactaccaggacccaaatggaaatgttaactaaagacaaagcagacaaggacgaacagatccggaagatcaagtcacggcatagtgacgaactgacatctttgctgggctattttccaaataagaagcaactggaggattggctccactcaaagtctaaagaaataaatcaaactagagaccgtctcgccaagctcaataaagaactcgcctcttcagagcagaacaagaaccatattaataatgagttgaagcggaaggaggagcagctctcatcatacgaggataaactatttgatgtctgtggcagtcaggactttgaatctgatctggacagacttaaggaagagatcgagaagtcctccaagcagagagcaatgctggctggggccacagcggtttacagccagttcattactcagcttacggatgagaatcagtcctgttgtcccgtgtgccagcgggtgtttcagacagaggccgagctgcaggaggtgatttcagatctgcagagcaaactgcgcctagcccccgataagctgaagagcactgaatcagagttaaaaaaaaaagaaaaacggcgcgatgagatgctcggtctggtcccaatgcggcagtctatcatcgacctgaaagaaaaggaaatccccgaactgaggaacaagcttcaaaacgtgaacagggacatccagcgcctaaaaaatgacatcgaggagcaggagactctgctgggcactattatgcccgaagaggagtcagcgaaagtgtgcctgaccgatgtcacaattatggagaggtttcagatggagctgaaggacgtggagaggaaaatcgcgcagcaggccgccaaactgcagggaatcgacttggaccggacagtgcagcaggtcaaccaagagaaacaggaaaagcaacacaagctcgacacagtttctagcaaaattgagctgaatcggaagctcatccaggatcagcaggaacaaatccagcacctgaagagcaccacaaacgagctgaagtctgaaaagctccagatttcaaccaacctgcaacggagacagcagctcgaggagcagacagtggaactgtccacagaggttcagtccctatacagggaaataaaggatgcaaaggagcaggtctcccctcttgaaaccacattggagaagtttcaacaggagaaagaagaactcattaacaagaagaataccagcaacaaaattgcacaagacaaactaaacgatatcaaggaaaaagtgaagaatattcacggatatatgaaggatatcgaaaactacatccaggatggcaaagacgattataaaaaacagaaggagacagagctgaacaaagtgattgctcagctgtccgaatgtgagaagcacaaagagaagatcaacgaggacatgaggctcatgaggcaagatatcgatacccagaagatccaagagcgatggctgcaagacaacctgaccctgaggaaaaggaatgaagaactgaaagaggttgaagaggaacggaaacagcatctcaaggaaatgggccagatgcaggtactccagatgaagagtgagcatcagaagttggaggagaacattgacaacattaagcgcaatcacaatctggccctcggaaggcagaaggggtacgaagaggagatcatccattttaaaaaggagttgagagaaccccagtttagggatgcagaagagaagtaccgtgagatgatgattgtgatgcgtacgactgaacttgtgaacaaggatctcgacatttattacaagactctggatcaggcaataatgaaattccacagcatgaaaatggaggaaataaataaaattattcgggacctgtggcgtagtacatacaggggacaggacattgagtacatcgagatcaggtccgacgccgacgagaacgtcagcgcctcggacaaaagacggaattacaattatcgggtcgtgatgctgaaaggtgacacggcattagacatgcgcgggagatgcagcgccggtcagaaggtcctggcttcactaatcatacgtctggcattagccgaaactttctgcttgaattgcggaattatagccctagacgaaccaaccaccaatctcgatagagaaaacatcgagtcactcgcccacgctctggtagagattatcaagtccaggtcacagcagcggaatttccagctcctggtaattacacatgacgaagattttgttgagcttctaggaagaagcgagtacgtggaaaaattctatcgcataaagaagaacattgaccagtgctcagagatcgtgaaatgtagcgtttccagtctggggttcaatgtccactag

SEQ ID NO: 16992 - DNA, 3522 bp, synthetic construct
  misc_feature 1..3522: note = Description of Artificial Sequence: Synthetic coding sequence
  source 1..3522: mol_type = other DNA
atgatatcctctctcggcgtttctaaagccgtgctcaataatgtgatcttctgccaccaggaagactctaactggcctctgtccgaggggaaggcacttaagcaaaaatttgacgaaatctttagcgccaccaggtatattaaggcactggaaaccctaaggcaggtgaggcagactcaggggcaaaaggtgaaggagtaccagatggagctgaaatacctgaagcagtacaaggaaaaagcttgtgagataagggatcagatcactagtaaggaggcccagctcactagctccaaggagatcgtgaagtcctacgagaatgaactggatcctctgaaaaacaggttaaaggagattgagcacaatctctctaaaatcatgaagcttgataacgagattaaagccttggattctcgcaaaaaacagatggaaaaggacaattcagaactcgaggaaaagatggagaaggttttccaggggacggacgagcagctgaatgacctctaccataaccatcagcgcaccgtgcgggagaaggaacgcaagcttgtagactgccacagagagctggaaaagctgaacaaggaatctcgactgctgaaccaggagaagtcggagcttctggttgagcagggtaggctgcaattgcaggctgatcgacaccaggaacatattcgtgcccgggacagcttgatccagtcattggccacgcagctggagcttgatgggttcgaaaggggaccattctcagaaagacagatcaaaaacttccacaaactagtgcgtgaaagacaggagggcgaggctaagaccgctaaccaactgatgaacgattttgcagagaaggagacacttaagcaaaaacagatagacgagattcgtgataaaaaaactggtttgggccgcatcatcgaacttaagtcagaaattctctccaagaaacaaaatgaacttaaaaacgttaagtatgaactacagcaactggaagggtccagcgatcggatactggagctcgatcaagagctgataaaggctgaacgggaactgagcaaggccgagaagaattctaatgttgaaactctcaagatggaagttatcagtctccaaaacgagaaggccgaccttgaccgcacgctcaggaaactcgaccaggagatggagcagttgaatcatcatactaccaccaggacccagatggaaatgcttacgaaagacaaggccgataaagacgagcagattcgaaagatcaaatctagacattccgacgaactgacatctctgctggggtatttcccaaataaaaagcagctggaggattggctccactccaagtccaaagaaattaaccaaacaagagatagactagccaagctgaacaaagaactggctagtagtgaacaaaacaagaatcacattaataacgagctgaagcgcaaggaggaacagttatcatcatatgaggacaaattatttgacgtgtgcggctcacaggacttcgagtctgacctcgaccggttgaaggaagaaatcgaaaaaagcagtaaacagcgcgcaatgctggctggtgcaactgccgtgtatagtcagttcatcacccagcttacagacgaaaatcagtcctgctgtcccgtgtgccagagggtgtttcagacagaagccgagctgcaggaggtgataagcgatctgcagtcaaagctccggctcgcacccgataaattaaagtctacggaatccgaactgaaaaagaaggagaagaggagggatgagatgcttggactcgttcccatgaggcagtccatcatcgacttaaaggaaaaggagatcccagaacttcgaaataagctccagaacgtgaaccgggacattcagagactcaaaaacgacatcgaagagcaggagaccctactgggaacaatcatgccagaggaggagtctgcaaaggtgtgtctgactgatgttactatcatggagcgctttcagatggagcttaaagacgtcgaaaggaagatcgcccagcaagcagctaaactccagggaattgatttagacaggacagtccagcaagttaaccaggagaagcaagaaaaacagcataaactggataccgtgtcctcaaagattgagcttaaccgcaaactcatccaagaccaacaagaacagattcagcacctcaaaagtactacaaacgaactcaagtccgagaaactccaaatctccactaatctccagagacggcaacagctggaggagcagacggtcgagctgagtacagaggtgcagtctttgtatcgggaaatcaaggacgctaaggaacaggtctctcccctggagaccactcttgagaagtttcagcaggagaaagaggaattaatcaataagaaaaacacctccaacaagattgctcaggacaaattaaacgatataaaagagaaggtgaagaacatacacggctatatgaaggacattgagaattatatccaggacggtaaggatgactataagaaacaaaaggaaactgaactgaataaagtcatcgcacaactgtcagaatgtgaaaagcataaagagaaaatcaacgaagatatgagactgatgcgccaagacattgacacccagaaaatccaggagcggtggctgcaggacaatttgactctccgaaagcgcaatgaggaattgaaggaggttgaagaggaacgtaaacagcatttaaaggaaatgggccaaatgcaggtgctgcagatgaagtcagagcaccagaagctcgaggaaaatatagacaatatcaagcggaaccacaacctggccctgggcagacagaaaggctatgaggaggagatcatacattttaagaaagagcttagggagccacagttccgcgatgccgaggaaaagtaccgcgaaatgatgattgtcatgagaacaacggaattggtgaataaagacctagatatctattacaagacgcttgaccaggctatcatgaaattccactcaatgaaaatggaggagattaataaaattattcgcgacctatggcgaagtacgtaccgtggccaggacatagagtatattgaaatccggtcagacgccgacgagaatgtttctgcatccgataagcggaggaactacaactatcgcgtggtgatgctgaagggggacactgcgctagatatgcgcggcagatgttctgcggggcaaaaggtcctcgctagcctgattataaggctggcactggctgaaaccttttgcctcaattgcggaatcattgcgctcgacgagcccaccacgaatcttgatcgcgagaatatcgaatccctggctcatgccctggtggagataataaagtcgcgaagccagcaacgcaacttccagcttcttgtgatcacacacgacgaagattttgtggagttactggggagatccgaatatgttgaaaagttttatcgtatcaaaaagaacattgaccagtgttccgaaatcgtgaaatgctctgtgtcctccttagggttcaacgtgcattag

SEQ ID NO: 16993 - DNA, 1020 bp, synthetic construct
  misc_feature 1..1020: note = Description of Artificial Sequence: Synthetic coding sequence
  source 1..1020: mol_type = other DNA
atggcaatgcagatgcagctggaagccaatgccgacaccagcgtggaagaagagtccttcggcccacaaccgatatctagactcgagcagtgtggaattaacgctaatgatgtgaagaagctggaggaagccggatttcatacagtagaggctgtggcttacgcccctaagaaggagttgattaatatcaaaggcattagcgaggccaaggccgataagatcctcgcggaagccgcgaagttagtccccatgggcttcaccaccgccactgagttccaccagagacgaagtgagataattcagatcactacaggctctaaagagctggacaaattgctccaaggcggaatagaaaccggaagtattacagagatgttcggagaattccgaaccgggaaaacacaaatttgccacactctggcagtgacctgccagctgcccatcgatcggggcggaggcgaagggaaggccatgtatattgacacagaaggaacctttcgccctgagagactcctggctgtggccgaacgatacgggctttctggttctgatgttcttgacaatgtggcctacgccagggccttcaatacagaccatcaaacacagttgctataccaggctagcgccatgatggtagaaagcagatatgctctcctgattgtcgatagcgccacggcactttataggactgattacagcggtcggggcgaattgtctgctcgccagatgcatcttgcccgattcctcaggatgctgctgagactggctgatgaatttggtgttgctgtggtgatcaccaaccaagtcgtggcacaggtcgatggagccgcgatgtttgcagctgatcccaagaaaccgatcggagggaatatcatagctcacgcctccacaactcggctctacttgagaaagggacggggggaaacccgcatatgtaagatctacgacagcccatgcctccctgaagcggaagcaatgtttgctattaacgcagatggggtgggagatgcaaaagactag

SEQ ID NO: 16994 - DNA, 729 bp, synthetic construct
  misc_feature 1..729: note = Description of Artificial Sequence: Synthetic coding sequence
  source 1..729: mol_type = other DNA
atggcaatgcagatgcagttggaggcaaacgctgacacctcagtggaagaggaaagtttcggaccccagcctatcagtagactggaacagtgtgggataaatgcaaacgatgtgaaaaaactggaggaggccggcttccacactgtggaggccgtcgcctatgcgcccaagaaggaactcattaacatcaaaggcatcagcgaggctaaagctgacaagatacttcttctgtcccaccgttacgggcttagcgggagcgacgtactggacaacgtggcatacgcccgcgcttttaacacagaccatcagactcagctgctgtaccaggcgagtgccatgatggtggagtccaggtacgcgctccttatcgtcgacagcgctactgccttatatcggaccgactattccggacgcggggagctttccgctcgccagatgcacttagccagatttctacggatgctgctcagactggctgatgagttcggagtcgcagtagtaatcactaatcaagtcgtggcacaggtggacggggccgcaatgttcgcagccgaccctaagaaacctatcggcggaaatattattgcacacgcgtctacaaccagattatacctgaggaaaggtaggggtgaaacaagaatctgtaaaatttacgattcaccgtgtctgcctgaggccgaggcaatgttcgcaatcaacgccgatggagtcggggatgccaaagattag

SEQ ID NO: 16995 - DNA, 1023 bp, synthetic construct
  misc_feature 1..1023: note = Description of Artificial Sequence: Synthetic coding sequence
  source 1..1023: mol_type = other DNA
atggccatgcagatgcagctggaggcaaatgccgatacgagtgtcgaagaagaaagtttcggaccccagcccatcagccgccttgaacagtgcggaattaacgcgaacgacgttaaaaagctggaggaggcagggttccacactgttgaagccgtggcctacgctcccaagaaggagttgataaatatcaagggaataagcgaggccaaggcggataaaattctcacagagagccggtctgtggcacgtttggaatgtaacagcgtgatccttgtgtattgtaccctgcggctctccggttcatctgatagccctgcctccgccagtagagtggtcgggactactggtggtatcgaaaccggctctatcaccgaaatgttcggggaattccggacaggtaagacccagatttgtcatactttggccgtgacatgccaacttcccattgacagaggaggaggggagggcaaggcgatgtatatagataccgagggaacgtttaggccagaacgtttgttggccgtagccgaaagatatggactttccggaagcgacgtcctggataacgtagcctacgcgagagccttcaacacggaccaccaaactcagctgctgtaccaggcttcagctatgatggtggaaagccggtacgcactgttaatcgtggattccgccactgccctttatcgtaccgactattccggccggggagagcttagcgccaggcagatgcacctggcgaggttcctccggatgctacttcgcctggccgatgagtttggggttgctgtggtgatcacaaaccaggtcgtagctcaggtggatggtgccgccatgttcgctgccgatcccaaaaagccaatcggcggtaatattattgctcacgctagcaccactcgcctgtatctgagaaaagggaggggtgaaacccggatttgtaagatctatgatagtccgtgcttacccgaggccgaagctatgttcgccattaatgcagatggagtgggagatgccaaagactag

SEQ ID NO: 16996 - DNA, 843 bp, synthetic construct
  misc_feature 1..843: note = Description of Artificial Sequence: Synthetic coding sequence
  source 1..843: mol_type = other DNA
atggctatgcagatgcagttagaggctaatgcggacacatcagtcgaagaagagagttttggcccccagccaatctcccgcttggaacaatgtggcatcaacgccaatgacgtgaagaaacttgaagaggccggctttcacaccgtggaagcagtggcgtacgcacccaagaaggagctaattaatattaaaggcatcagtgaggctaaggctgataagattcttgcagaggcggcgaagctagtccccatggggttcacaactgccactgagtttcaccagagacgaagcgagattattcaaatcactactggctctaaagagttggataaactgttgcagggggggatagagacaggaagcatcacagagatgtttggtgaattcaggacagggaaaacccagatttgccacactctagcagtgacctgccagctccctatcgacaggggagggggggagggtaaggcgatgtatatcgacacggaaggcacattccggcccgaacgcctcttagcggtggccgaacggtatgggctgtccgggtctgacgtcctggacaacgtggcttatgccagggcctttaatacggatcaccagacacagctcctttatcaggcgagtgcaatgatggttgaatctagatatgcccttctgatcgtggatagcgccactgcattatatagaacagactactccgggcgaggggagctgtctgctcgacagatgcatttggctcggtttttaaggatgctgctgcgactcgctgacgaaatcgttagcgaagaacgtaaaagaggaaaccagaacctccaaaaccttagactctctctgagttcatag

SEQ ID NO: 16997 - DNA, 456 bp, synthetic construct
  misc_feature 1..456: note = Description of Artificial Sequence: Synthetic coding sequence
  source 1..456: mol_type = other DNA
atggcaatgcagatgcagctggaggcgaatgccgatacctcagtcgaagaggaatcttttggcccccagccgattagcagattagaacagtgcggcattaacgccaacgatgtgaagaaactcgaggaagccggtttccacactgtggaagctgtggcttacgccccgaaaaaagaactcattaatataaaaggcatttctgaagcgaaggccgataagattttagctgaagcggccaaacttgtgccaatggggtttacaactgccacagagttccaccagaggcggagcgagatcattcagatcacaaccggctcaaaggagctggataaacttctgcaggggggtatcgaaacaggcagtattaccgaaatgttcggtgagtttaggaccggcaagactcaaatctgccacacgctggcggtcacatgccaggtgtggtccctgtggcaatag

SEQ ID NO: 16998 - DNA, 228 bp, synthetic construct
  misc_feature 1..228: note = Description of Artificial Sequence: Synthetic coding sequence
  source 1..228: mol_type = other DNA
atggctatgcagatgcagctggaggcaaacgctgacaccagcgtcgaggaggagagctttggcccacaacctattagtagattggaacagtgtggtattaatgccaatgacgtaaagaagctagaggaagcgggctttcatacagtggaagccgtggcgtatgcccctaagaaggaactgataaatattaagggcatatccgaggcgaaggcagataaaattctttag

SEQ ID NO: 16999 - DNA, 519 bp, synthetic construct
  misc_feature 1..519: note = Description of Artificial Sequence: Synthetic coding sequence
  source 1..519: mol_type = other DNA
atggccatgcagatgcaattagaagccaacgccgacactagcgtagaagaagaaagctttggcccgcaacccatttctcgcctggaacaatgtggcatcaatgccaatgacgtgaaaaaactggaggaggccggttttcacacggttgaggctgtcgcttatgctccaaaaaaagaactaatcaatattaagggcatctccgaggcaaaggcggacaagatcctcgccgaggctgctaagctcgtacccatgggcttcaccaccgcaacggagttccatcagcgccggagcgaaatcatccagatcacgacaggatccaaggagctcgataagctgttgcagggaggtatcgaaactgggagcatcaccgagatgtttggtgaattccgtacagggaaaacgcaaatatgccacactctcgcggttacttgtcagttgcctattgatagaggtggcggcgaagggaaggccatgtacatagacacagagggaacatttagacccgagaggttgctctag

SEQ ID NO: 17000 - DNA, 303 bp, synthetic construct
  misc_feature 1..303: note = Description of Artificial Sequence: Synthetic coding sequence
  source 1..303: mol_type = other DNA
atggcaatgcagatgcagctcgaggcgaacgccgacacttcagtggaggaagagagttttggcccccagccaatctctcggcttgaacagtgtggcatcaatgcgaatgacgtcaaaaaattggaagaggctgggttccacacagttgaggctgtggcatacgccccgaagaaagagttaattaatatcaaggggatcagcgaggctaaagcagacaaaatccttgtagagctccgccttgacctgtctcagaaatgcctcgaaaattccgagctagggaggccccgtagcgttatcaggtag

SEQ ID NO: 17001 - DNA, 1023 bp, synthetic construct
  misc_feature 1..1023: note = Description of Artificial Sequence: Synthetic coding sequence
  source 1..1023: mol_type = other DNA
atggccatgcagatgcagttggaggccaatgccgatacttccgtggaggaagaaagctttggcccgcagccaatctctcggctcgagcagtgtggtatcaatgctaacgacgtgaaaaagctcgaagaggccggcttccataccgtggaggccgtagcatacgcccccaaaaaggagttgatcaatattaaggggatctcagaagccaaggcagacaaaatcctcaccgagagccgtagtgtcgccaggctggagtgcaattcagtgatccttgtttattgcacactgaggctgtcagggtcctcagactcccccgccagtgccagccgcgtcgtgggaactaccggtggaatcgaaacaggttccataaccgaaatgtttggagagtttagaacaggcaagacgcagatttgccacaccttggcagtcacatgtcaactgcccatcgaccgggggggcggcgagggcaaggccatgtatattgacacagagggaaccttccgtccggagagactgctggctgttgctgaaagatatggcctgtcagggtctgacgtgctggacaatgttgcatacgctcgcgcgttcaacacagaccaccaaacgcagctcctttaccaagcctccgccatgatggtggagagccgctacgcattactgattgtggattctgcaaccgccctttatagaacagactatagcggtcgcggtgagctgtccgctcgacaaatgcatctagcgaggtttctacgaatgcttctgaggttggcagatgaatttggagtcgccgtggtgattactaaccaggtggtcgcacaggtggacggagcagccatgttcgccgccgacccaaagaagccaatcggtggcaacataatcgcccacgcgagtacaactagactgtacttgagaaaggggagaggcgagacacgaatctgcaagatttacgacagcccctgcctacctgaggccgaggccatgttcgctatcaacgccgatggcgtgggcgacgccaaagattag

SEQ ID NO: 17002 - DNA, 729 bp, synthetic construct
  misc_feature 1..729: note = Description of Artificial Sequence: Synthetic coding sequence
  source 1..729: mol_type = other DNA
atggcaatgcagatgcagttagaggcaaatgcggacactagcgttgaggaggagagcttcggcccccagcccatttccaggctggagcagtgcggaatcaacgcaaatgacgtgaaaaagctcgaggaggcgggctttcatacggtcgaggcagtcgcttacgctcctaaaaaagagttgattaatatcaaaggaatctccgaagccaaggcagataaaatcctagccgtggccgagcgctacggcttatcagggagcgatgtgctggacaacgttgcctacgccagggctttcaatacagatcatcagacccagctgctgtaccaggcttccgcgatgatggtggagagccgatatgccctcttgatcgtggactcagccacagctctctatcgcactgattatagcggcaggggcgaattgtccgcacggcagatgcatctagcgcgttttcttaggatgcttctgaggctggctgatgagttcggtgtggcagtggtgattactaatcaggtagttgctcaggtcgatggcgctgctatgtttgcagctgacccaaagaagcccatcggcggcaatattattgctcatgcctctacaacaagactttacctgcgaaaaggccggggagagactcgtatctgtaagatttacgactcaccctgtctcccagaagctgaggcgatgtttgctattaatgcggacggcgtcggagatgccaaggattag

SEQ ID NO: 17003 - DNA, 1053 bp, synthetic construct
  misc_feature 1..1053: note = Description of Artificial Sequence: Synthetic coding sequence
  source 1..1053: mol_type = other DNA
atgggttctaagaagcttaaaagagtgggcctctcacaggaactttgcgaccggctttcacggcaccagatccttacctgccaagacttcttatgcctaagccctttggagctaatgaaggtaacagggctgtcctaccgcggcgtccacgagttgctgtgcatggtgagcagagcatgtgcccccaagatgcagaccgcgtatggcattaaagcccaaaggtcagccgatttctcacccgctttcttgagcactacactgagcgccctagatgaggcgttgcacggcggcgtcgcttgcggtagcctgaccgaaatcaccggaccacccggatgtggaaagacccaattctgtattatgatgtctatcctggcgacactccccaccaacatgggcggcctggagggggctgtggtgtatatcgataccgaaagcgccttttcggcagaacgcctggtggagatagccgaatcccgctttccccggtactttaataccgaggagaagctgctactgacctccagtaaagtccatttatacagggagctcacttgtgatgaagtgctccagcgcattgagtcccttgaggaggaaataatcagcaagggcattaagttggtgatcctggatagcgtggcaagtgtggttcgaaaggagtttgacgcccagctacagggaaacctgaaggaaaggaataagtttctcgcgagggaggccagtagcctaaaatacctggcggaagagttcagcattcctgtaatcctcaccaaccagataacgactcacctgtccggggcattggccagccaggcggacttagtctcacctgctgatgatctatccttgagcgaagggacttctgggtcttcttgcgtcattgctgctttgggcaacacttggtctcacagcgtgaacactcgcttaatcctgcagtatctcgactctgagcgccgccagattctgatagcaaaaagccccctagcccccttcacttcatttgtgtacacaataaaagaagaaggcctggtattacaagcttacgcacagtgttag

SEQ ID NO: 17004 - DNA, 1101 bp, synthetic construct
  misc_feature 1..1101: note = Description of Artificial Sequence: Synthetic coding sequence
  source 1..1101: mol_type = other DNA
atggggagcaagaagctcaaaagagtcggcctcagtcaggagctttgtgatcgtctgtcaaggcaccagattttgacatgtcaggattttttgtgccttagcccactcgagttgatgaaggtaacaggcctctcttacagaggcgtccatgagttactttgtatggtctcccgggcctgtgcgccaaagatgcaaacggcctatggcatcaaggcacagaggtctgcagatttctctcccgcttttttgagcacaacgctgtccgccctggatgaagccctccacggcggtgttgcatgtggctcgttgactgagatcacaggtcctccaggatgtggaaaaacccaattctgcattatgatgagcatattggctactctccctactaacatggggggcttagagggggccgtcgtctacattgacacggagagcgctttctccgcggaacggctcgttgaaatcgcagaatctaggtttcctcggtacttcaacaccgaagaaaagctgctgttgacatccagtaaggtgcacctgtacagggaactaacttgtgatgaggtgttgcagcgaatcgaatccctggaggaggagattatctccaagggaatcaagttggtaattctggatagcgtcgcgtctgtggtaagaaaggagtttgatgcacagctgcaagggaacctgaaagaacgcaacaaatttctggcacgcgaagccagctcgttgaagtatctggcagaagaattttcaattcctgtcattctcaccaatcagatcacaacacatttgagcggcgcgctcgctagccaggctgatctagtgtccccagccgatgacctcagtctgagcgaggggacttctgggtcatcatgtgtgattgccgcgttgggcaacacttggtcccattctgtaaatacacgtcttatactgcaataccttgactctgaaagacgacagatcctgatagcaaaaagccctctcgcaccgttcacatcatttgtgtatacgataaaggaggaaggcctggtgctgcaggagttttggcatatctgtatctctggattttccatccagaataggctgaaggagaacgagtcatag

SEQ ID NO: 17005 - DNA, 1053 bp, synthetic construct
  misc_feature 1..1053: note = Description of Artificial Sequence: Synthetic coding sequence
  source 1..1053: mol_type = other DNA
atgggaagcaagaagctgaagagagtaggactgtcccaggaactgtgcgacaggctgtccaggcaccagattcttacttgccaggacttcttgtgtttgagccctctggaactcatgaaggtgaccggcttgagttatcggggagtgcacgagctgttgtgcatggtctccagagcatgcgctcccaagatgcagaccgcctacggcatcaaggcccagcggagcgcggatttcagtccagctttccttagcactacactgagtgctctagatgaagccctacatgggggtgtggcttgcggatcgcttactgaaattaccggccccccgggatgcggcaagacccagttttgcatcatgatgtcaattttggctactttgccaacgaacatgggaggcctggagggggctgttgtgtatatcgatactgaaagcgccttcagcgccgagaggctggttgagatcgctgaatctcgcttccctcgctactttaataccgaggaaaaactgctgctgacctcatcaaaggtgcacctgtacagggagctcacgtgcgatgaagtgctgcagcggatcgagtccttagaggaagaaatcatctctaagggcatcaagctggtgattctggactccgttgccagcgtggtgaggaaggaatttgacgcacaacttcaaggtaatctgaaggaacggaataagttcctagccagggaggcatccagccttaagtatctggcagaagaattttccatccctgtgatcttgacaaatcagataactacgcacctgtcgggggctctcgcttcacaagctgacctggtgtcacctgccgatgacttaagtctctctgagggcacttctggctcgtcttgcgtgatcgccgcactcggcaatacttggtcgcactcagttaataccagactgatcctgcaatatcttgactctgagcggcggcagattctcattgcaaagagcccgctagccccattcaccagttttgtctataccatcaaggaagagggcctggtcctgcagggccaagaaacgccatag

SEQ ID NO: 17006 - DNA, 1053 bp, synthetic construct
  misc_feature 1..1053: note = Description of Artificial Sequence: Synthetic coding sequence
  source 1..1053: mol_type = other DNA
atggggagtaaaaaactgaagcgggtgggattgtcccaggaattgtgcgacagattgtcaagacatcagattctcacatgtcaggatttcctatgtctttctcccctggaactcatgaaagtgaccggcctatcatatagaggagttcacgagctgctgtgcatggtctctagagcgtgtgcccccaaaatgcagacagcatatggaattaaagcccagcggtccgctgattttagcccagcctttctgagcaccacgctgagcgcattggacgaggcactccatggcggggtggcctgcggcagcctgaccgagatcacaggacctcccgggtgcgggaagacccagttttgcattatgatgtcaattctggccaccctgccaaccaatatgggcggcctcgaaggcgccgtcgtatatatcgacacagaatccgccttttccgctgaaaggctggtcgaaattgctgaatctcgctttccgcggtatttcaacactgaggagaagttactgctaaccagcagcaaggttcatctgtatcgtgagctgacatgtgacgaggtactgcagagaatcgagtctttagaggaggagatcatttccaagggcattaagctggttattctcgactctgtagcgtcagtggtaagaaaagagtttgacgcccaattgcaggggaaccttaaggagcggaataagtttttggcccgggaggcgtcaagccttaaatatctggccgaggaatttagcatccctgtgattctgacaaaccaaatcaccacccacttatccggcgccctggcctcacaggctgatcttgtgagtcccgcggacgacctatccttgagcgagggcacaagtggttccagttgtgtgatcgccgccctcggaaacacgtggtctcactctgtgaatactcggctaattctccagtaccttgactccgagcgcaggcagatcctgatcgcaaaatcaccactcgccccattcacttcgttcgtatacaccataaaggaggagggattagtgctccagggccaggagaagccgtag

SEQ ID NO: 17007 - DNA, 402 bp, synthetic construct
  misc_feature 1..402: note = Description of Artificial Sequence: Synthetic coding sequence
  source 1..402: mol_type = other DNA
atgggtagcaaaaaattaaagagggtgggactgtcacaagagctatgtgatcgcctgagtcgccaccagatattgacatgtcaggacttcctctgtctgtctcccctggaactcatgaaagttactggcctctcatatcgaggagttcacgagctgctatgcatggtttctagagcttgtgccccaaagatgcagaccgcctacggcatcaaggctcagagatctgccgacttttctccggcattcctatctaccaccctgagtgccctcgacgaggcactgcacggcggtgtggcatgtgggtcactaacagagatcaccgggccccccggctgtgggaaaacacagttctgtataatgatgagcatactcgcgacccttcctaccaacatggggggctag

SEQ ID NO: 17008 - DNA, 1155 bp, synthetic construct
  misc_feature 1..1155: note = Description of Artificial Sequence: Synthetic coding sequence
  source 1..1155: mol_type = other DNA
atgggttccaagaaacttaagcgcgtcgggctttctcaggagctgtgcgatcgactctcccgtcaccaaattctgacttgccaagactttctgtgtctcagcccactggagctgatgaaagttaccggactgtcctacaggggtgtgcatgaactgctctgtatggtgagtagagcctgtgcacccaagatgcagactgcgtacggaattaaggcacagcgaagtgcagacttctcgccagccttcctgagtaccactctctccgccctcgatgaggccctacacgggggcgtggcatgcggctctctgacagagatcacaggcccccccggttgtgggaagactcagttctgtattatgatgtcgattctggctacacttcctaccaatatgggtggccttgagggcgcagtcgtttacatcgacaccgagagcgcattttccgcagaacggctggtggaaatcgccgagtcaaggtttcctcggtacttcaacacagaggagaaactactgctcactagcagtaaagtccacctatacagggagctaacatgtgacgaggtgctgcagaggatcgaatccctggaggaagagattatatccaaggggatcaagctcgtcatcctggatagcgtcgcttccgtggttcggaaggagttcgatgctcagttgcaggggaacttgaaggaacgtaataaattcctggctagagaggcatcctcactgaaatacctcgccgaagaattcagtataccggtgatcctcacaaatcagatcaccacccatttgagcggagcgcttgcttcccaggccgacttagtctctcctgctgatgatctatccttgagtgagggcaccagtggtagcagttgtgtcatcgccgctctggggaatacctggagccatagtgtgaataccagacttatactacagtacctggactctgagcggcgacagattctcattgcaaaatcgccacttgccccttttactagcttcgtgtataccatcaaagaggagggattggtgctacaggagacgacgttttgtagtgtgacccaggcggagctcaattgggccccagagatcctgcctccccagccaccagaacagctgggcctccaaatgtgccatcacacgcaactgattttttag

SEQ ID NO: 17009 - DNA, 1101 bp, synthetic construct
  misc_feature 1..1101: note = Description of Artificial Sequence: Synthetic coding sequence
  source 1..1101: mol_type = other DNA
atgggctctaagaagcttaaaagggtcggcctgtctcaggaactctgtgacaggctaagtcggcaccagatcctgacgtgccaggactttctgtgtctgtctcccctggaactcatgaaggttactgggctgtcatacaggggggtgcacgagttactgtgcatggtgtctagagcctgcgcgccgaaaatgcagacagcctatggtatcaaagcgcaaaggagtgcagatttcagccctgccttcctgtccacaaccctcagcgccctggatgaagcgttgcacggtggagtggcctgcggctctctgacggagattacaggacctccaggatgtgggaaaacacagttttgtatcatgatgtctattctggctactctgcccaccaatatggggggtctcgaaggggccgtagtctatatcgatacagagtcagcttttagcgcagagagactggtggaaatcgccgaaagccggtttcccaggtatttcaacaccgaggagaagctcctgctcacctccagtaaggtgcacctctaccgggagctaacctgcgacgaagtgctgcaaagaattgagtcccttgaggaggagattattagtaagggcatcaaattggtgattctggactccgttgcgtccgtggtgcgcaaagagtttgacgcccaattgcagggtaacctgaaagagcgaaataagtttctcgcacgggaggcgtcttcgctaaagtacttagcagaggagttctcaattcctgtaatattgaccaatcaaatcaccacccacttgtctggagcgctagccagtcaggcagatctggtcagtccagccgacgatttgtctctgtccgagggtacttctggctcaagctgcgttattgccgccctggggaatacttggagccactccgttaacacccgactgatcctgcagtacttagacagtgaaaggcgacaaatacttatcgctaagtcacccttagctccgtttacatccttcgtatacacaataaaagaagaggggctggtgctgcaggaattttggcacatctgcatctccggcttctctattcagaacaggctcaaggagaatgagtcgtag

SEQ ID NO: 17010 - DNA, 228 bp, synthetic construct
  misc_feature 1..228: note = Description of Artificial Sequence: Synthetic coding sequence
  source 1..228: mol_type = other DNA
atgggctcgaaaaagctaaagcgcgtgggcctctcccaagagctgtgcgacaggctgagccgccaccagatcttgacgtgtcaggattttctgtgcctatcgccgcttgagttgatgaaggttaccggcctctcatataggggagtccacgagcttttatgtatggtatctagggcctgcgcccctaaaatgcagaccgcttatggaattaaagcccagcggtcctag

SEQ ID NO: 17011 - DNA, 1131 bp, synthetic construct
  misc_feature 1..1131: note = Description of Artificial Sequence: Synthetic coding sequence
  source 1..1131: mol_type = other DNA
atgcgcgggaaaacctttagatttgaaatgcagcgggacctggtgagtttcccactcagtccagctgtgagagtaaagctggtgagtgccggatttcagactgcagaggaactgttagaggtaaagccttcggagttgtccaaggaggttggtatctctaaggcggaagcactcgagacccttcagattatcagacgtgaatgccttaccaataagcccagatatgcgggcactagcgaaagccacaagaagtgtacagctctggagctgctggaacaggagcatacgcagggttttatcatcacgttctgctcggccttggacgatattctgggtgggggggtccccctgatgaagacaaccgagatatgtggagcacccggcgtgggtaaaactcagttgtgtatgcaactcgccgtggacgtacagatacccgagtgtttcggtggcgtcgctggggaagccgtgtttattgacaccgagggtagtttcatggtcgaccgagtcgtagacctggctacagcctgcatacaacatctccagctcattgcggagaaacataagggggaggagcatagaaaggcactggaagacttcactttggataatatcttgagccatatctactacttccgatgccgagactacacggagcttcttgcacaggtgtatcttctgcctgacttcctctcagaacattcaaaggtcagactagtgattgtggatgggatcgcattccctttcagacatgacctcgatgacctcagcctgcggactcgtctactgaacggcttagcccaacaaatgatctcactggcaaataatcaccgccttgccgtgatcctcacaaatcagatgactaccaaaattgaccgaaaccaggccctcttggtgccggcgttaggagaatcatggggacatgccgcaaccatcagactgatattccattgggacagaaagcagcggctggccacactctacaagtcaccatcacagaaggagtgcaccgtgctctttcagatcaaaccgcaaggattccgagataccgtcgtgacgagcgcttgctcgctccagaccgaaggctcactgtccacccgaaagcgcagtcgagatcccgaagaagagctttag

SEQ ID NO: 17012 - DNA, 987 bp, synthetic construct
  misc_feature 1..987: note = Description of Artificial Sequence: Synthetic coding sequence
  source 1..987: mol_type = other DNA
atgggcgtcctcagggtcggactgtgccccggtcttaccgaggagatgatccagctgctgcgcagtcatcggatcaagacagttgtggatcttgtcagtgccgacctcgaagaagtcgctcaaaaatgcggactttcttacaaagccctggtggcattgagaagggtgctgcttgcacaattctccgcttttccggtaaatggcgccgacctctatgaggagctcaaaacttctacggcgatattatctactggtattggccggattcgcctgtcaggcaatgccagatggctgatgccgaaggttaccgaaattgtggggggaccagggtctggaaagactcaggtatgtctgtgcatggccgccaatgtcgcccatggtcttcagcagaacgtcctatacgttgactctaacggcggcttaacggcaagccggctgctccagctgctgcaggctaagacacaggatgaggaggaacaggccgaggcactccgccgcattcaagtcgtccacgcattcgatattttccagatgctcgacgtacttcaggagctgcggggaaccgtagcacagcaggtgaccgggtcctctggcaccgtaaaggttgtcgtggtcgatagcgtcacggctgtagttagccccctgctggggggccaacagagggaaggcctcgccctaatgatgcagttagctcgcgagcttaagactctcgccagggacctgggcatggcagtcgttgtgacaaaccatattactcgtgaccgcgacagcgggcggttaaagccagcactggggcgttcatggtcctttgtcccttctactcgaatcctccttgacactatcgaaggggccggtgcttctggtggacgccgcatggcctgtcttgcaaagagctcacgacagcctaccggcttccaggaaatggtcgacattggcacttgggggacaagtgaacaatccgccacacttcaaggcgaccagacttag

SEQ ID NO: 17013 - DNA, 987 bp, synthetic construct
  misc_feature 1..987: note = Description of Artificial Sequence: Synthetic coding sequence
  source 1..987: mol_type = other DNA
atgggagtcttgcgggtgggcctctgtcccggcctcacagaagaaatgatacagttacttcgctctcatagaattaagaccgtggtggatctggtcagcgcagatctggaagaggttgctcagaaatgcggactgtcctacaaagcgctcgtggcccttagacgtgttctcctggcccaattctcggcattccccgtgaatggcgctgatctgtatgaagaactgaaaaccagcactgcgatcctttccacgggaatcggcagtctggacaaattactcgatgctggcctgtacacgggtgaagtgacggagatagttggaggacccggatctggcaaaacgcaagtctgcctctgtatggctgcgaacgttgctcacggcctgcagcagaacgtgttgtacgtagattcgaatggggggctgactgcctctcgacttctgcagctgctgcaggccaaaacccaagacgaagaagagcaggcagaagctctgaggaggattcaagtagtgcatgcctttgacatttttcaaatgttagacgtactccaggaactgcggggaacagtggcccagcaagttaccggcagttctgggactgtcaaggtggtggtcgttgatagcgttaccgcggttgtttcccccttattggggggacaacaaagagagggcctggcactcatgatgcaactggctagagaactgaagaccctcgcccgtgaccttggaatggctgtggtagtgaccaaccacattactagggacagagactctgggcggctcaaacccgctctggggcgatcctggtctttcgtgccatcaacccgcatcttactggacaccatcgagggcgcgggcgctagcggaggaaggcggatggcctgcctggctaagagcagccgtcagccaaccggctttcaggagatggtcgacatagggacctggggaacaagcgagcagtccgccacgttacaaggggatcagacgtag

SEQ ID NO: 17014 - DNA, 651 bp, synthetic construct
  misc_feature 1..651: note = Description of Artificial Sequence: Synthetic coding sequence
  source 1..651: mol_type = other DNA
atgggggtcctgcgcgtaggattatgccctggcctaactgaggagatgattcagttgctgcggtctcatcgtataaaaacagtggtggatttagtgtctgctgatctggaggaggtagctcagaagtgtggtcttagctacaaagccgaagcactgcgaagaatccaggtggtgcacgcatttgacatttttcaaatgctggacgttctgcaggagttaagagggactgtcgcccagcaagttacaggatcatccgggactgtgaaggttgtggttgttgactcagtgactgcagttgtgtctcctctcttgggtggccagcaacgggaagggttagccttaatgatgcagctcgcccgagaactcaaaacattggccagggacctcggcatggcagtcgtcgtgaccaaccatatcaccagagatcgggacagcgggcggctgaaacccgccctcgggcgctcgtggtcgtttgtgccttctactagaatccttctggataccattgaaggagccggcgcctctggtggcagacggatggcatgcttggccaagtcaagcagacagccaaccggctttcaggagatggttgatatcggcacatggggtacaagcgagcaatccgcaactctgcagggcgaccagacatag

SEQ ID NO: 17015 - DNA, 357 bp, synthetic construct
  misc_feature 1..357: note = Description of Artificial Sequence: Synthetic coding sequence
  source 1..357: mol_type = other DNA
atgggcgtgctgagagtcgggctgtgtcccggcctgactgaagagatgatacagctgctgagaagtcaccgcataaaaactgtggtggacctggtgagcgcggacctcgaagaggttgcacagaagtgtggacttagttataaggccttagtagcccttcggagagtgctgctggcccagttttcagccttcccagtgaatggcgccgacctttatgaggagttaaagacaagcaccgcgatcctttccacaggtatcggccggcacgggggacggactcaggtgggtacctgggaagattgtagctgtctccgctcaccccagggagacaggggtgtcggatccggcatgctctag

SEQ ID NO: 17016 - DNA, 852 bp, synthetic construct
  misc_feature 1..852: note = Description of Artificial Sequence: Synthetic coding sequence
  source 1..852: mol_type = other DNA
atgggagttctcagagtcggcctatgtccaggcctgaccgaagaaatgattcagcttctccgcagccacaggatcaagacagtggttgacctggtatctgccgacctggaagaggtggcccagaaatgcggcctctcatacaaggcgctcgttgctctgcgtcgagtcctgctggcccagttttcagcctttcctgtgaatggagccgatctgtatgaggagctcaaaacgagcaccgctattctttcaacaggaatcggatcgttagataagctgctggacgccggactatacaccggggaggtcactgagattgtgggcggacctggttccggaaagacacaggctgaggcattacgacgaattcaggtggtgcacgcgtttgacattttccagatgctggatgtcctccaggagcttcgcggcactgtggcacaacaggtgaccggcagctcaggaacagtgaaagttgtggttgtagacagcgtcacagcagtcgttagccctctcttgggtgggcagcagcgcgaaggtctcgcactgatgatgcaacttgcccgggaactcaaaacactggcccgcgatctgggtatggctgtggtcgtcactaaccatatcacccgggatagggatagcggaagactgaagcccgccctgggccggtcttggtcattcgttccgtcaacacgcatcttattggatacaatagagggcgcaggagcatcgggtggccggagaatggcatgtctcgcaaaaagcagtaggcagccaactggtttccaagagatggtggacattgggacatgggggacttccgaacagtcagccactctccagggggaccagacctag

SEQ ID NO: 17017 - DNA, 1047 bp, synthetic construct
  misc_feature 1..1047: note = Description of Artificial Sequence: Synthetic coding sequence
  source 1..1047: mol_type = other DNA
atgggcgtgttgcgggtggggctctgccccgggttaaccgaagagatgatacagcttcttcggtcgcacaggattaagactgtggtggatctcgtttctgccgacctagaagaggttgcgcagaagtgtggcctcagctacaagacatggagagcacacagttctggtaatttgggaggcctgcagcttccccaagttcccgcaggtagatcatggagtggggtgcggaatgccctgaagaaagctgggctgggtcacggcggcaccgacgggctgagtctcaacgcgttcgacgaacgaggcactgctgtgtcaacatcaaggctggacaagctcctagacgccggcctgtatactggcgaagtcaccgagatcgtaggtggtcctgggtcgggtaaaacacaggtgtgcttgtgcatggctgccaatgtggcccacggtctgcagcagaatgttctgtatgtcgatagcaacggtggactcacggccagccggctcttgcaactcctacaagcaaagacccaggacgaagaggaacaggcagaagctctgcgtcgtatacaggtggttcatgctttcgacattttccagatgctggatgtactccaagagcttagagggacagtggctcagcaggttaccgggagtagcgggactgtcaaagtcgtcgtggtcgactccgtgacagctgtcgtgagcccacttcttggggggcagcaacgagaaggacttgcgctgatgatgcagctggctagagagcttaagaccctagccagagatctcggtatggcggtggtggtcacaaatcacatcacccgcgacagagattcaggcagattgaaacctgccctgggccgaagctggtcatttgtgccttccactaggatcctattagatacaattgagggggctggcgcctccggcggacggaggatggcatgtctagcgaagtcctcacgccagcccactggatttcaggaaatggtggatatcggcacgtgggggacctccgaacaatccgctacgctgcaaggcgaccagacttag

SEQ ID NO: 17018 - DNA, 648 bp, synthetic construct
  misc_feature 1..648: note = Description of Artificial Sequence: Synthetic coding sequence
  source 1..648: mol_type = other DNA
atggtgatggcagccttgccctttagtgaggacctcaaaatgccagatacatgtgtgctgccccactgtcctggcaaggagaacaaggatgtggttgacttggtatcggctgatcttgaagaggtggctcagaaatgtgggttgtcttataaggctctagtggctctgcgcagagttcttctggcgcaattctcagcgttccccgtcaacggggctgacctgtacgaagaacttaagacctctaccgccatcctatcaactggaattgggagtttggacaaattgctggatgctggactgtacactggggaagtgactgagattgtcgggggccctgggtcaggaaaaacccaggtgtgtctttgtatggcggccaacgtggcacacggcttgcagcagaatgtactgtatgtcgactcgaacggcggcctgaccgctagcaggttgttacagcttctgcaggctaaaacacaagatgaggaagagcaggcggaggcacttcgaaggattcaagttgtccacgcgttcgatatctttcaaatgcttgatgtgctgcaggagttgcgtgggaccgtcgcccagcaagacggtattccggagcaccttaatcacatcccacactgcctccacgtccacttaccttgctag

SEQ ID NO: 17019 - DNA, 711 bp, synthetic construct
  misc_feature 1..711: note = Description of Artificial Sequence: Synthetic coding sequence
  source 1..711: mol_type = other DNA
atgggggtgctgcgtgtaggcctgtgtccaggtctcaccgaggagatgatccagctgctgcggtcgcacaggattaaaacagtggttgacctggtcagtgcagatttggaggaagttgcccagaagtgcggactgtcatataaggctctggtggccctccgccgcgtattgctcgcccagtttagtgcgtttcccgtcaatggcgcagacctctacgaggaactgaaaacatcaaccgccatcctctctacaggcatagggagcctggacaaactgttggacgcggggctttacacaggagaggtcaccgaaattgttggagggccagggagtgggaagacgcaggtctgcctttgtatggcggccaacgtggctcatgggctgcagcagaacgtcctctacgtggactctaacggaggcctaaccgccagccggctgctgcagttactacaagccaagactcaagatgaggaggagcaagctgaagctctcagaaggattcaggtggtgcacgcttttgacatttttcaaatgctggacgtgttacaggagctgcgtggtactgtggcacagcaagtgactgggtcttccgggactgtgaaagtggtcgttgttgacagcgtaacagccgtcgtgtctcccttgctgggcgggcagcagagagagggtcttgctttgatgatgcagctagcaagagaactgaagacttag

SEQ ID NO: 17020 - DNA, 1047 bp, synthetic construct
  misc_feature 1..1047: note = Description of Artificial Sequence: Synthetic coding sequence
  source 1..1047: mol_type = other DNA
atgggcgtgctgagagtggggctctgccccgggctgactgaggagatgatccaactgttaaggagccataggattaaaacagtggtcgaccttgtgtccgccgacctagaagaagtggcccaaaagtgcgggctctcctacaagacatggagggcccactccagcgggaacctaggagggctgcagttgcctcaggtaccggccgggcgctcgtggtccggagtcagaaacgccctcaaaaaggccggactcggacacggaggtaccgacggtctgagtctcaacgccttcgacgaaagaggcacagcagtctccacttctagactggataagctcctggacgcaggtttgtacactggagaagtcaccgagatcgtggggggcccaggaagtggcaaaacccaggtatgcttatgcatggctgccaatgtggcccatggcctgcagcaaaacgtgctgtatgtcgactcaaacggtggcctgacagcaagccgtcttctgcaactgctgcaggcaaaaactcaagatgaggaggagcaggcagaagctcttaggcggattcaagttgtccacgcgttcgacatcttccagatgctagatgtcttgcaagagctacgagggacagtggcgcagcaagtcactggatcttcaggcacggttaaagtcgtcgtggtcgacagtgtcacagccgtggtttcaccacttctcggcgggcagcaacgggaaggtctcgctcttatgatgcagctggctagggagcttaaaaccctggccagagatttggggatggccgttgtcgtcaccaatcatatcacgcgggacagggactccgggcgcctaaaacccgctctgggtcggtcgtggagtttcgtcccaagtacccggattctgctcgacacaattgagggggccggagccagcggggggcgacgaatggcgtgtctggctaagtcaagcaggcagccaaccggctttcaagaaatggtggacattggcacctggggcacctcggaacagtccgccaccctccagggcgatcaaacatag

SEQ ID NO: 17021 - DNA, 1257 bp, synthetic construct
  misc_feature 1..1257: note = Description of Artificial Sequence: Synthetic coding sequence
  source 1..1257: mol_type = other DNA
atgtcggggaccgaagaggcaatactgggtggacgagactctcatccggccgctggaggtggcagcgtgctatgttttggtcaatgccaatatactgctgaagagtaccaagcaatacaaaaggccctcaggcagcgtctcggcccagagtatatctccagccgcatggcaggaggaggccagaaggtttgttacatagaaggccatcgtgtgatcaacctggcaaacgaaatgtttggatataatgggtgggcgcactcaattacccaacaaaacgttgactttgtcgatcttaacaacggaaagttctacgtcggtgtgtgtgcgtttgtacgggtccagctgaaggacggcagctaccatgaggatgtgggatacggcgtcagcgaaggcctgaaaagtaaggcgctatctcttgagaaggcaaggaaagaagccgtcacagacggcttgaagcgagccctccgctcctttggcaatgctcttggaaactgtatcctcgataaggactaccttcggtctctgaacaaactacctcgccagcttcctctcgaagtggacttgaccaaggccaagcggcaagacctcgagccctcagtggaagaggccaggtacaattcttgccgccctaatatggcgctggggcaccctcagctccagcaagtgacatcgccctctagaccaagccacgccgttattccagccgatcaggattgctcaagtaggagccttagcagttctgccgtggaatccgaggctacgcaccagcggaagctacgccagaaacaactccagcagcagttccgagaacgtatggagaagcagcaggtacgagtgagcacgccatctgcagagaagtcagaagccgctccacccgcaccacctgttacccactctacccccgtcacagtgtccgaaccgctgcttgagaaggatttcctcgccggagtgacgcaggagctgatcaagactttggaggacaacagcgagaaatgggcggtaaccccagacgcaggcgacggcgtggtcaaaccgtcgtctcgagccgacccagcacagacctctgataccctcgccctgaacaaccagatggtaactcaaaaccgtacaccacacagcgtgtgtcatcagaaacctcaggcgaaaagtggatcctgggaccttcaaacctacagtgctgatcagaggacaacaggcaactgggaatcacaccggaagagtcaggacatgaagaagcgtaagtatgatccctcctag

SEQ ID NO: 17022 - DNA, 1257 bp, synthetic construct
  misc_feature 1..1257: note = Description of Artificial Sequence: Synthetic coding sequence
  source 1..1257: mol_type = other DNA
atgtccggcaccgaagaggctatactggggggtagagattcccatcccgcagccggaggcggatccgtcttatgttttgggcagtgtcagtatacagccgaggagtaccaggccattcagaaggccttaagacagcgcctgggacccgagtacatctccagccgcatggcaggaggcggacaaaaggtgtgctacatcgaggggcacagagtaattaacctggccaatgaaatgtttgggtataacggatgggctcattctattacccaacagaacgtggactttgttgacctgaacaatgggaagttctatgttggcgtttgtgctttcgttagggtccagctaaaggacggatcttaccacgaagatgtgggctatggggtctccgaaggcctgaaatctaaagccctgagcctcgagaaggcacgtaaggaggccgtcacggacggcttgaaacgggccttacgctcatttggcaacgctttgggcaattgcatcctcgataaggactatttgaggtccctgaataaactgccaaggcagctgccgttggaagtggacctgactaaagctaagagacaggatctggagccaagcgtcgaagaggctcgttataactcttgtcggcctaatatggctttaggccatccacagttgcagcaggtgacatctccctccaggcctagtcacgcagtaatccccgcggaccaggattgcagttctaggtcattatcttcctccgctgtagagagcgaagcaacacaccagcgaaagcttcgccagaagcagctgcagcagcagtttcgcgagcgcatggaaaaacagcaggtacgcgtgtctactcccagcgctgaaaagtctgaggcagccccccccgccccccccgtgactcactcgaccccagtaaccgtatctgagcctctcctggagaaagatttccttgcaggcgtcacacaggagcttattaagaccctagaagacaattctgaaaagtgggctgtcactccggacgccggagacggcgttgtcaaaccatccagccgtgctgatccagctcagacttcagataccctcgccttgaacaaccagatggtaactcagaataggacaccccacagcgtgtgtcaccagaagccacaggccaagtctggaagctgggatctgcagacctattcagccgatcagcgcaccacaggcaattgggagtctcatcggaagtctcaagatatgaaaaaacgcaaatatgacccttcttag

SEQ ID NO: 17023 - DNA, 1026 bp, synthetic construct
  misc_feature 1..1026: note = Description of Artificial Sequence: Synthetic coding sequence
  source 1..1026: mol_type = other DNA
atgttcggatataatggatgggcacatagcattacacagcagaacgtcgacttcgtggatcttaacaacggaaagttctacgtaggcgtgtgcgcattcgtgagagtacagctcaaggacggtagctaccacgaagacgttggatacggcgtgagtgagggcttgaaatcgaaagccctctctctggagaaggcacggaaagaggccgtaaccgacgggttgaagcgtgcgctgcggagcttcggtaacgccctaggcaactgtatcctcgataaagattatctccggagcctgaacaagctgcctcgccaactgcccttagaggtcgacctaaccaaagcaaagcgccaggatctggagccgagtgtggaggaagctcgatataactcttgcaggccaaacatggcccttggccacccgcagcttcagcaggtcacgtcaccaagtagaccttcccatgccgtaatcccagcggatcaagattgttcatcccgcagcttatcaagcagcgctgtcgagagtgaagcaactcatcagcggaaactacgacaaaaacagctccagcagcagttccgggagcgaatggaaaagcagcaggtgcgcgtctcaacaccctctgcagaaaagtcagaagccgccccccccgcaccaccggtgacccatagcactccagtaacagtgtccgagccactccttgaaaaagatttcctcgccggcgtcacacaagagctcattaagacactcgaggacaacagcgaaaaatgggcagtaactccggatgccggggacggcgtcgtgaagccaagctcacgtgcagatcccgcccagacttctgataccctcgctttaaacaatcagatggtaactcagaaccggactccacattcagtgtgccatcaaaaacctcaggcaaagtctgggagctgggatctgcagacctacagcgctgaccaaaggactaccggtaactgggaatcccacagaaaatcacaggatatgaagaagcgcaagtacgacccaagttag

SEQ ID NO: 17024 - DNA, 681 bp, synthetic construct
  misc_feature 1..681: note = Description of Artificial Sequence: Synthetic coding sequence
  source 1..681: mol_type = other DNA
atgagcggaacagaggaggccatcctgggaggcagagatagccatcccgctgccggcggcggaagtgtgctgtgctttggtcagtgtcagtacaccgctgaggagtatcaggccatacagaaggcccttaggcagagactggggcccgagtacatctccagtagaatggccggcggaggacagaaggtgtgctatatcgaaggtcacagagtgattaacctcgccaacgagatgtttgggtacaacggatgggcccactccatcactcagcagaatgttgactttgtggatttaaacaatggtaaattttacgtgggcgtttgcgcattcgtgcgcgtccagctgaaagacgggagctatcatgaggatgtaggttatggggtgagcgaagggctaaagagcaaagccctttctctcgagaaagctcgcaaggaggctgtaactgatggcctgaagcgggccctacggctaccgttgcttggggtctcaggacgcatactgtacagtttgttctctgtccactccgtgatgtgtgccgggggacttccaactccgaccgcttccgctcagaccgcaccctccagcccttgttctagcgcagtgctcaggtacgctcaagaattctgggagtgtacatggaagttatatagtggccagcggttacccgagattacaaaatag

SEQ ID NO: 17025 - DNA, 2244 bp, synthetic construct
  misc_feature 1..2244: note = Description of Artificial Sequence: Synthetic coding sequence
  source 1..2244: mol_type = other DNA
atgcggaggtctctggccccatcccagctggccaagcgaaagccagagggaagatcctgtgacgacgaggactggcaaccgggtcttgtgacaccgagaaaacgcaagtcttcaagcgaaactcagatccaagaatgtttcctctcgcctttccgtaagcccctttcccagcttacaaaccagcctccttgtctggactctagccagcatgaagcattcatccggtccatcctgagcaagcccttcaaagttcccatccctaactaccagggacctcttgggtccagggccctggggctaaagagagcgggcgtcagaagggcactgcacgaccccctagagaaggacgctctcgtgctctatgagcctccccccctcagtgcgcacgatcagctcaagctcgataaggagaagctccctgtacacgtggtggtggacccgatcctgagcaaggtgcttcggccgcaccaaagggagggggtaaagtttctctgggagtgtgtcactagtcgcaggatccctggcagccatgggtgcattatggcggacgagatgggcctggggaagacactccagtgtattacacttatgtggacactcctccgccagtccccggagtgcaagcctgagattgacaaggctgttgtggtgagcccttcttctttggtgaaaaattggtacaacgaagttggaaaatggttggggggtcggatacagcctctggccatcgacggtgggtcaaaggacgagatcgaccaaaagctcgagggctttatgaatcagaggggggctagggtgagctccccaattctgatcatctcatatgagacattccgacttcacgtgggggtgctccagaaggggtctgttggactggtcatttgcgatgaggggcaccgtctcaagaattcagaaaaccaaacatatcaggctcttgactcccttaacacctcacgacgcgtcctgatctccgggactcccattcagaacgacctgttggaatatttctccctggtgcatttcgtgaatagtggcatcctggggacagcgcatgaattcaaaaagcacttcgagctccctatattgaagggccgggacgcggcggcgagcgaagccgacaggcagttaggtgaggagcggttgagggagctgacgtcgatcgttaatcgctgtcttatccgcaggacaagcgatattttgtcaaagtatctgccagtgaagatagagcaggtggtgtgctgtaggctgacaccgctccagactgagctctacaagcgctttctgagacaggccaaaccagctgaagaattgttggaagggaagatgagtgtgagttctcttagctctatcacgtccctgaaaaaactgtgcaatcatcccgccctcatatacgacaagtgtgtcgaggaggaggatggatttgtgggagccctggacttgtttcctccaggatacagctcaaaggctctggaaccccagctgtccggcaagatgctggtgttggattacattttggcagtgactcggtcccggtcgagtgacaaagttgtcctagtcagtaattacacccagaccttagatctttttgaaaagctgtgccgggcgcgccgatatctctacgtgcggctggacggcaccatgtctataaagaaaagagcaaaagtcgttgagagattcaactccccaagctcccctgacttcgtgtttatgctgtcctctaaggctggaggctgcggtctgaatttgatcggcgctaacagactggtaatgttcgaccctgactggaatcccgcaaacgacgagcaggcgatggcacgggtttggagggatggccaaaagaaaacatgttatatctatagactcctgtcggcgggtacaattgaggagaagatattccagagacagtctcacaagaaggccttaagcagctgtgtcgtggatgaggagcaagatgtggaaagacatttcagcctaggcgagcttaaagagctcttcattctggatgaagcgagtctgagtgatacccatgaccgattgcattgccggagatgcgtgaattcaaggcagatacgccctccacccgatggcagcgactgtacaagcgatcttgcaggctggaatcattgtacagataagtgggggctgcgcgatgaggtcctgcaggccgcttgggatgcagcctccaccgccatcacattcgtgtttcatcaacggtcccacgaagaacagcggggactgcgttag

SEQ ID NO: 17026 - DNA, 2244 bp, synthetic construct
  misc_feature 1..2244: note = Description of Artificial Sequence: Synthetic coding sequence
  source 1..2244: mol_type = other DNA
atgcggaggtctttggcaccttcccaattagccaagagaaagccggaaggccgcagttgcgacgacgaggattggcagcctggtctggtgacccctcggaagagaaagtcatccagcgaaacgcaaattcaggagtgttttctgagccccttccgaaagcccttaagccagctaaccaatcagcctccatgtctggactcctctcaacacgaagctttcattcggtctatactaagcaagccatttaaggtacctatacccaactatcagggacccttggggtcacgagcactcggccttaaaagggcaggtgtgcgtcgcgctctgcacgatccactggaaaaagacgccttggttctgtatgaaccaccccccctgtcagcccacgatcagttgaaacttgacaaagaaaaactccccgttcatgtggtggtggaccccattttaagcaaagtgttgaggcctcaccaacgcgagggggtgaaatttctgtgggagtgtgtaactagtcgacgcatccccggaagccacggctgcattatggctgacgagatgggcttgggaaagaccctccagtgcatcacactgatgtggacgctactgaggcagagccctgagtgtaaaccagagatcgacaaagcggtggtggtatccccctcttcgttggttaagaactggtacaatgaggtcggcaagtggctgggtggtcgaatccagccactcgctattgacggcggcagtaaagacgaaatcgaccaaaaactggaggggttcatgaaccaaagaggagccagagtgtcctcgccaattctaatcatatcatacgagacttttcgcctccacgtaggggtgctgcagaagggttctgtcggattagtgatctgcgacgagggccaccgcttgaaaaactcagaaaatcagacctaccaggccttagactccctaaacacgtcccggcgagtgctaatatctgggacccccatccagaatgacctgctggagtacttctctctcgtgcattttgtgaacagtggaatcttggggacagctcacgaattcaagaaacactttgaacttcctatcctgaaggggagagacgcggctgctagcgaagcagacaggcaactgggcgaggaacgtctcagggagcttacttccatcgtcaacagatgtctcatccggcggactagtgatatcctctcgaaatatctcccagtaaaaatcgaacaagtggtgtgttgtagactcactccactgcagacagagctttataaacggtttctgcgacaggccaaacccgcagaggaactgctggaaggcaaaatgtctgtgtcgtcactatcctccattacctccctaaagaaactgtgtaatcaccccgccctcatctacgacaaatgtgttgaggaagaggacggttttgttggggcgctagacctgttcccgcccgggtatagctccaaggctcttgagccacagctgagtgggaagatgcttgtgctggactacatcctggcggtgacacgctctcgatccagtgacaaggtggtgctggttagcaactatacccagacattggatttgttcgaaaaattgtgtcgggcgcggcgctacctttacgtcaggcttgacggaaccatgtcgataaagaagcgggcgaaagtggtggaacgttttaacagcccatcatcccctgacttcgtttttatgttgagctctaaggctggaggctgcgggctaaacttaatcggcgctaaccgacttgtaatgttcgatcctgactggaacccagccaatgatgaacaagcaatggcacgggtttggcgggatggccaaaagaaaacctgttatatatatagactgctatccgccgggaccattgaagaaaagatctttcaaaggcagtcacataaaaaagctctgtccagctgcgtcgtagatgaggaacaggatgtagagaggcatttctcactcggggagctgaaggagctgtttatcttggacgaggcaagcttgtctgacacccatgaccgcctgcactgtaggagatgcgtgaactcaagacagattcgaccaccgccggacggatccgactgcacatctgacctggccgggtggaaccactgtacagataagtgggggctgcgggatgaagtgctgcaggcagcgtgggacgccgcatccaccgcaatcacctttgtattccaccaacggtcccatgaagagcagaggggccttcggtag

SEQ ID NO: 17027 - DNA, 1704 bp, synthetic construct
  misc_feature 1..1704: note = Description of Artificial Sequence: Synthetic coding sequence
  source 1..1704: mol_type = other DNA
atggcagacgagatgggtctgggtaaaactttgcagtgcattaccttgatgtggacattgcttcggcagtcccctgagtgtaagcctgaaatcgataaggcggtggttgtgtccccctctagcctcgtgaagaactggtataatgaagtgggaaagtggctgggagggcgaatacagcctcttgctatcgatggcggatcaaaagacgagatagatcagaaactggaaggatttatgaatcagagaggcgcccgcgtgagcagtcccatactaatcatttcctatgaaacgtttagactgcatgtcggcgtcctgcagaagggctccgtggggctagtgatttgcgatgagggtcaccggctgaaaaactcagagaaccagacataccaggccttggacagcttaaacacatcgcgcagggtccttatctcagggacccctatccaaaacgaccttcttgaatacttctccctcgtacacttcgtgaatagcggaatactagggactgcccatgagttcaaaaagcatttcgaactccccatcctcaagggccgcgacgcggccgccagcgaggcagatcggcagttgggcgaagagcgccttagagagctaacatccatagtcaataggtgtctgattaggcgaacctccgacatcctctccaaatacttgccggttaaaatagaacaagtggtgtgttgcaggttgacccctctgcaaacggagctgtacaaaaggttcctcagacaggctaaacctgccgaggaactgctggaaggaaaaatgtccgtatcttccctgagtagtattaccagcctgaagaagctctgtaaccaccccgccctcatctacgataagtgtgttgaggaagaagacgggttcgtcggggcgcttgacttgtttccccccggatactcatccaaagcactcgaaccccaactaagtggcaaaatgctggtgctcgactatatactggccgtgactaggagcagaagtagtgacaaagtcgtattagtgagcaattacacccagaccttagatttgtttgaaaagctctgcagagcacggcgatacctctacgtgagattggatggcacaatgtctataaaaaagagagctaaagtcgtcgagagattcaattctccctcctctccggacttcgtcttcatgctgagcagcaaagcgggtggatgcgggctcaatctgatcggtgctaatcgtctggtcatgtttgaccccgactggaatcccgccaatgacgagcaagcaatggcaagagtttggagggatggacagaagaagacttgctatatctacaggcttctgtctgcaggaacaattgaggaaaagatatttcagagacaatctcacaagaaagccctgagctcctgcgtcgtggatgaagagcaggatgtcgagcggcatttttccctgggtgaacttaaggagttgttcatcctggatgaggcctctctcagcgatacacatgatcgcctgcattgcagacgttgcgtcaactcccgacagatacgcccccctccggatgggtctgattgtacctcggatctagccggttggaatcactgcacagataagtggggactgcgggacgaagtgctacaggctgcttgggacgctgccagtaccgctatcacttttgtctttcatcaacgctcccacgaggaacagcggggactgcgttag

SEQ ID NO: 17028 - DNA, 1176 bp, synthetic construct
  misc_feature 1..1176: note = Description of Artificial Sequence: Synthetic coding sequence
  source 1..1176: mol_type = other DNA
atgaagtgtctcgtcaccggtggtaatgtgaaggtgcttgggaaagctgttcattccttaagccgcattggagatgagctctacctggaacctttagaggatgggctgtcgcttcgaaccgtgaatagtagtagaagtgcttacgcctgtttcttgtttgcgcccttattttttcagcaatatcaagctgctacgcccggtcaggacttgcttaggtgtaagatcttaatgaagtcttttctctcagtgttccgctccctcgcaatgctggagaaaacagttgagaagtgttgcatcagcctgaatggcaggagctctagactcgtggtgcagttgcattgtaaatttggcgtgcgcaagacgcataatttatcctttcaggattgcgagtcattgcaggccgtttttgatcctgcgagctgccctcacatgttgcgggcgcccgcaagggtgttaggcgaggctgtgctaccattcagtccagctctggccgaggtcaccctcggaattgggaggggaagacgcgtcattctaagaagttatcatgaggaagaggccgattccaccgctaaggccatggtcacagagatgtgcctgggggaagaggactttcagcagctccaggctcaggagggtgtggccataactttttgcctcaaagagtttcgtggcctgctctcttttgccgagagtgcaaaccttaacttgtccatacactttgatgctcccgggcgccccgctatctttaccatcaaggactcactactggacggacacttcgttctggcaactttaagcgataccgacagccactcccaggatcttggatctcctgaacggcaccagccggtgccacaattgcaggcccactctaccccgcaccccgacgacttcgctaatgatgatattgattcctatatgatcgctatggaaacaacgatcggaaatgagggtagccgggtgttgccaagtataagcctcagtcccggaccccagccgcctaagtctcctggtccacattccgaagaagaggatgaggccgaaccttccacggttcccggcactcctcctcctaaaaagttcaggtccctgttcttcgggagtattctggcacctgtgcgctctccacaagggcctagtccagttctcgcggaggactctgaaggagagggatag

SEQ ID NO: 17029 - DNA, 1752 bp, synthetic construct
  misc_feature 1..1752: note = Description of Artificial Sequence: Synthetic coding sequence
  source 1..1752: mol_type = other DNA
atgcctaagcccatcaatgtgagagtgacaacgatggatgccgaactcgagttcgccattcagcctaacactacaggcaagcaactgtttgaccaagtagttaagacagtcggccttagagaagtgtggttcttcggtctccagtacgttgacagcaaaggctactctacctggctaaagctcaataaaaaggttacccagcaggatgtgaagaaggagaatccactgcagttcaagttccgcgccaaattcttccctgaggacgtgtctgaagaactgatacaggaaatcacgcagcgacttttcttccttcaggtgaaggaagccatcttgaatgatgaaatctactgtcctcccgaaacagccgttctgcttgcctcttatgccgttcaagctaagtatggagactacaataaagagatacacaagcccggatacctggccaatgaccgactactccctcagagagttttggaacagcataagctgactaaagaacagtgggaagagagaattcagaattggcacgaggaacaccgggggatgctacgggaggatagcatgatggagtacttgaagattgcccaagatcttgaaatgtacggggttaattactttgagataaagaacaaaaaaggcaccgaactttggcttggcgtggacgcactgggcctgaacatctacgaacacgatgataagctgacccccaaaattgggttcccttggtcagagattaggaatatatcctttaatgataaaaagttcgtcatcaagccaatcgataaaaaagctcctgactttgttttctatgcaccccgattaaggatcaacaaacgcattctcgcactgtgtatgggcaatcacgagttgtatatgcgacggcgcaaacccgacacaattgaggtgcagcagatgaaagcccaagcccgcgaggagaagcatcagaagcagctggaacgggcacagctagaaaacgaaaagaaaaagagggagatcgctgagaaggaaaaagagaggatcgagagagaaaaagaggaacttatggagcgtctcaaacagattgaggaacaaaccatcaaggcgcaaaaagagctggaggagcagaccagaaaagccctcgagctagaccaggaaagaaaaagagcaaaggaagaagccgaaagattagagaaggaacgcagggccgccgaggaagccaagtccgctatcgccaagcaggccgctgatcagatgaagaaccaggaacagctggctgctgagctcgccgagtttactgcaaaaatcgcgctattagaggaagccaaaaagaaaaaggaggaagaagccactgagtggcagcataaggctttcgcagcccaagaagatctcgagaagacaaaggaagagctgaaaaccgtaatgtcagcccctcctccaccccctcccccacccgtgatacccccaacagagaatgaacacgatgagcacgacgagaataacgccgaagcttctgcagagctctctaacgagggcgtgatgaatcacaggagtgaagaggaaagagtgacggaaacgcagaaaaacgagagagtgaagaaacaactgcaggcattgtcatctgagttagcacaggcacgggacgagacaaaaaagacgcagaatgacgtgctgcatgctgagaatgttaaggccggcagggacaaatacaagactctccgacagataaggcagggtaacacaaagcagcgcatcgatgagttcgaggctatgtag

SEQ ID NO: 17030 - DNA, 1815 bp, synthetic construct
  misc_feature 1..1815: note = Description of Artificial Sequence: Synthetic coding sequence
  source 1..1815: mol_type = other DNA
atgcccaagcctataaacgtgcgcgtgacgactatggacgccgaactcgagttcgccattcagcctaacacaactggcaaacagctgttcgaccaggtggttaaaacagtgggtttgcgagaggtgtggtttttcggcctgcaatacgtcgactccaaaggatactctacatggctcaaacttaacaaaaaggtgactcaacaggatgtgaaaaaggagaacccattgcaatttaagttccgcgcaaagttctttcctgaagacgtatccgaagagctcattcaggagatcacgcagagactctttttcctgcaagttaaggaggccattctgaacgacgagatttactgcccgccagagacggctgtactgcttgcatcttacgctgtccaggcaaagtacggcgattataataaggagatccacaagccgggctacttagcaaacgaccgcctgttgcctcagagggtgctggaacagcataagctgacaaaggaacagtgggaggaacggatccagaactggcacgaggaacaccgcggaatgttgagagaagactccatgatggagtacctgaagatcgcccaggatctggaaatgtatggagtgaattacttcgagataaagaacaagaagggaacagagctgtggctgggcgtggacgccctgggtctcaatatttacgagcatgatgataagctcacccccaaaatcggtttcccatggagtgaaatacgaaacatttctttcaatgataagaaattcgtcatcaaacctattgataaaaaagctcctgacttcgtgttctatgccccccgtctgaggataaacaaaagaatcctggccctgtgcatgggaaatcacgagctgtatatgagaaggcgcaagcccgataccattgaagtccagcaaatgaaggcccaggctcgagaagaaaagcaccaaaaacaacttgaaagagcgcaactggagaatgagaaaaagaaacgcgagattgctgagaaagagaaggagcgaattgagcgcgaaaaagaggaactcatggaacggctcaaacagattgaagaacagactatcaaggcacagaaggagctcgaagagcagacacgaaaagccctggagctggatcaggagcggaagcgcgcgaaagaggaagccgaacgccttgaaaaagaaagaagggctgcagaggaagctaagtcagcgatcgccaaacaggcagccgaccagatgaaaaaccaggaacaactcgccgcggagctggccgaatttaccgccaagatcgctctcctggaagaggctaaaaaaaaaaaagaagaggaagccacagaatggcaacataaagccttcgccgcccaggaggacctcgaaaagacaaaggaggaactcaaaactgtaatgagcgcccctccacctccccctcccccgcccgtcatcccaccaaccgagaatgagcacgacgagcatgatgaaaacaacgcagaagcgtcggcagaactttcaaatgagggcgtcatgaatcatcggtcagaagaggaacgtgttacagagacccagaagaatgagcgggtgaagaagcagctgcaagccctctcatccgagctggcccaggctcgtgacgaaaccaaaaagacccagaacgatgttctgcatgccgagaatgtcaaggcaggtagggataaatacaagactctcaggcaaatcaggcagggcaataccaagcagagaattgatgaatttgaggcgatgtggggcccaaaactgtatgccttgtttcagatgaggtcttgtcagtctagcatcaaacagatgtag

SEQ ID NO: 17031 - DNA, 1020 bp, synthetic construct
  misc_feature 1..1020: note = Description of Artificial Sequence: Synthetic coding sequence
  source 1..1020: mol_type = other DNA
ccacaccctaagatcaatgtgcgcgtcaccactatggacgccgaactggaatttgccattcagccaaatacaacgggcaaacagctcttcgatcaggttgtgaagaccgtgggcctgagggaggtgtggttcttcggtctgcagtacgtggatagcaagggctactcaacctggctgaaactgaataagaaggtaacacagcaagacgtgaagaaggaaaaccctcttcagtttaaatttcgcgcgaagttttttcctgaagacgtttctgaggagctgatccaagagataacccagcggctctttttcctgcaggtcaaggaagcaattctcaacgacgaaatctactgccccccagagactgccgtgctgcttgcttcgtacgccgtccaggcgaagtatggagattataataaagagatccacaagcccggctatctagccaacgatagactgctgcctcaaagagttttggaacaacacaagctgaccaaagaacaatgggaggagaggatccagaactggcacgaggaacatagaggaatgctgcgagaagattcgatgatggaatatctgaagattgcccaggatctcgaaatgtacggggtgaattactttgagataaaaaacaaaaaaggtaccgaactttggctcggtgtggatgcactggggttgaacatctatgagcacgatgacaaattgacaccaaaaattgggtttccgtggagcgaaatacgtaacatcagcttcaacgataagaagtttgttataaaaccaatcgataaaaaggctcctgactttgtattctacgcacctaggctcagaattaacaaacggatattggctctgtgcatggggaatcacgagctttacatgcgtcgcaggaaaccagataccattgaagtgcaacagatgaaggcacaagctcgggaggaaaaacaccaaaagcagctcgaacgcagtcgactttccaagatcaaaaaaaaaaaacggaaaaagaaaaaaaaaaagaagaagtag

SEQ ID NO: 17032 - DNA, 1815 bp, synthetic construct
  misc_feature 1..1815: note = Description of Artificial Sequence: Synthetic coding sequence
  source 1..1815: mol_type = other DNA
atgcccaagccgatcaatgtcagagtgaccacgatggacgccgaactcgagttcgccattcagccaaacactactgggaagcagctgtttgaccaggtagtcaaaacagtaggcctccgcgaggtgtggtttttcggactgcaatacgtggactcaaaaggttactcaacatggctgaaactgaacaagaaagtaacacagcaggatgtgaagaaggagaaccctctgcagttcaaattcagggctaaatttttccccgaggacgtatctgaggaactcatacaagagataacacaacgactattctttttacaggtcaaggaggccatcctcaatgacgagatctactgtccacctgaaacggctgtcctcctggcaagttatgccgtgcaagccaagtatggagactacaataaggagattcacaagccaggatacttggccaacgataggttactaccccaacgggtactcgagcaacacaagcttacgaaagaacagtgggaggagagaatccagaactggcacgaggaacatcggggcatgctacgggaggactccatgatggagtaccttaaaatcgctcaagatttagaaatgtatggtgtcaattacttcgaaattaaaaataagaaaggcacagagttgtggctcggcgtggatgctctgggcctgaatatctacgagcatgacgataagttgacacctaaaattggctttccctggtccgaaatcagaaatatctctttcaacgacaagaagtttgttatcaagcccatagataagaaagctccagatttcgtgttttacgccccccgattgcgcatcaacaagcggatcctggctctgtgtatgggaaaccacgagttgtatatgcgccgcaggaagcccgacacaatagaggtgcagcaaatgaaggcccaggcgcgagaagagaagcaccagaagcagctggaacgcgcccagctggaaaatgaaaaaaaaaaaagggagatcgcagaaaaggagaaggagcggatagaacgagagaaggaggaactaatggagagactaaagcaaattgaagagcagacaatcaaagcacagaaagaactggaggagcaaactcgtaaagcactggaactcgaccaggaaaggaagagagcaaaagaagaggcagagaggctcgagaaggagcgaagggccgcggaggaggcaaagagtgcgattgctaaacaggcggccgaccagatgaagaaccaggagcagctcgcagcagaactcgctgaattcacagctaagatcgcattactcgaagaggctaaaaagaagaaggaggaggaagcaactgaatggcagcacaaggcgttcgccgcccaggaagacttggaaaaaacgaaagaggagctgaagactgtcatgagtgcacctcctccaccccccccaccgccagtgattcctcccacagaaaacgagcacgatgagcatgacgagaacaatgccgaggcctctgcagaactgagcaacgaaggagttatgaaccaccgcagcgaagaagagagggttaccgaaacacaaaagaacgaacgcgtgaagaaacagttgcaggccctgtcctccgagctcgctcaggcccgcgacgagacaaaaaagacgcaaaatgacgtcctgcacgcggaaaatgtcaaagccgggagagataaatacaagaccttacgtcagatccgtcaggggaatacgaagcagcgcatagacgaattcgaggccatgtggggccccaaactctacgccctgtttcagatgaggagttgccaaagttccattaaacaaatgtag

SEQ ID NO: 17033 - DNA, 774 bp, synthetic construct
  misc_feature 1..774: note = Description of Artificial Sequence: Synthetic coding sequence
  source 1..774: mol_type = other DNA
atggagcgtttgaagcagattgaggaacagacgataaaggcacagaaagaactcgaagagcaaactaggaaagccctcgagctcgatcaggagaggaaacgggcaaaagaggaagctgagaggttggagaaagagagacgcgccgccgaggaagctaaatccgctatcgcaaagcaggcggccgaccagatgaagaatcaggaacagctagccgcggagctcgccgagtttaccgccaagatcgctctgcttgaagaagccaagaagaaaaaagaagaggaggccactgagtggcagcacaaggctttcgccgcacaagaggatctggaaaagaccaaggaggagctgaagacagtgatgagtgcgccccctcctccccctccacccccagttatcccccccacagaaaacgaacatgatgagcacgatgagaataacgctgaggcttccgctgaactgtctaacgagggtgtgatgaatcacagatcagaggaagaaagagtcactgagactcaaaagaacgagcgcgtgaagaagcagctgcaggctctgtcatctgaactggctcaagccagagatgaaactaagaaaacacagaacgatgtgctgcacgccgagaatgtcaaagccggcagggacaagtataagaccttaagacagattcgccagggcaacactaaacagcggatagacgaatttgaggcaatgtggggccccaaattatatgcactcttccaaatgaggtcctgtcaaagtagcattaaacagatgtag

SEQ ID NO: 17034 - DNA, 762 bp, synthetic construct
  misc_feature 1..762: note = Description of Artificial Sequence: Synthetic coding sequence
  source 1..762: mol_type = other DNA
ggcggccggattgcacgggcccatgagtttgaagctgccgtgtcgttttgtaccagcgcgtgggcaacagaacgtgatccagtaagcaggaagcagcgcgagctagaagaacagaccaggaaagccctggagttagaccaggaacgcaagcgggccaaagaagaggcggaacgcctcgagaaggagcggcgtgccgccgaggaggctaagtctgccattgccaagcaggccgccgaccagatgaaaaatcaggaacaattagctgccgagcttgcggaattcactgctaagatagcattgttggaggaggcaaaaaagaaaaaagaggaagaggcaacagagtggcagcacaaggctttcgctgcccaggaggatttagaaaagacgaaagaagaattgaagacagtgatgtccgctccacccccaccacctccgcctccagtcataccgccaacagagaacgagcacgacgagcatgacgaaaacaatgctgaagcgtccgccgaactctccaatgagggggtgatgaatcaccgcagtgaggaggagagggtgactgaaacccagaagaacgaacgggttaagaaacagctccaggctttatcttccgagctggctcaggcgcgtgatgagacaaaaaaaacacagaacgacgtgctgcacgccgaaaacgttaaagctgggagagacaaatacaaaacactgagacagattaggcagggtaacaccaaacagagaattgatgagttcgaagccatgtag

SEQ ID NO: 17035 - DNA, 603 bp, synthetic construct
  misc_feature 1..603: note = Description of Artificial Sequence: Synthetic coding sequence
  source 1..603: mol_type = other DNA
atgcccaagcccatcaatgtgagagttacaacaatggacgctgagcttgaatttgccatccaacccaatactacaggtaagcagctgttcgatcaggtgactcagcaggatgttaagaaggagaacccattgcagtttaagtttcgcgccaagttcttcccagaagacgtgagtgaggagctcattcaggaaattacacaacgactcttcttcctacaggtgaaggaagcaatactgaatgatgagatttattgcccaccggagaccgccgtcctattggcttcttatgccgtgcaggcaaaatatggtgactacaacaaagagatccataagccgggctatctggctaacgatcggcttttacctcagagagtcctggagcaacacaaacttactaaggagcaggatgaaacgaaaaagactcagaacgacgtactgcatgcagagaatgtgaaagccggacgggataagtataagaccctgaggcaaatcaggcagggaaacaccaaacagaggatcgatgaatttgaggctatgtggggaccaaaactatacgccctgttccagatgagatcttgtcagtccagcataaagcagatgtag

SEQ ID NO: 17036 - DNA, 1815 bp, synthetic construct
  misc_feature 1..1815: note = Description of Artificial Sequence: Synthetic coding sequence
  source 1..1815: mol_type = other DNA
atgccaaaacccattaacgtgagggtgaccactatggacgctgaacttgagttcgccatccagccaaacacaaccggtaagcagctgttcgaccaggtcgtcaagacggtgggcctgcgggaagtctggttctttggcttacaatatgttgattctaagggatacagtacatggctaaaactcaataaaaaggttacccagcaggacgtgaaaaaggagaatccacttcagttcaagtttcgggcaaaattttttccagaggacgtgagtgaggagttgattcaggagatcactcagcggctgtttttcctgcaagtgaaggaagctatcctgaacgatgagatttactgccctcccgagaccgccgtgttgcttgcgagctatgccgtgcaggctaaatatggagattacaataaggaaatccacaagcccgggtacctggctaatgaccgcctgctgccccagcgcgtcttggaacagcataagctgactaaggaacagtgggaggagagaatccagaattggcatgaagaacacagggggatgttgcgagaagatagcatgatggaatatcttaagattgcacaggacttggagatgtacggggtgaattatttcgaaataaagaataagaaagggacagaactatggttaggtgttgatgcactggggctgaacatctacgagcacgacgataaactgacacccaagataggctttccttggagtgagataagaaacatcagcttcaacgataaaaaatttgtgattaagcccatcgataaaaaggcccctgattttgtgttttatgcgccccggcttcgtattaataagcgcattctggccctgtgcatgggcaaccatgagctctatatgcgaagacggaagcctgacacaatcgaagtgcagcaaatgaaggcccaggcaagagaggagaagcatcagaaacaactggaacgggcccagctggaaaatgagaaaaagaaacgggaaatcgcggagaaagagaaagaaaggattgaacgggagaaggaggaacttatggaacggctgaagcaaatcgaggagcaaaccataaaggctcagaaggagctagaggaacagactaggaaggccctcgagctggaccaggaacggaagagagcaaaagaggaagcggagaggctcgagaaggagagacgcgctgccgaggaggccaaatcggccatcgcgaagcaggccgccgaccagatgaagaaccaagagcagctcgccgcagagcttgctgagtttactgcaaaaattgcactactggaagaagccaaaaaaaagaaagaagaagaggccaccgagtggcagcacaaggcttttgctgcccaagaagatctggaaaagactaaagaagagttgaagacggtgatgagcgccccaccgcctccaccccctcctccagtgatccccccaacagaaaatgagcatgacgaacatgatgagaataatgctgaagccagcgcagagttatcaaacgagggcgtcatgaatcaccgttctgaggaggagagagtgaccgagactcagaaaaatgagcgcgtgaaaaaacagctccaagctctgtcatctgaattggctcaggctagagatgagacaaagaagacgcagaatgatgtgctgcatgccgagaacgtcaaagcaggtagagataagtataagaccctgcgccagatccgccaagggaatactaagcaaaggatcgatgagttcgaggctatgtggggcccaaaactgtacgcactgttccagatgcgctcttgtcagagcagtatcaaacaaatgtag

SEQ ID NO: 17037 - DNA, 1344 bp, synthetic construct
  misc_feature 1..1344: note = Description of Artificial Sequence: Synthetic coding sequence
  source 1..1344: mol_type = other DNA
atgcttagttggaacttgcccttttcacccatccagcttgccaataacttcctgacttctgtgctggaacagcacaagcttaccaaagaacagtgggaagagcgaatccagaattggcacgaagaacaccgggggatgctgcgggaagattcaatgatggagtacctgaaaattgcccaggacttggaaatgtacggcgtgaactattttgagatcaagaataagaagggaacagagctgtggctgggagtcgacgccttgggtcttaacatctatgaacacgacgataaacttacgcccaaaataggattcccgtggtcagaaatcagaaacatcagctttaacgataagaaattcgtgatcaaaccaatagataagaaggcacccgattttgtgttctacgcacctcgtctccgcataaacaaaaggatcctggctctgtgcatgggcaatcacgagctctatatgaggaggaggaaaccggacacaatcgaagtgcagcagatgaaagcccaagctcgggaagagaaacatcaaaaacaacttgaacgcgcacaactagagaacgaaaaaaagaaacgggagatcgcagagaaggagaaggaacggatcgaaagggaaaaagaagagctcatggagaggcttaaacagatcgaggagcagaccattaaggcacaaaaggagctggaggaacagacaaggaaagcccttgagctggaccaagaaaggaaacgtgccaaagaggaggctgagcgtcttgagaaggagcgacgagcggccgaggaggcgaaaagcgcaatcgccaagcaggccgccgatcagatgaagaatcaagaacagctagccgctgagctggccgagttcaccgctaaaatagccctgctagaagaggccaagaaaaaaaaagaagaggaagctactgagtggcagcataaggcgttcgccgctcaggaagacttagagaaaacaaaggaggagctgaagacggtaatgagtgcaccccccccccccccacctccacctgtcatccccccaacagagaatgaacacgatgaacacgatgaaaacaatgctgaagctagcgccgagctcagcaatgaaggcgtcatgaatcatagaagcgaagaggaaagagtgacagagactcagaagaatgagagggttaaaaaacagctacaagcacttagcagtgagctggctcaggctcgcgacgagacaaagaagacccagaatgacgtgctgcacgcagaaaacgtgaaggctgggagagacaagtataagactctgagacagatcagacagggcaataccaagcagagaatcgatgaatttgaagccatgtag

SEQ ID NO: 17038 - DNA, 3234 bp, synthetic construct
  misc_feature 1..3234: note = Description of Artificial Sequence: Synthetic coding sequence
  source 1..3234: mol_type = other DNA
atggatactgattcacaacgctcacatttgtcttcattcaccatgaagctgatggacaagtttcacagccccaagatcaagcggacaccctccaaaaagggaaaacccgctgaagtttcagttaagatccccgagaaacccgtgaacaaggaagctactgataggttcctgcctgaggggtacccccttccattagacctggagcaacaggctgtcgagttcatgagcacatctgcggtcgcctcaaggagtcagaggcaaaagaatctgagttggctggaggagaaggagaaagaggtcgtgtccgcgttgagatatttcaaaaccatagtcgacaagatggctatagacaagaaggtgctggagatgctgcccggatcagcctccaaagtgctggaggcaatcttgcccttagtccaaaacgacccccggattcagcactcctctgccctctctagctgctattccagggtgtaccagtccctcgccaacctgatcaggtggagcgaccaggtgatgcttgaaggcgtcaattcagaggacaaggaaatggtgaccaccgtgaaaggggtaattaaagccgtgctagacggagtcaaagagctcgtgagattgactatcgagaaacaggggaggcccagccccacttcgccggtgaagccatcatcacccgcgagcaagcccgatggacccgctgaattaccgctcaccgacagggaagtggaaattctgaacaagacaactggaatgtcccagagcaccgagctactcccagatgcgacagacgaagaggtggccccaccaaagccccctctaccagggatccgcgtggtcgacaatagtccacctccagcactgcctcccaaaaaacggcagagcgctcctagccccaccagggtggcggtggtggctcctatgagccgcgctaccagcggctcctccttgcccgttggcattaacaggcaagatttcgacgtggattgttatgcccagcggcgtctttcagggggaagccacagctacggaggcgagtcacccaggctaagcccctgtagcagcatcgggaagctgtctaagtctgatgagcagctctcttctctcgatcgggactcggggcagtgctcacgtaataccagttgcgagacattggatcattatgatcccgactatgagtttctccagcaggatctgagtaatgctgaccaaattcctcagcagactgcttggaacctgagccctctcccagaatcactgggcgagtccggcagcccattcctgggtcccccttttcagcttccacttggcggacatccccagcccgacgggccgctggcccccggacagcaaactgacactcctcctgccctgccggaaaaaaagagacgctctgctgccagccagaccgccgatggcagtggctgccgtgtgtcgtatgaacggcacccatctcagtacgataacatatcaggcgaagacttgcagtctaccgcacctataccaagtgtcccatacgcaccgttcgctgccatcttgcctttccagcatggtggcagctcagccccagttgagttcgtgggcgacttcactgcgcccgagagtacaggagaccccgagaagcctcctccactcccagagaagaagaataaacatatgttagcttacatgcaactgctggaagattacagcgagccccaaccatctatgttctaccagactcctcagaacgaacatatctaccagcaaaagaataagctgctgatggaggtatatggcttctccgattctttttctggggtggatagtgttcaggaactggcccctccgccggccctgcctcctaagcagcgacaactggagcctcctgccggaaaggacggacaccctcgggatccgtcggcagtctcgggcgtgcctgggaaagatagtagggatggatccgagagagccccaaagtcccctgatgccttagagtccgcgcagtccgaagaagaagtggacgagctcagcctcattgaccataatgagatcatgagccggctgaccctgaaacaggaaggcgatgacgggcccgacgttcgaggcggaagcggggacattctactagtgcatgcaactgaaaccgatcgtaaggacttggtgctctattgcgaagcgttcctcactacttaccgaacgttcatatcccctgaggagcttatcaagaagctgcagtacaggtacgaaaagttttcccctttcgcagatacctttaaaaagcgtgtgtccaagaatactttctttgttctcgtgagggtggtggatgagctgtgtttggtggagctgaccgaggagatactcaagctactcatggaactcgtcttccggttggtgtgcaatggagagctgagtttggctcgagtccttcgcaaaaatatcctggataaagtcgaccaaaagaagttactgcggtgtgccaccagttcacaaccacttgctgcccggggagtcgcggccaggccagggactctgcacgacttccatagccatgaaatcgccgaacagctcactctgcttgacgccgagttattctataagatcgaaatcccagaggtgcttctgtgggcaaaggagcagaacgaggagaagtcaccaaatctgacacagttcaccgaacactttaacaatatgagctactgggttagaagcattataatgctgcaagagaaagctcaggatagggagagactgcttctgaaatttattaagatcatgaaacacttaagaaaactcaataactttaatagttaccttgcaatcctcagcgctttggattcagcacctatacgtagactcgaatggcagaaacaaacatctgaagggctggctgaatattgtacattgatcgatagttcatcttcatttagggcataccgtgccgccttgtccgaagtggaacccccttgtataccatacctgggtctgattctgcaggatctgacatttgtgcacttagggaatcctgattatatagatgggaaggtcaatttcagtaaaaggtggcagcagtttaatattcttgattcaatgcgatgctttcagcaagctcattacgacatgaggcggaacgacgatattataaacttcttcaacgatttttcagaccatctggcggaagaagccttgtgggaactaagtctcaaaataaaaccccgtaacattactcgtcgcaaaacagaccgggaagaaaagacttag

SEQ ID NO: 17039 - DNA, 3168 bp, synthetic construct
  misc_feature 1..3168: note = Description of Artificial Sequence: Synthetic coding sequence
  source 1..3168: mol_type = other DNA
atgtccacctctgctgttgcgagcaggagccagaggcagaagaatctctcttggctggaagaaaaggaaaaagaggtggtgtcagcacttagatactttaagactatcgttgacaaaatggcaattgataaaaaagttctagagatgctgccaggctctgcttccaaggtgctggaggccatcctgccccttgtacagaacgacccccgcatccagcactctagcgcgctgagttcgtgctacagcagggtgtaccagtccctggctaacttaatcagatggtccgaccaggttatgttagagggggtcaatagtgaggataaggaaatggtgactacagtaaagggggtaatcaaggcagtcctggatggcgtgaaagaactcgtgaggctgactattgaaaagcagggtcgaccctcacctaccagccctgtgaagcccagctcccctgcttcaaaacctgatgggcccgctgagctccctctgactgacagggaagttgaaatcttgaataagactactgggatgtctcagtcaacagagctgctgccagacgcaactgatgaggaggtggccccccccaaaccgcctctgcctggcatccgggtcgtggataacagtcctccgcccgccttgccacccaagaagcgtcaatccgcaccaagcccaacaagggtggccgttgttgctcctatgtcaagagctacaagcggatcttctttacccgttggtattaaccgccaggacttcgatgtagactgttatgcccagcgtcgcctgtctgggggtagccatagttacggtggcgaatcaccacgcttatctccatgctcatctattggcaagttaagcaagagtgacgagcaattatccagtctggaccgggattccggacagtgctctcgtaatacaagctgtgaaactttagatcattacgacccagactatgagtttctccagcaggacctgtcaaatgccgaccagatcccccagcaaactgcctggaaccttagtccgctcccggagagcttgggagagtctggttcccctttcctgggccccccgtttcaactgcctctgggagggcaccctcagcccgacggacctctggcccccggacaacagacggacacccctccagccctgccagaaaaaaagagacgaagcgctgctagccagaccgccgatgggtcaggatgtcgggtgtcatatgaacggcacccctcccagtatgacaacatatcgggagaggatctacagtccacggctcctatcccaagcgtcccgtatgctccctttgccgccatcctgccctttcagcacggggggtccagcgcaccagtagagttcgtgggagacttcacggccccagagtctaccggcgaccctgagaaacctcccccgctcccggaaaaaaaaaataaacacatgcttgcctatatgcaactgctagaggattactcagagccacaaccaagcatgttctaccaaaccccgcagaacgagcacatctatcagcagaaaaacaagctcctaatggaggtctacggctttagcgactctttttcaggcgtggactcagtacaagaattagcacctccaccagcccttccgccaaagcagagacagcttgcgtcttgcgcagctagcagcttcagcagtgtcagtcactgtgtgcagcagacaaaagtggctttcacacccgaagatggcagcgccgcccaaggcctgagcgtgtctgtgtccaattctttccttagcagacacggctcactgcccgtgccatctgagcccccagctgggaaagacggccaccctcgggacccctctgccgttagcggggtgcccgggaaggattctagggatggttccgaacgagccccaaagtcacctgacgcactggaatcggcccagtcagaggaggaggtcgatgaactgtctttgattgaccataatgaaatcatgagccgtttgactctcaaacaggagggggatgacggcccagatgtgcgtggggggtccggtgacatcctgttagttcatgccaccgagactgatcggaaagacctcgttctgtattgcgaggcattcctcaccacctatcgaacatttatcagccctgaagaactgattaaaaaactgcagtaccgatatgaaaaattttcaccttttgccgacacctttaagaaaagggtgagcaaaaacaccttctttgttctcgtgcgcgtagtggacgagttgtgcctggtagagctcacagaggaaattctgaagctactcatggaactggtctttcgcctcgtgtgtaatggagagttgtctctcgcgcgagtgctccgaaagaatattctggataaagtggaccagaaaaaactgctccggtgcgctacatcctcccagcctctggccgcacgtggcgtggctgctagacctggcaccctgcacgacttccattcccatgagattgcagagcagctaacactcctggacgccgaactcttctacaagatcgaaattcctgaagtactgctgtgggctaaggagcagaatgaggaaaaaagtcctaacctgactcagtttaccgagcattttaataatatgtcatactgggtccgctctatcataatgcttcaagagaaggcccaagaccgcgaaaggcttttgttaaagtttatcaagatcatgaaacatctccgaaaactaaataacttcaacagttacttggcgatcctgagtgccctggactcagcccccatacgtcgcttagaatggcagaagcagaccagcgagggcctggcagagtattgtacactgatcgacagcagttcatcattcagggcgtatcgggctgccttatctgaagtggagcctccctgcatcccataccttggactaatactgcaggacttgacgttcgtccatttggggaaccctgattatatagacggaaaggtgaatttttccaagcgctggcagcaattcaacatcttggactctatgcggtgctttcaacaggctcattatgatatgagacggaacgatgatatcatcaacttttttaatgacttttctgatcatctagctgaggaagcactctgggagttatcactgaaaattaagcccagaaacataactcgccgcaagacggaccgcgaggagaagacgtag

SEQ ID NO: 17040 - DNA, 3285 bp, synthetic construct
  misc_feature 1..3285: note = Description of Artificial Sequence: Synthetic coding sequence
  source 1..3285: mol_type = other DNA
atgagtggcggactgggcctgaggcggagcccggaaatgtccggaaagattgagaaggcagattcccagcgtagtcatctttcatcgtttactatgaaacttatggataagtttcacagccccaagatcaaaaggacaccaagcaagaagggaaagcctgcagaagttagcgttaaaatccctgagaaacccgtaaataaagaggccaccgaccgctttttgcccgagggctacccgctccccctggatctggagcaacaagccgtggagtttatgagcacgagcgcagttgctagcaggtcacagcgccaaaagaatctctcctggctggaggagaaggaaaaagaagtggtttccgcactgcgttattttaaaaccatagtggataagatggcgattgacaagaaagttctcgaaatgctcccagggagtgcctctaaggtcctggaagccatcctccccctggtgcagaacgatccacgcattcagcactccagcgcactgtcctcctgctacagcagagtataccagagtctggccaacctgattcgctggtcagatcaggttatgttggagggtgtgaattccgaggacaaagagatggtaacgacagtgaagggagtgatcaaggccgtactggacggtgttaaagaactcgtgcgtctgacgatcgagaaacaggggcgtccttcaccgaccagtccagtcaaacctagtagcccagcatccaaacctgacggacccgccgaactaccgctgaccgacagggaggtggagatccttaacaaaaccacagggatgtctcagtcaaccgagcttctacccgacgctactgacgaggaagtagctccccccaagcctcctcttcctggaatcagggtggttgacaattcccccccaccggctctccccccaaaaaagagacaatctgccccgtctcctaccagagttgccgtggttgcccccatgagtagagctacaagtggcagctctctcccagtgggaattaacagacaggatttcgacgtagattgttacgcccagcgccggctatccggcggaagtcatagctacggcggcgaaagccctaggctctccccatgcagctccatcggcaagctgtcaaaaagcgacgaacagctgtcctctctggaccgggattctggacagtgctcaagaaacacgtcatgtgaaaccctcgatcattatgacccagactacgagtttctgcagcaggatctttctaacgccgaccagatccctcagcagacagcgtggaaccttagccctctccctgaaagcctgggagagtccggcagccccttcctggggcctccttttcagctccctctgggcggacatccccagcctgacgggccactggctcccggacagcagaccgatactccgccggccctgccagaaaaaaagcggaggagtgccgcttcccaaaccgcggatggatccggatgccgagtgtcatatgaacggcacccttcacaatatgacaatatctcaggagaagacctgcagagtaccgcacccataccatctgtgccttacgctcctttcgctgcgatcctgcccttccaacatggtgggtccagcgcgccggtcgaatttgtcggagattttacggcacctgaaagtaccggcgaccctgagaagcccccaccactccccgaaaagaaaaacaaacatatgctggcctatatgcaactgctggaggattatagcgagccacagccatcaatgttctatcagacccctcagaatgagcacatctaccagcagaagaacaagttgctcatggaagtgtacggtttctctgattctttcagtggggtggacagtgtgcaggaactggccccaccacccgcactcccgcctaaacagcggcagctagagcctcccgccgggaaggatggccacccccgcgatccctctgctgtatctggagttccgggcaaggattctcgggatggttcagaacgggctcctaagagccccgatgcattagagagtgcacagagtgaagaagaggtggacgaactttcactaattgatcacaatgagatcatgagccggcttactctcaagcaggaaggcgacgacggccctgacgtgcgaggtggctccggtgacatcttactggtgcatgcaacagagactgacaggaaggacctggtgctgtattgcgaagcgttcctgactacatataggacatttatttcaccagaggaattaatcaaaaagctgcagtataggtacgaaaagtttagtcctttcgcagacactttcaagaagagagtatctaagaacacgttttttgtgttggtgagagtagtggacgaactctgtctcgtggaacttacggaagagattctgaagcttctgatggaattagtattcaggcttgtgtgcaacggcgagttgtccctcgcgagagtgctaaggaagaacatcctggataaagtcgatcaaaaaaagctgctgcgttgcgctaccagttcgcagccattagccgcccgcggcgtagccgctcgacctgggacacttcatgacttccactctcacgaaatcgccgaacaactcactcttttggatgctgagctgttctataagattgaaattccggaagtcctgctatgggctaaagaacagaacgaggagaagagtcctaacctgacgcaatttactgaacacttcaacaacatgagctactgggtgagaagtatcatcatgttacaggaaaaagcgcaggacagagagcggcttctcctcaagtttattaaaattatgaaacatctcagaaagctaaacaactttaatagttatctggccatcttgtcagctttagattctgcacctattcgccggctagagtggcaaaaacagacttcggaagggctggcagagtattgcactcttatcgattcttcttcctcttttcgcgcgtatagggccgccctcagtgaggtggagcccccatgcattccgtacctaggacttattctgcaggaccttacatttgtgcacctgggcaaccctgattacatcgacgggaaggtgaacttttccaagaggtggcagcagttcaacatcctggactccatgagatgttttcaacaggctcactacgatatgagacggaacgatgatataatcaactttttcaacgactttagtgatcatttggccgaagaagcattgtgggagttgtctctgaaaatcaaaccgcggaatattactcgtcgcaagacagatcgcgaggagaaaacctag

SEQ ID NO: 17041 - DNA, 3234 bp, synthetic construct
  misc_feature 1..3234: note = Description of Artificial Sequence: Synthetic coding sequence
  source 1..3234: mol_type = other DNA
atggacacagactcccagagatcccacctgtccagctttactatgaagctgatggataaattccacagccccaaaatcaaacgcactccaagcaaaaagggaaagcccgccgaggttagcgtgaaaatccccgagaaacccgtgaacaaggaggcaacggatcgcttcttgcccgaaggataccctctgcccttggacctggagcagcaggcagtcgagtttatgtcaacatcagccgtcgccagccggtctcagaggcagaaaaacctctcttggctggaagaaaaggagaaagaagtggtctccgcgctccggtacttcaagaccattgttgacaaaatggccatcgataaaaaggtacttgaaatgctccctggcagcgcatccaaggtgctcgaagctatactgcccctggtacagaatgaccccaggattcagcactccagcgcactctcatcctgttactcccgggtttatcaaagtctggctaatctgatccgctggagcgaccaggtgatgcttgagggagttaatagtgaggacaaagagatggtgacaactgtcaagggcgttataaaggctgtgttggacggtgttaaagagctggtcaggctcacgatcgagaagcagggcagaccatcgccaactagtccagtgaagcctagcagtcccgcatcaaaacctgacggccctgccgaacttcctctcaccgatagggaggtcgaaatcctgaacaaaactactggtatgagccagagcacagagttgcttcccgacgcgactgacgaggaagtcgcacccccaaagccaccccttccaggcatccgggttgtggataactctccgccccctgctctgcccccgaaaaagagacagtcagctccttctcctactcgagtggccgttgtcgcccctatgagtagggctacctcgggatcaagcctgcctgttggcattaacagacaggactttgacgtcgattgttacgcgcagagacgcctgagtggggggtcccacagctatggcggggagtctccaagactgtccccctgtagtagtatcggcaaactaagcaagagtgacgaacagctcagtagcttggatagggacagtgggcagtgcagtagaaacacttcatgtgagaccctggatcactacgatcctgattacgaattcctacagcaggatttgtcaaatgctgaccagattcctcaacagactgcctggaatctctctcctcttcctgaatccctcggggagtcaggaagcccattcctgggtcccccctttcaactcccacttggcggccatccacagcctgacggaccgctcgcccccggacaacaaactgacactccccctgccctgcctgaaaaaaagaggcgcagtgcagccagtcaaactgcggacggatcgggctgcagagtatcatatgagcgacaccccagtcagtatgataatatctctggggaggacctgcaatccacagcccctattccctccgtgccatacgcaccattcgctgccattctccctttccagcacgggggatcctccgcgcccgtagaatttgtgggtgatttcaccgctccagagtctactggtgacccagaaaagccgccccctcttcctgaaaaaaagaacaaacacatgcttgcctacatgcaactgctagaggactacagtgagccccagccctccatgttctatcagacaccacagaacgaacatatttatcagcagaaaaataagctgctgatggaagtgtacggtttctcggattcttttagcggcgtcgacagtgtccaagagttggcccctccacctgccctgcctcctaagcagaggcagctggagccgccagcaggcaaagatggacacccgcgagacccatcagctgtgagtggcgtccccggtaaagactcccgggacggtagcgagagagctccgaagagtcctgatgccttggaatcagcacaatccgaggaggaagtggacgagctgtcactgatcgaccacaacgagatcatgagccgcctaacactgaagcaggagggagatgacggccccgacgtacggggtgggagtggggacatccttctcgtgcacgcaaccgagactgatagaaaagacctcgtgttgtactgcgaggccttcctcactacctaccgtaccttcataagcccggaagaacttattaagaaactacagtatagatatgaaaagttttctccttttgccgatacttttaaaaaacgagtgtccaagaatacattcttcgtgctggttcgcgttgttgacgaactgtgtcttgttgagctgactgaggagatactaaaacttctaatggagctggtctttaggctggtgtgcaacggggaactcagcctggcacgggtgttacgcaaaaatattctggacaaggtagatcagaagaagctgctgaggtgtgccactagcagtcaaccgctggccgcaagaggcgtggctgcacgacctggcacattgcatgacttccactcacacgagatagcggaacaacttacgctgttggacgcggaactgttttacaaaatagagatacccgaagtgttgctgtgggcaaaagagcagaacgaggaaaagtccccaaacttgacccagtttacagagcatttcaataacatgtcctactgggtgagatctattattatgctccaggagaaggcccaggatcgggagaggttgcttctcaagtttatcaagataatgaaacatttacgtaagctgaataacttcaattcctatctcgcaatcctgtctgccctggacagcgcccccattcgaagactggagtggcagaaacagacaagcgagggactggccgagtattgtacactcattgacagctcttcaagctttagagcctatcgggcagcactctcagaagtcgagcctccttgcatcccctatttaggccttatacttcaggacctgacattcgtgcaccttgggaatcctgactacattgacggcaaggtcaatttcagcaaacgttggcagcagttcaatattttagacagcatgaggtgtttccagcaggctcattatgacatgaggaggaacgatgacataatcaacttctttaacgacttctccgatcatttggctgaggaagcgctatgggagctcagtttgaaaattaaaccccggaacatcactcgaaggaagacggaccgcgaggaaaaaacgtag

SEQ ID NO: 17042 - DNA, 3288 bp, synthetic construct
  misc_feature 1..3288: note = Description of Artificial Sequence: Synthetic coding sequence
  source 1..3288: mol_type = other DNA
atgggaaatgccatcgaaaagcagaagcccctcaagcgaagtcatctgtacccctggaagcaggactcccagcgaagtcatctgagttcttttactatgaaattaatggacaagtttcacagccccaagatcaaacggaccccctcaaaaaaggggaaaccggccgaagtctcagtaaagatcccagaaaagcccgtcaacaaggaggctacagatcgattcctcccagagggctatccgctgccactggacctggagcagcaggcagtggagtttatgtctacttccgccgttgcttccagaagtcagcggcagaagaatctgagctggctggaggagaaagagaaggaggtggtcagcgcactcaggtatttcaagactattgtcgacaaaatggccatagacaagaaggtccttgagatgctgcctggctccgctagtaaggtgctggaggctattctgccacttgtacaaaacgaccctcgaatccagcacagttccgccctctcttcatgctattccagagtttatcaatctctcgctaacctgattcgttggtccgaccaggtgatgctggagggtgtcaacagcgaggacaaggaaatggtaacgaccgttaagggagtcatcaaagctgtattggatggagttaaagagctcgttaggctgacaattgaaaagcaagggagaccctcacctacaagcccggtcaaacctagtagcccggcctctaaacctgatggacctgccgagcttccgttgaccgatcgggaggtggagatattgaataaaaccacaggcatgtctcagtccactgaattattgcctgatgccacggatgaggaggtggccccacccaaaccccccctgcctgggatcagggtggtcgacaactcgcccccacccgccttgccacctaagaaaagacagtctgctccgtctcccactagagttgctgtcgtggctccaatgagccgcgcaacttccgggagtagcttgcccgttggaatcaatcgacaggacttcgacgtggattgctatgctcaacgaagactttcaggtggaagccattcgtacggcggcgagtccccgcggcttagcccatgcagctccattgggaagctgagcaagtccgatgagcaactcagcagtctagaccgggacagtggccagtgttcacggaataccagctgtgagaccttagatcactacgaccccgattacgaattcctgcagcaggatttatccaacgcagaccagatcccccagcagaccgcgtggaacctttctccccttcctgaaagtttaggtgaaagcggaagtccattcctaggcccaccgtttcagctgccactgggcggtcacccccaaccagatgggcccttggcccctggacagcagaccgatacacctccagccctccctgagaagaagagacgttcagccgccagccagaccgcagacggatctgggtgtagagtctcatacgagagacacccatctcagtatgataacatctccggcgaggatctgcagagcaccgctcccatcccgtccgttccatacgcccccttcgccgccattctgcccttccagcacggaggaagctctgcacccgtcgagttcgtgggcgacttcaccgcccccgagtctaccggtgatcctgagaaacccccaccgctcccagagaaaaaaaataaacacatgctagcctatatgcagctcttggaggattatagtgagcctcagccaagcatgttctatcagacccctcagaatgagcacatttatcagcagaagaataaactgctgatggaggtatacggcttctccgattcgttttccggagtggactccgtgcaggagttggcgccccctccagcactcccacctaagcaacgacaactggaacctccagccggtaaggacgggcaccctagagatccttccgccgtgtccggggtccctgggaaagatagtcgggacgggtctgagcgagcacctaagagtccggacgctctcgagtctgcccagagtgaggaggaagtcgacgaactgagcctgattgatcataacgagataatgtcccgtcttacactcaaacaggagggtgatgacggccccgatgtccgaggggggtccggggacattctgctcgtccatgctacggagaccgacaggaaggacctggtcctatattgcgaggcatttctgacaacatataggacattcatttcacctgaggaattgattaagaaacttcaataccgctacgagaaattttccccattcgccgacacatttaaaaagcgagtctcaaagaacaccttcttcgtgttggtgcgagtggtcgatgagttgtgtttagtagagctaacagaggaaatcctgaaacttctaatggagctggtattccggctggtgtgcaatggcgaactgtctctggcacgtgtcctcagaaagaacatcctggataaggtggaccagaagaaacttctgcgatgtgctacgtcctctcagcctctggctgcacgcggcgttgctgcccgaccggggacactgcatgatttccactctcacgagattgccgaacagcttaccctgttggatgcggagctgttctacaagattgaaatccccgaagtgctgctgtgggccaaggaacagaatgaagagaaaagccccaatcttacgcagtttactgagcacttcaacaatatgagctattgggtccggtctattatcatgctccaggaaaaagcccaggaccgagaaaggctgctactcaaattcattaagatcatgaaacatctccggaagctgaacaattttaattcctacctggcgatcctgagcgctctcgattcagcgcccattcggaggttggagtggcagaaacagacctccgagggtctggccgagtattgcacattgatcgactcttcctcctctttcagggcctacagggcagctctctctgaggtggaacccccttgtattccctacttaggactgattctgcaggatctgacttttgttcacctgggtaaccccgactacatagatggaaaggtcaacttcagcaagagatggcagcagttcaatatcctcgattccatgaggtgctttcagcaggcccactacgacatgcgaagaaacgatgatatcattaacttcttcaatgacttctctgatcacttagcggaggaggctttgtgggagctgagtctgaagatcaaacccaggaatattaccagacgaaaaaccgatcgcgaagagaagacttag

SEQ ID NO: 17043 - DNA, 1395 bp, synthetic construct
  misc_feature 1..1395: note = Description of Artificial Sequence: Synthetic coding sequence
  source 1..1395: mol_type = other DNA
atgtccagagccaccagcggtagtagcctgcccgtgggcattaacagacaggattttgatgtggattgttacgctcagcggagattaagcggtgggtctcactcttacggaggcgaaagccctcgcttgagtccctgctccagcatcggtaagctgagcaaatccgatgagcagctatcttccttagaccgtgacagtgggcagtgcagtcgcaatacaagttgcgaaactctcgaccactatgatcctgactatgaattcctacagcaggacctgtctaatgctgatcagatcccacagcagactgcatggaacctgagtcccttgcctgaatccctcggtgaatctggaagtccattcctgggacccccctttcagctccctttgggagggcacccgcagccggacggaccacttgcacccggacagcaaaccgacacaccgcccgcacttcccgaaaaaaagcgacgatctgctgcatcacagacagctgatgggagtgggtgcagggtgtcttacgagagacaccctagccaatacgacaatatatcaggggaggacctccagagcacagctccaattccttccgtgccgtacgccccttttgctgcaattctgccatttcagcacgggggcagctcagccccagttgagtttgtgggggatttcaccgccccggagtcaaccggggatccagagaaaccaccacctctccccgaaaagaagaataaacatatgcttgcctacatgcagctgctggaagattattctgaaccacaaccgtccatgttttatcaaactccccagaacgaacatatctatcaacagaagaacaaattactgatggaggtgtacggatttagcgattctttctctggagtagattctgtgcaggaactcgcccccccaccagccttgcctcccaagcagcggcagcttcaggcctcatgcgccgccagttcgttcagctccgtaagtcattgcgtgcaacaaaccaaagtcgccttcacccccgaggacgggtcagctgcccagggcctgtcagtgtccgtgtctaactcctttttaagtcggcacggaagtcttcccgttccatcgtataagtcagtgttccgaagctactctcaggacttcgttccacatcaccaggccagcgtgccacctttcctgcctccgacatcctcaagctccccccatttccccccagcacatcaatctcaatctagcgatttagcggttccaacaatggccggccccccccccagcacagtagatgggcccctgagtgcatcacaggagagctcatttcacggcaatacagtgtgtctgccttccgagacgtcctttactgattctgaaccaccagcaggcaaggatggtcaccctagggattag

SEQ ID NO: 17044 - DNA, 3285 bp, synthetic construct
  misc_feature 1..3285: note = Description of Artificial Sequence: Synthetic coding sequence
  source 1..3285: mol_type = other DNA
atgagcggcggtctcggactgaggagaagccccgagatgtcaggcaaaatcgaaaaggccgattcacagcgttctcatctgtcgagttttaccatgaagttaatggataagtttcactccccaaagattaaacggacaccgagcaaaaagggaaagccagccgaagtctccgtgaaaattcccgaaaagccagtaaacaaggaagcgacagacaggtttctcccagagggctaccctttacccctcgatctggagcaacaagccgtggagtttatgagcacctctgcagtcgcctccaggtcccagagacagaagaacctgagctggctggaggagaaagagaaagaagtcgtgtctgcccttcgttatttcaaaacaattgtggataaaatggctatcgataagaaagtactcgagatgcttccaggatcagcatctaaggttttggaagctatcctacccctcgtacagaacgaccctaggattcagcactcgagtgccctttccagctgctactctcgtgtttaccagtcacttgccaacctgataaggtggtctgatcaggtgatgctcgaaggggtgaactcagaggacaaagaaatggtgaccactgtgaagggcgtcattaaagctgtactggacggggtaaaagaactggtgaggctcactattgaaaaacaaggccgtcccagtccgacgtcacccgtaaagccctcgtcccctgcttcaaagccagatggccccgccgaactcccactgaccgatcgggaagtggaaatcctcaacaaaactaccggtatgagtcaatccaccgaacttcttcccgacgccactgacgaggaggttgctccgcccaagcctcccttgcccggaatccgcgtggtggataacagccctccgcctgctctgccaccgaagaagagacagagtgccccctcgcctacgcgcgtcgcggtggtggctcccatgagtagggctacatcagggtccagtctgccagtgggcattaacaggcaggatttcgacgtcgactgctacgcccaacgcagattgagcgggggctcccattcctacggaggagaatccccgcgactgagcccatgcagtagcataggaaagttgagcaagagcgacgagcagctatcatccctggacagagacagtgggcagtgctcccggaacacatcttgtgagaccctagaccactacgaccccgattatgagttcttgcagcaggacctcagtaacgcggaccagatcccgcagcaaaccgcttggaatcttagccctctgccagagtccctgggggaatcgggctcaccatttttggggcctcccttccagctccccttgggcggacaccctcagccagacggaccactggcacctgggcaacagaccgacacacccccggcactgccagaaaagaaaaggaggtccgcggcatcacaaactgccgatggttcgggatgcagagtctcgtacgagcgccacccttctcaatacgacaacattagcggtgaagacctccagtctacagcccccatcccaagcgtcccgtacgccccatttgccgccatactgccattccaacacggaggctcctccgccccagtggaattcgtcggagactttacagcacctgaaagcaccggagaccccgaaaagcccccaccattgccggagaagaagaacaagcacatgcttgcttacatgcaactgcttgaggattactctgaaccacagccgtctatgttttatcagaccccacagaacgagcatatttatcagcaaaaaaataagctgctgatggaggtatacggattttcggactccttttcgggcgtcgacagtgtccaggagctggcccctccaccggcattgcctccaaaacagcgccagctggaacctcccgccggcaaagatgggcatcctagagatccaagcgccgtgtccggtgtgcctgggaaagattctcgagacggctctgaacgcgccccaaagagtcctgacgcactggagagcgcccaaagtgaagaagaggtcgacgagctgagcctcattgatcataacgaaataatgagtcgattaacactcaaacaggagggggacgatggacccgacgtgcgtggcgggtccggggacatcctgctcgtgcatgccactgaaacagatcgcaaagatctggtgctgtattgtgaggccttcctgacaacgtataggacatttatctccccagaagagctcattaaaaaactccagtatagatatgagaaattcagcccattcgccgatacctttaaaaagagagtgtccaagaatactttcttcgttctggtgagagttgtggacgaattgtgccttgtggaactcaccgaagaaatcctgaagcttctgatggagcttgtgttccggctggtttgcaacggggagctttcccttgcgagggtgctgagaaaaaacatcctcgataaagtcgatcagaagaaactgctgcgctgtgccaccagcagtcagccgctcgccgcaaggggcgtcgccgcacggccaggcacacttcatgatttccattctcacgaaatagcagaacaattgacactcctggatgccgagctgttttacaaaatagaaatcccagaggtgctcttatgggccaaagagcagaacgaagagaagtccccaaatcttacccagttcaccgaacattttaacaatatgtcttactgggtacgttccattataatgttgcaggagaaggcccaagacagagaaagactgctcctgaagttcattaaaattatgaagcacttgcgcaaacttaacaacttcaattcttacttggctatcctgagtgctttggattccgctccaattagaagattggagtggcagaagcaaacctccgagggcctcgctgagtattgtaccctgattgatagctcttcctccttccgagcttaccgggccgcactcagtgaggtcgagcccccctgtattccttatctgggactgatcttgcaagacctcacctttgtgcacctgggcaatcctgattatatagacgggaaggtgaactttagtaagcgatggcagcagttcaacatactagattctatgcgctgcttccagcaggctcattatgacatgagacggaacgatgatattattaactttttcaacgacttttcagatcacctggcggaggaggccctgtgggagctgtcgcttaaaattaagccccgaaacatcacccgcagaaaaaccgatagagaggagaaaacatag

SEQ ID NO: 17045 - DNA, 1011 bp, synthetic construct
  misc_feature 1..1011: note = Description of Artificial Sequence: Synthetic coding sequence
  source 1..1011: mol_type = other DNA
atggaagtttatggattctctgattcattctccggcgtggatagcgtgcaggaactggctcctcccccagcactcccacccaagcaacgccagttaagcgagaatgctagtgaggaagctggggagggggaatacgttaatctgtattcctcgggacaaagtagcgaagagcttgccccatctagaggggaacccccagcaggtaaagacgggcatccccgcgatccttccgcggtttctggtgtgcccggcaaggactctagggacgggagcgagcgcgctcctaaatcaccagacgctctcgagtctgctcagtcagaggaagaagttgatgagctctccctaattgatcataatgagatcatgtcccgcttgacactgaagcaggaaggggatgacggtcccgacgtgcgggggggaagcggcgacatcctgctggtgcacgcgactgaaactgataggaaagaccttgtgttgtattgcgaagccttcctcaccacctaccggacgttcatttcgcctgaggaattgatcaaaaaactgcagtaccgctacgagaagttctctccatttgcagacactttcaagaagcgagtgtccaaaaacacgttctttgtcctggtcagggttgttgatgagctatgcctcgttgagctgaccgaagagatactcaagctgttgatggagctggtattccggctcgtgtgcaacggggagctctccctggcgagggtactacggaagaacatcctggacaaagtagaccagaaaaaactgcttcgttgtgcaacatcctcccagccgttggccgctcggggcgtggctgcccggccggggaccttgcatgatttccatagccatgaaatcgccgaacagttgacccttctggacgcagagctgttttataagattgagatcccagaggttctgctgtgggcaaaggaacagaacgaagaaaagtcacctaacttaacacaattcacagagcacttcaacaacatgtcttactag

SEQ ID NO: 17046 - DNA, 3174 bp, synthetic construct
  misc_feature 1..3174: note = Description of Artificial Sequence: Synthetic coding sequence
  source 1..3174: mol_type = other DNA
atgggcaacgcaatcgaaaaacagaagcccctcaaacgcagtcacctctacccttggaaacaggacagtcagcggtcccatctgtcttccttcactatgaaactgatggacaagttccatagtccaaagatcaagcgaaccccatccaaaaagggcaaaccggcggaggtttctgtcaagattcctgagaagcccgtgaataaaaacctgtcgtggctggaggagaaggaaaaagaagtagtgtccgcactgcgctactttaagaccattgttgacaagatggctattgataagaaggtgcttgagatgttacctggaagcgcaagtaaagtgcttgaagccatcctccccctggtccagaatgacccccggatacagcactcctccgcactctcttcatgttactcccgggtgtaccaatctctggccaacttaattagatggagcgaccaggtgatgctggaaggggtgaatagcgaggataaggagatggtgacaacagtaaagggcgttatcaaagccgtcctggatggtgtcaaagagctggtcaggctgacaattgagaagcaggggcgcccctctccaacatcaccagtgaagcccagttctcctgcttccaaacccgacggtcctgcagaactccctttgacagaccgcgaggtggagatactgaataagaccaccggtatgtctcaaagtacagaactcctgccagatgccacagacgaggaggtagcacctccaaaaccccccctacctggaatccgcgtcgtggacaactctccccctcccgcccttccgcctaaaaagaggcagtctgctccctctcccacacgtgtggcagtcgtagcaccaatgtcccgcgcgacatcaggcagctcacttcctgtcggtattaaccgtcaggacttcgacgtagattgctacgcccaaaggagattgagtggaggaagccactcatacggaggcgagtcacccaggctaagtccatgctccagcattggcaagctgagcaagagcgatgaacagctgtcaagtcttgacagagacagcggacagtgcagcagaaatacatcctgtgagacccttgaccactatgatcctgactacgaatttctgcagcaggatctgagcaacgcagaccagataccgcagcaaacagcttggaacctgtcaccacttccagaaagcctgggtgaaagcgggtctccatttttaggtccaccatttcagctccccctaggcgggcacccccagccggacggccctttggcccctggccagcaaaccgatactcctcctgccttgcccgaaaagaagcggcgaagcgccgcttcccagacagccgacggatccggctgccgggtgtcttacgagcggcatcctagtcagtatgacaacatttccggcgaggatttacaaagtacagctccaataccatcagtgccctatgcgccgtttgctgccattctgcctttccagcatggcgggtcatccgcccccgttgagtttgtgggcgattttaccgcacctgaaagtactggggaccctgagaagccaccccctctgcccgagaaaaaaaacaaacacatgcttgcgtacatgcaactcctcgaagactatagcgagccgcagccgtcgatgttctatcagaccccccagaatgagcacatctaccagcagaagaataaactgctcatggaggtgtatgggtttagcgatagcttctctggagtcgatagcgtgcaggagctcgccccgccgcccgctttgcctcccaaacaaaggcagctggagcctccggccggcaaagatggacatccgcgcgatccgtcggccgtttcaggtgtgcctggaaaggatagccgggatgggtctgaaagagccccaaaatctcctgacgcactcgagagcgcacagtccgaagaagaggttgacgagttaagtctcatcgaccacaatgagattatgtctcgtctgactctgaagcaggaaggtgatgacggcccagatgtgcgcggggggtccggagacatcctgttggtgcatgccaccgagaccgatcgtaaggacctggtgttatactgtgaggcgtttttgacaacctataggacttttatttctccagaggaacttattaagaagctccagtacagatatgagaaattctctccgttcgccgacaccttcaaaaagcgggtctctaaaaatacattttttgtgctggtgagggtggtggatgagctgtgcttggttgaattaaccgaagagatcttgaagctgctaatggagctggtcttcaggctcgtctgtaacggtgagctgtccctggctcgggtgctgcggaaaaacattcttgacaaggtggaccagaagaagctccttagatgtgcaacttcctcccagccactcgctgcccgcggtgtagccgccagaccgggtacattgcacgattttcattcccacgagattgcggagcagctgacactgctcgacgctgagctgttttacaaaattgaaattccagaggtccttctttgggctaaagaacaaaatgaagaaaagtcccccaaccttacacagtttacagagcactttaataatatgtcatactgggtgcgctcaattatcatgctgcaggagaaggctcaggaccgagagcggctgctgcttaagtttatcaaaataatgaagcacctgagaaagctgaataattttaacagttacctggctatcttgtctgctcttgactcggctcctatacgccggctggagtggcagaaacaaacaagtgaggggcttgccgagtactgtaccttaattgattcgagttcatcatttagggcctatcgcgccgccttgagcgaggtcgagcccccctgcattccatatctggggctgattctgcaggacttgactttcgtacacttgggtaatccagactacatcgacggaaaagtgaacttcagcaagcgctggcagcagttcaacatccttgattccatgcgatgtttccagcaggctcactatgacatgcgtcgcaacgacgatataatcaatttcttcaatgacttcagtgaccacttagcagaggaagcgctgtgggaactgtcgttaaaaatcaaacctagaaatattactcggcggaagaccgatcgagaggaaaaaacctag

SEQ ID NO: 17047 - DNA, 960 bp, synthetic construct
  misc_feature 1..960: note = Description of Artificial Sequence: Synthetic coding sequence
  source 1..960: mol_type = other DNA
tgactggccccaccacccgcactccctcccaagcagaggcagctgtctgagaacgcaagcgaagaggcaggtgaaggggagtatgtcaatttgtattcctctggccagtccagtgaggagctggccccaagccggggagaaccaccagccggtaaggacggccaccctcgagacccaagcgccgtgtccggggtgcccgggaaggactcaagagacggcagcgagcgagcaccaaagtctccggatgccttggaatctgctcaatccgaggaagaagttgatgagttgtccctgatagaccacaatgaaattatgtccagacttaccctgaaacaggagggtgacgacgggcccgatgtgaggggaggatcgggggacattttgcttgttcacgctacagaaaccgacagaaaggatctggttctgtactgtgaggcattcctcacaacctatcgcaccttcatctcccctgaagaattgatcaagaagctgcagtacagatatgaaaagttctcgccctttgcagacacgttcaagaaaagggtttctaagaacacgttcttcgtactggtcagggtggtggacgagctctgcctggtggagctgaccgaggagattttgaaactcctgatggagctggtctttcgcctcgtgtgcaacggagaactgtctctggcaagagtgctgcgcaaaaatattttagataaggtggaccagaaaaaattactacgctgcgcaacctcttctcagcctcttgcagctaggggcgtggccgcccgccccggaactcttcatgatttccactcacatgaaatcgcggaacagttgaccctactggacgcggaattgttctataaaattgaaatacccgaggtcctgctctgggccaaggagcagaacgaggaaaagagtccaaaccttacccaatttacggaacattttaataacatgtcatattag

SEQ ID NO: 17048 - DNA, 687 bp, synthetic construct
  misc_feature 1..687: note = Description of Artificial Sequence: Synthetic coding sequence
  source 1..687: mol_type = other DNA
taactgccagagaaaaagaataaacatatgctcgcctatatgcagctcctggaggattatagcgagccccagcctagcatgttttatcaaacaccccagaacgaacatatctaccagcagaagaacaagcttctgatggaagtgtacggctttagtgatagcttcagcggggtggattcagtgcaagagctggccccgcccccagcgctacctccgaagcagagacagttgcaggcctcctgcgcagctagctcgttctcttccgtaagccactgcgtccagcagaccaaagtagcttttaccccggaggatgggagcgccgcccagggactgtctgttagcgtctcaaatagctttttgtcccggcacggctccctccccgttccttcatacaaaagcgtctttcgaagttacagtcaggattttgtgcctcaccatcaagcgagtgtaccaccgtttctccctcctacctctagcagcagcccacacttccccccagcccaccagtctcagtcgtcagatctcgccgtccccactatggcagggcctccacctagcacagttgatgggcccctgtctgctagtcaggagagctctttccacgggaacaccgtctgcttaccatctgagactagcttcactgatagtgagccacccgccgggaaggacggtcatccaagggactag

SEQ ID NO: 17049 - DNA, 582 bp, synthetic construct
  misc_feature 1..582: note = Description of Artificial Sequence: Synthetic coding sequence
  source 1..582: mol_type = other DNA
atgggcaatgcaattgaaaaacaaaagcctctaaaaagatcccacctctacccttggaaacaggacagtcagagatcccatctcagcagctttactatgaagttgatggacaagtttcatagtcccaagattaagcggaccccttctaagaagggcaagcctgccgaggtgtccgtgaagatcccagagaagccggtgaacaaggaggctactgaccgtttcctcccggaaggctaccctcttcctctggatctcgagcagcaggctgtcgagttcatgtcgacctcagccgtggcatctagaagccagaggcagaaaaatttgagctggctcgaggagaaggagaaagaagtcgtgtctgcactcaggtattttaagaccatagtggataagatggccattgacaaaaaggtgctggaaatgcttcctggctccgcgtctaaggtgctggaggcaatcctgccactagtccagaacgatcctcgcattcagcattcatctgctctgagttcttgctactcacgcgtgtaccaaagcctagcgaacctgattaggtggtctgatcaggtgatgctggagtag

SEQ ID NO: 17050 - DNA, 3072 bp, synthetic construct
  misc_feature 1..3072: note = Description of Artificial Sequence: Synthetic coding sequence
  source 1..3072: mol_type = other DNA
ttcaagactattgttgataaaatggcgattgacaaaaaggtattggagatgctgcctggtagtgcgagtaaagtcctggaagctatcttaccgctcgtgcagaacgatccccgcatccagcactcaagtgcgctttcctcatgctacagtagagtgtaccagtcgttagccaatctgatccggtggagcgatcaggtgatgcttgagggggtcaactccgaggataaagagatggtgacaaccgtgaagggcgtgattaaggctgttctggacggggtcaaggagcttgttaggctgacaatcgaaaagcagggccggccctcacctactagccccgtgaagcccagcagtccagctagcaagcctgatgggcccgctgaactccccttgacagatagagaggtcgaaatcctgaataagactaccggaatgagccaatccactgagctgttgcctgatgcgaccgatgaggaagtcgctccacctaagccaccgcttccaggcattcgggttgtcgacaatagcccacctccagcccttccccccaagaaacgccagtcagctccaagtcctaccagggtggccgtcgttgcacctatgagtcgcgctacctccggttccagcctgcctgtagggattaaccgccaagactttgacgtcgactgctacgcacaacgcagactcagcggcggatcacactcctacggcggcgagagtccccgcctcagcccctgtagctccattggaaaactgtccaagtcggacgaacagttgtcttccttggatcgtgatagcgggcagtgttcccgcaatacctcgtgcgagacactcgaccattatgacccggattatgagtttctgcagcaggatctctccaacgccgatcagattcctcaacaaacagcctggaacttatcgcccttacccgagtctcttggcgagtccggctcccccttcttagggccaccattccagctgccgttaggcggccatccacagccagacggacccctcgccccaggccagcaaactgatacacctcccgcccttccagagaaaaagaggagatccgctgcgtctcagaccgccgatggttcggggtgccgagtttcatatgagcgccatccttcacaatacgacaatatctcaggcgaggacctgcagagcacggcaccgattcccagcgtgccttatgccccttttgcagcaatcctcccctttcagcacggtggatcatccgcccccgtggagttcgtcggggattttaccgctcctgagtcaaccggagacccagaaaagccccccccactgcccgaaaagaaaaataagcatatgctggcatatatgcagctgctcgaagactattctgaaccacagccctccatgttctaccagactccacagaatgagcacatataccagcagaaaaataagcttctaatggaagtgtatgggttcagtgactccttttcaggcgtggactccgtccaggaactggcaccccccccagctctgccgcccaaacagagacagctcgcctcctgtgcggcctcttcattttcttctgtgagtcactgtgtgcaacagacaaaggtggcatttactccagaggatggaagcgctgcacagggcctcagcgtttccgtttccaatagttttctatccagacatgggtccctgcctgttccttctgagcccccagcaggcaaagatggccaccctagggacccaagcgctgttagcggcgtgccaggaaaagactcccgcgacggatccgagcgagcgccaaaatctccggatgctctcgagagcgcacagtctgaggaggaggtggatgagctcagtctaattgaccacaatgaaataatgtcccgtttgacactgaagcaggaaggcgatgacggaccagacgtgcggggaggttccggagacatcctcttagtccacgctaccgagacggaccgcaaggacctggtgctgtattgtgaagcgttcctgaccacatacaggacattcatttcacccgaggagttgatcaagaagctgcagtataggtatgagaaattttccccgtttgccgacacttttaagaagagggtgagcaagaatacttttttcgtcttggtccgcgtcgttgacgaactttgtctcgttgaacttaccgaggaaatcctgaagttgctgatggagctggtgttccgtttggtgtgcaacggtgagctaagcctggcacgggtcctccggaagaatatcctcgataaagtggaccagaagaaactcttaaggtgtgctacaagctctcaacccctcgcggcccggggcgttgccgcaagaccaggcaccctgcatgatttccattcccacgagattgcagaacaacttaccttgttagatgcggagttattctacaaaattgagattccagaagtgctgttatgggccaaagagcagaatgaagagaaatcacccaacttgactcaatttacagaacatttcaacaatatgtcttactgggtccggagtataatcatgctgcaagaaaaagctcaggatagagagagactgctcctcaagttcattaagattatgaagcatctgaggaagctgaataactttaacagttacctggccatcttgagtgccttagactccgctcctattaggcggctcgagtggcagaagcagacttcagaagggcttgccgagtactgcacacttattgacagcagttctagcttccgagcataccgggcggccctgagtgaagttgagccaccctgtattccttacctggggctcatactacaagacctgaccttcgtgcatctcggcaaccccgactacattgatgggaaggtgaacttctctaaaaggtggcagcagttcaacattttggacagcatgcggtgctttcagcaggcgcactatgacatgcggaggaacgatgacatcatcaacttttttaacgacttctctgaccacctcgctgaagaagccctttgggagctcagcctgaagattaaacctagaaatattactcgccgaaaaaccgatagggaggagaagacatag

SEQ ID NO: 17051 - DNA, 480 bp, synthetic construct
  misc_feature 1..480: note = Description of Artificial Sequence: Synthetic coding sequence
  source 1..480: mol_type = other DNA
atggaagtctatgggttcagcgacagctttagcggagttgatagtgtccaagaactggcacctccaccagccctgcctcccaagcagagacagctgtacaagagcgtgttccgctcatactcccaagacttcgtgccccaccaccaggccagcgtgccccccttcttgccccccacgtcctcgagctccccacacttcccaccagcccaccaatcccagtcatctgatcttgccgtacctaccatggcgggcccccctccaagcaccgtcgacggccctcttagtgcaagccaggagtcaagcttccatggcaataccgtctgtctgccatctgaaaccagtttcacggacagcgagccacccgcagggaaggacggccacccaagagatccatcagcagtgtcaggcgttccaggaaaggatagccgagacggatccgaacgtgcacccaagtctcctgatgccttggagagcgcttag

SEQ ID NO: 17052 - DNA, 696 bp, synthetic construct
  misc_feature 1..696: note = Description of Artificial Sequence: Synthetic coding sequence
  source 1..696: mol_type = other DNA
atggaagtgtatggcttctccgacagcttttccggagtggatagtgtccaggaattagcgcccccccccgccttgccccctaagcaacgccagttacaggctagctgtgccgcaagtagcttcagttccgtcagtcattgcgtccagcagactaaggtcgccttcacccccgaggatggatctgcagctcagggactgtcagttagcgtttctaacagctttttgtctcggcacggatccctgccagtgccttcctataaatctgtctttcggagctacagtcaagattttgtccctcatcatcaagcatctgtgcctccgttcctgccgcctacaagctcttctagcccacattttccacctgctcatcagagtcagtcatcagacctcgctgtgcctaccatggccgggccacctccctccactgtggacggcccactgtcagccagccaggagagctcctttcatgggaatacggtgtgtctgcctagcgagacaagctttaccgacagctcagagaatgctagcgaggaggcaggcgaaggcgagtacgtgaatctgtattcctcaggtcagtccagcgaggagctggcccctagccgcggagagccacccgccggtaaggacggacacccgcgggacccctcagcagtctcaggcgttccaggtaaggactcaagggacggctccgagtag

SEQ ID NO: 17053 - DNA, 477 bp, synthetic construct
  misc_feature 1..477: note = Description of Artificial Sequence: Synthetic coding sequence
  source 1..477: mol_type = other DNA
atgagtggcgggcttggccttagaaggtcacccgagatgagtgggaagattgagaaagcagactcacaaaggtcccatttaagctccttcacaatgaaactgatggacaagtttcattccccgaaaatcaagcggactccaagtaaaaaaggtaagccggcggaggtcagtgtgaagattccagaaaagcccgtcaacaagaacttaagttggctggaagaaaaagagaaggaagtcgtctctgctctcaggtatttcaaaacgatagtagacaagatggcaattgataagaaggttctggaaatgctaccaggttccgcttccaaggtgctcgaagctatactgccgttagtgcagaatgatccaagaattcaacatagctcagcactgagcagttgctacagtagggtgtatcagtcgcttgccaatctgatcagatggagcgatcaagttatgcttgagggcgtcaatagctag

SEQ ID NO: 17054 - DNA, 261 bp, synthetic construct
  misc_feature 1..261: note = Description of Artificial Sequence: Synthetic coding sequence
  source 1..261: mol_type = other DNA
atggaagtctacgggttttcagacagtttttcaggcgtagattctgtacaggagctggcaccaccaccagccctcccgcctaagcaacggcaactggagcccccggctgggaaagacggccacccaagggacccgagcgccgtttctggcgttcccggcaaggactccagggacggaagcgaatccgggatcaccagcgtgtatcggtggaacatccagcgtcagcaaagactgagctatggacatactgcatctcagtag

SEQ ID NO: 17055 - DNA, 7419 bp, synthetic construct
  misc_feature 1..7419: note = Description of Artificial Sequence: Synthetic coding sequence
  source 1..7419: mol_type = other DNA
atgaccgccagagggcagtcaccgttggctcctctgctggaaaccctggaggatcccagcgcttcacacggtgggcagacggatgcgtaccttacgcttacttctcggatgaccggtgaggaggggaaagaagtgattactgagattgaaaaaaaactaccaagattgtacaaagtgctcaaaacccatatttcttctcagaattcagaactgtccagcgcagccctacaggctctgggcttctgcctgtacaaccctaaaattacttctgaactttccgaggcaaacgcactcgaactgttgagtaaactgaatgacaccattaagaactccgataagaatgtcaggacccgggccctgtgggtcatctcgaagcagacgttcccctcggaggtcgttggcaagatggtcagttccattatagacagtctggaaattctattcaacaaaggagagactcacagtgctgtggtggattttgaagcactgaatgtgatcgtgcggctgattgagcaggcccccattcagatgggcgaagaggccgttaggtgggccaagctggtgatccctctggtggtccattccgctcaaaaggtgcacttacgtggcgctacagctctcgagatggggatgcccctgttgctgcaaaagcagcaggaaattgcatctattacagagcagctgatgacaacaaagttaatctctgagttacagaagctgttcatgagtaaaaacgagacctatgtgctgaagctgtggcctttgttcgtgaaactgctgggacggaccctgcacaggtcaggtagcttcatcaacagtctcttgcagctggaagaattgggcttccggtctggcgctccaatgatcaagaagattgcattcattgcttggaagagcctaattgacaatttcgccctgaaccctgatatcttgtgttctgcaaaacgcttaaagctcctcatgcaacctctctcttcgattcatgttcgcactgaaactcttgctctcaccaaactggaagtttggtggtatctgctgatgaggctgggcccccacctgcccgctaacttcgaacaggtgtgtgtaccactgatccaatccaccatctccattgatagcaatgctagccctcagggtaactcgtgccatgtcgccacatcccctggattgaatcccatgacgcctgtgcacaagggggcttcatccccttacggagccccaggtaccccacggatgaacctatcttccaacttaggtggcatggccaccatacctagcattcaactgttgggactggaaatgcttctacatttccttttaggccccgaagcactctctttcgctaagcagaacaagctcgtgctgtcccttgagcctctggaacatccactaattagtagtccttcctttttttccaaacatgcgaataccctgatcacagccgttcacgattcatttgtcgctgtgggaaaagatgcacctgatgtggtggtgagcgccatctggaaggagcttatatcccttgtcaaaagtgtgacagaatctgggaacaagaaagagaagcctggatccgaagtgctgaccttactgctgaagagcctagaatccatcgttaaatctgaggtcttccctgtgtctaaaaccctggtgttgatggagatcaccatcaagggcctgcctcagaaggtcttggggtcacccgcttaccaagttgctaatatggatattctgaacggcacccctgcattgttcctgatccagctgatcttcaacaattttttagagtgtggggtttccgatgagagattttttcttagcctcgagtctctggtcggatgcgtcctgagcggccccactagtcccctcgcgttctctgactctgtactgaatgttattaaccagaatgcaaagcagcttgagaacaaggagcatctgtggaaaatgtggagcgtgatcgtgacccctctgacggagctgattaatcagaccaacgaggtgaaccaaggagatgcattagagcacaattttagtgctatatacggggcgctgactttaccggtgaatcacatcttttctgagcagagatttcctgttgccactatgaagactctgctgaggacatggagtgaactgtatagggccttcgcccgatgtgccgcgttggtggctacagccgaggagaatctctgctgtgaagaactctcttctaaaataatgtccagtctggaggacgaaggcttcagcaatcttctgttcgtcgacaggattatatatatcattactgtgatggtcgattgcattgatttctctccttataacataaagtaccaaccgaaggtgaagtccccacagcggccatccgactggagcaaaaagaaaaatgaacccttaggcaagctgaccagtctgtttaagttgattgttaaggtgatctactcgttccacaccctctcctttaaggaggctcattcagatactctgttcacaataggcaatagcatcactgggatcatttcctccgtcctgggacacatttccttgccctcgatgattaggaagatctttgcgaccttaacaagaccgctggctctgttttatgaaaactccaaactagacgaagtacccaaagtttacagttgtctcaataacaagctggaaaagctactgggagagatcatcgcttgcctgcagtttagttatacaggaacctatgactccgagcttttagagcagttgtcgccacttctctgcataattttcctgcacaagaacaagcagattcggaaacagtcagcccaattctggaacgccacgttcgcgaaggttatgatgctggtatatcccgaggagctgaagcctgtgttgacacaggccaagcagaagttcctcttgctgcttccaggcctcgagaccgttgagatgatggaagagagttccggcccgtacagtgacggtaccgagaactcccagctaaacgtgaaaattagcggtatggaaagaaagtcaaacggtaagcgcgatagcttccttgcccaaactaagaacaaaaaagagaatatgaagcccgctgcaaagctgaaactcgaatccagctccctgaaggtgaagggcgaaatcctgttggaggaagaaaaaagtaccgatttcgttttcatccctccggagggcaaagacgcaaaggagcgaattcttaccgaccatcaaaaggaggtgctcaagacgaagagatgcgatatccctgcaatgtacaacaatctggacgtgtcccaggacaccctgttcacccaatattctcaagaggaacctatggaaatccccactttgactcgcaagccaaaagaagatagcaaaatgatgattacggaggagcagatggactccgacatcgttatcccccaggacgtgactgaggattgcgggatggccgagcacttggagaagagctcactttctaacaatgagtgcggcagccttgacaaaacttcgccagagatgagcaactccaacaatgacgaacgaaaaaaggcgctcatcagtagtcggaagacaagcacagagtgcgcaagttcaactgagaattctttcgtcgtttcaagtagcagcgtgagtaacacgaccgtggctggcacacccccatacccaacctcaagaaggcagacattcattacactcgaaaagttcgatgggagtgagaaccggcctttcagtccctcaccattaaacaatataagctctaccgttacagtgaaaaacaatcaagagacaatgataaaaacagacttcctgcccaaagccaagcagcgggaaggaacctttagcaagagcgactctgagaagattgttaacgggaccaagcggagctctcggagggctggaaaggcagagcagacaggcaataagaggtccaagcctctgatgcgctcggagcccgaaaaaaacactgaagaaagcgtggagggcattgtagtgctcgagaacaaccctccagggctgctgaatcagactgaatgcgtatcggacaatcaggtccatctgtccgagtcaactatggaacatgacaacaccaagttgaaggctgccaccgtggagaacgccgtgctgctcgagactaacacagtcgaggagaagaacgtggagatcaatctcgagtctaaggagaatacaccaccagtggttatttcagctgaccagatggtgaacgaagacagccaggttcagatcactccgaatcagaaaactctccgccgtagctctaggaggaggagcgaggtggtggaatcgacaacggagtctcaggataaagaaaactcccaccagaaaaaagagcgacgaaaagaagaggagaaaccccttcagaagagccccctgcacattaaagatgatgtactgcccaaacagaaacttatcgctgaacagactcttcaggagaacttgattgagaaggggagcaacttgcatgaaaaaaccctaggcgaaacctccgctaatgcagagactgaacaaaacaaaaagaaagccgaccctgagaacattaaatcagaaggtgacggtacccaggacatagttgacaagagtagcgagaagctggtcaggggtcgcacgcgctatcaaactagacgagcctcccaaggtctactgtcttctatcgaaaattccgaatcagactccagcgaagctaaggaggagggcagccgtaagaagcgctcaggcaagtggaagaacaaatctaatgaaagtgtggacatacaggatcaagaggaaaaggtggtgaagcaggaatgtatcaaagctgagaaccaatcccacgactataaagccacttcagaggaagacgtttccattaagtcccctatctgcgaaaaacaggatgagtcaaacactgtgatatgtcaggattccacagtcacctctgatttgctgcaggtgcctgatgatctccccaatgtgtgcgaagaaaaaaatgaaacttcaaaatatgccgaatatagttttacaagcctgcctgtgcccgagtcaaacctgaggaccagaaatgccatcaaacggcttcataaacgggattccttcgacaactgctcacttggggagtcaagcaaaataggcatctctgacatctctagcctttccgaaaaaacctttcagaccctagaatgtcaacataaacgtagcaggagagtcagacgcagtaaaggttgtgattgttgcggcgagaaatcccagcctcaggagaaatccctgatcggacttaaaaataccgaaaataacgatgttgagattagcgagaccaaaaaggctgatgtgcaagctccggtaagcccaagcgagacttcgcaggccaatccttacagcgaaggacagtttttagacgaacaccattctgtcaatttccacctgggcctcaaggaggataacgacaccattaacgattctctcattgtgtcagaaactaagtcaaaagaaaataccatgcaggaaagcctcccgtcaggcatcgtgaacttccgagaggagatctgcgacatggactcgtcagaagcgatgtcacttgagagtcaagagtctcccaacgagaattttaagacagtaggcccttgccttggggatagcaagaatgtgtctcaggaatctctcgagactaaagaggagaagcctgaggagacccctaagatggagctgtcattggagaacgtcacggtggaaggaaacgcgtgtaaagttacagagagcaacctggagaaggccaaaacaatggaactgaatgtgggaaatgaggcttcattccacggccaggaacgtaccaagacaggcattagcgaagaggccgccatcgaggagaataaacgaaacgatgactctgaggcagacaccgccaagctcaatgccaaagaagtcgccaccgaggaatttaattctgacatctctctttctgacaataccacccccgtgaagctgaatgcacagacagagatatcagagcaaactgccgcaggtgagctggacggcggcaatgacgtctccgacctccactcttccgaagagaccaataccaaaatgaaaaacaatgaagagatgatgatcggagaagctatggctgaaaccggacatgacggggagacggaaaacgaggggatcacgactaagacaagtaagcccgacgaagccgaaacaaatatgcttacggcagaaatggacaattttgtgtgtgatacggtagagatgtctaccgaagaggggattatcgatgccaacaagacggagactaataccgaatacagcaagtccgaagagaagcttgacaacaatcaaatggttatggaaagcgatattttgcaagaggaccatcatacctcccagaaggtcgaggaaccgagccaatgtctggcctctggaacagctatctcggaactgatcatcgaggacaataacgcttctccacaaaaattaagagaactggatccctccctagtctcggccaacgattccccatcaggaatgcaaacgcggtgcgtttggtccccattggctagtccatctacgtcaatcctgaagcgagggctaaagcgaagccaggaggacgaaatttcaagcccggtcaacaaagtgaggcgcgtgtcctttgctgaccccatttaccaggcaggcctggccgatgacatcgatcgcaggtgtagtatcgttcgctcacacagtagcaattcctctcccattggaaagtccgtgaagaccagtccgaccactcaaagtaagcacaatactacatcagcaaaggggtttttaagccccggctctagatctcctaaatttaaatcctctaaaaagtgtctgatctcggagatggccaaggagtccatcccttgtcccaccgaatccgtgtacccccctctggtaaactgcgtagcccctgtagatataattctgcctcaaattaccagcaacatgtgggcacgcggactgggtcagctcatcagagcaaaaaatatcaagaccatcggggatttatccactttgacggccagcgaaatcaagacgctgcccatccggtcacccaaagttagcaacgttaagaaggcccttcggatctaccacgagcagcaggtcaagaccaggggcctcgaggaaattcctgtgttcgatatcagtgagaaaactgtaaatggaatcgagaataagagccttagccccgatgaggaaagacttgtgtcagatatcattgatccagtggctctggaaatacctctctccaaaaatctgctcgcgcagataagcgcactcgccttgcagctggacagcgaggatctccacaactattccggttcccagctcttcgaaatgcacgagaaactgtcctgtatggcaaactccgttattaagaatcttcaaagtaggtggcggagcccttcgcatgagaactcgatttag

SEQ ID NO: 17056 - DNA, 264 bp, synthetic construct
  misc_feature 1..264: note = Description of Artificial Sequence: Synthetic coding sequence
  source 1..264: mol_type = other DNA
atgacggcccgcggccagtcacccctcgcccccctgctagaaactctcgaggacccatccgcctcccacggcggccagacagatgcttatctaaccttgacttcacgaatgactggagaggagggaaaggaggtgatcactgaaatcgagaagaagctgcccaggctgtacaaagtgctgaaaacccacataagctctcagaattccgaactctcttctgcagccttgcaagcgttggggttctgtctttacaatccaaaatag

SEQ ID NO: 17057 - DNA, 7341 bp, synthetic construct
  misc_feature 1..7341: note = Description of Artificial Sequence: Synthetic coding sequence
  source 1..7341: mol_type = other DNA
atgaccgctcgcggtcagagcccgctcgctccgctgctcgagactctggaagatccctctgcaagccatggagggcaaacggacgcttatctgacattgactagccgcatgactggagaggaggggaaggaagtgataactgagatcgagaaaaagttgccccgactgtataaagtgctgaagactcacatctcttctcaaaactcagaactctccagcgcagcacttcaggccctcggcttctgtttgtataatcccaaaattactagtgagttatccgaggccaacgcattggaactgcttagcaaactcaacgacactatcaagaattccgataaaaacgtaagaacccgggcgttgtgggtaatcagtaaacagacatttccttccgaggtcgtgggcaagatggtgagcagcatcatcgacagtcttgagattttgtttaacaaaggagaaactcacagcgccgtcgtggatttcgaggcgctaaacgttattgtgcgcctcatcgagcaagctcccatacaaatgggggaagaggcagtccgctgggctaagttagttatacctctggtggtgcacagtgctcagaaggttcacctacggggcgcaacagcactggaaatgggcatgcctctcctacttcaaaagcaacaggagattgcctcaattacggagcaactgatgaccaccaagctaatctccgaactccagaagctctttatgagtaaaaacgagacatacgttctcaaattatggcctcttttcgtcaaattgctggggcgcactctgcatagaagcggaagttttattaactccctgttacagctcgaggagctgggctttaggtcaggtgctcctatgatcaagaaaattgctttcatcgcctggaagagcctgatcgacaatttcgcactgaaccctgacatcctctgctcagccaagcgcctgaagctgcttatgcagcccttatccagcatacacgtcaggacagagaccctcgccctgaccaaactggaagtctggtggtacctcctgatgagattgggaccccacctccccgcaaactttgaacaggtctgtgttcctttaattcagtctaccatctcaattgacagtaacgccagccctcagggtaactcttgtcatgtagctacttcaccagggctcaaccctatgacacccgtgcataagggcgctagcagtccatatggggctcccggcactcctcgcatgaacctgagctccaatcttggcggaatggctaccataccttccatccaactcttgggcctggaaatgctgttgcacttcttactgggacccgaagctctgtcgtttgccaaacagaataagctggtgctgagtctcgaacccctggagcaccctctgatcagctctccctccttctttagcaagcacgctaataccctgataacagccgtccacgactcatttgtggcagtcggcaaagacgcgcccgatgtcgtagtgtctgccatctggaaggaactcatttctctcgtaaaatcggtgaccgaatcaggcaataagaaagaaaagcccggctctgaggtgctcactctgctcctgaagagcctcgagtccattgttaaatcagaagtcttcccagtgtcaaaaaccctggtcctgatggagattacgatcaaaggcctcccgcaaaaagttctcgggtccccagcctaccaggtggcgaatatggacatcctgaacggtaccccggctctgttcctcatccagttgatctttaataattttctggagtgcggggtgtcagacgagcgcttcttcctgtctctggaaagcctcgtggggtgcgtcctctccggaccaacaagtcctctcgccttctctgactccgttctgaacgtaattaaccagaatgccaagcagctggaaaataaggaacatctgtggaaaatgtggtcggtgatagtcacacctttgacagaactgatcaatcagaccaacgaagtaaaccaaggggacgcattagaacacaacttctctgcaatttacggagctttgacacttcccgtcaaccacattttttcagagcagcgctttccggtagctacgatgaaaacactcctaagaacttggagcgagctgtaccgcgcttttgcacggtgcgccgcgcttgtcgcgactgctgaggaaaacctctgctgtgaggaactaagcagtaagattatgtcgtcgttggaagacgagggatttagtaacttgctctttgtggatcggatcatttatatcatcacggtcatggtcgattgcatcgacttctccccttataatatcaaataccaacctaaagtcaagagtccccaaaggccgagtgactggagtaagaaaaagaatgagccattgggcaaactgacatcactcttcaaactgattgtcaaggtgatctacagctttcatacgctgagttttaaagaagcacacagcgataccctgtttaccataggtaattctattacaggaataataagcagcgtcctgggacacatatctcttccgagcatgattaggaagatctttgcaacgcttacgcggccgctggcactcttctacgaaaattccaaacttgacgaagttccaaaggtgtacagctgtttaaacaataaactcgaaaaactgttgggggagattattgcttgtctccagttcagctatacaggaacctacgattcagagctactggaacagctttcccccctgttgtgcataattttcctccataaaaataagcagataaggaaacagagcgcccaattctggaatgctacctttgcaaaggttatgatgctcgtgtacccagaggagctgaagcccgtattgacgcaggctaaacagaagttcctgctattactacccgggttggaaacagtcgaaatgatggaggagtctagcggaccttatagcgacggaacggagaatagccagttgaatgttaaaatctcaggaatggagaggaaatcaaacggaaagagagatagctttttggcccaaacaaagaataaaaaggagaacatgaaacccgccgctaagctgaaacttgagagtagcagtctaaaggtgaagggcgaaatcctgcttgaggaggagaagagcaccgacttcgtgttcatcccacccgaaggcaaggatgctaaggagcgcatactgaccgatcatcaaaaggaggtcctgaagacaaagcgatgcgatattcccgctatgtacaataacctggacgtatctcaggacacactgtttacacagtatagtcaggaagaaccaatggaaattcccactctgacaagaaaaccgaaggaagactccaaaatgatgatcacggaggaacaaatggatagtgatattgtgattccacaagacgttacggaagactgtggcatggcggagcatctggaaaagtcatcgttgtccaacaatgagtgcggcagtctggataaaacctctccggaaatgtctaactccaacaacgacgagagaaagaaggcgcttatctcttctaggaagacctctactgaatgtgcatcctctacggaaaattcctttgtggtgtcgtcatctagtgtgtccaacactaccgtggctggcacccctccctatcctacctcacgccggcaaacttttattactcttgagaagtttgatgggagcgagaacagacctttcagcccaagccccctgaataatatcagctctacagtcactgtaaaaaacaatcaggaaaccatgattaaaaccgactttttacctaaagcaaaacaacgagagggaaccttttctaagtccgattctgaaaaaattgtgaacggtaccaagcggagctctaggcgagcaggtaaagcggaacagactgggaataaaagatccaagcctctgatgcgatccgaaccggagaagaatacagaggagtctgtggagggcatcgtcgtgctggaaaacaatccgcctggtttgctgaatcagacagaatgcgtgtccgacaaccaggttcacttgtctgagtcgacaatggaacatgacaacaccaagttaaaggcggcaaccgtggaaaatgccgtcttactcgagacaaatactgtcgaagaaaagaatgtggaaatcaacctggagtctaaggagaacacacccccagtcgtcatcagtgccgaccagatggtgaacgaagacagtcaggttcagattactccaaatcagaaaactcttagaagatcctctcggaggcgctccgaggtggtggaaagcacgacagagtcccaggacaaggaaaactcccaccagaagaaagagcgtaggaaggaggaggagaagcccctgcagaaaagccctctgcacattaaagacgatgtgttgccaaagcagaaactgattgcagaacagactctgcaggagaaccttatcgaaaaaggatccaacttacatgagaagactctcggggagacctccgccaatgctgaaacggaacagaataaaaaaaaagctgatcccgagaacatcaaatcggagggtgatgggactcaagatatagtggacaagtcaagcgaaaaacttgtgcgaggtcgaaccaggtatcaaacacgcagggcgagccagggtttattgtcgagtattgagaatagtgaaagtgattcgagcgaggccaaggaagagggaagcagaaagaaacgctcagggaagtggaaaaataagagtaacgaaagtgtggacattcaggatcaggaggagaaagttgtcaagcaagagtgtattaaggctgagaaccagtcacacgactacaaagccacttcggaggaggatgtgagtatcaagtcccccatctgtgaaaaacaagacgaatccaacactgtgatatgccaggacagcaccgttactagcgatctgctgcaggtgccagacgatctgcccaatgtgtgtgaggagaaaaacgagaccagcaagtacgccgaatatagttttacttcactgcccgttcccgagtccaatctgcgcaccagaaatgccatcaaacgactgcacaagcgagattcatttgacaattgcagtctcggcgagtcaagcaaaataggcatttcagacatttcctccctgagtgagaagacattccaaacattagagtgccaacacaaacgctctaggagagtgcggagatccaaggggtgtgactgctgtggtgaaaaaagccagcctcaggagaagagcctaattggcctcaagaacactgaaaataacgacgtggaaatttctgagacaaagaaagccgatgttcaggcccctgtatcaccctcagagacttcacaggccaatccgtacagtgaaggccagtttttggacgagcatcacagcgtgaacttccacctgggtttaaaggaggacaacgataccatcaatgattcactgatcgtgtcagaaactaaaagcaaggagaatactatgcaggaatctctcccctccgggattgtgaactttagagaagagatttgtgacatggactcttcagaggctatgagcctggagagccaggagagtccaaatgagaacttcaagacagtagggccatgcctaggtgatagcaagaatgtgtcccaagagagcctggaaactaaggaagaaaagccagaggaaaccccaaagatggagctgtcattagaaaatgtgacggtggaagggaatgcgtgcaaggtaaccgaatctaacttagaaaaagccaagacgatggagctgaatgtcggaaacgaggcttcattccatggtcaagaacgcactaagacaggaatcagtgaagaagccgcaattgaagaaaacaagaggaacgatgattccgaagccgatacagctaaactgaacgcgaaagaggtggccaccgaggagtttaacagcgatatctctctgagcgacaacactactcccgtgaaattaaacgctcagaccgagattagtgaacagacagcagctggcgagctggatggcgggaacgatgtgtctgatctacactcctctgaagagacaaacacaaagatgaagaataatgaagagatgatgatcggggaagcgatggccgagacaggtcatgatggcgagacagaaaacgaggggattacaaccaagacaagcaaacccgatgaggctgaaacaaatatgctcacggcagagatggacaactttgtgtgcgacactgttgagatgtctaccgaggaaggcattatcgatgcaaacaagacagaaacaaataccgagtattcgaagtccgaagaaaagctggataacaaccagatggtgatggagtccgatatactgcaggaagaccatcacacttcccagaaagtcgaggagccatcacagtgtctagcgagtggcactgcaatttctgagctcatcatcgaggacaacaacgccagtccccaaaaattacgggaactcgacccatctctggtaagtgccaatgacagcccttcaggcatgcagacccgttgcgtctggtctccactcgcaagtccctcaactagcattctgaagcgcgggctcaagcgatcccaagaggatgagatttccagtcccgtcaataaagtgcgacgtgtgtcttttgcagacccaatctatcaagcgggtctggctgacgatattgaccgaagatgtagcatcgtaaggagtcattccagtaacagtagtccaatcggcaaatctgttaagaccagccctactacacagtcaaagatatccgagatggcaaaggagtcaatcccttgtcctaccgagtcggtttaccccccactggtgaactgtgtcgcccctgttgacataattctgcctcagatcactagcaacatgtgggccagggggctggggcaactgatacgcgcaaagaatatcaaaaccatcggagatctgtccaccctcaccgcgtctgaaataaagaccctgccaatccggtcgccaaaggtctctaatgtgaaaaaggcattgcgcatatatcacgagcaacaggtcaagacccgagggcttgaagagattcctgtatttgatatctcagagaagacagtgaatggcatcgaaaataaatctttgagtccggatgaagaacgactcgtgagcgatatcatcgaccctgtggccctggaaatcccgctgtccaagaatttgttggcccaaatctccgccttggccctgcaattagattccgaggaccttcacaactattcagggagccagctctttgagatgcacgagaagctgagttgtatggctaacagcgtcattaagaatctccagtctaggtggcgttctccgagccacgagaacagcatctag

SEQ ID NO: 17058 - DNA, 7341 bp, synthetic construct
  misc_feature 1..7341: note = Description of Artificial Sequence: Synthetic coding sequence
  source 1..7341: mol_type = other DNA
atgaccgcaagagggcaaagcccattggctcccctgctggaaactctggaagatccctcagcatctcacgggggccagaccgatgcttacctgacgctgacatcgaggatgactggagaggaaggtaaagaggtcattactgaaatcgagaagaagctcccacgcctttacaaggttcttaagacccatatctcctctcagaactctgaactatcttccgccgctctgcaggctctgggcttttgcctatacaacccaaaaattaccagcgaactgtctgaagccaacgcgttggagcttttgtccaagctgaacgacacaatcaagaactcagataaaaacgtgaggaccagagccctgtgggttattagtaaacagaccttcccatcagaggtggtgggcaagatggtcagtagcatcattgactctctggagattctgttcaacaaaggtgaaacgcattcagctgtggtggacttcgaggccctgaacgtgatcgtgcggcttattgaacaggccccaatccagatgggagaagaagccgtcaggtgggctaagctcgttatcccactggtggtccattcagcgcagaaagtccacctgcggggagctacggctctcgaaatgggtatgccgctgctgctgcaaaagcagcaggaaattgcctcgatcactgagcagctgatgacaacaaaattgatctccgagctccagaagctattcatgagcaagaatgaaacttacgttctgaaactgtggcctctgtttgtgaaattgcttggtagaacgctgcaccgttccggatcattcatcaactctctgctgcaactcgaagaattggggtttcgtagtggcgctccgatgatcaagaagatcgcatttatagcatggaaaagtttgatagacaattttgccctcaatcccgatatcctgtgtagcgcaaaaagactcaagctgttgatgcagcctctgtcatccattcacgtgcgcacagagactctagccctgacaaagctcgaggtatggtggtatctactcatgaggttggggcctcacctccccgccaatttcgagcaagtatgcgtacctctgatccagagtacaatctctatcgacagcaatgcctcccctcaggggaactcatgtcacgtagccacctctcctggactgaacccaatgactcctgtacataagggtgcttcctcgccctatggcgctccaggaactccgagaatgaatctgtcctccaatttgggcggtatggccactatccccagcattcagctccttggactggagatgctcctgcactttctacttggtcccgaggccctctcattcgcaaaacagaacaagcttgttctgtctctggagccactggagcaccccctaattagctctccgtctttcttttccaagcacgccaatactctcatcacagctgtgcacgatagcttcgtggcggttgggaaggacgcacctgatgtggtcgtgtccgcaatatggaaagaattgataagccttgttaagagtgtgaccgaatcaggcaataaaaaagagaagccgggctcagaagtgttgacactgcttctgaagtctttagagtcaatcgtgaaatccgaagtgttcccagtcagcaagacacttgttcttatggaaatcacaatcaagggcttaccccagaaggtgctcggctcacctgcataccaggtggctaatatggatattctcaatggcacccctgcacttttcctgatccagctgatctttaataacttcctggagtgtggagtgtcagatgaaagatttttcctgtccctagagtctctggtgggctgtgtactgtccggccctacgtcacctcttgctttcagcgattcagtcttgaatgtcatcaatcaaaacgccaagcaactcgaaaataaggaacacctgtggaaaatgtggtccgtcattgtcacccccttaaccgaactcatcaatcagaccaatgaagtaaaccagggcgacgcgctagaacataatttttcagccatctatggagctctgacccttccggtgaaccatatattcagtgaacagcgttttcccgtagccacaatgaagactctgctgcgcacctggagcgagctctatagagcttttgcgcgctgcgcagctctggtagctaccgccgaggagaatttatgctgcgaggagctcagctcaaagattatgtcaagtcttgaggacgaaggattttctaatcttctgtttgtagatcgcatcatctacattatcacggtgatggtcgattgtattgacttctccccatacaatatcaaataccagccaaaagtaaagtctccccagcggccaagtgactggtcaaaaaagaaaaacgagccacttggaaagctcacctccttgtttaaactcattgtgaaggttatatactcctttcatacccttagttttaaggaagcccactccgataccctgttcactataggcaactctattaccggcattatttcgagcgtgttaggtcacatttctcttccatccatgatccggaagatattcgctaccctgacacgacccctggctctcttttacgagaactcaaagctggatgaggttccgaaggtgtactcctgccttaacaataagctggagaaacttctgggtgaaattatcgcgtgcctccagttctcatacactggaacgtatgattccgaactccttgagcaacttagccccttgctctgtattatcttcttacataagaataagcagataaggaaacaatcggcccaattttggaatgccacttttgccaaagtaatgatgttggtctaccctgaggagctgaaaccagttttgacccaagccaaacaaaagttcctgctgttgcttccaggcctggaaaccgtagaaatgatggaagaatccagcggcccgtactcagacggcacagaaaattctcagcttaatgtcaaaattagtgggatggaaagaaaatccaatggcaaaagggacagctttctggcacagaccaagaataagaaagagaatatgaaacctgctgcaaaacttaaactggaatcctcatccctgaaggtgaagggcgagatcttattagaggaagaaaagagcaccgatttcgtgttcatcccgccagaggggaaagacgcgaaggagagaattctcactgaccatcagaaggaggtgcttaagactaaacgctgtgacatccctgcaatgtataacaacctagatgtttctcaagacaccctgttcacccagtactcacaagaagagcccatggaaatccccacactgaccagaaaaccaaaggaagactctaaaatgatgattactgaggagcagatggactccgacatcgtgatcccccaggacgtgaccgaggactgtggcatggccgaacacctggaaaaatcttcgctgagcaacaacgaatgtggatcgctcgacaaaacctctcccgagatgtctaacagcaacaatgatgagaggaagaaggcccttatctcatctcgcaaaactagtactgaatgcgctagcagcacggagaattcattcgtggtaagttcttcgagcgtgagcaataccaccgttgcaggaacccccccctatcctacctctcgtagacagacgttcattacgcttgaaaagtttgatggctctgaaaataggccatttagcccctctccacttaataacatctcatccaccgtcacggtaaagaacaatcaggagaccatgataaagacagattttctgcccaaagccaaacagcgagaagggacgttttcaaaatccgatagtgagaagattgtgaatgggaccaagagaagtagccgccgcgctgggaaggcggaacagaccggaaataaacgatcaaaaccactcatgaggtcagagccggagaagaacactgaagagtccgtagagggcattgttgtgctggaaaataatcctcccggtctgcttaaccagacagaatgcgtgagcgacaatcaggtgcatttgagtgaaagtacaatggaacacgacaacaccaagttaaaagccgctacggtggagaatgcagtgctcctagagactaacaccgtcgaggagaagaacgtcgaaataaaccttgaatccaaagagaacaccccaccagtggtgatcagtgctgaccaaatggtcaacgaagactctcaggtacagatcacacccaatcagaaaaccctgaggcgctcctccaggaggagaagcgaagtcgtagagtccactacagagtctcaagataaggaaaattcccaccaaaaaaaggagcggcggaaagaggaggaaaaacctctgcagaagtctccgctccatattaaggacgatgtcttgcctaagcaaaagctgatcgcagaacaaacgctgcaggagaatctgatcgagaaaggcagcaacctccatgagaagacattgggcgaaacctccgccaatgctgaaactgagcaaaataagaaaaaagccgatcctgaaaatattaaatcagagggagacggtacgcaggacattgtagataaatctagcgaaaagctcgttcgagggaggacccggtaccagacccggagagcatctcaggggctgctgtccagtatcgagaatagcgagagcgacagctcggaagccaaagaagagggctctaggaagaagcgatcagggaagtggaagaataaatccaacgagagcgtggatattcaggatcaggaggaaaaggtagttaaacaagagtgtattaaagctgaaaatcagtctcatgactacaaagccacctcagaagaagatgtgtcgatcaaatcacctatatgtgaaaagcaggacgagagcaacactgttatttgtcaggattctactgtaacttcggacctgctgcaggtccccgatgacctgcctaacgtgtgcgaggagaagaacgagacctcgaagtacgccgaatactccttcactagccttccagtgccagagtctaacctccgcactcgcaatgccattaaacgtttgcacaagagagacagtttcgacaactgttccctgggcgagagctccaagattggtatctccgatatcagctccttgtccgaaaaaactttccagactctcgaatgtcagcacaagcggagcagaagggttaggcgctctaagggctgcgactgctgtggtgagaaatctcaacctcaagagaaatctcttattgggctgaagaacaccgagaacaatgatgtggaaatatctgagaccaagaaagccgatgtccaagcacccgtgtcgccatctgaaacgtctcaggctaacccatatagtgaaggtcagtttctggatgagcaccattcagtaaacttccacctgggactgaaggaggataatgatactattaatgatagtctcattgtctcagagacaaagtccaaagagaataccatgcaggaatccttgcccagtgggatagtgaactttcgagaggagatttgcgatatggacagctcggaagctatgagcctcgagtcgcaggaatcccccaacgagaatttcaagactgtgggcccttgtttaggtgactccaaaaatgtatcacaggagtctttggagaccaaggaggaaaagccagaggaaacccccaagatggagctgtccttggagaatgtgacagtggaaggtaatgcatgcaaagtgactgagtccaatctggaaaaggcaaagactatggagctgaacgtgggaaacgaggcctccttccacgggcaggagaggactaagactgggattagtgaagaggcggctatcgaggagaataaacgcaacgatgatagcgaggccgacaccgcaaagttgaacgctaaagaggtggccaccgaggaatttaactccgacatcagtctgtccgataacaccaccccagtgaagctcaacgcacagaccgagatctcagaacagacagccgcaggcgagttggacgggggcaacgatgtttcagatctgcatagtagcgaagagaccaataccaagatgaaaaacaacgaggaaatgatgattggggaggccatggcagaaacaggccacgatggtgagacagaaaacgaaggaatcactaccaagacgtcaaagcccgacgaggccgaaacaaacatgctgaccgcggagatggacaatttcgtttgtgataccgtggaaatgagtacagaagagggcattatagacgcaaacaagaccgagacaaacacggaatactctaaatccgaagaaaagctcgataacaaccagatggtcatggaaagcgacatcctgcaagaggaccaccacacttcgcagaaggttgaggaacccagccagtgcttagcgagcggaactgccatatcagagcttattatcgaagacaacaatgctagtcctcaaaaattgagagagctggatccatcgctcgtctcggcgaacgactcccctagtggaatgcagacgcggtgcgtgtggagtccactggctagtcctagtaccagtatcctgaaacggggacttaaaagaagccaagaagatgaaatcagctcccccgtcaataaggtgaggcgagtgtcattcgccgaccccatctatcaagctggcctcgctgacgatatcgatcgtcggtgttctatcgttcgctcccattccagtaattcatcgcctatagggaagtccgtgaaaaccagcccaaccacacagtcgaagatctccgagatggcaaaagagtcaatcccctgtccgaccgaaagcgtttacccccctcttgtgaactgtgtggctcctgtcgacatcattcttccgcagattacaagtaatatgtgggccagaggtctgggccagctgattagagccaaaaacattaaaacaattggggatctgtccactttaaccgcatccgaaattaagactctgcctatccgctcccctaaagtcagcaatgtcaagaaggcacttcgtatctaccacgaacagcaggtaaaaacgaggggcctagaggagattcctgtattcgacatttccgaaaagacagtcaacggcatcgaaaacaagagtctttcccccgatgaagagcgcctggtctccgacataatcgaccccgtcgccctggaaatcccattgagtaagaatcttttggcgcagatatccgccttggccttgcagcttgactcagaggatctccacaactattcaggatctcagttgtttgaaatgcatgagaagctgagctgcatggccaatagtgttatcaaaaacttgcagagcagatggaggagcccatcccacgaaaatagcatctag

SEQ ID NO: 17059 - DNA, 1026 bp, synthetic construct
  misc_feature 1..1026: note = Description of Artificial Sequence: Synthetic coding sequence
  source 1..1026: mol_type = other DNA
atgactgctcgtggacagagcccactggcccctctgctcgaaacactcgaagatccaagtgccagccatggagggcagactgacgcctacctcactcttacttctcggatgacaggggaggagggtaaggaggtaataactgaaatagagaagaagctccctcgcctgtacaaagttctgaaaactcacatttcttcccaaaattcggaactgagcagcgccgcgttacaggcgctaggattctgtttatacaaccctaagattacatcagagctgtcagaagccaacgcgcttgagctccttagcaagcttaatgatacaatcaagaatagcgataagaacgtcaggactagagccctgtgggtgatttccaagcagaccttcccgtccgaggtggtgggaaaaatggtctccagcatcattgattccctggagatcctgtttaataagggggagactcattctgccgtcgtggacttcgaagccctaaatgtgatcgtcagacttatcgagcaggcccctatccaaatgggggaggaggcagttcggtgggctaagcttgtgatcccccttgtcgtccatagtgctcagaaggtacacttgaggggggctacagctctggagatggggatgcccctgctgctgcaaaaacagcaggaaattgcgagcataacagaacaattgatgaccaccaccctccatcggtccgggagttttatcaattcacttctgcagctagaggagcttggattccgcagtggcgctcccatgattaagaaaattgcattcatcgcttggaagagcctcatcgataattttgccctcaatcccgacatactatgtagcgcaaaaaggcttaagcttctaatgcagcccctttcatccattcatgtaaggacggagacccttgcgttaactaagctagaggtctggtggtacctgctgatgcgcctgggcccccatctcccggcaaactttgagcaggtcctgccgccacggaccgaacctcgagaactaccagagtag

SEQ ID NO: 17060 - DNA, 7419 bp, synthetic construct
  misc_feature 1..7419: note = Description of Artificial Sequence: Synthetic coding sequence
  source 1..7419: mol_type = other DNA
atgaccgccagggggcagagtccactagcgccattgctcgagaccctggaagacccctcggcttcccatggcggccagacggatgcctatctgaccctaacttcccggatgacaggagaagagggaaaagaggttattaccgagattgaaaagaagctccccaggctgtataaggtgctgaagacacacatcagttcacaaaactcagagctgtcaagcgcagcactacaggctctgggcttctgtttgtataatcccaagattacctccgaattgagcgaagctaatgccctcgagcttttatccaaactgaatgacacaatcaagaatagtgataaaaacgttcgcacgcgcgcgttgtgggtgatatctaaacagacattccctagtgaagtggtgggcaaaatggtcagttccatcattgactctctggagatcctgttcaacaaaggagaaacccacagcgcggtagtggattttgaagcgcttaatgtcatagtgagattgattgaacaggcccctatccagatgggtgaggaagctgtgcgatgggccaaactcgtgatccccttggtcgttcactccgcccagaaggtgcacctacggggcgccacggccctcgagatgggcatgcctctgctgcttcagaagcagcaggagatcgcaagcataactgaacagctgatgactacaaaattgatttcagaactccagaagctcttcatgagcaaaaatgagacctacgtactgaaactgtggcccctgttcgtgaagctgctgggccgaactctgcataggagtgggagcttcatcaactcactgctgcagctggaggagctcgggtttcggtctggcgcgcccatgattaagaaaatcgctttcatcgcgtggaaatctctgattgataacttcgctttgaatcctgatattctttgttcagcaaagcgcctgaagctcctcatgcaacctctatcctctatccacgtccgaacagaaactctcgcactcaccaagctggaggtgtggtggtaccttctgatgcgactgggccctcacctgccagcaaatttcgaacaggtgtgtgtccctcttattcaaagtacaatttcgatagactcgaacgccagtccacaaggcaactcatgccatgtggccacatcgcccggcctcaaccccatgacccccgttcataaaggcgcctcaagtccgtacggcgcaccgggcacacctcggatgaatttatcctcaaatctcgggggcatggcaacaataccaagtatccagctcctgggccttgaaatgctgctgcatttcctgttaggccctgaggcactgagctttgccaagcagaacaagctagtactttcccttgagccgctagaacatccgctgattagttccccttctttctttagcaagcacgccaatacccttatcaccgctgtgcatgatagctttgtagccgttgggaaggacgctccagatgtggtcgtctccgcaatctggaaggagctaatcagtctcgtgaaaagcgtcactgagtccggaaacaaaaaggagaaacctggcagtgaagtgcttaccttgctgctcaaatctcttgaaagcatcgtgaaatccgaggtgttccctgtgagcaagacgctcgtactcatggagattaccatcaaggggctcccccagaaagttcttggatcgccggcttatcaggtagccaacatggacattctcaacggtaccccagccttgttcctgatacagctgatcttcaacaactttctcgaatgcggagtgtccgacgaaagattttttcttagtctggagagtctcgtcggctgtgtgctgtcaggcccgacctctcccctggcgttcagtgactccgtgctgaacgtcattaatcagaacgctaagcaattagaaaacaaggagcacctatggaaaatgtggtccgttattgtgacgcctctgactgagttgatcaatcagaccaacgaagtcaaccagggtgacgcactcgaacataatttcagtgccatttatggagctctgacactgcccgttaaccacatcttctcagaacagaggttccctgtcgcaactatgaaaacgttgctgagaacttggagtgaactctatcgggcttttgctcgatgcgccgctctagttgccactgcagaggagaacctctgttgcgaggaactatcctccaagataatgagctcgctggaggacgagggcttctctaatttactttttgtggatagaatcatctatattatcaccgtaatggtcgactgtatagactttagcccgtacaacatcaaataccagcctaaagtcaaaagcccgcaacgtccctccgattggagcaaaaagaaaaacgagccgctcggaaagctgaccagcctgttcaagctgattgtgaaggtcatatactcctttcacaccctaagtttcaaagaggctcacagcgatacgctgttcactatcgggaatagcattacaggcatcatttcaagcgttctaggtcatatctcattaccatcaatgattcggaaaatcttcgcaactctgactcggccactggcactattttacgagaatagcaaacttgacgaggtaccaaaagtttactcctgcttgaacaataagcttgagaagctgctgggtgaaattattgcatgccttcaattttcatacaccgggacatacgactccgagctgcttgaacagctgtcccctttgttatgcataatcttcttgcataaaaacaagcagataaggaagcagagcgcccagttttggaacgcaacttttgccaaagtgatgatgctggtttatccagaggaactaaaacccgtactgacccaagccaagcagaagtttttgctgttgctgcctggtctggaaaccgtggagatgatggaggagtcgtcgggaccttattcggacgggacagagaactcccaactcaacgtgaagatttccgggatggagcgtaaatccaacggtaagagagactccttccttgctcagactaagaataagaaagaaaacatgaagcctgccgcaaagttgaagctggaatcttccagcctgaaagtcaaaggtgagatcttgctcgaggaagagaagagcacagatttcgtgttcatccccccagagggcaaggacgccaaggagcgcatcttgaccgaccaccagaaagaggtgctgaagaccaagcgatgcgatatccctgccatgtataacaaccttgacgttagccaggacacgctattcacccagtattcccaggaggagcccatggagataccaacgctcacgaggaagcctaaagaagacagcaaaatgatgattacggaggaacagatggattcggacattgttatccctcaggatgtaactgaagattgcggaatggctgaacatctggagaaaagcagcttgagtaacaacgagtgtggctctctcgacaaaacgagccctgaaatgtctaacagtaacaacgacgagcgaaagaaggcccttatctccagcaggaaaacatccaccgaatgtgccagttcgacggaaaactcttttgtggtgtcttcctccagcgtaagcaacactaccgttgccggaacacctccttatcccacgtccagacggcagacattcatcactttagagaaattcgacgggtctgagaaccgcccatttagcccgtctcccctgaacaatatctcaagtaccgtcaccgtgaaaaataaccaggaaactatgatcaaaactgatttcttacccaaggccaagcagagagagggaacgttctccaagtctgatagcgagaagattgtcaatggaactaagaggtcttcacggcgggcagggaaagcagagcagactgggaataagcgtagcaaacccctcatgcggtccgaacccgaaaagaatactgaagagtcagtggagggcatcgttgtcctagagaataatccgccgggcctccttaaccagactgagtgcgtgtccgacaaccaggtgcatctgtcggagagcactatggaacatgataacaccaagcttaaagcagctaccgttgaaaacgccgtcctgctcgagactaatacggtggaagagaaaaatgtggaaatcaatctagaatctaaggaaaacactccaccggtagtcatcagcgcggaccagatggtaaacgaagacagtcaagttcaaatcactccaaaccagaagacactccggaggtcgtccagacgtcgctccgaggtagtggagtccaccacagaatcgcaggacaaagagaatagccaccagaaaaaggagcgtcggaaagaagaagaaaaacccctgcagaaaagtccacttcatataaaagacgatgttttgcctaagcagaagctgattgctgaacagactctacaggagaatttaatcgagaaggggtcgaaccttcacgaaaagacacttggcgagacgagtgctaatgccgagacagagcagaacaagaagaaggcggatccagagaatataaagagcgagggggatggcacacaggacatcgtagacaagagtagtgaaaagttagtgagggggcggacccgataccagacccggcgggcctctcagggactgctgagctctatcgagaattctgaatccgactctagcgaggccaaggaggaaggctcccggaagaagagatctgggaagtggaaaaacaagtcaaatgagagtgtggatatccaagaccaggaggagaaggtcgtgaagcaggaatgtatcaaggcggaaaatcagagccacgactacaaagctactagcgaagaagatgtgtcaattaagtcgccaatctgtgagaaacaggacgaatcaaacacggtgatctgccaagattcaaccgttaccagcgacctcctgcaggtgcccgacgatttaccaaatgtatgcgaagagaaaaacgaaacttctaaatatgccgagtattcattcacatcactccccgtgccggagtcaaaccttcggacccggaacgctataaagcggctgcataagagagatagttttgataattgctcacttggcgaaagttctaaaatcgggatctccgatatttctagtctgagcgagaaaaccttccaaaccctggaatgccagcacaagaggtcccggagagtgcgccggagcaagggctgcgattgttgcggtgagaaatcccagccacaggaaaaatcactcatcggcctgaagaacaccgagaacaacgacgtcgaaatctcagagactaaaaaagctgacgtgcaggctccggtatcgccaagcgagacttcccaggccaatccgtatagcgaaggtcagttcctggacgagcaccactctgtaaattttcacctcggcctcaaggaggacaacgatacaattaatgattctctgattgtctccgaaactaagtcaaaagaaaacactatgcaggagtccctgccctctggtattgtaaatttcagggaagagatctgcgatatggactcatcagaggccatgagcctcgaaagtcaggaatcgcctaatgaaaattttaaaactgtagggccttgcctaggggattctaaaaatgtaagccaggagagcctcgaaactaaggaagagaagcccgaggaaactccaaaaatggagctcagcttggaaaacgtgaccgtggaaggcaatgcttgtaaggtcaccgaatccaaccttgaaaaggccaagactatggaattgaatgtgggcaacgaggcctcattccacggccaggaacgtaccaaaaccggaattagcgaggaagcagctattgaggagaataaacgtaacgacgactccgaagccgacactgctaaactgaatgctaaggaggtggcgacggaggaatttaactctgacatcagcctgtctgataacaccactcccgtaaaactgaacgcacagaccgagatctctgagcagacggcagcaggagaattagacggagggaacgacgtgagcgacctgcacagctccgaggaaaccaacaccaaaatgaagaataatgaggaaatgatgataggagaagcaatggcagaaacaggacatgacggtgagacagaaaatgagggcatcactacaaagacaagtaagccagatgaggccgaaacaaacatgctgactgctgagatggataactttgtctgtgataccgtggaaatgagcactgaggagggcatcattgacgccaacaagacggaaactaacaccgagtacagtaaatccgaggaaaagctggacaacaaccagatggtcatggagtccgatatcctgcaagaagaccaccacacctcgcaaaaggtagaggaaccttcacagtgtctggcgtctggaacagccatctccgaactgataatcgaggacaacaacgcgtctccacagaagcttcgggagctggaccccagtctggttagcgccaatgactcaccatccggtatgcagaccagatgcgtttggagtccactggcctctccctccaccagcatcctgaagaggggcctgaagaggtcccaggaagacgaaatctcctcacctgtgaacaaagttaggagggtctctttcgctgaccctatctatcaggcaggtctagctgatgacatagaccgccgatgttccattgttcgctctcactccagcaactcctcaccaattggcaaatcagtgaaaacatcgcctactacacaaagcaaacataacaccacctcagctaaaggtttcttgtctcccggaagccggagccctaagttcaagagtagcaagaagtgtcttattagcgaaatggctaaggagtccattccatgtcctaccgagtctgtgtatcctcccttagtcaactgtgttgctcccgtcgatattatcttacctcagatcacctccaacatgtgggcaagggggttaggccagttgatccgggcgaaaaatataaagacaattggtgaccttagcacgttaacagccagcgagattaagacattaccaattaggagcccgaaggtgtccaacgtcaagaaggcactgcggatatatcacgagcaacaggtgaaaacgcgaggcctggaggaaattcccgtattcgacatcagcgagaagacagtgaacgggattgagaacaaaagcctttccccggacgaggagcggctggtctctgacatcattgatcccgtggccctggaaatcccactgtccaagaatctattagcacagataagcgcactggctcttcaattggactcagaggatctccataactactctggaagtcagctgtttgaaatgcacgaaaagctttcttgtatggctaacagtgtgattaaaaatctgcagtctcggtggcggagcccatcacatgaaaattctatctag

SEQ ID NO: 17061 - DNA, 7341 bp, synthetic construct
  misc_feature 1..7341: note = Description of Artificial Sequence: Synthetic coding sequence
  source 1..7341: mol_type = other DNA
atgacggcgcgcggtcagagcccattggccccacttttggagaccctcgaagacccgagcgcttcccatggcggacagaccgatgcctatctcaccctgacatcccgtatgacgggagaggaaggcaaggaagtgatcacggaaattgagaagaaattacctcgactatacaaggtgcttaagactcatatttctagtcagaactcagagctgtctagtgcagccttgcaagccctcgggttctgtctctataatcccaagatcaccagcgaactatccgaggctaatgcactagaactgttgtccaagctcaatgataccatcaagaacagcgataagaatgtccggacgcgggccctctgggtcatttcaaagcagacctttccctcagaagtagtcggaaaaatggtatcaagtatcatagattcactggagatactcttcaataaaggcgaaacccattccgccgtggtagattttgaggccttgaacgtgatcgttaggcttatagagcaggcacccattcagatgggcgaagaagcagttcgctgggccaaactggtgattccgctggtggtgcacagcgcccagaaggtacacctgaggggggctaccgctctcgagatggggatgcctttgttgctgcaaaagcaacaggagatcgcctcaatcaccgagcagctgatgaccacaaaactgataagcgaactccagaagttgtttatgagtaaaaatgagacctatgttttgaagttgtggccactcttcgtcaagctgctgggcagaactctgcaccgtagcgggtcttttataaactcattgttacaactggaggagctgggttttcggtcgggggcccccatgattaagaaaatcgcatttatcgcgtggaagtctctgattgataattttgccctgaaccccgatatcctgtgtagcgcgaaaaggctcaaactcctgatgcagccccttagctccatacacgtgcgtacagagaccttagcgctcacaaaactggaagtttggtggtacctgttgatgaggctaggcccacatcttcctgccaattttgaacaggtgtgcgtgcctttgatccagagtacaatctccattgatagcaacgcttcccctcagggtaactcatgtcacgtggccacatcacccggattaaatccaatgactcccgtccacaagggggcctcttccccttatggagccccaggtactcctaggatgaacctaagttccaacctgggcggaatggctactatcccaagcatacagctgcttgggctagagatgttattgcactttcttctgggacctgaggccctctcctttgccaaacagaacaagctggtgctgtctttggagcctttggagcatccactcatctcttccccttccttcttttccaagcatgcaaacactcttatcacagcggtgcacgactctttcgttgccgtggggaaagatgccccagacgtagtagtatcagccatctggaaagagttgatatcactggttaaaagcgtcactgaatcggggaacaaaaaggagaagcccggatctgaggtgctcaccctgctgctgaagtcattggagagcatcgtaaaaagcgaggtctttcccgtgtcgaagacgttagtgctgatggagatcaccatcaaagggctgccacagaaagtcctgggcagccctgcataccaagttgcaaatatggatatcttgaatggaacccccgccctctttctgattcaactcatcttcaacaactttctagaatgtggcgtgtccgacgagcggtttttcctgagtctggagtccttagtcggctgtgtgctgtctggccctacctcgccgcttgctttctctgacagcgtgcttaacgtgatcaatcaaaatgccaagcagctcgaaaataaggagcacctctggaagatgtggagtgtaattgtgacaccactgacagagctcatcaatcagacaaatgaagttaaccagggggatgccttggaacacaattttagcgcaatctatggcgcattaactctacctgtgaaccatatttttagtgaacaaaggtttcccgtcgctaccatgaaaactttgttacgaacgtggagcgaactgtaccgagcattcgcgaggtgtgctgccctggtggcaaccgctgaggagaacctttgctgcgaagagctgtcaagcaagatcatgagcagcctggaagatgaaggtttctccaacctgctttttgtggacagaattatttacataattacagtaatggtggattgtatcgatttttctccctataacattaaataccagcctaaagtaaagtctccacagagaccgagcgattggagcaagaaaaaaaatgaacctctcggcaagctgacgtctcttttcaaactgattgtgaaggtgatatacagctttcacaccttatctttcaaagaagctcactcagacacactgttcaccatcggaaactcaataaccgggatcatttcgtccgttctgggccatattagtctgccttctatgatcaggaagatcttcgctaccttgacgcgacctctggcccttttttacgaaaatagcaagttggacgaggtccctaaggtgtactcctgcttgaataacaagttagagaagctactcggcgaaatcatcgcctgcttgcagttttcgtacacggggacatatgattccgagctgcttgaacagctcagcccacttctctgcattatttttttgcataagaacaagcagattcgcaagcagtccgcccagttttggaacgccacatttgccaaggttatgatgcttgtgtatccagaagagctaaagccagtgcttacgcaggccaagcaaaagtttttactcttgctcccgggcttagagaccgtcgagatgatggaagagtcaagcggcccttattctgatggtacagagaattcccagctgaatgtgaagatcagcggcatggaaagaaaatccaacggaaaaagagactcgttcctggcccagacaaagaacaaaaaagagaacatgaagccggcggctaagctgaagctcgaatcctcgtctctgaaggtgaagggcgaaattctcctggaagaggaaaaatctaccgactttgtgttcattcccccagaaggtaaggacgccaaggagaggatccttactgatcatcaaaaggaggtgctgaagacaaaaagatgtgatatccccgcaatgtataacaacctggacgtctctcaggacacattgttcacacagtatagtcaagaagagcctatggagattcctacactaactagaaaaccaaaagaggacagcaagatgatgattactgaagagcagatggactctgatatcgtcattcctcaggacgttaccgaggactgcgggatggctgaacatctggagaagagctcactttccaataacgaatgtggaagtctcgacaagacatcccccgaaatgtctaatagcaacaatgacgagaggaagaaagccctgatatcatctaggaaaacctcaaccgaatgcgcctcctctacagaaaatagctttgtcgttagcagttccagcgtctcaaatacgactgtagcgggaacgcctccctaccctacttcacgtcggcaaacttttattaccttagagaagttcgacgggagcgaaaatcgaccatttagcccttccccgctgaacaatatctcatctacagtgaccgtgaaaaacaaccaggaaacaatgattaagaccgattttctacccaaggccaaacagcgagaagggactttctcaaaatctgactcggagaaaatagtcaatggaaccaagaggagttcccggcgggccgggaaggccgagcagacaggtaacaagcgatccaaacctttgatgcgcagcgaaccagaaaagaatactgaagagagcgtggaaggaatcgtggtgttagaaaacaatccccccgggttgctgaatcaaaccgagtgcgttagcgataatcaagtgcatctcagtgaaagcacaatggaacacgacaacacaaagctgaaggccgccactgtggagaatgctgtactgctggaaacaaatactgtggaagagaagaatgtcgagatcaacctcgaatccaaggagaataccccgccggtcgtgatttcagccgatcaaatggtcaacgaagacagtcaggttcagatcaccccgaatcagaagactctgaggagatctagtaggagaagatctgaggtggtggagagtactacagaatctcaggataaggagaattctcaccaaaaaaaagaacgccgaaaagaggaggaaaagcctctgcaaaagtccccactgcacattaaggacgatgtgctcccaaagcagaaattgatcgccgaacagactttgcaggagaatttaatagagaagggcagcaacctgcacgaaaaaaccctcggagaaacttctgcaaatgctgagactgagcagaacaagaagaaggccgatcccgaaaatatcaaatccgaaggggacggcacacaagacatagttgacaagagttcggagaagctcgtgcgcgggagaacacgctatcagacccggagagcttcccagggcctgctgtcctccatcgaaaactccgaatcagattcgtctgaggccaaagaggaggggagtcgtaaaaaacgaagcggaaagtggaagaacaagtccaacgagtcagttgacatccaagatcaggaggagaaagtggtgaagcaggagtgtatcaaggctgagaaccagagccatgattacaaagcaacgtccgaggaagatgtgtccatcaagagccccatctgtgagaagcaggatgagtccaatacagttatttgccaggactccactgtgacttctgaccttctgcaggtcccagatgacttgccgaacgtgtgcgaggagaaaaacgagacatcaaaatatgcagaatactcttttacgagtctgcctgtgcctgagtccaatctgaggactagaaacgccatcaagcgcctgcacaagcgagactcatttgataactgctcacttggcgaatccagcaagattggcatatctgatatcagttcattgtctgaaaaaacatttcagacacttgagtgtcagcataaacgatcaaggcgggtgcggagatccaaaggctgtgactgttgcggtgaaaaatcccagccgcaggaaaaatccttaatcggtttaaagaataccgagaacaacgatgtggagatcagcgagaccaagaaggcagatgtccaggcccccgtcagtccatcagagactagccaggctaacccgtactcggagggccaatttctcgatgagcaccattcagtgaacttccacctaggtctaaaggaggataatgacactatcaatgactcacttatcgttagcgagactaagtcaaaggaaaataccatgcaggagagtctgccatccggtattgtcaactttagagaagagatctgcgatatggattccagcgaagcaatgtcactggaaagccaggaaagtcctaatgaaaactttaagaccgtggggccttgtttgggggacagtaaaaatgtatcgcaggagtcactggagaccaaagaggagaagccagaagaaactccaaagatggagctctctttagagaacgtcactgtggaggggaacgcatgcaaagtgacagaaagcaaccttgagaaagccaagactatggaactcaatgtgggcaacgaggcctctttccatggccaggaaagaactaaaacaggcattagcgaagaagcagccatcgaggagaacaaacggaatgatgattcagaggccgatacagccaagctgaacgccaaagaagtagctacagaagaattcaactctgatatcagtctctctgacaacaccacacctgtgaaactgaacgcccagaccgaaatatccgaacagaccgccgccggcgaattggacggcggaaacgacgtctccgacctgcactctagcgaggagacaaacacaaaaatgaagaataacgaggagatgatgataggcgaagcaatggccgagaccgggcacgacggcgagaccgaaaatgaggggatcaccaccaaaacttctaaaccagatgaagcagagactaacatgttgacagccgagatggataacttcgtgtgcgacacagtcgagatgtcaacggaggagggtattattgatgccaataagacagaaaccaacactgagtactccaaatccgaagagaaactcgacaataaccagatggtaatggaatctgacatccttcaggaggaccatcacacgagtcagaaggtagaggagcctagccagtgtctggcctcaggcacagccatctccgagctgatcatcgaggacaataatgcttccccacagaaactgcgggagctggatccctcgctggtatctgccaacgactctccgtcaggaatgcagacaaggtgcgtctggtctcccctcgcgtccccctcaactagtatactgaaacgaggacttaagaggagccaggaggatgagattagttctcccgtcaacaaggtacgacgggtcagcttcgcggacccaatttaccaggccgggctggccgatgatattgaccggaggtgctcaattgtccggagccattcttctaacagctctcccattgggaagtctgtcaagacttctcccactactcagagcaaaattagcgagatggctaaggaatcgatcccttgccccaccgaaagtgtctatccacctttggtgaattgcgtggccccagtggacatcatactgccccagataaccagtaacatgtgggctagaggtctgggccagctcatcagggcgaagaacataaaaaccataggcgacttgagcacccttaccgcttcagaaatcaagacactgcccatcaggtcacctaaggtctctaacgtcaagaaggcgttgagaatctaccacgagcagcaggtgaagacaagagggcttgaagaaattcctgtgtttgatatcagcgagaagacagtaaacggtattgaaaacaaatctctgagccccgacgaagaacgccttgtgtctgatataattgaccccgtggccttggaaatccctctgagcaaaaaccttctggctcagattagcgccctggcccttcagttagactccgaagatctgcataactatagcggctcccagctgttcgaaatgcacgagaagctctcctgtatggcgaacagtgtgatcaagaatttgcagtcacggtggcgttcgcccagtcatgaaaacagcatctag

SEQ ID NO: 17062 - DNA, 555 bp, synthetic construct
  misc_feature 1..555: note = Description of Artificial Sequence: Synthetic coding sequence
  source 1..555: mol_type = other DNA
atgagagagtacaaattggttgtgttgggatctggaggagtcgggaagtccgcgcttaccgttcagtttgtgcaggggatttttgtcgaaaagtacgaccccaccatcgaggacagctaccggaaacaagtcgaagtggattgccagcagtgcatgctcgagatcttggacactgcaggaacagaacagttcaccgctatgagggacttatatatgaagaatgggcaggggttcgccctggtttattccattaccgcacaatccacctttaatgacctgcaggacttgagagagcaaattctgcgggtgaaggacactgaagacgtgcctatgatactggttgggaacaaatgcgacctggaggatgagcgggtggtcggaaaagaacagggacaaaacctggctcgccagtggtgcaattgcgcctttctggaatcaagcgctaaaagcaaaattaacgtaaacgagatcttttatgatctggttcggcagattaacaggaaaacacctgttgagaagaagaaacctaagaagaaaagctgtcttctcctctag

SEQ ID NO: 17063 - DNA, 555 bp, synthetic construct
  misc_feature 1..555: note = Description of Artificial Sequence: Synthetic coding sequence
  source 1..555: mol_type = other DNA
atgcgggaatacaaattggtcgtgcttggctctgggggagtcggcaagtcagcccttacggtgcaatttgttcaaggaatcttcgttgaaaagtacgatcccaccatcgaggacagctaccggaagcaggtggaagtggactgccagcaatgcatgctggaaatcctcgataccgccgggaccgagcagttcaccgctatgcgcgatctttatatgaaaaatggacagggctttgcccttgtatactcaattaccgcacagtccaccttcaacgatctgcaggacctccgggaacagatcctgagagtcaaagacactgaggatgtacctatgatcctcgtgggtaacaagtgtgatcttgaggatgagcgggtcgtggggaaggaacagggtcagaatctggcccggcaatggtgtaattgcgcttttctagagtcatctgcaaagagcaagatcaacgtcaatgagatcttttacgacctggtgcggcaaatcaacagaaaaacgccggttgaaaaaaagaagccaaagaaaaagtcgtgccttctgctttag

SEQ ID NO: 17064 - DNA, 390 bp, synthetic construct
  misc_feature 1..390: note = Description of Artificial Sequence: Synthetic coding sequence
  source 1..390: mol_type = other DNA
atgcgggagtacaagcttgtagttctcggttccggcggcgtgggtaaatctgcacttactgtgcaatttgtgcaaggcatttttgtggagaagtatgaccctaccatcgaagattcgtatagaaaacaagtagaagttgactgtcagcaatgtatgctcgaaatcttggacactgctggaacagaacagtttactgcaatgcgggacctgtatatgaaaaatggccaaggttttgccttggtctatagcattacggcccagagtactttcaacgatctgcaggatttaagggaacaaattctcagagtgaaggacacagaggatgtgccaatgattctggttggtaacaagtgtgacttggaagacgaacgggtggtgggtaaggagtag

SEQ ID NO: 17065 - DNA, 555 bp, synthetic construct
  misc_feature 1..555: note = Description of Artificial Sequence: Synthetic coding sequence
  source 1..555: mol_type = other DNA
atgcgtgagtataagctggttgtgcttggttccgggggtgttggaaagagcgcactgactgtacagtttgtgcaagggatatttgtcgagaaatatgacccaacaatcgaggactcctacaggaagcaggtggaggttgactgccagcagtgtatgctggaaattcttgacaccgcgggtacagagcagtttaccgccatgcgcgacctatacatgaaaaacggacagggcttcgctctcgtttactccataacagcgcaaagcacatttaacgacctacaagacctgagggagcagatacttcgagtgaaggacacagaggatgtgccaatgatactcgtggggaataagtgcgatctcgaagatgagagggtggttggtaaggaacaagggcagaatctcgcgcgccagtggtgcaactgtgccttcctagaaagttccgctaaatctaaaataaacgttaatgaaatattctacgaccttgtacgacaaataaaccgcaaaacccccgttgaaaaaaagaaaccaaagaagaagtcttgtttgctcctgtag

SEQ ID NO: 17066 - DNA, 555 bp, synthetic construct
  misc_feature 1..555: note = Description of Artificial Sequence: Synthetic coding sequence
  source 1..555: mol_type = other DNA
atgcgcgaatacaaattagttgttctcggctccggaggtgtgggaaagtccgccctcacagtgcagtttgtgcagggaatcttcgtagagaaatatgaccctacaattgaagactcttacagaaaacaggttgaggtggattgccagcagtgcatgttggaaatcctggacacggccggcaccgaacagtttactgcaatgagagacctatacatgaaaaacgggcaaggctttgccctggtatactctatcacggcccagtcaacattcaacgacttgcaggatctaagggaacagatcctgcgagtcaaagacacagaggatgtcccaatgatccttgtgggaaacaaatgtgacctcgaagacgaacgagtcgtagggaaggagcagggacagaatttggcgcggcaatggtgcaattgtgctttcctagaatctagcgccaagtcaaaaatcaacgtgaacgagatcttttatgatctggtgaggcagattaatcgtaagaccccagtagaaaaaaagaaaccaaaaaagaaatcatgtctgctactctag

SEQ ID NO: 17067 - DNA, 1380 bp, synthetic construct
  misc_feature 1..1380: note = Description of Artificial Sequence: Synthetic coding sequence
  source 1..1380: mol_type = other DNA
atgagggcccagatcgaggtgattccgtgcaaaatttgtggggataaatcaagcggaatccattacggggtgataacctgcgagggctgcaagggtttcttccggaggagtcagcagaataacgctagttattcttgccccagacagaggaattgtttgattgatcgaacaaacagaaaccgatgccagcattgccgtctgcaaaagtgcctggcgcttgggatgtccagagatgccgtgaaattcgggcgtatgagcaaaaagcagcgcgattccctgtatgccgaggtccagaaacatcagcaacgcctccaagaacagagacagcagcagtctggagaggctgaagccctcgcaagagtttacagctctagcatttctaacggactgagcaatcttaacaacgaaacctctggcacctatgctaacgggcatgtgattgacctgccgaagtccgagggctactacaacgtagacagtggccagccatccccagatcagtcaggcttggacatgaccgggatcaaacagattaagcaggaacctatttatgacctaacatctgttcctaacctctttacctatagtagtttcaataacggacaactcgctccaggcattactatgactgagatcgacagaattgcgcagaatatcatcaagtcccacctggagacctgccagtacacaatggaggagttacaccagttggcttggcagacacatacctacgaagaaatcaaggcctatcagtctaagtcccgtgaagctctgtggcagcagtgcgcaattcaaatcacccacgctattcagtacgtggtagaattcgccaaacgaattaccggcttcatggagctctgccagaacgaccagattcttctgctcaagtctgggtgcctggaggtagtactggtcagaatgtgtcgcgcctttaaccccctgaacaatacagtgcttttcgaagggaagtacggtggcatgcagatgttcaaggccctgggatcggatgacctggtgaatgaagctttcgatttcgcaaagaacctgtgtagcctccagctgaccgaggaagagattgcccttttttcttccgccgtgctcatctcccccgatcgcgcttggctaattgaaccaaggaaggtacagaagctccaggagaaaatctatttcgcactgcagcacgtgatccagaagaaccatctcgatgacgaaactcttgctaagctgatcgccaagattccaacaattactgcagtgtgcaatctgcacggggagaaactgcaagtctttaaacagtctcatcccgagatagtgaatacactcttcccccctctatataaggaacttttcaatcctgattgtgcgactgggtgcaagtag

SEQ ID NO: 17068 - DNA, 1413 bp, synthetic construct
  misc_feature 1..1413: note = Description of Artificial Sequence: Synthetic coding sequence
  source 1..1413: mol_type = other DNA
atgtgcgagaaccagttaaaaacaaaagcagatgccacagcgcagatcgaagtcatcccatgcaagatttgcggagataagagcagcggcatccactatggtgtcattacatgcgagggctgcaaagggtttttccggcggtctcagcagaataatgcaagctatagctgccctaggcagcgtaattgtctgattgaccgaactaataggaatcggtgccaacactgtcgtctgcagaaatgcctggccctgggcatgagccgcgatgccgtgaagtttgggaggatgagtaagaagcagcgcgattccctttacgccgaggtgcagaagcatcagcagcgtctacaagaacagagacagcagcagagcggggaagctgaggcactcgctagagtatactcgtcaagcatttcaaacggcctctccaacttgaataatgaaacgagcggtacttacgccaatggacatgtgattgatttacccaagtcagaaggttattacaacgtggattccggccagcccagccccgatcagtccgggctagatatgactgggattaaacagatcaaacaggaaccaatctacgacctcacctccgtccctaaccttttcacttactccagttttaataatggtcagctggcgccaggaatcactatgactgagatcgatagaattgcccaaaatataattaagtcccatctcgagacttgccagtatactatggaggaactgcaccagctggcctggcaaacgcacacctacgaggagataaaggcttaccagtccaaaagcagagaagcgctctggcagcagtgcgccatccagatcacccacgccattcagtacgtggtcgagttcgcaaaacgaataactggcttcatggagctctgccagaatgatcagatcctactgctcaaaagcgggtgtctggaagttgttctggttcgaatgtgccgggccttcaatcctctgaacaatactgttctgttcgaaggtaaatatggcggaatgcaaatgttcaaagctctgggcagtgacgatcttgttaacgaagcgtttgattttgctaaaaatctgtgctccttacagctgacagaggaagagatcgccttgttctctagcgctgtgcttatcagccccgatagagcatggctcatcgagcctaggaaggttcagaagttgcaggaaaagatctactttgcgcttcaacacgtgatccagaagaatcatctggacgatgagaccttagcaaaactaatcgctaagattccgaccataactgctgtctgcaatctccacggcgaaaagctgcaagtatttaagcagtctcatcctgagatcgtgaacaccttgtttccacccctttataaggagctctttaatcctgactgcgcaaccgggtgtaaatag

SEQ ID NO: 17069 - DNA, 813 bp, synthetic construct
  misc_feature 1..813: note = Description of Artificial Sequence: Synthetic coding sequence
  source 1..813: mol_type = other DNA
atgggggaggccgaggccccatcctttgagatgacatggagtagcacaacgagttccggatattgcagccaggaggactcagattctgagctcgaacagtatttcactgctaggactagtctggcccggcgtcccaggcgtgatcaggatgagcccgtggaatgggagacccctgatctttcccaggcggagatcgaacagaaaatcaaagaatacaatgcccagatcaactcgaatctctttatgtctctgaacaaagacggctcatacaccggtttcatcaaagtgcaactgaagctggtgcgccccgtgtctgtgcccagctccaagaaaccaccctctttgcaggacgctcgtagggggccaggtcggggaacatccgtcaggcgccgtaccagtttctatctgcctaaagacgctgtcaaacacctgcacgttttaagccggacaagagcccgtgaggtgattgaagctctcctgcgtaagttcctcgtcgtggacgatcctcgcaagttcgccctctttgagagggcagagcgtcacggccaagtgtacctgcgaaaacttctggatgacgagcagcctcttaggctgcgtctcctggctggaccgtcggacaaagcactgagctttgtgctcaaagaaaatgactccggcgaggtgaattgggatgctttttctatgcccgagctgcataacttcttgagaattttacaaagagaggaggaagagcacctacgccagatattacagaaatactcgtattgtcggcaaaagattcaagaagcccttcatgcctgcccactgggatag

SEQ ID NO: 17070 - DNA, 1035 bp, synthetic construct
  misc_feature 1..1035: note = Description of Artificial Sequence: Synthetic coding sequence
  source 1..1035: mol_type = other DNA
atgagcggggagccagagctaatagaactgagagagctggccccagcaggaagggccggcaaaggtaggacccggcttgaaagagctaatgcactgcgcattgctcgtgggacagcgtgcaatcctacacggcaactcgtgcctggaagaggtcatcgcttccagcccgccggtccggccacccatacttggtgtgacttgtgtggtgactttatatggggggtcgtccggaaagggctccaatgcgccagactgagcgcagattgtaaattcacatgccattatcgttgtcgagccctggtgtgcctggactgctgtggtccacgcgatctgggatgggagccagctgtggaacgggatactaatgtagatgagcctgtggagtgggaaacgccggatttgtcgcaggctgagatagagcagaagatcaaggagtacaacgcccagattaacagtaatctgtttatgagcttaaataaagacggcagctataccgggtttatcaaggttcagctcaaacttgtgcgacccgtgtctgtgccctccagcaaaaagcccccaagcttacaagatgctagacgaggtccagggcggggtaccagcgtgagaaggcggacaagcttttacttacctaaggatgctgtcaaacatctgcatgttttaagcagaacacgagctcgagaagtgattgaagccctgctcagaaagttcctggtcgtcgatgaccccaggaagttcgccctgtttgagcgagccgaaaggcatgggcaggtgtatctgcggaagcttctcgatgatgaacagcctctcagactgaggttattagcaggtccctctgataaggccctttccttcgtgttgaaagagaacgatagtggggaggttaattgggacgcattctcaatgcccgagctccataactttctgaggatacttcagagagaagaagaagagcacctccgacaaatccttcaaaagtattcgtattgcagacagaaaatccaggaagcacttcatgcctgcccactcggctag

SEQ ID NO: 17071 - DNA, 1023 bp, synthetic construct
  misc_feature 1..1023: note = Description of Artificial Sequence: Synthetic coding sequence
  source 1..1023: mol_type = other DNA
atgagcggcgagcctgagctgatcgaactgagagagctagcacctgccggcagggctgggaaaggaaggacccgactcgaaagagctaacgcgctgagaatagctcgaggaactgcctgcaaccccacaaggcagctggttcccggcaggggacaccgtttccagccagctggtccagcaactcacacctggtgcgacttgtgcggggatttcatctggggcgtcgtgaggaaaggtcttcagtgtgcgcactgcaagtttacctgtcactaccggtgcagggccttagtatgtttggattgttgcggccctagggacttaggttgggaacctgccgtggaacgcgacacaaacgtggacgagcctgtagaatgggagaccccagatctgagccaggccgagatcgagcagaagatcaaggaatacaatgcccagattaactccaacctgttcatgagtctaaacaaagatggatcctatactggctttatcaaagtgcagcttaaattagttcgccctgtgagcgtgccctcatcaaagaaacccccatccctacaagacgccaggcgcggacccgggcgggggacgtcagtgaggaggagaacatctttttacctacccaaggacgcagtgaagcatctgcacgtactcagcagaactcgagccagagaggtgattgaggctctgttgcgaaaatttctggtcgttgatgacccgagaaagtttgctctgtttgaaagagctgagaggcacgggcaagtgtacttaagaaagctcctggacgatgagcagcctctgcggttacgcctcctggcaggacctagcgataaggctttgtctttcgttctgaaagaaaatgactctggtgaggtgaactgggatgcattcagtatgcccgagctccataattttctgcggatcctgcagcgcgaggaggaggagcacctgcgccagattctgcagaaatatagttactgtaggcagaaaatacaggaagctctgcacgcctgtccgctgggatag

SEQ ID NO: 17072 - DNA, 570 bp, synthetic construct
  misc_feature 1..570: note = Description of Artificial Sequence: Synthetic coding sequence
  source 1..570: mol_type = other DNA
atgagtttaaacaaggacggatcctacaccggtttcatcaaagtgcagctgaaactggtccggccggtgtctgttccctccagcaagaaacccccgagtttgcaggacgctcgacggggacctggccgcggcacaagtgtgcggcgcaggacctccttctacctaccaaaggacgctgtcaaacacctgcatgtgctgagccgcacccgcgcacgtgaagtgatcgaggctctgctcaggaaattcctggtggtggacgacccccggaaattcgcactcttcgaacgggctgagagacacgggcaggtttacctgagaaaactgttagacgatgagcagccactgcgcttgcgcctgctcgcaggtccgtcagataaggcactgagcttcgtcctgaaagaaaatgactccggggaggtcaactgggatgccttttccatgcccgagctgcacaattttctgagaatattacagcgcgaggaggaggagcacctgcgtcaaattctgcagaagtactcttactgtcgacagaaaatccaggaagctcttcatgcatgccctcttggttag

SEQ ID NO: 17073 - DNA, 981 bp, synthetic construct
  misc_feature 1..981: note = Description of Artificial Sequence: Synthetic coding sequence
  source 1..981: mol_type = other DNA
atggattacagtcaccagacctccctggttccctgtgggcaggacaagtacatcagcaaaaacgaactgctgctccacctgaaaacttataatttatactatgagggccagaacctccagctcaggcacagagaggaggaagacgaattcatcgtggaagggctgctgaacatcagttggggcttacgcagacctattaggctgcagatgcaggacgacaacgaaagaattagaccacccccgtcctcttcttcatggcactcaggatgtaacttgggggctcagggtaccacacttaaaccgcttaccgtcccaaaggtacaaatttcagaggtcgatgcacctccagaaggcgaccagatgccgagttccacggattccagagggcttaaacctttgcaggaggataccccgcagctgatgagaacccgctcagatgtgggagtgaggcgacgtggcaacgtgcgtaccccaagcgaccagaggaggatccggcgccatagattctcgatcaatgggcatttttacaaccataagacgagtgtgtttacacccgcctatggaagcgttaccaacgtacgcatcaattccaccatgacgacacctcaagtgctgaagcttcttttgaataagtttaaaatcgaaaactccgctgaagagtttgcactgtacgtggtccatacaagtggagaaaaacagaaactgaaggctacggactacccactgattgcaaggattctgcaaggaccttgtgagcagatctcaaaggtcttcctcatggagaaagaccaggtcgaagaagtaacctacgacgttgcccagtacattaaattcgaaatgcccgttctcaagagctttatccagaagctgcaggaggaagaggatcgtgaagttaagaagctaatgagaaagtatactgtgttgcggctgatgatccgccagcgcttagaagaaatcgcagaaactcctgctactatctag

SEQ ID NO: 17074 - DNA, 981 bp, synthetic construct
  misc_feature 1..981: note = Description of Artificial Sequence: Synthetic coding sequence
  source 1..981: mol_type = other DNA
atggattatagccaccagacaagtctagtgccctgcgggcaggacaagtacattagcaagaacgagctgttgctgcacttgaaaacttacaatctgtattacgaaggacagaatctgcagttgaggcatagggaggaggaagatgagtttatagtcgaggggcttctgaatatcagctgggggttgcggcgccccatcagactgcagatgcaagacgataacgagagaatcagacctccacccagtagcagctcatggcatagtggctgcaacttgggggcacagggtaccacacttaagcccctcacggtgcccaaagtccagatcagcgaggtggatgctcctcccgagggggatcagatgccaagtagtactgacagtcggggattgaagcctctacaagaagataccccccaattaatgaggacacggtctgatgttggagtccgcaggcgggggaacgtacgaactccctcggaccagagaagaatccggagacacagattttctattaacggtcacttttacaatcataagacatccgtgtttactccagcttacgggtcggtaactaacgtacgaattaattcaaccatgacgacccctcaggttctgaaactgctgctgaataagtttaagatcgagaattcagctgaagagtttgctctgtacgtggtgcacacctctggagagaaacagaagctgaaagccacggattacccactgatagcaaggattctacagggcccctgcgaacagatctctaaagtattcttaatggagaaagatcaggtggaggaagtcacgtacgatgtggcacagtacatcaagttcgagatgcctgttctgaagtcatttatacagaaactccaagaggaggaggaccgcgaggtgaagaaactgatgcgcaagtataccgtgctgagactgatgatccgtcagagattggaggaaatcgctgaaacacctgcaaccatctag

SEQ ID NO: 17075 - DNA, 993 bp, synthetic construct
  misc_feature 1..993: note = Description of Artificial Sequence: Synthetic coding sequence
  source 1..993: mol_type = other DNA
atgaaagaagattgcctccccagctctcacgtgccaatttctgacagtaaatcaatccagaaaagggacgtgcaggggctaagcgaggaggggaccctaattatcgagggacttctcaatattgcctgggggctccgccggcctatacggcttcagatgcaggacgatcgggagcaggtgcacctgcctagcacatcatggatgccccggcgcccctcttgcccactaggctgctggtccctgttgctcggcttgagttcgctgagcctgcccgccgccatcagtgccctgcaactgtctgtttttcgcaaggaaccctccccccagaatggaaatatcaccgctcaagggcccagtatccaacccgtgcacaaggccgagagcagcaccgatagtagtggtccccttgaggaagccgaggaagcaccccagttaatgcgcactaagtccgatgcatcttgcatgagccagaggcgaccaaagtgccgggctccaggcgaggcccagcgtatccgcagacaccgcttctcaattaacggccatttctataaccacaaaacatctgttttcacacccgcttatggcagcgtcactaacgtgcgagtgaactctaccatgactaccctgcaggtgctgacactccttctcaataagtttagagttgaggacggcccatctgagtttgctctctatattgtgcacgagagcggcgaacggaccaagcttaaagattgcgagtacccgctaatctcccgcatactgcacgggccttgcgaaaagatagccagaattttcttgatggaagcagatctgggggttgaggtgccacacgaagtggctcaatatattaagtttgagatgcccgtactggactcgtttgtggagaaactgaaagaggaagaagagcgggagatcataaagctgactatgaagtttcaggccctgcgactgaccatgctgcagcgccttgagcagctggtagaggccaaatag

SEQ ID NO: 17076 - DNA, 966 bp, synthetic construct
  misc_feature 1..966: note = Description of Artificial Sequence: Synthetic coding sequence
  source 1..966: mol_type = other DNA
atgaaggaggattgcctcccctcaagtcatgtgccaatatccgactccaaatccattcaaaagagtgagctgcttgggcttctgaaaacttacaattgctaccacgaaggtaaaagtttccagctccggcacagagaggaggaaggtacactcatcattgagggcctccttaacatcgcatggggcttgagaagaccaatccgcctgcagatgcaggatgatcgagaacaggtgcacctcccgagcactagctggatgcctcgccggccttcctgccctctgaaagagcccagtcctcagaatggtaatataacagcccaaggcccttcgatccagccggtgcataaggcagagtcttctaccgatagttcagggccactcgaggaggctgaagaggctcctcagttaatgagaacaaagtccgacgcctcctgcatgtcccaaaggaggcccaagtgtcgggcgcctggagaggctcaacgtattcgcaggcaccgattcagcattaacgggcacttttacaatcataaaacctccgttttcacaccggcttacggttcggtcacaaatgtgagagtgaattctaccatgacaacgctccaggtgcttacgctgctgcttaacaagttcagagtggaggacggccccagcgagtttgcactgtacatagttcacgagagtggcgagcgcacaaagctcaaggactgtgaataccctttaatctcccggatcctccatggaccctgcgagaagattgctagaatttttctgatggaggccgatctgggagtggaagtgcctcacgaagtggcccagtatatcaagttcgaaatgccggttctcgatagttttgtcgaaaaactgaaagaggaagaagaaagggagatcataaagctcaccatgaagttccaggctctgcgtttgacaatgctccaacggctagaacagctggttgaggccaagtag

SEQ ID NO: 17077 - DNA, 1239 bp, synthetic construct
  misc_feature 1..1239: note = Description of Artificial Sequence: Synthetic coding sequence
  source 1..1239: mol_type = other DNA
ggcagcaacgcgggcggcggccaaggcggatgccaggggctgacttgtgactccgagagtgtcgggaccttggacatcttggaccagactcaggcttgtcctgtgtctctggcatcttcctcggctagaccgccctgcccccctcccggaccttgcgcggagccctcaggatgtatcgccatggccgtttggagtcctcttgtgatgccaggccgcagagagggctgttgccatacacctgtgactaatgaggagaccgaagcaagagaagccaaagggcagaagctgagaccctgccacacactgggagttcatgtgtgtctgagcctgtttagatctgaacttttggggctgcttaagacctataactgttatcatgaagggaaaagcttccagctccgtcaccgggaggaggagggcacactaatcatcgaaggcctgctcaacatcgcatgggggttgagacgtccaatacgtttgcaaatgcaagacgacagagaacaggtccatcttccttcaacttcgtggatgccccgcaggcccagttgtccgctgaaggagccgtcaccccaaaatgggaatataaccgctcaaggcccatctattcagccagtccataaagctgagagctctacagatagttctggccctctcgaagaagctgaagaagcaccacagcttatgaggaccaagagtgacgcctcctgtatgagccagcgccgacctaagtgtagagccccaggcgaagcacagcgtatccgtcgtcaccgatttagcatcaacggccacttttacaatcataaaaccagcgtgttcacgccagcatacgggtccgttacaaatgtccgagttaactctactatgaccaccctacaggtactcactttgctactcaataaattcagagttgaggacgggccctcggaattcgccttgtacatcgtgcatgaatccggtgagaggactaagctcaaggattgcgagtacccgctgataagccggatcctgcacgggccctgcgagaaaatcgctcgcatctttttgatggaggccgacttgggcgtcgaggtgcctcatgaagtggcgcaatacattaaatttgaaatgcctgtcctcgactccttcgtggagaagctgaaagaggaagaagagcgtgagattatcaagttgacgatgaaattccaagcactgcgtctcactatgctccagagactggagcaactggtagaagccaagtag

SEQ ID NO: 17078 - DNA, 393 bp, synthetic construct
  misc_feature 1..393: note = Description of Artificial Sequence: Synthetic coding sequence
  source 1..393: mol_type = other DNA
atgaaggaggattgcttacctagcagccatgttccaatctccgacagcaaaagtattcaaaagagtgaactcctcggacttcttaagacatataattgctatcacgaaggaaaatccttccagctgaggcaccgtgaggaggaagggactctgattattgagggactactcaatatagcttggggcttgcgccgacctatcagattgcaaatgcaagacgaccgggagcaggtccatctcccaagcacttcatggatgcccaggcggcctagttgccctctccacctcgctggcaagaaaggcagattacagcctggagggttgcctaccccaatgcaggctgaacacgttagcccatcgttggttctttccttgaagttcaccaggatctag

SEQ ID NO: 17079 - DNA, 381 bp, synthetic construct
  misc_feature 1..381: note = Description of Artificial Sequence: Synthetic coding sequence
  source 1..381: mol_type = other DNA
atgaaggaggattgcttgcctagctcacacgtacctatctccgattcaaagagcatacagaagagcgagctcctcggcttgctgaagacctataactgctaccacgagggtaaaagcttccagcttaggcatcgcgaagaggagggtaccctgattatcgaagggctgctcaacattgcatggggattacggcgaccaatacggctccaaatgcaagacgaccgtgagcaggtacatctgccttcaacctcatggatgcctaggagacccagttgtccactcgcacccggcggtgggcggggcggcccccccgcagatgccgaccaggagaggcgacagctgcacgagccagaagaggcgcaggtgcctcgaccaaggtag

SEQ ID NO: 17080 - DNA, 456 bp, synthetic construct
  misc_feature 1..456: note = Description of Artificial Sequence: Synthetic coding sequence
  source 1..456: mol_type = other DNA
atgaaagaagactgcctccctagcagccatgttcctatcagtgattccaaaagcattcagaaatcagaacttctcggattactgaagacttataactgttatcacgaaggaaagtcttttcagctgagacaccgcgaagaggaggggaccttgatcattgagggtttgttaaatatagcctggggtctgcggcgcccaatcagactgcaaatgcaggatgacagggaacaggtgcacttgcctagtacatcgtggatgcctagacgtccctcatgcccgctcggctgttggtctctcctcctgggtctgtcttctttatctcttccagctgctattagcgcactgcagctcagtgtttttcgaaaggaaccgagcccccaaaacggtaatatcactgcacagggccccagtattcagcccgtgcataaagcagagtcttcaactgactcctcgtag

SEQ ID NO: 17081 - DNA, 372 bp, synthetic construct
  misc_feature 1..372: note = Description of Artificial Sequence: Synthetic coding sequence
  source 1..372: mol_type = other DNA
agcagtcacgtgcccatatcagacagcaagtcaatccagaagagcgagctgctggggcttttgaaaacatacaactgttaccacgaaggtaagagcttccagctccggcaccgggaggaggagggcactctcataatcgagggactactgaacattgcctggggactgcggcggccaatcaggttacaaatgcaggatgatagggaacaggttcatttgccttcaacaagctggatgccacggcggccttcatgccctctgcacttggccgggaagaagggcaggctccagccgggtggcctgcctaccccaatgcaggcggaacatgtctccccgtctttagtgctctcgctgaagttcactaggatctag

SEQ ID NO: 17082 - DNA, 798 bp, synthetic construct
  misc_feature 1..798: note = Description of Artificial Sequence: Synthetic coding sequence
  source 1..798: mol_type = other DNA
atgacagtggactcctcgatgagcagtggatactgttcacttgacgaggagttggaggattgcttttttaccgccaaaactactttctttcgaaacgcacagtccaagcatctcagcaaaaacgtgtgtaagccagtggaggagacacagaggcccccaactttgcaggagatcaagcagaaaatcgactcatataacacgagggagaaaaactgtcttggcatgaaactgtctgaagatggaacatacaccgggttcatcaaggttcacctcaagctacggcggccagtgactgtccctgccggcatcaggccacagtccatatacgacgccattaaggaggtgaatcttgccgcaactacagataaacggacttcattctaccttccactggatgcaataaaacagctccacatttcctccacaacaaccgtcagcgaggtcatccaaggcttactgaaaaaatttatggtggtagataatccccagaagtttgccctgttcaaaaggatccataaggatgggcaggttctgttccaaaaacttagcatcgctgacagacctctatatcttcggctgcttgcaggccctgacacggaggtgctaagtttcgtcctcaaagagaatgagaccggcgaggtagaatgggacgccttttctatccccgaactgcagaattttctcacgattctcgaaaaagaggagcaagacaaaatccagcaagtgcagaagaagtacgacaagtttaggcagaagctggaggaggcattaagggagtcccaaggaaagccaggatag

SEQ ID NO: 17083 - DNA, 1179 bp, synthetic construct
  misc_feature 1..1179: note = Description of Artificial Sequence: Synthetic coding sequence
  source 1..1179: mol_type = other DNA
atggcaatggcgtcaccagccattggccagcgtccatatccgctgctgctggatccagaaccgcctcgatacctgcagtctctttccgggccagagctacctcctccaccccctgaccgttcttcccggctctgcgtgcccgctccactgagcacagctccaggcgccagagaggggcggtctgcccggagggccgccaggggaaacctggagcccccaccaagagcttcccggccagcacggcctctccgaccggggctgcagcagcggctgcgaagaagacccggtgcccctcgacctagggatgtgaggtctatatttgagcagccacaagaccccagagtaccagccgaacgtggtgaagggcactgtttcgccgagctggttctccctgggggacccggatggtgtgacctgtgcggcagagaagtgctccgacaagctctgcggtgtaccaactgcaaattcacctgtcaccctgaatgcaggtctctaatccagctggactgttcgcagcaggaaggactgagcagggatcgcccgtcccccgaatccactttgacggtgacattttcccagaacgtctgtaagccagttgaggaaactcagagaccccccaccctgcaggaaataaaacagaagatcgactcgtataacaccagggagaagaactgtctgggaatgaaattaagcgaagatggaacatatactggttttatcaaagtgcacttaaagctgcgacgacccgttactgtgccggctggcattagaccacagtcaatctacgatgcaattaaagaagtgaatcttgccgctactaccgataagcgaacaagtttttacctcccactggatgcaattaaacaacttcacataagttccactacaactgtgagtgaggtgattcaagggctcttgaaaaaattcatggtggtcgataacccacagaagtttgccctctttaagcggatccataaagacggccaagtcctgttccagaaattgtctatcgccgatcgccccctttacctgcgcctgctggcaggtcccgatacagaggtcctgtcttttgtcttaaaggagaacgaaactggagaagtcgagtgggatgcattttcaatccccgagctgcagaatttcttgtctagctggtgcattcaaatttatctctattactag

SEQ ID NO: 17084 - DNA, 1257 bp, synthetic construct
  misc_feature 1..1257: note = Description of Artificial Sequence: Synthetic coding sequence
  source 1..1257: mol_type = other DNA
atggcaatggcaagcccagcaatcggccagcgcccttatccactgctgctggaccctgagccacctcggtatttacagagtctgagtgggcctgaactgccgcccccccctcccgatcgaagctcacgcctgtgcgttccagcaccactgtcaaccgctcccggcgcacgtgagggcagatctgctcggagagcggcacgcggcaatttggaacctccacctcgcgcctcccgcccggcaaggccactgcgccccgggctgcagcagagattgaggcggagaccaggggcaccccgaccccgcgacgtacgttccatctttgagcagcctcaggacccgcgcgtccccgcagagcgcggagagggccattgtttcgcagagctcgtactaccgggcggacccggctggtgtgatctctgcggtagagaggtgctgagacaggccctcaggtgcacgaactgtaaatttacttgtcacccagaatgtcggagcctgattcaacttgattgttcccaacaggagggcctgagcagggaccggccttcccccgagagtactttgacagtcaccttctcccaaaatgtatgtaagcctgtggaggagacccagcggccacctacactgcaagaaatcaagcagaagatagacagttacaacacgcgcgagaagaattgcctcggtatgaaattgtcagaggacggaacctacaccggcttcattaaggtccatcttaagttgcgacgcccggtgacagtaccagccggcattcgaccccagagcatttatgatgcaatcaaggaggtgaatcttgctgccacaaccgacaaaaggacttccttctaccttcctctggacgctatcaagcagctgcatatctcctctaccacaacagtcagcgaggtgattcagggcttgcttaaaaaatttatggtagtggataacccccagaagttcgcactttttaagagaatccacaaggatggccaggtcctttttcaaaaattgtccatcgctgatcggcctctctacctgaggctgcttgctggccccgatacagaagtgctgtcttttgtcctgaaggagaatgagacgggagaggtggagtgggacgccttttctatcccagagttgcaaaattttttgacaatcctggagaaggaggagcaggacaagattcagcaagtgcagaaaaagtatgataagtttaggcagaagctggaagaggctctgagggaatcacaggggaagcctggatag

SEQ ID NO: 17085 - DNA, 1011 bp, synthetic construct
  misc_feature 1..1011: note = Description of Artificial Sequence: Synthetic coding sequence
  source 1..1011: mol_type = other DNA
atggccatggcgagccccgccattgggcagcgcccataccccttgctgcttgaccctgagcctccaagatacttgcagagcctgagcggacctgagctgcctcccccccctcccgataggtcctcccgcctgtgtgtgcccgctcctttatctaccgcacctggggctcgagaagggaggtcagcgcggcgggctgcgcggggtaatcttgagcctccaccccgcgccagtcgccctgctcgcccccttaggccagggcttcagcagcggctgcgcaggcggccaggcgccccgagaccccgcgatgttcggagcatatttgaacagcctcaggatcctcgcgttcccgctgagaggggggaaggacattgttttgcggagctggtgctgcccgggggacccggctggtgtgatctttgcgggcgggaggtgctgcggcaggccctgcgatgtactaactgcaaattcacttgtcaccctgagtgtcgctcccttatccagctggattgctcccaacaagagggcctgagcagagaccggccctcccccgagtccactttgaccgtcacatttagtcagaacgtctgtaaaccagtggaagagacacagcggccgcccactctccaagaaattaagcagaagattgatagctacaatacgagggagaagaactgtctgggaatgaagctttccgaagatggaacctacactggattcatcaaagtccatctgaagttgaggcggccggttactgtgcccgccgggatccggcctcagtcaatctatgatgcaatcaaagaggtgaatctggcagccacaacagacaagagaaccagtttttacctcccgctggacgctatcaagcagctccacatttctagcacaaccaccgtatctgaggttatccagggcctcttgaaaaagttcatggttgtggataacccgcagaaatttgctctgttcaaaagaattcataaagatggccaggtgggttgcctgctgcacccgtag

SEQ ID NO: 17086 - DNA, 1182 bp, synthetic construct
  misc_feature 1..1182: note = Description of Artificial Sequence: Synthetic coding sequence
  source 1..1182: mol_type = other DNA
atggccatggcctctccggccattgggcagcggccttaccccctcttattagacccagaaccaccaaggtacctgcagtccttgtccggacctgagctgcctcccccaccacccgatcggtccagccggctgtgtgtgcccgctccactttccaccgccccgggggctcgtgaggggagatcagccaggcgcgccgcccgtggaaatctcgaacctcccccccgcgcatcaaggcctgctagaccactcagacctggcctgcagcagcgtctgcggcgccggcctggggcaccgcgcccaagggacgtgagaagcatcttcgagcagcctcaggaccctcgcgtaccggccgaaaggggagaggggcactgtttcgcagagctcgtgctgcctggcggaccaggttggtgtgacctgtgtggtagggaggtcctgagacaggcgctgaggtgtactaactgcaagttcacttgtcatcctgagtgtagaagcctgattcagcttgactgttcacagcaagagggtttgagccgagatcggccgtcgccggagtccacgctcaccgtcacgtttagtcaaaacgtttgcaagcctgtggaggagacccagcggcctccaacactgcaagagataaagcagaaaattgactcttacaacacaagagaaaaaaactgcttgggtatgaaactaagtgaagatggcacttacactggattcatcaaagtccacctcaagctccgccggccagtgaccgttcccgcaggaatcaggccacagtctatctatgatgccatcaaggaggttaatttggctgcaaccacggataaacggaccagtttctatctgccattagacgccattaaacagctgcatatcagctccactacaacagtgtctgaggtcatccagggattgctcaagaagttcatggttgtggacaatcctcagaaattcgccttgttcaaacgcattcacaaagacgggcaggttttgtttcagaaactgagcattgcagatcggcccctgtatctgaggctgctggccggccccgataccgaagtacttagctttgtcctgaaggaaaatgagactggcgaagtggaatgggacgctttctccatcccagagctgcagaactttttcttgtcaagctggtgcatccagatttacctgtactactag

SEQ ID NO: 17087 - DNA, 555 bp, synthetic construct
  misc_feature 1..555: note = Description of Artificial Sequence: Synthetic coding sequence
  source 1..555: mol_type = other DNA
atgcctcaatctaaatcccgaaaaatcgctatactaggctacagatctgttggcaagtccagcctcactatccaattcgtggaggggcaatttgtcgactcctatgaccccactatcgaaaacacctttacaaagttgatcaccgtgaatggtcaagagtaccaccttcagctggtggatactgctggtcaggatgaatatagcatctttccacagacttatagcattgacatcaacggttacatcttggtgtactccgtgactagcattaaatccttcgaggtcattaaggtgattcatggaaagctactggacatggtcggcaaagtgcagatacccataatgttagttggcaacaagaaagacctgcacatggagagggtcatctcctatgaggaaggcaaagctctggcggagtcgtggaatgctgcgttcctagagtccagcgccaaagaaaatcaaaccgcagtcgatgtgttccgtagaatcatcttagaagctgaaaaaatggacggcgccgctagccagggaaaatcaagctgttcagtgatgtag

SEQ ID NO: 17088 - DNA, 582 bp, synthetic construct
  misc_feature 1..582: note = Description of Artificial Sequence: Synthetic coding sequence
  source 1..582: mol_type = other DNA
atggctgccatccgtaagaaactggtcatagtcggggacggggcttgcggcaaaacttgcctgctaatagtcttctccaaggaccagtttcccgaggtatacgtgccaacggtatttgagaactatgtggctgatatcgaggttgatggtaaacaggtcgagctggccttgtgggacaccgcaggacaggaggattacgacagactgcgacctctgagctaccctgacaccgacgtaatcctgatgtgcttcagtatcgactcccctgacagcttagagaatattcccgagaagtggactccagaagtgaagcatttttgtcctaacgtacctatcatccttgtcggtaacaagaaagatttgaggaacgatgagcacacacggagggagctggccaagatgaaacaggagcctgtaaagccagaagagggccgggatatggctaaccgtatcggggcttttgggtatatggaatgctctgcaaagacaaaggatggagtgcgcgaggtcttcgagatggccacgcgggcggcactccaggcccggaggggtaaaaaaaaatctggctgcctggttttatag

SEQ ID NO: 17089 - DNA, 591 bp, synthetic construct
  misc_feature 1..591: note = Description of Artificial Sequence: Synthetic coding sequence
  source 1..591: mol_type = other DNA
atggctgccattcgcaaaaagctcgtcgtggtgggggatggtgcgtgtggcaagacttgccttcttatcgtgttctcgaaagacgagttccccgaggtgtatgtgccgaccgtattcgagaactatgtggccgatatcgaagtagatgggaaacaggtggaactagctctttgggacacagctggccaagaagattatgaccgcctgcgcccattgtcttacccagatacagacgtgatcctgatgtgttttagcgtagatagtcccgattcgctagagaatatccccgagaagtgggtcccggaggtgaagcacttctgcccaaacgttccaatcatactggtagcgaataagaaggaccttcggtcagacgaacacgtgcgaacagagctagcccggatgaagcaagagcccgtacgtacagacgatggacgagcgatggctgtgcgcatccaggcctacgactatctagagtgtagcgcaaagactaaggagggcgtgcgtgaagtcttcgagaccgcaacccgcgctgcgcttcagaagaggtatggttctcaaaatggctgtatcaattgttgcaaggtgctgtag

SEQ ID NO: 17090 - DNA, 582 bp, synthetic construct
  misc_feature 1..582: note = Description of Artificial Sequence: Synthetic coding sequence
  source 1..582: mol_type = other DNA
atggcagctattagaaaaaagctcgtcatcgtgggagacggcgcatgcggcaagacctgtctgctcattgtgttcagcaaggatcagttccccgaagtatacgtccccacagtcttcgagaactacatcgcagacatcgaggtcgacgggaagcaagtcgaactggcgctctgggatacagccggacaggaagattacgatcgattgcggcctctgagctacccagatacagacgtcatccttatgtgcttttccatcgactcccctgattcgctggagaatatcccggaaaagtggaccccggaggtgaagcatttctgtcctaatgtacctatcatcctcgttggtaataaaaaggacctgaggcaagacgaacataccagacgcgagctggcaaagatgaagcaggaacctgtccggtctgaagaaggccgggacatggccaacagaattagcgcctttggctatttagagtgcagtgcaaagactaaagaaggcgtccgagaagtgtttgaaatggccacccgcgccggccttcaggtccgtaagaataagaggaggcgagggtgccccatcctgtag

SEQ ID NO: 17091 - DNA, 582 bp, synthetic construct
  misc_feature 1..582: note = Description of Artificial Sequence: Synthetic coding sequence
  source 1..582: mol_type = other DNA
atggcggcaattcgcaaaaaacttgtaatcgtgggagacggggcatgtggaaagacgtgcctgttaattgttttttcaaaggaccaattccccgaggtctatgtgccaaccgtatttgaaaactatatcgccgacattgaagttgacggcaagcaggtggaactggcactctgggacacagctgggcaggaggactacgatcgcctgaggcctctgtcctacccggacaccgacgtgattctgatgtgtttttctattgattctcctgactccttggagaacatccccgaaaagtggactcccgaggttaaacatttctgtccaaatgtacccataattcttgtgggaaataagaaggacctcaggcaggatgaacacacgcgtcgcgaactggctaaaatgaaacaggaacccgtaagatccgaggaaggccgcgacatggccaaccgcatctctgcattcggatacctggaatgctctgctaagacgaaagaaggcgtccgggaagttttcgagatggccacacgggccgggctgcaggtcagaaagaataagcggcgacgcggttgtcccattttatag

SEQ ID NO: 17092 - DNA, 582 bp, synthetic construct
  misc_feature 1..582: note = Description of Artificial Sequence: Synthetic coding sequence
  source 1..582: mol_type = other DNA
atggcggcaattcgaaaaaaactggtcattgtcggagacggggcatgcgggaaaacctgcctgttaattgtgttttctaaagaccagttccctgaagtttacgtgccaacagtctttgaaaactacattgccgacattgaggttgatggtaaacaggtcgaactggctctgtgggacacagccggccaggaagattacgataggctgagacctctgagctacccggataccgacgtaatcctgatgtgtttcagtatcgatagccccgatagcctggaaaatataccagaaaagtggactccagaggtgaaacacttctgtccaaacgtaccaatcatccttgtggggaataagaaggacctccgccaggacgaacatactcggcgggaacttgccaagatgaaacaggaacctgtgcgaagcgaggaaggtcgggacatggccaatagaatatctgcgttcggctatcttgagtgcagcgcaaagacaaaagaaggtgtaagagaagtgtttgagatggccactcgggcgggtctccaggtgcggaagaataaacgccgccgcggatgcccaattctgtag

SEQ ID NO: 17093 - DNA, 582 bp, synthetic construct
  misc_feature 1..582: note = Description of Artificial Sequence: Synthetic coding sequence
  source 1..582: mol_type = other DNA
atggcggctatcaggaagaaacttgtgatagtcggcgatggagcctgcgggaaaacctgtctgctgatcgtgttctctaaagaccagtttcccgaggtttatgtcccaaccgtgtttgagaattacatcgctgatattgaggtggatggcaaacaggtggaactcgccctctgggacactgccggtcaggaggactatgaccgcttacggcccctcagctatcctgacaccgacgtgatcctcatgtgcttttctatagatagtccagacagcctagagaacattccagagaagtggacccccgaagttaaacacttctgcccaaacgtgccaatcatcttggttggaaacaagaaagaccttaggcaggatgagcatacccgcagagaactggccaagatgaagcaggaaccggtgagaagtgaggagggccgcgacatggctaatcgcatctcggccttcggctacctcgagtgttccgcgaaaacaaaagagggggtgcgcgaggtgttcgaaatggccaccagggcagggcttcaggtaaggaaaaataaacgccggcgtggatgccccatactctag

SEQ ID NO: 17094 - DNA, 600 bp, synthetic construct
  misc_feature 1..600: note = Description of Artificial Sequence: Synthetic coding sequence
  source 1..600: mol_type = other DNA
atggccgccatccggaaaaagctggtgattgtgggcgacggtgcctgtggcaaaacttgtctcttgatagtcttcagtaaagaccaattccccgaagtatatgtacctaccgtcttcgaaaattatattgcagatatcgaggttgacggaaaacaggtggagttggcgctgtgggatacagcagggcaggaagactacgaccggctccggccactctcctaccctgacaccgacgtgattctgatgtgtttttctatcgattcccccgattcccttgaaaatattccagagaagtggaccccggaggtgaaacatttttgccctaatgtgccgatcatactggtgggtaacaaaaaagatctgaggaaagccggaacctggcggactggtagtgttcccctggccacattgtccgcccagccacgccccagaagggagtgcggcagatgcctgagatggcccttgggtctggcgtcccgttccgcaagaacttctgttggtggtgcggtccctttcagtgagatccctaaagccttccccacttgtccgctgccctcacaaggatatcggaattacccgcccactacaccagcctcctag

SEQ ID NO: 17095 - DNA, 582 bp, synthetic construct
  misc_feature 1..582: note = Description of Artificial Sequence: Synthetic coding sequence
  source 1..582: mol_type = other DNA
atggccgccatacggaaaaagctggttatcgtgggcgatggggcgtgcggaaagacatgcctgttgatcgtcttctcaaaagaccaatttcccgaggtttatgttccaactgtgtttgagaactatatcgccgatatcgaggttgacgggaaacaggtcgaactggccctgtgggacacggccggacaggaagactatgaccgtttacgcccactgtcttatccagacacagacgtgatcttaatgtgtttctctattgattcccccgacagtctcgaaaatatccctgagaagtggacaccagaggtaaaacacttttgccctaatgtaccgatcatcttggtgggaaacaagaaggatctacggcaggacgagcatacccggagggaactggccaagatgaagcaagaacctgtgcggtcggaggagggaagggatatggcaaaccgcatcagcgcgttcggctatcttgagtgttccgcgaaaacgaaagaaggggtgcgggaagtcttcgaaatggctacccgggccggattacaggtgcggaagaacaaacgtcggcgtggctgtccgatcctctag

SEQ ID NO: 17096 - DNA, 582 bp, synthetic construct
  misc_feature 1..582: note = Description of Artificial Sequence: Synthetic coding sequence
  source 1..582: mol_type = other DNA
atggcggccatacggaagaagctcgtaatcgtgggagacggtgcctgtggtaagacgtgcttgctgattgttttcagcaaagaccagttccctgaagtgtacgtccctaccgtcttcgaaaattatatcgccgacatagaggtcgacggtaagcaggttgaacttgccctgtgggacaccgccggccaagaagattacgaccggctcagacctctaagttatcccgacacggatgtcatcctgatgtgtttctctatcgattcaccagattcactggagaatataccagagaagtggaccccggaggttaaacatttctgccctaacgtaccgattattctggtaggcaacaagaaagacctgcgacaggatgagcacacacgtcgggaactggctaaaatgaagcaggagccagttagaagcgaagagggacgggatatggctaacaggataagtgcctttggctacttggagtgcagtgctaagactaaagaaggcgtcagggaggtgttcgagatggccacgcgggcaggcctgcaggtcaggaagaacaagcgccgtcgcgggtgcccaattctgtag

SEQ ID NO: 17097 - DNA, 582 bp, synthetic construct
  misc_feature 1..582: note = Description of Artificial Sequence: Synthetic coding sequence
  source 1..582: mol_type = other DNA
atggccgcaatccgcaaaaagctggttattgtcggggacggcgcctgtgggaagacctgccttctgattgtgtttagcaaagaccaatttccagaggtctatgttcccacagtttttgaaaactacatcgccgatatagaggtggacggcaaacaggtcgaattggcactttgggatactgcgggtcaagaagactacgaccgcctcaggcccctctcttacccagatacggacgttattctgatgtgttttagcatcgattctcccgactccctggaaaacattcctgagaaatggacccccgaggtaaaacacttctgcccaaacgtgccaattatcctcgttggcaacaagaaggatcttcgtcaggacgaacacacccggagagagcttgccaagatgaaacaggagcccgtcagatctgaggaggggcgagatatggcgaatcgtataagcgctttcgggtacctggagtgctccgccaaaacaaaggagggggttcgtgaagtgtttgagatggcaacccgggccggactgcaggttcgtaagaacaaacgacgccgcggttgccccatcctgtag

SEQ ID NO: 17098 - DNA, 279 bp, synthetic construct
  misc_feature 1..279: note = Description of Artificial Sequence: Synthetic coding sequence
  source 1..279: mol_type = other DNA
atggctgcaatcagaaagaagctggtgattgtgggggacggagcctgtggcaaaacttgccttctgattgtgtttagcaaggaccagttcccagaagtgtacgttcctactgtctttgaaaactatatagccgacattgaggtcgacggtaagcaagtggagctggcgctatgggatactgcaggtcaggaggactacgacaggctcaggcccttaagctaccctgatacagatgttatactcatgtgcttcagcattgatagccccgattctctgtag

SEQ ID NO: 17099 - DNA, 570 bp, synthetic construct
  misc_feature 1..570: note = Description of Artificial Sequence: Synthetic coding sequence
  source 1..570: mol_type = other DNA
atggctgctatacgaaagaagctcgtgattgttggtgatggcgcctgtgggaagacctgtctgcttattgtgttctcaaaggaccaattccctgaagtgtacgtgcctactgtgtttgagaattacattgccgacattgaggtcgacggaaagcaagtggagttggcactgtgggacacagccggccaggaggattatgaccgtctgcggcctctgtcttacccagataccgacgtcattctaatgtgtttctcaatagattcccccgatagcctcgaaaatatccccgaaaaatggacaccggaagtgaagcacttttgccctaacgtgccaatcatactcgtggggaacaaaaaagatctgcgccaggatgaacatacccggcgggagttagcgaaaatgaagcaggagccagttcgctctgaagagggaagggatatggccaaccgcatctccgccttcggctacctggaatgctccgccaaaactaaagagggagttagagaggtctttgagatggctacccgggccggattacaggtgaggaagaataagaggcggaggggctag

SEQ ID NO: 17100 - DNA, 384 bp, synthetic construct
  misc_feature 1..384: note = Description of Artificial Sequence: Synthetic coding sequence
  source 1..384: mol_type = other DNA
atggctgcgatcaggaaaaaattggtgatcgtgggggatggcgcatgcgggaagacctgcctgttaatcgtgttctcgaaggaccagttccctgaagtttatgtacctacagtcttcgaaaattacatcgccgatatagaggtcgacgggaaacaagtggaattggcactttgggacacggccggacaagaggactacgaccggttgcgccccctcagctaccccgatacagacgtgatcttgatgtgttttagcatcgactccccggattcactggaaaatattcccgaaaaatggactcccgaagtgaaacacttttgccccaatgtgccaattatcctggtggggaacaagaaagacttacgacaggatgagcacacatag

SEQ ID NO: 17101 - DNA, 690 bp, synthetic construct
  misc_feature 1..690: note = Description of Artificial Sequence: Synthetic coding sequence
  source 1..690: mol_type = other DNA
atggtgagcatttcagggggcgaccttccaactggtctcgacttcatatctgcccccgaacccgctctttcctcatgtagtctgggcactagcgctggttggtcccccacaatggcagcaatcaggaagaaactggtgatcgtgggagacggtgcttgtgggaaaacgtgtttgctcatcgtgtttagcaaagatcagttccctgaggtgtacgtgcctacagtctttgagaactacatcgctgacatcgaagtagacggaaaacaagtagagctagccctgtgggacacggccggacaggaagattatgaccggctcaggcccctttcctatccagataccgacgtaatcctgatgtgcttttcaatcgactcccctgattctctggagaacatccctgagaagtggactccagaggtcaagcacttttgtcccaatgttccgatcatcctggttggcaacaaaaaagatcttaggcaggatgaacacaccaggcgggagttggccaaaatgaagcaagagcccgtgagatcagaggagggtcgggacatggcaaaccgaatcagtgctttcggataccttgagtgtagtgctaagacaaaggagggcgtacgagaggttttcgaaatggcaacaagagccggattgcaagtccggaaaaataagaggcgccgtgggtgcccaatctag

SEQ ID NO: 17102 - DNA, 510 bp, synthetic construct
  misc_feature 1..510: note = Description of Artificial Sequence: Synthetic coding sequence
  source 1..510: mol_type = other DNA
atggccgccattcgaaagaaactggtgatagtcggggacggtgcttgcggtaagacctgcctcctcatagtgtttagcaaggatcagttccccgaggtctatgtccctaccgttttcgagaactacatcgccgatatagaggtggatgggaagcaggtcgagctcgcactgtgggatactgccgggcaagaggactacgacagactgcgccctcttagttatccggacactgacgtgattctcatgtgcttttccatcgactcacctgactcccttgagaacatcccagagaaatggactccagaagttaagcacttctgtcccaatgtccccattatcttggttggcaacaaaaaagatcttcgccaggatgaacataccaggcgcgaacttgcaaaaatgaagcaggagccggtcagatccgaagaaggtcgcgacatggctaaccggatttctgcgtttggctacctggaatgttccgctaaaactaaagaaggagttcgagagtag

SEQ ID NO: 17103 - DNA, 3144 bp, synthetic construct
  misc_feature 1..3144: note = Description of Artificial Sequence: Synthetic coding sequence
  source 1..3144: mol_type = other DNA
atgatggcggccgaagctggttcagaggagggggggccggtgaccgctggtgcaggaggaggcggcgcagccgctggcagttctgcctaccctgccgtgtgccgggttaaaatcccggccgctctgcccgtggccgccgcgccctatccagggctggtggagaccggcgtggctggaaccctggggggtggagccgccctgggcagtgagttccttggcgcagggtcagttgctggtgccctgggcggagctgggctcaccgggggggggaccgccgcgggagtcgccggtgcagctgcgggggtcgctggagcggcagtggccggcccctctggagatatggctctgacaaagctgcctactagtctgctggccgagaccttgggtccaggaggaggattcccccccctacctcctcctccttacctaccaccactgggggccggccttgggacagtggatgaaggggattccctggatggcccggagtacgaggaggaagaggtggctatccccctaacagctcctccaaccaaccagtggtaccatggaaaacttgaccgcactattgccgaggaaaggctgagacaggcagggaagagcggatcttatctaatccgcgaatctgaccgaaggccgggttcctttgtgttgagcttcctatcacagatgaatgtggtaaaccattttcggattattgctatgtgcggcgattattatatcggtggtcgtagattttcttccttgtctgatcttataggatactattcccacgtgtcatgtctgcttaagggagagaagctgctatatcctgtggctccacccgagcctgtcgaggatagaaggagagtccgggctatcctgccctataccaaagtccctgacactgatgagataagttttttgaagggcgatatgttcatagtccataatgagcttgaggatgggtggatgtgggtgaccaacctgaggacagatgaacaagggctgattgtggaggacctggttgaggaggtggggcgtgaggaggaccctcacgaagggaaaatctggttccacggtaagatctcaaaacaggaggcgtacaacctgctgatgactgtaggacaggtctgcagctttctggtcaggccgtcagataatactccaggcgactactcactgtatttcaggacaaatgaaaacatccagcgctttaagatttgccctacccccaataaccagtttatgatgggtggccggtattacaactctatcggagatatcatcgatcattatagaaaagaacaaattgtggagggttactacttgaaggaacccgtgccaatgcaggatcaggaacaagtgttgaatgatacagtggacggcaaggagatctataatacaatccgtaggaagactaaggatgccttctacaagaacattgtcaagaaggggtatttgctgaaaaagggaaaaggtaagaggtggaaaaatttatattttattctggagggcagcgatgctcagctaatctacttcgagtccgagaagagagctaccaagccaaaaggcctcattgacctatcagtctgtagcgtgtacgtggttcacgactctttgttcgggcgccccaactgtttccagatcgtggtgcagcatttcagcgaggagcactacattttttactttgcaggcgaaacccctgaacaggctgaggattggatgaaaggcttgcaagccttctgcaacctgagaaaatcctctcccgggaccagtaataagcgtttgcgacaagtctccagcctggtcctgcatatagaggaagcacacaagctgccggttaagcatttcacaaatccctactgtaatatctacctaaattccgttcaggtggcgaagacccacgccagggagggccagaatccggtatggtcagaggagttcgtgttcgatgaccttccccctgatatcaatcgctttgaaataactctgtcaaacaaaacaaaaaagagcaaagaccctgatatcctttttatgcgctgccaactctcccggttgcagaagggccacgctaccgacgagtggtttctgctgtcaagccacattccccttaaagggatcgagccagggtctctgcgggtgcgcgctcggtattcaatggagaagatcatgcctgaagaagaatattctgaatttaaggagctgatccttcagaaggagctgcacgtggtctacgctctcagccatgtttgtgggcaggaccgcacattactggccagtatactgcttcgtatctttctgcatgagaagctcgagtccttgcttctttgcacactgaacgacagggaaatctccatggaggatgaagccacaaccctgttcagggctacaactctggcgtcaaccctgatggagcagtatatgaaggccacggccacacagttcgtccaccatgctctgaaggatagtatcctgaaaataatggagtcaaaacaaagctgcgagctgagcccgagcaagctggagaagaacgaggacgtgaacactaaccttactcatctgctcaacatattatccgaactcgttgagaagatctttatggcatcagagatcttgccacctaccctcagatatatttacggctgtctccagaagagtgtgcagcataaatggcctactaacactaccatgcgaactcgggtcgtgtctggattcgtgtttttaagacttatatgccccgccatcctgaacccccgaatgtttaacatcatctcagattcacctagcccaatcgccgctcgcacactgatcctggtggcaaaatctgtccagaacctggcaaacttagtggagttcggcgcaaaagaaccgtatatggagggcgtgaacccctttattaagagtaataaacacaggatgattatgttcctggatgagctggggaacgtcccagagctgccagatactactgaacattcccggaccgacttatcaagggacttggcggcgctgcacgagatctgcgttgcacactctgacgagctcagaacactgagcaatgaacgcggcgcccaacaacatgtgcttaaaaagctactagctataaccgaattgctacagcagaagcagaatcagtataccaaaactaacgacgtgaggtag

SEQ ID NO: 17104 - DNA, 2613 bp, synthetic construct
  misc_feature 1..2613: note = Description of Artificial Sequence: Synthetic coding sequence
  source 1..2613: mol_type = other DNA
atgaagggatggtaccatggaaagctcgacagaaccatcgccgaagagcgactacgccaggcaggcaagagcggaagctaccttatccgagaatctgatcgacggcccgggagctttgtgctttccttcctaagccagatgaacgtggtgaaccattttaggatcatcgcaatgtgtggagactattacatcggaggcaggcggttctcttcactcagtgatcttataggatattatagccatgtttcctgtttgctgaagggagagaagctactgtatccagtggcaccccctgagccagtggaagacaggcggagagtgcgggccattctaccttacacgaaggtccccgacaccgatgagatctctttcctcaagggcgacatgtttattgtgcacaacgagctcgaagatggctggatgtgggtcaccaatctgaggaccgacgaacagggcctgatcgtcgaagatctggtagaggaggtaggtcgagaggaagatccccacgagggtaagatctggtttcacggaaagattagcaaacaggaagcctacaaccttttaatgacggtggggcaggtgtgcagctttttggtgagaccatcggataacactcccggcgattattctctgtacttccggacaaacgagaacatccaaagatttaaaatatgtccaactcccaataaccagttcatgatgggggggaggtactataacagtatcggcgatattatcgatcattatagaaaggagcaaatcgtggaaggatattacctgaaagaacctgtccccatgcaagatcaggagcaggtgctgaacgacactgtggacggaaaagagatttataacaccatcaggcgaaagactaaggatgccttctataaaaacatagtgaaaaaaggttatctcctcaagaaaggtaaagggaagaggtggaaaaatctgtactttatattagaaggctctgacgcccagctaatctacttcgagtccgaaaagcgggctaccaagccaaaaggccttattgacctctccgtgtgtagtgtatatgtggttcatgacagtctctttggccgccccaattgtttccagatcgtggtgcagcatttttcagaagagcactacattttttactttgcaggcgagacaccagagcaggcggaagattggatgaaaggcctccaggcattctgtaacctgcggaagagcagtccaggaacctctaacaagcgactgaggcaagtgagctcactggtattgcacattgaagaggcccataaactaccggtcaaacattttacaaatccatactgtaacatttatctgaattcagtccaagtagccaaaacccacgcccgagaaggacagaatcccgtctggtccgaagaatttgtctttgatgatctgcctccagacatcaataggtttgagatcacgctttctaacaagacaaagaagagcaaggaccctgacatattattcatgcgctgtcagttgtctcgcctccagaaggggcatgcaaccgacgaatggttcttactgtcgtctcacatccccctgaaaggaattgagcccgggagcctacgtgttcgggcccgatactccatggagaagattatgccagaagaagagtacagcgaattcaaagaactgatactgcagaaggagttacacgtagtgtacgcattatcccacgtttgtggtcaagacaggactttgctggccagcatcttactcagaatattcttgcatgaaaagctcgagtctcttcttttatgtacccttaacgatcgggaaatcagcatggaagacgaagcaacgaccctttttcgcgcaacaacacttgccagtactttgatggagcagtatatgaaagctaccgctacacaatttgtccaccacgcattgaaagactcgattctcaagataatggaaagcaagcaatcgtgtgagctgtctccttccaagctggagaagaatgaggatgtgaataccaacctgactcacctgctcaacatcctgagcgagctggtggagaagatcttcatggctagcgaaatattgccacccaccctgcgctacatctacgggtgtcttcagaagtctgtgcaacataagtggcccaccaacactaccatgagaactagggtggtgtctggctttgtttttttgcggctgatctgccccgccatcctgaacccgagaatgttcaatattatatcagatagcccttcacccattgctgcccggacccttatcttggtggcgaaatcagtgcaaaacttggctaatcttgttgaattcggtgccaaagagccttatatggagggggtgaacccgtttatcaagtcaaacaaacatcggatgattatgtttcttgacgagctgggtaacgtccccgaacttcctgacactaccgagcactccaggaccgatctgtctagagatttggctgctttacacgagatctgcgtggcccattctgatgagctgcggacactgagcaatgagcgcggcgcccagcagcacgtgcttaagaagctgcttgctataacagagctcttgcagcagaaacaaaatcagtacacaaagacaaatgatgtcagatag

SEQ ID NO: 17105 - DNA, 2646 bp, synthetic construct
  misc_feature 1..2646: note = Description of Artificial Sequence: Synthetic coding sequence
  source 1..2646: mol_type = other DNA
atgtgcctggtgaaaagctggttcttgtccatacgatcacgatggtaccacgggaagctggatcggaccattgcggaggagagattgagacaggctggaaaaagcgggtcctacctcattcgggagtctgatcgtcgtcctggcagctttgttctttccttcttgtctcaaatgaacgttgtgaaccatttccgaatcatagccatgtgtggggattactatatcggcggaagaaggtttagttctttgagtgacctgattggatactatagtcacgtgtcctgcctgctgaagggagagaagctgctctacccggttgccccccccgagccagttgaagaccggagacgagtgcgtgcaattctgccttataccaaagtgccagacaccgacgaaattagctttcttaagggcgacatgttcatcgtacacaatgagcttgaggacggctggatgtgggttaccaacctgcgaaccgacgaacagggattaatagttgaggacctggttgaggaggtcggcagggaggaggatcctcatgagggaaaaatttggtttcatggaaagatcagcaaacaggaggcgtataatttgctaatgaccgtgggtcaggtgtgttcatttctggtgagacctagtgacaacacccctggagactactccttatattttcgtacaaatgagaatattcagcgatttaagatatgtccaactcccaacaatcagtttatgatgggaggacggtattacaattctattggcgacattattgaccattaccgcaaggagcagatcgtcgagggctactatctcaaggaacccgtccccatgcaggaccaggaacaggtattgaatgacacggtggatggcaaggagatctataatacgattcggaggaaaaccaaagatgcgttctacaagaatattgtaaagaagggctacttactcaaaaaaggtaagggtaagcggtggaagaatctttactttattctcgagggaagtgatgcccaactcatatattttgagtcagagaagagggccacaaagcctaagggcttgattgacttgagtgtttgcagcgtgtacgtggtgcatgactcattgttcgggcggcctaattgttttcagattgtcgttcagcacttctcagaagaacactacatcttctactttgccggcgaaacacctgaacaggccgaagattggatgaaaggtctgcaagctttttgtaatttaagaaagtcctctcctggcacttcaaacaagaggctgaggcaagtgtcaagcctggttttacacatcgaagaagctcataaactcccagtaaagcattttaccaatccatattgtaatatttacttaaactctgtacaagtcgcaaaaactcacgctagagagggacagaatcccgtgtggtccgaagaattcgtctttgacgacctcccccctgatattaatcggttcgagatcaccctgagtaataaaactaagaaatcgaaggaccccgatatcctgtttatgcggtgtcaactcagcagactccagaaggggcacgcaacagatgagtggtttctcctgtcctcacacatcccactgaaggggattgagccaggatcactcagggtgcgggcaaggtacagcatggagaagattatgcccgaggaggagtattcagagttcaaagagctcatcttgcaaaaagagctccatgttgtgtatgccctctctcacgtctgcggccaggacaggacattgctagcaagcatactgttacgcatcttcctacacgaaaaactagaatctctgcttctgtgtacacttaatgaccgcgagatcagtatggaagatgaggcaactaccctcttccgggccacaactttggcaagcaccttgatggaacaatacatgaaggctaccgcaacacagttcgtccatcacgcacttaaggactctatactgaagataatggaatctaagcaaagctgcgaattgtccccgtcaaaactggagaagaatgaggatgtcaataccaatttgacacatttgctcaacattctcagtgagctggtcgaaaagatttttatggcgagtgagatcctgcctcccaccctgaggtacatttacggctgtctgcagaaaagtgttcagcacaagtggccaaccaatacgaccatgcgtacccgggttgttagtggctttgtctttctgcgtttaatttgcccggcaatcctgaaccctcgaatgttcaatattatatcagattccccctcccccattgcggcccgtacactcattctcgtggccaagtccgtacaaaatctggcgaacttggtcgagtttggggcaaaggaaccttacatggagggcgtgaacccattcattaaatcaaataagcatcgcatgattatgttccttgatgagttggggaacgttcccgagctgcctgacactaccgagcacagcagaacagatctgtctagagacctcgctgccttgcatgagatttgcgtggcacactcagacgaattgcgaactctgtccaacgaacggggggcgcagcagcacgttttgaagaagctgctggcgataacagaactgttgcagcagaagcagaaccagtacactaaaactaatgacgtgcgctag

SEQ ID NO: 17106 - DNA, 2643 bp, synthetic construct
  misc_feature 1..2643: note = Description of Artificial Sequence: Synthetic coding sequence
  source 1..2643: mol_type = other DNA
atgaggacagggtatagttcagtaccttcaaagttaagatggtaccatggaaagctcgacagaactattgccgaggagcggctccggcaggccgggaagtccgggtcctatttgatccgagagagcgaccggagacccggcagttttgtactatcattcttgtcacagatgaacgtagtgaaccacttcaggatcattgccatgtgcggtgattattacattggaggcagacggttttctagcctctctgacctgattgggtactatagtcatgtgtcatgtctgttgaaaggggagaaattgttgtaccctgttgcccctcccgagcccgttgaggataggcggcgggttcgagcaatcctgccttacacaaaagtacccgatactgacgaaatttccttcctaaaaggggatatgttcatagttcacaacgaattggaggatggatggatgtgggtcacaaatctgcggacagacgaacaagggctaattgtagaggacctggttgaggaggtaggccgcgaagaggaccctcatgagggcaagatttggttccacggaaagatttccaagcaggaagcatacaacctcttaatgaccgtaggtcaggtgtgttctttcctggtgcgtcctagtgacaataccccaggagattattcgttatacttcaggaccaatgagaacattcagaggttcaaaatctgtcccaccccgaataaccagtttatgatgggggggcgatactacaactccattggcgatatcatcgaccattataggaaggagcagattgtggaaggctattatctgaaagagcctgtgccgatgcaagaccaggagcaggtccttaacgatacagtggacgggaaggagatctataacaccattagacgaaagacaaaggacgcattttacaagaatattgtgaagaagggctacttgttgaagaagggtaagggcaaacgctggaagaatttgtactttattcttgagggttccgacgcccagctgatatacttcgaaagtgagaagcgcgctactaagcctaaaggccttattgacctgagcgtgtgctcagtctacgtcgtgcatgacagtctcttcggacggcccaattgtttccagattgttgtgcagcatttctccgaggagcactacatcttctattttgccggcgaaacaccagaacaggccgaggactggatgaaggggctgcaagcattttgtaatttgagaaaaagttcacccggcacaagcaataaaagattacgccaagtcagcagtcttgtgctacacatcgaagaggctcacaagctgcccgtgaagcattttacaaatccttactgcaacatttatctgaacagcgttcaggttgcaaaaactcacgcgcgagaagggcagaatcctgtgtggtccgaggaattcgtgtttgacgacctcccacccgatatcaacagatttgaaattaccctcagtaacaaaaccaaaaaatcaaaggacccagatatcttgtttatgcgttgccaactgtcaaggctgcagaagggtcatgccaccgatgagtggttcctcttatctagccacatacccctgaagggaatcgaacctggtagtctgagggtgcgggcccgctattctatggagaagataatgccagaggaagagtattccgagttcaaagagcttatccttcagaaggagctccacgttgtgtacgccctgtcacatgtgtgtggccaggaccggactttgctagcgtcaatcctgctcaggatctttctgcacgagaagctggaatctctgctgctgtgcaccctgaacgatcgggagatcagcatggaagatgaagccaccaccctctttcgggcaacaacattggcgagcacgcttatggagcagtacatgaaggcgactgccacacagtttgtccaccatgccctgaaggatagcattctcaaaatcatggagtccaaacagagctgcgagctgtcaccatctaagctagagaagaacgaggatgtcaacacaaacctgacacacctcctgaatatcctgtcagagctcgttgaaaaaatctttatggcgtcagaaattttacccccgacgctccggtacatatacggatgtctccaaaagtccgtccagcacaagtggcctactaacacgactatgcgcactagggtggtgtcaggattcgtattcctgagactaatttgccctgctattcttaacccccgcatgtttaacattatcagcgatagcccaagccctatcgcagctcgcaccctgattttagtggcaaagagtgtgcaaaaccttgcaaatctggtggaattcggcgcaaaggagccctatatggaaggcgtgaacccattcataaagtctaacaagcacaggatgattatgtttctcgacgaattgggcaacgtgcctgagctgcccgacaccacagagcacagtcggaccgacttgtcccgcgaccttgccgccttgcatgaaatctgtgtcgcccactctgacgagctgaggacgctctctaatgaacgtggggcccagcagcacgtactgaaaaagctcttggcaattaccgagttgctccaacagaagcagaatcaatatactaaaacaaacgacgtcaggtag

SEQ ID NO: 17107 - DNA, 2616 bp, synthetic construct
  misc_feature 1..2616: note = Description of Artificial Sequence: Synthetic coding sequence
  source 1..2616: mol_type = other DNA
cgaggggacgcttccggctggggctgtagcgaaccgggccctggtggaccatggggctctcgtgccggacgggttgggcagtctagagctggttttaacatgatggcagcagaggctgggagcgaagagggcggacccgtcactgcaggcgcaggcggcggaggggccgccgcaggatcctctgcttaccctgctgtttgccgcgtgaaaatccccgccgccttaccggtggccgccgccccttacccaggactggtggagactggtgttgcgggaacgttaggcgggggcgccgcactcggctctgaattcctgggcgctgggtccgtggcaggggctttgggaggggctggcctcacgggggggggaacggcagctggtgtggcaggcgctgcagccggtgtggccggcgcggcggtggctggccccagcggggacatggctctgacaaaattacctacttctcttcttgcagagaccttaggacccggaggagggttccctcccctgccacctcccccatacctcccacctttgggggctggcctcggcactgttgacgaaggagactcacttgatggtccagagtacgaagaagaggaagtcgcaataccgctaaccgccccccctactaaccagtggtaccacggcaaactagaccgtaccatagcggaagagcgcctcaggcaggcgggtaagagtggctcctatttaataagagaatcagacaggcgtcctgggagctttgttttaagttttctttcgcaaatgaacgtggtgaaccacttcaggataatagcgatgtgcggagattactatatcggcggacggcgttttagtagcttaagtgacctcatcgggtattattcacacgtgtcctgccttctgaaaggcgaaaaactgctctatcctgtggcccctcccgaacccgtagaggaccgtaggcgagtgagagctatacttccttatactaaggtgcccgacacagatgaaattagtttcttaaaaggagacatgtttatagtgcacaatgagttagaggacggatggatgtgggtcacaaaccttcgtaccgacgagcaggggctcatcgtggaagacctcgttgaagaggttggcagagaagaagacccccacgagggtaaaatttggtttcatggcaaaatctccaaacaggaagcctacaacctgctgatgaccgtcggtcaggtgtgctccttccttgtgcgcccctcggacaacacgcccggggactacagcctgtattttcgaacaaacgagaatatccagagatttaagatctgccctacacctaataatcagttcatgatgggaggaaggtactataatagcataggagacattatcgaccattatagaaaagaacagatcgtagaggggtattacctcaaggagcccgttcccatgcaggaccaggaacaagtgctaaatgacacagtcgatggaaaagagatctataatactataaggagaaagaccaaggacgccttttacaagaacatcgtgaaaaaaggctacctcctaaagaaaggtaaggggaaacgatggaagaacttatacttcatcctcgaagggagcgacgcacagcttatctatttcgaaagtgaaaagcgggctaccaaacctaagggactgatcgatctctccgtgtgcagcgtgtacgtggtccacgactccttgttcggaaggcctaactgttttcagattgttgtgcagcatttctccgaagaacactacattttttattttgccggcgaaacaccagaacaggcggaggactggatgaagggtctacaggctttttgcaacttgcggaaatcaagtcccggtacaagtaacaagcgccttcgccaggtaagctcactggtgctgcatatcgaggaggcgcataagctgcccgttaagcacttcaccaatccctactgcaatatctacctaaatagcgtccaggtggccaagacccatgcaagagagggccagaatcctgtatggagcgaagaattcgtctttgatgacctgccaccagacataaaccggtttgagattacactctccaacaaaactaagaaatccaaggacccagacatattattcatgagatgccaactgtcacgactacagaaaggccatgctacggacgagtggttcttgctgagctctcacattcctctaaagggaatcgagcctggatctctaagagttagagccagatactccatggagaaaattatgcccgaggaggagtactcagaatttaaggagttgattctgcagaaagagctgcatgttgtgtacgcgctcagccatgtgtgtgggcaggatagaacgctgttggcgtccatccttctcagaatttttctccacgaaaagctcgaatctcttcttctttgcacccttaacgacagagagatttctatggaggatgaggccaccaccctgtttcgcgcaacaaccctggcttctactctcatggaacagtacatgaaggccacggcaacacagttcgtccatcatgcgttgaaggacagcattctgaagatcatggagagtaagcagtcatgtgagctcagtagctccaaattgcaaaaagcttag

SEQ ID NO: 17108 - DNA, 1161 bp, synthetic construct
  misc_feature 1..1161: note = Description of Artificial Sequence: Synthetic coding sequence
  source 1..1161: mol_type = other DNA
atgaatccccagatccgcaaccccatggaacgcatgtacagagacactttttacgataactttgagaatgagccaatcctgtatggaaggtcctacacctggttatgttacgaggtgaagatcaaacgaggacgctctaaccttctgtgggataccggggtcttcagagggcccgtgctgccaaagcgccagtccaaccacaggcaggaagtgtatttcagatttgagaatcacgctgagatgtgcttccttagttggttttgtgggaatcggctgcccgcaaacaggagattccagattacatggttcgtctcctggaacccctgtttgccctgcgtggtgaaagtgacaaaatttttagccgagcacccaaacgtgaccttgactatcagcgcggccaggctgtattactacagggatcgggattggagatgggtcctgttgcgccttcacaaggcaggcgcccgcgtcaaaattatggattatgaggactttgcctattgctgggagaatttcgtgtgcaacgaaggtcaacctttcatgccatggtacaagtttgatgataactacgcttcactgcataggacactgaaagagatcttgcgcaaccccatggaagcaatgtacccccacattttctactttcacttcaaaaaccttcttaaggcttgcggccgaaacgagagctggctgtgctttactatggaagtgacaaaacaccattctgccgtttttcggaagcgaggagtctttcgtaatcaagtggaccccgagactcattgccatgcagaacgatgctttctgtcttggttctgtgacgacatcctgagtcctaacacaaattacgaagtcacgtggtacacgagttggtccccatgccctgaatgcgcaggtgaagttgccgaattcttagctcgccactctaacgtgaatctcacgatattcactgccaggctttgctacttttgggacactgactatcaggaagggttatgcagcctgagccaggagggagcttcagtaaagatcatgggatacaaagattttgtgtcctgctggaagaactttgtgtacagcgatgacgagccattcaaaccctggaaagggttgcagaccaactttaggctgcttaagcggagattgagagagatcttgcaatag

SEQ ID NO: 17109 - DNA, 348 bp, synthetic construct
  misc_feature 1..348: note = Description of Artificial Sequence: Synthetic coding sequence
  source 1..348: mol_type = other DNA
atggggggttctttgagggtggccgtccttggagctccaggtgtgggaaaaacggctatcatccgtcagttcctttttggcgattacccggaaagacaccgtccaacagatggtccacggctgtaccgtcccgccgtattgctagacggtgcagtgtacgacttatctattagagatggagatgtagcaggcccaggatctagccctggaggacctgaagagtggcccgacgccaaggattggtctctacaggataccgacgccttcgttctggtttatgatatatgctctcccgactcctttgattatgtgaaagccctccgacagcgcatagctgagaccaggtag

SEQ ID NO: 17110 - DNA, 579 bp, synthetic construct
  misc_feature 1..579: note = Description of Artificial Sequence: Synthetic coding sequence
  source 1..579: mol_type = other DNA
atgcaggcaataaagtgcgtagtcgttggcgacggagcagtaggcaagacttgtctgctgatttcctatactacaaacgccttcccaggtgagtacattcccactgtttttgacaattatagcgcaaacgtgatggtggatggaaagcctgtgaatttaggtctctgggacactgccggccaggaggactacgaccgactccggcctctttcctaccctcagactgatgtcttcctaatatgcttctctcttgtatccccagcatcgtttgagaatgtccgcgccaagtggtaccctgaggtgcggcatcactgtcctaataccccgatcatcttagtggggactaagctggacctccgtgatgacaaagacacgattgaaaaactgaaagagaagaaacttactccgatcacctacccacagggccttgccatggcaaaagaaattggcgcagtcaagtatttggaatgcagcgcactcacccagcgaggcctcaaaacggtctttgatgaagctattagggccgtgttgtgcccacctccggtcaagaagcgcaagcggaaatgtctcctgctgtag

SEQ ID NO: 17111 - DNA, 636 bp, synthetic construct
  misc_feature 1..636: note = Description of Artificial Sequence: Synthetic coding sequence
  source 1..636: mol_type = other DNA
atgcaggctattaagtgtgtggtggtgggagatggtgccgttggcaagacctgcctcctgatctcatacaccaccaacgccttcccgggcgagtatataccaaccgtgttcgacaattactccgccaatgtcatggtggatggaaaacctgttaatctcgggttatgggatacagctggacaggaagattacgatagactgcgacctctgagttatccccaaaccgtcggagagacatatggtaaggatatcacaagcaggggaaaggataagccaatagcagatgttttccttatctgtttctccctcgtcagtcctgctagcttcgagaacgtgcgggccaagtggtaccccgaggtccggcaccattgcccgaatacccccatcattctcgtcggcacaaaactggacctcagggatgacaaggacaccattgaaaagttgaaggagaaaaaacttacacctattacatacccgcagggactggcgatggctaaggagataggcgccgtgaaatatctggagtgttccgcactgacccagagggggctaaaaacggtgttcgacgaggccattagagctgtgctatgtcccccgcctgttaaaaagaggaaaagaaaatgcttgctgttgtag

SEQ ID NO: 17112 - DNA, 579 bp, synthetic construct
  misc_feature 1..579: note = Description of Artificial Sequence: Synthetic coding sequence
  source 1..579: mol_type = other DNA
atgcaggccattaagtgtgtggtggtaggtgatggtgccgtcggcaagacatgcctgctgatctcgtatacaaccaatgcatttccaggcgaatatattcctaccgtgttcgataactattctgccaatgtcatggtggattctaaacccgtgaacctgggcctctgggataccgctggtcaggaggactacgaccgccttcgtcccttatcatatccacagactgacgtcttcctcatttgtttctcacttgtctctccagctagctacgaaaatgtcagagcaaaatggtttccggaagtgcgccaccactgcccatccacccccataatcctagtaggtactaaactcgacctgcgggatgacaaggacaccatagagaagttaaaagagaagaaattagctccaatcacatatccccagggcctggcccttgctaaagagatagacagtgtgaaatatttagagtgcagcgctctgactcaaagaggcctgaaaactgtattcgacgaagccattcgagctgtgctgtgtccccagcccaccaggcagcagaaacgcgcttgttctctcctgtag

SEQ ID NO: 17113 - DNA, 261 bp, synthetic construct
  misc_feature 1..261: note = Description of Artificial Sequence: Synthetic coding sequence
  source 1..261: mol_type = other DNA
atgcaggctatcaaatgcgtggttgtcggcgatggggcagtggggaaaacatgtctcctgatctcctacacaaccaatgcctttccaggagagtacatcccaactgtgcctggcaggccatgcgctttgctacaagacgcagaggccggtttgtcatcggacgtcgaaggcgcttgctggtgccagacccaagaggggaggatgacaggggaggctcctgcacccccatggccagccctgagaggtccccaccattcttag

SEQ ID NO: 17114 - DNA, 558 bp, synthetic construct
  misc_feature 1..558: note = Description of Artificial Sequence: Synthetic coding sequence
  source 1..558: mol_type = other DNA
atgcaagcaatcaaggccgttggaaagacttgtctgcttatcagttatacgacaaatgcattccccggtgagtacattccaaccgtgtttgacaactactctgccaacgtgatggtcgattccaagcccgtgaacctgggcctgtgggacaccgcggggcaagaggactacgaccgcctgaggccactttcctacccccagacagatgtgttcctcatctgtttttccctggtgtctccagcatcctatgagaacgtgcgtgccaagtggttcccagaagtgcgacatcattgccccagcacgcctattatcctggtaggaacaaagttggacctcagagacgataaagacaccatcgaaaagcttaaggagaaaaagttggctcctattacctatccacagggactggccctggctaaggagatagattccgttaaatatctggagtgcagcgcactgacacagcgcgggctgaagaccgtcttcgatgaagccatcagagctgtattgtgccctcaacctaccagacagcagaagcgcgcatgcagcctcttatag

SEQ ID NO: 17115 - DNA, 447 bp, synthetic construct
  misc_feature 1..447: note = Description of Artificial Sequence: Synthetic coding sequence
  source 1..447: mol_type = other DNA
atggtcgacagtaagcctgtcaatctcggactctgggatacagctgggcaggaagactacgatcgcctgcgccccttgtcctatccacaaaccgacgtttttctcatatgtttctccctggttagtcctgcctcatacgaaaacgtccgcgctaagtggttccccgaagtgcgccaccactgtccatcaacgcctattatcctggtgggaaccaagttggacctgagggacgacaaagatacaatagagaagcttaaagaaaagaagctggctcctattacataccctcaggggcttgcactggccaaagagattgacagtgtgaaatacttggaatgtagtgcattaactcaaaggggcctcaagacagtcttcgatgaagctatccgcgccgtgctttgtccgcagcccactaggcagcagaagagggcgtgcagcttgctgtag

SEQ ID NO: 17116 - DNA, 501 bp, synthetic construct
  misc_feature 1..501: note = Description of Artificial Sequence: Synthetic coding sequence
  source 1..501: mol_type = other DNA
atgcaagcaatcaagtgcgtcgttgtaggtgatggagcagtagggaaaacttgtcttctgatttcctataccactaacgcctttcccggcgaatacattcccacagtgttcgacaattacagtgccaatgttatggtcgacagcaaaccggtgaatttgggtctgtgggacacagctggtcaggaggactatgatcggcttagaccgctctcatacccccaaacagacgtctttctcatctgcttttccctggtctcacctgcgtcgtacgagaatgtgcgtgcaaaatggttcccggaggtgcgccaccattgccctagtacgcctattatactcgtgggaaccaaattggatcttcgtgacgataaggacaccatcgaaaagctgaaagagaaaaagctggcgcccattacatacccccagggtctggcactggctaaagaaattgacagtgttaagtatctagagtgcagcgcactcactcagagaggcttaaagtag

SEQ ID NO: 17117 - DNA, 4785 bp, synthetic construct
  misc_feature 1..4785: note = Description of Artificial Sequence: Synthetic coding sequence
  source 1..4785: mol_type = other DNA
atgaagctctacgtctttcttgtcaacacaggaactaccctcactttcgatactgagcttacagtgcagactgtggctgacctaaagcacgcgatccagagcaagtacaaaatagctatccaacaccaggttctggttgtcaatgggggggagtgtatggcagctgatcggcgcgtgtgcacatatagcgctgggaccgacacaaacccaatttttctgtttaacaaagagatgattctctgcgacaggccccccgctatccctaagaccaccttctcaactgaaaacgacatggaaattaaggtagaggaatcactaatgatgcctgcggtgtttcatactgtcgcttcgagaactcagcttgcacttgaaatgtacgaggtcgccaagaagctgtgctccttctgtgagggacttgtgcatgacgaacacctgcagcaccagggctgggccgctattatggctaacctggaggattgttctaattcatatcaaaaactgctcttcaaattcgaaagcatctacagtaattatctgcagtctatcgaggacatcaaactgaaattgacccacttgggtacggccgtttctgtgatggctaagattcccctgctggagtgccttaccaggcacagttaccgcgagtgcctgggaaggttggattcgttgcctgagcacgaagattctgagaaggccgagatgaaacgctctactgagctagttttatcgcctgatatgcccaggactacaaatgaatctctcctcactagcttccctaaatccgtggagcatgtctcacctgacactgctgacgccgagagtggcaaggaaattcgcgagtcatgtcagtccactgtccaccagcaggacgaaaccacgattgacaccaaggatggcgatttgcctttcttcaacgtgagccttctggactggataaatgtgcaggataggccaaacgatgttgaatcccttgtccgcaagtgtttcgactccatgtcaaggttagatccaagaatcatcagaccattcatcgctgagtgcagacagaccatcgccaaactcgataaccagaacatgaaggccattaaggggctagaggataggttatatgccctggatcagatgattgcaagctgcgggaggctggtgaacgaacagaaggagctggcacaggggttcctggccaaccagaaacgtgccgagaatctcaaagacgcctctgtgcttcccgacttatgcctctcacatgcgaaccagctcatgatcatgctgcaaaatcatagaaagcttctagatatcaagcagaaatgcacgaccgcaaaacaggagctcgccaataacctgcatgtgcgcctcaaatggtgttgctttgtcatgctgcacgcagaccaggatggcgagaagctgcaggccctgctgcgcttagtcattgagctccttgagcgggtaaaaattgtggaagcacttagcaccgtcccacagatgtactgcctggccgtagtggaagtcgtaagacggaagatgttcattaaacattatcgcgagtgggcaggcgccctcgtgaaggacgggaaaaggttgtatgaagcggagaaatcgaagcgcgaaagcttcggcaaactctttcgaaagtcgttcctgcggaatagactgtttagaggtctggacagctggccaccctctttttgcacacagaaaccgcgtaagttcgactgcgaacttcctgatatcagccttaaggacttgcagtttttgcagagtttctgccctagtgaggtacaaccgtttttgcgcgtgcctctcctgtgtgacttcgagcccctgcaccagcacgttctggctctgcacaatctggtgaaggccgctcaatccctcgacgaaatgagccagacgattaccgatctgctatctgaacagaaagcttctgtttcgcagactagtcctcagagtgccagtagcccccggatggagtccaccgccggcatcactacaaccacttccccacggacaccacctcctttaacagttcaggaccctctttgtcccgcagtttgcccactcgaagagttgtctccggacagcatcgacgcccacacattcgacttcgagacaataccacatcctaacatcgaacagaccatccatcaagtctctctggacctagacagcctggctgagtcgccagagtcagattttatgtctgctgtaaatgagtttgttattgaagagaacctgagctcccctaacccaatttccgatcctcagtccccggagatgatggttgaatccctctacagttctgtcatcaacgcaatcgattctcgtagaatgcaagatactaacgtgtgtgggaaagaagatttcggagatcatacctctctcaatgtacagctggagcgatgccgtgtggtcgctcaggactcacatttctctatccagacgatcaaggaggatctctgccattttaggacatttgtgcaaaaggaacagtgtgacttcagcaattcgctgaaatgtactgctgttgagatcagaaatattatcgaaaaagtgaaatgcagcctcgaaattacactgaaggaaaagcatcaaaaagagttgttgtctttgaaaaatgagtacgagggcaagcttgacgggcttataaaggagactgaggaaaatgagaataagatcaagaagctcaaaggcgaattggtttgtctggaagaggttctccaaaacaaggataacgaattcgccctggttaagcatgagaaagaggctgtgatctgcctgcagaacgagaaggaccagaagctcctggagatggagaatatcatgcactcccagaactgcgaaatcaaagagcttaaacaaagtcgcgaaatcgttctggaggaccttaaaaagttgcacgtcgaaaacgacgagaagctccagctcctccgcgcagaacttcaatcactggagcaatctcaccttaaggaattggaagacaccctccaagttcgtcacattcaagagttcgagaaagtgatgacagatcaccgcgtgtccttagaagagctcaagaaggagaatcagcaaatcattaatcagattcaggagtcccacgccgaaataatccaggagaaagaaaaacaactccaggagcttaaattgaaagtttctgacctatcggatactcggtgcaaattggaggtagaactagctctgaaggaagccgagactgatgagataaagattctgctggaggaatcgcgggcacagcagaaagagaccctgaagagcctgctggagcaggaaactgagaacttaagaaccgaaatttctaagttgaatcagaaaattcaggataacaatgagaactatcaggtggggttagctgaacttcggactctgatgaccatcgaaaaagaccagtgcatatctgaattaataagcaggcatgaggaagagagcaacatactaaaggcagagctgaataaggtcactagcctacacaatcaggccttcgaaatcgaaaagaaccttaaggagcagatcattgagttgcagtctaaactggatagcgagctgtccgcactcgagcgccagaaggacgagaagatcacccagcaggaagaaaagtacgaggctattatccagaacttggagaaggaccggcagaaactggtgagcagccaggagcaagaccgtgaacagttgatccagaaactgaattgtgaaaaggacgaagcaatccagaccgccctcaaggaatttaaactggagcgggaagtagttgagaaggaactcttagaaaaggtgaagcacctcgagaatcaaatcgcaaagtctcctgcgatcgattcgacgcggggcgatagctccagcttagtagccgagttgcaggagaaactgcaagaggagaaagctaaatttctggagcaactagaagaacaggagaagcggaagaatgaggagatgcaaaatgtgaggacttccctgatagcggagcaacagacgaattttaatacagtgctcaccagagagaaaatgcgaaaggaaaatataataaatgatttgtctgataagctcaagagcaccatgcagcagcaggagagagacaaagatttgatagagtcgctcagcgaagatagggccaggctcttagaagagaagaagaagttggaggaggaggtgtctaagctgaggtcctccagctttgttccctccccttacgtcgcaaccgcccctgagctctatggtgcctgcgcccccgagctgcctggggaatccgacagaagtgcagtcgaaactgccgacgaaggccgggtcgatagcgctatggagacgagcatgatgagcgttcaagaaaatattcatatgctctctgaagaaaaacagcgaatcatgttacttgaacggaccctgcagctgaaagaagaggagaacaaacgcctgaaccaacgacttatgagtcagagcatgtcaagcgtgagctcgcgccactcagagaagatagccatcagggacttccaggtgggtgacctcgtactgattattctggatgaacggcacgataattacgtgctcttcaccgtttcccccacactctattttcttcatagtgaatcattgccagccttggaccttaaaccaggcgaaggggccagtggagcgagtagaaggccctgggttctcggcaaggtaatggagaaggagtactgtcaagcaaaaaaggcgcagaatagattcaaagtgccactgggcaccaagttttaccgcgttaaggccgtgtcttggaacaaaaaggtgtag

SEQ ID NO: 17118 - DNA, 4776 bp, synthetic construct
  misc_feature 1..4776: note = Description of Artificial Sequence: Synthetic coding sequence
  source 1..4776: mol_type = other DNA
atgaagctctacgtctttctggtaaacactggcacaacgctgacttttgacaccgaactgaccgtccagaccgtggctgacctgaagcacgctatccagtctaagtataaaattgctatccagcatcaggtattggtagttaatggcggagagtgcatggccgccgatcgtcgtgtgtgcacctattccgccggcaccgatactaatcccatttttctgttcaataaggagatgatactatgtgaccggccccccgctattccaaagactacatttagcacggagaacgatatggagattaaggtagaggaatccttaatgatgccagctgtcttccacaccgtagcaagcaggacccagttagctctggaaatgtatgaggtcgccaaaaagttatgctcgttttgcgagggactggttcatgacgagcatctgcagcaccagggatgggcagctatcatggctaatttggaggattgttcgaactcttatcaaaagctgttgttcaagttcgagtccatttacagcaattatctgcagagcattgaagatatcaagttaaaactgacccacctgggcaccgctgtgagtgtcatggctaaaatccccctgcttgagtgtttgacaagacactcatatcgtgagtgtttggggaggctggattctctccctgaacacgaggactcagagaaagccgagatgaagcggtcaacagagctagtcctgtcccccgatatgccgagaaccacaaacgagtcactgctgacctctttccctaagtccgttgaacacgttagtcccgacaccgcagacgcagagtcgggcaaggaaatccgggagagttgtcaatctaccgtacatcagcaggacgagaccactatagataccaaagatggggacctccccttctttaacgtttccctccttgattggatcaatgttcaggataggccgaatgacgtcgagtctctggtccgcaaatgtttcgatagcatgtcacggttggaccctcggatcattcggccattcattgcggagtgcaggcaaacaattgcaaaactggacaatcaaaacatgaaagccattaaaggattggaagacaggctctatgccctggatcaaatgatcgcttcttgcgggagactggtgaatgaacagaaagaattagcgcaagggttcctggcaaatcaaaagagggctgagaatcttaaggacgcctcggtgctgcccgacttgtgcttgtctcacgctaaccagcttatgattatgttacagaatcatcgaaagctcctggacatcaaacagaagtgcacaaccgccaagcaagagctggctaataacctgcacgtacgcctaaagtggtgctgttttgttatgctccacgcagatcaggacggggagaaactccaagctctcttgagactggtcatcgagcttttagagagggttaagatagttgaagctctcagcaccgtgccacagatgtattgcttagctgtcgtggaagttgtgaggagaaaaatgttcattaagcactaccgcgagtgggccggtgcccttgtcaaagacggaaagcgcttgtatgaggctgaaaagagtaagcgcgagtctttcggtaaactattccgcaaatcattcttaagaaaccgtctcttccggggacttgacagctggccgcctagcttttgcactcaaaaaccacggaagttcgactgtgagctgccagacatctctctaaaggatctccagttcctgcagtcattttgtccgagcgaggtgcaaccattcctccgtgtgccccttctgtgcgattttgagcctttgcaccagcacgtgctggcactgcacaatctcgtgaaggccgctcagagcctggatgagatgtctcagacaattaccgatctgctctctgaacagaaggccagcgtttctcagacatccccacagtctgctagctcacccagaatggaatcaaccgcggggatcactaccacgactagtccaagaacaccgccgcccttgaccgtgcaggatcctctttgccctgccgtgtgtcccttggaagagctcagcccagacagtattgacgcccatacctttgattttgaaactatccctcaccctaatatcgagcagactattcaccaagtctctctcgaccttgatagtctggccgagtcgcccgaaagcgattttatgagtgccgttaatgagtttgtgattgaagagaatctttcaagtcctaaccccattagtgacccacaatcccccgagatgatggtggagtccctgtatagctctgtcattaacgccatagattccaggaggatgcaagatacaaacgtttgtggaaaggaggatttcggcgaccacacatcactgaacgtgcagctcgagcgatgcagggtggtcgcgcaggactcgcacttctcgattcaaactataaaggaagacctctgtcactttcgtacatttgtccaaaaagagcagtgcgacttcagtaactcacttaagtgcacagctgtggaaatccgaaacatcatagagaaagtgaagtgttctctcgagatcactttgaaggaaaaacaccagaaagaattgttgagcttgaaaaacgagtacgagggcaaactggacgggcttattaaagagacagaggagaacgaaaataagatcaaaaagctgaagggggaactcgtgtgcctggaggaagtgctgcagaacaaagacaacgagttcgccctggttaaacatgagaaggaggccgtgatttgtctgcagaacgaaaaagaccaaaagttattggaaatggagaacattatgcatagtcaaaattgtgaaatcaaggaactcaagcaaagccgggaaattgtgttagaagacttaaaaaaactccatgtggagaacgacgaaaaactgcaactgttgcgcgcagagctccagtctctcgagcagagtcatcttaaagaacttgaggatacgctccaagtccgacatatacaggagtttgaaaaggtgatgacagaccatcgtgtctcactggaggaattaaagaaagagaaccagcagattattaatcagatccaggaaagccatgcggaaatcatccaagaaaaagagaaacaattgcaggagctaaaactgaaagtgagcgacttgtcggacacccgttgcaaacttgaggtggagctggcattaaaggaggccgaaacagatgagatcaagatactgttggaggaaagccgggcccaacaaaaagaaaccctaaaatctttattggaacaggagacagagaatctgagaaccgagataagcaaactaaatcaaaagatccaggacaacaatgagaactaccaggtcgggctcgctgagttgaggacattaatgaccattgagaaagaccagtgtatctcagaattaatttcaaggcacgaggaggagtctaatatacttaaggctgagctcaataaggtgacaagtctacataaccaggcattcgagattgagaaaaacctcaaagagcagattatagagttgcaaagcaaattagattcggagctgtcagcgcttgaacgtcagaaagatgaaaaaattacccagcaggaagagaagtacgaggctattatccaaaacctcgagaaggacaggcaaaagctcgtgagttcccaggagcaagacagggagcagctcatccagaagctgaactgcgagaaagatgaggccattcaaacagccttaaaggagttcaagttggaacgggaagtggtcgagaaggaactgcttgagaaagtaaagcacctggaaaatcagatcgcaaagtcccccgctatcgatagcacaaggggcgacagctcgagcttagtcgctgaactacaagagaagctccaggaggagaaggcaaaattcctagaacagctggaggagcaagagaagaggaaaaacgaggaaatgcagaatgtgcgtacttcactgatcgctgagcagcaaaccaatttcaacaccgtgctcacgcgtgagaaaatgcgtaaggaaaacataataaacgacctatccgacaagttgaagtccaccatgcagcagcaagaaagggacaaagatttgattgagtcattatcagaggacagagctagactacttgaggagaagaagaaactagaggaggaggttagcaaactgcgaagcagcagcttcgtgccatctccatacgtcgctacggcccccgaactgtatggagcgtgtgcacccgaactacctggcgagtccgatcgatctgcagtagagactgcggacgaaggcagggtggacagtgccatggagacatcgatgatgtctgtccaggaaaatatccacatgctgtctgaggagaaacagcggatcatgctcctagagaggacgctgcagctgaaagaggaggagaacaaaagactgaaccagcggttgatgagtcagagcatgtcttcagtgagctcgagacacagcgagaagattgccatcagagactttcaggttggtgacctggtcctgatcatcctcgatgaacgacatgacaactacgttctattcacagtctcacctactttgtacttcctccactccgagagcctcccggccctcgacctgaaacccgcatcaggagcgtctagacgaccctgggtgctcggcaaagtgatggaaaaggaatattgccaagccaagaaggcacagaacaggttcaaggtaccattgggcaccaagttttaccgggtgaaggccgtctcctggaataagaaggtatag

SEQ ID NO: 17119 - DNA, 48 bp, synthetic construct
  misc_feature 1..48: note = Description of Artificial Sequence: Synthetic coding sequence
  source 1..48: mol_type = other DNA
atgaaactttacgtgtttttggtgaataccggcactaccctaacgtag

SEQ ID NO: 17120 - DNA, 4776 bp, synthetic construct
  misc_feature 1..4776: note = Description of Artificial Sequence: Synthetic coding sequence
  source 1..4776: mol_type = other DNA
atgaagctgtatgtcttccttgtcaataccggcactacactgacctttgatactgagctgacagtgcaaaccgtggccgatctgaaacacgcgatccagagtaaatataaaatcgcaattcagcaccaggtgctggtggttaatggcggggagtgtatggcagctgaccgccgggtttgtacgtattctgccgggaccgatacaaatcccatttttctcttcaacaaggagatgattctatgtgacagaccccccgccattcctaaaaccacgttctctacagaaaatgatatggaaattaaggtggaagaatcacttatgatgcccgccgtgttccatactgtggctagtcgaactcaattagcgctggagatgtacgaggtcgctaaaaaactctgtagcttctgcgagggattagtacacgacgagcatctccaacatcagggctgggcagccattatggcaaacctggaagattgtagtaacagttatcagaagttactgtttaaatttgagtctatctatagcaattacctgcaatccatcgaagatatcaaactgaaactcacacacttgggaacagccgtatccgtcatggcgaaaattccactattggaatgtctgacccgccacagctatagagagtgcctgggacgtctggacagcttgccagaacacgaggactcagagaaggcggaaatgaagcggagcaccgaactggtcctaagtcccgatatgcccagaaccactaatgagagcctactcacgagcttccccaaatcagtagaacacgtttcccccgacaccgccgacgcagaatctgggaaggaaatcagagagagttgccagagtacagtccaccagcaggatgagaccactatagataccaaagacggagacctccctttttttaatgtatctttgctggattggatcaacgtgcaggataggccgaatgacgttgagtcactcgtgcgaaagtgtttcgactccatgagccggctggatccgaggatcatccgaccctttatcgccgaatgccgccagacaattgccaagcttgacaatcaaaatatgaaggctattaaaggactcgaggatcgactgtacgctctcgatcagatgatagcatcctgtgggaggctggttaacgaacagaaggagctggcacaggggttccttgctaatcagaaacgagctgagaatctgaaagacgcatccgtcctccctgatctctgtctttcccatgcaaaccagctcatgatcatgttacagaatcatcggaaattgttggacataaaacagaagtgtaccacggcaaaacaagagcttgctaacaacctgcacgtgaggctcaagtggtgttgcttcgtgatgcttcatgctgatcaggacggagaaaagttgcaggctcttttgcggctggtcattgaactgcttgagcgggttaaaattgtagaggccttgtccactgttcctcagatgtactgtcttgccgtagtggaagtggtgagaaggaagatgttcatcaagcactatcgcgaatgggccggagccctggtgaaagatggtaagaggctgtatgaagctgagaaatcaaaacgcgaaagtttcggaaagctattccggaagtcatttctgaggaaccgtctattccggggacttgactcttggcctccgagcttttgtacacagaagccgcgcaaatttgactgcgaacttccagacataagtctgaaggatctgcagtttctccagtcattttgtcctagtgaagtgcagccctttctaagagttccccttctttgtgactttgaaccgttgcaccagcacgtcctcgcgctgcacaatctcgtgaaggccgcgcagtccctggatgagatgagtcaaacgatcacagatttgctttctgagcagaaagcctccgtgtcccaaacttctccgcagtccgcctccagcccccgaatggagagcacggccggcatcactacaactacgtcccctaggaccccgccccctctgaccgtgcaggatcccttatgcccagcagtctgcccacttgaggagctttcaccggacagcatcgatgcacacacattcgacttcgaaactatccctcaccccaacatagagcagaccatccaccaagtctcgctggatctagattctctggcagaatctcccgagtccgacttcatgagtgctgttaacgaatttgtaattgaagagaacttaagtagcccaaatcctatctctgacccacaatcccccgaaatgatggtcgaatctctgtactcctcagtcatcaatgccatcgatagccgcagaatgcaggacacaaatgtgtgtggcaaagaggactttggcgatcatacgagtctaaacgtccagctcgaacggtgccgggtggtggctcaggatagccactttagcatccagacaatcaaagaggacctgtgccacttccgtacttttgtacagaaggagcaatgtgatttcagcaacagcctgaagtgtacagcggtggagataagaaacattatcgaaaaggtaaaatgcagcttggagataacactgaaggagaaacatcagaaggagctgctctccttgaaaaacgagtatgagggcaaattagacggtctgatcaaggagaccgaagagaatgaaaataagattaaaaagctgaagggcgaacttgtgtgtctcgaggaagtgctgcagaacaaagataatgagttcgctctcgtgaagcatgagaaggaggccgttatctgcctgcagaacgaaaaagaccagaaactactggagatggaaaacatcatgcattcgcagaactgtgaaataaaagagttgaaacagtcgagggagattgtgctcgaggaccttaaaaagctccatgtggaaaacgacgagaaactgcagcttcttagagctgagcttcagtcacttgaacagtcgcaccttaaggaactggaggataccttacaagtccggcatatacaggagttcgagaaggtgatgaccgaccaccgggttagtctggaagaactgaaaaaagaaaaccaacagatcattaaccaaatccaggagtcccacgctgagataattcaggaaaaagagaaacagctgcaagagctaaagttaaaagtcagtgacctgagtgacacacgatgcaaactcgaggttgagctagctttgaaagaggctgagaccgatgagattaaaatattgttagaagagagccgggctcagcagaaagaaacattgaagtccctcctcgaacaggaaactgagaacctaagaacagagatcagcaagcttaatcagaaaatccaggataacaacgaaaactatcaggtgggcctggctgaactgagaactctgatgaccatcgagaaagaccagtgcatttcagaactcatcagcaggcacgaggaggagtctaatatcctaaaggctgagctcaacaaggtgaccagtctgcacaatcaggcctttgaaatcgagaagaatttgaaagagcagattatcgagctacagagcaagttagatagtgagctttcagcacttgagcgccagaaggatgagaaaattactcagcaggaagagaagtacgaagcaattatccagaacctggaaaaggaccgccagaaactggtatcaagccaggagcaggatcgcgagcagctgattcagaaacttaattgcgagaaggacgaggccatacagacagcgctgaaagagttcaaactagagagggaggtggtggaaaaggagttactcgaaaaagttaaacatttagaaaaccagattgccaagagccctgctattgactcaactaggggagacagttccagcctggtcgccgagctgcaagagaagctccaggaagagaaagcaaagtttctcgagcagctggaagagcaggagaagcgtaaaaatgaagagatgcaaaacgtccggacctccctgattgctgagcagcaaaccaactttaataccgtgctgaccagggaaaaaatgagaaaggaaaatatcataaatgaccttagtgacaaactcaagtcaactatgcagcagcaagaaagggataaggatttgatagagagtctaagtgaggatcgggccaggctgttagaggagaaaaagaaactcgaagaggaggtctccaaactccgtagcagctccttcgtgcctagtccctatgtggccactgctcctgagctctacggagcttgtgcccccgaacttcccggagagtccgacagaagcgccgtggaaacagctgatgagggtagagtggacagcgccatggagactagtatgatgagtgttcaggaaaatatccatatgctgagtgaggaaaagcagcggatcatgttactcgaaaggacactccagctgaaagaggaggaaaataagcgactcaatcagcgactcatgtcacagtccatgtctagcgttagttctcggcactccgagaagatagctatccgcgactttcaagtaggtgatctcgttctcattatactggacgaacgacacgacaactatgtcctcttcactgtgagtcctaccttatattttttgcactccgagagcctcccagctctagacttaaaacctgcctccggcgccagccggcgcccatgggttttgggtaaggttatggagaaagaatattgccaggcaaagaaagctcagaatagatttaaggtacctctgggaacaaaattctatagagttaaagccgtgtcatggaacaagaaggtatag

SEQ ID NO: 17121 - DNA, 6471 bp, synthetic construct
  misc_feature 1..6471: note = Description of Artificial Sequence: Synthetic coding sequence
  source 1..6471: mol_type = other DNA
atgagcgacacacccagcactgggttctctattatacaccctacctcatcagagggccaggtgcctccaccgcgccatctctcccttacccaccctgttgtggcgaagaggatctctttttacaagtcaggcgacccccagttcggcggcgtccgagttgtggtgaacccccggtctttcaaaagtttcgacgccctgctggacaacctgagcagaaaagtcccactgccctttggagttagaaacatctctactcctagagggcgtcactccattacgagactggaagaactcgaggatggtgagagttacctgtgttcccacggacgcaaagttcagcctgtcgatctcgacaaagctcgcagacgcccaagaccctggctgtcaagtagggccatatctgcgcactccccaccccaccccgtggccgtcgccgccccaggcatgcctaggccgccaaggtccctcgtagtgtttcggaacggcgaccccaagacaaggagagccgtcctgttgtctagacgggtcacccaatcatttgaagcattccttcaacatcttaccgaagtgatgcagcgcccggttgtcaaactctatgcgactgatggtaggcgagtgccttccttgcaggccgtgatcctgtccagtggagcggtcgtcgcggcaggtcgcgaaccatttaagccaggcaactacgacatccagaagtacctcttgcccgcaaggctgcccggcatctcccagagggtttaccctaaggggaacgccaaaagtgaatccagaaagatcagtacccacatgtcctcgagctccaggagtcagatatattctgtgtccagtgagaaaacgcacaataatgactgctatctcgactactccttcgtgccagaaaaatatttggccttggaaaaaaacgattctcagaacctgcctatatatcctagcgaagacgacatcgaaaaatccatcattttcaaccaggacggaactatgactgtggagatgaaagtcagatttaggattaaagaggaggagacgattaagtggaccacgactgtgtcaaagacagggccctctaacaacgatgagaaaagcgagatgtcattccccggcaggaccgagagcaggtcaagtggacttaaacttgcagcctgttcatttagcgcggatgtgtcaccaatggagcggtcttcgaatcaggaaggatcgttggcagaggagattaacattcagatgactgaccaggtggctgagacatgttccagcgcttcctgggaaaatgcaacagtcgacactgatatcatccaaggcacccaggaccaagccaaacaccgattttatcggccccccaccccaggccttcgtagggtccgccaaaagaaatcggttatcggttctgtcaccctggtgtcagaaacagaggtgcaggagaaaatgattggccagttttcctacagcgaagagagggaatcaggtgagaataaatcagagtaccatatgtttacccacagctgttctaagatgagctccgtgagcaacaagccagtgctggtgcagattaataataacgaccaaatggaagaatcctccctcgaacggaagaaggagaacagtttgctcaaatcttcggcgatatccgccggggtcattgagattacttcacagaaaatgctggagatgtcacataataacggattgccaagcacaataagtaacaacagtatcgtggaagaggatgtcgtggactgtgtcgttctcgacaacaagaccggcatcaagaatttcaagacatatggcaacactaacgacagattcagccctattagtgcagacgctacccacttctcatccaataatagcggtaccgacaaaaatatcagcgaggccccagcctccgaagcctcttcaacagtgacagctcggattgataggttaatcaatgaattcgcccaatgtgggttaactaaactacccaagaacgagaagaagatactaagcagcgtcgcaagtaagaaaaagaagaagtcccgccagcaggcgatcaacagccgctatcaggacggtcagctcgcgacaaaggggatcctgaataagaacgagcggatcaatactaagggtcgcatcaccaaggagatgatagtccaggactcagactcccctctgaaaggaggcattctgtgcgaagaagacctgcagaagtccgacacggtcatcgagtcaaatacgttttgctctaagagtaatctgaatagcacaatctccaaaaacttccatcgtaataagttgaacacgacccaaaattcaaaggtgcagggtcttctaactaagcgtaagagtaggagtcttaacaaaatcagtctgggggcccccaagaagcgagagatcggtcaacgcgacaaggtttttcctcacaatgaatctaaatattgcaaatcaaccttcgagaataaatcactgtttcacgtcttcaatatactggagcagaagcccaaggatttttacgcccctcagtcgcaagccgaggtggcttctggctatctaagaggaatggctaagaagtctctggttagcaaagtgacagacagccatatcacactcaagagccaaaagaaaagaaagggtgacaaagttaaggcctctgcaatcttgtcgaaacagcatgccacgactagggccaattccctcgcctctctcaagaagccggactttcctgaggccatcgcccatcattctattcaaaattacatccagagctggctacagaatattaacccataccccacgcttaagccgataaagagtgccccagtatgtaggaacgaaacctctgttgtgaattgctccaacaattctttctcaggaaacgacccacatacaaacagcgggaagattagcaatttcgttatggagtctaacaagcacattactaaaattgcgggcctgacgggtgacaatttgtgcaaagaaggcgacaagtctttcatcgctaatgacactggtgaggaggatttacacgagactcaagtgggctcattgaacgacgcctacctggtgccactgcacgagcattgcaccctgagccagagcgctatcaatgaccacaacaccaagagtcacatagcagctgaaaaatctggtcctgaaaagaaactcgtgtatcaggagatcaacctagcgcggaagaggcaaagtgtggaagctgctattcaggtggaccctatcgaggaagaaacacctaaggacctgctcccagtacttatgctgcaccaacttcaggccagtgttcccggcatccataaaactcagaacggagttgtgcagatgcccggctcactggccggggttccctttcactccgccatttgcaattcctcgaccaatctgctgctggcctggttactagtgctgaatctgaaaggatctatgaattcattttgtcaggtggatgcgcacaaggccacgaacaagagttctgagacccttgcactcctagaaattctgaagcatatcgccatcactgaggaagcagacgatctgaaggcggccgtggcaaacctagttgagtctaccacgtcccacttcgggctgtcagaaaaggaacaagacatggtccccattgatctttctgccaactgtagcaccgttaacatccagtccgtccctaagtgctctgaaaacgagagaactcagggaatctcttcacttgacggtggatgttcggcatccgaggcctgtgctccagaggtctgcgtcctggaagtgacatgttcaccttgtgagatgtgcactgtaaacaaagcctattctccgaaggagacatgcaacccttctgacactttttttccctccgatggttacggcgtagatcaaaccagcatgaataaagcttgcttcctgggcgaggtttgctctctcaccgacactgtcttttccgacaaagcttgtgcccagaaagaaaaccacacatatgagggtgcgtgtcccattgatgagacttacgtgcctgtcaacgtctgcaacactattgactttctcaactcgaaggaaaacacctacacagataacttggacagcacggaggagttagagcgcggcgatgacattcaaaaggacctgaatatactgactgaccctgaatataaaaatggattcaatacgcttgtctctcaccagaatgtctccaacctaagcagctgcggcctctgtctgtcagaaaaggaagccgagctcgataaaaaacattcatccctggatgactttgagaactgttcgctccgcaagttccaggacgagaacgcctacacgagttttgatatggaagagccgcgcacttctgaagaacctggcagcatcactaacagcatgacctcctccgagaggaacatcagtgagctggagtccttcgaagaattggaaaatcacgatacagacatattcaacacagtagtcaacggcggggaacaggccacagaggagttgattcaggaggaagtcgaagcttccaagaccctggaactgatagatatcagctcgaagaacatcatggaagagaagcgaatgaacggcatcatatacgagatcatttcaaagcgattagctactcccccctccttagacttctgttacgatagtaaacagaattctgagaaagaaactaacgagggcgaaaccaagatggtgaagatgatggtcaaaacaatggaaactgggtcctacagcgaatcgtcgccagatctgaagaagtgtattaagtcaccggttacttctgactggtctgactaccggcccgactcagattccgaacagccatacaagacttcctctgatgatccaaatgactcaggagaactgacacaggaaaaagagtataacatcggcttcgtgaaacgggcaatagaaaagctgtacgggaaggcggatattattaaaccatctttttttccaggttcgacccgaaagtcccaggtgtgcccttacaattcagtcgaattccagtgcagtagaaaagcgtcgctatatgacagcgagggccagtcattcggatcttccgaacaggtgtccagttcctcaagtatgctacaggagtttcaggaagagaggcaggacaaatgtgacgtgtccgctgtccgagacaactactgccgcggcgatatcgtggagcccggaactaaacagaacgacgattctcgaattctgaccgatatcgaggaaggtgtcctgatcgataaagggaagtggcttctcaaggagaatcatttactgagaatgtcgtccgagaaccccggcatgtgtggaaatgccgatactacatcagtggacactttgctggataacaattcatcggaggtgccctactcacactttggtaatcttgcaccaggccccacgatggacgagctaagcagctccgaacttgaggagctcacccagcccctggaactgaagtgtaactattttaatatgccacatggctcggacagcgaacctttccatgaggacctgcttgatgtgcgcaacgagacatgcgcgaaggaaaggattgcaaaccaccacactgaggagaaaggctctcatcagagtgaacgcgtctgcacctcggtgacacattctttcatctcggctgggaataaggtctatcctgtgtcagacgatgccattaaaaatcagccgctgccaggctccaacatgattcatggtaccctgcaggaggcggacagtcttgacaaactctatgcactctgcgggcagcactgccctatcctgaccgtcatcatccagccaatgaatgaggaggatcgaggattcgcctaccggaaggagtccgatatcgagaactttttaggcttttatttatggatgaaaatccatccatacctcctacagacggataagaacgtgtttagagaggagaacaacaaggcttcaatgaggcagaaccttatcgacaacgctattggggatatctttgatcagttctatttctcgaacactttcgatctgatgggaaaaaggcggaagcagaaacgaatcaacttcctaggcttggaagaggaagggaatttaaagaaattccagcctgacctgaaggagcgcttctgtatgaacttccttcacaccagcctactcgtcgtaggaaatgtggacagcaatacacaagacctgtcggggcagaccaacgaaattttcaaggccgtggacgaaaataacaatctattaaacaaccgattccagggcagccgtaccaaccttaaccaggtggtgcgggaaaatattaactgccactactttttcgagatgttaggccaagcctgtctcttggatatctgtcaagtagagacgagtctgaacatttccaaccgcaatatcctagaactctgtatgttcgagggcgaaaacttgtttatttgggaggaagaggatatcctgaaccttacggatctcgaaagcagcagggaacaggaagacttgtag

SEQ ID NO: 17122 - DNA, 1212 bp, synthetic construct
  misc_feature 1..1212: note = Description of Artificial Sequence: Synthetic coding sequence
  source 1..1212: mol_type = other DNA
atgacaccccctctgctccaccatgacctgaaaacacagaacatccttctcgataatgaattccatgtcaaaattgctgactttgggctttcgaaatggcgtatgatgtcattatcccagtcccgcagttccaaatcggctccagagggggggacgattatatacatgccgccagagaactacgaacccggccagaagagccgggcctcaatcaaacatgacatatactcctacgctgtgattacatgggaggttctgagccgcaagcagccttttgaagacgttactaacccactacagatcatgtatagcgtgagccaagggcacaggcctgtgattaatgaggagtctcttccttatgacattccacatcgagctaggatgatcagcctaatcgaatcgggatgggcccagaatcccgacgagcggccatcatttcttaagtgtctaattgagttagagcccgtacttagaactttcgaagagatcaccttcctggaggctgtgatacaactcaagaagactaaacttcagagtgtcagtagcgctattcatctctgcgataaaaaaaagatggagctttctctgaatataccggtgaaccacggaccacaggaggagtcttgtggatcctctcagctacatgagaactcagggtcacccgaaacttccagatccttacctgctccacaggacaacgactttctctcccgcaaggctcaggattgctactttatgaaactgcaccactgtcccgggaatcacagctgggactccactatctccgggtctcagcgcgccgccttctgcgaccataagacaacgccatgcagcagcgcgattataaaccctctttcaacagcaggcaattccgagagactgcagccaggaatcgcacagcagtggattcagtcaaagcgggaggatatagttaaccaaatgaccgaggcctgtctcaaccaaagcctggatgcgctcctctctagagacctgattatgaaggaagactacgagctcgtctcaacaaagccaactcgtacctccaaggttcgacagctgctcgatacaaccgacatccagggagaggagtttgccaaggtgatcgtacagaaacttaaggacaataaacagatgggattgcagccctatccagaaattcttgtggtttcccgaagcccatcactgaacttgcttcagaataaaagcatgtag

SEQ ID NO: 17123 - DNA, 10377 bp, synthetic construct
  misc_feature 1..10377: note = Description of Artificial Sequence: Synthetic coding sequence
  source 1..10377: mol_type = other DNA
atggagaggtcagggtgggccagacagacctttcttctggccctgcttctgggggccaccctgcgggcgagagccgccgcagggtattaccccaggtttagcccattctttttcctatgtacccaccatggggaacttgagggtgacggcgagcaaggggaagtgctgatcagcctgcatatcgctggcaaccccacctactacgtgcccggccaggagtatcacgttacaatctcaacctctacatttttcgacggcctgctggttacgggattgtatacttccactagcgttcaggcttctcaatccatcggaggttctagtgcctttggtttcggaataatgtctgatcatcagtttggaaaccagttcatgtgcagtgtggtggcttcgcatgtgagccacctgcccaccaccaacttaagctttatctggattgccccccccgctgggactgggtgtgtcaacttcatggctaccgccacacaccgtggtcaggtcattttcaaggatgccctggctcagcaactgtgtgaacaaggcgcgcccaccgacgtaactgtgcatccacacctggcggagattcactccgactctatcatactaagagatgatttcgactcttaccatcaactgcagctaaaccccaatatttgggtggagtgcaacaactgcgagactggggagcagtgtggagcaattatgcatggtaacgcagtcacattttgcgaaccttatgggcccagggagttaattaccactggtctgaacaccaccacagcatctgtgttacagttctcgataggatcaggctcctgcagattttcttactccgatccgtctattatcgtcttatatgcaaagaataatagtgcagattggatccagctagagaaaatcagagcaccttccaacgtatcgactataatacacatcctgtatctgccagaggatgccaagggcgaaaatgtgcagtttcagtggaaacaggaaaacctccgtgtgggcgaggtgtacgaagcctgttgggccctagataacatcctcatcataaatagcgctcataggcaggttgtcttggaagactccttggacccggtggataccgggaactggctatttttccccggggccacagttaagcactcctgccagtccgacggaaatagcatctacttccatgggaacgaagggagtgaatttaactttgccacaacaagggacgtcgatttgtcgacagaggacatccaggagcaatggtccgaagagttcgaatcccagccaaccggatgggacgtgctgggagccgtgatcgggaccgagtgcgggactatcgaaagcggtctctctatggtgttcttgaaggatggtgaacggaaactgtgtacaccctcaatggatacaacaggttacggtaatctaaggttctacttcgtaatggggggaatctgtgatcctgggaattcacatgagaacgatatcatactgtatgcaaaaatagagggtcggaaggagcatattacactggacacactcagctattccagttataaggtaccttcactcgtgtcagtcgtgattaatcccgagttacagacccctgctacaaagttctgcctcaggcagaaaaaccaccaggggcataacagaaacgtttgggctgtagacttcttccacgttctgcccgtccttccatccaccatgagccacatgatccaatttagtatcaatctgggttgcggcacacaccagcccggcaactctgtgagtctcgagtttagtacgaatcacggaaggagctggagtctcctccacacagagtgcctccctgagatctgcgcagggccacacttgccgcactcaacagtgtattctagcgaaaactacagtggctggaatcgcatcacgattcccctgccgaacgccgccctaacccgcaacactaggattcgttggcgccagacaggtccaattctggggaatatgtgggctatcgataatgtttacattggcccgagctgtctcaagttttgcagcggtcgcggccagtgtacgcggcacggatgtaagtgcgacccaggcttttctggtcccgcttgcgagatggcttcccagacttttcccatgtttatttctgaatctttcggatctagtagactgtctagctatcacaacttttactccattagaggcgcagaagtaagttttggatgtggggtgctggcatccggaaaggcgttggtgttcaataaggacggacgccgccagctgatcacatcattcttagattcatctcagtcccgattcctgcagtttaccttgcgactcggatcaaagtccgttctgagcacttgtagagcccccgaccaaccaggggagggggtccttctgcactactcatatgacaacggcataacttggaagttactcgaacactactcctacttgagctaccacgagccaagaataattagtgtagaactgccaggagatgccaagcagttcggcattcagtttagatggtggcagccttaccacagctcccagcgcgaagatgtctgggctattgacgaaatcatcatgactagtgtattattcaacagtatctccctcgattttactaacctcgtggaggtgacacagtctctcggattttaccttggcaatgtgcagccatattgcggccatgactggactctttgctttactggcgactcaaagcttgcctccagcatgcggtatgtggagacccagagcatgcagattggcgcgtcatacatgattcagttcagtctggtgatgggttgtggtcagaagtataccccccatatggataatcaggtgaaactggagtattcaaccaatcacggattgacatggcatctcgttcaggaggaatgtctcccgtcaatgccaagctgtcaagaatttacatccgctagcatttaccatgcaagtgagttcacacaatggcggagggtcattgtcctgctccctcagaagacatggtctagtgctactcggtttcgttggtcacagtcttactatacagctcaggatgaatgggctctggattctatctatatcggccaacagtgtcccaacatgtgctctgggcacgggtcatgcgatcacggaatctgtaggtgcgatcaaggctatcagggtactgaatgccacccagaagcggccctcccttccactatcatgagcgactttgagaatcaaaatggatgggagagtgattggcaggaagtgatcggaggagagatcgttaagcccgagcagggatgcggcgtgatctcaagcggtagctctctctatttctccaaagcagggaagcgtcagttggtgtcctgggacctcgatacttcttgggtagactttgtccagttttatatccaaatcggaggcgaaagcgcatcgtgtaacaaacctgacagtcgggaggagggagtgctgctccagtatagcaacaacggcggtatacaatggcatctcctggccgagatgtatttcagtgatttttccaaaccacggtttgtctacttggaactgcctgccgccgcaaagaccccctgcaccaggtttagatggtggcagccagtgtttagcggggaggactatgatcagtgggcagttgacgacatcataatcctgtccgaaaagcagaaacagattattcctgtgatcaacccaactttgcctcagaacttctatgaaaaacctgcatttgattaccctatgaatcagatgagcgtgtggttaatgttggccaatgaaggcatggtcaagaatgagactttttgtgccgccactcctagtgctatgatttttggtaagagcgatggggataggttcgccgtaactcgcgacctaacacttaaacctgggtatgtgctgcagtttaagctgaatattggatgcgccaaccagtttagctctactgcgccagtgttgctacagtactctcacgacgccgggatgagctggtttttggtcaaagaaggctgttatcccgcttcagctggcaaaggatgcgaaggtaattcccgcgagttgagtgaaccaacaatgtatcacacaggtgatttcgaggagtggacacggatcacaatagtgattccccgatccctggcctcctcaaaaactcgctttcgatggatacaggagtcctcgtctcagaaaaacgtgcctccttttggactggacggcgtgtacatttccgagccttgtccgagctattgcagcggacacggtgattgcattagtggcgtgtgcttctgcgatctgggttatacagcggcacaagggacctgcgtcagtaatgtgcctaatcacaatgaaatgtttgatcgattcgaagggaaactctctccactgtggtacaaaattactggagctcaagttggaacgggctgcggcaccctaaacgatggcaaaagtttatactttaacggcccaggcaaacgagaggccaggaccgtgcccctcgacactcggaacatccgactcgtccagttttatattcagatagggtctaagacctctggaatcacttgcatcaaaccaaggacccggaatgagggtctgatcgtgcaatattccaacgacaacggcatcttgtggcacctgctgagagaattggatttcatgtcattcttggagccacaaataatcagtatcgacctgcctcaggacgccaaaacgccggcaacagcgttccgctggtggcagcctcagcacggaaagcacagtgcacagtgggcactagatgacgttctgatcggaatgaatgacagcagtcaaaccgggttccaagacaaattcgatggttccattgatttacaggccaactggtacaggattcagggtggccaggttgatatcgactgcctctccatggatacagccctcatcttcacggagaatattggcaaacctcgatacgctgaaacatgggatttccacgtgtcagcctccacttttctccagtttgagatgtctatgggctgtagcaaacccttttctaattcgcactccgtgcaactccagtatagcctgaataacggaaaggactggcacctggttacggaggaatgcgtccctccgaccatcggctgcctgcactacacagagtctagcatctatacttccgagcgcttccagaactggaagcgcatcacagtctacttgccactgtccaccatctctccccgcactcgctttaggtggatccaagcgaattacaccgtgggagccgatagctgggcaatcgataacgtggtactggcctcaggttgcccctggatgtgcagcggaagagggatttgcgacgctgggcgctgcgtctgtgaccgggggtttggcggtccctactgtgtccctgtggtacctcttcctagcatcctgaaggacgacttcaatggcaatcttcaccccgatttgtggcctgaggtctatggcgctgaacggggcaatctgaatggcgagactatcaaaagtgggacatcactgatttttaagggcgaaggcctgcggatgcttatttcgcgcgatcttgactgcacaaacactatgtacgtgcagttctctctaaggttcatcgcaaagtctacccctgaacgatcccattctattcttctgcagttctcaattagcggaggaatcacatggcatttgatggacgagttctacttccctcagacaaccaacattctcttcatcaatgtgccactgccctacactgcccagaccaatgccactagatttagactgtggcagccttataacaacggcaagaaggaggaaatttggatagtagatgatttcatcatcgatgggaacaatgtgaacaatcctgtgatgctactggacacctttgactttggcccccgagaggacaactggttcttctatcctggtggtaacattggactgtattgcccatacagctctaaaggggctcctgaggaggacagcgccatggtatttgtttccaacgaagttggagaacacagcatcacaaccagggacctgaacgtgaatgagaataccatcatccaattcgaaataaacgttgggtgctctaccgattcctctagcgcagaccccgtgaggctggagttctctagggatttcggggccacctggcatttgctcctgccattgtgttaccacagctctagtcacgtctcttcactttgttctaccgagcatcatccatccagcacgtactacgcggggacgatgcaggggtggcgcagagaggtagttcatttcggaaagctccacctgtgtggtagcgtccgttttcggtggtatcagggcttttaccctgcaggcagccagccggtgacatgggctatcgataacgtgtatattggaccacaatgtgaagagatgtgcaacggacagggctcatgcatcaatgggaccaaatgtatctgcgatcctggatatagtggacccacctgtaagatcagcacgaaaaatcctgactttctgaaagatgactttgaggggcagctggagtcagaccgttttctccttatgagcgggggtaagccaagtcgtaagtgcggtatcttgagcagcgggaacaacctgttcttcaatgaggacggacttcggatgcttatgacgcgtgacctggatctgagccatgcccggtttgtgcagttttttatgagactaggatgtggcaagggggtcccggacccgcggtcacaacccgtcttgctgcagtattctttgaatggtggcctttcatggagcctattgcaggaattcctcttttccaatagcagcaacgtgggtaggtatatcgccctggagatcccgctgaaggcacggtcagggagtacaagacttaggtggtggcagccctctgagaatggccatttttactcaccgtgggtcattgaccaaatcctgattgggggtaacatatccggaaatacagttctggaggatgactttaccacattggattctcgcaagtggctgttgcatcccggaggcacgaaaatgcccgtttgtggcagtacaggcgatgcccttgtgtttatcgaaaaggccagcacgagatacgtcgtgagcactgacgtggcagtgaatgaggactcattccttcagatcgactttgctgcttcatgttccgtgactgacagctgttacgcaatcgagttggaatattctgtggatctgggtctgtcgtggcacccactcgttagagattgtctgccaactaacgttgaatgctctcggtaccatttacagcgtatcctggtctcggatacttttaataagtggacaagaatcaccctcccactccccccctacacgcgatctcaggcaacccgcttcaggtggcaccaacccgccccatttgacaaacagcagacatgggctattgataacgtgtacatcggagatggatgcatcgacatgtgcagcggccatggacgttgtatccagggcaactgtgtttgtgacgagcagtgggggggtctgtactgcgacgatccggaaacgagccttccaacgcagcttaaggataactttaacagggcacccagctcgcaaaactggctgaccgtcaacggcggtaagctatcaacagtgtgtggcgcagtcgccagcggaatggccttacacttctccggcggctgttcacggctgttggtaactgttgacctgaacctcaccaacgcagagtttatccagttttacttcatgtacggatgcctgattacccccaacaatcgcaaccaaggagtgctacttgaatattccgtgaacggagggatcacatggaacctcttgatggagattttctacgatcaatactccaaaccggggttcgtcaatattctgctaccccccgatgctaaggaaattgccacgcgctttaggtggtggcagcccaggcacgatggacttgatcaaaacgactgggctatcgataacgttctcataagtggatccgctgatcagcgtaccgtgatgctcgacacattctccagcgcgccagtaccacagcacgaaagatcaccagcagacgccggcccagtggggaggattgccttcgacatgttcatggaggataagacgtctgtgaatgaacactggctcttccatgacgattgtacagtagagcggttctgtgattctcccgatggcgtaatgctttgcggatcacatgacgggcgggaggtgtacgctgtgactcatgacttaacacccaccgaaggctggatcatgcagtttaaaatcagcgtgggctgtaaagttagtgagaagatcgcacaaaaccagatacacgtccagtacagcacagactttggcgtgagttggaactacttggtcccacagtgtctccctgccgatccaaagtgttccgggagtgtgagtcagccaagtgttttttttcctacaaagggatggaagcggatcacgtaccccttgcccgagtccctggtgggtaatccggtccggttcaggttctaccagaaatactccgacatgcaatgggccattgataatttttatcttgggcccggctgtttggataattgccgcggccacggagattgcctccgagaacagtgcatttgcgatcctggatactcaggtccaaactgctatctcactcacacactgaagacctttttaaaagagagattcgactcagaagagatcaaacctgatctctggatgtcacttgagggcggcagcacatgcacagagtgtgggattctggccgaagatacagcgctgtattttggtggctcaaccgtgcgtcaggcagtaacacaggatcttgacctgcgaggagctaaattcctgcagtattggggccgcataggatccgagaataatatgaccagctgccatcggcccatctgccgcaaggagggagtgctgctcgattactctacagatggaggtattacttggacactgctgcacgagatggactaccagaagtacattagtgttcgccacgattatattttactgcccgaggacgcacttacaaacaccacccgtctacggtggtggcagcctttcgttatttccaacggaattgttgtgtcaggggttgagcgggcacagtgggccttggacaatatactgataggcggagcagagatcaatcctagccagctggtcgatacatttgacgacgagggtacctcccacgaggaaaactggtctttttaccccaatgccgtgcggaccgctggtttctgtggcaacccatcttttcatctctactggccgaataagaagaaagataagacacataatgccctgagctctcgcgagctcatcatccagccaggctatatgatgcagttcaagatcgtggtcggttgtgaggccacttcatgtggcgatctgcatagtgtcatgctcgagtacaccaaggacgccagatctgactcctggcagttagtgcagactcagtgcctaccttcaagctcaaacagcatcgggtgcagtccgttccaattccacgaagctactatctacaactcggtgaactcttcaagctggaagagaatcaccattcagctgcccgaccacgtgtcaagtagcgccactcagttcaggtggatccagaaaggcgaagagactgagaagcagtcttgggcaatcgaccacgtgtacatcggggaggcatgtccaaagttgtgctccgggcacgggtattgcaccaccggggcaatctgcatctgcgatgagtcttttcaaggagacgattgttctgtgtttagccatgatctgcctagctatatcaaggacaacttcgagagcgcaagagtgaccgaggccaactgggagaccatccagggaggagtcataggtagcggttgtggacagctggccccatacgcccatggagactctctgtactttaatggttgccaaatcagacaagcagccacaaagccacttgacctgaccagggcctctaaaattatgttcgtgttacaaatcgggagcatgtctcagactgatagctgtaactcagacctgagcgggccacacgccgtcgacaaggccgtgctccttcaatatagcgtaaacaacggtattacatggcatgtgatcgcccagcaccagccgaaagactttacccaggcccagagggtgtcttacaatgtgccgctcgaggccaggatgaagggggtacttctaagatggtggcagcccagacataacggaacaggccatgatcagtgggcattagaccacgtggaagtggtcctgacacgaaaacaaaattacatgatgaacttttcacgacagcacggattaagacatttttataaccgtagaagacggtccctgcgccgctacccttag

SEQ ID NO: 17124 - DNA, 10383 bp, synthetic construct
  misc_feature 1..10383: note = Description of Artificial Sequence: Synthetic coding sequence
  source 1..10383: mol_type = other DNA
atggagcgcagcggctgggctcgccagacattcttgctggccctgctgttgggggcgacactgagggccagagctgcagccggttattaccccaggttctccccctttttttttctatgtactcaccacggcgagctggaaggtgacggtgagcagggggaggtcctcattagcctacatatcgccggtaacccaacttactatgttccgggccaggagtaccatgtgacgattagcacctcaaccttttttgacgggctcctggtgaccggactgtatacaagtacttcagttcaggcaagtcagagcatcggcggatcgagtgccttcggttttgggattatgtctgatcaccagttcggaaaccagttcatgtgctcggtagttgctagccacgtttcccacctccccacgactaaccttagcttcatctggatcgctccacccgctgggacaggctgtgtaaattttatggcaacagccacccaccgaggccaagtgatcttcaaagatgccctggcacagcagttatgtgagcagggggcccccacagacgtcacggtccatccccatctggccgaaattcattcggacagtattatcctcagggatgactttgacagttatcatcagttgcaactaaatcctaacatctgggtcgagtgcaacaattgcgagacaggggaacagtgtggcgccatcatgcacggaaacgccgtgactttttgtgagccctacggaccgagggaactcattaccacaggcttgaacacgaccacagcctcagtactgcagttctccatcggatccggctcatgccgcttctcctactcggacccctctattatcgtcctttatgcaaaaaataattcagctgattggatacaactggagaagatcagagccccctcgaacgtgtcaacaattatacacatactgtatctccccgaagatgctaagggcgaaaacgtgcagttccaatggaagcaggaaaatctcagagtgggcgaggtctacgaggcctgttgggcccttgataatatcctgattatcaatagtgcacaccgtcaggtagtcctggaggactcactggaccctgtcgacacaggaaattggctatttttccctggagcgacagttaagcactcctgtcaaagcgacggcaactcaatctacttccacggaaatgagggttccgagtttaatttcgccaccaccagggacgtggatctgagcactgaagatatccaggagcaatggtccgaggagtttgagagtcagcccaccggatgggatgtacttggcgctgtcattggcaccgagtgtggcacaattgaaagcgggctctccatggtcttcctgaaagacggtgaacgaaagctgtgtactcctagtatggatacgactggatacggcaatctgcgattttacttcgtcatgggaggcatttgcgacccagggaacagtcatgagaacgatataatcctttacgctaagattgagggacggaaagaacacattaccctcgataccttatcttatagttcctacaaggtaccatccttggtctctgtcgtcataaacccagagctgcagacccctgccaccaaattctgtctccggcagaagaatcaccagggccacaacaggaatgtgtgggctgttgattttttccatgtgctcccagtgcttccctccactatgtcccatatgatccagttcagcatcaacctaggatgcggaactcaccagcctggcaactctgtgtctctggaattcagcactaatcacggccgatcatggtctcttttacatacagaatgccttcctgagatttgcgctggcccccacctacctcacagtaccgtttattcttccgaaaattactccggctggaatcgtattacaatcccactgccaaatgctgccctgacgaggaacactagaatccggtggagacagactggaccaatactaggcaatatgtgggcaattgacaatgtgtacattggtccttcgtgcctcaaattttgttccgggcgcggtcaatgcacacgccatggctgtaaatgcgatccaggattcagtggccccgcatgcgaaatggcaagccagacgtttcctatgtttatcagtgagtccttcggcagttcccgcctctctagctaccacaatttctacagcatccgcggtgccgaggtctcatttgggtgtggtgtgcttgccagcggcaaggctctggtgttcaataaggatggccgtaggcagctaatcacttcctttctggacagtagccagagtaggttcttgcagtttacccttcggttaggtagcaaaagcgtgctcagcacatgccgcgcccccgaccagcccggagaaggcgtgctcctccactactcctatgacaatggcatcacctggaagctattggagcactactcctatctgagctaccatgaacctcgtattatttctgttgagctgcctggagatgccaaacaattcggcatccagttcagatggtggcagccttaccactccagccagcgtgaggatgtctgggccatagatgaaattataatgacaagcgtcttgttcaattcaatttcccttgatttcacaaacctcgtggaggttacccagtcactcgggttctacttgggaaacgtgcagccgtattgtggccatgactggaccctgtgttttaccggagacagcaagcttgcatcttctatgcgctacgtggaaacccaaagcatgcagattggagcctcttacatgattcagttcagcctggtgatggggtgcgggcagaagtacacccctcatatggataaccaagtcaagctggaatactctacaaaccacggcctcacatggcatctcgtgcaagaggagtgtttgccttcaatgccatcctgccaggaatttacttctgctagcatctatcacgcctcagagtttacccagtggcgccgagtcatcgtgctactgccacagaaaacgtggtcttctgccacccgtttcagatggagtcagtcctattacactgcccaggatgaatgggcccttgactctatatacattgggcaacagtgccctaacatgtgttccggccacggctcctgtgaccacggcatatgtcggtgcgaccagggctaccaggggacagagtgccacccagaagccgctttgcctagtaccattatgtcagactttgaaaatcagaatgggtgggagagcgattggcaggaggtcattgggggcgagatcgtaaagcccgagcaggggtgtggcgtaattagttccgggtcttcactgtacttcagcaaagctgggaaaaggcagctggtgagctgggacctagatactagctgggtggactttgtgcagttctatatccagattggtggagagagcgcctcctgcaataaaccagactctagggaagaaggcgttcttttacagtatagcaacaacggaggcatccagtggcatcttttggccgagatgtatttctccgacttttccaagcccagattcgtgtatttggagctgcctgcggctgcaaagacaccttgtaccaggttccgctggtggcaacccgtgttttcgggcgaggactatgatcagtgggcagttgacgatatcatcatcctttcagagaaacagaagcaaataatacctgtcatcaatccaaccctacctcaaaacttctacgaaaaacctgcatttgactacccaatgaaccagatgtctgtttggctaatgcttgcaaacgagggaatggtcaagaacgagaccttttgtgcggcaaccccaagcgcaatgatctttggtaagagtgatggcgaccgttttgccgtcacaagggatctgacactgaagcccgggtacgtcttacagttcaaactcaatattggctgcgccaatcagttctcatccacagcccctgtgcttctgcagtatagccatgacgctggcatgagttggttcctcgtgaaggaggggtgctatccggcttctgccggtaaaggctgtgaaggcaattcacgagagctctcggagccaacaatgtaccacactggagatttcgaggaatggacgaggattactatagtcatcccacggagcctggcctctagtaaaaccaggtttcgttggattcaagaatcctccagccaaaaaaacgtgccgcccttcggcttggatggggtgtacataagcgaaccgtgtccttcatattgctccggtcacggggactgtatcagcggcgtgtgtttttgtgacctggggtacactgctgcccaaggcacttgcgtgtcaaacgtgccaaatcacaatgaaatgttcgacagatttgaaggaaagctgagtcccctgtggtacaaaatcacaggagcccaggtaggcaccggttgcggcaccctaaatgacggcaaaagcctatattttaatggccccgggaaacgcgaggcgaggaccgtgcctttggacacacgaaatatcaggctggtgcagttttacatccagatcgggagtaaaacatccgggataacatgtattaaacctcggactaggaacgagggcctgatagttcaatatagcaatgataatggcatcctctggcatctgctccgagagctggatttcatgtccttcttggagccccagattatcagtatagatcttccgcaggacgccaagactccagcaacagcgtttagatggtggcagccgcagcatggcaagcactccgcccagtgggcgctggacgacgtccttattggtatgaacgattcatctcagacaggattccaagacaagtttgatggcagcatcgatctccaggctaactggtacaggattcagggtggccaggtagatatcgactgtctctccatggataccgctctcatctttactgaaaacataggaaagccacgttatgctgaaacatgggacttccacgtctccgcttctaccttcctgcagtttgaaatgtctatgggatgtagcaaaccattttcaaacagtcacagcgttcagctgcagtatagcctgaataacggtaaagactggcacctggtgacagaggagtgtgttcctcccacaatcggttgtcttcattacactgagtccagtatatacacttcagaaagattccaaaattggaagcgaattactgtgtaccttcctctgtccaccatctcaccccgaactaggtttagatggattcaggccaattacaccgtgggggcagattcctgggctatagataatgtggtgcttgcatctgggtgtccatggatgtgctccgggcggggcatttgcgacgctggccgatgcgtgtgcgatcgagggttcggaggtccatactgtgtgcccgtggtccccctacccagcatccttaaagacgacttcaatggcaatttacacccggatctgtggccggaagtgtatggggctgaacggggcaacctgaacggggaaaccattaagtccgggacctccctgatattcaagggggagggtctgcgtatgctcatttcacgcgatttggattgtaccaacaccatgtacgtacagtttagtctccgcttcatagcgaagagcactccagaacgaagtcattccatcctgctgcagttctctatctccggcgggatcacatggcaccttatggatgaattttatttcccccagaccacaaacattttgttcattaatgtgcctctgccatatactgcccagaccaatgcaacacgcttcagactgtggcagccatacaataacgggaaaaaggaggaaatttggatcgtggacgacttcattatcgatggcaacaatgtcaacaacccagtgatgctccttgatacattcgacttcggcccgagggaagacaactggttcttctaccccggaggcaacattggattatattgcccttactcctctaagggtgccccagaagaggactccgccatggtctttgtttctaatgaagtgggcgaacatagtataacaaccagagaccttaatgtgaacgagaacactattattcaatttgagatcaacgtagggtgttctacagacagtagttccgcagatccagtgaggctggaatttagtagggatttcggagccacttggcatttgctgcttcccctctgttaccactcttcctcccacgtgagctccctctgctcaacggagcaccacccgagctcgacctattacgccggaaccatgcagggatggcgcagagaggtggtgcatttcgggaaactacatctctgcgggtccgttaggttcagatggtatcagggtttctatccggctggctcccagcccgtgacatgggccattgacaatgtctacataggcccacagtgcgaggaaatgtgtaacggccagggctcttgtattaatggcacgaaatgcatctgcgatcccggctatagcgggcccacctgtaaaatttctacaaagaaccctgacttcttgaaggacgactttgagggacaactggagtccgacagattcttgttaatgagcggcggtaagccatcacgcaagtgtgggattctatccagtgggaataacctcttctttaatgaagacggcctacggatgctgatgactcgagatcttgacctgtcgcacgcccgttttgtgcagttctttatgagactaggctgcggaaaaggcgtacctgatccaaggagccagcccgtgctgctccagtacagtctcaacgggggtctgtcctggtccctgctgcaggagttcctgttcagcaacagcagcaatgtcggtaggtacatcgctcttgagattccccttaaggctaggtcaggttccacaaggctcagatggtggcaaccatctgagaacggccatttctactccccttgggttattgaccagatcctgataggtggcaacataagcggcaatacagtgcttgaggacgacttcacaacactggactcacgcaaatggctgctgcaccctgggggcactaagatgcccgtatgcgggagcacaggcgatgcgctggtattcatagagaaagctagcacccggtacgtggtgtcaactgacgtagccgtcaacgaggactctttcctgcaaatcgactttgctgcctcatgcagcgtgactgactcctgctatgctatcgagttggagtactccgtcgacctggggttatcttggcacccactggtgcgggactgcctgccaaccaatgtcgaatgtagccgataccatctgcagagaatcctcgtgagtgacacattcaataagtggactaggatcactctccctctgcctccttatactagatctcaggccaccaggttcagatggcatcagcccgcgccctttgacaagcagcaaacctgggcgatcgacaacgtatacattggcgatgggtgtatcgacatgtgcagcggacacggcagatgtatccaggggaattgcgtgtgtgacgagcagtggggtggtctctactgcgatgatcccgagacgtcactgcccacacaactgaaagacaattttaaccgggccccgagctctcagaattggctgacagttaacgggggtaaactgtcaactgtgtgcggtgccgtggccagtgggatggcactgcactttagcggaggctgttcgcggctgctcgtaacagtcgatctcaatctgacaaatgcggaattcatccaattttatttcatgtacggctgcctgattacacccaacaatagaaaccagggcgtcctgctggagtacagcgtgaatggaggaatcacgtggaacctgctgatggaaattttttacgatcagtacagtaagcccggcttcgtcaacattctgctcccccccgacgctaaagagatagccaccagatttaggtggtggcagcctcgacacgacgggctcgaccagaacgactgggcgatcgataacgtcctgatcagcgggtctgccgatcagaggaccgtgatgcttgataccttctccagcgctccggtgcctcagcacgaacgaagtcccgcagacgctggccctgtgggcaggatcgcgtttgatatgtttatggaagacaagacatccgttaacgagcactggctttttcatgacgactgcaccgttgaaagattttgcgattctcctgatggggtgatgctgtgtggctctcacgatggacgcgaggtgtacgcagttacacatgatctgacccccaccgagggatggattatgcagttcaaaatcagcgtgggctgtaaagtcagtgaaaagattgctcagaaccaaatccacgtgcagtattctaccgattttggcgtctcatggaactacctggtccctcagtgcctacctgccgaccctaaatgcagtgggtccgtgtcgcagccatccgtgttcttccccaccaagggttggaaacgaatcacctatcctctgccagaatctctcgtaggaaaccctgttaggttccgattctatcagaaatactctgacatgcagtgggccatcgataacttctacttgggacccggctgcctggataactgtcgaggccacggcgactgcctgagggagcagtgtatttgtgaccccgggtactccggcccgaattgttatctgactcatacacttaagacctttcttaaggaaagattcgattccgaagagatcaagccggacctgtggatgagtctggaaggcggctcgacatgcactgaatgcgggatcctagcagaggataccgcactctacttcgggggttctactgtcagacaggcagtcactcaggatcttgacttgagaggcgctaaattcttacagtactgggggcgcataggaagcgagaacaacatgacaagctgtcatcgccccatctgcagaaaagaaggcgttctattagattacagtaccgacggagggatcacgtggactcttttgcatgaaatggattatcagaaatacatcagcgtccggcatgattatatcctccttcctgaagacgcccttactaacacgaccaggttgcgatggtggcaacccttcgtgatctccaacggtattgtggtgtcgggcgttgaaagggcgcagtgggctttggacaatatcctcattgggggcgctgagataaacccctcccagttggtggatactttcgacgatgaggggaccagccacgaagagaactggtcattctaccccaatgccgtgcggaccgcagggttttgcggcaacccatcgtttcacttgtactggcctaataagaagaaagacaagactcataacgccctgtcaagtcgggagctgatcatccagccgggctacatgatgcagtttaaaatcgttgtagggtgcgaggctacatcgtgtggcgatttgcactctgtgatgttggaatacactaaggatgcccggtccgattcctggcaactggtacaaacacagtgcctgccatcctcaagcaactccattggctgttccccctttcagttccatgaggcaaccatttataacagtgtgaacagtagtagttggaaacgaatcactatccagctcccagatcatgtgtcttcttccgcgacacagtttcggtggatacaaaaaggggaggaaaccgaaaagcaaagctgggctattgaccacgtttacatcggcgaagcatgccctaaactttgtagcggccatggatattgcaccaccggcgccatctgtatttgtgatgagtcttttcagggagatgactgctccgtgttcagtcacgacctgcctagttatatcaaagacaacttcgagagtgctagggtaactgaggccaactgggagacaatccagggaggcgtcattgggagcgggtgtgggcagttggccccttatgctcatggagactctctatatttcaatgggtgtcagatcaggcaggccgctaccaaacccctggatttgacaagggcaagcaagatcatgttcgttttgcagatcggatctatgagccagacagactcctgcaacagcgatctttcagggccgcacgctgtggacaaggccgtgctcttacagtatagtgtcaataatggtataacttggcatgtcatcgcgcagcatcagcccaaggatttcacacaggcacagcgggtgtcttacaacgtgcccctggaggcgagaatgaagggcgtgctgctgagatggtggcaaccccggcataatggcaccgggcatgatcagtgggccctcgatcacgtcgaagttgtgctatttagcacccggaagcagaactatatgatgaatttttccaggcagcacggtctgcgccatttctataacagaaggcggagatcactgcgacgctacccctag

SEQ ID NO: 17125 - DNA, 2934 bp, synthetic construct
  misc_feature 1..2934: note = Description of Artificial Sequence: Synthetic coding sequence
  source 1..2934: mol_type = other DNA
atgtgctcgggtcacggacggtgtattcaaggtaattgcgtctgcgatgagcagtggggcggcctttactgtgatgacccggaaaccagtctacctacgcagctaaaagacaattttaatagggcaccgtcctcccagaattggctaacggtcaacggaggaaaactttcaactgtgtgcggcgctgtggcatctggaatggcgcttcacttttccggcggctgttcccggctccttgtcacagtcgacctgaacctgaccaacgcggaattcattcaattttactttatgtacggctgcctcatcacaccaaataaccgtaatcagggcgtcttgctagaatattccgtcaatggaggcatcacgtggaacctcttaatggagatattctacgaccagtatagtaagcccggtttcgtgaacatacttctcccgccagacgccaaagagattgctacaaggtttcgatggtggcagcctcggcacgacgggcttgatcagaacgattgggccatagacaatgtgctgatctcaggctccgcagaccagaggaccgttatgcttgatacgttctccagtgcgcctgttcctcagcatgagagatcgcctgctgacgccggccccgtcggccgcattgctttcgatatgttcatggaggacaagacatccgtgaatgaacactggctgtttcatgacgattgcaccgtcgaaaggttctgtgattctccagacggtgtaatgttatgcggtagtcacgatggaagggaagtgtacgccgtgacacacgatctgaccccgactgaaggctggattatgcagtttaagatctctgtgggatgtaaggtttccgagaagattgcacaaaatcagattcacgttcaatacagcacggactttggagtgtcttggaattacctggtcccccagtgcctgcccgcagacccgaagtgtagtggttctgtgtctcagccgtctgtcttttttcctacaaaaggttggaaacgcataacttatccactgcctgaaagcctcgttgggaaccccgtaagattcagattttatcagaagtactccgacatgcagtgggcaatcgacaatttctacctggggcctggatgtctggacaactgcagaggacatggggactgcttaagagagcagtgcatctgtgatccgggttattctggacctaattgttatctcacgcacacactcaaaacattcctgaaggagcggttcgattccgaagagatcaagccagatttatggatgtcattagagggtggatccacctgtacagagtgtggaattttggctgaggataccgccctgtattttggtggctccacggtcagacaggccgtgacacaggacctcgatctacgtggtgccaagtttctgcagtattgggggagaattggaagtgagaataacatgacttcctgccacaggccaatctgcaggaaggagggcgtgcttctggattatagcaccgatggcgggattacgtggacacttttacacgaaatggattaccagaagtatatttctgtccgtcatgactatattttattgcctgaagatgccctgaccaacacgacacggctccgttggtggcaaccctttgtaattagcaacggtatagtcgtttctggagtcgaaagggcccagtgggccctggataacattctgataggtggtgccgagataaaccctagtcagctggtggacacttttgatgacgagggtacatctcatgaagagaactggtctttctaccctaatgctgtgagaacagccgggttttgtggaaaccctagcttccatttgtattggcccaacaaaaaaaaagacaaaacacacaatgcattaagctctagagagttaatcatccaaccagggtatatgatgcagtttaagatcgtggtgggatgcgaggcgaccagttgcggagatttgcactctgtcatgctcgagtatacaaaggacgctcggagcgactcttggcaactggtgcaaacacagtgcctgcccagcagctccaattctattggttgcagtcccttccaattccacgaagccacaatttacaatagcgtgaacagtagcagttggaagaggattacaatccagctgccagatcatgtgtcatccagtgccacccagttccgctggatccaaaagggagaggaaaccgagaaacagagttgggccattgaccatgtgtacattggggaggcgtgccccaagttgtgtagtggccacggatactgcacaactggcgctatatgcatttgcgatgaaagctttcagggcgacgactgctccgttttctcgcatgatctcccatcttacataaaggataatttcgagagcgcgcgggtgacagaagccaactgggagaccatccagggaggagtaattggtagcggatgtggacagcttgcgccttacgctcacggcgactcactctacttcaacgggtgtcagattcggcaggccgctactaaaccactcgatctcacgcgagcgtcaaaaatcatgttcgttctgcaaatcggttccatgagccagacggactcctgtaactccgacctgtccggacctcacgccgtagacaaggccgtgctgctgcaatattccgtcaataatggcattacttggcacgtgattgctcaacaccagccgaaggattttactcaggcccagcgggtgagctataacgtcccgttggaggctcggatgaagggcgttctactgcggtggtggcagcctcgacataacggaaccgggcacgaccagtgggccctggaccatgtggaggtggtactggtgactacacggaagcagaattacatgatgaatttttcaaggcagcatggtctcaggcacttctataacagaagacggcggtcattgcgcagatacccatag

SEQ ID NO: 17126 - DNA, 10383 bp, synthetic construct
  misc_feature 1..10383: note = Description of Artificial Sequence: Synthetic coding sequence
  source 1..10383: mol_type = other DNA
atggagcgtagtgggtgggcgcgacagacatttctgcttgctctgctacttggggccacactgagagctcgggcagcagccggctattatccaaggttttcccccttcttttttctttgtacacaccacggagaactcgagggggacggcgagcagggcgaggtgctgatttcactgcatatcgcaggcaatcctacctattatgtgcctggtcaagagtaccatgtgaccataagcacatccaccttctttgacgggctcctggtcaccgggctctataccagcactagcgtgcaggctagtcagtccatcggaggatcttcagctttcggtttcggcatcatgagtgaccatcagtttggaaaccagtttatgtgtagtgtcgtcgcttctcatgtgagccacttaccaaccaccaacttaagctttatatggatcgctcccccagctggcacggggtgtgtgaattttatggctacagctacccataggggacaggtcatttttaaggacgccctggcacagcagctgtgcgagcaaggtgcaccaaccgatgtcaccgtgcaccctcatctggctgagattcatagcgacagcatcatcctacgtgatgattttgacagctaccatcagctccagctgaacccgaacatttgggtggaatgtaataactgtgagacaggggaacagtgtggcgcaatcatgcatgggaatgccgttactttttgcgagccatacggaccacgtgaacttattacaaccgggctgaacaccacaaccgcgagcgttctgcagttttcaatcggatccggcagttgcagattttcctacagcgatccgtcaatcatcgttctgtatgctaagaacaacagcgctgattggatccaactagagaagattagggccccctccaacgtgagcaccattatccacatcttgtatctgcctgaggatgccaaaggtgagaatgtgcagttccaatggaagcaagagaatttgagggtgggtgaggtctacgaggcgtgctgggccctggacaatattctgataattaatagcgcacatcgccaggttgtcctggaagactctctcgacccagtagacacaggaaattggctgttcttcccgggcgccacagtgaagcactcttgccagtccgacggaaacagcatctactttcacgggaatgagggctctgagttcaattttgctacaacacgggatgtggacctgagtactgaggatatccaggagcagtggtcagaagagttcgagtcccagcctactgggtgggacgtcctgggagccgtgatcggaaccgaatgtggtactattgaatctggtcttagcatggtgtttctgaaagacggcgagcgcaagctgtgtaccccctcaatggacactacgggctatggtaatctccgattctatttcgtgatgggcggcatctgtgatcccggcaacagtcatgaaaatgatataatcctttacgctaaaatcgaagggcggaaggagcatattacactcgacaccctgagctactccagttacaaggtgcccagcctggtatcggttgtgatcaaccccgagctacaaactcctgcaacaaaattttgtttgaggcagaagaaccaccagggacacaaccgaaacgtttgggctgttgacttcttccacgtgctcccggtcttgcctagcacaatgtctcatatgattcagttctctattaacctgggatgcggaacacatcagcccggcaatagcgtctcattggagttttctactaatcatggccgctcctggtcgctgcttcacaccgagtgtctgccagaaatctgtgcaggcccacacttaccacactcaaccgtctattctagcgaaaattacagcggctggaatcgtatcacaataccactgcccaatgctgccctgaccaggaacacccgcataaggtggagacagactgggccaatacttggcaacatgtgggctatcgacaatgtctacattggacctagctgtctgaaattctgttctggacgcggccagtgcactagacatggctgtaagtgtgatccggggtttagcggacccgcctgcgagatggcttctcagacattccctatgtttattagtgaatccttcgggtcatcgcgcctgtcttcttatcacaatttttactccattaggggcgctgaggttagtttcggatgtggcgtgctggcttcaggaaaagccttagtttttaacaaagacgggcgcagacagcttataacctcatttctggattcaagccagagcagatttctgcagtttacccttcgactgggcagtaagtcagtcctgagtacgtgcagagcccccgatcagcctggtgagggagtccttctccactattcctacgataacggcatcacgtggaaattgcttgaacactattcttacctcagctaccatgaacctaggataatcagcgtagaattgccaggggacgcaaagcaattcggtatacaattccgatggtggcagccttaccactcttcccagcgagaagatgtgtgggccattgatgagatcatcatgacttcagtactctttaattctatctctctagacttcaccaatctggttgaagtgacccagtctttgggattttatcttgggaatgtgcagccctactgtggacacgactggactttatgttttacgggtgacagcaagctggcaagtagcatgagatacgtcgagacccagtctatgcagattggggcctcatatatgatccagttttcactggtgatggggtgcggtcagaagtacacgccccacatggacaatcaagtgaaactggagtattccacaaaccacggattgacttggcacttagtgcaagaggaatgcttgccttctatgccctcatgccaggagtttacttcggcatccatttatcacgctagcgagttcacccagtggcgcagagtgattgtattgctccctcagaagacgtggagctcagctacacggttccggtggtcccagagttattacaccgcccaagacgagtgggccctggattcaatttatataggccagcaatgccccaacatgtgctccggtcatggatcttgcgatcacggaatctgtcggtgtgaccagggctatcagggcaccgagtgccacccagaagcagccttaccaagtaccatcatgtctgatttcgagaaccagaacggttgggagagcgactggcaggaagtaatcggcggcgaaatcgtaaaacccgagcaaggctgtggagtcatcagctcgggttcctccttgtatttttccaaagccgggaagagacagttagtgtcctgggatttagatacctcctgggtcgattttgtgcaattctacatccaaatcggcggagagtctgctagttgcaacaaacctgacagccgtgaggagggagtgttgctgcaatactcaaataatggcggaatccagtggcacttgcttgccgagatgtatttcagtgacttcagcaaacccagattcgtgtacctagagttgcccgctgccgctaaaaccccatgtactaggttccgatggtggcagcccgtattctctggggaggactacgaccagtgggctgtggatgacatcattatcctgtctgaaaagcagaaacagatcatacccgtcattaatcctaccctaccccagaacttctatgaaaaacctgcctttgactacccaatgaaccagatgtctgtgtggctgatgctcgcaaacgagggaatggttaagaacgaaaccttctgcgccgccactcccagcgccatgatcttcggcaaaagtgatggagataggttcgcagtcacaagagacctcaccctgaagcccggctatgtgttgcagttcaagctgaacattggctgtgcaaaccaattcagctccacagcgccagttttactgcagtattcccatgatgcgggaatgtcttggtttttggtgaaagagggatgttacccagcttctgcaggcaaaggatgcgaagggaattctcgagaactgtcagagcctacaatgtaccatacaggtgatttcgaagagtggacacggattaccatagtgatccctcggtcactggctagttccaagacccggtttagatggatccaagaaagttcaagccagaaaaatgtgccacctttcggactcgacggagtatacattagcgagccctgcccaagctactgctcaggccatggcgactgcatatccggagtctgcttctgtgatcttggctacaccgccgcccagggcacatgcgtgtctaacgttccaaaccacaacgagatgtttgaccgttttgagggaaaattaagtccgctgtggtacaagattaccggcgctcaagtagggactggctgcggcacactcaacgacgggaaaagcctatatttcaacggcccaggcaaacgcgaagcccgcactgtgcccttagacacacgcaacataaggctcgtgcagttctatattcagatcggctctaagacatctggaattacctgtattaagccccgcaccagaaacgagggtctgatagtccagtattctaacgacaatgggatcctgtggcatctccttagggagcttgatttcatgtctttcttagagccacaaattatttcaattgacctacctcaggatgctaagacgcctgcaactgcttttagatggtggcagccacagcacggtaagcactcagcacaatgggccttggacgacgttcttatcggaatgaatgattcttctcaaaccggatttcaggacaaatttgatggctctattgatctccaagccaactggtaccgcatccagggcggacaggtggatatcgactgcctgtcaatggacacagccctgatatttacagaaaacatcggaaaacccagatatgcagagacatgggatttccacgtttccgcatccacgttcttacagtttgagatgtcgatgggctgttccaagccgttctccaactcccattcagtgcaattacaatacagtctcaataacggcaaggattggcacctcgtcacggaggaatgtgtgccgcccactatcggctgcctccactacaccgagtcgtctatatacacttccgagcggtttcagaactggaagcgtattaccgtctacttaccgctgagtaccatctcccctaggactagattccgctggatccaggcaaattacactgtaggagctgactcctgggcaatcgacaacgtcgttttagccagcgggtgcccttggatgtgctcgggacggggcatatgtgatgccggcagatgcgtttgcgaccgtggctttggtgggccgtactgcgtccctgtggtgcctttgccaagtatcctgaaggacgacttcaatggtaacctgcaccctgacttatggccagaagtgtacggcgccgaaaggggtaatctgaatggtgagaccatcaaaagcgggacttctctgatctttaagggtgagggtctgaggatgctcataagtcgtgatcttgactgtactaacaccatgtatgttcagttctcactcagattcattgccaagtccacccctgagagaagccattcaattctgctccaattctccatatcaggcggcatcacatggcacctcatggatgagttttactttcctcagaccacgaatatcctctttatcaatgttccacttccatataccgctcagaccaatgctactcgatttagactctggcagccatacaacaacggaaagaaagaagaaatttggatcgtggacgattttattatcgacggtaataacgttaataatcccgtgatgctgctggacacattcgattttggaccgcgtgaagacaattggtttttttatccgggtgggaatatcgggctgtactgcccatactccagtaagggggccccggaggaagacagcgccatggtgtttgtgtctaacgaggtgggcgaacactccataacgacccgcgacttgaacgtgaacgagaacactattattcagttcgagattaatgtgggctgtagtacggatagctcaagcgcagatcccgtgcggctggaattcagtagggactttggtgccacctggcacctgctgttaccactgtgttatcactcttcatcacacgtgtccagcctctgtagtactgagcaccacccatccagtacatactatgccggcacgatgcaggggtggcgccgggaagtggtgcattttgggaagctgcacctgtgcggcagcgtaaggttccgctggtaccagggcttctacccagctggctcccaaccagtaacttgggccatcgacaacgtctacataggtcctcagtgcgaggagatgtgcaatggtcagggtagctgtatcaatgggactaaatgcatctgcgaccccggttattccgggccaacctgtaagataagcaccaagaacccggactttctgaaggatgattttgagggccagctggaatccgaccgcttcctgctgatgagtggaggcaagccgtcccggaagtgcggaattctttcttctggtaacaaccttttttttaatgaagatgggttacgcatgctgatgacgcgcgatctggacctaagccatgcacgctttgttcagtttttcatgaggctggggtgtggcaagggggtccctgaccctagaagccagcctgtgctccttcagtattctctgaacggtggcctatcgtggagcttgctgcaggaatttctgttctctaacagttcaaacgtcggaagatacattgctttagagattccattaaaggccagaagcgggtccaccagactgcgctggtggcagcccagtgaaaatggacacttctattctccctgggtgattgatcagatcttgatcggagggaacatcagtggcaacacggtgctggaagacgacttcaccacattggactctcgtaaatggctgctacaccccggcggaacaaaaatgcctgtgtgcggtagtacaggagatgcactggtcttcatcgagaaggcttctactaggtatgtagtatcaaccgacgttgccgttaacgaggatagctttctccagattgattttgctgcctcatgctccgtcaccgacagttgttacgccatagagcttgagtattccgtggacctcggcctgtcttggcatcccttagtaagagattgcctgccaacaaacgtagagtgttccagataccatctgcagcgaattctggtgtccgatactttcaataagtggacccggataacgttaccattgccaccttatacccgatctcaggccaccaggtttcgttggcatcagcccgcaccttttgacaagcaacagacatgggctattgataatgtgtacatcggggatggctgcattgacatgtgtagtgggcacggtcgttgtatacagggcaattgcgtgtgtgatgagcaatggggcggcctctactgtgacgatcccgagacttccctcccgacacagctgaaggataacttcaaccgcgcacccagctcccagaactggctgaccgtgaacggtggcaagcttagtacagtatgtggggcagtggcctctgggatggccctgcatttcagcgggggttgctccaggctgctcgtaactgtggacttaaacttgactaacgcagaattcattcagttctattttatgtatggttgcctgattacacccaacaacaggaaccagggcgtgctgcttgagtatagcgttaacggaggaattacatggaatttgctgatggaaattttttacgatcagtatagcaagccaggctttgtaaatatcctcttgccacccgatgcaaaggagatcgctacccggtttagatggtggcagccccgacacgacggtctggaccagaacgactgggcgatcgacaacgtccttatcagcggatcagccgaccagagaactgtgatgcttgacaccttttccagcgcaccagtgccccagcacgaaaggtctcctgctgatgctgggccagttggcagaatagctttcgatatgtttatggaggataagaccagcgtaaacgagcactggctgtttcacgatgactgcactgttgaaagattttgtgatagccccgatggggttatgctgtgtggttcccacgacggccgcgaggtgtatgctgtaactcacgacctcacacccacagagggctggatcatgcaattcaagatcagcgtgggctgtaaggttagcgagaaaattgcacaaaatcagatccacgtccaatacagcaccgattttggtgtgagctggaattaccttgtgccacagtgcctcccagccgaccctaagtgcagcggctctgtgtcacagccttcggtgttctttcctaccaaggggtggaaacggattacatatcccctgcctgagtccttggtgggtaacccagtgagatttcgcttttaccagaagtattctgacatgcaatgggctatcgacaacttctatctgggacccgggtgtctggacaattgtcgcggacacggcgattgtctgagggaacagtgtatttgcgatcccggatactccggacctaactgttatctaacccatacactgaagacctttctgaaagagagatttgatagcgaggagattaagccagacctctggatgagcctggagggcggttccacatgtactgagtgcggcattctggccgaggacacggccctgtatttcggggggtccacagtgagacaagcagtgacccaggacctggacttgagaggcgcgaagtttttacagtattggggcaggatcggttcagagaacaacatgaccagctgtcataggccgatctgtagaaaagaaggcgtgttgttggattatagtaccgatggggggatcacctggaccctgctacacgaaatggactatcagaagtacatctccgtgcggcatgattatattctgctccccgaagatgctctgacgaatactactcgactgcggtggtggcagccttttgtcatcagcaacgggatcgtcgtatcgggcgtggagcgggctcaatgggcactagataacattctaatcggcggtgctgagattaatccctctcagctggtggatacattcgacgacgaggggacctcccatgaggaaaactggagtttttacccaaatgccgtgcggacagcaggattttgtggcaatccctcatttcacctgtactggccaaataagaaaaaagataaaacacataatgcactgtcatcaagggaactcattatccaaccgggttacatgatgcagttcaagattgtcgtgggttgcgaggctaccagctgcggcgacctccacagtgttatgttagaatatactaaggatgcccggtccgattcctggcagctcgtccaaacacagtgcctcccctcgtcttcgaactctatcggatgctccccatttcagtttcacgaggctacaatatacaattccgtgaatagttcaagttggaagaggattactatccagctccctgaccacgttagttcatcagccacgcagtttcggtggattcagaagggagaggagaccgaaaagcagtcatgggccatcgaccacgtgtatataggcgaggcgtgtcccaaactctgctctggacacggatactgcaccactggggctatatgcatatgtgacgaatcctttcagggggatgattgttctgttttttcacacgacctgccaagctacattaaggacaattttgagtcggcacgggtgaccgaggccaactgggagaccatccagggaggcgtgataggatccggctgcgggcagttggctccctacgcccacggcgactctctctatttcaatggctgtcaaattagacaagcggctacgaaaccgctggatctgacaagagctagcaagataatgtttgtcctccagattggctccatgagtcagactgactcttgcaattcggatctgagtggcccccatgccgtggataaagccgtgctccttcagtacagcgtgaacaacggtatcacctggcatgtgatagcacaacaccagccaaaagacttcacccaagctcagagggtttcatataatgttcccctggaagctagaatgaagggagtcctgctcaggtggtggcaacctaggcacaatgggactgggcacgaccagtgggcactggaccacgtcgaagtagtcctggtgagcacccggaaacagaactacatgatgaattttagcagacaacacgggctgagacatttttataataggcgccggcgctcactgagacgctacccatag

SEQ ID NO: 17127 - DNA, 10284 bp, synthetic construct
  misc_feature 1..10284: note = Description of Artificial Sequence: Synthetic coding sequence
  source 1..10284: mol_type = other DNA
atggaacggtctggatgggcgaggcagactttcctgctggcactgcttctaggggctacactaagagccagagccgcagctggttattatccgcgcttttcaccatttttctttctgtgtacccaccacggcgaactggagggcgacggagaacagggggaagttttgatctctcttcacattgccggtaatcccacatattacgtgcccggccaggagtaccacgttactattagcacctcaaccttcttcgatgggctcctggtcacggggctgtataccagcacatcggtgcaggccagccagtccattggagggtcctctgcctttggattcggcatcatgtcagatcaccaatttggcaaccagttcatgtgtagcgttgtagccagtcatgtatctcacctgcctactacgaacctgtctttcatttggatcgcgcctcccgcaggcactggatgtgttaattttatggccactgccactcacagagggcaagtaatttttaaggatgctttggcacagcagctgtgtgagcagggcgctccaacagacgtcaccgtgcacccacatttggccgaaattcactccgattcaatcattctcagagatgatttcgactcttaccatcagcttcagctgaaccctaacatttgggtggaatgcaacaactgcgaaactggagaacagtgtggcgctatcatgcacggcaacgcggtcactttctgtgagccatacggtccacgcgagttgatcactacgggcctcaacacaactacagccagcgtcctccagttctctataggttcaggatcttgtcggtttagttactctgacccttccatcatcgttctctacgccaaaaataactcagccgactggatccagctcgaaaagataagggcaccctctaatgtgagtactatcatccatatcttgtacttgcctgaggatgcaaagggagagaatgtgcagttccagtggaaacaggagaatctcagggtaggagaagtatacgaggcctgctgggccctcgacaatattctaataatcaactctgcacatcgtcaggtcgtgctcgaggacagtctggatcctgtggataccgggaattggttattcttccccggggccacagtcaaacacagttgccagagtgacggaaatagtatctactttcacgggaacgaaggttctgagtttaattttgctaccactagagacgtggacctgagtacagaagatattcaagagcagtggagcgaggagtttgagtcccagccaactggctgggacgtcctgggcgctgtcattggcacagaatgtggcacaatcgaaagcggtctaagcatggtattcctgaaagatggtgagaggaagctgtgtacgccgtcgatggacaccacgggatatggaaatctcaggttctacttcgtgatgggaggcatctgtgaccccgggaacagccacgagaacgatatcatactttatgcaaagattgaaggcagaaaagaacacatcaccctggacacactttcatacagctcctacaaggtgcccagtctagtgagcgttgtgatcaatccggagcttcagactcctgccaccaagttctgcctgcggcagaagaaccaccagggccataatcggaatgtgtgggccgtcgatttcttccacgtactgccggttctgcctagcaccatgagtcacatgatccaattctctattaacctcggatgtggcacccatcagcctggaaactctgtgagcctcgagttcagcacaaatcatggacgctcctggagcctattgcacaccgagtgtcttcccgagatttgtgcaggaccacatctaccccattccactgtgtacagctccgagaattacagtggctggaatagaataactataccattgccaaatgcagccctgacccgaaacacacgtattcgctggcgacagaccggaccaattttagggaacatgtgggctattgataatgtgtacatcggacccagttgcctgaaattttgcagcggacgggggcagtgcaccaggcatgggtgcaaatgcgaccctggttttagcgggcctgcctgcgagatggcctcccagactttcccaatgtttatttccgaatcatttgggtcctctcgcttaagctcctatcacaacttttacagcattcggggcgctgaagtatcatttggatgtggcgttctcgcgtccgggaaagctttagtgttcaataaagatggtagaaggcagcttatcacctcttttctggatagcagccaaagcagattcctccaatttaccctgaggctcgggtccaaatccgtcttgtccacatgtagagcaccggaccaacccggggaaggagtgcttctgcactattcctacgacaatgggatcacctggaagttgctagagcactactcgtacctgtcatatcatgagccaagaatcattagcgtggagctgcccggtgatgccaagcaattcggcatccaatttagatggtggcagccttaccacagttctcagagggaagatgtgtgggcgatcgacgagattatcatgacctccgtactctttaatagcatttcactagatttcacaaacttagtggaggttacacagtctcttggattttacctaggaaatgtgcagccctactgcggacacgattggacactgtgttttacaggggattccaagttggcgagctcaatgcgttatgtcgaaactcagagtatgcagataggagcctcctacatgatccaattctccctcgtcatgggttgtggacagaagtatacaccacacatggacaaccaagtgaaactcgaatattctactaaccacggactcacctggcaccttgttcaggaggagtgtctcccgtcgatgccctcatgccaggaattcactagtgcctcaatctaccatgcgtctgagttcacccagtggcgaagagtcattgtcctgctgccgcagaaaacttggtctagtgcaactaggtttaggtggagccagtcgtactataccgcacaagatgaatgggcccttgactctatttacatcggccaacagtgcccaaatatgtgctctggtcacggtagctgtgaccacggaatctgccgatgtgatcaggggtatcagggcactgaatgccacccagaagcagcactgcctagtacaattatgtcagattttgagaatcaaaatggttgggagtccgattggcaggaagtgattgggggggagattgtgaaacccgagcaaggctgtggagtaatcagtagtgggtcaagtttatactttagtaaggctggcaagcggcagctagtcagctgggatctggataccagctgggtggactttgtgcagttttatattcagataggaggcgagagcgccagctgcaacaaaccagactcccgcgaggaaggtgttctgctgcagtattctaataatgggggcattcagtggcacctgctcgccgagatgtatttcagcgatttctcaaagcctagattcgtttacctcgagctcccggctgccgcaaaaaccccctgcacccgtttcagatggtggcagcccgtctttagcggtgaagactatgatcagtgggccgtggacgacatcatcatcctttcagaaaaacagaagcaaatcattcctgttattaatcctacactgccacagaacttctacgagaaaccagcgtttgattatccaatgaatcaaatgtctgtctggctcatgctggccaacgagggcatggtgaaaaacgagacattctgtgccgccacaccatccgccatgatctttgggaagagcgatggtgatcgcttcgcagtgacacgcgatttgactctgaagccaggctacgtgctgcagtttaaactgaatattggctgtgccaaccagttctccagcacagcgccagtgttgttgcagtactcgcacgacgccggcatgtcctggttcctcgtgaaagaaggctgctaccctgcaagtgccggaaaaggctgtgagggaaattccagggaattgtccgaacccacaatgtatcataccggcgacttcgaggagtggactcggataactatcgtaatcccgcggtctctggctagcagtaagacccggtttcggtggatccaagaatcctccagccaaaagaacgtccctcccttcgggcttgacggcgtctatatctcagaaccttgcccctcatattgttccggccacggggattgtatctctggcgtctgcttctgtgatctcggatatactgccgctcagggaacatgtgtgagtaacgtgcccaaccataacgaaatgttcgaccgcttcgaaggtaagcttagcccgctctggtataagatcactggtgcacaggttggaactggttgcggaacactcaatgacggcaagtcactctatttcaatggaccagggaagcgcgaagctcggactgtgcctctcgacacccgcaatatcagactggtgcaattctacatccagatcggcagtaagacatccggaattacctgtattaaacccaggacccgaaatgagggtttaattgttcagtacagtaacgataacggaatcctttggcacctgctcagggagctcgactttatgagtttcctggaaccacaaattatatccatcgacctgccacaggatgccaagacacccgcaaccgcctttagatggtggcagccacaacacgggaaacacagcgctcagtgggccctggacgatgtcttaattggaatgaatgattccagccaaaccggcttccaagataagtttgacgggtctattgaccttcaagcaaattggtatcggatccaaggcggccaagtcgacatcgactgcctgtctatggataccgccctgatctttacagaaaatatcggcaagcctcggtacgccgaaacatgggatttccatgtctccgccagtacatttctacagtttgagatgtccatgggatgtagcaagccctttagcaactcacactccgttcaactgcagtactccctcaataacggaaaggactggcacctggtgacagaagagtgcgtacctcctacaataggctgcttgcactacactgagagctccatatacacctcagagcggttccagaactggaaaaggatcacggtgtaccttccattgtctactatttccccaaggacacgcttcagatggattcaggccaactatactgtcggagccgacagttgggccatcgataatgttgtcctcgcatccggctgcccatggatgtgttctgggagaggcatatgcgacgcgggcagatgcgtgtgtgatagaggcttcggaggtccgtattgcgtgccggtcgtgcccctgccttctattctgaaggacgatttcaatggtaacctgcatccagacctatggccagaagtgtatggcgctgaacgcggaaatctgaatggggagactattaaatctggaacatctctcatttttaagggggaggggctccgcatgcttatctcccgagatctcgactgcactaataccatgtatgtccagttctctctgagattcatcgcgaaatcaacacctgagcgctcccactccatcctgcttcagttttccatttcgggcggtattacctggcatcttatggacgaattttacttcccgcaaaccacgaacatcctgtttattaatgttccacttccatatactgcccaaacaaacgccacccgcttcagactgtggcagccctataataatgggaaaaaagaagaaatctggatcgtagacgattttatcatagatggcaataacgttaacaatcccgttatgctactagatacattcgatttcggcccacgagaggacaattggtttttctacccaggaggaaatatcggcctctactgtccttattcatctaaaggcgctcctgaggaagattcagctatggtgtttgtttctaatgaagtcggcgagcacagtataacgaccagggatcttaacgtgaatgaaaacacaattattcagttcgaaatcaatgtcggatgttcaacggactccagttcggcggatcccgtgcgcctcgagttttccagagatttcggcgctacgtggcatctgctgctgcccttatgctaccattcttcctcacatgtaagcagcctgtgtagcactgagcaccaccccagtagcacgtactatgccggcaccatgcagggatggcgtcgggaggtggtgcatttcggcaagctgcacctctgcggcagcgttcgatttcgctggtatcagggattctaccccgccggatcccagccggtgacctgggccatcgacaatgtttacatcgggcctcagtgtgaggagatgtgtaatggtcagggtagttgcattaatgggactaaatgcatttgtgatcctggctactccgggcctacttgtaaaatatcaacaaagaaccctgattttctgaaggatgatttcgaaggtcagttggaaagcgatcgattcctgctgatgtccggtggcaaaccatctagaaaatgtggcatcttgtcttccggaaacaacctgttttttaatgaagatgggttgagaatgttgatgacacgcgacctcgacctcagccacgccagattcgttcaattctttatgcggctgggttgcggaaagggagtcccagacccgcgctcccaacccgtgctccttcaatattcacttaacgggggcttaagttggtcactgctgcaagaatttctgttcagcaatagtagtaatgttggacggtacattgctcttgagattcctctaaaagcccggagtggcagcactagactccggtggtggcaaccttccgagaacggacacttctattccccatgggtaatcgaccaaatactgatcggcggaaatatttctggaaacactgttctcgaggacgacttcactactctggacagcagaaaatggctgctccaccccggcggtactaaaatgcctgtctgtggctccacgggagacgcgttggtgtttatcgagaaggcctccacgaggtacgtggtgagtaccgatgtcgccgtcaacgaggactcttttctacagatcgactttgccgcctcctgtagcgtgacggactcttgctacgctatcgaactcgagtattccgtggaccttggattaagctggcacccactagtaagggattgtttgcccacgaatgtggagtgttctcgctaccacctccagcggatcctggtgagtgatacattcaacaagtggaccagaatcactcttcccctgccgccttacactcgatctcaggccacacgctttcggtggcaccagcccgcaccttttgataaacagcagacctgggccatagacaatgtgtatatcggggatggatgtattgacatgtgcagcggccacggtcgctgcatccagggaaattgtgtctgcgacgaacaatggggtggactttattgtgatgaccctgaaacaagccttcctactcagctcaaggacaacttcaatcgcgccccgagctcccagaattggcttaccgtgaacggggggaagctttctaccgtttgcggagctgtagccagcggcatggccctccatttttccggcgggtgctcaaggctcttagtgaccgtcgatctcaacttgaccaacgccgagttcatccagttctacttcatgtatggctgccttattacgcccaacaataggaatcagggtgtcctcctggagtattcagttaatggcggcattacctggaatcttcttatggaaattttttacgatcagtactccaagcccggatttgtgaatatcctccttccaccagatgccaaggagatcgctacccgcttcagatggtggcagccgagacatgatggcttggatcagaacgattgggctattgataacgtactgattagtggttccgctgatcagcgtacagttatgctggatactttcagttctgctcccgtgccgcagcatgaaagatcccccgccgatgccggacccgtggggaggatcgcattcgacatgttcatggaagacaaaacctcagttaatgaacactggttgttccatgatgattgcacagtagagcggttttgtgatagtcccgatggagtgatgttgtgcggatcccacgacggccgtgaggtttacgccgtcactcacgacctcaccccaaccgagggctggataatgcaattcaaaatttccgtgggttgtaaagtttcagagaagattgcccagaatcagattcatgtgcagtactccacggactttggagtctcatggaattacctcgtgccgcagtgtctgcccgccgaccctaagtgcagcggaagtgtgtctcagccatccgtctttttccccaccaaaggctggaagcggatcacctaccctttacccgagagcctcgtggggaacccggtcagattccgattttatcagaaatacagcgacatgcagtgggccatagacaacttttacctgggcccaggctgtctcgataactgcagaggtcatggagactgcctgagagaacagtgcatctgcgatccaggctacagcggaccaaattgctacctcacacacacactcaaaactttcttgaaagagcggttcgatagcgaagaaattaagcccgatctctggatgagcctggaaggcggttcgacatgcacagagtgcggcatcttggctgaggacaccgctctttattttggggggagtacagtgcgacaagccgtgactcaggacctagacttgagaggggctaaatttctgcaatattggggccgcattggtagtgagaacaatatgacatcttgtcaccggcccatctgccgcaaagagggagtactgcttgactactctaccgacggcggcatcacttggaccctcctgcatgaaatggactaccaaaaatacatatccgtgaggcacgattacatactcctcccagaagacgctttgactaacaccacaaggctacgctggtggcagcccttcgttatctctaacggcattgttgtctcaggtgtggagcgggcccaatgggccctggataatatcctgatcggcggggcagagataaacccctcccaacttgtagatacttttgacgatgagggcacgtcgcacgaggagaactggagcttctacccaaatgctgtgcgaactgccggcttttgtggaaatcccagcttccatttgtattggcctaacaagaaaaaggacaagactcataacgcactgagcagcagggagttgattatccagcctggatacatgatgcagttcaagatagtagtcggatgcgaggccaccagttgcggcgacctgcactccgtgatgttggagtatacaaaggatgcgagatctgactcctggcagcttgtgcagacacaatgcctaccctcttcatcaaattccatcgggtgcagcccttttcagttccacgaggctaccatctacaactccgtgaactcttcgtcatggaagcggatcactatccaactccctgatcatgtgagttcttcagccacccagttccggtggatccaaaagggggaagagacagaaaagcagagctgggctatcgatcacgtctatattggcgaagcctgccccaaactctgctcaggacacggatattgtacaacaggcgccatatgcatctgtgacgaatctttccagggtgacgactgtagcgtgttctcgcacgatctgccaagttacattaaagacaacttcgagtccgcgcgggtcacggaggccaattgggagacgatccagggcggtgttatagggagtgggtgcggtcagcttgcaccctacgcacacggcgattcattgtattttaacggctgtcaaataaggcaggcagcgaccaagccgctggatctcactcgggcttcaaaaattatgttcgtgttgcagataggcagcatgagccagacggacagctgcaacagtgacttgagcggaccccacgccgtggacaaggctgtgctcctgcaatactccgtgaacaacggcataacatggcacgtgattgctcagcatcagcctaaggacttcacgcaggcacagcgcgtgtcctacaacgtcccactcgaggcccgaatgaaaggggtgctcctgcggtggtggcagcctcggcataatggaacaggacacgaccagtgggcactggatcatgtcgaagtggtgctgtag

SEQ ID NO: 17128 - DNA, 1668 bp, synthetic construct
  misc_feature 1..1668: note = Description of Artificial Sequence: Synthetic coding sequence
  source 1..1668: mol_type = other DNA
atgaaaaagcacgattttgctgaaaacctgcccagtagcctgctgattattatcctcgtgattttcacgctctcagggtcgaagttcgggaggggaaccggtcttactcaaccttctcagcgtaccagtgcccgcagaagtttcggccggtccaaaagatttagcatcactaggtccctggatgatcttgagagcgcaaccgtttctgacggggaactgaccggagcggacctaaaagattgcgtcagtaataatagcctgtcttctaatgcctccctcccaagtgtccagtcttgccggcgccttcgcgagcgtcgcgtcgcatcatgggctgtttcgtttgaacggctcttacaggacccagttggagttcgttatttttcagattttctgagaaaggagttttcagaagaaaatattctgttctggcaggcctgcgaatacttcaaccacgttcctgctcacgataaaaaggaactctcatatagagcaagagagatattttcaaagttcttgtgctctaaggcaaccactccagtcaatattgattcccaggctcagttggcagacgatgtgttaagagctccccacccagatatgttcaaggaacagcaactccagattttcaaccttatgaaatttgacagctacacaaggttcctgaagtcccctctgtatcaggagtgcatccttgcggaagtggaagggcgagcgcttcccgattcacagcaggtaccctctagcccagcttctaagcactctcttggctcagatcacagttccgtcagcactcccaagaagttgtccgggaagagcaaatccggccgcagcctgaatgaggaactgggggatgaggattctgaaaaaaaaagaaagggagcattcttctcctggtcccggactcgatcaactggcagaagccagaaaaagcgagaacatggagatcatgccgacgacgcactgcacgccaatggaggactttgccgtagagagagccagggatctgtctcctctgccgggtccctggatctcagcgaagcgtgccgcacattagcacctgagaaagacaaggcgactaagcattgctgcattcatctgccagacggcaccagttgcgtggttgctgtgaaggccggcttctctattaaggacatactgtcgggtctatgcgagagacacggaattaatggggccgccgctgacttgtttctcgtgggaggcgataaacctctggtgctgcatcaggacagcagcattcttgagtctcgcgaccttcggttagagaagcggaccctgtttagactagatttagtgcccataaaccggtctgtcgggctgaaagccaaacccactaagccggtgaccgaggtcctgaggcccgttgttgccaggtacgggctcgacctttcagggctgttggttcggctgagtggagagaaggaaccgcttgatctgggagctcctatctcttccctggacggtcaaagggtcgttttggaagaaaaagacccttcccggggcaaggccagtgcagacaaacagaagggcgtccccgttaagcagaataccgctgtgaactcctcctctcgcaatcatagtgctacatcttttctttccttatttccaaagcttcgtgcaaccgagcagatgaccaatgtgggatgctag

SEQ ID NO: 17129 - DNA, 4131 bp, synthetic construct
  misc_feature 1..4131: note = Description of Artificial Sequence: Synthetic coding sequence
  source 1..4131: mol_type = other DNA
atgtttcgcgccggagaagcctccaaaaggccattacccggcccgtcccctcctcgggtgcggtccgttgaagttgctcgcggacgagccgggtacggcttcaccttgagcgggcaagctccctgcgtgctctcttgcgtaatgcggggctcccccgccgacttcgttgggctgcgagctggtgaccagattctcgctgtgaacgagatcaacgtcaaaaaggccagtcacgaagacgtagtgaagttgatcgggaaatgctccggagtcctgcatatggtgattgctgaaggcgtgggtcggtttgagtcctgctcttctgacgaagaaggcggattatatgaggggaaaggttggctgaaacccaaacttgacagtaaagcacttggtataaatagagccgagagggtggttgaggagatgcaatcaggagggatctttaacatgatatttgagaaccccagcctgtgcgcctcaaacagcgagcccctgaagttgaagcaacgtagtctatccgaatccgctgctacgcgcttcgacgtaggccatgaatccattaataacccaaatcctaacatgctgtctaaagaggagatttctaaggtaattcacgatgattcagtgttctccataggtctggagtcccatgacgattttgcgctggacgcatcgatcctgaacgtggcgatgatcgtcggatatctgggctcaatcgaactgccatctaccagtagtaatctggaatctgattccctccaggccattagaggctgtatgagacggctgcgagctgaacagaaaatccatagtctggtcaccatgaagatcatgcatgattgcgtgcagctgagcacagataaggcaggcgttgtggccgagtatcccgctgaaaaacttgctttcagtgctgtctgccccgatgacaggcgcttttttggattagtcaccatgcagaccaacgatgatggctcacttgcacaagaggaggagggtgcgttacgtacatcgtgtcatgtgttcatggtcgaccctgatctgttcaatcacaaaattcaccaaggaatcgctaggcgcttcggatttgagtgtaccgcggacccggacaccaatgggtgcctggagtttcccgccagcagcttaccagtcctgcagttcatcagcgtgctatatcgggacatgggagagttgatcgaaggtatgcgcgctagagcctttcttgacggtgatgccgacgctcatcagaacaacagcacatcaagcaacagtgacagcggaataggcaatttccaccaagaggaaaagtctaaccgggtgttggtggttgatctgggcggatctagtagtaggcatggtccagggggaagcgcatgggatggggtgggaggcagaggagctcagccctggggcgctccttggacaggtccgttttgtcctgaccctgagggctctccaccatttgaggcagcccatcaaacagatcgattttgggacctgaacaagcatttgggccccgctagcccagtggaagtgccacccgcctcactgcggagtagtgttcctccttccaagcgcggcactgtgggcgccggctgtggattcaatcagaggtggcttccggtgcacgtgctacgcgagtggcagtgtggccacacctccgaccaggatagctatacagatagcacagatggctggtcttcaatcaattgtgggaccttgccgcctcctatgagtaagattccggccgaccgatacagagtcgagggatccttcgcgcagccccctcttaatgctccaaaacgggagtggagccgcaaggcatttggtatgcaatctatttttggcccccaccgaaatgtgagaaaaacaaaggaggacaagaaagggagcaagtttgggagagggaccggtctgacacagcccagtcaaagaaccagcgctcgacgcagcttcggccgctccaaacggttcagcataaccaggtcactcgacgatctggaaagtgccaccgtcagcgacggtgagctaacaggtgcggatctgaaggactgcgtgtccaataacagtcttagcagtaacgcttcactgccaagcgtgcagtcatgtaggcgcctgcgggaacgcagagtagcttcttgggctgtgagtttcgagaggttattacaggatccagttggcgtgcgctactttagcgactttctgaggaaggagttcagcgaggagaatatattgttctggcaggcttgcgaatatttcaatcacgtccctgcgcacgataaaaaggagctgtcttatcgcgcccgcgagatcttcagcaaattcctgtgctccaaagcaacaactccggtgaatattgactcccaagcgcaattagccgatgacgtattgcgggcccctcaccctgacatgtttaaagagcagcagctgcaaattttcaacctgatgaaatttgactcctacacacggttcctgaagagtcccttgtatcaggaatgcatactggccgaagtggagggacgggccttgcctgattcacagcaggtgcctagctccccagcttctaagcattcactgggctcagatcacagcagcgtgtccacaccaaaaaagctgtctggcaagtccaaatccggtcgctccctgaatgaggaactgggtgacgaggattcagagaagaagagaaagggggccttttttagctggtcacgaacgcggtctactggccgctcccagaagaagagggagcatggcgaccacgcagacgacgctctacatgccaatgggggcctctgtcgcagggaaagtcagggcagcgtaagctcggcaggatcccttgatctgagtgaggcttgcaggaccctagcgcctgagaaggacaaggccacaaaacattgttgcatccatctcccagacggaacgagctgtgtagttgccgtgaaggcaggcttctccataaaggacattcttagtgggttgtgtgaacggcacgggatcaacggcgcggcggcagatctattcctggtcgggggagacaaacctctggtgctgcaccaggatagttcaatcctcgaatcaagagaccttcggctggagaaacggacactgttcagactggatctcgtgcctataaatcgtagcgtggggctcaaagcaaagccaactaagccagttaccgaagtgctgcggccagtcgtggcccgttacggactggatctttctggtttgctggtccgactaagcggggagaaggaacctctggatcttggggctccgatatcctccctggacggtcagcgcgtggtccttgaggagaaggatccaagcagaggcaaggcaagcgccgataaacaaaaaggcgtgccagtgaaacaaaatactgcagtcaatagcagtagtcggaaccacagtgccactggggaagagcgaacactcggaaaatctaacagcatcaagatcaaaggggagaatggaaagaatgcacgggatccacgattaagtaagagagaggaaagtatcgccaagatcggcaagaagaaatatcagaaaattaacttagatgaggcagaagagtttttcgagcttatcagcaaggctcagtcaaacagggccgatgaccaacgaggcttgttgagaaaagaagatttagtgctgccagaattcttgcgtcttcccccggggagtaccgagctgacgcttcctacccctgctgccgtcgcaaaaggctttagtaaaaggtccgccactggcaacggcagggagtctgccagccagccaggcgagcagtgggagccagtccaggaatcttctgatagtcctagtacgtcccccggatctgcgagttctccaccaggccctcccggcaccactccaccgggtcaaaagtctccctccgggcccttttgcacgccccaatctcccgtgagtcttgcccaggagggcacagctcaaatttggaagcgccagagccaggaagtcgaggcaggcggcatacaaacagtggaggacgagcacgttgccgagttaacccttatgggagagggtgatattagcagccccaacagcaccctcctgccacccccaagcaccccgcaagaggtgccaggaccgagtaggccagggacttcacgcttctag

SEQ ID NO: 17130 - DNA, 2400 bp, synthetic construct
  misc_feature 1..2400: note = Description of Artificial Sequence: Synthetic coding sequence
  source 1..2400: mol_type = other DNA
atgaatcttggtaaagagcttagcaacgagactcatgtctctaatgatcaacagagtgctactgtgtccgacggtgagttgaccggcgccgacctgaaggactgcgtctctaataatagcttatctagcaatgcatccctgccatcagttcagtcctgccgtagactaagagaacgcagggtcgcgagttgggcggtctccttcgaaaggcttcttcaggacccggttggggtcaggtacttctctgacttcttaagaaaggaatttagcgaggagaacatattattctggcaggcttgtgaatacttcaaccacgtgcctgcccatgacaaaaaggagctgagctaccgagcccgagagatctttagcaagttcctgtgtagcaaggctacaactcctgtgaacatcgactctcaggcgcagcttgctgatgacgtgctgagggctccccacccagacatgtttaaagaacaacagttgcagatctttaacctgatgaagttcgacagctatacccgcttcctgaaatcacccctttaccaagagtgtattctcgctgaggttgagggccgtgcattgcccgatagtcagcaggttccgagcagcccagcttctaaacacagcctgggatcagaccactcaagcgtaagtaccccaaagaagctgtccgggaagagtaagtctggtagatcgctgaatgaagagcttggcgacgaggactctgagaaaaaacggaagggagcttttttttcctggtctagaacacggagtacaggccgctcccagaagaaacgcgagcatggcgatcacgcggacgacgctctgcacgctaatggagggctctgtaggagagaaagccaggggtctgtcagttccgcgggttcactcgatcttagcgaagcctgtcgcacgttggctccagaaaaagataaggcaacaaagcattgctgtatccacctgcctgatggcacaagctgtgtcgtcgccgtcaaggccggcttttctatcaaagatatattgagcggtttatgcgagcggcatggtatcaatggagccgccgccgatttatttctcgtgggaggcgacaagccactggtactgcaccaggactcaagtattctggaatctagggacctccgtctggaaaaacggactctattccgtctggacctggtaccaattaatcggagtgttggactcaaagcgaagcccacaaagcctgtgaccgaagtcttaaggccagttgtggcaaggtatggactggatctgtcaggcctcttagtccgtctgagcggggagaaggaaccgctggatcttggcgctcccatttctagtcttgatggtcagcgcgtggtacttgaggaaaaagatccttcacgtggaaaagcatctgctgataagcagaagggtgttcctgtgaagcaaaacacagctgtgaactcctctagccggaaccactccgcaactggcgaagagagaacactgggcaagagtaacagtattaagatcaagggtgaaaatggcaagaacgcacgcgacccaagactttctaagagagaggagagcattgctaagatcggcaaaaaaaagtatcaaaagataaacctcgacgaagccgaagagtttttcgaactgatctctaaggcacaatcaaaccgagcggacgatcagaggggcttacttaggaaagaggacttggttctccccgagtttttgcgactaccccccggcagcacagaattgacattgccaacgccggccgctgttgctaagggtttctccaagcgctcagcaacggggaacgggagggaaagcgccagtcaaccaggagagcaatgggagcctgttcaggaatctagtgacagtccatccacctcaccggggagtgcgagctcaccacccggccctcctggcacgacacctcccggacagaagagcccatctggccccttttgtacaccccagtcccctgtgagcctagctcaggaaggcaccgcacagatctggaagcgtcaatcccaggaggtggaggcagggggaatccagaccgtcgaggacgagcacgtcgcagaattaactctgatgggggaaggcgacatcagcagccccaacagcacgctgctaccccctccctccacgccgcaggaagttccaggcccctcccggcccggatcggggacacatggatcccgagaccttccggtgaatcgtattatagatgtggatcttgttacggggagcgctcccgggagggatggaggtatcgctggagctcaggccggcccaggaagatcccaagcgtctgggggtccacctacatccgacctcccaggcctggggcctgtccccggtgagccagcaaaacccaagacctccgcccatcacgccacattcgtctag

SEQ ID NO: 17131 - DNA, 4344 bp, synthetic construct
  misc_feature 1..4344: note = Description of Artificial Sequence: Synthetic coding sequence
  source 1..4344: mol_type = other DNA
atgttcagggccggcgaggcttcaaaaagacctttgccaggtccatcaccacctcgcgtgcgctccgtggaggttgctcgcggaagggcaggctatggattcacgctgagcggccaggcaccatgcgtactcagttgcgttatgcgcggtagccccgcggactttgtgggactgcgggcaggggaccagattctcgcagttaacgaaattaacgtgaagaaagcctctcacgaggatgtggtaaaattaattgggaagtgctccggtgtgctgcatatggtgattgccgaaggcgtcggtcggttcgaaagttgttcatccgatgaggagggcgggctctacgagggcaaagggtggctgaagccaaaattagacagtaaggccctcggcattaacagagcagagcgggttgtggaggaaatgcagtccggaggtatatttaacatgattttcgagaatccaagtctgtgtgcaagcaattccgaaccacttaaactcaagcagagatctctcagtgaaagcgcggctactcggttcgatgtgggccacgagtcgataaacaatcccaacccaaatatgctcagtaaagaggaaatcagtaaggtaatccatgacgattccgtgttcagtattggtctggaatctcacgatgatttcgcacttgacgcttccattttgaatgtggccatgattgttggatatctggggtctatcgagctgcccagtacgagttcgaatctcgagtcagatagtctccaggctatcagaggctgcatgagacgcctgcgagctgaacaaaaaatacattcccttgtcaccatgaaaattatgcatgactgtgtccagctcagtaccgacaaagctggcgtcgtggcagaatatcccgcagaaaaactcgctttctccgccgtgtgcccagatgatcgtagatttttcggacttgtgacgatgcagacaaatgacgatggtagtttggcccaggaagaagaaggggcactgagaacatcatgtcacgtgtttatggtcgacccagacctatttaaccacaaaatacaccagggcatcgcccggaggtttggctttgagtgcaccgcagatccagataccaacggatgcctggaatttccagcatctagcttgccagtccttcaatttatcagcgtactatatcgagatatgggggaactgatagagggcatgcgggccagagccttcttggatggagacgccgatgctcaccaaaataactctacatcttctaacagcgatagcggcatcggaaatttccaccaggaagaaaagagcaatagggtactcgtcgtggatctgggaggtagttcaagccggcacgggccaggaggaagtgcctgggacggcgtgggcggacgcggcgcccaaccctggggcgcaccttggactggtcctttctgtcctgatccagagggttctccaccctttgaggctgcacatcagacggaccgtttttgggaccttaataagcacttgggcccagctagcccagtggaggtaccacccgcgagcctgcgctcaagcgtgcctccttctaagagggggacagtcggcgcaggctgcggattcaaccagagatggctgcctgtgcacgtgcttagagagtggcaatgtggtcacacatctgaccaggacagctatacagactctactgatggctggagctcaattaattgcggcacactcccccctccgatgtcaaagatcccagccgacagataccgggttgaaggatcctttgcccagccacctttgaacgcccccaaaagagagtggtcccggaaagctttcgggatgcagagtattttcggtcctcatcggaatgtccggaagaccaaagaggacaaaaaaggttctaagttcggtcggggcacagggttaacccaaccatcacagcggacctccgccaggcgatcttttgggcgtagtaagcgcttctcaatcaccagaagcttggatgacttagagagcgccacagtatcagacggggagctcaccggcgctgatttaaaggattgcgtgtctaacaattccctcagtagcaacgcctcccttccttccgtgcagtcatgtcggcgtcttagagaacgacgggtggcttcctgggcagtatccttcgagagactcctgcaagatccagtgggcgtgcgatacttttctgatttcctccgaaaggaattctctgaagaaaatattctgttttggcaggcgtgcgaatattttaaccacgtgcctgcccacgataagaaggagctgagctacagggcgcgtgagatttttagtaagttcctctgctccaaagcaacaaccccagttaacatagactcccaagcccaactcgcagacgacgtgctgcgggcaccccaccccgatatgtttaaagagcaacagctgcagatctttaacttaatgaagtttgatagctacaccaggttccttaaatcaccgctataccaagaatgtattttggcggaggtagaagggcgagcgctccccgactcccagcaagtgccttctagtccggcttcgaaacactcactgggctccgaccattcatccgtgtctacaccaaaaaagctcagcgggaagtcaaaaagcgggcgaagcctgaatgaagaactgggtgatgaagatagcgagaaaaagaggaaaggagctttcttctcttggtctagaactaggagcaccggtcggagccaaaagaagagggaacacggcgaccacgccgatgatgcactgcacgcgaacggcggcttatgtaggcgcgaaagccaaggttctgtgagttctgctggaagtcttgatcttagtgaggcttgcagaaccttagctcctgaaaaagacaaggccactaaacattgctgtattcatctccccgatggaacctcttgtgttgttgccgtgaaggccggcttttccatcaaagatattcttagcggtctttgtgaaaggcacggaattaacggcgccgctgccgatctgttcctagtgggcggagataagccactggtactgcaccaagacagttcaatcctggagagtagagatctcaggctggagaagagaactctgtttcgtctggatctagtcccaattaataggtccgtgggccttaaggctaagcctaccaaacctgttaccgaagtccttcggcctgttgtggctagatatggactggaccttagcggactgttagtaaggctgagcggcgaaaaagagccccttgacctgggtgccccgatttcctccttggatggacaacgggtcgtcttagaggagaaggatccatcccgaggcaaagcttcggcggacaaacagaagggagttcccgttaagcaaaacacagcagttaatagttcctccaggaaccacagcgccaccggtgaagaaaggactctgggcaagtccaactccataaagatcaaaggcgagaatggtaaaaacgcccgcgaccctcggttgagcaaacgcgaagaatctattgcaaaaattggcaagaagaaataccagaagattaacctagacgaggctgaggagtttttcgagttgatctcaaaggcccagagcaatcgcgccgacgatcagaggggtctgctgaggaaggaagacctggtcctgcctgaatttctcaggcttcctcccgggtccaccgagttaaccctcccgacccctgcagcagtggccaaaggtttctctaagcgctccgccactgggaacggaagagagtcagcctcccagcccggagagcagtgggagcccgtgcaagagagcagtgattccccatcaacttctcccggctccgcgtccagtccaccgggcccccctggcaccacccccccaggacagaaatctcccagtgggcccttctgcacgccacagtctcccgtgtccctcgcccaagagggtaccgcccaaatttggaaaaggcaatctcaggaggtagaagctggcgggatacagactgttgaggatgagcacgtggccgagctgactttgatgggagaaggtgatatcagcagccccaacagcacccttctccctccgccctctaccccccaagaggtacctggtccaagcagacccggttccggcacgcacggctctcgcgacctgcccgtcaatagaatcatcgacgtggacctcgtgacaggatccgctcccggccgtgacggtggtattgcaggcgcacaggccggtcctgggcgctcacaagcaagtggagggcccccgaccagcgatcttccaggacttggcccagtgccaggggaacccgctaagccaaagacaagcgcccaccacgcgaccttcgtgtag

SEQ ID NO: 17132 - DNA, 4131 bp, synthetic construct
  misc_feature 1..4131: note = Description of Artificial Sequence: Synthetic coding sequence
  source 1..4131: mol_type = other DNA
atgtttcgtgccggcgaggccagcaaacgccccctccctgggccgtctcctccaagagtcaggtcagtggaggtggcccgcgggagggcaggctacgggttcaccttgtccggacaggccccttgcgtgctttcctgtgtcatgcgtggatcaccagcagatttcgtgggcctgagggcaggagaccaaattctcgccgtcaacgagatcaatgttaaaaaggcgagccacgaagatgtggtgaaattgataggcaagtgttccggggtgctccacatggtaatcgccgagggggttggcaggttcgaaagttgttctagcgacgaagagggtggcctgtacgaaggcaaggggtggctgaagccaaagctggacagcaaggcattgggaattaacagagctgaaagggtggtggaggaaatgcagagcggaggcatctttaatatgatttttgagaatccaagtttgtgcgcttctaacagcgaacccctcaaattgaagcagcgcagcctgagcgaaagcgcagcaactagatttgatgtggggcatgagtctatcaataaccccaatcccaacatgctatctaaagaggaaatcagtaaggtcattcatgacgactccgtttttagcatcgggcttgaaagtcacgacgactttgccctggatgcatcaattctaaacgtcgctatgatcgtgggttatctcggatccattgaactgccttccacaagttccaatctcgaaagtgattcgctgcaagcaatcagagggtgtatgcggcgattgagagccgagcaaaaaatccactcactagttaccatgaaaataatgcacgactgcgtgcagttgagtactgacaaagcgggggttgtggcagaatacccggccgaaaaattagcatttagcgctgtgtgtcctgatgacagacggttcttcgggttagttacaatgcagactaatgatgacggcagcctggcccaggaggaagaaggagcactgcgcacttcctgtcacgtcttcatggtggacccagacctgtttaaccataagattcaccagggcattgcgaggcggttcgggtttgagtgcaccgcagatcctgacaccaacggttgtcttgagtttccagcgtctagcctccctgtcctccagtttatcagtgtcctgtaccgggatatgggcgaactgattgagggcatgagagcccgcgcctttctggacggagacgcagacgcacatcagaataactctactagtagcaactcagattccgggatagggaactttcaccaggaggagaagagtaaccgggtccttgtggtggatctgggtggcagcagtagcagacacggtccagggggttctgcatgggacggcgtggggggccggggcgcacagccttggggggccccctggacaggacctttttgtcccgaccctgaaggcagtcccccatttgaggccgctcatcagacagacagattctgggatctgaacaagcacctgggccctgcatctcccgtcgaggtgcctccagcgagtttgagaagcagcgtgcccccttccaagagaggcacggtcggagccggctgcggctttaatcaaagatggctgccagtccatgtcctgcgcgaatggcagtgtgggcatacctccgatcaagattcttataccgactctacggacggctggagcagtatcaactgtggtaccctaccccctcctatgagtaagataccagcagatcggtacagagtggaaggtagttttgctcagccacccctgaacgcccctaagagagaatggtcacgtaaagcatttggaatgcagagtatctttggcccccatagaaatgtgcgcaaaacaaaggaagataagaaaggcagcaagttcggacggggaacaggactgacacagccatcccagcggacgagtgccagaaggtctttcggaagatccaagagattcagcataacccgatcactcgacgatctggaaagtgctacagtgtctgacggtgagcttacaggcgcagatctgaaggattgtgtgagcaataattctctgagctctaatgcttctctcccttccgttcaatcatgcaggaggctccgagaaaggcgtgtggctagttgggctgtgagtttcgaacgactgctgcaggatcctgtgggtgtgcgctatttctctgactttctaagaaaagaattttccgaagagaacatccttttctggcaggcatgcgagtacttcaaccacgtgcctgcccacgacaagaaggaactttcttatcgagcccgggagatttttagtaaatttctctgcagtaaggccaccacaccggtgaatatcgattcacaagctcagctggcagatgatgtgctgagggcacctcatccagatatgttcaaggaacagcagctgcagatcttcaacctgatgaaattcgatagctatacccggtttctgaagagccctttgtaccaggaatgcattctagctgaggtcgaaggaagagcgttacccgacagtcagcaggttccaagctcacccgctagtaaacacagcttgggttctgaccacagctctgtctctactcccaagaaattgagtggcaagagtaaatcggggagaagcctaaacgaggagctgggcgatgaagacagcgaaaaaaaacgaaaaggtgccttcttcagttggtctaggacccgcagcactggccgctctcagaagaagcgagaacacggagaccacgccgacgatgcccttcacgcaaacggcgggctatgccggagggaaagtcaaggatctgtcagctcagcgggtagtctcgatctctcggaggcttgccgcacactggcgcctgaaaaagataaggcgacaaaacattgttgtatccacctaccagacggcacgagttgcgtggtggctgtgaaagccggcttcagtattaaagatatcctgtccgggctgtgtgagagacacggcatcaacggcgcagcagctgacctgttcttggtggggggagacaaacctttggtactacaccaagactcctccatactcgagtctagggacctccgccttgaaaaaaggactcttttccgactggacttggtccccatcaatagaagcgtgggcctgaaagccaagcctacaaagcctgtgaccgaagttctgcggcctgtagttgcaaggtacgggctggacttatctgggcttttggtgcgcctgtccggagagaaggaaccactggatttaggggctccaatttcatctctggacggtcagcgagtagtgctcgaggagaaagaccctagcaggggaaaagccagcgcagacaagcagaagggcgtgcccgtgaagcagaatactgctgttaacagcagtagtcgcaatcattccgctaccggagaagagcggactcttggaaagtctaactcgattaagataaagggtgaaaacggtaagaatgcgagggatcccagactgagcaaaagagaagaaagcatcgccaaaatcggtaagaaaaaataccaaaagatcaacttagacgaagcggaggaatttttcgaacttatttctaaagcacagtcaaaccgagcagatgaccagaggggtctgctcaggaaggaggatttagtgctccccgaattccttcggctccccccagggtctaccgaactgaccctgccaacaccagccgccgtagctaagggtttcagtaagcgcagcgctacaggtaacggacgggaatccgcaagccagccaggtgaacagtgggagccagttcaagagagttcagactctccctccactagtcctggctccgcctcctcacctccaggaccacccggaactacaccccccggccaaaaaagccccagtggacctttctgtacaccacagtcacccgtaagccttgctcaggagggcacagctcagatctggaagcgacagagccaagaggtggaggccggaggcatacagacagtggaagacgagcacgtcgcagaactgaccctcatgggcgaaggagatatttcatcacctaactcaacacttctccctccaccctctacaccccaggaagtgcccggcccctctcggcctggcaccagtcgcttctag

SEQ ID NO: 17133 - DNA, 1500 bp, synthetic construct
  misc_feature 1..1500: note = Description of Artificial Sequence: Synthetic coding sequence
  source 1..1500: mol_type = other DNA
atgtcgttgtcactgtttttccagagcgcaactgtgagtgatggcgagctcactggagccgacttgaaagactgcgtgtcgaataattcactgagctccaacgctagtctaccttccgttcagtcctgccgtcgcctgcgtgagcggcgtgtcgcctcttgggctgtgtctttcgaaagactgctccaggaccctgttggggttagatatttctccgactttttaaggaaagagttctcagaggaaaatattttgttttggcaggcttgtgaatatttcaaccacgtacccgcccacgacaagaaagagctgtcttatagggcccgagagatattcagtaagttcctgtgctccaaggctacaactccggttaatatcgacagtcaggcacagctcgctgatgatgtgttgcgagcaccccatcccgatatgttcaaagaacagcaactgcagatcttcaacctgatgaagttcgattcttatactcgctttttgaagtcacccctgtaccaagagtgcatattagccgaagtggaaggcagggcactgccggattctcaacaggtgccatccagccccgcctcgaaacattccctcgggtctgatcacagttccgtgagcactccgaaaaaactgtctggaaaaagtaagagtggacgcagtctcaacgaggaactaggtgacgaagatagcgaaaagaaaaggaaaggagcctttttcagctggagcaggactcgcagtactggccggagccagaaaaagcgggagcacggagaccacgcggatgacgctctacatgccaacgggggactatgtcgccgagaatcacagggatctgtgagcagtgccgggtccctggatctatctgaggcctgcaggacactagcccctgagaaagacaaagcaacgaaacactgttgcatccatctacccgacggaacctcttgtgtcgtggccgtgaaagccggtttcagtattaaagatatcctcagtggattatgcgagcgacacgggatcaacggagctgctgctgatctgtttttagtgggcggggacaaaccactagtgctgcaccaggactcatctatccttgaaagccgcgatctccggttagagaaacgaaccttgttccgcctggacttagtgccaatcaatagaagtgttgggttgaaggccaagcctactaaacctgtgaccgaggttctgagaccagtcgtagctagatacggactggacttaagcgggttgctcgtgaggcttagcggtgagaaggagcctctcgatctcggtgcaccaatctcaagtctggacgggcagagagttgttctagaggagaaggacccctctcgtggtaaggcctctgcagataagcagaagggcgtcccagttaagcagaacacagctgtcaattcatcctctagaaaccattccgccacttctttcctgtcactctttcccaaactccgcgccactgagcagatgaccaatgtaggatgctag

SEQ ID NO: 17134 - DNA, 2004 bp, synthetic construct
  misc_feature 1..2004: note = Description of Artificial Sequence: Synthetic coding sequence
  source 1..2004: mol_type = other DNA
atgtttagagccggcgaggcatctaagcgacccctgccgggcccgtctcctcctagagtacggtccgtggaggtggcccgaggacgagctgggtacgggtttacgctctctggacaggccccctgcgtactcagctgcgttatgcgcgggtccccagctgattttgtaggcctccgcgctggagatcaaatacttgccgtgaatgagattaacgtcaaaaaagcgtcccacgaagacgtagttaaactaatagggaaatgttccggtgtgctgcatatggtcatcgccgaaggagtcggtcgcttcgagtcttgttcctctgacgaagagggagggttgtacgagggcaagggctggctgaagcccaaactggacagtaaggccctcggaatcaatcgcgcagaaagggtggtggaggagatgcaatctggtggcatctttaatatgatctttgaaaacccttcattgtgtgcgtctaacagtgagccactgaagctaaagcagcgatcattgagtgagagcgctgctactcgcttcgacgttgggcatgagtccatcaataatcctaacccgaacatgctgagcaaagaagagattagtaaggtgattcatgacgactctgtgttctctatcggcctggagagtcacgacgacttcgcgctagacgcgtcaatcttaaacgttgccatgatcgtgggctatctaggctctatcgaacttcccagtaccagctcgaatctggagagtgattccctccaggccattcgaggatgcatgcgacggttgcgggctgaacagaaaattcactctctggtgacaatgaagataatgcatgattgcgtgcagctctccacggacaaggctggcgttgtggccgagtatccagcagagaaactggccttctccgccgtttgtccagacgaccgtagattctttggactggtgacaatgcagaccaatgacgacgggtccctggcacaggaggaagaaggcgccctgaggacatcttgccatgttttcatggtagatccggacctcttcaatcacaaaatccaccagggcatcgctcgccgctttggatttgagtgcaccgcagaccccgacacaaatgggtgtctggagttccccgcgtccagccttcctgtgctgcaatttattagcgtgctatatagggacatgggcgagcttatcgagggaatgcgggcaagagccttcctcgacggcgacgcggatgcccatcagaataactctactagcagtaatagcgacagtggcatcggaaattttcatcaggaagaaaaatctaatcgagttctcgttgtggacttgggaggtagtagtagcagacacggccccggcggctctgcctgggacggcgtgggcggcagaggggctcagccttggggggcaccctggacagggccattttgtcccgatccagagggttcaccacccttcgaagcggcccatcagactgacaggttttgggacctgaataagcacttgggacccgctagtcctgtggaagtgcctcctgcttccctgcggtcttcggtgccaccgtccaaacgcgggacggtaggcgccggctgtggttttaaccagcggtggctccccgtccatgtcctgagggaatggcaatgtggacatacatcagaccaggacagctataccgattctactgacggatggtcatctatcaattgcggaactctcccccccccaatgagcaagatcccggcagatcgttaccgggttgagggatcattcgctcagccaccgctgaacgcacccaagcgtgaatggagccgcaaagcctttggcatgcagtcaatttttggcccacaccggaacgtgaggaaaactaaggaagataaaaaggggtccaaatttggaaggggcaccgggcttactcagcccagccagaggacaagtgccagacgatccttcggacggtctaaacgattctccatcactcgcagtttggatgacttagaatcctag

SEQ ID NO: 17135 - DNA, 636 bp, synthetic construct
  misc_feature 1..636: note = Description of Artificial Sequence: Synthetic coding sequence
  source 1..636: mol_type = other DNA
atgcagagcgccatgttcctggctgtgcagcatgattgccggcccatggataagagcgcgggctccggtcataaatccgaggaaaagcgtgaaaagatgaagaggactctgctcaaggactggaagactcgcttgtcatacttcctgcagaatagcagcacccctggcaaaccaaaaactggtaaaaagtctaagcagcaagctttcatcaagccatctcccgaggaggcacagttatggagcgaagctttcgacgagctgctggcaagcaagtatggccttgctgcttttagggcattcctgaagtccgagttctgtgaagaaaatatcgaattttggctggcttgtgaagacttcaaaaaaaccaagagtccccagaagctcagctccaaggctaggaagatctatacagattttatcgaaaaggaagcccctaaagagattaacatcgattttcagacaaagactttgattgctcaaaatattcaggaggccaccagcggttgtttcaccaccgcgcagaagcgagtctactccctaatggagaacaactcttatccaaggtttttagagagcgagttttaccaggatttatgtaagaagccacaaattactacggagccacatgcaacctag

SEQ ID NO: 17136 - DNA, 4203 bp, synthetic construct
  misc_feature 1..4203: note = Description of Artificial Sequence: Synthetic coding sequence
  source 1..4203: mol_type = other DNA
atgccgaaaattgtattgaacggagtgacagttgacttccccttccagccctacaagtgccagcaagagtacatgaccaaggttctggagtgcctccagcaaaaggtgaatggtattttggaaagccctacaggaacaggtaagactctgtgccttctgtgcactactctggcatggcgggagcacttgcgcgatggaatctcagcccggaaaattgcagaacgagcgcagggcgagctgttcccagaccgggccctgagcagctgggggaacgcagccgcggccgcgggggatcctatagcctgctatacagatatcccaaaaattatttatgccagccgcacccatagccagttgacacaagtgatcaacgaattacggaatacgagttatcgtcccaaagtctgcgtactggggtccagggaacagctctgcattcatcctgaagttaagaagcaggagagcaatcatttgcagatccacctttgccgcaagaaggtcgcctctcggtcctgccacttttacaataacgtggaggaaaagtcactggagcaggaattggccagcccaatcctcgacatcgaggacctcgtcaagtcaggttccaagcatcgggtgtgtccttattacttgtcccgaaacttgaaacagcaggccgacatcatttttatgccttataattacttgttggatgctaagtcccgacgtgcccacaacatcgatcttaagggcactgtggtcatctttgatgaagcccacaatgtggagaagatgtgcgaggaatctgcctcatttgatttgactccccatgatctcgcctctggtctggatgtgatcgaccaggtgctcgaagaacagaccaaagctgcgcaacagggggagcctcaccccgaatttagtgcagactccccgagtcccggtctgaacatggaactggaggatatagctaaattgaagatgattttgctccggctggaaggggccattgacgccgtggagttgccaggcgatgattcgggggtgacaaaacccggctcgtatatctttgaacttttcgccgaagcccagattacttttcagacaaagggctgcatacttgacagtctggatcagatcatccagcacctggccggaagggccggcgttttcaccaacacagccggcctccagaagttggcagacatcattcagatcgttttctctgtggacccatctgaagggtcccctggctctccagctggtctgggcgccctgcagtcctataaagtgcacatccaccctgatgctgggcatagacgcactgctcaacggtccgatgcatggagcactaccgccgctcgtaaacgcggtaaggtcctctcatattggtgtttcagccccggccacagcatgcacgaactggtgaggcagggagttcgcagcctcatcctcaccagtggcactctcgctccagtgagcagctttgcgctggaaatgcagatcccttttcccgtgtgccttgagaatccgcacataatcgacaaacatcagatttgggtaggagtcgtaccgaggggccctgatggcgcccagctttcgtccgctttcgatagacgattctcagaagaatgtctgtccagtctggggaaggctctcggcaatattgccagggtcgtcccatatggcctcctgatctttttcccgtcttacccggtaatggagaaatccctcgagttctggcgggcccgtgatttagcccggaagatggaagctcttaaaccattgttcgtcgaacctaggtctaagggcagcttctctgaaaccattagcgcctattacgctcgggtcgctgcgccgggcagcacaggggcgacctttctagctgtctgcaggggcaaggcatcggaaggcctcgactttagtgatacaaatggcaggggtgttatagtgaccggcttgccctacccaccacggatggacccccgcgtagtgctgaagatgcagttcttggacgagatgaaggggcagggcggtgccggtggccagtttctgagtggacaagaatggtaccggcagcaggcgtcccgtgccgttaaccaggccatcggacgggtgattcggcacagacaagactatggcgctgtctttctctgcgatcataggttcgccttcgccgacgctcgtgcccagctgccgtcctgggtccgaccccacgtgagagtatacgataactttggtcatgtaatacgggatgtcgctcagtttttccgagtcgccgagcgtactatgccggccccagcccctagggccactgcaccttccgtacgcggcgaggacgctgtgagcgaggccaaaagccccgggccctttttctctacgcgtaaagccaagtcccttgacttgcacgtgccgtctctgaagcagagatcgtctggaagcccagcagccggcgacccggaatctagcctttgcgtggagtacgagcaggagccagtgcccgcaaggcaacggccaagggggctattggctgctctggaacattccgagcagcgggctggtagcccaggcgaagagcaggcgcactcttgttctacacttagcctgttgagcgaaaagagaccagccgaggaacctcgaggcggacgaaaaaagattcgactggtgtctcatccagaggaaccggttgccggtgcacagacagaccgcgcaaagctcttcatggtcgcggtcaagcaagagctgagccaagccaattttgccacgtttactcaagctctgcaggactataaaggtagcgatgacttcgcggccctcgccgcctgcctgggacctctgtttgcagaagatcctaagaaacataacctcttgcagggcttctaccaattcgtgaggccacaccataagcagcagttcgaagaagtttgtatccagctgaccggccggggttgtggttacaggcccgagcactcaatcccgagacgtcagcgcgcacagcccgtactggatccaacagggagaacggctcccgacccaaaattaaccgttagtaccgctgctgctcagcaactggatccccaggagcatcttaaccaaggccgcccacatctgtcacctaggcctccacccacgggtgatcctggctcccagccacagtgggggagtggggtgccacgtgctgggaaacagggacagcacgctgtaagcgcttatctggccgatgccagaagggcactcggctctgcgggatgctctcagctgctggcggccctgaccgcctacaaacaggacgacgatttagataaagtacttgcagtgctggctgcactgactacggcaaagcctgaggactttccactccttcatcggtttagcatgttcgttcgccctcatcataagcagagattctcacagacctgtaccgatcttacagggaggccctacccagggatggaaccacctgggcctcaggaggagagattagcggttccgcccgtcttgacccacagggcccctcagccgggcccttccagaagtgaaaaaaccgggaaaacccagtcaaaaataagcagcttcttgaggcagcgtcccgctggcacggtgggtgccggtggtgaagacgccggcccgtcccagtcgtctgggccgcctcacgggcctgcagcgagtgaatggggtgagcctcacggacgcgacatcgccggacaacaggcaacaggcgcccccggtggccccctaagcgctggttgtgtctgtcaaggttgcggggccgaggatgtcgtccccttccagtgcccagcatgtgacttccaaagatgccaagcatgttggcaaagacacctgcaggcttcccgcatgtgtccggcttgccataccgcaagccggaagcagtctgtgatgcaggttttctggcccgagccccataaagatcacgagggcgccggcggagctcgccccgtggccgcagtgcctggcgtgggggcagcctgtcccgccgcaggcgccggatgcactcgtagcggcaggaacacacatttgcctcttgctggccgtcgcgataggggcgcagctggcgtgcgcccggtcccaccgaggcacttgtgtgctgccgctgtccctccccggcaacctcacgatgtgtggccagtcagcacagcgccactccatgcagtccttgagcttcctcgcgccctcccactcctacaacgccccctgcgtggtgcctag

SEQ ID NO: 17137 - DNA, 1638 bp, synthetic construct
  misc_feature 1..1638: note = Description of Artificial Sequence: Synthetic coding sequence
  source 1..1638: mol_type = other DNA
atgcctgcaccagccccccgagcaacagcaccttccgtacgcggcgaggacgcagtaagtgaggccaagtctccgggaccgttcttctctacccgaaaggcgaaatcacttgatctccatgtaccaagcctgaaacagcgcagttctggaagccctgctgcgggggatcccgagagttccctgtgcgtggaatatgagcaagagcccgtcccagcccgacagcggccaagaggcttactggccgcactagagcactcagaacagcgtgcaggatcccccggggaggaacaggcccactcctgctctacactgtctctattaagcgaaaagcggccagcagaggagccacgagggggacgcaaaaaaatccgcctcgtgagccatcccgaggaacccgtagctggcgctcagacggacagagctaagctgtttatggtcgcggtaaaacaggagctcagccaggcaaacttcgcgacgtttacccaggcattgcaagactataagggaagcgacgattttgccgccctggccgcttgcttgggccccctgtttgcagaggacccgaaaaagcataatctcttgcagggattctatcagtttgtcaggcctcatcataagcaacagttcgaagaggtgtgtatacagctgaccggtcgcggctgcgggtaccgaccagagcattctattcccaggcgacagcgggcacagccagtcctagatcctaccggacgtactgcacccgaccccaagttgactgtttcaacagcagctgcgcagcagctggacccccaggagcatttgaaccagggaagacctcacttatcccctcgcccgccacccacaggcgatcccggctcccaaccgcagtggggcagcggggtcccgagggccggcaaacagggacagcacgctgtgagtgcttacctggctgatgcccggcgggcactcggcagcgccggatgctctcagctgctggccgctttaacggcttacaaacaggacgatgacctggataaagttttagccgtgctggcggccctcacaaccgcaaaacccgaggacttccccctgttgcacaggtttagcatgttcgtgaggcctcaccataaacaaaggttttctcagacttgcaccgatcttaccggaaggccatatccaggcatggaacctcccggacctcaagaagaacgcctagccgtacctcctgtgttgacgcatcgggccccccagcccggcccttcccggagcgagaagactgggaagacacagagtaagatttctagcttcttgcggcagaggccagcaggcactgtgggggccggtggcgaggatgccgggcccagccaaagcagcggaccccctcacggcccagcagcctcagagtggggcgagccacacggcagagatatagcaggccaacaggcgaccggcgcaccagggggacccttgagcgccggatgcgtatgtcagggctgcggcgcggaagatgtcgtcccttttcagtgccccgcttgtgattttcaaagatgccaggcgtgttggcaaagacatctgcaggcatccagaatgtgcccagcatgtcacaccgcctctcgcaaacaatcagtgatgcaagtgttctggcctgagccacagtag

SEQ ID NO: 17138 - DNA, 3660 bp, synthetic construct
  misc_feature 1..3660: note = Description of Artificial Sequence: Synthetic coding sequence
  source 1..3660: mol_type = other DNA
atgcctaagattgtgctgaatggggtgactgtggatttcccttttcaaccatataagtgccaacaggaatacatgaccaaagtgctcgagtgtctccaacagaaagtgaatggcatattggagtcacctaccggtactggtaaaactctgtgtctactgtgcaccacactggcctggcgcgaacacctcagagacgggatttcggcacggaaaatcgcagaaagggctcagggggagctgtttcctgaccgcgccctgtcctcctggggaaatgctgccgccgcggccggggaccccatcgcctgttatacagatattcctaagatcatctacgcttcccgaacccactcccagttgacacaggtgataaatgaactccgtaatacaagttacaggcctaaggtgtgcgtattaggctctcgggaacagctctgcatccatcctgaagttaaaaaacaggaaagcaaccatctgcagattcatctctgtcgcaagaaggtggcgtccagatcttgccatttttacaataacgtggaggaaaaaagcctggaacaggagttggctagcccaattctggacattgaagatctggttaagtctgggagtaagcatagagtttgtccatactatttatcgagaaacttaaaacaacaagccgatattatcttcatgccttataattatttgctggatgcgaagtcccggagagcccataacatcgatctgaaaggaacggtggtgattttcgatgaagcacacaatgtggaaaaaatgtgtgaggaatccgcctcttttgatttaactccgcatgacctggccagtggcttggacgttatagaccaggtccttgaggaacagacaaaagctgcccaacaaggagaaccgcaccctgagtttagcgctgactctcccagtcctggacttaacatggagctggaagacatcgctaagttgaagatgatcttactccgcttggagggggccatcgacgcagtagagcttcccggggatgatagcggagtaaccaagccagggtcctacatatttgagttgttcgcagaggcccaaattacgtttcagactaaggggtgcatcttggactcattagaccagatcattcaacatttagccggtcgagctggagtgttcactaacactgctggcctgcagaagctcgctgatattatccagatagtgttctctgttgacccaagtgaagggtctcctggatcccccgccgggctgggagcactgcagagctacaaagtgcacatccatcctgacgcgggacaccgccgtacagcacagagatcagatgcttggagcactacagcagctaggaaaaggggcaaagtgctttcttactggtgtttctcaccgggccatagtatgcacgagcttgtgcgccagggcgtgagaagcctcatcttaactagcggcacactcgcgcctgtgagctcttttgcactggagatgcagataccttttcctgtgtgtttggaaaacccacacatcatcgataagcatcagatctgggtcggcgtggtgcccagagggccggacggcgcacaattaagctctgcattcgaccgcaggttttccgaagagtgcctctcgtctctcggaaaagccctggggaacatagccagagtggtcccatacggactgctgatttttttcccctcttaccctgtcatggagaaatcgcttgagttttggcgggctcgcgacttagctcgcaagatggaggcgctgaaacccctgtttgtagaaccacggtcaaaggggtccttttcagagactatctctgcatattacgcccgtgtcgctgctcccggctctacgggagcaacgtttctggccgtgtgtagggggaaggcttcagagggcttggacttctcagacacaaacggccgaggagtgatagtcaccgggctgccttatcctcccagaatggatccacgcgtggtgctaaagatgcagttcttggacgaaatgaaagggcaaggaggtgccggcggacagtttctttctgggcaagagtggtaccggcagcaggcctcccgggccgtgaaccaggccattggaagagtgatcagacaccgtcaagattacggggccgtcttcttgtgcgatcatcgcttcgcattcgcagacgcaagagcacagctgcctagttgggtgagacctcacgtaagagtgtatgacaatttcggtcatgtaatccgcgacgtcgctcagtttttcagggtggcggagaggaccatgcctgcgccggctccacgcgcgaccgcgccttcggtccgtggggaagacgctgtcagtgaagcaaaaagcccaggcccctttttcagtacccgaaaagccaaatctctggatctgcacgtaccctctctcaaacagaggagctccggcagtcccgctgccggggatcccgaatcttctctgtgtgtggaatatgaacaggagccagtccccgcacgacagaggccgaggggacttttggccgcactcgagcattccgagcaaagggccggtagccccggtgaggaacaggctcactcttgtagtaccctttctcttctaagtgagaagaggccagccgaagagccgcgcgggggcagaaagaaaatcagattggtgagccaccccgaagaaccggtggctggagcccagacagacagggccaagttgttcatggttgcggttaagcaggagctttctcaagccaatttcgccacctttacacaagcactccaggattacaaggggtcagatgactttgctgcactggctgcctgtctgggccctctgttcgctgaagatccaaagaagcacaatctgctgcagggcttctatcaattcgtacgcccacaccataagcagcaattcgaggaggtgtgcattcagctgactggcaggggctgtggttaccggcctgagcacagtatccccaggaggcagagagcccagccagtgctggaccccaccggccgcacagcccctgacccaaagctgacagtgagcaccgcagctgctcagcagctcgacccccaagagcacctgaaccagggaagaccacatctgtcaccacgccctcctcccactggcgatccgggttcccagccccagtggggttcaggagtgcctcgggctgggaaacaaggccaacatgcagtgagtgcttatttggcagacgcacggcgggcacttggatccgccggatgctcacagctgttggcagctctgacagcctacaagcaggacgatgacctggacaaagtgttggccgtgcttgccgccctgactaccgccaaacccgaggattttcccttgctgcaccggttctctatgttcgtgcgccctcaccacaagcagagattcagccaaacctgcacggatctaaccggcagaccctatccaggcatggaacccccaggtccacaggaagaacggctggccgtcccaccagtgttgacgcaccgtgcgcctcagccggggccttctaggagcgagaaaaccgggaagacacagtcgaagatcagttcatttctcaggcagaggcctgcaggtaccgtgggggctggcggcgaagacgcaggcccatcacagtcctcgggcccccctcacggccctgccgcctctgagtggggtttgtag

SEQ ID NO: 17139 - DNA, 3732 bp, synthetic construct
  misc_feature 1..3732: note = Description of Artificial Sequence: Synthetic coding sequence
  source 1..3732: mol_type = other DNA
atgcctaagatcgtgctgaatggagttacagttgattttcccttccagccttacaagtgtcagcaggaatatatgaccaaggttctcgagtgtttacagcaaaaagtaaatggaatcttggaatcgccaactggcacagggaaaaccctgtgtctcttgtgtaccactttagcttggagggaacacctcagagatggtatcagcgcacggaagattgcagagcgggctcagggcgagttgttcccagatcgagcgctgagcagttggggcaacgctgccgccgctgctggcgatcctatcgcatgttataccgacatccctaaaattatttatgcctccaggacccattcccagctcactcaagtcattaatgaactgagaaatacctcataccggagtcgctgccgagcaactttgtgggtgctggagactgccccacccaggcctacagtgctaagtcctacaagacccaaagtctgcgtgctgggcagtcgggaacagctatgcattcatcctgaagtgaaaaaacaagaaagcaaccaccttcagattcacttgtgtcgcaagaaagttgcgtcgcgctcgtgccatttttacaacaacgtagaagagaaatccttggagcaggaactggcttcgccgatcttggatatcgaggacctggtgaaaagcggcagcaagcacagagtgtgtccttattacctaagcagaaaccttaagcagcaggctgacattatctttatgccatacaattacctcctggacgccaaatcgaggcgtgcccacaacattgacttgaaaggcaccgtggtgatcttcgatgaagcccacaacgtggaaaagatgtgcgaagaatctgccagcttcgatctgaccccccatgacctggcctctggcctggacgtgatcgatcaggtactggaggagcagacaaaggccgcccagcagggagagccacatccagaatttagcgcagattcaccctcccccggactaaatatggagcttgaggacatagcaaagctgaagatgatccttcttagactggaaggcgctatagacgccgttgagcttcccggggacgattccggagtgacgaagccgggcagttacatcttcgagctcttcgccgaagcacagattactttccaaaccaagggatgcattctcgattctctggaccagataatacaacacctggccggtcgagccggagtgttcaccaacacagctggacttcagaaactggccgatatcatccagatagtcttctccgttgatccttccgaaggaagccccggatcccctgccggcctcggcgccttacaatcatataaggtccacattcaccctgacgctggtcacagacgaactgcccaaagatcggatgcctggtctaccacagccgcaagaaaaagggggaaagtgttaagctattggtgtttctcccctggccactcaatgcatgagctcgtgcggcagggagtgaggagtctgatattgacctctggaaccttggccccggtgtcgagtttcgctctcgagatgcagatcccattccctgtctgcctggaaaatccccatatcattgacaaacaccagatctgggtgggcgtggtcccacgcgggcccgacggggcacagctgtcctccgcgttcgacagaaggttttctgaggagtgcctgtcctctttggggaaagcgctgggaaacattgccagggtcgtgccatatggcttactgatcttctttccctcatatcccgtaatggaaaaatccttagaattctggagagcacgagacctggccagaaaaatggaggccttaaaaccgctgttcgtagagccccgttctaagggctctttctccgaaacaatctctgcttattacgcgagggtcgccgcccccgggtccactggagccacatttctcgccgtttgcagggggaaagcatctgaaggcctggactttagcgacaccaatggccgtggtgtcattgtgaccggactgccatatcccccccgtatggatccgagggttgtgctaaagatgcagtttttggatgagatgaagggacagggcggcgcaggcgggcaatttctttcaggtcaggagtggtatcgtcagcaagcgtcccgcgccgtcaatcaggctatcgggagggttattcggcaccggcaggactatggcgccgtgtttctgtgcgatcaccgatttgcctttgctgacgcaagagcccaactccctagctgggtgcgaccgcatgtccgtgtttacgacaatttcgggcatgtcattagggacgtggctcagttttttagggtagctgaacggaccatgcccgcccctgcccccagagccaccgccccttctgtccgtggcgaggacgccgtctcagaagcaaaatcacccggcccattcttctccacgcgaaaagcaaaatctctggacctgcacgtcccctccttgaagcaaagatccagtggtagtcccgccgcaggcgacccagagtcctcgctatgtgtggagtacgaacaggagcctgtccctgcaaggcaaagacctagagggctgcttgctgccctagagcattccgagcaacgcgcagggagtcccggggaggagcaggctcatagttgctcgacactctctttgctgtctgagaaaagacccgctgaggagccacggggaggaaggaagaaaatccggctcgtctcccatcccgaggagcccgtcgctggggcacaaactgatcgggccaagctcttcatggtagcagtcaaacaagaattatcccaggcgaacttcgcaacctttacgcaggctttgcaggactacaaggggagcgatgacttcgctgccctggctgcctgtttgggtcccctatttgcagaggaccctaagaagcataatctgctgcaaggcttctatcaatttgttagacctcatcacaagcagcagttcgaagaggtctgtatccagctcactggaagaggttgtgggtacagacctgaacactctatccctcgtaggcagagggcccaacctgtcctggaccccaccgggaggactgccccagatccgaaactgactgtgagcacagcagctgctcaacaactggacccacaggaacatttaaatcagggccgcccccacctgagccctagaccacctccgaccggcgaccctggttctcaaccccagtggggcagtggcgtgccaagagctgggaagcaggggcagcacgccgtaagtgcgtatctcgctgacgcccgtagagcgctgggcagcgcagggtgtagccagttactagccgcacttaccgcatataaacaggacgacgacctcgataaagtgctggcagtgttggccgcgctgaccacagctaaacctgaagacttccccctgctgcactctaactcaatgttcgtgcgaccacaccataaacagcgatttagccagacatgcacagaccttacaggaagaccataccctgggatggagccccccggtcctcaggaggagaggctggccgtaccaccagtcctcacacacagagctccccagccaggaccctcacgctccgaaaagacagggaagactcagtcaaagatctcctcttttctgaggcagaggccggcgggcacggtgggggctgggggagaggacgcaggccctagtcaatccagtgggccaccccatggacccgctgcctcagaatggggactttag

SEQ ID NO: 17140 - DNA, 3444 bp, synthetic construct
  misc_feature 1..3444: note = Description of Artificial Sequence: Synthetic coding sequence
  source 1..3444: mol_type = other DNA
atggatatcaggaagtttttcggcgtgattccgagtggcaagaagctcgtcagcgaaaccgtaaagaagaacgaaaaaacaaagtctgatgaggagactctaaaagccaagaagggcatcaaagagattaaggtgaacagctcccgaaaagaagacgacttcaagcaaaaacagcctagcaagaagaaacgaataatttacgactcagatagcgaatccgaggaaaccttacaggtgaaaaacgcaaagaagcccccggaaaaactgcccgtgtcttccaagccaggaaaaatatcccggcaggaccccgtcacctatatctctgagactgacgaggaggacgacttcatgtgtaaaaaggcagcctctaagtctaaggagaatgggaggtccaccaactcccaccttggcacttcaaacatgaaaaagaacgaggaaaacactaagaccaagaataagcctctgagtcctattaagctgaccccaacatcggtgctcgattacttcggaaccgggagtgtgcaacgtagcaacaagaagatggtcgcatcgaagaggaaagagcttagtcagaacaccgatgaaagtggtttgaacgatgaggccatagcaaagcaactacagctcgatgaagacgctgaactcgaaaggcaacttcacgaagatgaggagtttgccagaactttggccatgctggatgaggagcctaaaactaagaaggcccggaaggacaccgaagccggagagaccttcagctccgtacaggctaatctgagcaaggctgagaagcacaaatatccccataaagtgaagaccgctcaggtctccgatgaaaggaaatcttactcccccagaaaacagagtaaatatgaatcctcaaaagagtcccaacagcattccaagtcttctgccgacaagatcggtgaagtgagcagcccaaaggccagtagcaaactcgcaatcatgaaaagaaaggaagaaagcagttataaggagatcgagcctgtggcttctaagaggaaagagaatgcgattaaactcaaaggggaaacaaagactccgaaaaagaccaaatccagccctgctaagaaagagagcgtgtctcctgaagattccgaaaagaagaggaccaactatcaagcgtaccgttcttatctgaatagagagggacccaaggctctcggctccaaagagatccccaaaggggctgaaaactgtcttgaaggcctcatttttgtgattaccggggttctggagtccatcgaacgagacgaagcaaagtctctaatagaacggtacgggggcaaggtgactggcaacgtgagcaagaaaaccaattacctggtgatgggtcgtgacagcggacaatccaagagtgacaaggccgccgctctcgggacaaaaataatcgatgaggacgggcttctcaacctgattcgcactatgcccggtaagaagagcaagtacgagatcgccgttgagaccgagatgaagaaagaaagcaagctcgagcgaaccccccaaaaaaatgtgcagggcaagcgcaaaatctctcccagtaaaaaagagagcgagagtaagaaaagcaggcccacgtctaagagggacagcctggcaaagactatcaagaaggagacagacgttttctggaaaagtctggattttaaggaacaggtcgcagaagagacctccggggactcaaaggctagaaacctggccgacgatagctctgagaataaggtggaaaatctgctctgggtcgataaatacaagcccacctccttgaaaacaattatagggcagcagggtgaccagagctgtgcaaacaagctattgagatggcttagaaactggcagaaaagctcttcggaggacaagaagcatgcaaagttcggaaaattctccggaaaggacgacggctcttccttcaaggcggccctcctttcaggcccccccggcgttgggaagactacaactgcttccctggtttgccaggagctaggctactcttatgtagagcttaatgcctccgatacccggagcaagtcctcacttaaggccatcgtagccgaatccttgaataataccagtataaaaggattctacagtaacggggctgcatcctctgtcagcactaagcatgcattgattatggacgaagtagatggtatggccggcaatgaggaccgcggaggcatccaggagttgatcggcctaattaagcacaccaaaattccaattatttgcatgtgcaacgaccggaaccatcctaaaataaggtccctggtgcattattgcttcgacctgagatttcaaagaccaagggtggagcagattaagggagccatgatgagcatagcttttaaggaaggcctgaaaattccaccacccgctatgaacgagatcattctgggcgctaaccaggacattaggcaggtactgcataacctttccatgtggtgtgcccgttccaaggcattgacctatgaccaggctaaagccgactctcatagggccaaaaaggacatcaagatgggaccgtttgacgtggcacggaaggttttcgccgcaggtgaggagacggcccacatgtccctggttgacaagagcgacttgtttttccatgactacagcattgcacctctcttcgtgcaagagaactacatacatgtgaaacccgtcgcagccggaggagatatgaagaagcatttgatgctattgtcgcgtgccgccgatagtatttgcgacggcgacctggttgattctcagattcgatccaagcaaaactggagccttttgcctgctcaagcaatctacgcatccgtgctgcccggtgaactgatgagggggtacatgacacagttccccacttttccatcctggctgggcaagcactcctccactggaaaacatgaccggatagttcaggacctggcactgcacatgtccctgcgcacgtacagttccaaaaggaccgtgaacatggactatctgagcttactacgcgatgcgttggttcagcctcttaccagccagggggtcgacggggtgcaagatgtggtggctctgatggacacctattatttaatgaaagaggattttgagaacatcatggaaatttcatcatggggaggcaagccaagcccgttttccaaactggacccgaaagtgaaagcagccttcacgcgcgcctataacaaggaagctcacctaaccccctatagtctccaagccattaaggcctctagacactcaacatctccatccttggacagcgaatacaatgaggaactgaatgaggacgactctcagtctgacgaaaaggaccaggatgcaattgagacagatgccatgatcaaaaaaaagaccaagagctctaaaccttccaagcccgagaaggacaaggaaccgcggaaaggcaagggcaaatcaagcaagaaatag

SEQ ID NO: 17141 - DNA, 3447 bp, synthetic construct
  misc_feature 1..3447: note = Description of Artificial Sequence: Synthetic coding sequence
  source 1..3447: mol_type = other DNA
atggatattagaaaatttttcggagtcatcccatccggcaagaaactcgtcagtgaaactgtgaaaaaaaacgagaagacaaagagcgacgaggagactctgaaagccaaaaagggtatcaaggagatcaaggtgaacagcagccgtaaagaggatgattttaagcagaaacaaccctcaaagaagaaacgaattatctatgatagcgattccgagtcagaagagacactccaggtgaaaaacgctaaaaagcctcccgagaaactgccagtctctagcaaacccggtaagataagtcggcaggacccagtgacttacatttccgaaactgacgaggaagatgattttatgtgcaagaaggcagcatccaagtctaaggagaacgggcgtagtacaaactcacatctaggaacatccaacatgaagaaaaacgaagagaacactaagaccaaaaataaacctttgagccccatcaagctgacacccacaagcgtgctggattactttggcacaggttctgtccagcgctccaacaagaaaatggtcgcttctaagcgcaaggagctgtctcaaaacaccgatgagtcaggcctcaatgacgaagccatcgccaagcagctacagttggacgaagatgctgagcttgagaggcagctacatgaggacgaggagtttgccagaaccctcgctatgctagatgaggagcctaagacaaagaaggcacggaaggatactgaggcaggagaaaccttctcctccgtgcaggccaacttgtcaaaggccgagaagcacaagtacccacataaggttaagactgctcaggtatccgacgagaggaagagctactctcccagaaagcagtccaagtacgaatcctcaaaggaatctcagcagcatagcaaaagctcggcagacaagattggagaagtgtcatctcctaaggcaagctctaaactggccatcatgaaaaggaaggaagagagttcttataaggagatagagcctgtggcttcaaagaggaaggaaaacgcgatcaagttgaagggagagaccaaaacgccaaagaagaccaagtcttcgcctgccaaaaaagagagcgtgagtccagaagactccgagaagaagcggactaattatcaggcctatcgctcctatttgaacagagagggacctaaggctttggggtccaaggagatccctaaaggcgcagagaactgcctggaaggtttaatcttcgtcatcaccggagtgctggagagcatcgagcgcgatgaggccaaatccctgatcgagcgttacggggggaaagtgacaggaaatgttagcaagaagacgaattaccttgtcatgggtcgcgattctgggcagtctaagtcggataaagcggctgccctcggtacaaaaattatcgacgaagacggactgctgaatctgatccgaaccatgcccgggaagaagagtaaatacgagatcgccgtcgaaacggagatgaagaaggagagtaagctggagcgaaccccccagaaaaatgtgcagggcaagcgcaagattagcccaagcaagaaggaaagcgaaagcaagaagtcgagacccacatcaaaaagagattcactcgccaagacaatcaagaaggagactgatgtattttggaaatctcttgattttaaggagcaggtggccgaagaaacttctggcgattccaaggctaggaacctcgctgacgactcaagcgaaaataaggtggagaacttgctttgggtggacaagtacaagccaactagcctcaaaaccatcatcggccagcaaggcgatcagagctgcgccaataagctcctcagatggctgagaaattggcaaaaatccagctctgaagacaagaaacacgcagctaagttcgggaaattttcagggaaagatgatgggtcttcttttaaggctgcactgctgtcaggcccccccggggtaggcaagacgaccaccgcttccttggtctgtcaggagctgggatactcctacgttgaattgaatgcatccgacacaagatctaagtcaagcctgaaggctatcgttgcagagagcctcaataatacatctatcaagggattttattcaaatggcgccgccagttctgtcagtactaagcacgctttaatcatggatgaagtcgatggcatggccgggaacgaggaccgcgggggcatccaagaactcattgggctgatcaagcacaccaagataccaattatatgcatgtgtaatgaccgcaatcaccccaagattcgctctctggtccattactgctttgacctgcggttccagcggccgcgtgttgaacaaatcaagggggccatgatgagcatcgcattcaaggaggggctaaaaatccctcctcccgctatgaatgaaatcatactgggcgctaaccaggacatccggcaggtgctacacaacctctccatgtggtgtgccaggtctaaggcactaacttacgaccaagccaaggctgattcccacagggccaaaaaggacattaagatgggcccctttgacgttgccaggaaggtgtttgctgcaggcgaggaaaccgcccacatgagtctagtggacaagtcagatctgtttttccatgattactctattgcacctctgttcgttcaggagaattatatccatgtgaagcccgtcgcggctggtggtgacatgaagaagcacctgatgctcctgtcacgggccgcagactccatttgcgatggagacctcgtggactcacaaattaggagcaaacagaattggtctctgcttccagctcaggctatctatgcatcagtgctgcccggtgagctgatgcggggatatatgactcagttccccacgttcccttcttggcttggcaagcacagttcaactggcaaacatgataggatagtgcaggaccttgccctgcacatgtctctgagaacgtactcatcaaagcggaccgtcaatatggactatctgtctctcttgagagacgcactcgtgcagccgttaacttctcagggtgtagatggcgtccaggacgttgtagcactgatggatacatactatctgatgaaggaagacttcgaaaatatcatggagatttcatcatggggcggaaagccatcccctttttcaaagttggatcctaaggttaaggctgcattcacacgggcctacaacaaggaagcacacctgactccatactcactgcaagccatcaaagcctcccggcactctacatccccctccctggactcagagtacaacgaagagctcaatgaggacgactcacagagtgatgagaaagaccaggatgcaatcgagaccgacgccatgatcaaaaaaaagacgaaatcctcgaagccgtcgaagccggaaaaggataaagagccccgtaaaggtaaggggaagagcagtaaaaagtag

SEQ ID NO: 17142 - DNA, 564 bp, synthetic construct
  misc_feature 1..564: note = Description of Artificial Sequence: Synthetic coding sequence
  source 1..564: mol_type = other DNA
cccgaagattcagagaaaaaacgcaccaattatcaggcttatcgctcttacttgaacagggagggccctaaagcgttagggtctaaagaaatcccaaaaggagcggagaactgtttagaaggccttattttcgtaataaccggcgtgttggagagtatcgaaagggacgaagccaagtctctcatcgaacgctacggcggaaaagtgacggggaacgtaagcaagaagacaaactatctcgtgatgggcagagattctggccagtcaaaaagcgataaggccgcagctctgggtaccaaaataattgatgaggacggccttcttaacctgattcgtacaatgcctgggaagaagtctaaatacgaaattgctgtggagactgaggagttggggtattcatacgtagagctgaatgcctccgatacccggtctaaatcctccctgaaggcgatcgttgctgaaagcttgaacaacacgagtattaaaggcttctatagtaatggtgcagcctcgagtgtcagtaccaagcatgcccttattatggacgaagtggacggtatgtag

SEQ ID NO: 17143 - DNA, 1851 bp, synthetic construct
  misc_feature 1..1851: note = Description of Artificial Sequence: Synthetic coding sequence
  source 1..1851: mol_type = other DNA
atggtgggccagctgtctgaaggcgcaattgcagccatcatgcagaagggtgatacgaatattaaaccaatcctccaggttataaatattcggccgataaccacagggaactctccaccgaggtaccgcttgcttatgtctgacggtctcaacactctgtcaagctttatgctcgccacacagctgaaccccttagtagaagaagagcaactcagctccaattgcgtctgccagatacacagattcatagtgaataccctcaaggacggcaggcgggtcgtgattctgatggaattggaggtgctgaagagcgccgaggccgttggtgttaagatcgggaaccctgtgccctacaacgaaggcttgggacagccacaggtggctccgcccgctccagctgcctctcccgcggcttcatctcggccacagccgcagaatggtagctccggcatgggctccacagtctctaaggcctacggtgcaagcaagacatttggcaaggccgctggaccgtcgctgagccatactagcggtgggacacagtcgaaggtggtgccaatcgcttccttgaccccctatcaatccaagtggaccatctgcgctcgggttaccaacaagtcacagattaggacctggtcaaactctaggggagaggggaagttattctccctcgaactcgtggacgagtctggcgagattagggcgacagcattcaacgaacaggtcgacaagttcttccctctaatcgaagttaataaagtatactacttcagtaagggcacactgaagatcgccaacaagcaattcaccgccgtcaaaaacgactatgagatgaccttcaataatgagacttctgtgatgccatgcgaggatgaccaccaccttccgaccgtccaattcgactttacaggcattgacgacctcgaaaacaaaagcaaagactccctcgtggacattatcggaatttgcaagtcttacgaagacgcgaccaaaatcactgtgagatccaacaatagggaagtggcaaagaggaacatttacctgatggacacttctggaaaggtggtgaccgcaaccctatggggcgaagatgctgacaaatttgacggctctaggcagcctgtgcttgcgatcaagggcgcaagagtgagtgacttcgggggacgcagcctgtccgtcttatcttccagcacgatcattgccaaccccgacattccagaggcctacaagttgcggggatggtttgatgccgagggccaggcacttgacggggtgagcatcagtgacctgaagtctggcggtgtgggaggctccaacactaattggaaaacgctttatgaagtcaagtcagagaatttagggcaaggtgacaagcctgactacttcagctccgttgcgacagtggtctatctgcgaaaagagaactgtatgtaccaagcctgcccaacacaggattgcaacaaaaaagtcatcgaccaacagaacgggctctataggtgcgagaaatgtgatactgagttcccaaatttcaagtataggatgatcctgagtgtgaatattgctgattttcaagagaaccagtgggtgacttgtttccaagaatccgcagaagccattctgggccaaaacgccgcttacttaggggagctgaaggacaagaacgaacaagcttttgaggaagtattccaaaacgcaaatttcaggtcttttatcttccgcgtgagggttaaagtggaaacatacaatgacgagagtagaattaaggcgacagttatggatgtcaagcctgttgactatcgagaatatggccgaagactagttatgtccatccgcagatcggcgctcatgtag

SEQ ID NO: 17144 - DNA, 2217 bp, synthetic construct
  misc_feature 1..2217: note = Description of Artificial Sequence: Synthetic coding sequence
  source 1..2217: mol_type = other DNA
atgacctcctccggcccgggtcctcgcttcctgttgctactgcccttgctgcttccccccgcggcctctgcctccgaccggcccagagggagggaccccgtgaatccagagaagctgctcgttatcaccgtggctacggccgaaacagaaggttatcttcggtttctaaggagcgccgagtttttcaactacacagttcgcacactgggcctcggggaagagtggcgagggggcgacgttgccagaaccgtgggaggtggccaaaaggtgcgttggctgaagaaggaaatggaaaaatatgccgatcgggaagatatgatcatcatgttcgtcgactcctatgatgtgattctggctggttcacccacagaactgttgaagaagttcgtgcagagcggcagtcgcctgctatttagtgcagagtcattttgctggccagaatgggggctcgcggagcaataccctgaagtgggtactggtaaacgatttcttaattccggcgggtttattggcttcgccacgaccatccatcagatcgtccggcaatggaagtacaaggacgacgatgacgaccagttgttctacacccgactgtacctggatcctggactcagggagaagctgtccctgaacctggatcacaagtctcgcatcttccagaatctgaatggcgctcttgacgaggttgtgctgaagtttgacaggaaccgggtccgtatacgcaacgtggcttacgacacgctgcctatcgtagtgcacgggaatggtcccacaaagctccaactgaactatcttggaaactatgtgccaaacggatggacaccggagggcggctgtgggttttgtaatcaggacaggaggactctccccggcggccaaccgccaccccgggtgtttctggctgtcttcgtagagcagcctactcctttcctgccacgattcttgcagcgtttattgctgttagactatccccccgaccgggtcactctttttctacacaataatgaagtgtttcatgagccgcacatcgcagactcttggccccaactgcaagatcatttcagcgcagtcaaactggtaggccctgaggaagccttgagccccggggaagcccgtgacatggccatggacctgtgccgccaggatccagaatgcgaattctacttttctctcgatgccgatgcggttttaacgaacctgcagacgcttagaatactgatcgaagaaaaccggaaagttatagccccaatgctatctaggcacggcaagttgtggtcaaatttctggggggcactttcccccgacgaatactacgctaggtctgaggattacgtcgaactggtccagaggaagagagtaggggtatggaatgttccatatatctcacaggcatatgtgatccgaggagacacactccggatggagttgccgcagagagatgtgttctctgggagtgataccgatcctgatatggccttttgcaaaagctttagagataaaggcattttcctgcatctctcaaaccagcacgaattcggaaggcttttggccacgagcagatatgatacagaacatctccatcccgatttgtggcagattttcgataaccccgttgactggaaagaacagtacattcatgaaaactactccagggccttagagggggagggcatagtggagcagccctgtcctgacgtgtactggttcccactgctaagcgagcaaatgtgcgatgaactggtagcggaaatggagcactacggacagtggtccggaggccgccacgaggatagcagactggccggtggctatgaaaatgttccgactgttgatatccacatgaagcaggtggggtacgaggaccagtggcttcagctcctacggacgtacgtcgggcccatgacagagtctttgtttccaggctaccatacaaaggcccgggctgtgatgaattttgtggtcaggtacagaccggacgaacagccctccttaagacctcaccatgactcctccacattcactttaaatgttgctctaaatcataaaggtctagattatgaaggaggaggctgcagatttctgagatatgactgtgttattagtagtccacgcaagggctgggctttactgcacccaggtaggctcacacactatcatgaggggctacccaccacttggggtactaggtacatcatggtatccttcgtggacccctag

SEQ ID NO: 17145 - DNA, 366 bp, synthetic construct
  misc_feature 1..366: note = Description of Artificial Sequence: Synthetic coding sequence
  source 1..366: mol_type = other DNA
atggtggacatgatggatctgcccagatccaggatcaatgccggcatgctagcccagtttatcgataaaccagtctgttttgtgggccgcttggaaaagatccatcctacagggaaaatgtttattctgtccgatggcgagggtaagaacggtaccattgagcttatggagcctctggatgaagagatttctggaatcgtggaggtggttgggagggtgaccgccaaagccaccatcctctgtacgagttatgtccagttcaaagaggattctcaccctttcgacctgggtctgtacaatgaggcggtcaagataattcatgattttccgcagttttatcccctggggatagtccagcatgattag

SEQ ID NO: 17146 - DNA, 2787 bp, synthetic construct
  misc_feature 1..2787: note = Description of Artificial Sequence: Synthetic coding sequence
  source 1..2787: mol_type = other DNA
atgccacctaagactccgaggaagacagccgctaccgcagcggcggctgccgctgagcctcccgctccacctccaccccccccaccagaggaggaccctgagcaggattccggaccagaagacctgcctctggtgagactggaatttgaagagactgaagagcctgatttcactgcattgtgtcaaaaactgaagattccggatcacgtgcgggaaagagcatggttgacttgggaaaaggtaagctctgtggacggggtactgggcggatatatacagaagaagaaagagctgtggggtatctgtatcttcatcgccgcagtggacctggacgaaatgtctttcaccttcaccgagctccagaaaaatatcgagatttccgtacacaaattcttcaacctgctgaaagaaatcgatactagcaccaaggtcgacaacgccatgagtcggcttttgaagaagtacgatgttcttttcgctttgttttcaaagctcgaacgaacgtgtgagctcatctaccttacacagccatctagttccatatccactgagattaactccgctttggttcttaaggtttcttggattaccttccttctggcgaaaggcgaggtccttcagatggaggacgacctggtgatttccttccagttgatgctgtgcgtgctggattacttcattaaactctctcctcctatgctgctgaaggagccctacaaaaccgcagtgatcccgattaatggaagccctaggaccccacgacgaggtcagaacaggtcagctaggatagcgaaacagttggagaatgatacacgcattatcgaagttctgtgcaaagaacatgagtgcaatatcgatgaggtcaaaaacgtatatttcaagaactttataccattcatgaacagtctgggcttggtgacctccaatgggctgccggaggttgagaacctgagtaaaagatatgaagagatctaccttaaaaacaaagacctagatgcccgtctctttctggaccacgacaagacccttcaaaccgacagcatcgattctttcgaaacccaacgcacccccaggaagtccaacttggatgaggaagtgaatgtaatccctccccacacacccgttaggactgtcatgaatactatccagcagcttatgatgattctaaactccgccagtgaccagccaagtgaaaatctcattagctatttcaataattgcacagttaatccaaaggaatccatccttaagagagtgaaggacatcggctacatctttaaagaaaaattcgctaaagctgttggacagggctgtgtggaaattggaagtcagagatacaaattaggtgtgagattgtactatcgtgtaatggagtcaatgcttaaaagtgaagaagaacggcttagtatccagaacttctcaaaactgttgaatgacaatatattccacatgagccttctcgcttgcgctctggaagttgtgatggcgacttattcaagatccacatcccagaatctggactctggcacagatctaagcttcccgtggatcttgaatgttctgaatcttaaggcttttgatttttataaggtgatcgagagctttataaaagccgaggggaacctgacacgcgaaatgatcaagcacctggaaagatgcgagcataggattatggaaagtctggcctggctgagcgacagccctctatttgacctgatcaagcaatccaaggatcgtgagggtcctactgaccacctggaaagtgcgtgtcctttgaacctgccactacagaataatcacaccgctgccgacatgtacctgagccccgtaagatcaccaaaaaagaagggttcaactacgcgcgtcaatagtaccgccaatgccgagacgcaggctacttcggccttccaaacacagaagccactgaagtccacctcacttagcctcttttacaagaaggtctaccgtctggcttacttaagattaaacaccctatgtgaaaggttgctgtccgagcaccccgaactagaacacattatttggactctgtttcagcatacgctccagaacgaatacgagctcatgcgcgataggcatctggatcaaattatgatgtgtagtatgtacggcatttgtaaggtgaaaaacatcgatctgaagttcaaaatcatcgttacagcatataaggaccttccccacgccgtacaagaaactttcaagcgcgtactgatcaaagaggaagagtacgacagtataatcgttttctacaatagtgtgttcatgcagagactgaagaccaacatcctgcaatacgcctccaccagaccacctacgttgagccccataccccacattccaaggtccccttataagtttccctctagccccttgcgtatccctggcggcaacatctatatctccccactgaagagtccctacaagataagcgaggggctgcccacacccaccaaaatgacacccaggtcccggatcctggtgagcatcggagaatcattcggtacgagtgagaaattccagaagatcaaccagatggtctgcaacagcgaccgggtgctgaagcgctctgcggagggaagcaacccacccaagcctttgaagaagctaagatttgatattgaggggtctgacgaggctgatgggtcaaaacacctgccaggcgagagtaagttccagcagaagctagcagagatgacctccaccagaaccagaatgcagaaacagaagatgaatgattccatggacacaagtaacaaagaggagaaatag

SEQ ID NO: 17147 - DNA, 162 bp, synthetic construct
  misc_feature 1..162: note = Description of Artificial Sequence: Synthetic coding sequence
  source 1..162: mol_type = other DNA
atgcctcccaagacaccaagaaagactgcagctaccgcggcagctgcagccgctgagcccccggccccccctcctcccccccctcctgaagaggatcccgagcaggattctggaccagaggacttacccttagtccgcggttccattacaaatggccggtag

SEQ ID NO: 17148 - DNA, 2724 bp, synthetic construct
  misc_feature 1..2724: note = Description of Artificial Sequence: Synthetic coding sequence
  source 1..2724: mol_type = other DNA
atgcctcctaagaccccaccacctgaggaggacccggagcaggacagtgggcccgaagatttgccgctggtgcgcctcgagtttgaggaaacagaggaacctgacttcaccgcgctctgccagaagctgaagattcctgatcatgttagagagcgagcctggctgacatgggagaaagtttcatccgtggacggagtccttggcggctacattcagaaaaagaaagagctgtgggggatttgtatctttattgctgcagtagatttagacgagatgagctttacattcacggaactacagaaaaatatcgagattagcgttcataagttttttaacctgctcaaggaaattgatacctcaactaaggtggacaacgcgatgtcccgccttctcaagaaatacgacgtgctgttcgcccttttttccaagctggaaagaacctgcgagcttatttacttgacacagccctcctcctctatttctacagagattaattctgcactggttcttaaggtttcttggatcactttcctactggccaagggggaggttttgcagatggaagacgacttggtgatcagttttcagttaatgctctgcgtgctggattactttattaagctcagccctcctatgctgctcaaggaaccctataaaaccgcggtgataccaataaacggttccccacggaccccccggcggggacaaaaccggtctgccagaatcgccaaacaactggagaacgacacacgtatcatcgaagtcctgtgcaaagaacatgagtgtaatatcgacgaggtgaaaaatgtctactttaagaatttcattcccttcatgaactcgctaggactagtgacatctaacggccttcctgaagtagagaacctgagtaaacgatacgaagagatttacctgaaaaataaagaccttgatgcccggttgttcttggatcacgacaaaacactgcagactgattccatcgacagctttgagacacagagaaccccccggaaaagtaatttggatgaagaggtgaatgtgatcccccctcatacgcccgtccgtaccgtgatgaatacaatacaacaactcatgatgatcctgaattctgcctcggatcagccatccgagaacctgatttcatacttcaacaactgtaccgtcaatcccaaagagtcgattttgaagcgggttaaggatattggatatatatttaaggagaaatttgccaaggctgtcggtcaagggtgcgtggagattgggtcccagagatacaagctgggagtccggctctactacagagttatggaaagcatgctaaaatctgaggaggaaagactttcaattcaaaacttctcaaagctgttgaacgataacattttccacatgtccctactggcctgcgcattagaggtcgtcatggccacttattctcgttccacaagtcagaaccttgatagcggtactgacctgtcatttccttggattctaaatgttcttaatctcaaggcctttgacttttacaaagtcatcgagtcctttattaaggctgaaggcaatctgactcgggagatgatcaagcacttggaaagatgtgagcaccgcataatggagtccctagcctggctcagcgacagtccattgttcgatcttatcaagcagtccaaagatcgggaggggccaactgaccatcttgaaagcgcttgtcctctcaacctccccctccagaataatcatactgcagccgacatgtatctctcaccagttcggtccccaaagaagaagggctctactacaagggtcaattccaccgcaaatgcagagactcaggctacgtctgcctttcaaacccagaaacccttgaaaagcacctctttgagcctgttctataagaaggtgtatagactggcctacctccgtctaaacacattatgtgagcgcctcttgtccgagcatccagagctggagcatattatttggaccttgtttcagcatactttgcagaacgagtacgaactgatgagggatagacacctggaccaaatcatgatgtgttcgatgtatggtatttgcaaggttaaaaacattgacttgaagttcaaaatcattgtcaccgcttataaggaccttcctcacgccgtgcaggaaaccttcaagagagtgttgattaaggaagaagagtacgattctattatcgtgttttacaacagtgtgtttatgcagagactgaagaccaacattctgcagtatgcctcaacaagacctcccactctctcccccatccctcatattccacggtcgccatacaaatttccatcgagtccccttaggatccctggcggtaatatttacattagtcctctgaaaagcccatacaagatcagcgagggcctgccaacccctaccaagatgactccgagatcacggatcctcgtgtcgataggggagagcttcgggacatcagagaagtttcagaagatcaatcagatggtatgtaattccgaccgcgtgctgaaacgatccgccgaagggagcaaccctcccaaaccactgaagaaactgcgctttgacattgaagggagcgatgaggctgacggatcaaaacaccttccaggggagagcaagtttcagcagaagctcgcagagatgaccagcaccaggacaaggatgcagaaacaaaaaatgaatgattcgatggatacttctaataaagaagaaaagtag

SEQ ID NO: 17149 - DNA, 2694 bp, synthetic construct
  misc_feature 1..2694: note = Description of Artificial Sequence: Synthetic coding sequence
  source 1..2694: mol_type = other DNA
atgaacatctccggcagcagctgtggttcccctaattcggccgacaccagttctgacttcaaggacctatggactaagttaaaagaatgccatgaccgcgaagtgcagggcctgcaggttaaggtcacgaaactgaaacaggagaggatactggacgcacaacgactggaagagttcttcacaaagaatcagcagcttagggagcaacagaaggtgctgcacgagacgattaaagtgctagaggatcgcttgcgcgcgggcctctgtgaccgctgtgctgtgaccgaggagcacatgcgcaaaaaacaacaggaatttgagaacattagacagcagaaccttaagttaatcaccgaacttatgaatgaacgaaacaccctccaggaagaaaacaagaagctgtctgaacaacttcagcagaagattgaaaatgaccagcagcatcaggcggcggagctcgaatgcgaagaggatgttatcccagactcccctattacggcgttttccttctcgggagtgaaccggctcagacgaaaggaaaatccccatgtgcgatacatcgagcaaacccacacgaaactcgagcactctgtttgcgcaaacgagatgaggaaggtcagcaaaagctccacacacccccaacacaatcccaacgagaatgagatcctggtggccgacacttacgaccaaagtcaaagccctatggccaaggcccatgggacttcatcttatacaccagataagagtagtttcaatcttgccacggttgtcgcagagacgctaggcctgggcgtccaagaagaatccgagacccaggggccgatgagcccactgggcgacgagctttatcattgtctggagggcaaccacaagaagcaaccgttcgaggagtcgacacgaaatacagaggattctctgcgatttagcgacagcactagtaagacccctccccaggaggagttgcccacccgagtgtcttctccagtgttcggagccacctcgtccataaaaagtggcttggatctcaacacctctctctcacccagtctactccagccagggaagaaaaagcatcttaagaccttaccctttagtaatacttgtatcagcaggcttgagaaaacaaggagtaagtcagaggactctgccctgtttacacatcactccctcggcagcgaggtcaataagatcatcatccagagcagtaacaaacaaatcctcattaataaaaacatctcggagtcccttggcgagcaaaaccgcacagagtatggaaaggactccaataccgacaagcatttggagccactcaagtcgctgggtggccggacctcaaagagaaagaaaaccgaagaggagtcagaacatgaggtaagctgtcctcaagcttcgtttgacaaagagaatgcttttccattcccaatggacaaccagttctctatgaatggagattgcgtgatggacaaaccgcttgacctgtccgatcgcttcagcgccatacagcggcaggagaagtcccagggaagcgagacttccaagaacaagttccgacaggtgactctgtacgaggccctgaagaccatccctaagggcttcagctcctctcgaaaggcttcggatgggaattgcacattgccaaaggactcacccggcgaaccgtgctcacaagaatgcattattctccagccactgaacaagtgctccccggataacaagccgtccctccagattaaggaagaaaatgcagtgtttaaaatccccctgcgcccccgcgagtcactcgaaaccgagaatgtcctcgatgatattaagtctgccggctcccatgagcctatcaaaatccagacaaggtccgatcacggtggctgtgaactcgcttctgtactccagctcaacccttgtcgcacaggaaaaatcaagagtcttcagaataaccaggacgtgtcctttgaaaatatccagtggtcgattgacccgggcgctgatctgtcccagtacaagatggacgtgaccgttattgatacaaaggatggtagtcaatctaaactgggaggggagacagttgacatggattgcaccctcgtatctgaaacagttctcctgaaaatgaagaagcaagaacagaaaggagagaagagctccaacgaggagcggaaaatgaacgacagccttgaagatatgttcgaccggaccacccatgaagaatatgagtcatgtttggccgactccttcagtcaagcggccgacgaagaagaggaactttcaactgcaactaaaaagttgcatactcacggtgacaagcaggataaagttaagcagaaggcctttgtcgagccctattttaaaggagacgagcgggaaactagtttgcagaattttcctcacattgaggtggtgcgcaaaaaagaagaacggcggaagttgttgggccatacttgtaaggaatgtgaaatttactacgcggacatgccggcagaagagagagagaagaaattggcaagctgttcacgccaccgattcaggtacattccaccaaataccccagagaacttttgggaagttgggtttccatctacccagacttgcatggaacgcggatacatcaaggaggacctcgatccatgtcccaggccgaagcgccggcagccttacaacgccatcttttcacccaagggcaaagaacagaagacctag

SEQ ID NO: 17150 - DNA, 2709 bp, synthetic construct
  misc_feature 1..2709: note = Description of Artificial Sequence: Synthetic coding sequence
  source 1..2709: mol_type = other DNA
atgaatataagcggctcgtcgtgtggttctccgaacagcgcggacacaagcagcgatttcaaagatttgtggactaagctgaaggagtgccacgaccgagaagttcagggcctgcaggtgaaagtgacaaaactgaagcaggagcggatcctggacgcccagaggctggaagaattctttactaaaaatcagcagctacgggagcagcaaaaagtattacacgaaaccattaaggtgcttgaagaccgcctccgagcagggctctgtgatagatgcgccgtgaccgaagagcatatgagaaaaaaacagcaagaattcgaaaacattcgccagcaaaacctcaaacttataaccgagctgatgaacgagcggaatacactgcaggaagagaacaaaaagctgtcagagcaactgcagcagaaaatcgaaaacgatcagcagcatcaagctgcagagctggagtgtgaagaggacgtcatcccagacagccccattactgcattcagtttctctggcgtaaaccgattgcggagaaaagaaaaccctcacgttcggtacatcgaacagacccataccaaattggaacactctgtctgtgctaacgagatgaggaaggtttccaagagctccacccaccctcagcacaaccccaatgaaaatgaaatactagtcgccgacacttatgatcagtcccaatcccctatggctaaggcacacggaacaagctcatacacacctgacaagagctcctttaatctagctacagtggtggcagagaccctgggccttggagtgcaggaagaaagcgagacgcagggaccaatgtcacctctaggggacgaactctatcattgccttgaaggcaatcacaaaaagcagcctttcgaagagtcaaccaggaatacagaggatagcctccggttctccgactcaacaagcaagactcccccccaggaagaactgcccacgagagtgtcctctccggtgttcggcgccacatcctcgatcaaaagcggtctggacctgaacaccagcctgtcccctagtttgctgcaacccggcaagaagaaacacctgaaaaccctgcccttctcgaatacgtgtataagcaggttggaaaagactagaagtaagagcgaggattccgccctcttcactcaccacagccttggcagtgaagttaacaaaattatcatccagagctctaataaacagatcctaatcaacaaaaacatttccgaatctttaggggagcagaataggacagagtacggaaaagattcaaacaccgataagcatctggaacccctaaaatcactaggcgggaggacatccaagaggaaaaaaacagaagaagagtcagaacatgaggttagctgcccccaggcatcatttgacaaagagaacgcattcccttttccaatggataaccagttcagtatgaacggggactgtgtcatggataaaccactggacctgtctgatagattctcagctatccagaggcaggagaagtctcagggtagcgaaacctccaaaaacaaatttcgccaggtgactctgtacgaggcactcaagacgatccctaaagggttttcgagctcaagaaaagccagtgatggaaattgtacactgccaaaagacagtccaggtgagccgtgtagtcaggagtgcatcattctgcagcctcttaataaatgcagtcccgataataaaccatcattgcaaatcaaggaggagaacgcggtgtttaagattcccctgcgcccaagagagagtcttgaaaccgaaaatgtgctcgacgacatcaaaagcgcgggcagtcacgaacccattaaaattcagacccgctctgaccatggcgggtgtgagttggcatccgtactccagctgaatccttgtagaaccggaaaaattaaaagcctgcagaacaaccaggacgttagctttgagaacattcagtggtctattgacccgggagctgatctctcccaatataaaatggatgtgacggtaatagacaccaaggatgggagccagtccaagcttggtggagagaccgttgatatggattgtaccctagtctccgaaacagtcctgcttaagatgaagaagcaggagcagaaaggagaaaagtcctctatgctattttacatcgatgaggagagaaagatgaacgactcccttgaagatatgttcgataggaccacacacgaagaatatgaaagttgtctggctgactcgttcagccaggcggccgatgaggaagaagaactctccacagcaaccaaaaaacttcacacacacggcgacaaacaggataaggtgaagcagaaagctttcgtggagccctatttcaaaggagatgagcgagagacgagcctgcagaactttcctcacatcgaagtggtgcgcaaaaaggaggagagaaggaaattactagggcatacatgcaaagaatgcgaaatttattacgcggacatgcccgctgaggagagggaaaagaagcttgcaagctgcagtcggcacagatttagatacatcccacccaacacaccggaaaacttttgggaagttggcttcccttcaacacagacctgcatggagagaggctatattaaggaagacctggacccatgtcccagacccaaaagacgtcagccttacaatgccatattctcccccaaaggcaaggaacaaaagacatag

SEQ ID NO: 17151 - DNA, 2598 bp, synthetic construct
  misc_feature 1..2598: note = Description of Artificial Sequence: Synthetic coding sequence
  source 1..2598: mol_type = other DNA
atgaatatttctgggagctcctgcggtagccctaattcagcggatacgagcagcgatttcaaagatctgtggacaaagcttaaagagtgtcacgaccgggaggtacaaggattacaggtgaaagtgaccaagctgaaacaggaacgtatactcgatgcccagagactggaggaattcttcaccaagaaccagcagctgagagagcagcagaaggtgctacacgaaaccataaaggtccttgaagatcggctccgagctgggctctgtgatagatgcgctgtgacagaagagcacatgcgaaagaaacaacaggagttcgagaatattaggcagcaaaatcttaaactgataaccgagttgatgaacgagcgcaataccctgcaggaggagaataagaagctcagcgagcaacttcagcagaaaattgagaacgatcagcaacaccaagctgctgagttggagtgcgaagaagatgtgatccccgactcccctattaccgctttttcattttctggggtgaacaggttgaggcggaaggagaaccctcatgtccgctatattgagcagacccacaccaagcttgaacatagcgtgtgtgccaacgaaatgaggaaagtgtctaagtcgtccacccacccccagcacaaccctaatgagaacgagatcttagtcgctgacacctacgatcagtctcaatcgccaatggcaaaggcacacggaacgtcttcctatacccccgacaagagcagtttcaatcttgcaactgtagttgccgagacccttgggcttggggtccaagaagagtccgagacacagggccctatgagccccctgggcgacgaactttatcactgtcttgaggggaaccacaaaaagcagccgttcgaggaatctacccgaaacaccgaagatagcctccggttctcggacagtacctctaagactcccccacaagaggaactgcccaccagagtttcctccccagtctttggcgccaccagcagtattaagtctggactagacctcaatactagcctgagcccctctctgctgcagcctggaaaaaagaagcacttgaaaaccttgcccttctccaacacctgcatcagtcgattggaaaagacgaggtctaaaagcgaggactcggcactgtttactcaccatagtctaggcagtgaggttaacaaaataatcatccagtcgagcaacaaacagatactcataaataaaaatattagcgagtccctcggggagcagaaccggactgaatacggcaaggatagcaataccgataagcacctggaacctctgaaaagcctgggagggcggacttcaaaaaggaaaaaaactgaagaggagtccgagcatgaggtcagttgcccgcaagcctcatttgacaaagaaaatgcattcccatttcctatggataatcagttctccatgaatggagactgcgtgatggacaagcctctcgacttgagcgataggttcagtgctatacaacgtcaggaaaaatcacagggctcagagacgagtaagaataaattccgacaggtgacattgtacgaggccctgaagaccatccctaaggggttttcaagcagtcgaaaagcaagcgacggaaattgcactcttcctaaggattcgcctggagagccctgttctcaggaatgtatcatcctccagcctctgaataagtgttcaccagacaataagcctagcctgcagatcaaggaggaaaacgcggtcttcaagattccccttcgcccacgagagagcctcgaaacagaaaacgtcctggacgacattaagagtgcagggtcccatgagcctatcaaaatccagacccgcagcgatcatggaggctgtgagcttgctagcgtgttgcagctcaacccatgccgcaccggcaagatcaagtctctgcagaacaaccaggacgtgagttttgagaatatccaatggtcaatcgatcctggcgcggatctgagtcagtacaagatggatgtcacggtgatcgatacaaaagatggctcccagtcaaaactggggggggagaccgtcgatatggattgtacgctagtgtcagagacagttctgctcaaaatgaagaagcaagaacagaaaggcgagaagagttcaaatgaggagcgtaaaatgaacgattcactggaagatatgttcgatcgcactacgcacgaggaatatgagagttgcctcgctgatagcttcagccaagccgccgacgaagaagaggagctaagcacagccacaaaaaagctgcatacacacggcgataaacaggataaggtgaaacagaaagctttcgtggagccttacttcaagggcgacgagagcataatgcagatttgtcagcaaaaaaaggaaaaaaggaactggctaccagctcaggatactgattctgctacattccatccgacacaccagcgcatttttgggaaactggtgtttcttccacttagattagtttggaaggaagtaattctgagaaaaatcctgatcctcgtactggtgcagaaggatgtgtcactgacaacccagtacttcttacagaaggcacggtcacggcggcattag

SEQ ID NO: 17152 - DNA, 2694 bp, synthetic construct
  misc_feature 1..2694: note = Description of Artificial Sequence: Synthetic coding sequence
  source 1..2694: mol_type = other DNA
atgaacatctcaggaagcagttgcggatcaccgaattccgcagacacaagtagcgattttaaggatctgtggactaagctgaaagaatgtcatgatcgcgaggtgcaggggctgcaagtcaaagtgactaaactgaagcaggagcgtatactggatgcacaacgactcgaagagttttttacaaagaatcagcagctccgagagcaacagaaagtgctgcatgagacgatcaaagttctggaggacaggctccgcgctggattatgtgatagatgcgcagtaacagaggagcatatgcgtaagaagcaacaggaatttgagaacataagacaacagaatctgaaattgattactgaactaatgaacgagcgcaataccctacaggaagaaaataagaaactgtccgagcagctccaacagaaaattgagaacgatcagcagcatcaagctgcagagctggagtgtgaggaggacgtaatccctgactcccctatcacggccttcagcttcagtggggtgaacagactccggcggaaagagaatccacacgtacgttatatcgaacagacccataccaaactcgagcatagtgtctgcgccaacgagatgcgtaaggttagcaagtcctcgacacacccccagcataacccgaacgaaaatgagatcctagttgcggatacctacgatcagtcgcagagccctatggctaaggcacacgggacaagtagttatacaccggataagtcctccttcaacctggcaacggtggtggcagagacactcggactgggcgtgcaggaggagtccgagactcagggacctatgtcacctctcggcgatgaattgtaccattgtctcgaaggcaaccacaagaagcagccctttgaggaatctacacgtaacactgaggatagtttgcgatttagtgactccaccagcaagacgcctccgcaagaagagctacccaccagagtgagcagcccagtgtttggcgccacgagctcaattaagtcagggctggatctaaacacctcactgtcccccagcctgctgcaacctggaaagaagaagcatttaaaaacactcccattcagcaatacatgcatttcacgactggaaaaaacccgtagcaagtccgaggattcggccctgttcacccaccactctctaggcagcgaagtcaataaaattatcatccagagttccaataaacagatactaattaataaaaatattagcgagagtttaggggagcagaaccgaaccgaatatggtaaagactccaatactgataaacacctggagccgttaaaatccctcggagggcgcacgagtaagcgtaagaagacagaggaagaatccgagcacgaggtcagctgccctcaggcaagctttgacaaggaaaatgcattcccgtttccaatggacaatcagttctccatgaacggtgattgtgttatggataagcctctggacttgtccgataggttcagcgccatccagcgacaggagaagtctcagggctcggagacctcgaagaacaaattccgacaggtgaccctgtacgaggcactgaaaaccatccctaagggatttagctcttcacgcaaagccagcgatggcaattgcactctgccaaaggacagtccgggcgaaccctgttctcaggagtgtattattctgcagcccttgaacaagtgtagcccagacaataagccgagcctccagattaaggaggagaatgccgtgtttaaaatcccattgagaccccgcgaatcactagaaactgaaaatgtgttggatgacatcaaaagtgcaggatcacatgagccaattaagatccagaccagaagtgatcacggtgggtgcgagctggcgagcgtcctgcaactgaatccatgtaggacaggcaaaattaagtctctgcagaataatcaggatgtgtctttcgagaatattcagtggtccatagaccctggcgcagatctctcgcagtacaaaatggacgtcactgtgatcgataccaaggatggctcccagtcgaagctgggaggagagaccgttgatatggattgtaccctggtcagcgaaaccgtgctgctcaaaatgaagaagcaagaacagaagggcgagaagagtagcaacgaggaaagaaaaatgaacgactccctggaggacatgttcgataggactacacacgaggaatacgaatcttgcttggcagactcgtttagccaggcagccgacgaggaagaggagctgagcactgctaccaaaaagctccacacacacggcgataagcaagacaaggtaaaacaaaaagctttcgtggagccttactttaaaggcgacgaaagggagacctccttacaaaactttccacatattgaagtggtgcggaaaaaagaggaacgccggaaactgttgggccacacatgtaaagagtgcgagatttactatgcagatatgcctgcagaagagcgcgagaaaaaattggcctcatgctctcggcacagatttcgatacatcccaccaaatactccagagaacttttgggaagtcggattcccctcaacgcagacctgtatggaacgaggttacatcaaggaggatctggatccgtgccctaggccaaagaggcgccagccctataacgccatcttttctcctaagggcaaggaacagaaaacctag

SEQ ID NO: 17153 - DNA, 2604 bp, synthetic construct
  misc_feature 1..2604: note = Description of Artificial Sequence: Synthetic coding sequence
  source 1..2604: mol_type = other DNA
atgaacatttctggctctagctgcggttcaccaaacagcgctgacacgtcttcagactttaaagatctgtggaccaagctgaaagaatgtcacgacagagaggtgcagggtctgcaggtaaaggtgaccaaactgaagcaagagagaatcctggacgctcagagattagaagagttttttaccaagaatcagcagttaagggagcaacagaaggtactgcatgagactatcaaagtcctggaggataggctccgcgccggactgtgcgaccgatgcgccgtaactgaggagcacatgaggaagaagcagcaggagttcgagaacattagacagcaaaaccttaagctcattaccgagcttatgaatgagcgaaacactctgcaggaagaaaataagaagctgtcagaacagctccagcagaagatcgaaaatgaccaacagcaccaggccgcggagcttgaatgcgaagaggacgtgattcctgatagtccgataacagctttctcgtttagcggggtcaaccgactgcgtagaaaggaaaatcctcacgtgagatatattgaacagacgcatactaagctagaacactcagtgtgtgccaacgaaatgcggaaagtgtccaagtcctcaacccacccccagcataacccgaatgagaacgaaatccttgtggccgatacctatgaccaaagccagtctccaatggctaaagcacacggtacatcgagttatactccagataagtccagtttcaacctcgctacagttgtggccgaaaccttaggcctgggcgtgcaggaggagagcgagacacagggtcctatgagtccacttggagacgagttgtaccactgcctggaaggaaatcataagaaacagccattcgaagagtcaacaagaaacaccgaagactcacttagattctcagacagtacaagtaagacacctcctcaagaagagctgcccacgcgcgtgtcttctccagttttcggagccacgagctcaattaaatcaggcctagacctgaataccagtctgagcccctccctacttcagcctggcaagaaaaagcatctcaagaccctcccgttttccaatacatgtatcagtcgcttagagaaaacacgctctaagagtgaggattcagccctctttacccaccatagtctgggaagcgaagtgaataaaataatcatccagtcaagtaataagcaaatcctgattaacaaaaacatctccgagtcgttgggagaacagaatagaacagagtatgggaaagattctaatacagacaagcacctggaaccactgaaaagtttgggcgggcgcacctctaagagaaagaaaacagaggaagagtccgaacatgaggtatcctgccctcaggcctcttttgataaagagaatgcatttcccttccctatggacaaccagttttccatgaatggggactgtgtgatggataagcctttagacctgtctgaccgatttagcgccatccaacgacaggagaagagtcagggctcagaaacttctaagaacaaatttcggcaggtcacgctttatgaggcacttaagacaatccccaaaggcttctcaagtagtagaaaggctagcgacgggaattgcaccctgccaaaggacagtcccggcgagccctgctcacaggagtgcattattcttcaacccctcaataaatgttcacccgataacaagccaagcctgcaaataaaggaagaaaacgcagtctttaagatcccactacggccaagagaaagcctggaaaccgaaaacgtgttagacgacatcaagagtgccggctcgcatgagccaattaagatccaaacccgctccgaccatggaggctgtgagctcgcctctgtcctacaactcaatccatgcagaaccggcaaaatcaagtcgctacaaaacaatcaggatgtctcattcgaaaacattcagtggtctattgatcccggggcagatctgtctcagtataaaatggatgtgactgtgatcgacacgaaggatggctctcagagcaagctcggaggggagactgttgacatggactgtaccctcgtctcagagaccgtcttgctcaagatgaagaagcaggagcagaagggggaaaaatcaagcaatgaagaacgaaagatgaatgactccttggaggacatgtttgatcgtaccacacatgaggaatatgagagttgcttggcagactcattcagtcaagccgctgacgaggaagaagagctgtccaccgccaccaagaagctacacacccatggggataagcaggataaggtgaaacaaaaggcttttgtcgagccctactttaaaggcgacgagagcataatgcaaatatgccaacagaagaaggagaaaagaaactggctacctgctcaagacacagacagcgccacatttcatccgacacatcagcggatttttgggaagctggtgtttctgccactcagattggtttggaaagaggtaattctcaggaaaatcctgatccttgtcttggtgcagaaagacgtgtccctcacgacacaatactttctgcagaaagcaaggtctcgtcgccaccgccggtag

SEQ ID NO: 17154 - DNA, 3045 bp, synthetic construct
  misc_feature 1..3045: note = Description of Artificial Sequence: Synthetic coding sequence
  source 1..3045: mol_type = other DNA
atgtttgaagacaaacctcacgcagaaggtgcagccgtggttgccgccgcgggggaggctcttcaggcgctgtgccaagaattgaatctggacgaggggtcagcagcagaagccctggatgattttacagcaatacggggaaattattctttggaaggcgaagtcactcactggttagcttgttcgctgtatgtagcttgccgcaaatctatcatccccacagtggggaagggaatcatggagggcaactgtgtctcgctgactcggatcttgaggagcgcaaaattgagtctgatccagttttttagtaaaatgaaaaagtggatggatatgtctaatctgccgcaagaattcagagagcgcatagagcgcctagagcggaatttcgaggttagtaccgttatcttcaagaaatatgaaccgatctttttggatatctttcaaaatccttatgaggagcctcccaagctgcccagaagcaggaaacagcggcgcatcccctgcagtgtgaaagatctgtttaatttttgctggaccctgttcgtctacacaaagggaaattttcggatgataggagatgatctcgtgaacagttaccacctcctgctctgctgtttggacctcatcttcgcaaatgcaattatgtgccctaacagacaggatctgttgaatccgagcttcaagggactccctagtgacttccatacagccgacttcactgcatccgaagagcctccttgtatcatcgcggtgctctgcgagctgcatgacggccttttggttgaggccaagggaataaaggaacattacttcaagccatatattagcaaactgttcgatagaaaaattcttaagggcgagtgccttctagacttatccagctttacggataactctaaagcggtcaataaggagtatgaagagtatgtactgacagtaggtgatttcgacgaacggatatttctgggagcggatgctgaggaagagattgggactcccaggaagttcacgcgtgacacgccgctcggaaagctgacagcccaggcgaatgtggagtataatttacagcagcacttcgagaagaagagatcattcgcgccatcgaccccactgactgggaggcgatatctgagggagaaagaggccgtcataacaccagtggcctccgccactcagtctgtctcccgattgcagtctatcgtggctggtttgaaaaatgccccatctgatcagctgataaacattttcgaatcttgcgtgcgtaaccctgttgagaacatcatgaaaatactgaaagggatcggagaaacattctgccaacactacacccagagcaccgacgaacagcctggctcacacatcgatttcgcagtgaacagacttaagctggccgaaatactgtactacaagatactggagaccgtgatggttcaagagacccgacgtcttcacgggatggatatgtcagtgctgctggaacaggatatttttcatcgcagcttgatggcctgttgtctagagatcgtgctgttcgcttactcatctcccaggaccttcccctggattattgaagttttaaatctacaaccattctacttctacaaggtcattgaggttgtgattcgcagcgaagaaggcctgtctagagatatggtcaagcatcttaactctattgaggagcaaattttggaaagtctggcatggtcgcacgacagcgcgctttgggaagccctgcaggtgtctgccaataaagtgcctacttgcgaagaagtcatctttcctaacaactttgaaacaggcaatggcggaaacgtgcagggtcacctgcctctgatgccgatgagtccacttatgcaccccagagtgaaggaggtgagaaccgattctggatcacttagacgtgacatgcagccactgtcccctataagtgttcacgaaagatatagtagccctacagctggcagcgccaagcgtcggctgttcggcgaagaccccccaaaggaaatgttgatggataaaattattactgaaggcacaaagctcaaaatagccccatcaagctcgataaccgcagagaatgtgtctatccttcctggacaaacccttctgactatggccaccgctcctgtcacaggcacaactggacacaaagttacgattcctctgcatggcgtggccaatgacgcaggagagattacactaatacctctctcaatgaatactaatcaggaatcgaaagtcaagagcccggtctcacttacagcacacagcttgatcggagcctctcctaagcagacaaatctcacaaaggcccaggaggtgcatagcacaggtatcaaccgtccgaaaaggacaggctctcttgccctcttctacaggaaagtctaccatttggcaagcgtgcgactgcgagatctgtgcctgaagttggacgtgtcaaacgagttgcggagaaagatttggacctgtttcgaattcactctcgttcattgtcctgacctaatgaaggatagacacctggatcagctgcttctctgcgccttctatatcatggctaaggttaccaaggaggagcggaccttccaagagattatgaaaagttataggaaccagcctcaggctaattcccatgtgtacaggagtgtccttcttaaatcaatcccccgagaagtggttgcctataacaaaaatatcaacgacgatttcgagatgattgactgtgatctggaggatgctaccaagaccccagactgttcgtccgggccagtgaaggaagaacgcggagacctgattaagttttacaacaccatatacgtaggtcgcgtgaagagctttgctttaaagtacgacttggcgaatcaggaccacatgatggacgctccccctttgagcccttttccacatattaaacagcaacccgggtctccgaggcggatctctcagcagcactccatctacatttcaccccacaaaaatgggtccggtttaaccccacggtccgccctgctgtacaaattcaatgggtccccatcgaaagtgcggtag

SEQ ID NO: 17155 - DNA, 3207 bp, synthetic construct
  misc_feature 1..3207: note = Description of Artificial Sequence: Synthetic coding sequence
  source 1..3207: mol_type = other DNA
atgtttgaagacaagccgcatgccgaaggcgctgctgtggtagccgccgccggagaagcattgcaagcgctgtgccaggagctgaacttggacgagggcagtgcagccgaggcgctggatgattttaccgccatccgaggcaattatagtttagaaggcgaagtgactcactggctcgcttgttcactgtatgtggcctgccgaaaatctattatcccaaccgtgggtaaaggcattatggagggaaattgcgtgagtctcacaaggatattgaggtctgctaaactgagcctaatacagttcttttctaagatgaaaaagtggatggatatgtctaacctgccacaggagttcagagagcggatagagcgactcgagagaaatttcgaagtgtcgactgtgattttcaagaagtacgaaccaattttcctcgatatctttcagaatccctatgaggagcctccaaagctgcctcgtagcagaaagcagcgtcgcatcccctgtagcgtcaaggacctgttcaatttttgttggacgcttttcgtctacactaaaggaaatttccgcatgatcggggatgacttggttaattcttatcacctgcttctgtgttgcctagatctaatcttcgccaacgcaatcatgtgtcctaatcgccaagacctgctgaatccatccttcaaaggactaccatctgattttcacaccgccgactttacggcatccgaggagcctccatgcatcattgcggtgttgtgcgagcttcatgatgggttattagttgaagccaaaggcataaaggagcactattttaaaccttacatctctaagctatttgaccggaaaatcctgaagggtgaatgcttgctggatctctcctcgtttaccgacaacagtaaagccgtgaacaaagaatatgaagagtatgtgctgaccgtgggagacttcgacgagcggatttttctcggggctgatgcggaggaggaaatcggcacccctcgaaagttcacccgggacaccccactgggcaaattgaccgcacaggcgaacgtggaatataatttacagcagcatttcgagaaaaagcggtcattcgcccccagcacccctctgaccggacgccgctatctgcgcgaaaaagaggcagtcattacccctgtcgcctcagcaactcaatcagtatcccgccttcagtctatcgtggccggactgaaaaacgctccatccgaccaactgatcaacatatttgagtcatgtgtccgaaacccggtcgaaaacatcatgaaaattcttaaggggattggggaaactttctgccagcactatacacaatctactgatgagcaacccggcagccacatagattttgccgtgaaccggttgaagctcgcggagattctgtactataaaattctggagacagtaatggtccaggaaacccgcaggctccatggcatggatatgagcgtgctgctcgaacaggacatttttcaccgtagcctgatggcttgttgccttgaaatagtgttgttcgcatatagctccccacgcacctttccctggattatagaggttctgaatctccaacctttttatttttataaagtgatagaagttgtgatccgatccgaggagggtctatcccgggatatggtcaagcacctcaattccatcgaagagcagatcttggagtcactggcatggagccacgatagcgctctatgggaggccttacaagtaagtgccaacaaggtgcctacctgcgaagaagtaatctttccaaataatttcgagacaggaaacggtggtaatgtgcagggccaccttcctctgatgccaatgagcccactgatgcatcctagagtcaaagaggtaaggaccgattctggtagcctgcggagagacatgcaaccactctcaccaatatccgtccacgagcgctacagctctccaaccgccggttctgcaaaacgccgcctgttcggagaagaccctccgaaggaaatgctaatggacaagatcatcactgagggcaccaaactgaaaatcgccccctctagttcaatcaccgccgaaaatgtcagcattcttccaggccagaccctgctgacaatggcaaccgcacctgtgacaggcaccactgggcacaaagtcacaattccattacatggagtggccaacgatgctggggaaatcaccttgatcccactcagtatgaacactaatcaggaatctaaggtcaagagccccgtatcgctcacagcccactcactgataggggccagccccaagcagactaacctgacaaaggcccaggaagtgcactccacaggcatcaacagacccaagcgtaccggctccctcgccctcttttataggaaggtttaccacctcgcctcggttcgactgcgcgacttgtgtctgaaacttgacgttagtaatgagctccgcagaaagatctggacctgcttcgaattcacgttagtgcactgtccggatctgatgaaggaccggcacctcgatcagctgttactttgcgccttttatataatggcgaaggtgacaaaggaggagcggactttccaggagattatgaaatcctacagaaatcagccccaagccaatagtcacgtctaccgcagtgtgcttctcaagtccatccctcgcgaagtggttgcatacaataagaacataaatgatgacttcgagatgatcgactgtgacctggaggacgccacaaagactccagattgcagctccggtcccgtgaaggaggagaggggggacctgattaagttttacaacacaatatacgtaggacgtgtgaagagcttcgccctgaagtacgatcttgctaaccaggaccacatgatggatgcaccaccactgagtccttttccccatatcaagcagcagcccggttcacccagaaggatcagccagcagcacagtatttatatctccccccataagaatggatccggcctgacgcctcgctccgccctcctttataagtttaacgggagcccgagcaaaagtctaaaagacatcaataacatgattcgtcagggagagcagcgcaccaaaaagagagtgatagcgatcgattccgatgcggaaagccctgcgaaacgggtgtgccaagagaacgacgacgtcctccttaagagattacaggatgtggtgtcagagcgagcaaatcattag

SEQ ID NO: 17156 - DNA, 3420 bp, synthetic construct
  misc_feature 1..3420: note = Description of Artificial Sequence: Synthetic coding sequence
  source 1..3420: mol_type = other DNA
atgccatccggcggcgaccagagtcccccccccccaccaccccctcctgctgctgcggcgtccgacgaggaagaagaggacgatggcgaggcagaggatgccgctccacccgctgagtcccctactcctcagattcaacaaagatttgatgagctttgttctcggctcaacatggacgaggctgcccgtgcagaagcctgggattcctatcgttctatgagcgagagctatacgctcgaggggaacgatctgcattggcttgcatgcgcgttgtatgtggcatgccgaaaaagcgttcccacagtatcaaagggtactgtcgagggtaactatgtaagccttactagaattctgaaatgtagcgagcagtccctgatagagtttttcaacaaaatgaaaaagtgggaagacatggccaaccttcctccccactttcgagagcgcacagaacgccttgagcgcaatttcacagtgagcgctgtgatattcaaaaaatacgagcccatctttcaagacatattcaagtatccacaggaagagcagccccggcaacagagggggcgtaaacagcgccgacagccatgtacagtaagtgaaattttccatttttgttgggttcttttcatctatgcaaaaggaaacttccctatgatttccgatgaccttgtgaactcttaccatctgctcctctgtgctctggatctcgtttatggcaacgcattacagtgctcaaatcgcaaggaattagtgaaccccaattttaaaggcttgtccgaagactttcatgcgaaagacagtaagccaagcagcgacccgccctgtattatcgaaaaattgtgctccctgcatgatgggcttgttttggaggctaaaggcatcaaagagcacttctggaagccgtacataaggaagctatatgagaagaaactgttaaagggaaaggaggagaacctcaccggatttttggagccaggaaatttcggagagagcttcaaagccatcaataaagcgtacgaggagtatgtgctgagcgtgggcaacctggatgagaggatcttcctgggggaggacgcagaggaggagatcgggacactcagtcgctgtctgaatgctggaagcggcacagaaaccgcggagcgagtgcagatgaagaacatcctccagcaacacttcgataaatcaaaggccctccggatttctacaccactaactggtgtccgttacattaaagaaaactctccctgtgttacacctgttagtacagcaacacactcactgtcacgcctgcacacgatgctgacaggattgaggaatgctccatcagagaaacttgagcaaattctgcgaacatgtagcagagacccaactcaggctatagctaataggctcaaggaaatgttcgagatatatagtcaacatttccaaccagacgaggacttttctaactgtgccaaagagatcgcttctaaacactttcgatttgctgaaatgctgtactataaggttctcgaaagcgtgatcgaacaggagcaaaaacgactcggggacatggatctgagcggcatcctggagcaggatgcgtttcacaggagcctgttagcctgttgtctggaggtggtaacgttctcctacaagcccccaggcaatttccccttcattactgagatatttgatgttccactgtaccacttttataaggtcatcgaggtatttattcgcgcagaggacgggctgtgcagggaggtcgtcaaacatctgaatcagatcgaggagcaaatcctggaccaccttgcttggaaaccagagagcccattgtgggagaagatccgcgacaatgagaatcgggttcctacctgcgaggaggtaatgcctccacagaacctggaacgcgctgatgaaatttgcatcgccgggagccctctcactccccgtagagtgaccgaggtgcgcgccgacacaggaggccttggacgaagtattacctctcccaccactttatacgatagatattcttctccacccgcatctactaccaggagaaggctgttcgtcgaaaatgattccccctcggatggcgggacaccggggcgcatgcctcctcagcctctggtcaacgcggtgcctgtccagaacgtgagtggcgaaacagtttcagtgacacccgtgcccggccaaacacttgtgactatggcgacagcaaccgtgacagcaaataacggccagacggtgaccattcctgttcaaggtatagccaatgagaatggggggatcacttttttcccagtccaagtgaacgttggtggacaggcgcaggccgttacggggagtattcaaccactcagtgctcaggcactggcgggtagtttatccagtcaacaggtcactgggacaaccctccaagtaccaggccaggtagctatccagcagatctctccgggcggtcagcagcagaaacagggccagtctgtgacaagcagctcaaaccgccctagaaaaacaagctcgctttcgctgttctttcgcaaagtgtatcacctggcagcagtgcggctccgcgacctgtgtgcgaagctggacatttctgatgagctgcgcaagaaaatctggacctgctttgagttctccatcattcagtgcccagaactaatgatggacagacatctggatcaactgctgatgtgcgcaatttacgtgatggccaaggtcacaaaggaggataagagtttccaaaatattatgcggtgttaccgtactcagcctcaagccaggagccaggtttatcggtcggttttgataaagggcaagcgcaaacgaaggaattctggttccagtgatagccgctcacatcagaacagcccgactgagctgaataaagacagaacttccagggattcaagtccagtgatgcgaagctccagtactctcccggtacctcagccatcttctgccccaccaacccctacgcgcctgaccggtgcaaatagtgatatggaagaagaagaaaggggggatcttatccagttttacaacaacatttacatcaaacagatcaagacctttgccatgaagtattcacaggcaaacatggacgcccccccacttagcccttatccctttgtgcggaccggaagtcctcgtaggatacagctgtcccagaaccacccggtttacatttctccccataagaatgaaacaatgttatcgcctcgggaaaagattttctactacttctccaactccccttccaaacgcctccgagagataaatagcatgatccggaccggcgagactcctactaaaaaaaggggtattttacttgaagatgggtccgaaagtccggccaaacgcatctgcccagagaaccactcagccctcctgagaagactgcaggatgttgcaaatgaccgaggatcccactag

SEQ ID NO: 17157 - DNA, 2550 bp, synthetic construct
  misc_feature 1..2550: note = Description of Artificial Sequence: Synthetic coding sequence
  source 1..2550: mol_type = other DNA
atggaaagcagatgcgtggcgcaggctggaatgcagtggcacgacttgggctctctgcagccgctgcccccacggttcaagaggtttttctgcctttcattactcagctcttgtgaatacagcaaggccattaacaaagcctacgaggagtatgtcctctctgtggggaacctggacgaacggatcttcctgggtgaggacgctgaagaggaaatcgggacactgtctagatgtttgaatgcaggcagcgggaccgagaccgcggaaagagtccaaatgaagaatatccttcagcagcactttgacaaaagcaaagcattgcgcataagtacccctctcacgggagtaagatacatcaaggaaaactctccatgtgtgactcctgtttcaacagcaactcattcactgagcagattgcacacgatgctcacaggactgcggaatgcacccagtgagaagctagaacagatcctgcggacctgctccagggacccaacacaggctatcgcaaatcgcctgaaggagatgtttgaaatttacagtcagcacttccaacccgatgaggacttttcaaattgcgccaaggagattgcctccaaacactttaggttcgctgagatgctctactataaggtgctggaaagcgtgatagagcaggagcagaagcgcctcggtgatatggacctgtccggcatcctggaacaggatgcttttcacaggtcactgcttgcctgctgtcttgaggtggtgactttctcgtataaaccccctggcaacttccccttcattactgagattttcgatgtgccgctgtaccacttttacaaggtaattgaggtgttcatccgagccgaagatggtttatgtagggaggtagtaaaacacctaaaccagatagaagagcagattctggatcacttagcctggaaacctgaaagccccttgtgggagaaaatcagggacaatgagaaccgggtgccaacctgtgaagaggtgatgcccccccagaacctggaacgggcggatgaaatttgcatcgctggaagtccactgacgcccaggcgtgtcacagaggtgagagccgacacgggaggtctgggtaggagcatcacctccccaactaccctctacgaccgatatagttcgcctcccgcctctacaaccagaagaagactgttcgtagagaacgattcccccagtgacggcgggacaccaggacgcatgccaccacagccgttggtaaacgcagtgcctgtgcagaacgtcagtggcgagacagtctctgtcactcctgtgcctggccagaccctcgtaacaatggccacagccacagtgacggccaacaatggccagacagtaaccatccctgtccaggggatagccaacgagaacggagggattacatttttccctgtccaagtgaatgtggggggccaagcccaagctgtgaccggtagcatacagccgctcagcgctcaggccttagccgggtcgctttcatcccagcaggtgacaggcacaactctgcaagtgcccggtcaggtcgctattcagcagatttctcctgggggccagcagcaaaagcaaggccagtctgtgacaagttccagcaaccgccctcggaaaacctcctctctgagtctgttcttccgaaaagtgtaccatctcgcggccgtcaggctgagggacctgtgcgccaaactggacatttcagacgagctgagaaagaaaatttggacttgctttgagttctcaatcatacagtgtcccgaactgatgatggatcggcatctcgatcaactgctcatgtgcgcgatctacgtgatggccaaagtgactaaagaggacaagagttttcagaatattatgcggtgctatcgcacacaaccacaggcacgtagccaggtctatagaagcgtgctgatcaaaggaaaacgtaagcgaagaaatagtggctcatcggatagccgctcacatcaaaatagcccgaccgaattgaacaaggacaggaccagtagggactcttcccccgtcatgcggagctcctctaccctgcctgtgccccaaccgtcttccgcccctccgacaccaacacggttgacgggagccaattcagacatggaggaggaggagcgcggggatctaatccaattttacaataatatttacattaagcaaatcaagaccttcgccatgaaatatagtcaggccaacatggacgccccaccactaagcccttatccttttgttagaacaggctcacccagacgaattcagctgtcccagaatcatcctgtgtatatatcaccgcacaagaacgagacaatgctgagccccagagagaaaatcttctactacttctctaactcgccatccaagcgactcagggagattaactccatgataagaacgggcgaaactcccaccaagaagcgcggaatcctgctggaagacgggagtgaaagtccagctaaacggatatgcccggagaaccattctgcactgttgcgacggctgcaggatgtagccaatgaccgggggtcccactag

SEQ ID NO: 17158 - DNA, 1668 bp, synthetic construct
  misc_feature 1..1668: note = Description of Artificial Sequence: Synthetic coding sequence
  source 1..1668: mol_type = other DNA
atgcagtcactgacaaagggaaatgatctgcactggcttgcatgcgcgctgtatgtcgcgtgcaggaagagtgtccccaccgtgtctaagggtactgtagagggcaattatgtgtccctcacccgcattctaaagtgctctgaacagtccctcatcgagttttttaataagatgaaaaaatgggaggacatggccaatctccccccacatttccgcgagcggacagaacggcttgaacgcaactttacagtgtccgcggtaatttttaagaaatatgaacctatattccaggatatcttcaagtaccctcaggaggagcagccccgacagcagcgaggccgaaagcaaagaaggcagccttgtactgtgtctgagatcttccatttctgctgggtgctgtttatttacgcgaaaggaaactttccgatgatctcagatgatctggtcaactcataccacctcctactttgcgcactggacctggtctacggaaatgcactgcagtgttcgaacaggaaggaactcgtaaatccaaactttaagggactctctgaggactttcacgcaaaagattctaagcctagtagtgaccccccttgcataatcgagaaactgtgtagtctccacgatggactggtgctggaggccaaggggatcaaagagcatttttggaaaccatacatcaggaaactatatgagaagaagcttctcaaaggcaaagaggaaaatctgaccggcttcctggaaccgggaaacttcggggaatcatttaaggccatcaataaggcatacgaagagtacgtgttatctgtgggcaatttggatgaaaggattttcctgggcgaagatgcggaggaagaaatcggaaccctgtcgcggtgtttgaatgccggatcaggaaccgagacggccgagcgtgtgcagatgaaaaacatactgcagcagcacttcgacaaaagtaaggccctgcgaatttccacacccctgaccggtgtccggtacatcaaggagaattcaccttgtgtgaccccagtcagtacagccacacacagcctctcccggctgcacactatgctaacagggctgcgcaacgcccctagcgaaaaactagaacaaattctcaggacctgttcccgtgaccccacccaggcaatcgcaaatcgcctgaaggaaatgtttgaaatctattctcagcattttcagcccgacgaagacttttctaattgtgcaaaagaaattgccagcaaacattttcggttcgccgaaatgctctactataaagtactcgagtccgtgattgagcaagagcaaaagagactgggagacatggacctttctgggatcttggaacaggatgcattccatcgatccttacttgcctgctgtctggaggtggtcacctttagctacaagccacctggtaatttcccgttcatcacggagatttttgatgtccccctgtaccatttttataaggtgattgaagtatttatccgtgccgaagatgggctgtgccgggaggtcgtgaaacatctgaatcagattgaagagcaaatcttggatcatctggcgtggaagccagaaagtcctctgtgggagaaaataagagataacgaaaaccgcgttccgacctgtgaagaggtgatgccacctcagaatcttgaatag

SEQ ID NO: 17159 - DNA, 1557 bp, synthetic construct
  misc_feature 1..1557: note = Description of Artificial Sequence: Synthetic coding sequence
  source 1..1557: mol_type = other DNA
atgatctctgacgacctcgtaaattcctaccaccttctgctgtgcgcgttggatctggtgtatggaaacgcactgcagtgctcaaaccggaaagaactggtcaatccaaacttcaaggggctctcggaggattttcacgctaaggactcaaaacccagcagtgaccctccatgtataatcgaaaaattatgttccctccatgatggtttagtcctggaggccaaggggatcaaagagcatttttggaagccttatattcgcaaactctacgaaaaaaagctccttaagggaaaggaggagaatctcaccggcttcctggagcctgggaactttggagagagcttcaaggctattaataaagcctatgaagagtacgtgttgagcgtgggcaacctcgatgagaggatttttctcggagaggatgctgaggaggaaattggcacattgagcaggtgcttgaacgctggaagtggcactgaaacggctgaacgcgtacagatgaaaaacattcttcagcagcactttgataaatccaaggcactcagaatttccacaccactcacaggcgtgcgctacattaaggagaattccccgtgtgtcacacccgtgtccacagcaactcacagcttaagcagattacataccatgctaaccgggctccggaacgcaccgtccgaaaaactggaacagatcttacgtacctgcagcagagaccctacccaggcaatagccaacagactcaaggagatgttcgagatctattcacagcacttccagccagatgaggattttagtaattgtgccaaggaaatcgccagcaagcactttcgctttgccgagatgctatactataaagtgctggagagcgtcatcgaacaggagcaaaaaaggctgggggatatggatctttcagggatcctggaacaggacgcgttccacagatccctccttgcctgttgtctggaagttgtcaccttttcatataagcctcccgggaacttcccttttataaccgagatcttcgacgttccattgtatcacttttacaaggtgatagaagtgtttatccgtgcagaggatggactgtgcagggaagttgtgaagcacctaaatcagatcgaggagcagattttggaccatctggcctggaaaccggagtcgcccctatgggagaaaatccgggataatgaaaatcgtgtaccaacatgcgaagaggtaatgccccctcagaatttggaacgagctgatgagatctgtatcgccggctccccacgtaggatccaactgtcacagaaccaccccgtttacatttcaccccacaagaatgagaccatgctgtcaccgagagaaaaaatattttactacttctcgaattcgcccagtaaacgcctgcgcgagattaacagcatgatcaggactggcgagacacccacaaaaaaacgcgggatcttactcgaagacgggagtgaaagcccagccaagaggatctgccccgaaaatcattccgcgctgctcagaagactccaagacgtcgcaaatgaccgcggcagccactag

SEQ ID NO: 17160 - DNA, 1347 bp, synthetic construct
  misc_feature 1..1347: note = Description of Artificial Sequence: Synthetic coding sequence
  source 1..1347: mol_type = other DNA
atgtttgattgcatggatgtgttgtcagtgagccccggacagatcctggatttctacacagcctcaccaagttcctgtatgttacaagagaaagccctgaaggcctgtttcagcggcctgactcaaacagaatggcaacatcgccacaccgcgcagtcaatagagactcagtctacatcttctgaagaactggtgcccagcccccccagccccttgcccccccctagggtctacaagccttgcttcgtttgtcaggacaagtcttctggatatcactacggtgtcagcgcatgtgagggatgcaagggttttttccgcagatccatccaaaaaaatatgatttacacctgtcacagggataagaactgcgtcatcaataaggtcacacgaaatcggtgtcaatattgcaggctgcagaaatgtttcgaggtcgggatgtcaaaggagagtgtccggaatgatagaaataagaaaaagaaggaaaccagcaaacaagaatgcactgaaagctacgagatgactgccgaattagacgatttaactgagaaaatccgtaaagcacatcaagagacatttccttctctgtgtcagctcggcaaatataccacaaactcttcggccgatcatcgagtgaggctggatctgggtctgtgggataagttcagtgaacttgctacaaagtgtatcataaaaatcgtggagtttgcaaaaaggcttcccggattcaccggccttaccatcgctgatcaaatcaccttgctgaaagcagcctgcctagacatactgatcttgagaatctgtacaaggtacactccagagcaggacacgatgactttttctgacggtctgactttgaataggacccagatgcacaacgcaggcttcggccctcttaccgaccttgtattcactttcgctaatcagttgcttcctctggagatggatgatacggagacgggtctgctgtccgccatctgcctcatttgcggtgaccggcaggaccttgaagagccgaccaaggttgacaagctgcaggaaccactgctggaggccctgaagatttatattcggaagagaaggccatctaagccccacatgttcccgaagatcttaatgaaaatcacagacttgagatctatctctgcaaaaggggcagagcgcgtaatcactctaaagatggagattccaggatctatgcctcccctcatccaggagatgctggagaacagcgagggccatgaaccactgactcctagcagttcgggaaacacagccgaacactcaccctcaatcagtccatcctctgttgaaaactctggcgtctcgcagtcgccactggtccagtag

SEQ ID NO: 17161 - DNA, 1368 bp, synthetic construct
  misc_feature 1..1368: note = Description of Artificial Sequence: Synthetic coding sequence
  source 1..1368: mol_type = other DNA
atgacaacttccggtcatgcctgtcccgtacccgccgtgaatggacatatgacacactatcctgcaaccccttacccactcctgttcccccccgtcatcggggggctcagcctaccaccccttcacgggctacacggacacccccccccatcaggctgcagcacgccctccccggccaccattgaaacccagagtactagttccgaggaactcgtacccagccccccttccccgctcccccctcccagggtatataagccctgttttgtgtgccaagacaagtctagcggatatcattatggggtctcagcttgcgagggatgtaaagggttcttcaggcgctcgattcaaaaaaacatgatatatacatgccatcgggacaagaactgcgtgataaataaggtgacgcgcaaccgctgccaatactgtcgtcttcagaagtgctttgaagttggcatgtctaaagaatctgttagaaacgatcggaataagaagaagaaagagacaagtaaacaggagtgcactgaatcctacgaaatgactgctgaactggatgatctaactgagaagattcgcaaggcacaccaagagacctttccctcactttgtcagctgggaaagtataccaccaacagctcagctgaccatcgcgttcgcctggacctgggcttgtgggataagttcagtgaactcgctactaaatgtatcatcaaaatcgttgaatttgccaaaagactgcccggcttcaccggtctgacaatcgctgaccaaatcacccttctgaaagccgcgtgcttggacattctgatactgagaatttgtacacgctatacccctgaacaggatacgatgacattttcagacggcctcacattaaacaggacccagatgcacaacgctggctttggtccactgactgacctcgtctttactttcgccaaccagctgctcccactggaaatggatgacactgagaccgggcttttgtcggctatctgcttgatctgcggagaccggcaggatctggaggaaccaaccaaagtcgataaattgcaggagccccttctagaagctctgaagatctatatacgcaaacgaagaccatccaaacctcatatgttcccaaaaattctgatgaagataaccgacttgaggagtatctctgcaaagggagcagagagggtgattacactaaagatggagatccctgggtccatgccaccccttattcaggagatgttggagaatagtgagggtcatgaacccctgactccatcatcttccggcaacaccgctgaacacagtccatcaataagcccgagttccgtggaaaattccggggtgtctcaatcccctcttgtgcagtag

SEQ ID NO: 17162 - DNA, 1011 bp, synthetic construct
  misc_feature 1..1011: note = Description of Artificial Sequence: Synthetic coding sequence
  source 1..1011: mol_type = other DNA
atgatctacacctgccatagggataagaattgtgtaataaacaaagtaacacgcaaccgctgccaatattgccgactgcagaagtgcttcgaggttggtatgtcaaaggagtccgtgagaaatgaccgcaacaagaaaaagaaggagacgtccaaacaggagtgcacggaaagctacgaaatgaccgctgagctcgacgatttgacggaaaaaatccgtaaggctcatcaggaaacctttccctctttgtgccagttgggcaagtacactaccaattccagcgcagaccatcgggtacgacttgatttaggcctttgggacaagttttccgaactcgcaactaaatgtattattaagattgtggagttcgcaaagcgacttccaggattcaccggcctgacaatcgctgaccagattacactgctaaaagcagcatgcctggatatcctcatattgaggatctgcactaggtacacacctgagcaggacacaatgactttctccgatggtcttaccttgaacagaacgcagatgcataacgctggattcgggccactgacagacttggtttttaccttcgccaaccagttactgcctttggaaatggacgatacagagactgggctgctatccgcgatttgcctgatctgcggcgatagacaggatctggaggagcccactaaagtggacaagctgcaagaaccattgctcgaggccctaaaaatctacatcaggaagcgacgcccaagtaagccccacatgtttcccaaaatccttatgaaaataaccgacctcagatccatcagtgcgaaaggagcagagcgggtcatcactttaaagatggagatacctgggagcatgccccctcttatacaagaaatgttggagaacagcgagggccatgaacctcttaccccctctagttccggtaacacagccgagcacagccccagtatttccccctcttctgtcgagaactctggagtgagccaatcacctctggttcagtag

SEQ ID NO: 17163 - DNA, 1011 bp, synthetic construct
  misc_feature 1..1011: note = Description of Artificial Sequence: Synthetic coding sequence
  source 1..1011: mol_type = other DNA
atgatttatacatgccatcgggacaaaaattgtgtcattaacaaagtgactagaaatagatgccagtactgccgtctacagaagtgctttgaggtgggcatgtcaaaggagtccgtgcgcaacgatcgaaacaagaagaaaaaggagaccagcaaacaagaatgcacggagtcttatgagatgactgccgaactcgacgacctcacagaaaaaattcgtaaggcccaccaggagacctttccctctttatgccagctcggcaagtacacaaccaacagcagcgccgatcacagggtgaggttagatctcggcctgtgggataagttttcggaactcgctaccaaatgtatcatcaagatcgtcgaattcgcgaaaagattgcccggcttcacggggctgaccatagctgatcaaatcactcttctgaaggccgcttgcttagacatcctgattctgcgcatttgcacgcgctatacacctgagcaggacactatgacgtttagtgatggcttgacactgaatcgaacacaaatgcacaatgctgggtttggccccctgacagatctggttttcacatttgcgaaccagctcctcccccttgaaatggacgatacagaaacggggctcctgtcagccatttgtctaatatgcggtgatcgccaggacttggaagaaccgactaaggtagacaagttacaggaacccctgttagaggcgcttaagatctatatacgcaagcgcagacctagtaaaccacacatgtttccgaaaattttaatgaagatcaccgacctacggtccattagcgctaaaggggccgagagggtgatcacactgaagatggagattccagggagtatgccaccactgatacaggaaatgctcgaaaacagtgaagggcacgagccgctgacacccagttcttccggaaatacagctgaacactctccgtctatcagtcccagttctgtggagaactctggcgtaagccaatcccctctggttcagtag

SEQ ID NO: 17164 - DNA, 1326 bp, synthetic construct
  misc_feature 1..1326: note = Description of Artificial Sequence: Synthetic coding sequence
  source 1..1326: mol_type = other DNA
atgaccacctccggccacgcctgcccagtgccagccgtcaacggacacatgacccactaccccgccacaccttacccactcctgtttcctcctgtcattggcggcctgtccttacctcctctgcacggactgcatgggcatccacctcctagcggctgctccacaccaagtcctgccaccattgagacacagtctaccagctctgaagaattagtgccatcccccccatctccccttccaccccctcgtgtgtacaagccgtgcttcgtgtgccaagataagtctagcggttatcattatggcgttagcgcttgtgaaggctgcaaaggtttcttccgccgatctatccaaaaaaatatgatatatacttgtcacagagacaaaaattgcgtgataaataaggtaacccggaacagatgtcaatattgtcgcctccagaagtgtttcgaggtggggatgtcaaaggaaagcgtccgtaacgacagaaacaaaaagaaaaaagagacctctaagcaggaatgtaccgaaagctatgagatgacagcagagctggatgatctcaccgagaagattcgaaaggctcaccaggaaacgttcccttccctgtgtcaactggggaagtacactactaattcatcagccgatcaccgggtaagactcgacctgggactgtgggataagttttcagaactggccactaaatgcattattaagatcgtggaattcgcgaaaagactcccaggtttcaccggactgaccatagctgatcaaatcacactcctgaaagcagcatgcttggacattctgatactccggatctgcacacgttataccccggaacaggatactatgacattttccgatggactgacgctgaaccgcacccagatgcacaacgctggttttggaccgctaactgacctagtgttcacattcgctaatcagttgctgcctctcgagatggatgatacagagactggactgctttctgccatctgcttgatatgtggggacaggcaagacctcgaagaaccaaccaaggttgacaagctccaggaacctctgctagaggctttgaagatctatattaggaagcggagaccgtctaaaccgcacatgttccccaagatcctcatgaaaatcaccgacttacgatcgatctctgcaaaaggcgcagagagggttatcaccctgaaaatggagatcccagagggccacgaacccctgacaccttcatcctcaggaaacaccgcagaacattcacccagtataagcccatcctcggtagagaattctggagtgtcccagtctccgctggtgcagtag

SEQ ID NO: 17165 - DNA, 462 bp, synthetic construct
  misc_feature 1..462: note = Description of Artificial Sequence: Synthetic coding sequence
  source 1..462: mol_type = other DNA
atggaccctccagctgggttcgtgagagccgggaatcccgctgtggccgctccacagtctcctctctctcccgagggggcccactttcgggccgcccaccacccccgttctaccggatctcggtgccctgggtccctgcagccttctaggccactggttgccaactggctgcagtctctacccgagatgccagtggatttcacaggctactggaagatgttggtgaatgagaatttcgaggagtacttgcgcgccctagacgtgaacgtggccctacggaagatcgcgaacctgctgaaaccagataaagagattgtccaggacggggatcacatgatcatccgaacattatctacattccgaaattacattatggatttccaggttggcaaggaattcgaagaagacctgacgggcattgacgatcgtaagtgcatgagcgaaactggctttagctcttag

SEQ ID NO: 17166 - DNA, 405 bp, synthetic construct
  misc_feature 1..405: note = Description of Artificial Sequence: Synthetic coding sequence
  source 1..405: mol_type = other DNA
atgaccagagatcagaacggcacctgggaaatggaatctaatgagaactttgaaggctatatgaaggcgctggacatcgattttgcaacgagaaaaattgctgtgcgattgacccagactaaggtcatagaccaggacggcgacaatttcaaaacgaagaccaccagcacttttaggaactatgacgtggattttaccgtcggcgtcgagtttgatgaatatacaaaatcactcgataaccgccatgtgaaggcgcttgtgacatgggaaggcgatgttctcgtatgtgttcaaaagggagaaaaggagaatcgaggctggaaacaatggattgaaggggataagctgtacctggagttgacatgtggcgatcaggtttgtcgtcaggtctttaagaaaaaatag

SEQ ID NO: 17167 - DNA, 474 bp, synthetic construct
  misc_feature 1..474: note = Description of Artificial Sequence: Synthetic coding sequence
  source 1..474: mol_type = other DNA
atggaccctcccgccgggtttgtgagggccggcaatcccgccgtggccgcaccccagtctccacttagcccagaaggcgcacactttagggctgcccatcatccccggtcaacaggaagtcggtgtcccggctctctccaaccctcccgtcctctagttgcgaactggctccaatcactcccagagatgcccgtagacttcaccggatactggaagatgctcgtgaatgaaaacttcgaggagtatctacgggctctggatgtcaacgtggcactgcgaaaaatagcaaacctgctgaaacccgataaggagatagtgcaagatggagatcatatgataatccggacattatcgacctttcgcaactacatcatggacttccaagtggggaaagagttcgaggaagacctgacgggcatcgatgataggaagtgtatggccggagtacagtcgagagacttgagcagtctgtag

SEQ ID NO: 17168 - DNA, 3756 bp, synthetic construct
  misc_feature 1..3756: note = Description of Artificial Sequence: Synthetic coding sequence
  source 1..3756: mol_type = other DNA
atgagacgcggaggatggagaaaaagagcagaaaacgatggatgggagacctggggcgggtatatggcagccaaagtccagaaattagaggaacaatttcgatccgacgcagccatgcagaaagacggcacatcttcgacgatctttagtggtgtggccatttacgtcaatggatatacggatccctctgccgaggaattgcggaagcttatgatgctccatggggggcaatatcacgtatattattctagatctaaaaccacccacattattgcgacgaacttacctaatgccaaaatcaaggagcttaagggcgaaaaggtcatcagaccggaatggatagttgaatcgataaaagccggtaggctgctgtcatacatcccgtaccagctttacacaaaacaaagtagcgtacagaaggggttaagctttaatcccgtatgcaggcctgaggaccccttacctggaccatccaatattgcgaaacagctgaacaacagggtgaaccacattgtgaagaaaattgaaactgagaacgaagtgaaggttaacggcatgaattcttggaatgaggaagatgagaataatgactttagttttgttgatctggaacagacgtcccctggaaggaagcaaaacggcattcctcacccacggggatctactgccatttttaatggccacacgccctcctccaacggtgccctgaagacccaggattgtctggttcccatggtgaacagtgtcgctagccgcctcagccccgccttttctcaggaagaggacaaagctgagaagagttctactgattttcgcgactgcactctgcagcagctgcagcagtcaacaagaaacactgatgcattgcgtaatcctcacaggacaaatagtttttctctgagtccactgcacagcaatacaaaaattaatggagctcaccattccacggtgcagggtccctccagtacgaagtctacttcatctgtttcaactttcagcaaagcggcaccatccgtacctagtaaaccatcagactgtaatttcatctcaaatttttacagtcactcaaggctccaccacataagcatgtggaaatgtgagctcacggagttcgtgaacacactgcagcggcagagcaatgggatcttccccgggagggagaagctgaagaagatgaaaaccgggagaagcgccctggtggtcaccgacaccggcgatatgagtgtgctgaatagtccacgccaccagtcatgtatcatgcatgttgatatggactgcttcttcgtgagcgtggggatccgtaatcgaccggacctcaaggggaaaccggtggctgtaacctcaaataggggtacagggagggccccgctccgacccggtgctaatccgcagctggagtggcagtactaccagaacaaaattctgaaaggtaaggccgccgacatccctgattcctccctctgggagaatcctgattccgcccaggctaatggtatagacagcgtcttgagccgcgccgagatagcctcttgttcatatgaagctcgccagctgggaatcaaaaatggcatgttctttgggcatgccaagcagctatgccctaacctgcaggccgtcccctacgattttcacgcctacaaggaagtggcgcagacactttatgagactttagcatcttatacccataacatcgaggcagtcagctgcgacgaggccctggttgacattactgagatacttgcagaaaccaaactcaccccagacgagttcgctaacgccgtcaggatggaaataaaagaccagaccaagtgcgccgctagcgtggggatcggatccaacattctgctggcccgtatggcaacccgtaaagctaagcccgatggccagtaccacttgaagccggaggaagtggacgattttatcagggggcagctggttactaaccttcccggagtcgggcatagcatggagagcaagctggccagtctcggcataaagacttgtggagatcttcagtacatgacaatggctaagctgcagaaggagtttggtccgaaaaccggccagatgctataccgattctgccgtggccttgacgatagaccagtccgcacggagaaagaacggaagtcggtctcggctgagattaactacggcattaggttcacccagccaaaagaggcagaagccttcctgctgtccctcagtgaagagatccagaggaggctggaggcaacgggcatgaagggcaagcggctaacacttaagattatggtccgaaagcctggggccccagtcgaaacggccaagttcggggggcatgggatctgcgacaacatcgcccggacggtgaccctggaccaggctaccgataacgctaaaatcattggcaaagcaatgctgaatatgttccatacgatgaaattgaatatcagtgatatgcggggagtcggtattcacgtgaaccagctggtgcccaccaatctgaacccctctacatgcccttctcgcccttccgtccaatcctctcactttccaagcggatcttactccgtgagggacgtgttccaagttcagaaggctaagaaatcgactgaggaggaacataaggaggtctttcgtgcagctgtggacctggaaatcagttcagctagcaggacatgcacctttctgcctcctttccctgcacacttgcccaccagtccggacaccaacaaagccgagtcttctggcaagtggaacgggttgcacacgccagtgtccgttcaaagtaggttgaacctgagtattgaagtacccagtccctcccagttggaccaaagcgtacttgaggccctcccccccgatttgagggaacaggtggaacaggtttgcgccgtgcaacaggcagagtcccacggcgataagaaaaaggagcccgttaacggatgcaataccggaatcttgccccaacccgtgggtacagtcctgttacagatccccgagccccaagaaagcaactcggacgcagggatcaatctgattgccctgccagccttttcccaggtggatcccgaggtattcgccgctttgccagcagaactgcagcgcgagttaaaagccgcatatgaccagcgccagaggcagggagaaaattccactcaccagcagagcgcctcggcaagcgtgcccaaaaatcctctgctccatttgaaggctgctgttaaagaaaagaaaagaaacaagaaaaagaagaccattgggtcccccaagcgaatccagtccccgcttaacaacaaactgctaaactcccctgccaagacccttccgggggcatgcggctctccccagaaattgatagacggctttcttaaacatgaggggccacccgctgagaagccactagaagagctctccgcgagcacatccggggtgcctggcctgagtagcttgcaaagcgaccccgccgggtgcgttaggccaccagctcctaacctggctggggccgtggagttcaacgatgttaaaacactcctccgggagtggataaccactatttccgatcccatggaggaggatatcttgcaggtagtgaagtactgtacagacctgatagaagaaaaggacctcgaaaagctcgatctcgtgattaaatatatgaaacggctcatgcagcaatccgtggagtccgtttggaacatggctttcgattttatactcgacaacgtgcaggtagtattgcaacagacgtacggtagtactcttaaggttacatag

SEQ ID NO: 17169 - DNA, 3753 bp, synthetic construct
  misc_feature 1..3753: note = Description of Artificial Sequence: Synthetic coding sequence
  source 1..3753: mol_type = other DNA
atgcgaagggggggctggaggaagcgggcggagaacgacggctgggagacgtggggcggctacatggctgctaaggtgcaaaaattggaggagcagtttcgatctgacgcggccatgcagaaagacggcacctcttcaacgattttttcaggcgtcgccatttacgtcaatggttacactgaccccagtgcagaagagctccgtaagcttatgatgctccacggcggccagtaccacgtgtactactcccgcagcaagactacacatataatcgcaactaatcttccaaatgccaagattaaggagctaaaaggcgaaaaagtgatcagaccggagtggatagtggagtccatcaaagcaggccgattacttagctatataccataccagttgtacaccaaacaaagttcggtgcagaaaggactcagtttcaatcccgtgtgccgcccggaagatccactgccaggtcccagtaatattgctaagcagctgaataacagggtaaaccacatcgtgaagaagatcgaaacagagaatgaagtcaaggtgaacggcatgaactcctggaacgaggaagacgagaacaatgacttctcatttgtggatcttgaacagacatcacctggtagaaaacagaacggcataccacatccccggggttccacagcaatttttaacgggcatacgccatcttcgaatggcgccctcaaaacacaggattgtctggtgcccatggtcaattccgtggcttcgcggctatcccctgctttttcacaggaggaagataaagccgagaaatccagcaccgacttcagagattgcacgttacagcagctgcaacagagcacacggaataccgatgccctcagaaatccccatagaactaatagcttctccctatcacctctccacagcaacacgaaaattaacggcgctcaccatagcaccgttcagggccctagctctacaaaatctacgtctagcgtgagtaccttcagtaaggccgcacctagtgtgccttccaagccttccgattgtaacttcatctccaacttttattcacatagccgcctccaccatatctctatgtggaagtgtgagttgaccgagttcgttaacaccctccagcgccaatctaatggaatatttccagggagggagaagctaaagaaaatgaagactggccgttctgcactggtcgtaactgacaccggagacatgtcggtcctcaactcaccccggcatcagagctgtattatgcacgtggacatggactgcttttttgtatctgtagggataaggaaccgaccggatctcaaaggtaagccagtcgcagtgactagtaaccggggaaccggtcgcgcgcccctgcgtccaggagcaaaccctcagctggagtggcaatattatcagaataagatactgaaagggaaagctgatatcccagattctagtttgtgggagaatcctgactccgcgcaggccaacggcattgactcagtgctgtcgcgcgccgaaatcgcctcttgtagctacgaagcccgtcagctgggcatcaaaaatgggatgttctttggacacgccaagcagctctgccctaatctgcaggctgtaccttacgacttccacgcttacaaggaagtagcccagacactctatgaaacactagcaagctatactcacaatatcgaggccgtaagctgcgacgaggccttagttgatatcacggagattctggctgagacaaagctgacccccgacgagttcgctaacgccgtgcggatggagatcaaggatcagacaaaatgtgctgcatcagtgggcattggctccaatattttgcttgcacgtatggctaccagaaaggcaaagccagatggccagtaccacctgaagcccgaggaggtcgacgactttatccgtggacagctggtgactaacctgcctggagtgggtcacagcatggagagcaaattggcgtcactcggtatcaagacatgtggggatctgcaatatatgacaatggctaaactgcagaaggaattcggacctaagacgggacagatgctgtatcgcttttgccgtggcctggatgatcggcctgtcagaactgaaaaggaacggaagtctgtctctgctgagatcaactacggcatccggttcacccagccgaaggaagccgaggcttttttactctccctcagcgaagaaatacagcggaggctggaggcaacaggaatgaagggaaaaagacttactctgaagatcatggttaggaaaccaggggcccctgtggagactgcgaaatttggcggccatggcatatgcgacaatattgccaggacggtgactttggatcaggccactgacaacgctaagatcatcggcaaggcaatgctgaatatgttccacaccatgaagctaaacatttccgatatgcgcggggtgggcatacacgtgaatcagcttgtccctaccaacctcaacccctccacatgcccatcaagaccaagcgtccagtctagccatttcccctctggtagctattcagtgagggatgtgtttcaggttcagaaggctaaaaagtccactgaagaagaacacaaggaggtgttcagagctgccgtggatttggaaatatcatcagcctctcgtacctgcacctttctgcctccattccctgctcatctgcctaccagcccggacacaaacaaagccgagagcagtgggaagtggaacgggctacacactcccgttagcgtgcagagccggctgaacctgtctattgaggttccatcaccctcccaactagaccaatcagtccttgaggcccttccgcctgatctgcgggaacaagtcgagcaggtttgtgccgttcagcaggccgagagccatggcgataaaaagaaagagcccgttaacgggtgtaataccgggatcctgcctcagcccgtgggaactgtgttgctgcagattcccgagccccaagagagcaatagcgacgctggcatcaacctcattgccctacccgctttttcacaggtcgacccagaggtgttcgccgcattgccagcggagttgcagagagagctaaaggccgcatatgaccagagacagcgccagggtgagaactctacacatcagcagtccgcttcggcatctgtcccaaaaaatccacttctgcacttaaaagctgcagtgaaggagaaaaagcgtaataaaaagaagaaaacgatcgggagccccaagaggatccagagtccattgaacaacaagctgctcaatagtccagcaaaaaccttgcccggggcttgcggatcccctcaaaagcttattgacgggttcctgaaacatgagggcccacccgctgagaagccactagaagagctatcagcttctacaagtggtgtgcccgggctgagctcccttcaatcagaccctgcggggtgtgtgaggccaccagctcccaacctcgccggtgcagtcgaatttaatgatgtcaagacccttctacgcgaatggattacaacaatcagcgatcctatggaagaggacatacttcaggtggtgaagtattgtaccgatctgatcgaggaaaaggacctggagaaactcgacctcgttatcaaatatatgaaaagattgatgcagcagtcggtggagtctgtgtggaatatggccttcgactttatcctggataacgtgcaggtggttctacaacagacttacgggagcactctcaaggttacctag

SEQ ID NO: 17170 - DNA, 2916 bp, synthetic construct
  misc_feature 1..2916: note = Description of Artificial Sequence: Synthetic coding sequence
  source 1..2916: mol_type = other DNA
atggctaccgtgcgcgcatctctaaggggagcactgctactgcttctggccgttgccggagtcgctgaagtggccggtggcctggcacccggtagtgcgggggcgctgtgttgcaatcacagtaaagacaaccagatgtgcagggatgtgtgcgaacagatattttcatctaaatctgagagccgcttaaagcatttgctgcagagggcgcccgactactgccccgagacgatggtggagatttggaactgcatgaactcctctctccccggcgtgttcaagaagtcggacggctgggtgggtctgggttgctgtgagctggcaatcgctctggagtgtcgacaggcatgcaaacaggcaagctcaaaaaatgacatctcaaaagtatgtcggaaagaatatgaaaacgccctcttcagctgtatcagccgaaacgaaatgggatctgtctgttgttcttacgcagggcatcacactaattgccgcgaatactgccaggcaattttccgcaccgactcatcaccgggaccctcccagatcaaagccgtggagaattactgtgcttctatctcaccacagttgatacactgtgtcaacaactacacccagagttaccctatgaggaatccgaccgactctctttattgttgcgacagagccgaggatcacgcttgccagaacgcatgtaaacggattttgatgagcaaaaaaaccgagatggaaatagtggacggcttgatcgagggttgtaaaacccaacctctccctcaggacccgctgtggcagtgcttcctggagtcctctcaaagcgtgcatcccggagtaacagtacatccaccaccgtcaaccggactggacggagctaaactgcattgttgctcaaaggctaatacctctacatgccgtgagctatgcactaagctctattccatgtcgtggggaaatacacagtcttggcaggaattcgaccgcttctgtgagtacaatcccgtagaagtcagtatgcttacatgcttggcggacgttagagagccctgccaacttgggtgcaggaatctcacctattgtaccaactttaataaccgaccgacggagctctttcggtcatgtaacgcccaatccgaccagggtgcaatgaatgacatgaagttgtgggaaaaaggtagcattaagatgcctttcatcaatatacccgtgcttgatatcaaaaagtgtcagccagaaatgtggaaggctattgcctgcagtctgcagattaagccctgtcatagtaagtctaggggctccataatctgtaagagtgattgtgtcgagatcctgaaaaaatgtggagatcagaacaaatttccggaagatcataccgctgaatcaatctgcgagctgctatcgcccaccgacgatctgaagaattgtatccctctggatacctatcttcggccttccacactgggcaatatcgtggaagaggtgacccatccatgcaacccaaatccgtgccctgccaatgagctttgcgaagtcaatcgcaagggctgtccatccggagacccttgtctcccatacttttgcgttcaggggtgtaaactaggggaagcatcagatttcatcgttcgccagggcacactcatacaggtgccttcttctgccggggaagtgggttgctacaagatctgctcgtgtggacaaagcgggctcttggagaactgtatggaaatgcattgtatcgatctgcagaagagctgtatagtcggtgggaaacggaaatctcatggaacctctttctctatcgactgcaatgtgtgcagctgcttcgctggcaatctagtatgcagcacccgactttgcctgagcgagcactcctctgaagacgacagaaggacgttcaccgggctaccgtgtaactgtgctgatcaattcgtccccgtctgtggccaaaatggccgtacttatccatcggcctgcattgcacggtgcgtgggcttgcaggatcatcagtttgagttcgggagctgcatgtctaaagatccttgcaacccgaatccttgtcaaaaaaaccaaagatgtataccaaagcctcaagtgtgtctcaccaccttcgataagttcggctgctcgcaatatgagtgcgttcccagacagctcgcatgtgaccaggttcaagatcctgtgtgtgatacagatcatatggaacacaataacttgtgcactctgtatcagcggggtaaaagtctgtcctataagggcccatgccagccattctgccgggccaccgaacctgtgtgcggtcacaacggcgaaacttatagcagcgtctgtgctgcctactccgatcgggtggccgtagattactacggcgattgtcaggccgttggcgtcctgtctgagcacagctccgtggctgaatgcgcttccgtgaagtgtccgtccctgttagccgccggctgcaaacccattataccccctggagcttgttgtccactgtgcgccggcatgcttcgcgtcctctttgataaagagaagcttgacactattgccaaggtgaccaacaaaaagccaattaccgtcttggaaatccttcagaagattaggatgcacgtgtctgtcccccagtgtgacgtgtttggttatttctcgatagagtctgagatcgtgattcttattattcctgttgatcattatcccaaggctctgcagattgaagcctgtaataaggaggccgaaaaaattgaatctctaatcaattccgattctccgactttagcctcccatgtcccgctgtctgcgctgatcatctcacaggtgcaagtcagctcttcagtcccttcggccggcgttagggctagacccagctgccattctttgctgctgcccttaagcttggggctggctctgcacctcctctggacctacaactag

SEQ ID NO: 17171 - DNA, 735 bp, synthetic construct
  misc_feature 1..735: note = Description of Artificial Sequence: Synthetic coding sequence
  source 1..735: mol_type = other DNA
atgaaagagcgcagagctagtcagaagctcagttcaaaaagcataatggacccaaaccagaatgtgaagtgcaaaattgtagtggttggtgacagccaatgtggtaaaactgctcttttgcacgtgttcgctaaagattgcttccccgaaaactacgtgccaacagtgtttgaaaactacactgccagttttgagattgacactcagcgcatcgagttgtccctgtgggataccagtggaagtccttactacgataatgtcaggccgcttagctacccagattctgacgccgtgctgatttgtttcgacatcagccggcccgagaccctggatagcgtcctgaagaagtggaagggcgaaattcaagagttctgcccaaacaccaaaatgttgttggtgggatgtaagtctgacttgaggacagatgtttcgaccttagtcgagctttccaaccaccgccagacccccgttagctacgaccagggcgccaatatggctaaacagataggggccgccacctatatagagtgttcggcgctacaatctgaaaattcagtcagagatatattccatgtcgccaccctggcttgcgttaacaaaacaaacaaaaatgtgaaaaggaataaatcccagagagctactaaacgcatatctcatatgccatcccgccccgaactaagtgctgtagctacagatctgcggaaagacaaagccaaaagctgtacggtgatgtag

SEQ ID NO: 17172 - DNA, 735 bp, synthetic construct
  misc_feature 1..735: note = Description of Artificial Sequence: Synthetic coding sequence
  source 1..735: mol_type = other DNA
atgaaagagcggcgagcaagtcagaaactgtcttctaagtccatcatggatccaaaccaaaatgtgaaatgcaaaattgtggtagtcggggacagccagtgcggcaagacagctcttctccacgtgttcgccaaagattgctttccagagaactacgtgcctactgtctttgagaactatacagcatccttcgagatcgatacccagaggatcgagctgagtctatgggacacaagcggcagtccatattacgacaatgtgcgccctctgtcctatcccgactcagatgctgtgttgatctgtttcgatatcagccgccctgagaccttggactccgtcctcaagaaatggaaaggggaaatccaggagttttgccctaacactaaaatgctgctggtgggctgtaaatccgacctcagaaccgacgtctcaactttagtagaattgtctaatcatcggcagacccccgtttcttacgaccaaggagccaacatggctaagcaaattggcgctgccacttatatcgagtgttctgccctgcagtctgaaaactccgtgagagatatctttcatgttgccactctcgcatgcgtcaacaaaaccaacaagaacgtgaaacggaacaagagccagagggcgaccaagcggatatcccacatgccatcaaggcccgaactctccgcagtcgcaacggaccttagaaaggataaggccaagtcttgtacagtcatgtag

SEQ ID NO: 17173 - DNA, 348 bp, synthetic construct
  misc_feature 1..348: note = Description of Artificial Sequence: Synthetic coding sequence
  source 1..348: mol_type = other DNA
atgctcctcgttggctgtaaaagcgacctgcgaacggatgtaagcactctggtggagctgtcaaaccacagacagaccccagtgtcttacgaccagggtgccaatatggccaagcagattggggctgccacctatatcgaatgcagcgccctacagagcgagaatagcgttagggatattttccacgttgcaaccctggcttgtgtgaacaagactaataagaatgtcaaaagaaataagtctcagcgcgccacaaagcggataagtcatatgccaagccggcccgagctttcagcagtagcaactgatctccgcaaagacaaagccaagtcatgcactgtgatgtag

SEQ ID NO: 17174 - DNA, 351 bp, synthetic construct
  misc_feature 1..351: note = Description of Artificial Sequence: Synthetic coding sequence
  source 1..351: mol_type = other DNA
atgaaggaacgccgagcctcccagaaattaagctctaagtccatcatggatccgaatcagaatgtgaagtgtaagattgttgtggtaggagattcacagtgcggcaaaacggcccttcttcacgtctttgctaaagactgttttcctgaaaactacgtccctactgtgttcgagaattatactgctagttttgaaatcgatacacagcgcatcgagctcagcctatgggacacttctggttctccatactatgataatgtccggccactatcttaccccgattccgacgcagtactcatctgctttgacatcagtagacccgagactcttgactcggtcctaaagaagtag

SEQ ID NO: 17175 - DNA, 351 bp, synthetic construct
  misc_feature 1..351: note = Description of Artificial Sequence: Synthetic coding sequence
  source 1..351: mol_type = other DNA
atgaaagagagacgggcgtcccagaagttgtcgtcaaaatctatcatggatcctaatcagaatgtaaagtgtaagattgtggtcgtcggggactcacagtgcggtaagacagcactgctccacgtattcgcgaaggactgttttcctgaaaattatgtgccgactgtgtttgagaactataccgcctctttcgagatagacacccagcggatcgaactttcgctgtgggacacatctggctccccctattatgacaacgtccgtccccttagttacccagactcagatgcggtgctgatttgcttcgatatcagtcgtccggaaacactcgacagcgtgctcaaaaagtag

SEQ ID NO: 17176 - DNA, 615 bp, synthetic construct
  misc_feature 1..615: note = Description of Artificial Sequence: Synthetic coding sequence
  source 1..615: mol_type = other DNA
atggccgagcaggagcccactgctgaacagttggctcagattgcagcggagaatgaggaagatgagcattcagtgaactacaaacctcccgcgcagaaaagcatccaagaaatacaagagctcgacaaagacgacgagtccctgcgaaagtacaaagaagcactgctgggcagagtggccgtgtccgccgatccaaatgtgccaaacgtggtcgttacaggcttaacgctcgtatgttccagcgcacccggcccattggagctggacctgacgggggatctggagagtttcaaaaaacagagtttcgtgctgaaggagggagtcgagtatcgcattaagatttctttcagagtcaaccgcgaaattgtgtccggtatgaagtacatccagcacacataccgtaaaggcgtgaaaatcgacaagactgattacatggttggatcatacggacctcgtgcggaggaatacgagtttcttaccccggtagaggaagcacccaaaggtatgctggcacgggggtcctacagcatcaagtctagattcaccgatgatgataagaccgatcacctctcttgggagtggaatctgacaataaagaaggactggaaagattag

SEQ ID NO: 17177 - DNA, 537 bp, synthetic construct
  misc_feature 1..537: note = Description of Artificial Sequence: Synthetic coding sequence
  source 1..537: mol_type = other DNA
atggcagagcaggagcctacggcagaacagctggcccagatagcggcagagaatgaagaggatgagcattccgtaaattataaaccacccgcgcagaagagcatccaagagatccaggaactggataaagacgacgaatctctccggaagtataaggaggccctgctcgggagggtcgcagtctccgccgatccaaacgtacctaatgtggtggtcaccggactgaccttggtctgctctagtgcccctggccctctggagttagatctgacaggggacctcgaatccttcaagaaacaaagcttcgtccttaaagagggcgtggaatacagaataaagattagcttcagagtgaaccgagaaatagtttctggaatgaaatacatccaacatacttaccgcaagggcgtaaagattgataaaaccgactacatggtgggctcctatagcatcaagtcgcggttcaccgacgacgataagaccgatcatctgtcctgggaatggaatttaactatcaagaaggactggaaggactag

SEQ ID NO: 17178 - DNA, 615 bp, synthetic construct
  misc_feature 1..615: note = Description of Artificial Sequence: Synthetic coding sequence
  source 1..615: mol_type = other DNA
atggcagagcaggagcccaccgctgaacagctggcacagatcgcagccgagaatgaggaggacgaacatagtgtcaattacaagccaccagcacaaaagtctattcaggagatccaggaactggataaggacgatgagagcctccggaaatacaaggaggcactcttggggagagtcgccgtgtcagctgatcctaatgtgccgaacgtcgtggtaactggtcttacgcttgtgtgttcctctgccccgggccccctagagctcgacctcaccggggacctcgagtcttttaaaaaacagtcttttgtacttaaggaaggcgtggagtatagaattaagattagctttcgggtcaatcgcgagattgtgtccggcatgaaatacattcagcacacctatcggaaaggcgtcaagatagacaagacagattatatggtgggttcctatgggccccgggcagaagaatatgagttcttaactccggtcgaagaggccccgaaggggatgctcgctcgcggttcctactcaattaaaagcagattcaccgacgatgacaagactgaccatctgtcttgggagtggaacttaacaattaaaaaggactggaaggactag

SEQ ID NO: 17179 - DNA, 3576 bp, synthetic construct
  misc_feature 1..3576: note = Description of Artificial Sequence: Synthetic coding sequence
  source 1..3576: mol_type = other DNA
atggaagcgatgtccccacagcaggaaactttggggggacagcctggtcgctccagctctctcacaggggtctctaggcttgccggtggctcctgcaccaagaagaagatgaaaaccctcgcagagcgtaggcggtccgctccaagcctgatactggacaaggccttgcagaaacgacccacaactagagactctccatcagcaagtgtggatacctgtacttttctgtcctccctggtatgctccaatcgcacattactgattgatggacgagcagaactgaagagaggcctgcagcgccaggaacgccatttgtttctcttcaatgacttgtttgtggtagcaaagattaagtacaataacaacttcaaaattaaaaataaaattaagctgacggacatgtggacggctagctgcgtcgacgaagtcggggagggaaataccaacgctatgaaatcctttgtgctgggatggcctacagtcaatttcgtggccactttttcatctccagaacagaaagataagtggctgtctctgcttcagaggtatataaatctcgagaaagagaaggactaccctaaatccattccactgaagattttcgcaaaggacatcggcaattgcgcttatagtaaaacaataacggtgatgaatagtgacaccgctaacgaagtgattaacatgagtctccccatgctcggaattactggaagtgaacgagactaccagctgtgggtgaacagtggcaaagaagaagccccttatcccctaattggccacgagtacccttacgggatcaaaatgtcccatctacgggactcagctctccttacccccgggagtaaggattctactacgcctttcaacctgcaggaacccttcctgatggagcagctcccgagggagatgcagtgtcagttcatactgaagccctctaggctggctgcggctcagcaactctccgatagcgggcacaaaaccttcaaaaggcgacgtagtattataaactgggccttctggaggggctcatcaacgcatctcgacaacctgccttctagtcccactagtccaatgccaggacagctcttcggaatatccctgcccaatatctgcgaaaatgacaatctgccgaagccggttctggatatgctgttcttcctgaaccagaagggccccctgaccaaaggcatctttaggcagtcggctaacgtcaagagctgccgggagctgaaggaaaaactgaattctggagttgaggttcaccttgactgtgaatctatcttcgtcattgccagtgttcttaaagattttctgcgcaacattccggggtccatatttagctccgacttgtacgaccactgggtcagcgtgatggatcagggcaacgacgaagaaaaaatcaataccgtgcaaagacttctggatcagttacctcgtgccaatgttgttttactgagatacctcttcggggttcttcataacatcgagcagcacagcagttcaaatcagatgaccgccttcaatctcgccgtttgcgtggctccctctattctgtggcctccagcctcctccagtcctgagctggaaaatgagtttactaaaaaggtaagtctcctcatccagtttttaatcgaaaattgtctgcggattttcggagaagaaataaccagcctgttcagagaggtgtccgttagatgtgatacgagggaaaatgcaagtgacatctcttgcttccaactgaatgatagctcctatgactcactggagaacgaactgaacgaagacgtcgacgcaccctgttcagatcttgttaaaaagttggggcaagggagccggtcgatggactctgtgttaacactcagtgattatgatctggaccagccagaggtggagggcctgcttaccctttcagactttgaccttgcccactctaaggacgaggatgttcaaatgaaaagaccactagaatctaagcccgtgaatatcttagtttacactaaaattcctttaagagatcacgcccgtgccccatccgccatgtgcacaccctcgtacctgtccacagcagcagccaacgcagcgaaaagtctccgtaggcataggcgctgtagcgaaccgtctatagactacctggattccaagctcagttatctgcgggaattctatcaaaagaagttgcggaagtcatcctgcgacgctatactgtcccagaaagatgaagactacctgaagcagaaccagcccctgcaggaggaaggaaagacatgctttaagcagtccttggtgacggggaccgatgtatctaagaagaacgctaccactcagaacaccaaaaagaagagcctgtccggctccgagggaaatcacgtcaagctttttcccaagagcaagccagtagctatttccgtggctagctattcacccatgtctagtcaggatcacagtaaaaaccagccttttgatgtcaacacatcgggatattccccaccgcacacagccgacgctcttaagggacctcgaactcatagaagatgttctgaacctaatattgaggaccagaacaggaagctgacatacctgagaggtatctattccaaaaagcaacacaagacgtcatgcgaagcagggctgttgcacggcgaggaggattatctgaaaaggcataagtctcttcagatggagggccagaagctgataaatcagtccctggtgatgggcattgaggttggcaagagttcggctaccaaccagaatactgagaaagttctccctcctagactgaacctctgccctaggaccagctatagctcactgagctcgcctgggacatctccatctggttctagcgtgtcttcacaggatagcgcatttagccagataagcgaacactcagtttttacacctacagagacctcatcgccgatcgactgtaccttccaggcacagcggaagagggaagatctgagccctgacttttctaacgcctcgcacgtgagcggcatgcccgggccaagtagcggccaggcctgcagccgcccagcttataccaaaaaggatacaatggagtggcattcccagatgcattccgttacgcttcacccttcaacatggctcaggaacggcgtggcttcccttaaaaattggagcctaaaaaagaaggccaaagcagcccgccctgaggaagagaagatagcctctccaaagggacccctggagccgcctcctcacgcttccggcgtgcctgaggcgaatagcctgcaggaggagcagaaagatttgcccctgagagccgccgaggggctgagtccagttcaatccgcccagcgctgttcctcaagtccattccaggactccgagcgccattgttcttccccgttctccctggttgaaagtagactcaagctctgcatgaaatcccacgaggaaattgagccagggagtcagtcttccagtggctccctgccatgggaacgggcctccgcttcctcatggaccctggaagacgcaacctctcctgactcaggtccaaccgtggtatgcgatatcgaggacagatacttgactaaggacatttag

SEQ ID NO: 17180 - DNA, 3498 bp, synthetic construct
  misc_feature 1..3498: note = Description of Artificial Sequence: Synthetic coding sequence
  source 1..3498: mol_type = other DNA
atgactttctggatcatcattaataagaagatgaaaactcttgcagaacgacgacgcagcgcccccagcctgatactcgacaaggccctacagaaaaggccaaccacacgcgattcacctagcgcaagcgtggatacctgcactttccttagttcgctggtatgttctaaccgcaccttactgattgacgggagggcggaattgaaacgcggcctgcagagacaggagaggcacctgtttttgtttaatgatctgttcgtggttgcgaagatcaaatacaataataactttaagattaagaacaaaatcaaattgactgacatgtggactgccagctgtgtggacgaggtgggcgagggcaataccaacgcaatgaaatcattcgtgctggggtggcccacagtgaattttgtggccactttttcctcgcctgaacaaaaggacaagtggctgtctctgctacaacggtacattaatctcgagaaggagaaagactatccaaaaagcatcccactgaaaatcttcgccaaggatatcggcaactgcgcatattctaagaccatcactgtcatgaatagtgatacggctaacgaagtcattaacatgagcctgcctatgctgggaattaccggatccgaaagggactatcagctgtgggtaaactcaggaaaagaagaggccccttatccactgatcggacatgagtatccctacgggatcaagatgtcacaccttagagactcagcactcctgactcctggcagtaaagattccactacccccttcaacttgcaggaaccttttctgatggaacaattaccaagagaaatgcagtgccagttcattctcaagcccagtagattggctgccgcacaacagctgtctgactctggtcacaagacattcaaaagaagaagaagcatcattaattgggctttctggcgggggtcttccacccaccttgacaacctaccttcctcgcctacaagtccgatgccaggccagttgtttgggatatccttacccaacatctgcgaaaatgataatctaccaaagccagtgctcgatatgctcttctttttgaaccagaaagggcctttgacgaaggggatttttaggcaatcggctaatgtcaagtcctgcagagaactgaaagaaaaactgaatagcggtgtggaggtccacttggactgtgaatccatcttcgtgattgccagcgtgcttaaagacttcttaaggaatatccccggtagcatcttttctagcgatctttatgatcactgggtaagtgtcatggatcaggggaatgatgaggagaagataaatacagttcagaggttactagaccagctccctcgggccaacgtggtgctcctgagataccttttcggagtgctgcacaatatcgaacagcatagttcctcgaatcagatgactgcctttaatctggctgtgtgcgttgcacccagcatcttatggcccccggcaagtagtagtccggaactggagaatgaatttaccaagaaggtttctctcctcatccaatttcttatagagaattgtctgaggatattcggagaggagatcacgagtttgtttcgcgaagtgtctgtccgatgtgatactcgagagaacgcaagtgatatatcctgcttccagctaaacgatagtagctacgactcactggagaacgaactgaatgaagacgttgacgccccatgctctgacttggtgaagaaacttggccagggtagtagaagtatggattctgtgttgacactctctgactacgacttggaccagcctgaagttgaggggctgcttacactgagcgatttcgacctagcccattcaaaggacgaggacgtgcaaatgaagcgcccgttagagagcaagccagtgaacattctggtgtatactaagataccgctacgagatcatgccagagccccgtccgccatgtgcacgccatcctaccttagcactgctgcagcaaatgcggcaaaaagcctgcgcaggcaccgcagatgctctgaaccaagcatagattatctcgacagcaaactgagctatttgagagaattctaccagaaaaaactgcgaaaatcttcttgtgacgcaattctgagtcagaaagatgaggattacctaaagcagaaccagccactccaggaggagggcaaaacctgctttaagcagagcctggtgacagggacagacgtgtcaaagaagaatgctacaacccaaaacactaaaaagaagtcactgagcggcagtgagggcaatcatgtgaaactgtttccgaagtcaaagccagtcgccatttcagtggcaagttattcacccatgtcttcacaagaccacagtaagaaccagccgtttgatgtgaacacctctggttactcccccccacacactgcagacgcactcaagggcccacgtacccatcgacgttgctccgagcccaacatcgaagatcaaaaccgtaagctgacgtatctgcgtggcatatacagtaaaaagcagcacaagacatcctgcgaagcgggcctcctgcacggagaggaggactatctgaagcgtcataagagcttacaaatggaagggcagaaattgatcaatcagtccctggttatgggaatcgaggtgggcaaatccagcgctactaaccagaacacagaaaaagtgttgcctcctagactcaacctgtgtccacgcacctcctacagttcgctaagctctcccggtacatcaccatcaggaagcagcgtatcctcgcaagatagcgccttcagccagatttcagagcactcggtattcacacctactgaaacttctagccctattgactgtacattccaggcacagaggaaacgggaggacctgtcaccagacttttctaatgcttctcacgtttccggcatgccggggccttccagcggccaagcttgcagcagacccgcgtatactaagaaagacaccatggaatggcatagtcagatgcactccgtaactctccacccaagtacatggctgaggaacggcgtggcctctctcaaaaattggtctctgaaaaaaaaggccaaggccgcgaggcccgaggaggaaaagatcgcttcacccaagggtcctctagagccccccccccacgcgagcggggtgcccgaggcaaattccttgcaagaggagcagaaagacttgcctcttcgagcagcggaggggttaagcccggtccaaagcgcccaacgctgctcatcttcccctttccaggactccgagcggcactgcagtagtccattcagcctggtagagtctcgtttgaaactgtgcatgaagtcccacgaggaaatcgagccaggctctcagtcttcaagtggatcattgccctgggaaagagcaagcgcatcaagctggacccttgaggatgccacaagccctgatagcgggcccacggtggtttgtgacatcgaggaccgctatctgactaaagatatctag

SEQ ID NO: 17181 - DNA, 3507 bp, synthetic construct
  misc_feature 1..3507: note = Description of Artificial Sequence: Synthetic coding sequence
  source 1..3507: mol_type = other DNA
atgagcgccagagagcgtcaaccagccctcaaaaaaaaaatgaagacactcgctgagcgacggaggtctgctcctagtcttatcctggacaaggctctacagaaacgaccgactacacgcgattcaccctccgcctcggtagacacatgcacgtttctcagtagtctggtgtgctctaatcggacactgctgattgacggaagggctgaacttaagcggggacttcaaagacaggaacgtcacctctttctgttcaatgacctgtttgtcgtagctaagatcaagtacaataataatttcaaaatcaagaacaaaataaaactgacagacatgtggacggctagttgcgtggatgaagttggcgaaggaaatacaaacgcaatgaagtcctttgtccttggctggccaacggttaatttcgttgcaacattctcttctcccgaacagaaagacaagtggctgagcctcctgcagaggtatatcaatcttgaaaaggagaaggattacccaaaaagtatccccctcaagatctttgcaaaagatatcgggaactgtgcctacagtaagactataactgtgatgaatagcgacacggctaatgaagtgatcaacatgagcctcccaatgctcggaattactgggtcagaacgagattaccagctctgggtgaattcaggaaaagaggaagccccctatccactgattgggcacgagtacccatatgggataaagatgagtcacttgagagattccgctctgctgacccctgggtctaaggactctacaacaccctttaacctgcaggagccattcttgatggagcagctccccagggagatgcagtgtcagttcatcctcaaaccgagcaggctggcagcggcgcaacaactaagtgacagcggccacaaaactttcaaacggcgccgttctatcattaactgggccttctggagagggagcagtacgcacctggataatctgccaagctcgccaacctctcccatgcccggtcagctgtttggtatttctttgcccaacatctgtgaaaacgataatttgccaaagcccgtgctcgacatgctgtttttcctcaaccagaaaggtcccctgaccaagggcatctttcggcagtctgctaatgtcaaatcctgccgcgagttgaaggagaagttgaatagtggagtagaggttcatctggattgtgaatccatctttgtcatcgcctcagtgttgaaggatttcctcaggaacattccagggtccattttctcttccgatctatacgaccattgggtttcagtcatggatcagggtaatgacgaagaaaagataaatactgtgcagagactcctggaccagcttccaagagccaacgtggtgcttttgcggtacttgtttggagtgctgcacaacatcgagcaacacagtagctctaatcagatgacagctttcaatcttgccgtctgcgtcgcaccttctatcttgtggccccctgcttcttcatcacctgaactggaaaatgaattcactaaaaaagtttcattactcatccagttcctgattgaaaactgtttaagaatctttggtgaggagatcacatccctgttcagagaggtcagcgtgcgatgtgataccagagaaaacgccagcgatattagctgtttccagctcaacgatagttcgtatgattctctcgagaacgagttgaatgaagacgttgacgccccctgctccgatctggtgaagaagctggggcagggctctcggtctatggatagcgtcctgactttatctgactatgacctggatcagcccgaggtggaaggcctcctgaccctctctgactttgatctggctcactctaaggatgaggacgtccagatgaagagacccctggaatccaaacccgttaacatcctggtgtataccaagatccccctgagggaccacgccagagctccaagtgccatgtgtaccccatcttacctgagtacagcagccgcaaatgcggccaaatccctccgacgtcaccggaggtgctccgaaccatccatagattatctcgacagcaaattgagctatttaagggagttttatcagaagaaactgcgcaaatccagctgtgacgccatcctgtcacagaaagatgaagattaccttaaacaaaatcagcctctgcaggaggaaggcaaaacttgctttaaacagagcctggtgactggcaccgatgtaagtaaaaaaaacgctacaacccaaaacaccaaaaaaaagagtttgtcagggtcagaaggtaaccacgtgaaactgttccccaagtctaagcctgtggccatcagcgtggcgtcctacagtcccatgagctctcaggaccactctaaaaaccagcctttcgacgtcaatacaagtggttacagccctccacatactgccgacgctctgaaaggtcctcgcactcatcggagatgctctgaacctaatatcgaggaccagaatcggaagctgacatatctgcggggaatttactctaagaaacagcataaaacatcatgtgaagctggcctactgcatggagaggaggattatctcaaacgccataaatctttgcaaatggaaggacagaagttaattaaccagagcctggtgatggggatcgaagtcggaaaatccagcgcgacgaaccagaacaccgaaaaggttctgccgccccgactgaacttgtgtccacgcacatcatacagctcactgtctagcccaggtacaagtccttccggatcgtctgtttcatctcaagattcagcctttagccaaatctccgagcatagcgtgtttactcccactgaaaccagcagcccaatcgactgcaccttccaggcccagcgcaagcgagaagatctgtcaccagacttttccaatgccagccatgtcagtggcatgcctgggccaagttctggacaggcctgctccagacctgcctacacaaagaaagacaccatggagtggcactcccagatgcactcggtcacactgcacccttccacctggctgcgcaacggagtcgcttctctgaaaaactggtccctgaaaaaaaaggccaaagcagcccggcctgaggaggagaaaatcgcctctccaaagggccccctggagccaccaccgcatgctagtggcgttccggaagccaattctttgcaagaggagcagaaggatctacccctgagagctgcagaaggactatctccagtgcagtcagcccagagatgctcttccagtccattccaggatagcgaaagacactgtagttccccattctcgcttgtcgagagtaggcttaagctgtgtatgaagtcacatgaggagatcgaaccagggtcacagtcttcgtccggctcactgccttgggagagggcttctgcatcaagctggacactcgaagatgctactagccccgacagcggtcctaccgtcgtgtgtgacattgaggatcgatatcttacaaaagatatctag

SEQ ID NO: 17182 - DNA, 3468 bp, synthetic construct
  misc_feature 1..3468: note = Description of Artificial Sequence: Synthetic coding sequence
  source 1..3468: mol_type = other DNA
atgaagacactagctgaaagaaggaggtctgctccgagcctcatcctcgataaagcactccaaaaacggcccacaactagagattctccaagcgcctcagtcgatacttgtaccttcctctcatcactggtgtgcagcaatcgcacccttctgattgatggccgtgctgagcttaaaaggggcctgcagagacaggaacgacatctcttcctcttcaacgacctgttcgttgtggccaagatcaaatacaacaataactttaagatcaaaaacaaaatcaaactgaccgacatgtggactgccagctgtgtggatgaggtgggagaaggaaacacaaatgcaatgaaaagctttgtacttggctggcctacagtgaatttcgttgcaacctttagtagtcccgagcaaaaagataagtggctaagcttgctgcaacgatacatcaatttagagaaagaaaaagactatcccaagagtatacccctcaaaatcttcgcaaaagatataggaaattgtgcatatagcaagactataacagtgatgaacagtgatactgcaaatgaggttattaacatgtcattgcctatgctgggcatcactgggtccgagcgcgactaccagttatgggtgaactcgggtaaggaagaggccccctaccctctgattgggcatgagtatccatacggaattaagatgtcacatcttcgcgacagtgccctgcttaccccaggttcaaaagattccactacccccttcaatcttcaggagccttttttaatggaacagctgcctagggaaatgcaatgccagttcatcctcaaaccctccaggctggcggcagcccagcagctttccgattctgggcacaagactttcaagcggcggagatcaatcatcaattgggctttttggaggggaagcagcacacacctggacaacttgccaagttccccaacttcacctatgccaggccagttgttcggaatttctctgcctaacatctgcgaaaacgacaatctgcctaagcccgtgttggatatgttattttttttaaaccagaagggtcccctaactaagggaatattcaggcagagcgccaatgttaagtcatgtagggagctaaaggaaaaattgaattctggggtcgaagtacacctcgactgcgaatccatctttgtgattgcttcagtgctgaaggatttcctgcgaaatatccctggaagcattttctcctcagacttatatgatcattgggtgtcggtgatggaccagggaaatgatgaagagaagatcaatacagtgcagaggctgttagatcaactgcctagagctaacgttgttctgctcagatatctgttcggtgtactacacaacatcgagcagcactcatcctccaaccagatgaccgccttcaacctggcggtatgcgtggccccatctattctctggccccccgctagtagctcacctgaactggaaaatgaattcaccaagaaagtgagtctccttatccaatttctcatagagaactgtctccgaatattcggcgaggagattaccagcctgtttagggaggtctcagtgaggtgtgacacacgagagaacgcctctgacatcagctgttttcagcttaacgactcttcttatgactcattggagaatgagcttaatgaagatgtggacgctccttgcagtgacctcgttaaaaagctgggccagggctccaggtcaatggattctgtactgacactctcagattatgatctggaccagccagaggttgaaggcctattaaccctgagcgacttcgatcttgcccactctaaggatgaggacgtacagatgaagcgccccctcgaatcaaaacccgttaacattttggtttatacgaagatccctctgcgggaccacgcccgagctccatcagctatgtgtaccccctcatacctgtccacagctgctgccaacgccgccaagtctttgcggcgccaccgacgttgcagtgagcctagtattgactacctggacagtaagttgtcttacctgcgcgaattctaccaaaaaaaactgcgcaagtcttcatgcgacgctattctctcgcagaaagatgaagattatctgaagcagaaccaaccactgcaggaagagggaaaaacatgttttaaacaaagtctggttactggcacggacgtcagtaagaaaaacgccactacccagaacaccaaaaagaagtctcttagcgggagtgaaggaaaccacgtaaagttattcccgaaaagtaaacccgtagctattagcgtagcatcttactcccccatgtcttcgcaagatcacagtaaaaaccagccttttgacgtcaacacatccggatattcccctcctcatactgcggatgctttgaaaggcccccgcactcaccgccgttgctctgaacctaacattgaggatcagaaccgaaagctgacgtatttacggggaatctatagtaagaaacagcataaaacaagttgtgaggccggactgctccacggcgaggaggattaccttaagagacacaagtccctgcagatggaggggcagaagctcatcaaccagtccttggttatgggcattgaagtcggtaaatcctcagctacaaaccaaaatacagaaaaggtcctgccgccacgtctgaacttatgcccgcgcacatcctatagctcactatcttcccctgggacgtctccgtccggtagttccgtgtcctcccaggatagcgcattctctcaaatttctgagcactcagtcttcacaccaacagaaactagctccccaatagactgcacatttcaggcccagagaaagcgggaagatctgtcccctgacttttcaaacgctagtcacgtgtccgggatgcctgggccatcgtcaggacaagcatgctcaagaccggcgtacaccaaaaaggacacaatggagtggcactcacagatgcattctgtgaccttgcaccctagtacatggctgagaaacggcgtggcgtcactcaagaattggagtctcaagaaaaaggcaaaagcagcccggccagaagaagaaaagattgccagtccaaaaggccccctagagccccctccccatgcatctggcgtgcccgaggctaacagccttcaggaagaacagaaagacctcccattgcgggctgcagaggggctgtcacccgtgcagagcgctcagcgttgcagttcatctccattccaggactctgagcggcactgctcaagcccattctctctggtggaatctagactcaagttatgcatgaagagtcatgaagaaatcgaacctggaagccaaagcagttctggaagcttaccttgggaacgggcttctgcctcatcctggactttggaggatgcaacgagcccagattcaggtcccacagtggtctgcgatatcgaggaccgctatttgaccaaagatatatag

SEQ ID NO: 17183 - DNA, 3468 bp, synthetic construct
  misc_feature 1..3468: note = Description of Artificial Sequence: Synthetic coding sequence
  source 1..3468: mol_type = other DNA
atgaaaaccctggccgagcgtcgcaggtctgctcccagtctgatactggataaggccctgcagaaaagaccaaccacaagagactctccttccgcctcagtagacacgtgtaccttcctgtcttcgctggtttgttcaaatagaactctgcttatagatgggcgggccgagctcaagcggggtttgcaaaggcaggagagacacctgttcttgttcaatgacttgtttgttgtcgctaagattaaatataacaacaattttaaaatcaagaacaagatcaaacttactgatatgtggactgccagctgtgtcgacgaagttggggagggtaatacaaatgcaatgaagtcatttgtcctgggatggcctaccgtgaatttcgtggccactttttcgagcccagagcagaaggacaaatggctgagcttgctgcagaggtacatcaacttggaaaaagaaaaggattatcctaaaagcattccccttaaaatcttcgccaaagatattggaaactgcgcatacagcaaaactattaccgtgatgaatagtgataccgccaatgaagtgattaatatgagcctgcccatgctcggcatcactggttctgaacgggattaccaactttgggtcaatagtggtaaagaggaagctccttacccactcattgggcacgagtacccctatgggatcaaaatgtcccatctgagggattcagccttacttacacccgggtctaaggacagcaccacgccatttaatctgcaggaaccctttcttatggaacagctgccccgggagatgcagtgccagtttattttgaaaccctcaaggctcgccgccgcccagcagctgagtgacagcggccataaaacattcaagcgaaggagaagtattatcaactgggctttctggcggggcagctccacccacctggataatcttccttcttcccccacttcccccatgcccggccagctatttggcatcagtctgcccaacatctgcgagaacgacaacttaccaaagccagtgctggatatgctcttttttcttaaccagaaggggcccctgaccaagggcattttccgccagtctgccaatgtgaaaagctgcagggagctcaaagaaaaacttaactccggggttgaggtccacttagattgcgagtctatcttcgtgattgcctctgttctgaaagactttcttagaaatataccagggtcaatcttttcaagcgacttgtatgatcactgggtttccgttatggaccagggcaacgacgaggagaaaatcaacacggtgcaacgcctgttggaccaactgccaagagcgaatgtggtccttcttcggtatctgttcggtgtgctgcacaatatagagcagcattcctcttcgaatcaaatgacggcgttcaatctcgcagtgtgcgttgccccatcgatcctgtggcccccagcttcatccagccctgagctcgaaaacgagttcaccaaaaaggtgagtctgcttatacagttcctcatcgaaaactgcctccgtatcttcggtgaggaaatcacctcactcttccgtgaagtctccgtacgctgcgacacccgtgaaaatgctagcgatattagctgcttccagctcaatgactctagttatgattccctggaaaacgagctgaatgaggacgtggatgctccttgctccgacctcgtcaagaagctggggcaggggagcagatccatggacagcgtcctgaccctgagcgactacgatctcgatcagcctgaagtagagggtttgcttacgctttccgatttcgacttggcacactctaaggatgaagacgtgcagatgaaaaggccactggagtcgaaacctgtgaacattctcgtctacactaaaatccctctaagagatcatgctagagcgccgagcgctatgtgcaccccatcttatctcagtaccgccgcagctaatgccgccaagtctttgcgtagacataggcgctgcagcgagccctccatcgactatttagatagtaagctctcctacctacgcgagttctaccaaaagaagttgcgcaagtcaagttgtgacgcaatcctttcacagaaggacgaagactatttgaaacagaatcagcctctgcaggaagaaggcaaaacttgttttaaacaaagtctggtcaccggcaccgacgttagcaagaagaacgcgacgacccagaataccaagaagaagtcactgagcgggtccgaaggtaaccacgtgaagctgttccctaagagcaaacctgtcgctatctcagttgctagctattctcccatgtcaagtcaagatcactccaagaatcagccctttgacgtcaatacctccggatactcaccaccgcacacagcggacgctctgaagggcccccggacgcacagacgttgctctgagcccaacatcgaggaccaaaacaggaagctgacatatctgcgcggcatctacagcaagaaacagcacaagacctcctgtgaggccggcttgctgcacggagaagaagactatctgaagcgccacaaatccttacagatggagggtcaaaagctaattaaccagagcctggtaatggggatcgaggtggggaagtccagtgccactaaccaaaacactgagaaggtgctccccccacgtctgaacctgtgtcctcggacttcctatagcagccttagctcacccggtacttctccctccgggagtagcgtgtctagtcaggatagtgcgttctctcagataagcgagcatagtgtgtttacaccaactgaaacatcctctcctatagattgcacattccaggcacagcgcaagcgcgaagatctgtcacccgacttcagcaatgcctcacacgttagtggcatgcccggcccaagtagcggccaggcttgctctcggcccgcctataccaagaaggacaccatggagtggcacagtcagatgcattctgtcacgctgcatccatccacgtggttgcgtaacggcgtggccagcctcaaaaactggagtctgaagaaaaaggccaaagctgcacgcccagaggaggaaaagatagcctctcccaaaggacctctggaaccacctccacacgcatcaggggtgccggaggccaactcactgcaagaagagcaaaaggatctgccacttcgtgctgccgagggtttgtctccagtgcagtccgctcagcgctgttcgtcatctccatttcaagactctgagcgccactgttcctccccttttagcctcgtggaaagtcggcttaagttgtgtatgaaaagtcacgaggaaatagagcccggaagccagtccagctctggctcccttccttgggagagagcctccgccagcagctggactctcgaggatgcgacctccccagatagtggccctaccgtcgtgtgtgacatagaggaccgctatctgactaaggatatctag

SEQ ID NO: 17184 - DNA, 2196 bp, synthetic construct
  misc_feature 1..2196: note = Description of Artificial Sequence: Synthetic coding sequence
  source 1..2196: mol_type = other DNA
atggaccagggcaatgatgaggaaaaaataaacacagtacagcgcctgctggatcagcttcctagagctaatgtcgtgctcttgagatatctgtttggagtactacacaatatcgaacagcacagttcttctaaccagatgaccgcctttaatctggcggtgtgcgtcgctccttccatcctgtggccgccagcctcctcaagccccgaactggaaaacgaattcaccaaaaaagttagccttctgattcaattcttgatagaaaattgtcttcggatttttggggaagaaattaccagcctttttagagaagtgagcgtccgctgcgacacaagagagaacgcaagtgatatcagctgctttcaattgaatgattcctcgtacgacagcctggagaatgagttaaatgaagacgtggacgccccctgttccgacctcgtgaagaagctcggccagggatcgcggtccatggattcagtgttaactctgagcgactacgatctggatcaacctgaagtagagggcctgctcactctgtccgactttgatcttgctcattccaaggacgaagatgtccaaatgaagcggccacttgagagcaaaccggttaatatactcgtctacactaagatacctctgcgggatcacgctcgggcgccatcagccatgtgcactccatcctatctatctaccgccgctgccaacgccgccaagagtctgaggagacataggcgttgctccgagccctcaatcgattaccttgatagtaagctgtcatatctacgcgaattctaccagaagaagctgcgcaaatctagttgtgacgccattctgtcgcaaaaggacgaggactatctcaaacagaatcagcccctgcaagaggagggcaagacctgcttcaaacagagtctggtcacaggcacggatgtgagcaagaagaacgctactactcaaaataccaagaagaagtcactctccggaagcgagggaaaccatgtgaaattatttcccaagtcgaaacccgtggctatctccgtcgcgtcttatagcccaatgagctcccaggaccacagtaagaatcaaccattcgacgtgaataccagcggatattcacctccgcatacggccgacgcactcaagggccctcggacacaccgccgctgttctgagccaaatatcgaagatcagaatcgcaagctgacgtatttgcggggaatctatagtaagaaacaacataaaaccagttgtgaagcgggcctgctgcatggagaagaggactacctgaagcgacataaatcactccagatggaaggacaaaagctgatcaaccagtccctggtcatgggaattgaggtgggaaagtccagcgctaccaatcaaaacacggagaaggtgctgccaccccggctgaatctctgccctagaacgtcttactcctcccttagttctccgggcacttctcccagcggatcatcagtgtcctctcaggacagcgcgttttcacagatatcagagcacagtgtattcactccaaccgaaacctcatccccgatcgattgcaccttccaggctcagcgtaaaagagaggacctgtccccagactttagcaatgctagccatgtcagcgggatgcctggcccaagctcaggtcaggcctgcagccgacccgcttatacaaagaaggatacaatggaatggcattcccagatgcactcagttacgctgcatccatctacttggctgaggaacggcgtagccagtctgaagaactggtcccttaaaaagaaagctaaggctgctcgccctgaggaagagaagatcgcaagcccaaaggggccattggaaccccccccacacgctagtggcgtgccagaggcaaactctctgcaagaggagcagaaagatttgccccttcgggccgccgaaggacttagtcctgtccagtcagcacagagatgctcctcttccccattccaggatagcgagaggcactgctcaagtcctttctctttagttgagagtcggctcaagttgtgcatgaagtcccatgaggaaatcgaacctggctcacagagctcgagtggcagcctgccctgggaacgagcaagtgctagcagctggacgctggaggatgctacatctccggactcaggacccacagtggtatgcgacattgaagaccggaactgctgttag

SEQ ID NO: 17185 - DNA, 3498 bp, synthetic construct
  misc_feature 1..3498: note = Description of Artificial Sequence: Synthetic coding sequence
  source 1..3498: mol_type = other DNA
atgaccttttggatcatcatcaacaagaaaatgaagaccctggcggagcgcaggcgctcagcgcctagtctgatattggacaaagccctccaaaagaggcctactacgagggactctcccagcgccagcgtggacacctgcacattcttgtcctcactggtctgtagtaaccgcactctcctcattgacggaagagccgaactcaagaggggactccaacggcaggagaggcacctgtttttgtttaacgatctgtttgtggtcgccaaaatcaagtataacaacaactttaaaataaagaacaaaatcaaactgaccgacatgtggacagccagctgcgtcgatgaagtaggcgaaggcaatacgaacgcaatgaagagcttcgtacttggctggcccacagtaaactttgtggccacattttcaagccctgaacagaaagacaaatggttgagtctattgcagcgctatatcaatctggagaaagagaaagattaccctaaatccatacccctgaaaatcttcgcaaaagacattggcaactgtgcctacagtaaaaccatcactgttatgaatagcgatacagccaacgaggtgattaatatgagccttcctatgttgggcatcactgggtccgaaagggattaccagttgtgggtgaactcaggcaaggaggaggccccatacccactgatcggacatgagtatccctacggcattaagatgagtcatctgagggattctgcacttctcaccccgggaagcaaagactctacaactccctttaacctgcaggagccatttcttatggaacagctgccaagggaaatgcaatgccagttcattctgaaacctagccgactggccgccgctcagcagctcagtgactctggacataagacgtttaagcgtaggagaagcatcatcaactgggccttttggcgcggctcgtccacgcatcttgacaatcttccaagtagccctacctcccccatgcctgggcaactgtttgggattagcttgcccaacatctgcgaaaatgataatcttccgaagcctgtgctggacatgctgttcttcctgaaccagaaagggcctctgacaaaaggaatatttcgtcagagcgccaatgttaaaagctgtagggagttaaaagaaaaactcaactccggtgtggaagtccatctcgactgtgagagcattttcgtgatcgcctccgtgctgaaagatttcttaagaaacatcccagggtcaatcttcagttccgacctatacgaccattgggtgtccgtcatggaccagggcaatgacgaagagaagatcaataccgtccagcgtctattggaccagctccctcgcgccaacgttgtgctcctgcggtatctgttcggggtgctgcacaacattgagcagcatagcagtagtaatcagatgactgcttttaatctggcggtctgtgttgcgccgtccattctttggccacccgcctccagttcacctgagcttgaaaacgaatttactaagaaagtgagcttgctgatccagttccttattgagaactgcctgcgaatttttggggaagagataacctccctgttccgtgaagtctctgtacgctgcgatacccgcgagaacgctagtgacatttcctgttttcagcttaatgattcctcttatgatagtcttgagaacgagctgaacgaggatgtcgatgcgccctgctcagacctggttaaaaaactcggtcagggcagcagatctatggacagtgtgctaacactgtcagactacgaccttgatcagcccgaagttgaggggctgttgactcttagcgactttgacctggcacacagcaaggacgaggatgtgcagatgaaacggccactggaaagtaagcctgttaatatcctggtgtataccaaaattccccttagggatcatgcacgtgctccctccgcgatgtgcacaccatcctacctttcaacagccgctgctaatgcagctaagtctctgagaaggcaccgccgttgcagcgaaccttcaatcgattatttagatagcaaactgtcgtacctcagagagttctaccagaagaaattacggaagagctcatgtgatgccatcctcagccaaaaggacgaagattacctgaagcagaaccagccactgcaggaagagggaaagacctgttttaaacagagtctcgtgaccggcacggacgttagcaaaaaaaacgctacaacccagaacaccaaaaaaaaatccctctctggctctgagggaaaccatgtcaagctgttcccgaagtctaagcctgtagctatctctgtggccagttattctcctatgagctctcaagaccatagcaagaaccagccatttgatgtgaataccagcgggtatagcccaccccacaccgctgacgctctaaaggggcccagaactcatcggcggtgttcagagcctaatatcgaggaccagaatcgtaagttgacgtatctccgcggaatctacagcaagaagcagcacaaaaccagctgcgaggcaggtcttcttcacggagaggaggattatcttaagagacacaaatcactccagatggaggggcagaagttaatcaaccaatctctggtaatgggcatagaggtaggtaaatctagcgcaaccaaccagaacacagagaaggtcctaccaccccgcctgaacctgtgccctcggacgtcctacagttccttaagctcacctggtaccagtccatccgggagctccgtgtcctcccaagattccgctttctcacagataagcgaacactcagtgttcactccaactgagaccagtagcccgatagactgcacgttccaagcccagagaaagagggaggatctcagcccagacttctcaaacgcatctcacgtttccggaatgcctggcccatccagcggacaggcttgctcaaggccggcgtatacaaagaaggacaccatggagtggcactctcagatgcactcggttactttgcacccaagtacctggttgaggaacggtgtggccagtctcaagaattggagcctgaaaaaaaaggctaaagcagcacgcccagaagaggaaaagatagcaagcccgaagggccctctcgaaccaccaccacatgcttccggagtacctgaggccaattctctgcaggaggagcaaaaggatctgcccttgcgcgccgcagagggcctgtcccctgtacagtccgctcagcggtgctcatcctccccctttcaggactcagagagacactgctcttctcccttcagtctggtcgaaagcagacttaagctatgtatgaagagtcatgaagagattgagccaggctcgcaatcatccagcggtagtttaccctgggagcgagctagcgcctcaagctggaccttggaagacgctacgtctccagactcagggcctactgttgtgtgtgacatagaggacaggtacctgaccaaagacatatag

SEQ ID NO: 17186 - DNA, 4542 bp, synthetic construct
  misc_feature 1..4542: note = Description of Artificial Sequence: Synthetic coding sequence
  source 1..4542: mol_type = other DNA
atgatgatggccagaaagcaggatgtgcgaattcccacatataatattagtgtagttgggctgagcggaaccgagaaagagaaaggccaatgtggcatcggtaagagttgcctatgtaaccgcttcgtgaggccctccgctgatgagttccatcttgaccatactagcgttctgtctacgtctgactttggaggtagagtggtcaacaatgaccacttcttgtattggggcgaggtatctagaagcttggaggactgtgtagaatgtaagatgcatatcgtagagcagacagaattcatcgatgaccaaacctttcaaccgcatcgctccaccgctctgcagccttacattaaaagggctgctgcgacgaaattagcgtccgccgagaagctcatgtacttctgcacagatcagctaggactggagcaagatttcgagcagaagcagatgcccgacggcaaactgctagtcgacggttttttgcttggcattgatgtctctcgcgggatgaaccggaacttcgacgaccagctgaaatttgtgtccaatctatataaccagcttgctaagactaaaaagccgattgtagtcgtgctgactaagtgtgatgaaggtgttgaacgttatatcagggatgctcacacctttgcattaagtaaaaaaaacctgcaggtcgtggaaacaagcgccagatctaatgtgaacgtggatctggctttttctaccttagtccaactgattgataaatcccggggcaaaactaaaatcataccctatttcgaagccctgaaacagcagtcccaacagattgctaccgctaaagataaatacgaatggctggtgtcaagaattgtgaaaaatcataatgagaattggttaagcgtgagcagaaaaatgcaggcaagcccagaatatcaggattacgtttacctggagggcacccagaaagctaagaagttgtttttgcagcatatccaccgcctgaagcatgaacacattgagcggcggaggaaactctacttagcagcgctgcccctggcttttgaagccctcatccctaacctcgatgagattgatcacctgagctgcattaaagcaaaaaagctgctggagaccaaacccgaatttctgaaatggttcgtcgtacttgaggagaccccgtgggacgctacgagtcacatcgataacatggaaaatgaacgcatcccattcgatctcatggataccgtgcctgcggagcaactgtacgaagctcatttagaaaaattgcggaacgagagaaaaagggttgagatgaggcgggcctttaaggagaatctcgagacttcgccgttcattactcctggtaagccgtgggaggaagctagatcctttatcatgaacgaggatttttatcagtggcttgaagagtcagtctatatggatatctacggcaagcaccagaagcagatcatcgataaggctaaggaggagtttcaggagctcctactcgaatacagtgaactgttctatgaattggagctggacgcaaagccttccaaggaaaagatgggcgtcatacaggatgttctgggggaggaacagcggtttaaagcactccaaaaacttcaggcagaacgagatgccttaatcttaaagcacatccatttcgtgtaccaccctacaaaggaaacgtgtccaagctgccctgcatgcgtggatgctaaaatagaacatctcataagttctagatttatccgcccgagcgatcgtaaccaaaaaaatagtctcagtgaccccaacatcgacaggattaatcttgtcatcctcggtaaggacgggttggccagagagctggcaaacgaaatccgtgctctctgtaccaacgatgataagtacgtcattgacggaaagatgtacgagctgtctcttcgccccattgagggcaacgtccggctgcccgtcaattccttccagaccccaacgttccagcctcacggatgtctttgtctgtataattccaaagagtcactatcatatgtggttgaaagcatcgagaaaagccgcgaaagtacccttggccggcgcgacaaccacctggtccacttgccactgacattgatcctggtaaataaaagaggagatacatcaggggagaccctgcattccctgatacagcagggtcagcaaattgccagtaagttgcagtgtgtgtttctggaccctgcctccgctgggatcggctatggccggaacattaacgagaagcagattagccaggtcttgaaaggcctcctggactctaaaagaaatctgaacctcgttagctcaaccgcaagtatcaaagacctcgcagacgtagatctgcggattgtcatgtgtctgatgtgcggggatcccttttccgccgatgatatcctatttcccgtgctgcagtctcagacctgcaagagtagtcattgtggcagcaataactcagttctgctggaattgccaatcgggctgcacaaaaagcgtattgagttgtcagtgttgagctatcactcgtctttcagcattcgtaaaagccggctggtccatggttatatcgtgttctatagtgccaaacgaaaggcaagtctcgcaatgttgcgcgccttcctgtgtgaagttcaagacattatccctatacagcttgtcgctctcacagatggcgctgtagacgtgctggacaacgatctatctagggaacaactgacggagggcgaagagatcgcccaagagatcgacgggcggttcacgagcatcccgtgttcccagcctcaacacaaactggaaatctttcatccattttttaaggacgtcgttgagaagaagaatattatcgaagccactcatatgtatgataacgcagcagaagcttgcagcactaccgaagaagtattcaattctccaagggctggcagccccttatgcaattcaaatttacaggatagcgaggaggacatcgagccttcttattccctgttcagagaggacaccagcctgccatcactgtctaaagatcattccaagctcagcatggagctcgagggaaacgatggcttgagttttatcatgagtaactttgaaagtaagctaaataacaaagttcctcctcctgttaaaccgaagccgcccgtccacttcgagatcactaagggcgatctgtcttacctcgaccagggtcatagggatggccagcgaaaatccgtatccagctcgccgtggttgccccaggatggcttcgacccctccgactacgctgagcctatggacgcagttgtgaaaccaaggaatgaggaggagaatatttattcagtgcctcatgattcaacacagggaaagatcatcacgatccgcaatattaataaagcgcaatccaatggcagcggcaatgggtccgatagcgagatggacacttccagcctggagcgaggtcggaaggtatcgatagtgtctaaacccgtgctgtacaggacgagatgtacacgccttggcagatttgcatcttatcggacttctttcagcgtggggtctgacgacgagctcggacccatccgcaaaaaagaggaagatcaggcatcccagggatacaaaggcgacaatgcagtcatcccatacgagactgacgaggatcccagacgcaggaacatccttaggtctctgagacgtaataccaaaaagccaaaacccaagcccaggccttccatcaccaaggccacttgggaatccaattacttcggtgtaccactgaccacagtagtgacaccagagaaacctattccgatattcatcgaaaggtgcatcgaatacatcgaggccactggattgtctactgagggaatctacagagtgagtggcaataaaagcgagatggagtcccttcagcggcagttcgatcaagaccacaacctggacctggctgagaaggattttactgtaaacaccgtggctggagcgatgaaatcattcttctccgagttgcctgaccccctggtgccatataatatgcagattgacttagtcgaagctcacaaaataaatgatcgtgagcaaaaactccacgcattgaaggaagtgctgaaaaaattccccaaggaaaaccacgaggttttcaaatacgtaatcagtcatcttaacaaggtttcccacaacaataaagtaaatctgatgacttctgagaacctttctatatgcttctggccaaccctaatgagaccggacttcagtaccatggatgcccttactgctacgaggacctatcagaccatcattgaattattcatccaacagtgtcctttctttttttacaacagacccatcaccgaacctcccggtgctcgcccgtcctctccatcagcagttgcttctactgtccctttcctcacgtcgacccctgtgacatcacagccgtctcccccccagtctccgcctcccacaccacaaagccctatgcagccactgcttcccagtcccctgcacccacatagacccacgccacagccctccaggaatatcccttggcaaacaaaagagcactag

SEQ ID NO: 17187 - DNA, 4500 bp, synthetic construct
  misc_feature 1..4500: note = Description of Artificial Sequence: Synthetic coding sequence
  source 1..4500: mol_type = other DNA
atgatgatggcgcgaaaacaagatgtgagaatcccaacatacaatatatcggtggtgggcctgagtggcaccgagaaggaaaaaggacaatgtgggatcggtaagtcctgcctctgtaacagatttgtccggccttccgccgatgagtttcacctagatcacacttcagtcctctccacaagcgatttcggaggccgggtcgtgaataacgatcactttctctattggggtgaggtcagcagatccctggaagactgtgtggaatgcaagatgcacattgttgagcagacagagttcatcgatgaccaaacattccagccacaccggtcaactgcacttcagccatacattaaacgggctgctgcaacaaagctggcctcagctgagaagttgatgtatttctgcaccgaccagctaggactggagcaggattttgaacagaagcagatgcctgatggaaaacttctcgtcgacggcttcctgttggggatcgacgtaagtagggggatgaaccgcaatttcgacgaccagctgaaattcgtgtctaatttgtacaaccagctggctaagaccaagaagccaattgtggtggtgttaacaaagtgtgatgagggggtggagaggtacatccgagatgcccacacatttgctctgagcaagaaaaatctgcaggtcgttgaaacttctgcccgctctaacgtgaatgtcgacctcgcgttcagcacactggttcagcttatcgacaaaagccgtggtaagacaaagatcatcccctatttcgaggcccttaagcagcaatcacagcagattgccacagctaaagacaagtatgagtggctggtttctaggattgtgaagaaccataacgagaattggctatctgtgtcccggaagatgcaggcttcccctgagtatcaggattatgtttatcttgaaggtacacagaaggcgaaaaagttgtttctgcagcatatacatagactgaaacatgagcatattgaaaggagacgcaagttatacctcgccgccctgccactcgcttttgaggctttgatccctaatcttgacgaaatcgaccatttgtcatgtatcaaagccaagaaactcctagaaaccaaaccagagtttttgaagtggttcgtcgtgctggaggagaccccatgggatgctaccagccatattgacaacatggagaatgaacggataccatttgatctgatggatacagtgccggctgaacagctttacgaagcgcacctggaaaaactccggaatgagcggaagcgcgtggaaatgagacgcgcatttaaggagaatctagagacaagcccgttcataacgcctggaaaaccatgggaggaagcgagaagctttataatgaacgaggacttttaccaatggttggaagagagcgtctatatggacatttacggtaagcaccagaagcagataatagacaaagcaaaggaggagttccaggaactcctgctggaatacagcgagctgttttatgaactggagctcgatgccaagccttccaaggagaagatgggcgtgatacaagacgttctgggagaggagcagaggtttaaagcccttcagaagttgcaggccgagcgcgacgcccttatcctcaaacacattcacttcgtatatcatcctacaaaagaaacttgtccatcttgtcccgcatgcgtggacgcaaagatcgaacatttaatttcatctcggtttataagacctagtgaccgcaatcagaaaaattcactgagtgatcctaacattgacaggattaaccttgttattcttggtaaagacggactggctcgggaactcgcaaatgaaatccgtgctttatgtactaatgacgataagtacgtcatcgatggaaaaatgtatgagctgagcctacgccctatcgagggcaacgtgagactgcccgtgaacagctttcagacgcccacatttcagcctcatgggtgcctttgcctgtacaactctaaggagagtctttcctacgtggtcgaaagcatcgaaaagtcacgtgagtcaacacttggaagacgggacaatcatctagttcatctgccgctgaccctgatcttagtaaacaaaagaggcgacacctctggagagactctccattccttgatccagcaaggccagcaaattgcaagcaagctgcaatgcgtgtttctagatcccgcaagcgctggtatcggatacggtcgcaacatcaatgagaagcagataagccaggtcctcaagggcctgctggactccaagagaaacctaaatctggtgtcttctactgcgagtataaaagacctcgccgatgtagacctgaggatagttatgtgtcttatgtgtggcgatcctttctcagccgatgatattctgttccctgtcctccagtcacagacttgcaagtcatcacattgcgggtcgaataacagtgtgctgttagagctccctataggtcttcacaagaagcgcatcgaactcagcgtgctgtcgtatcatagtagcttctctattagaaagtcgagactggtccatgggtacattgtgttctacagcgcgaaacggaaggcctctctggcaatgctgagggcctttctttgcgaggtgcaggatataattcctatacagttagtggcccttactgacggggccgtcgatgtgctcgacaacgatctgtcacgagagcagctgactgaaggcgaagagatcgcacaggagatagatggcagattcacatccatcccttgtagtcaacctcaacacaagcttgaaatcttccatcccttctttaaggacgttgttgaaaagaaaaatataatcgaggccactcacatgtatgacaatgccgccgaagcctgttccactaccgaagaggtcttcaactctcctcgagccggtagcccgttgtgcaacagcaatctgcaagattccgaggaggacatcgagccatcgtattccctgtttcgggaagatacctccctcccaagcttgagtaaagaccacagtaaactctctatggaattggagggcaacgacggtttatcgttcatcatgagcaattttgagtctaagctgaataataaggtaccccctccggtgaagccaaagcctcctgtgcacttcgaaattactaagggtgacctatcctacctggatcagggacacagagacggtcagcggaaaagcgtaagctctagtccatggctgccacaggatggtttcgatccctccgattatgccgagccaatggacgcggtggtcaagcctcgaaacgaggaagaaaatatttactcagtgccccatgattcaactcaaggaaaaattatcactattagaaacataaacaaggctcagtctaacggttctggaaacggctccgattcggagatggatactagctcactggaaagaggccggaaagtgtccatcgtgagcaaaccagtgctgtacaggacccgctgtactagactgggtcgttttgcgtcgtataggacctcattcagtgtgggctcagatgacgagttgggtcctataagaaagaaggaggaggaccaggcctcccaggggtataaaggggacaatgctgtcattccttatgagacggacgaagatccccgacgacgcaacatcctgagatccctcaggagaaatactaagaaacccaagccgaagcccagaccctcaatcactaaggccacctgggaaagtaattatttcggcgtgccgttgacgactgtggtaacgcctgagaaaccaatccccatattcatagaacgatgcatcgaatacatcgaggcgacggggctgtcaactgagggaatttatcgggttagcggaaacaaaagtgagatggagagtctgcagcggcaatttgatcaagaccacaacctcgacctcgcagagaaagacttcactgtgaatacagtcgccggagcaatgaagtctttcttctccgaattaccagatcctctggtgccatataacatgcagattgatctcgtggaggctcacaagattaacgatagagaacagaaactgcacgccctaaaggaggtgctcaagaagttccctaaggagaatcatgaggtgtttaagtatgtaatttcccacctaaacaaggtgtcacacaacaacaaagtgaaccttatgaccagtgagaatctgtctatctgcttttggcctactcttatgagaccagatttttcaaccatggacgcgctaaccgcgacacgcacctatcagacaatcatcgagctctttatacagcagtgccccttcttcttttacaaccgccccatcacagaaccgccaggcgctcgcccctcttccccatctgcagtcgcctcaacagtcccttttctcaccagtactccggtaacctctcagccttctcccccccagtctccacctccaactcctcaatccccaatgcagcccctgttgccaagccagctccaagccgagcacacactctag

SEQ ID NO: 17188 - DNA, 2250 bp, synthetic construct
  misc_feature 1..2250: note = Description of Artificial Sequence: Synthetic coding sequence
  source 1..2250: mol_type = other DNA
atgatgatggccagaaagcaggacgtgagaattcctacctacaatatttccgtagtcggtttgtcaggtacagagaaagagaaagggcagtgcggtattgggaaatcttgtctgtgtaacagatttgtgcgcccatccgctgatgagttccacctcgaccacacatccgttcttagtacatctgacttcgggggtagagtagtgaacaacgaccacttcctgtattggggcgaagttagcagatctcttgaagactgcgtggagtgcaagatgcacattgtcgaacagactgaattcatcgatgatcagacgttccaacctcatcgctccaccgccctgcagccgtatataaaacgtgctgctgccacaaagctggcctctgcggagaagctcatgtacttctgtaccgaccagcttggattggaacaggactttgagcaaaagcaaatgcctgacggcaagctgttagtcgacgggttcctgctgggaattgacgttagcaggggcatgaatcgcaattttgatgaccagctgaagtttgtctccaacctatataaccagttagccaagacgaaaaagcctatcgttgtggtgttaaccaaatgtgacgaaggggtcgaacgctacatccgcgacgctcacaccttcgccctcagcaaaaaaaaccttcaggtggtcgagacctctgctcggtctaacgtcaatgttgacctagctttctcgactctggttcaactgatcgataagtcacgtgggaaaactaagatcatcccatatttcgaggccttgaaacaacagtctcagcagattgcaaccgccaaggacaagtatgaatggttggtgagccggatagtaaagaaccataacgagaattggctgtccgttagtcgtaagatgcaggctagccccgagtatcaggattacgtgtatttggaaggcacacaaaaggcgaaaaagctcttcctgcagcacatacaccggctcaaacatgagcacatcgaacgccggcggaagttgtacttagcggcactgccccttgcctttgaagcgttgatccctaacctagatgagattgatcacctctcttgcataaaagcgaagaagctcctggaaacgaaacccgagttccttaagtggttcgtcgtactggaggaaaccccatgggacgctacatcgcacattgataatatggagaatgaaaggataccttttgatctgatggacaccgttccagccgaacagctgtatgaggcacacctggagaagcttcgcaacgaaagaaaacgcgtcgaaatgcgtagagcattcaaagagaatttggagacgtccccttttatcactccgggcaaaccttgggaggaagctcggtcctttataatgaacgaggacttctaccagtggctggaggaatccgtctacatggatatttacggcaagcaccagaaacagataatcgacaaggccaaggaggagtttcaggagttgctcctcgaatactctgagttgttctacgaactggaactcgacgctaagccatccaaagagaaaatgggcgtgattcaggacgtgctgggcgaagagcaacgtttcaaggctcttcagaaactgcaggccgaacgagatgcactgatccttaagcatatccacttcgtgtaccacccaaccaaagaaacttgtccatcatgtcctgcttgtgttgatgcgaagattgaacacttgatcagttctcgattcatacgtccatcagaccgaaatcagaagaactcgttgtccgatccaaacattgaccgtatcaacctggtaatcctgggtaaagacgggttagcgagagaactggcgaacgaaattagggccctctgtaccaacgatgacaagtatgtcattgatggcaagatgtatgaactaagcttgcggcctatcgaggggaatgtgcggttgccagtgaatagtttccagaccccaaccttccagcctcacggatgcctatgcctatacaatagtaaggagtcactgtcttacgtcgtggaaagtatcgaaaagtcaagggaatctaccctgggaaggcgggacaatcatctggttcacctcccgcttactctgattctggtaaataagaggggagatactagcggagagacgctgcactcactaattcaacaggggcagcagattgcgagcaaactgcagtgtgtgtttctggatccggcctccgccggcgctgcagacctgtcctggctaggacctatctag

SEQ ID NO: 17189 - DNA, 978 bp, synthetic construct
  misc_feature 1..978: note = Description of Artificial Sequence: Synthetic coding sequence
  source 1..978: mol_type = other DNA
atggacatgtggaccgcccttctgatcctgcaggcactactgctgccttctctggccgatggcgccacaccagcactaagattcgtggccgtgggagactgggggggtgtccccaatgccccctttcacacagcccgtgagatggcaaatgctaaggagattgcccggactgtgcaaattttgggagccgacttcatcctgagtctgggcgataatttttacttcacaggcgtgcaggacatcaatgataagagattccaggagaccttcgaggatgttttcagtgaccgctccctacgaaaagtcccctggtacgtacttgccggcaaccatgatcacctggggaatgtgtctgctcagattgcttattccaagatttcaaaacggtggaattttccgtccccattttaccggctgcattttaagattcctcagacaaacgtgtctgtggctattttcatgctggacaccgtgacactgtgtgggaactctgatgacttcctgtcccaacagcctgaaaggcctcgggatgtgaagcttgccaggacacagctgtcttggctcaagaaacaactggcagctgcccgcgaggactatgttctcgtcgccgggcactaccctgtctggtccattgcagagcacggaccaacccattgtctggtaaagcagctgagacctttactggcaacttatggggttaccgcatacctctgcggccacgatcataatctgcagtacctccaggacgagaacggggtcggatatgtgctcagtggcgcaggcaactttatggatcctagcaagagacaccagcgcaaagtacctaacggatatctgaggttccattatggaacagaagacagcctcggggggtttgcttatgtcgaaataagttccaaggagatgacagtgacatatatcgaagctagcgggaagtccctgtttaaaacccggctcccaagacgcgctcgcccatag

SEQ ID NO: 17190 - DNA, 2349 bp, synthetic construct
  misc_feature 1..2349: note = Description of Artificial Sequence: Synthetic coding sequence
  source 1..2349: mol_type = other DNA
atgaattcagccgagcagacagtaacctggctgattacactcggcgttttagaaagtccaaagaagactatcagcgatccagaggggttcctccaggccagccttaaggatggagtggtactgtgtaggctactagagaggttgctgccaggcactatcgaaaaggtgtaccccgagcccaggagtgaatcggagtgtctatcgaacatccgtgaatttctccggggatgcggagcatctctgagactggaaacgtttgacgcaaacgacctgtatcagggtcagaacttcaacaaagtcctttcatccctggtgacactgaacaaagttacagctgacattggattgggaagtgacagtgtctgcgcaagaccctcctctcacaggatcaagtcttttgactcgctggggagccagtcactccacacgcgaactagtaagttgttccagggacagtaccggagtctggatatgaccgataacagcaataatcaattggttgtccgcgcgaagttcaactttcagcaaactaatgaagacgagctgtctttttcaaaaggtgatgtgatacacgtgaccagagtagaggagggggggtggtgggaaggcacactgaacgggcgcacagggtggttcccatcaaattatgtgcgagaagtcaaggcttcagaaaaacccgtgtcccccaaatcaggcacgctaaagagcccaccaaagggctttgatacgaccgcaataaataagtcctattacaacgtggttcttcagaacatcctggagacagagaacgaatattcaaaggagttgcagacggttctcagcacctacctgcggcctctgcagacatccgagaaactctcgagcgctaatatctcatatctcatgggcaatctggaggaaatctgctcttttcagcagatgctggtgcaaagcttggaagaatgcacaaagctgccagaagctcagcagcgtgtagggggttgcttccttaatttgatgccgcagatgaagaccctgtatctgacttactgcgctaaccacccatccgcggtgaatgtgctgactgaacacagcgaagaattgggcgaattcatggagacaaagggggcctcatcgccaggaatcctggtgcttacaaccggcttatctaaaccctttatgagattggacaagtatcctaccctattgaaagaactcgaaaggcacatggaagattaccacactgatcgacaggatatccaaaaatcaatggcagcatttaaaaacctgagtgcccagtgtcaagaggtccgaaagaggaaagagcttgaacttcagattttaactgaggctatacgcaactgggaaggggacgatattaaaaccctaggaaatgttacgtatatgagccaggtgcttatccagtgcgccggcagtgaggaaaaaaacgagcgatacctcctgctctttcccaacgtgcttctcatgttatctgctagccccagaatgtccggctttatataccaaggtaagctgcctactaccggcatgacaattaccaagcttgaagactccgaaaaccaccgtaacgctttcgagatttctgggtccatgattgagagaatcctggtctcctgtaataatcagcaggatttacaagaatgggtggaacatctccaaaagcagacaaaggtgacgagcgtcggcaatcctaccatcaaaccccattcagttccttcacatactttacccagccaccccgttacaccatcctcaaaacacgcagattccaaaccagcaccactcacccccgcctaccatactttgccccatccatctcaccatgggactccgcataccacaatcaactggggacccctggagcctccgaaaacacccaaaccttggagcctgagttgcctgcggcccgcgcctccccttcgcccctccgccgccctgtgctataaggaagatctttctaagagccccaagactatgaaaaaattgcttcccaaacgcaagccagagaggaagccctccgacgaagagtttgcctcgcgaaagtccactgctgccctggaagaggatgcccagatcctgaaggtgatcgaggcgtactgtacgtctgcaaaaacgaggcagaccctgaattccacctggcagggaaccgaccttatgcataaccacgtcttggccgatgacgaccagccctcacttgattcattagggcggagatccagcctgagtcgcttggagcctagtgatctttccgaagactctgactatgattccatctggacagctcacagctacaggatgggatcaaccagccgtaaatcctgctgtagctacatctcacatcaaaattag

SEQ ID NO: 17191 - DNA, 2196 bp, synthetic construct
  misc_feature 1..2196: note = Description of Artificial Sequence: Synthetic coding sequence
  source 1..2196: mol_type = other DNA
atgaactcagctgagcagacagtaacttggttgatcactctgggcgtccttgagtcgcccaagaaaacaataagcgacccagaaggcttcctccaagcctctcttaaggacggagtggtgctgtgtcgactgcttgagagacttctgcccggcaccatcgaaaaagtctaccccgaaccccggtctgaaagcgaatgccttagcaacattagagagtttttgcgcggctgtggcgcctcccttagattggaagacatgaccgataatagcaataaccaattggttgtcagagctaagttcaactttcagcaaactaatgaggacgaactgtccttctctaagggcgacgtgattcatgttaccagggtcgaagaaggtggatggtgggaggggaccttgaatggaaggactggctggtttcccagcaattacgtcagagaagttaaggcatcggagaagcccgtgtcccctaaaagcggcactcttaagagccctcccaagggatttgatacaacggccatcaataaatcgtactacaacgtggtgctccagaatatcctggagaccgagaacgagtactccaaggagttgcagacagttttatctacatatcttcgccccctacagaccagcgagaaattaagctccgctaacattagctacctgatgggtaaccttgaagaaatctgtagctttcaacagatgcttgttcagtctctagaagaatgtacaaaactgccagaagcccagcagagagttggaggctgtttcctgaatttaatgccccagatgaagactctctacttgacttattgtgcaaaccatccatcagcagtcaatgtattaaccgagcactcggaggaacttggcgagttcatggaaacaaagggcgccagtagccccggcatattggtcctgacgaccggcttgtctaagcctttcatgcggcttgataagtacccaactctcttaaaagaactggagcgccacatggaggactatcatacagatcggcaagacatacagaaaagtatggccgcatttaagaacttatctgcccagtgccaagaagtacgcaagcgcaaagaattggagctccaaatcctgacagaggcaatcaggaattgggagggagacgatatcaaaacacttggcaatgtgacatacatgtcacaggtgctgatacaatgtgccggaagcgaagagaaaaatgagcggtacctgctccttttcccgaatgtcctgttaatgctgagcgctagcccccgcatgtcaggcttcatctatcagggaaagttacccaccaccggaatgacaatcactaagctggaggattccgaaaaccaccgtaatgcctttgagatttcagggtcaatgattgaacgcatccttgtctcgtgcaacaatcagcaggacctacaggagtgggttgagcatctccaaaaacaaacaaaagtaacgtctgtcggaaatcccacgatcaagcctcacagcgtgccttcgcatacactgccatcccaccccgtaaccccctctagtaagcatgcagattctaaacccgctccgttgacgcctgcctaccacacacttccccatcctagtcaccacggaactccccatacaacaatcaattgggggcctctggaaccacccaaaactcccaaaccttggtccttgtcctgcctgcgcccggcgccccccctgaggccaagtgctgctctgtgctacaaagaagatcttagcaagtcacccaaaactatgaagaagctcctaccaaagcggaaaccggaaagaaaacccagcgatgaagagttcgcgagtaggaaatctaccgcagccttagaggaagacgctcagatcctgaaggtgatcgaggcctactgcacatcagccaaaaccagacaaaccctcaactccagctcaagaaaggagtcggccccgcaagtactcctgcctgaggaggaaaagatcatcgtcgaggaaacaaaatctaatggtcagacagtcatcgaagaaaagagtctggtcgacacagtgtacgccttgaaagacgaagttcaggaactgaggcaggataacaagaaaatgaagaaatccctcgaagaggagcaaagggcccgaaaggatctagaaaaactggtgcgcaaagtcctcaaaaacatgaacgacccagcctgggacgaaacgaacttgtag

SEQ ID NO: 17192 - DNA, 1878 bp, synthetic construct
  misc_feature 1..1878: note = Description of Artificial Sequence: Synthetic coding sequence
  source 1..1878: mol_type = other DNA
atgaccgacaattccaataaccagctggtagttagagccaaatttaacttccagcagactaacgaagatgagttgtccttctccaaaggtgatgtgattcacgtgactagggtggaagaaggcggctggtgggagggcacactgaatggtcgcacaggttggttcccctccaattatgtgcgggaggtcaaggcatctgagaagcccgtgtcccccaagagcggaacactcaaatcacctccaaaggggttcgatactacagcaatcaataagagctactacaacgttgtgctccagaatatccttgagactgagaacgaatactctaaagaactgcagacagtcctctcaacttatcttcggccacttcagaccagcgagaagctgtcttccgcgaacatcagctatttaatgggcaatttggaggagatctgcagttttcagcagatgttagttcagagcttggaggagtgtacaaaactgcctgaggcgcagcaacgggtcggcggctgctttctgaatctcatgcctcaaatgaagactctgtacctgacttactgcgccaaccacccttctgccgtcaacgttttaaccgaacacagcgaggagctaggagaatttatggagacaaaaggcgcaagttcaccaggcatcctggtcctgacaacgggtctgagcaaacctttcatgcggctggacaagtatccgaccctgctcaaggagttggagcggcacatggaagactatcatacggatcgccaggacattcagaagtccatggccgcatttaagaaccttagcgcacagtgccaggaagtaagaaagaggaaggagctggagctgcagattctgaccgaagccatcagaaattgggagggcgacgatattaaaactcttggtaatgtcacctacatgagccaggttctcattcagtgcgcaggatccgaggagaagaatgagcggtacttgctgctctttccaaatgtgctcctgatgctatcagcctcaccccggatgtccggattcatttatcaggggaaactacctaccacgggaatgaccataaccaagctagaggacagcgagaatcatagaaacgctttcgagatctccgggagtatgatcgagagaatacttgtgagttgcaataatcaacaggatttgcaggaatgggtggagcacctgcagaaacagacaaaggtcacttcagtcgggaatccaaccatcaaacctcacagtgtgccttcccatacactgccctcccacccggtcacgccatcttccaagcacgcagacagcaagcccgcaccgcttaccccggcctatcataccctgccccacccttctcatcacggaacaccacatacgacaatcaattggggacccctcgagccgcccaagactcccaagccctggtctctgtcctgcttgcgccccgccccgccccttcgtccttctgccgctctctgttacaaggaagatctgtcaaagtccccaaagaccatgaagaagctgctgcctaagagaaagcccgagagaaagccttccgacgaggaattcgcatccaggaagagcacagccgccttagaggaagacgcccagatactgaaggtcatcgaagcctactgcacgtcagccaagacgcgtcagactttgaatagcacttggcaggggactgatctgatgcataatcacgtgctggccgacgacgaccaaccaagcctagactccctgggtcgaagaagtagtctctctcggctggagcctagcgatctctctgaggacagcgattatgacagcatctggaccgctcacagctacaggatgggctctacttctcgcaaatcgtgctgttcctacataagtcaccagaattag

SEQ ID NO: 17193 - DNA, 1941 bp, synthetic construct
  misc_feature 1..1941: note = Description of Artificial Sequence: Synthetic coding sequence
  source 1..1941: mol_type = other DNA
atgaccgataatagcaacaatcagctcgtcgtaagagccaagttcaattttcagcagaccaatgaagatgagctttccttctccaagggcgacgtcatccacgtgacacgcgtggaggagggtgggtggtgggaaggcacactaaacggcagaactgggtggttccctagtaactacgttcgtgaggtgaaagcgtccgagaaacctgtgagtccaaaatctgggaccttgaagtctcctcctaaagggtttgatactacagccatcaataaaagctactataacgttgtcctgcaaaacatcctcgaaaccgaaaatgagtattcaaaggagctgcaaaccgtgttatctacctatctgagacccctgcagacttctgaaaagctatcctcggcgaacatcagctacctcatgggcaatctggaggagatctgttcttttcagcagatgcttgtacagagtctggaagagtgtactaagctcccagaggctcagcagagagtcggagggtgcttcctgaatttgatgcctcagatgaaaactctctatctgacgtattgtgccaaccatcctagcgccgtaaacgtgctgaccgagcactcagaagagttgggcgagttcatggaaaccaagggggccagtagccctggcatcctagttctgaccacagggttgtccaaaccattcatgcggctggataagtaccccactctgttaaaagaactggagcggcacatggaggactaccacaccgaccggcaagacatacagaagtctatggccgcgttcaaaaacctgtctgctcagtgccaagaagtccgcaaacgaaaggagctggagctccaaatcctgaccgaggccatccgaaattgggagggggacgacatcaaaacactgggtaacgttacttacatgtcgcaggtactgattcagtgcgccgggtcagaagagaagaatgagcgctatctgctgctctttccaaatgtccttctgatgctttcagcctccccccgcatgtccggtttcatctatcagggtaagctcccaactacaggaatgaccatcactaaacttgaagattcagaaaatcatcgcaatgccttcgagatctccggctccatgattgaaagaatcctggtgagctgtaacaaccagcaggatctccaggaatgggtcgagcacctgcagaagcagaccaaagtgacttctgtgggaaatccgaccatcaagccccattctgttccttcccacacattgccatctcaccctgtgacaccgtcttctaagcatgccgactctaagcccgcacccctgacaccagcctatcacacacttcctcacccatcacaccacggtacaccgcacacaactataaattggggaccactcgaaccccctaagacaccaaaaccatggtcactgagttgcttgagacccgcgccacccctcaggcccagcgctgccctgtgttacaaggaggatctgtcaaaatcaccaaaaaccatgaagaagcttttgccgaaaaggaaaccagaacgaaagcccagcgatgaggagttcgcttctcggaaatctaccgctgctctggaggaggacgcccaaattcttaaagtcattgaggcgtattgcacttcagcgaaaactcggcagaccttgaattccagtagccgcaaggagtcagccccccaagtgttgttacccgaggaagaaaaaatcatagttgaggaaacgaagtctaacggccagactgtcatcgaagaaaagtctctggtagatacagtatatgccctgaaagacgaagtgcaggagttgcggcaggataacaaaaagatgaaaaaatccctggaggaagagcagcgggctagaaaagacttggagaagttggtgcggaaagtgttgaaaaacatgaatgatcccgcatgggacgagactaatctctag

SEQ ID NO: 17194 - DNA, 2166 bp, synthetic construct
  misc_feature 1..2166: note = Description of Artificial Sequence: Synthetic coding sequence
  source 1..2166: mol_type = other DNA
atgaagacctttgacgccaatgatctgtatcagggtcagaatttcaataaggttctttcctctctggtgacccttaacaaagtgacagccgacatcggtttagggagtgacagtgtgtgcgcccgcccttcaagccataggatcaagagttttgatagtctcgggagccagagcttacacactagaacctctaagttattccagggccaataccgttctttggatatgactgataacagtaacaatcagctcgtggttagggccaaattcaatttccagcagacaaatgaagacgaattgtctttttcaaagggcgacgttatccacgtaacacgggtggaagaaggaggatggtgggagggtaccttgaacggtcgcaccgggtggttccccagcaactacgtgagggaggtcaaggctagtgaaaaacctgttagccccaaatctggtacactgaagtctccaccaaagggcttcgacacaaccgctattaataaatcctattacaatgtggtactgcagaacatcttagaaacagagaatgagtatagcaaagaattacagacagtgttgtcaacatacttgcggcccctgcagacctcggagaagctgtccagcgcaaacataagctacctgatgggtaacctcgaggagatttgtagctttcagcaaatgttggtacagagtctcgaggagtgtactaagttgcccgaggctcagcaaagggtgggaggctgcttcctgaatctcatgcctcagatgaagacactctacctgacctactgcgccaatcacccatcggctgtcaacgtactgaccgaacattctgaagagctcggagagttcatggaaaccaaaggtgcttcctcccctggaatcttagttctgacaacaggcctgtccaagccttttatgcgcttggacaagtatcccacgctgctaaaagaattggaaaggcacatggaagactaccacactgacagacaagacatccagaagtctatggcggcatttaagaatctgtccgcacagtgccaagaagtgcgtaaacgcaaagagctggaactgcagatcctgacagaggctatcagaaactgggagggcgacgacatcaagacacttgggaacgtgacatacatgtcccaggttctgattcagtgtgccgggagcgaagaaaaaaacgagcggtacctcctgctgttccctaacgtactgctgatgctgagtgcctccccacggatgtcggggttcatctatcagggaaaacttccaacgacagggatgactatcactaagctagaagatagcgaaaaccacaggaacgctttcgagatcagtggttcaatgattgagcgaattctcgtatcgtgcaataatcagcaagatctccaggagtgggtagagcatctgcagaaacagactaaggtcacaagcgtgggcaaccccacaatcaaaccacacagtgtgccaagccatacattgcccagtcaccctgtcaccccttcctccaaacacgccgacagtaagccggcaccactcactcccgcttaccatacgctaccacacccttcccaccacggcactccacacactaccatcaattggggcccactcgaacccccaaaaactcccaagccgtggagtctatcatgcctaagacctgctccccccctccggccctctgccgccttatgctataaagaggacctgtctaaaagcccaaagaccatgaaaaaattgctccctaagcgaaagcctgagcggaaaccatcagacgaggagtttgcctcgcggaagtccaccgcagctctcgaggaggacgcccagatactgaaagtcattgaagcctactgtacaagcgccaaaacccgacaaactctcaacagttctagtcggaaagaatccgcccctcaggtattattacccgaagaggaaaagatcattgtggaagaaactaagtcgaatggccaaaccgtcatcgaagagaagagcctggttgatacggtgtacgcgctgaaagatgaggtccaagagttgcgacaagacaacaaaaagatgaaaaagtccttggaggaggaacagcgtgcccgcaaggatctagaaaagcttgtacgcaaagtgttgaaaaacatgaatgacccggcctgggatgagacaaacctttag

SEQ ID NO: 17195 - DNA, 2262 bp, synthetic construct
  misc_feature 1..2262: note = Description of Artificial Sequence: Synthetic coding sequence
  source 1..2262: mol_type = other DNA
atgaattctgcggaacaaacagtcacttggttgataacattaggggtccttgaatcacccaagaagactatcagcgaccccgaagggtttctgcaggcatctcttaaggatggggttgtattgtgcagactcctggagcgcttgctgcccggtacaattgaaaaaacttttgatgccaatgacttgtaccaaggtcagaattttaacaaggtgctctcgtccttggtgaccctgaataaggtgaccgcagacatcggcctcgggtccgatagcgtgtgcgctcgcccctcttcacatagaatcaagagctttgatagtttgggttctcaatctctccatacccgtaccagtaagctctttcagggacagtatcgctcactcgatatgactgataattccaacaatcaattggttgtgcgggcgaaattcaattttcagcagacaaacgaagatgagcttagttttagtaaaggggacgttatccatgtgacgcgcgtcgaagagggaggctggtgggaaggaactctgaacgggcggactggatggtttccaagcaattacgttcgagaagtaaaggcaagcgaaaagccggtgagcccaaaatcaggaactctgaaatcgccgccgaaaggattcgataccactgctatcaacaagagctactacaacgtggtactgcagaacattctggaaaccgaaaatgagtatagtaaagaactacagactgtcctgtccacctatttgagaccactgcagacgagtgaaaagctatctagcgcaaacatctcctacttgatgggaaatctggaagaaatttgctcgtttcagcaaatgctcgtacaatcacttgaggagtgtactaaacttccggaagcccagcagagagtgggaggatgttttttgaacctgatgccccagatgaaaacactttacctgacatactgtgccaatcacccctctgcagtcaacgtcttgactgaacattcagaggagcttggtgaatttatggagaccaaaggcgcctcctctccgggcatactggtcctcaccacgggtctgagcaaacccttcatgcggcttgacaagtatcctacactcctgaaggaattagaaaggcatatggaggactaccataccgacagacaagatatacagaagagcatggccgcatttaagaatctgagcgcccagtgccaggaagtcaggaagagaaaagaacttgaacttcaaatacttactgaggctattcgcaattgggagggagacgatattaaaaccttggggaacgtgacctacatgagccaagtcctaattcagtgcgccggcagtgaagagaaaaacgaacgctacctattgctcttcccaaatgtgttgctaatgttgtccgcctctccaagaatgtctggcttcatttaccaaggcaagttgcctacgaccggaatgacgataactaagttagaggactcagaaaaccataggaatgccttcgagattagcggaagcatgatcgagcgtatactcgtcagctgtaataatcagcaggacctccaggagtgggtggagcatctgcaaaaacagactaaggtgacgtcagtgggcaatcccacgatcaaacctcattctgtgcccagtcatactctgcccagccaccctgtcactccatcctcaaagcacgctgactcaaagcctgcccctttaacaccagcctatcatactttacctcatcctagccatcacggaacacctcacacgacaatcaattgggggcccctggagccaccgaagaccccaaaaccttggtcccttagttgtttgcgacctgccccacccctccgtcccagcgccgcactgtgttataaggaagaccttagtaagagtcctaaaacgatgaagaagctgctgcccaagcgaaaaccggagagaaaaccaagtgacgaggagtttgccagccggaaatccaccgcggcattagaggaagatgcccagatcctcaaggtcatcgaggcgtattgcacatccgccaaaacgaggcagaccctgaactctacatggcagggcacggatctcatgcacaaccacgtgcttgctgacgacgaccagccctctctggattcacttggaagacgttcatctttgtctaggctcgaaccctctgacctaagcgaagatagcgactacgacagcatttggaccgcgcatagctatcgaatggggtcaacaagcaggaagtcgtgctgttcgtatatttcacaccagaactag

SEQ ID NO: 17196 - DNA, 2412 bp, synthetic construct
  misc_feature 1..2412: note = Description of Artificial Sequence: Synthetic coding sequence
  source 1..2412: mol_type = other DNA
atgaatagtgccgaacagactgtgacttggctaattacactgggtgtattggagtcccccaagaagaccatttccgatccggaggggttccttcaggcatctctcaaagatggcgtcgtgctctgcaggctcctggagcggctgctccccggcacgattgagaaagtgtatcccgagcccaggtctgaaagcgaatgcctgtcaaacatccgcgagtttctgaggggatgtggagctagcctgcgcctggaacttctttttccaccatcgcagcccccccaacatctcgtgacgacaatactgttaagcgcctccactttcgacgctaatgacttataccaaggacagaatttcaacaaggtcctgagtagccttgtgacattaaacaaggtcactgcagacatcggactgggttctgactccgtctgcgcaagaccttcctcacaccggattaagtcatttgacagtctcgggagccagtccctgcataccaggacttccaaactgttccagggccagtataggtctctggacatgaccgacaatagcaataaccagctggtggtgagggccaagttcaatttccagcaaaccaatgaagatgaactgagcttctccaagggcgatgttattcacgtaacaagagtagaagagggcggctggtgggagggcactctgaacgggaggactggctggttccctagcaactacgtccgcgaagtgaaagcctcagagaaaccagtgtctcctaaatctggaacgttgaaatccccgccgaaaggattcgacacgacggcgataaacaagagctattataatgtagtactgcagaatatcttggagacggagaacgaatattctaaggagctgcagactgtgctgagcacctatctcagacccttgcagaccagtgaaaaacttagcagtgctaatatttcctatctgatgggcaacctcgaagaaatatgcagcttccagcagatgctagtgcagagcttggaagagtgcacaaaactgccagaggcccaacagagagtaggtgggtgctttttgaatctgatgcctcagatgaagaccctgtaccttacttattgcgccaaccacccctccgccgtgaatgtgttgacagagcactcagaggaactgggtgagtttatggagaccaagggcgctagtagccccggaatcctcgtgcttaccacaggcttgtccaagcctttcatgcggttggataagtatcctacactgcttaaagagctagagagacacatggaggattaccacactgataggcaggatatacaaaagtctatggctgcttttaaaaacctttccgcccagtgccaagaagttcggaaaagaaaggaactcgagctgcagatattgaccgaagcaataagaaattgggaaggcgacgacataaaaacactgggtaatgttacatatatgtctcaggtgctcatccagtgtgccggctctgaggagaagaacgagaggtaccttttgctcttccctaacgtgctgctaatgttatccgcgagcccacgaatgtccgggttcatttaccagggtaaattaccaacaacaggaatgacaataacgaagctggaggactccgagaaccacaggaatgctttcgagatcagcgggtccatgatcgaaagaatactggtgagctgcaacaaccagcaagacctccaagaatgggtagaacacctccagaaacagacgaaggtcacctcagtgggaaacccaacaatcaaaccccactctgtcccgtcccacactctgccgtcacatcccgtgacccccagtagtaaacacgcagattccaaacctgctcctcttacccctgcatatcatacgctcccgcaccccagtcaccacggcactccgcacacaactatcaactggggtcccctggaacccccaaaaacccccaagccctggtctttgtcatgcctgcgtcccgcgccaccactccggccttccgccgccttgtgctacaaagaggatctgtcaaagtcccccaagaccatgaagaagctgctgcctaagaggaaacccgagcggaagccgagtgatgaggagtttgcaagccggaaaagtacggctgcattagaagaagacgcccaaattctgaaagttattgaggcctattgcacttcggccaagaccagacagaccctaaattccacttggcagggaaccgacctcatgcacaaccatgttctagccgatgatgatcagcccagtctcgacagcctggggagaagatcatccctgagtagactcgaaccttctgacctctcagaagacagtgattatgacagtatctggacagcgcattcatatcggatgggctccacaagccggaagtcttgttgttcttacatatcacatcagaattag

SEQ ID NO: 17197 - DNA, 1941 bp, synthetic construct
  misc_feature 1..1941: note = Description of Artificial Sequence: Synthetic coding sequence
  source 1..1941: mol_type = other DNA
atgacagacaactccaataaccaacttgttgtgagagctaaatttaactttcagcagacgaacgaggacgaactgtcgttctcaaagggcgatgttatccatgtaacgcgtgtggaagaaggaggatggtgggagggtactctgaacggccggacaggttggttcccgtccaactatgttcgcgaggtgaaagcctcagagaaacctgtcagtcccaagtccgggaccttgaagagcccaccaaaaggcttcgatacaaccgctataaataagagctattacaacgtggtgctccagaacatcctcgagactgaaaatgagtactcaaaggagctgcaaactgtcctgtcaacatatttgagaccactgcagacatccgaaaaactgtcatcagccaatatcagctatctcatgggcaatcttgaggagatttgtagttttcaacaaatgcttgtgcagtctctggaggagtgcaccaaactaccagaagctcagcaaagagtagggggctgcttcttgaatctgatgccacagatgaaaaccctatatttgacttattgcgccaatcatcctagcgccgtaaatgtgcttacagaacactcggaggaactcggcgagttcatggaaacgaaaggtgcatcgagccctggtatacttgttctcaccaccggtctgagcaaaccctttatgaggctggacaaatatcccacgctgctcaaagagctcgagcggcacatggaggattatcatactgaccggcaagacatccagaaaagcatggccgcgtttaaaaatttgtcagcccagtgtcaggaggtgaggaaaaggaaggaactggagctgcaaattttaacggaggcaatccggaattgggagggagacgatattaagacattgggtaatgtgacctatatgtctcaagtgctcatacagtgcgccggttcagaagaaaaaaacgagagatatctactgttgttcccgaatgtcctgcttatgctaagcgccagtccccgaatgagtggttttatctaccaggggaaattaccgacgactgggatgaccattaccaaactggaagactccgagaaccaccgcaacgctttcgagatcagcgggtcaatgatcgaaaggatcctggtatcttgcaacaaccagcaggatctccaggagtgggtcgagcatctccaaaagcagaccaaggtcacctcagtgggcaacccgaccatcaagccacatagcgtgccctctcatacattaccttctcacccagttaccccatcgagtaagcacgccgacagcaagcctgctcccctgaccccagcttatcacaccttgccacacccaagtcatcacgggacaccacatacgacaatcaattggggcccgctggagccaccaaagacaccaaagccatggagtctgtcatgtttaaggccagcccctcccctaaggcctagcgctgccctctgctacaaggaagacctttcaaagagcccaaaaacgatgaagaagctccttcccaaaaggaaaccggaacggaagccaagtgatgaggaattcgcttcccgcaagagtactgccgccctcgaagaggatgcccaaattctgaaggtcatcgaagcctactgcacctcggctaaaacccggcagactcttaacagtagcagtcgaaaggaatccgccccacaggtgttactgccagaagaggaaaaaatcatcgtggaggagaccaagtctaatggtcaaacagtgatcgaggagaagtccctcgtggacacagtctatgcccttaaagacgaggtgcaggaactacgacaggacaataagaaaatgaagaagtcgcttgaggaggagcagcgtgctagaaaggatctggagaaacttgtgcgaaaggtccttaaaaatatgaacgacccagcatgggacgaaaccaatctgtag

SEQ ID NO: 17198 - DNA, 201 bp, synthetic construct
  misc_feature 1..201: note = Description of Artificial Sequence: Synthetic coding sequence
  source 1..201: mol_type = other DNA
atgacagacaattccaataaccagttggtcgtgagagccaagttcaacttccaacaaacaaacgaggacgagctctccttctccaagggcgatgtcatccacgttactcgggttgaggaggggggatggtgggagggtaccttgaatgggcggacggggtggtttccttctaactacgtgcgagaagtgaaagcatcatag

SEQ ID NO: 17199 - DNA, 1344 bp, synthetic construct
  misc_feature 1..1344: note = Description of Artificial Sequence: Synthetic coding sequence
  source 1..1344: mol_type = other DNA
atgacagacaactccaacaaccagttggttgtccgagctaaattcaatttccagcagaccaatgaggacgagttgtctttttctaaaggtgacgttattcacgtcactagagtagaagaggggggatggtgggagggcactctcaatggacgcactggttggttcccgtctaactacgtccgcgaggtcaaagcatctgagaagcccgtttccccaaaatccggcacactaaaatcacccccaaaaggattcgatacaactgctattaacaaaagctactacaacgtggttctgcagaacattctggagaccgaaaatgagtattctaaggaacttcagaccgttctctccacttatctccggcctctgcagacgtctgaaaagctttcctcagccaacatcagttacctaatggggaacttggaggaaatatgcagtttccagcagatgcttgtgcagagtctagaagagtgtactaaactccctgaagcccagcagcgcgttggcggatgtttcctgaatttgatgccacagatgaaaaccctttacctaacatactgcgctaatcatccttctgcggtgaacgtgctcaccgaacacagcgaggagcttggtgagtttatggagaccaagggcgcatcatctccgggaatactcgtgttgacgactgggctgagcaagcctttcatgcgattggacaaatacccgaccctccttaaggaactggagaggcacatggaagactatcatacagacagacaggatatccagaagtctatggcagccttcaagaacctcagtgctcaatgccaagaagtgagaaagcgcaaagagctagagctccagatcctcaccgaagccatcaggaactgggagggggatgatattaagactctgggtaatgtgacctatatgtcccaggttcttatccagtgcgccgggagtgaagagaagaacgagcgttacttgcttctgtttccaaacgtcctactcatgctctctgcatccccccggatgagcggctttatataccagggcaaactgcccactactggaatgactatcactaagcttgaggactccgaaaatcatcggaatgcatttgagatatccggatcaatgatcgagaggatcctggtttcttgtaacaatcagcaggacctgcaggaatgggttgaacacctgcagaagcagacaaaggtgactagcgtgggcaatccaactattaaacctcatagcgtgccatctcacaccttaccaagtcacccagtgactccaagctcgaagcacgccgatagcaaaccagctcctctgacacctgcttatcacaccctccctcactag

SEQ ID NO: 17200 - DNA, 186 bp, synthetic construct
  misc_feature 1..186: note = Description of Artificial Sequence: Synthetic coding sequence
  source 1..186: mol_type = other DNA
atgacggataattccaacaatcagctggtggttagagcaaagtttaatttccagcagaccaatgaagacgagctctcctttagtaaaggagatgttattcacgtgacgcgtgtggaggaaggaggctggtgggaaggcacgctgaacggcaggaccggatggttcccgtctaactatgtccgttag

SEQ ID NO: 17201 - DNA, 120 bp, synthetic construct
  misc_feature 1..120: note = Description of Artificial Sequence: Synthetic coding sequence
  source 1..120: mol_type = other DNA
atgacggataatagtaataaccagctggttgttcgcgcaaaattcaacttccagcaaaccaatgaggacgaactgtctttcagcaagggggatgtcatacacgtcaccagagtggaatag

SEQ ID NO: 17202 - DNA, 546 bp, synthetic construct
  misc_feature 1..546: note = Description of Artificial Sequence: Synthetic coding sequence
  source 1..546: mol_type = other DNA
atgtgcttcccccgcagctccgtcactacggacgatcatcagctggatggtattaagtcgacacgggcacctgcccctgggtgctgctgctgcccctcggaaactctgcggtcaggtgaggtagcgcgatctagcgccgaatccaggagactcctgttcaagccagatgctactgatgaaaatccagttcctcacgttctatgtcagagccctttctgtagcgagtgtcctcacggaacccaggactaccataccgaccgtcaggatatccagaagagcatggcggcttttaaaaacctgagcgcccagtgccaggaggtacggaaacggaaggagctcgaactccagatattgacggaagctattagaaattgggagggagacgacattaaaacgctgggcaatgtgacctatatgagccaagttctgatccagtgtgccggctccgaggaaaagaacgagcggtacctcctgctatttcccaacgttcttctcatgctttctgctagtccccgtatgagtgggttcatctaccagggcgcgtag

SEQ ID NO: 17203 - DNA, 2070 bp, synthetic construct
  misc_feature 1..2070: note = Description of Artificial Sequence: Synthetic coding sequence
  source 1..2070: mol_type = other DNA
attccccccagtaagcccctcagaggttcgagcctatgggggtgctggagtagacccaagacaatctccgatcctgagggcttcctgcaggcctccctgaaggacggcgtggtgctctgccgcctgctcgagcgtctcctgcctggtaccattgagaaagtctatcctgagccccggtccgaatctgagtgcctttcaaacatccgtgagtttctgagggggtgcggcgcaagcctgaggctggaaaccttcgatgctaatgatctctatcagggtcagaatttcaataaagtgctctctagcctggtgacactgaacaaggttaccgccgacattggcctgggatctgactccgtgtgtgccaggccttccagccatcggatcaaatcattcgacagcctgggatcacagagcctgcacacaaggactagtaagctctttcaggggcaatatagatctctggatatgacagacaatagtaataaccagctcgtggtgcgggctaagttcaattttcaacagacaaacgaggatgaactcagttttagtaaaggcgacgtgattcacgtgacgcgggtcgaagaagggggttggtgggagggtacacttaatggcagaaccggatggtttccgtctaactacgtgcgagaggtgaaggccagcgaaaaaccggtgtcccccaagtcgggtacactcaagtccccacccaagggatttgacacgaccgccataaacaagtcatactacaacgtggttctccaaaatattctggagacggaaaatgaatatagcaaagaactccagaccgtattaagcacctatctgagaccactgcagactagcgagaaactatctagcgccaacatctcgtatttaatgggcaacctcgaagaaatatgctccttccagcaaatgcttgtgcagtccctggaggagtgtaccaaactacccgaggcacagcagcgggtgggaggatgttttctcaacctgatgccccagatgaaaacactttatcttacctactgtgctaaccatcccagtgcagtcaatgtacttacagagcactctgaagagcttggtgagttcatggagactaaaggcgcaagctcccccgggatcctggtattaactacggggctcagcaaaccttttatgaggctcgataaataccctacccttttgaaggagctcgaacgtcatatggaggattaccataccgatcgccaggatatccaaaaaagtatggccgcttttaaaaacctcagtgctcagtgccaggaagtgcgaaaaagaaaagagctagagctacagattcttaccgaagctattcggaactgggaaggggacgacataaaaaccctgggtaacgtcacatacatgtctcaggtcctgatacaatgcgctggctctgaggaaaagaatgagcggtaccttctcctgttccctaacgttctcctgatgctgtcagcttctccccgcatgtctggattcatataccagggaaagctgccaacgaccggtatgaccataacaaagctggaggactccgagaatcaccgcaacgcattcgaaatctctggatccatgatcgagcgaatcctcgttagttgtaacaatcagcaggacctgcaggagtgggtagaacacttgcaaaagcagacgaaggtcacttccgtggggaacccaacaatcaagccacacagcgttccatcccatacactgccgtctcaccccgttaccccatcgtcaaaacatgccgacagcaaacccgcccccctgaccccggcctatcacacccttcctcatccatcacaccacggtacccctcataccacgattaattggggcccgctggagcccccgaaaacgccgaaaccctggagcctgagctgcctgcgcccagctcctcctctaaggccatcagctgccttatgttacaaagaagacctgtctaagtctcctaaaacaatgaagaagcttctgcctaagaggaaaccagaaaggaagccaatgcgctcgagtaggccaggtaaggcccaactcctatggaaaaaaatgctgcgtttttag

SEQ ID NO: 17204 - DNA, 4065 bp, synthetic construct
  misc_feature 1..4065: note = Description of Artificial Sequence: Synthetic coding sequence
  source 1..4065: mol_type = other DNA
atgagcactggagattcatttgaaacaaggtttgaaaaaatggacaacctactgcgggacccaaaatccgaggtcaactccgattgtctgcttgacggcctagacgcactggtatacgacctcgatttccccgcactgcgcaagaacaaaaatatcgacaacttcctgtctcggtataaggatacgattaacaaaataagggatcttcggatgaaagcggaagactatgaagtagtgaaggtgatcggtaggggggcattcggagaggttcaactggtgcgtcacaaaagtactagaaaagtgtacgccatgaagttgctctcgaagttcgaaatgataaagaggagtgactcagccttcttctgggaagagagggatattatggccttcgccaactctccttgggtcgtgcagctcttctatgcctttcaggacgacagatatttatacatggtgatggagtatatgccaggaggtgacctggttaatcttatgtctaactacgacgtgcctgagaaatgggcccggttctacacagccgaggtggttttggcgctcgatgcgatccactctatgggattcatccatagagacgtgaagcctgacaacatgctgctggacaagtccgggcatctgaaacttgccgactttgggacgtgtatgaaaatgaataaagaaggcatggtcaggtgcgataccgcagtggggacaccagattacattagccctgaggtccttaagagccagggaggggatgggtattatggaagggagtgcgactggtggtccgtgggggtgttcctgtatgaaatgctggtcggcgacactcccttttatgcagattcactagtagggacatacagtaagatcatgaatcacaaaaattcactcacgttccctgacgataacgacatcagcaaagaagcgaagaatcttatctgcgcctttttgacagacagagaggtgaggcttggccggaacggcgtggaggagataaaacggcatctgttttttaaaaacgaccaatgggcatgggagactctgcgggatacagtggcacccgtggtgccagacctgtcatccgacatcgatacttctaactttgacgatctcgaagaggataaaggggaggaagagacctttccaatccccaaagcattcgtgggcaaccagctcccatttgtcggtttcacctactactctaaccgcaggtatctctcgtcagcaaacccgaacgacaataggactagcagcaacgctgataagagtctgcaggaaagcctccagaagaccatttacaaacttgaggaacaactgcacaatgagatgcaactgaaggacgaaatggaacaaaagtgccggacttctaacatcaaactggacaagatcatgaaggaactggatgaagagggtaaccagcgaagaaacctggagtctaccgtgagccaaatcgaaaaagaaaagatgctgttacagcatagaattaacgagtaccaaaggaaagccgagcaggaaaacgagaagaggcggaatgtggaaaacgaggtgagtacgctgaaggaccagctggaggacctgaaaaaggtatctcagaacagtcagctggcgaatgaaaagctgagtcagttgcagaaacagctggaggaggcaaatgacctgctccgcactgaaagtgacacagctgtgagactgcggaaaagccacaccgagatgtcaaagtctattagtcagttggaaagcttgaatcgcgagctgcaggaaagaaatcggatcttggagaatagcaagtcccagaccgacaaagattactaccaactacaggccatcctcgaggcagagcggcgggatcgggggcatgactccgaaatgattggggatctgcaggcaaggatcacctcgctgcaggaagaagtaaaacacctcaagcacaatcttgagaaggtagaaggggaacgtaaggaggcccaggatatgctaaatcactctgagaaggagaagaacaatctcgagatagatctgaattataaacttaagtctctgcagcagcggctggagcaggaagtgaatgagcataaagtgaccaaagcgaggcttaccgataaacaccaatcaattgaagaggctaaaagtgttgccatgtgtgagatggagaaaaagctgaaggaagaacgagaggcccgcgagaaagccgaaaatcgcgtcgttcagattgagaagcaatgttcaatgctggatgttgaccttaagcagagtcagcagaaattggagcacctgaccggaaacaaagagcgaatggaggacgaagtgaagaacctcactcttcagcttgaacaagagtcaaataaaaggctgctccttcaaaatgagctcaaaacccaagcttttgaagcagacaacctaaagggtctggagaaacagatgaaacaggaaataaacaccctgctcgaggccaaaaggctcctggaattcgaattggctcagctcactaaacagtatagggggaatgaagggcaaatgagagagctgcaggatcagctcgaggccgaacaatatttcagcacactttataaaactcaggtgaaagaactcaaggaggagattgaggaaaagaaccgggagaatctcaaaaaaattcaggaactccaaaatgagaaggagacactagctacccagcttgatctcgcggagaccaaggccgagtcagaacagttggctaggggactgttggaggagcagtactttgaacttacccaagagtccaaaaaggctgcttcccggaaccgccaggagatcaccgataaagatcacaccgtgtctcgcctggaggaggcgaattctatgttgacaaaagacattgaaattttgagacgtgaaaacgaggaactcacagagaagatgaaaaaggccgaggaagaatacaagcttgagaaagaggaggaaatcagcaatttaaaagcagccttcgagaagaatataaatacagagcgtaccctcaaaacgcaggccgtgaacaaacttgccgagattatgaataggaaggacttcaagatcgaccgaaagaaggcaaacacccaagaccttcgaaaaaaagagaaggagaaccgaaaactccaactggagctgaatcaggaaagggaaaagtttaatcagatggtagtcaaacaccagaaagaactgaatgatatgcaggcccagttggtggaggaatgtgcccatcgcaatgaactccagatgcagctggcaagcaaagagagcgacattgagcagctccgggccaagttgctggacctgtccgattccacgagtgttgcttccttcccctccgctgatgaaaccgacggtaatctccccgaatcaagaatagaaggctggctttccgtgcctaataggggcaacatcaaacgctacggatggaagaagcagtacgtcgtagtgtcctctaagaagatcctcttctacaacgacgagcaagacaaggagcagagcaacccgtccatggtcctggacatcgacaagctgtttcacgtccggccagtgactcagggcgacgtgtaccgcgcagagactgaggagattcccaagatctttcagattctgtatgccaacgagggcgaatgcaggaaggacgtcgaaatggagcctgtgcagcaagccgaaaaaacaaatttccagaatcacaaaggccatgaattcattccgacactctatcattttccagctaattgtgatgcatgtgctaagccactgtggcatgtgttcaaacctccccctgccctcgaatgccggagatgtcatgtgaagtgtcacagagaccacctggataaaaaggaagaccttatctgtccatgcaaggtttcatatgatgtcaccagtgccagggatatgctcctgctcgcttgttctcaggacgagcagaagaaatgggtgacccacctggtgaaaaaaataccaaagaacccccctagcggtttcgtccgcgcctccccgagaacactgtcgactcggtcgacagctaaccagagtttccgtaaggtcgtgaaaaatacctctgggaagacaagctag

SEQ ID NO: 17205 - DNA, 471 bp, synthetic construct
  misc_feature 1..471: note = Description of Artificial Sequence: Synthetic coding sequence
  source 1..471: mol_type = other DNA
atggcgccagcgagagctgggttctgcccacttttgctgcttcttctcctgggactgtgggtcgccgagattcctgtcagtgctaaacccaagggcatgaccagcagccagtggtttaagatccaacacatgcagccgtcgccacaggcatgcaactccgcgatgaaaaacattaataagcacacgaaaaggtgcaaggacctcaatactttcctacacgaacctttctcttccgtggccgcgacatgtcagacaccaaagatcgcgtgtaagaacggggataagaattgtcatcagagtcatggagccgtgtccttgacaatgtgtaagctcacaagcggtaaacaccccaactgcagatataaggagaaaaggcagaacaaatcgtacgttgtcgcgtgcaaaccaccacagaaaaaggatagccagcagtttcatcttgtaccagtccacctggaccgggtgctgtag

SEQ ID NO: 17206 - DNA, 471 bp, synthetic construct
  misc_feature 1..471: note = Description of Artificial Sequence: Synthetic coding sequence
  source 1..471: mol_type = other DNA
atggcgccggcccgcgcggggttctgtccacttctgctgctcctcctactgggactttgggtggccgagattccagtgagtgcaaaacccaagggcatgacttcttcacagtggttcaaaattcagcacatgcaaccatcaccccaggcctgcaactccgccatgaaaaatatcaacaaacacaccaagcggtgcaaggacctgaatacttttctgcacgagccattctcgtccgtcgccgccacctgtcagacaccgaagattgcttgtaagaacggagataaaaactgtcaccagtcacatggcgctgtttccttaactatgtgcaagctgacttctggaaagcatcccaattgcagatacaaagagaagagacagaacaagtcctacgttgtcgcatgtaaaccgcctcagaaaaaagactctcagcagtttcatttggtgcccgtccacctggatcgggtgctctag

SEQ ID NO: 17207 - DNA, 831 bp, synthetic construct
  misc_feature 1..831: note = Description of Artificial Sequence: Synthetic coding sequence
  source 1..831: mol_type = other DNA
atgctgcagcaggactccaatgacgatactgaggacgtgtcactgttcgatgctgaagaagaaactactaataggccccgcaaagccaaaatacgccacccagtcgcctcatttttccatctctttttccgcgtgtccgctatcatcgtgtgtttgttgtgtgagctgctaagttcctcctttatcacctgcatggtgactattatcctccttctgtcgtgcgacttttgggcagttaaaaacgttactggtcgcctcatggtcggactgcggtggtggaatcatatcgacgaagatggaaaatctcactgggtttttgagagccgcaaggaaagcagccaagaaaataagacagtgtccgaggcggagagtaggattttctggctcgggctcattgcctgttctgtgctttgggtcatttttgccttcagcgccctgtttagttttactgtcaagtggctccggcgcagtagacacattgctcagacaggactgaaagtgttgggatcccgcgaccccccagcctcagcgtttcaatccgcaggaattaccggggtcagccgctgtcccggtcacccaagcaggaagtttcaccaggtcgacatcaactcttttacacgcattaccgatagagcgctttactggaaacctgcccctcgcctctcatctcctcctcttcgcgctgctccaggcaactgtcagcagatggctccagctcgcctgtttctctcgcttaggctgtgggcttggagaggtgggggggagagcccaaattcaagaggcacaggagaaccaggacctaagttccatctcgccagtggtatgcactag

SEQ ID NO: 17208 - DNA, 1419 bp, synthetic construct
  misc_feature 1..1419: note = Description of Artificial Sequence: Synthetic coding sequence
  source 1..1419: mol_type = other DNA
atggatcatgggggggtgggtccgtatgagctgggaatggagcattgtgaaaagttcgaaatctcggagacgtccgtcaaccgggggcccgaaaagattcggccagagtgcttcgagcttctgcgtgtgttgggtaaggggggatatgggaaagtctttcaggtccggaaagtgacaggcgcaaacactggcaagatcttcgcaatgaaggtcctcaagaaagcaatgatagttagaaacgctaaagacacggcacacacaaaagccgagagaaacatccttgaggaagtgaagcatcctttcatcgtggacctgatctatgcattccagactgggggcaaactgtacctgatcctggagtatctgtccggcggagaactttttatgcagctggagagggaggggatttttatggaggacacagcctgtttctacctggccgaaatctctatggctttggggcatctgcaccagaaagggatcatttatagggacctcaaacctgagaatatcatgttgaatcaccagggacatgtcaagctcactgacttcggcttatgtaaagaatcaattcacgacggcacagtcactcacactttttgtggtacgatagagtatatggccccagaaattctcatgcggagcggccacaatcgggccgtggattggtggagtttaggagctcttatgtatgacatgttgaccggcgcccccccctttacaggtgagaatagaaagaagaccattgacaagatcttgaaatgcaagctgaacctccccccatatctgactcaggaggccagggacctactgaagaaactgctgaaacggaacgcagcttcgcggctcggggctggaccaggtgacgccggcgaggttcaagctcacccctttttccggcacataaattgggaggaactgctggctcgaaaggtggagcccccattcaagcctctcctgcagagtgaagaggatgttagccaatttgattctaagtttactagacaaactccagtggacagccccgacgacagtacactgtccgaaagtgccaaccaggtcttccttgggttcacctatgttgccccgagtgtcctagagtcagtgaaggaaaagttcagctttgagcctaagataagatcacccagacggttcattggtagccctaggaccccagtctcacctgttaagtttagtcccggggacttttggggccgcggtgcaagtgctagcaccgccaatccccagactcctgtcgaataccccatggagactagcggcattgagcaaatggatgtaactatgtcaggagaggcatctgcccctttgcccatccggcaaccaaactcagggccttataaaaagcaggcgttccccatgatttccaagaggcccgagcatctacgcatgaatctctag

SEQ ID NO: 17209 - DNA, 1356 bp, synthetic construct
  misc_feature 1..1356: note = Description of Artificial Sequence: Synthetic coding sequence
  source 1..1356: mol_type = other DNA
atgcgcaggcggaggcgtagagacggtttctacccggctccggatttccgcgaccgcgaggcggaggatatggctggagtgtttgatattgatcttgaccagccagaagacgccggaagcgaggacgagctggaagagggaggtcaactgaacgagtctatggaccatgggggcgttggaccttatgagctgggcatggagcattgcgaaaagttcgagataagtgagacgagcgtaaacagagggcctgagaagatccggcccgaatgcttcgaactccttcgtgtgctgggaaaggggggttatgggaaggtcttccaggtccgcaaggtcaccggcgctaatactggcaagatctttgcaatgaaggttctcaagaaggcaatgattgtccgaaatgctaaagatacagctcacactaaagccgaacggaacattctggaagaggtcaagcacccattcattgttgatctgatctacgccttccagaccggaggaaaattgtaccttatacttgagtatctaagtggaggcgaactgttcatgcagcttgaaagggagggaatcttcatggaagatacagcctgcttttatctggctgagatttctatggctcttggacacctgcaccagaagggaattatctaccgcgatctcaagccagaaaatatcatgctgaaccaccaagggcacgtgaagttaaccgactttggtctctgcaaggagtccatccacgatgggactgtgacccataccttctgtgggactatcgaatacatggctccggagatactaatgagatccggacataatagggccgtggactggtggtccctgggtgccctgatgtatgatatgcttaccggcgctccgccattcactggcgaaaacaggaagaagacaatcgacaaaattctcaaatgcaaacttaatctgcctccatatctgactcaggaagccagggatctgctgaaaaagctgctcaagagaaatgcggcatcacggctgggtgcaggccccggtgatgctggtgaggtgcaagctcatccctttttccggcatatcaactgggaggaacttctggcccggaaggtagagccccctttcaagcctctgttacagagcgaagaagacgtgagccagtttgacagcaagtttacccggcagaccccggtggacagccccgatgactccactctctccgaaagtgccaatcaagtcttcctcgggttcacatacgtggcgcctagcgtactcgaatcggtcaaagagaaattctcttttgaacctaaaatccgctcacccaggcggttcattggatcacccaggacccccgtgtctacagccatgtgctag

SEQ ID NO: 17210 - DNA, 1509 bp, synthetic construct
  misc_feature 1..1509: note = Description of Artificial Sequence: Synthetic coding sequence
  source 1..1509: mol_type = other DNA
atgcgaaggaggagaaggagagacggcttttaccccgcccccgactttcgcgatagagaagccgaggatatggctggcgtgtttgacattgatcttgaccagcctgaagacgctgggtcagaggatgagcttgaggagggaggtcaacttaacgaaagcatggatcacggaggcgtcggcccttatgaactcggcatggagcattgcgagaaatttgagatttctgagacgtcagttaaccgcgggccagaaaagattcgtcccgaatgtttcgagctcctcagggtgctcggaaaggggggatacgggaaggctatgattgttaggaatgctaaggacactgctcacactaaagctgaaaggaatattttggaggaggttaaacacccatttattgttgatttaatatacgcgtttcagactggcggcaaactctacctgatcctggagtatctctctggcggcgaattgtttatgcagttggagcgcgaggggatatttatggaggatacagcttgtttctacttagccgagatcagtatggctctagggcatctccaccagaagggcatcatctatcgcgacctgaaacctgagaacatcatgctgaaccaccagggacatgtgaagctgacagactttggtctctgcaaagagtctattcatgatggcacggtgactcacactttttgtggaactatcgagtacatggctcccgagatactcatgcgctccggccacaacagagcggtggattggtggtctctgggggccctcatgtatgatatgctcactggagcgcctccctttacaggagaaaacagaaaaaaaactatagacaaaatccttaagtgcaaactgaacttgcccccttatctgacacaggaagcacgtgacttgctgaagaagcttctgaaacgaaacgccgcatcacggctgggcgctgggcctggagacgccggagaggtgcaggcccaccctttcttccggcatatcaattgggaggagctcctggctcgaaaggtcgagcctccatttaaaccacttctccagtccgaggaggacgtgagccagtttgatagcaaatttactcggcagacccccgtagactcacccgatgactccaccctgtctgaaagcgctaatcaggttttcttggggtttacatatgtggcaccttctgtgctggagtcagttaaagaaaagttcagctttgaacccaagattaggtctccacgacgattcatcgggtcacctcgcacccccgtatcccctgttaaatttagtcctggtgacttttgggggcgtggcgcatcagcgagtacagctaatcctcagacacccgtggagtacccaatggagacttccggcatcgaacagatggatgtgactatgagcggggaggctagtgctccactgcctatccgtcagccaaactccggcccatacaagaagcaggcgtttcccatgatctccaagcgcccggagcacctgcggatgaacctgtag

SEQ ID NO: 17211 - DNA, 1932 bp, synthetic construct
  misc_feature 1..1932: note = Description of Artificial Sequence: Synthetic coding sequence
  source 1..1932: mol_type = other DNA
atgaaggttctcaagaaggctaccctgaaagtcagagaccgggtgaggacaaagatggaacgagatatcttggccgatgttaaccacccctttgtggtgaaactgcactatgccttccagaccgagggcaaactttacctcatactggattttctgagaggaggtgacctgttcactcgcctctcaaaagaagtgatgtttactgaggaagacgtgaaattttacctagccgagctcgcgctcggtctggaccatctccattcgctgggcattatctatcgcgacctgaaaccagaaaacattcttctcgatgaggaggggcacataaagcttacagactttggactttctaaagaggctattgaccacgagaagaaagcctacagtttctgtgggactgtagaatacatggctcccgaggttgtgaaccgacagggacatagccattctgcagattggtggtcctacggcgtgcttatgttcgaaatgcttacagggtctcttccgttccaagggaaggatcggaaggagactatgacactgatcttgaaagccaaactggggatgccgcagtttctatcaacggaggcacagtctctcttgcgcgctttgtttaagcgcaacccagccaaccgccttggatctggaccagatggcgccgaggaaattaagaggcacgtcttttactccacaatcgattggaacaagctttacaggcgcgagattaaacccccctttaaacctgctgtggcccagcccgacgacacattttactttgatacggaattcacaagccggacacccaaagactctcctggcattccacctagcgcgggggcacatcagttattcaggggttttagctttgtggctaccgggcttatggaggacgatggcaaaccccgcgccccccaggcaccacttcactcagtggtccagcagctgcatgggaagaatcttgtctttagtgatggctatgtagttaaggagaccattggggtgggcagctatagcgaatgcaagcgctgcgttcacaaagcgactaatatggagtatgccgtgaaggttatcgataagagtaagagagaccccagcgaggaaattgaaattttgcttcgatacggacaacatcctaatatcataaccctgaaggatgtttacgacgacggtaaacacgtgtacctggtgaccgaactaatgcgcggcggggagctattggacaaaatcctcaggcagaagtttttttctgaaagagaagcaagtttcgtcctccacactattggcaaaaccgtggagtacttgcactcacagggcgtcgtccatcgtgaccttaagccctccaacatattatatgtggatgaatccggaaacccagagtgtcttcggatttgtgactttggtttcgccaagcagctgcgcgcagagaacggactgttgatgacaccctgttatactgctaactttgtggcacccgaggtcttgaaaaggcaaggatacgacgagggatgtgatatttggtcacttggtattttgctgtacaccatgttggccgggtatacccccttcgccaatgggccgtctgacacccccgaagagatcctgacccggattgggtccggtaagttcactctatccggaggaaattggaataccgtatccgaaactgctaaggacctcgtgagtaagatgctgcacgtcgatcctcatcagcgcctgactgccaagcaggtgctccagcatccatgggttactcagaaggacaagctccctcaatcccaactgtcacaccaggatctccaactagtgaagggagcaatggcagctacgtactctgcgttaaactcctctaaaccaaccccccagctgaagccaattgagtccagcatcctcgcccagcggcgcgttcgtaaattacccagtaccacactgtag

SEQ ID NO: 17212 - DNA, 687 bp, synthetic construct
  misc_feature 1..687: note = Description of Artificial Sequence: Synthetic coding sequence
  source 1..687: mol_type = other DNA
atgccgcagttcctgtccacagaggcccaatcgttattgcgcgccttgtttaaacggaaccccgcaaaccgactaggctcaggccccgacggggccgaagaaattaagaggcacgtgttctattccactatagactggaacaagctttatagaagggaaattaaacctccattcaagccagctgttgcacagcccgatgatacattttactttgatacggaattcacatcgcggacaccaaaggattcacccgggatccctccgtcggccggcgctcatcaactgtttcgcggcttttccttcgtagcgacaggactaatggaggatgatggaaaacccagagcacctcaagcccccctgcatagcgtggtgcaagtgattgacaagagcaaacgtgaccctagcgaggagattgaaattctgttgcgctatggacaacaccctaatatcatcactcttaaggatgtctatgatgatggtaaacacgtgtacctcgtcaccgaactgatgcgcggcggagagcttctcgacaagattctgagacagaaatttttctccgagcgcgaggcatcctttgtgctgcatacgatcggaaaaactgtggagtacctgcatagtcaaggagtagtccacagagatcttaagcctagcaacattctttacgttgacgagtctggtaacccttag

SEQ ID NO: 17213 - DNA, 2208 bp, synthetic construct
  misc_feature 1..2208: note = Description of Artificial Sequence: Synthetic coding sequence
  source 1..2208: mol_type = other DNA
atgcccctggctcagcttaaggagccctggcccctaatggagctagtccctctggacccagagaatggccagacaagtggagaagaggccggcttgcagccctctaaggatgaaggagtgctaaaagaaatctcaatcacccatcatgtcaaggctgggtctgagaaggcagaccctagccatttcgaattgctgaaagtcttgggccagggatcttttggcaaagtgttcttagtaaggaaagttacaaggccagactctggccacttgtatgcaatgaaagtcctcaaaaaggccactctgaaggtacgcgaccgagtcagaactaaaatggaacgagatatcctcgccgatgttaatcatccatttgttgttaagctacactatgcattccagacagaggggaagctgtacctgattctggattttctgcgtggcggagacttgttcactcgcttgagcaaagaggtaatgttcaccgaggaagacgtcaaattctaccttgctgagctcgctctcggcctggatcacctgcattctctgggcattatttatcgggatctgaagcctgaaaatatcctgttggatgaggaggggcacattaagctcaccgatttcgggctgtctaaggaggctatcgaccacgagaagaaggcctacagcttttgcggtaccgtggagtacatggcaccagaagttgtgaaccgtcagggacattctcactccgccgattggtggtcatacggcgtcctgatgtttgagatgctaaccggcagcttacccttccagggtaaggacagaaaggagaccatgaccctgatcctgaaggccaagctggggatgccccagtttctgtcaacggaggcgcaaagcttgctcagggcgctttttaagaggaaccctgctaaccggctggggagtggaccggatggagcggaggaaatcaaacgccatgtcttttattcgacaatcgactggaataaactctatcggcgcgagatcaagcccccatttaagcccgctgtggctcagcccgacgacacattttattttgacacagagttcacctcaagaacacccaaagatagccccggcatcccaccttctgctggcgctcaccagctgttcaggggatttagctttgtcgcaacggggctgatggaggatgacggcaaacctcgcgcaccacaggccccactccattccgtagtgcaacaactgcatgggaaaaatcttgtgttctcagacgggtatgtggtgaaggaaacaattggcgttggatcctactccgagtgtaagcggtgtgtgcataaagctaccaatatggaatacgctgtgaaagtcatcgacaagtccaaaagagacccatcggaagagatcgagattttgctgcgatatggtcagcatcccaatataatcacactgaaggacgtctacgacgatggaaagcatgtgtatctggtgactgaattgatgcgtggaggagaactgcttgacaaaatcctgcgtcaaaagttcttcagcgagcgcgaggccagtttcgtgctgcacaccattggaaagacagtggagtatctacactcacagggcgtcgttcatagggacctgaaaccctccaatattctgtatgttgatgagagtggaaacccggagtgtctgcggatctgcgacttcggttttgccaaacagctccgtgcggagaatgggctcctgatgaccccatgctataccgcgaattttgtcgctcccgaggtcctgaaacgacaggggtatgatgaaggatgcgatatctggtccctggggattctactctacaccatgctagcagggtacactccattcgccaatggaccttccgacaccccagaagagattctcacaaggatcggctcaggaaagtttaccctttctggaggtaattggaataccgtcagcgaaactgccaaggatttagtgagcaagatgttgcacgtggatcctcatcagagattgacagcaaagcaggtgctgcagcatccttgggtgactcagaaagataagctaccacagtctcagttgagccatcaggacctccagctggtgaaaggggcaatggccgccacttattcagctctcaactcatccaaaccaacccctcagttaaaacccatcgaatctagcattctcgctcagcgtagagttcgcaaactcccaagtactactctctag

SEQ ID NO: 17214 - DNA, 501 bp, synthetic construct
  misc_feature 1..501: note = Description of Artificial Sequence: Synthetic coding sequence
  source 1..501: mol_type = other DNA
gcacagcccgatgacacgttctactttgataccgaattcacttcgcgcacccctaaggatagccctggcattccgccaagcgcaggcgcacatcagctttttcggggcttcagctttgtggctacagggctcatggaggatgatggaaagcccagggctccgcaggccccacttcattctgtagtgcaagtgattgacaaatcaaaacgggatcctagcgaggaaatcgagattcttctgcgttatgggcagcatcccaatatcataacgctcaaggatgtatacgacgatggaaagcacgtctacctggtgaccgagttgatgcggggtggagaactcctcgacaaaattctgagacaaaagtttttttccgagagagaggcttctttcgtcctgcataccatcggaaaaacagtggaataccttcactcccagggggtggtgcaccgagatttgaagccctcaaatatcctgtatgtggacgagtccggcaacccttag

SEQ ID NO: 17215 - DNA, 2160 bp, synthetic construct
  misc_feature 1..2160: note = Description of Artificial Sequence: Synthetic coding sequence
  source 1..2160: mol_type = other DNA
atgcagaccccagctgatttccctcgagtggaaagagaccttgttccttgcccaagaaaggatgagggggttctgaaggaaatttctattacacatcacgtcaaggccggttccgaaaaagccgacccctctcacttcgagctcctcaaggtgctcggccagggcagctttggcaaggtgttcttggtgcgaaaagtaactaggccggacagcggacatctgtacgcgatgaaagtgctcaagaaggcgaccttaaaagtccgtgacagggtgcgaactaaaatggagagggatatcctcgctgacgtgaatcacccgttcgtggtgaagctgcattatgcttttcagaccgaaggcaaactctacctgatcctagatttcctcagaggaggcgatttgttcacacggctgtccaaggaagtgatgttcacggaagaggacgtgaagttttatctcgccgagctggctctgggcctcgaccatctacacagtctgggcattatctaccgggaccttaagcccgaaaatattctgttagacgaagaggggcatatcaagctaaccgatttcggcctgagcaaagaggcgatagatcatgagaagaaagcctactctttctgtgggaccgtagagtacatggctccggaggttgtcaaccgccagggtcacagccactctgcagattggtggtcctatggcgtgctgatgttcgaaatgctcacgggctccttacctttccagggcaaggacaggaaagaaacaatgactcttatcctaaaagccaagctgggcatgccgcagtttctgtctaccgaagcacagagcctgttgcgggccctgttcaagcgcaatcctgccaatcgcctgggctctggacccgatggcgcggaagaaatcaagaggcatgtgttttactctaccattgactggaataaactgtacagacgggagatcaagccacctttcaaaccagcagtggcgcaaccagatgacactttttactttgacaccgaattcactagccgcacaccaaaagacagccctgggatccctccctccgccggggctcaccagcttttcagaggattctcgttcgtggccaccggcctcatggaggacgatggtaaaccgcgcgcaccgcaggcgcccctgcactctgtagtgcaacagttgcatggaaaaaatctggtcttctctgatggctatgtcgtgaaagaaactatcggagttggatcatatagcgagtgcaaacggtgtgtgcataaagctactaatatggagtatgccgtgaaggtgatcgacaaaagcaaaagagacccctccgaggagatcgagattctgctgcgctacggccagcatccaaacatcatcactctgaaggatgtgtacgacgatggtaagcatgtgtatctagtgacagagcttatgcgaggaggtgagctgctggacaagatcctgcggcagaagtttttctctgagcgagaggctagctttgtactgcatactattggtaagacagtggagtatctccacagccaaggcgttgtgcacagggatctgaagccgagcaacattctttatgtcgacgaatcaggaaatcctgagtgcctccgcatttgcgattttggtttcgctaaacagctgcgagcagagaacggcctgctcatgaccccatgttatactgcaaattttgtcgctccagaggtgctgaaacgccaagggtacgatgagggttgcgacatctggtctcttggaatactcctgtacaccatgctggccggatacactccgttcgccaatggacctagcgacactcccgaagagattctgactcggataggctcaggtaagttcacgttatcgggcggtaattggaatacggttagcgaaaccgctaaagatctcgtttccaaaatgctccatgtcgaccctcatcagagattgaccgccaaacaagtcctgcagcacccttgggtgactcagaaggataagttgccgcagtctcagctctcacaccaggatttgcagttagtaaagggggcgatggccgcaacgtactccgccctgaactcgtctaagccaaccccacagttaaagcctattgagtccagtatactggcacaaaggagagttcgtaagttgccctccaccacattatag

SEQ ID NO: 17216 - DNA, 2202 bp, synthetic construct
  misc_feature 1..2202: note = Description of Artificial Sequence: Synthetic coding sequence
  source 1..2202: mol_type = other DNA
atggacctgtctatgaagaaatttgcagtgagaagattttttagtgtgtacctcaggcgcaagagccggagcaagtctagttcactgagtcggctggaagaagagggggtggtaaaggaaatcgacattagccatcacgtgaaagaagggttcgaaaaagcagacccgtcccagttcgaactgctgaaagtgctcgggcaaggctcttatggaaaagtcttcctcgttcggaaagttaaaggtagcgacgcaggacagctgtacgccatgaaggtgctgaagaaggctacactcaaggtcagggatcgcgtgcgatcaaaaatggaacgtgatattctcgctgaggttaatcacccctttatcgtgaaattacattatgcttttcagaccgagggcaaactatacctcattctggatttcctccgaggtggcgacctcttcactagacttagcaaagaagtcatgtttacggaagaggatgtcaagttctacttagcggaactggcccttgctctggaccatctacacagtttggggatcatctacagggatctcaagcccgaaaacatactcttggatgaggagggccatattaagattactgatttcggcctgagcaaggaggccatcgatcatgataaaagggcttattccttttgcggtaccatcgagtatatggctcccgaagtggtcaaccgccgtggccacactcagagcgccgactggtggtcattcggcgtcttgatgtttgagatgctcacgggttctcttccttttcaaggcaaggaccggaaggagactatggctctcatacttaaagcaaagctgggcatgccgcagttcctctccggggaggcccagagtctgctgagagcactcttcaagcgcaacccatgcaataggctgggcgccggcattgatggggtggaggagataaaacgccacccgttctttgtcacaattgattggaataccctataccgcaaagagattaagccaccgttcaaaccagccgttgggcgccccgaagataccttccattttgatccggagttcactgcaaggaccccgaccgattcgcctggcgtacccccatcagccaatgcccaccacctcttccgaggatttagcttcgtggcttcctctctgatccaggagccaagccaacaggatctacacaaagtacctgttcacccaattgttcaacagctgcacggaaataacatccacttcactgatgggtacgaaataaaagaagacataggtgtagggagctacagcgtgtgcaagcgctgtgtccacaaagccaccgatacagaatatgctgtcaagatcattgataagagtaaaagagatccatccgaggaaatcgagattctgctcaggtacggccaacaccctaacattataaccttgaaggatgtctatgatgatgggaagttcgtgtacctagtcatggagttgatgcgggggggggagttgttagatcgtatcttgcgccaaagatacttcagtgaacgagaagcctccgatgtgctgtgcacgattacaaagactatggactacctccacagccagggtgtcgtccacagagaccttaaacctagcaacatactgtaccgagacgagagcggcagtccggagtcaataagagtatgtgatttcgggttcgccaagcagcttcgcgcgggaaacggtctcctgatgacgccatgttacaccgcaaactttgtggcccctgaggttctgaagcggcaaggctatgacgcagcatgcgacatctggtctctgggaattttgctgtacacaatgctagctggttttaccccgttcgcaaatggacccgatgatactcccgaagaaattctcgctagaatcggatctggcaagtatgcgctctctggcggcaactgggactccatcagcgacgctgccaaggatgttgtgagcaagatgctgcacgtagaccctcaccaaagactgaccgctatgcaggttctgaaacacccgtgggtggtgaatagggagtacctcagtcccaaccaactgagtcggcaagatgtgcacctggtgaagggggcaatggctgccacgtatttcgcactgaacaggacaccacaggccccccgcttggagcctgtcctgtcttccaatctagcccagcgcagaggcatgaagcgcctcacctcaacacggctgtag

SEQ ID NO: 17217 - DNA, 501 bp, synthetic construct
  misc_feature 1..501: note = Description of Artificial Sequence: Synthetic coding sequence
  source 1..501: mol_type = other DNA
atgttcactgaagaagacgtcaaattttacctcgctgagctggcacttgctttagatcatcttcatagcctggggattatctacagagacctgaagccagagaacatcctcctcgacgaggaggggcacatcaaaattacagatttcggcctctcaaaagaggctatcgatcacgataaacgggcttattctttctgtgggactatagagtacatggcacctgaagttgtgaacagacgcggacacactcagtctgcggattggtggagttttggagtgctgatgttcgagatgttgaccggctcactgcctttccagggcaaggataggaaggagacaatggcacttatcctcaaagccaagttggggatgcctcagttcctctcaggcgaagcccaatctctgctgagagcattatttaagcggaatccctgcaaccggttaggggagaagaccgccttgtgtccacgcgtgagctgctcccgactgttaggcttttag

SEQ ID NO: 17218 - DNA, 1935 bp, synthetic construct
  misc_feature 1..1935: note = Description of Artificial Sequence: Synthetic coding sequence
  source 1..1935: mol_type = other DNA
atgaaagtcctgaaaaaggccacattgaaagtgagagacagggtgaggagcaagatggaaagggatattcttgctgaggtgaaccatcccttcatagtaaaactgcactacgcgtttcagaccgaaggtaaactgtatctcatcttagacttcctgcggggtggtgatctgtttaccaggctctccaaagaggtaatgttcactgaggaggacgtgaaattctacttggcagagctggcccttgccctggaccatctgcattctctgggcatcatctaccgcgatttgaagccagaaaacatcctacttgacgaagagggacacatcaagatcacagattttgggctgtcaaaagaagccatcgatcacgataaaagggcgtactccttttgcggaactatcgagtatatggctcccgaagttgtgaacagaagagggcacacacagtccgccgactggtggtccttcggggtgttaatgtttgagatgttgacgggctccttgccatttcaggggaaggataggaaagaaactatggcccttatccttaaggcaaaacttgggatgcctcagttcttgtccggagaggcccagtccctgctcagagccttattcaaaaggaacccttgcaatcggctcggcgctgggatcgacggcgtagaagaaatcaagaggcaccccttttttgttaccattgattggaatacattataccggaaggagattaaaccacctttcaaacccgcagttggccgacctgaagacacattccactttgaccctgagttcactgccaggacccctactgactcccccggggtgccaccttcggctaacgctcatcacctgtttcgcggatttagctttgtcgcctccagcctcatccaagaaccctctcagcaggatttgcacaaggtgccagttcaccccattgtgcagcagctgcatggcaacaatatccacttcactgatggatacgaaataaaagaagacatcggggtcgggtcctactctgtctgtaaacggtgtgtccataaggctactgacaccgagtatgccgtgaagatcattgataaaagcaagcgagatccctccgaagagatagagattctgctcaggtatggccagcaccctaatataatcacactcaaagacgtgtacgacgacggcaagttcgtttacctggtgatggagctcatgcgtgggggtgagctcctggaccgaatactgcgtcagcgatatttttctgagagagaagcaagtgacgtcctctgtaccattaccaaaaccatggattaccttcattctcagggcgtcgtgcacagggacctgaagcctagcaatattttatacagagatgagagtggaagtcccgagagcatccgcgtctgcgactttgggtttgctaagcagctccgggcgggaaacgggctgctcatgaccccctgttacacagcaaatttcgtcgcgccggaggtgctgaaacggcaaggctacgacgcagcttgcgacatctggtccctcggtatcctcctgtacaccatgctcgccggctttacccccttcgccaatggacctgatgacacccccgaagaaatcctggcgaggataggcagtgggaagtacgcactgtcgggtggtaactgggattccatttccgacgcagctaaagacgtcgtgtcaaagatgcttcacgtcgatccacaccagcggctgaccgctatgcaggtactaaagcacccatgggtcgtgaatcgggaatatctgtcacctaatcaactgagcaggcaagacgtgcacttggttaaaggggccatggccgccacttattttgctctgaacagaacacctcaagctcctagattagaacctgtactgtcatctaacctcgcccagcgtagaggaatgaaacgcttaacaagcaccaggctttag

SEQ ID NO: 17219 - DNA, 1935 bp, synthetic construct
  misc_feature 1..1935: note = Description of Artificial Sequence: Synthetic coding sequence
  source 1..1935: mol_type = other DNA
atgaaagttctgaagaaggcgacattaaaagtccgtgacagagtgcggtcaaaaatggagagagacatcctggcagaggttaaccatcccttcattgtgaaactgcactacgcctttcagaccgagggcaaactctatttaatcttggactttctgcgcggtggagatctgttcactcggttgagcaaagaggtgatgtttacggaagaagacgttaaattttatctggctgagctagctctggccttggatcatctccattcactgggcattatttaccgcgacctcaaacccgaaaatattctgctggatgaagaaggccacatcaagatcacagactttgggctatccaaggaagctattgatcacgacaaaagagcttatagtttttgtggaaccatcgaatacatggcccccgaggtcgtgaatcggagaggccatacccagagcgccgattggtggtcatttggtgtgctgatgttcgagatgttgacgggcagcctcccattccagggcaaagacagaaaagagaccatggcattaattcttaaggcaaaattaggaatgcctcaattcctctccggggaggcccagtcattgctgcgcgccctctttaagagaaatccttgcaatagactaggcgccggcatagacggagtggaggaaatcaagagacatccgttctttgttactattgactggaataccctgtacaggaaggagataaaaccccccttcaagcccgctgtgggtcggcctgaggacacatttcattttgacccagaattcaccgcgcgcacaccgacagactctccaggtgtgcccccttctgcaaatgcacatcacctcttcagaggctttagttttgtcgcaagctccctgatccaagaaccatcacaacaggatctgcataaagttccagttcaccctattgttcagcagctccatgggaataatatccacttcaccgacggctatgaaattaaggaagatatcggggtcggcagctatagtgtctgcaaacggtgtgtgcacaaggcaaccgataccgaatacgccgtcaagatcattgacaagtctaagcgggatccatccgaagaaatcgaaattctcttaagatacgggcagcacccaaacatcatcactctcaaggacgtgtacgatgacggaaagttcgtgtatctggtgatggagctgatgcgcggcggcgagctgttagatcggatactgcgccagagatacttcagtgagcgggaggcatccgatgtgctgtgtaccattacaaagaccatggattatctccatagccaaggggtggttcaccgagatctgaaaccatcaaatattctgtatcgagatgagtccggctcgcctgaaagtattcgggtgtgcgacttcggatttgccaagcagctccgggctggaaatggccttctcatgaccccatgttacacagccaatttcgtggcgcctgaagtgctgaagcgccaagggtatgatgcggcctgtgacatatggagccttgggatcctcttgtacaccatgcttgccgggtttactccattcgcaaatggacccgacgacacgcccgaagagatactagcgcgcatcggcagcgggaagtacgcgttgagtggtggcaattgggacagcattagtgatgcggccaaggatgtggtgagcaagatgctgcacgtggatcctcaccaaagattaactgctatgcaggttctgaagcatccttgggtggtgaatcgcgaatacctgagccctaaccagctgtcccgacaagatgtccacctggtaaagggagccatggccgctacctacttcgctcttaacaggactcctcaggcaccaagactggaacctgtgttatccagcaacctggcccaacgaagagggatgaagcgcctaacctcaactaggctgtag

SEQ ID NO: 17220 - DNA, 2226 bp, synthetic construct
  misc_feature 1..2226: note = Description of Artificial Sequence: Synthetic coding sequence
  source 1..2226: mol_type = other DNA
atgcctatcgctcagctattggagttgtggaaaaagatcgaagtggaacccatggagattgagactaccgaagaagacttgaatctggatgtggagccaactaccgaggataccgcagaggaggaagagggagtcgtgaaagagatcgatatcagtcatcatgtgaaggagggattcgagaaggccgaccccagccaatttgaattgctgaaagtgctaggccagggcagctacgggaaggtgttcttggttcggaaagtgaaaggaagcgacgctggccaactttacgccatgaaggtgctgaaaaaggccaccctcaaggtgcgtgatcgggtgcgctccaagatggagagggacatcctggccgaagtgaatcaccctttcattgtgaagcttcattacgccttccaaaccgaggggaaactgtacctgatcttggattttttgaggggcggagatttgttcactcgtctgtcaaaagaggtcatgttcaccgaagaagacgttaagttttatctggccgaactggctttggcactcgatcatctgcactctctggggataatctatagagacctgaaaccagagaacatccttctggacgaagagggccatataaagatcacagactttggactttcaaaggaagccatcgatcatgacaagcgggcctactcattttgtgggacaatagaatatatggcgcccgaggtcgtgaaccggaggggacacactcagtccgccgactggtggagttttggagtgctgatgtttgagatgttgaccggatccctcccgttccagggcaaagacagaaaagagaccatggccctgatactaaaagccaagctcggcatgccacagtttcttagcggagaagcccagagcctgcttcgggccctctttaaaagaaacccatgtaatagactgggtgcaggcattgacggagtcgaggaaataaagcgccacccatttttcgtgacaatcgactggaatacactgtatcgtaaagagattaagcctcctttcaagccagcagtgggccgtcccgaggataccttccattttgatcctgagtttactgcaagaacacctaccgatagccctggcgtgcccccttcagccaatgcccatcatctgttcagggggtttagcttcgtggccagcagccttatccaggaaccatcacagcaggatttacacaaggtaccagtgcatccaattgtgcagcagctgcatggcaacaacattcattttacggatggctacgaaattaaggaggacatcggagtgggtagttattccgtgtgtaaacggtgcgtccacaaagccacagatacagagtacgctgtgaaaatcatcgacaagtccaaaagagatccctcagaagaaatcgaaatattgttgcgctatggacagcaccccaacatcattaccctgaaggacgtctacgacgacggcaaatttgtgtacttagtcatggaactcatgcgcggcggtgagctgctggaccgtatcctgaggcagagatactttagtgaaagagaggcgtcagacgtgttgtgtacaattacaaaaaccatggactatctgcactctcagggtgtggtccatagggacctgaaaccctctaacatactgtaccgcgacgaatccggctcacccgagagcattcgcgtgtgtgactttggctttgcaaagcagctgcgggcagggaatgggctactgatgacaccgtgttacacagctaattttgtagcaccagaagtcctcaagagacaaggttacgatgccgcatgcgacatctggtccctgggaatcctactttacacaatgctggctggattcactccttttgctaacggtccagacgacacacccgaagagattctggctcggattggatccggtaaatacgccctcagcggtggcaactgggacagtatcagcgacgctgctaaggacgtcgtatcaaagatgctccacgtagatcctcaccagagattgaccgctatgcaggtccttaagcatccatgggtggtgaaccgcgagtacctgtcacctaaccagctgagcagacaggacgtccacctggtcaagggcgccatggctgcaacttatttcgctctcaatcggacacctcaggcccctaggctggaacccgtactgtccagcaatcttgctcagaggaggggcatgaaaaggctgactagcacccggctctag

SEQ ID NO: 17221 - DNA, 516 bp, synthetic construct
  misc_feature 1..516: note = Description of Artificial Sequence: Synthetic coding sequence
  source 1..516: mol_type = other DNA
atgccgattgctcaattgctggaactgtggaagaagatagaagtggaaccgatggagatcgaaactacagaggaggacctgaatctcgacgtggagcccactaccgaagatacagcagaggagggaaaatccgacagtgccgcctgcaaaacaaaggttgctgggagcgtggaggaggaaggggtggttaaagagattgatatatcacaccacgttaaggaggggttcgaaaaggctgaccctagccagttcgagctacttaaggtgttaggtcaaggcagttacgggaaggttttccttgtaagaaaggttaagggctctgatgccggccagctgtacgcgatgaaggtgttaaaaaaggccacactgaaggtacgtgatagagttagaagcaaaatggagagggatattttagccgaggtgaatcacccgttcatcgttaaactgcactatgccttccagacagagggcaagctgtacctcatcctggacttcttgagagggggagacctgtag

SEQ ID NO: 17222 - DNA, 2277 bp, synthetic construct
  misc_feature 1..2277: note = Description of Artificial Sequence: Synthetic coding sequence
  source 1..2277: mol_type = other DNA
atgcccattgctcagctcctggagttgtggaagaagatcgaggtggaacctatggaaattgaaaccaccgaggaagatctgaacctggacgttgagcctacgacagaggatacagcagaggagggtaaatcggacagcgcagcctgtaaaacaaaagtggctggatcagtggaggaggagggggttgtcaaagagatagatataagccaccacgttaaagagggctttgaaaaggccgatcctagtcagttcgagttactgaaagtgctggggcaaggatcttatggaaaggtctttttagtacgaaaggtaaaaggatctgacgccggacagctttatgctatgaaagttctgaagaaagccactctgaaagtcagagacagagttcggagtaaaatggaaagggacatcctggcggaagttaaccacccattcatcgtgaagctccactacgctttccagactgaaggcaaactgtatctcatcttagactttctgcgggggggcgatctattcacacggctgtccaaagaggtgatgttcaccgaagaggacgttaaattctatctggcggagctcgccctagcgctggaccacctgcactcactgggaattatctacagagacctgaagccagagaatatccttttggatgaggaagggcacattaaaatcacagattttggactttcaaaagaggccattgaccacgacaagcgagcatattcattttgtgggaccatcgagtatatggctcctgaagtggttaatagacgtggacacactcagtcagccgactggtggagtttcggcgttctgatgttcgagatgctgacggggagtctcccttttcaaggaaaggacaggaaagagaccatggccctcatactcaaagcaaaactgggcatgccacagttcttgagcggcgaagctcaatccctgctgagggcactcttcaaaagaaatccctgcaaccgattgggagcaggcatagatggggtcgaagagatcaagcgccacccttttttcgtgacaatagattggaatactctctaccgaaaggaaatcaagccccctttcaaaccagcagtaggacgccctgaagatacctttcatttcgatccagaatttacagctaggaccccaactgactcacctggcgtaccccccagtgctaatgctcaccatcttttccgaggattctcctttgtggcctccagcctgattcaggaaccatcacagcaggacctgcacaaagtccctgttcatcccattgtccaacagctgcacggaaataatattcactttactgacggctacgaaatcaaggaggatattggcgtgggtagttatagcgtgtgtaaacgctgtgtgcataaagcgacagacactgagtacgccgttaagattatcgataaatctaagagggacccttcagaagagattgagatcttgctacgctatggccagcaccctaacattatcaccttgaaggatgtgtatgatgatggtaaatttgtatatctggtaatggagctgatgagaggaggagaactgctggaccgaattctccgacagcgatatttcagcgagagagaagcaagtgatgtgttatgcacgattaccaagaccatggattatttgcactcccagggtgttgtgcaccgcgatttgaaaccctccaatatcctgtacagggacgagtctggatcccctgaatctataagggtgtgtgacttcggattcgccaaacaacttcgtgccggaaacggtctgctgatgaccccttgttatactgccaattttgtggcccctgaggtcctgaagagacaggggtatgatgccgcttgcgacatttggagtctcggtatcctgttgtataccatgctggcagggttcaccccctttgctaatggtccggacgacacgcctgaggaaatcttggctcgcatcggttctggcaaatacgccctctccggagggaactgggactcaatttcagatgcagctaaggatgttgtgagcaaaatgctgcatgtcgacccacaccagcgcctgacagccatgcaggtgctcaaacatccatgggtcgtaaatcgggaatacctctctccaaatcagctctcccgccaggacgtccatttagtaaaaggcgctatggccgcaacatatttcgccctcaatagaaccccccaggccccccggctggagccagtgctgagtagcaatctcgcacagagaagaggaatgaaacggctgactagcaccagactgtag

SEQ ID NO: 17223 - DNA, 888 bp, synthetic construct
  misc_feature 1..888: note = Description of Artificial Sequence: Synthetic coding sequence
  source 1..888: mol_type = other DNA
atgagtggagccctggacgtgttgcagatgaaagaggaggatgtcctcaagttcctggctgcaggcacccacttaggagggacaaatctcgattttcaaatggagcagtacatctacaaacgaaaaagcgacgggatatatatcattaatttgaaacgaacgtgggagaaactgttgctcgccgctcgagccatcgtagcaatcgaaaatccggccgatgtctcagtcatctcctccagaaacacaggtcagcgggccgttctaaagtttgcggccgccaccggagccaccccaatagctggacgtttcacgcccggcactttcacaaatcagattcaggctgcttttcgcgaaccaaggctgctcgtggtgactgatccaagagccgatcaccagccgcttactgaggctagctatgtaaatctgcccacaatcgcgttatgcaacaccgactccccactccgatatgtcgacatcgccatcccatgtaataacaagggagcccattctgtgggtctgatgtggtggatgctagcccgtgaagtacttagaatgaggggaaccatatcacgcgagcacccctgggaggttatgcctgacttatacttttatcgcgacccagaggaaatcgaaaaggaagagcaagccgcagccgaaaaggcagtgaccaaagaagagttccaaggagaatggaccgctcctgctcctgaatttacggcaacacagcccgaagtggctgactggtcagaaggagtgcaggtcccaagcgtgcccattcaacaattccccaccgaagattggtccgctcagccagctacggaagattggagcgccgcccctacagcacaggccaccgaatgggttggagcgactaccgactggtcctag

SEQ ID NO: 17224 - DNA, 795 bp, synthetic construct
  misc_feature 1..795: note = Description of Artificial Sequence: Synthetic coding sequence
  source 1..795: mol_type = other DNA
atgtcaggcgctctggatgtccttcagatgaaggaagaagacgttctcaaatttttggctgcagggacccatctgggcgggacaaacctggattttcaaatggagcagtacatctataagcgcaaatctgatggaatatatattattaatttgaagaggacgtgggaaaaactgttgctcgcagcgagggctattgtggccattgaaaaccccgcagacgtgtctgtcatcagctcccggaacacaggacaaagggctgtgttgaagttcgctgcggccaccggcgctacccccatcgccggcaggttcacacccgggacttttactaaccaaatccaggccgccttccgagaaccacgcttgctggtggtcacggatcctcgggccgatcaccaaccccttacagaggcctcttatgtgaatctgccaaccatcgccctgtgtaatactgacagcccgttaaggtacgttgatattgctattccctgcaataacaaaggcgcccactccgtggggttgatgtggtggatgctggcccgggaggttcttcgcatgcgcggcaccatcagccgagagcacccctgggaagtcatgcctgatctgtacttttatagggatccagaggagatcgagaaggaggagcaagcagctgctgagaaagccgtcacaaaagaggaatttcaaggtgagtggactgcaccagcacccgagtttactgcgacgcaacctgaggtggcagactggtctgagggagtgcaagttccctccgttccgatacagcaatttccaacgtag

SEQ ID NO: 17225 - DNA, 1458 bp, synthetic construct
  misc_feature 1..1458: note = Description of Artificial Sequence: Synthetic coding sequence
  source 1..1458: mol_type = other DNA
atgggggagcctgggttcttcgtaactggagatcgggcaggtggaagaagctggtgtctccggcgggtcggcatgtcggccgggtggcttcttctcgaggatggctgcgaagtgaccgtgggccgcggattcggcgttacctaccagctggtaagtaagatttgccctctaatgatcagtagaaaccactgcgtgttgaagcagaaccctgagggccaatggactattatggataataaatcactgaatggcgtgtggctgaaccgggctcgattggaaccgctgagagtgtattccattcaccagggggactacatccagctgggtgtcccactcgagaacaaagaaaacgctgaatacgagtatgaggttaccgaagaggactgggaaacgatctatccctgcctctcgcccaaaaatgatcagatgatcgaaaaaaacaaggagctgcgtaccaagaggaagttcagcctggatgaattagcaggtcccggcgcagaaggacccagcaatttaaagagcaaaattaacaaggtctcctgtgagagcggccagcccgtcaaaagccaggggaaaggcgaggtggcaagtacaccgtctgacaacctggatccgaagctcactgcccttgagccgtctaaaaccaccggggccccaatctaccccggatttcccaaggttactgaagttcaccatgagcaaaaggcatctaattccagtgccagtcagagatctctacaaatgtttaaggtgactatgagtagaatcctacggctgaaaattcaaatgcaagaaaagcatgaggccgttatgaatgtgaaaaagcaaactcagaaaggaaactccaaaaaggtggttcagatggagcaggagctccaggatttgcagtcacagctgtgtgccgagcaggcgcagcagcaggccagagtagaacagctcgaaaagacatttcaggaggaagaacagcacctacagggcctagaaattgcccagggtgaaaaggacctgaaacagcagttggcacaggcactgcaggagcactgggcccttatggaggaactaaatcgtagtaagaaggattttgaggccattatccaggcgaaaaacaaagaactggagcagaccaaagaagagaaggagaaaatgcaggctcagaaagaggaggtcctgtctcacatgaacgacgtgcttgagaacgaacttcagtgtattatatgttccgagtacttcatcgaagcagtgactctgaattgtgcccattccttctgttcatactgcatcaacgagtggatgaaaaggaaaatcgaatgtcctatatgtcgcaaggacattaaatcgaaaacttactcattggtgttggacaactgtatcaataaaatggtgaacaacctttcctcagaagtcaaagagagacggattgttctcataagggagcgcaaggccaaaagactcttctag

SEQ ID NO: 17226 - DNA, 297 bp, synthetic construct
  misc_feature 1..297: note = Description of Artificial Sequence: Synthetic coding sequence
  source 1..297: mol_type = other DNA
atgggagagcctggttttttcgttactggagacagggccggggggcgctcttggtgcctgcgtagagtgggaatgtccgccggatggctgctgctggaagacggttgcgaggtgacggtcgggcgagggtttggcgtgacatatcagctcgtgtctaagatttgtcccctcatgatctctagaaaccattgcgtcctaaaacagaaccccgagggtcagtggaccatcatggacaacaaatcctttccttccgaaaaggccgaggacttcactgccgccggggaacggttcctctag

SEQ ID NO: 17227 - DNA, 1347 bp, synthetic construct
  misc_feature 1..1347: note = Description of Artificial Sequence: Synthetic coding sequence
  source 1..1347: mol_type = other DNA
atgggagaacccggctttttcgtgaccggagaccgagccgggggcaggtcctggtgcttaagaagagtgggaatgtctgcaggctggcttctgctggaggacggatgtgaggtgacagtgggccgtggctttggggtcacctaccagctcgtctcaaaaatctgccctctaatgatatcgcggaatcactgcgtcctgaaacaaaaccccgagggacagtggacaattatggacaacaagtcactgaatggggtatggttgaatcgcgcccgcctcgagcccctgcgtgtgtattccatccatcagggggactacattcagctgggagtacctctggagaacaaggaaaacgccgagtacgaatacgaggttaccgaggaagattgggagaccatatacccatgtctcagcccgaagaacgaccagatgatagaaaaaaacaaagaactgagaacgaagaggaagtttagcctggatgagcttgctggcccaggcgccgaggggccctctaatctgaagtctaagattaacaaagtctcatgtgagagtggccagcccgtcaaatctcagggaaaaggagaagtggctagtacgccatctgataatctagatccaaaacttacagccctggagccttcaaaaacaactggtgccccaatctatcctggttttccaaaggtcaccgaagttcaccacgagcagaaggctagtaattcaagcgccagtcagagatcgctgcagatgttcaaagtcactatgtccagaatcttgaggctgaagatccagatgcaggaaaaacatgaagctgttatgaacgttaaaaaacagactcagaagggtaattcgaagaaagtggtacaaatggagcaggagctgcaagacctgcagagccagctgtgcgccgagcaggctcagcagcaggctcgagttgagcagctggaaaagacattccaggaagaggagcagcacctccaaggactcgaaattgctcagggcgaaaaagacttgaaacagcagctagcccaggctttgcaggagcattgggcacttatggaagagctaaatagatctaagaaggacttcgaggccatcatccaggccaaaaacaaggagctggagcaaacaaaggaggaaaaagagaaaatgcaagctcagaaggaagaagtgctgtctcacatgaatgacgtcctggagaatgaactgcagtgtatcatttgcagtgagtacttcatcgagcagcgcgattgctcagaggatcgggcgctgcgtgcatttgagcgccttcctgggagtgcctcacttcgctggtccggagggttttcattagccgtcactccgctcctctag

SEQ ID NO: 17228 - DNA, 1593 bp, synthetic construct
  misc_feature 1..1593: note = Description of Artificial Sequence: Synthetic coding sequence
  source 1..1593: mol_type = other DNA
atggcagacgacatcgatatcgaagccatgctggaggccccctacaagaaagatgagaataaattgagcagcgcgaatgggcacgaggagagatcaaagaagcgtaagaagtccaagagtagatcccgctcgcatgagcggaaacggagcaaatcaaaagaacggaaacgatcccgggaccgtgaaaggaagaaatctaagtcgcgggagcgtaagaggtccagatctaaagaaaggcgtaggtccagatccagaagtagagacagacggttccgaggtcggtatagatccccctattcgggacctaagttcaactccgccattcgtgggaagataggactcccacactcaatcaaactgagcagaagacggagtcgatcaaagagccctttccggaaggacaaatctcccgttcgagagcccatcgataacctgacgcccgaagaaagagacgcccgaacggttttttgtatgcagttagctgctcgcattcggcctcgcgatctcgaagagtttttctcaacagtgggtaaggtgagggatgtcagaatgatctctgacaggaattctaggcgtagtaagggtatagcttatgttgagttcgtggatgtgtccagtgtgcccctcgctataggcctcacagggcaacgggtgcttggggtgcccatcattgtacaggcctctcaggccgagaaaaatagggcagccgcaatggcgaacaacttacagaaaggatctgccggacccatgcggctatacgtcggcagcctgcatttcaatatcacggaagatatgctaaggggaatcttcgaacccttcgggcgaattgagtcgatccagttaatgatggatagtgagactggacggagtaaagggtacgggttcatcacattctctgattcggaatgcgctaagaaagctttggaacagctgaatgggtttgaattagctggcaggcctatgaaggttggacacgtcactgaacgtaccgatgcctcgagcgcctcgagttttctggacagtgacgaattggagaggaccgggattgatttgggtactactgggaggctgcaactgatggctagactcgccgaaggcacgggcctacagattccacccgctgcccagcaggccttgcagatgagcgggtctttggcttttggggctgttgctgagttcagctttgtgattgacctacaaacaagattatctcagcagacggaagccagtgccctggctgccgcagcatcagtccagccattagcaactcagtgctttcagttgtctaacatgttcaatccccagacagaagaggaggttggttgggatacagaaatcaaggatgatgttatagaagaatgtaacaaacacggaggtgtaattcatatttatgtggacaagaacagcgcccagggtaatgtgtacgtcaagtgccccagcattgctgcagccattgctgccgtgaacgcacttcacggaagatggtttgccgggaagatgatcacggcagcatatgttccgctgcccacttatcataacctgtttccagacagcatgacggcaacccagctgctcgttccctcccgtagatag

SEQ ID NO: 17229 - DNA, 1272 bp, synthetic construct
  misc_feature 1..1272: note = Description of Artificial Sequence: Synthetic coding sequence
  source 1..1272: mol_type = other DNA
atggctgatgatatagacatcgaggccatgctggaagctccatacaagaaggacgaaaacaaactgtcatccgctaatgggcatgaggagaggtccaagaagcgcaaaaaaagcaagtcgcgctctagatcacacgaacggaagagaagcaaatctaaggaaaggaaaagaagtcgcgatagagaacggaagaagagcaaatcccgggaaaggaagcggagccggtccaaagagcgtagaagaagccgtagccgtagtagagaccgacgttttcgcggtcgctatagaagtccatatagcgggccaaagttcaattctgccattcgtggcaagatcggactccctcacagcatcaagctaagccgaagacgatctcgctccaagagcccatttcggaaagacaagagtccagtgcgggagccgattgacaacttaacgccagaggagcgcgatgctagaaccgtcttttgcatgcaactcgccgcccgcattcgaccgcgggatctagaggaatttttttcaactgtgggcaaggtgcgggatgtgaggatgatctccgaccgcaacagtcgccgaagcaagggtattgcctatgtggagttcgttgacgtatcatccgtgccactcgcgatcgggttaaccggccagagggtgctgggtgtgcctattattgtacaggcttctcaggccgaaaagaaccgcgcagcagccatggccaacaacctacagaaggggagtgcggggccgatgaggctctatgtggggtctctgcactttaacatcaccgaggacatgctcaggggcatattcgagccctttggccgcattgagtccattcagttgatgatggactcggagaccggtcgttcgaaggggtacgggtttattaccttttctgacagtgagtgcgctaaaaaggccctggaacagctgaacggcttcgaactggctgggcgccccatgaaagtgggccatgtcaccgagaggaccgacgccagtagcgcttcgagctttctggattccgacgagctggaacgaaccggaatcgacttggggacaacgggacgcctgcagctgatggcacgcctcgcggagggtacagggctccaaattccaccagctgcgcagcaggcgttgcagatgagcggctcgttagcgtttggagccgtcgccgacctgcagacacgacttagtcagcagaccgaggctttgttcgtgattatgttctggaacgaaatttggtctgacaacatgatcaccctgcaactctag

SEQ ID NO: 17230 - DNA, 1575 bp, synthetic construct
  misc_feature 1..1575: note = Description of Artificial Sequence: Synthetic coding sequence
  source 1..1575: mol_type = other DNA
atggccgacgacatcgacattgaggccatgctggaggccccatataaaaaagacgaaaataaattgtccagcgctaatgggcatgaagagagatccaaaaagcggaagaagtccaaatcaagatcacggtcccacgaaagaaaaaggtccaagagtaaggaaaggaaacggtctcgggaccgggagaggaaaaagagcaaatcacgagaaagaaagagatcccgctcaaaagagcgtcggagatcccgctcccgcagcagagatcgacgatttcgggggaggtaccgaagcccttactcggggcccaagtttaacagcgcgattagggggaaaatcggactgcctcacagcattaagttgagtcgcaggcggagtcgctctaaatctccctttcggaaggacaagtctcccgttcgggagcccatcgataatctgacgcctgaggaaagagacgcaaggacagtgttctgcatgcagctcgctgctcgtattcgaccccgggatctggaggagtttttctccacggtcgggaaagtgagggatgtgcggatgatatcagaccgcaatagccggaggtccaagggcatagcctacgttgaatttgtggatgtgagtagtgtccccttagctatcggcttaacaggacaacgagtcctgggagtgcccataatcgtccaggcttcccaggccgaaaagaatagagctgctgcaatggcaaacaatctccagaagggctctgctggacccatgagactgtatgtgggaagcctgcatttcaacatcacagaggatatgctcagaggcatttttgaaccgttcgggcgaattgagagcattcagctcatgatggattcagaaaccggcaggagtaaggggtacggatttattacattcagcgacagcgaatgcgctaagaaagcactcgaacagttgaacgggttcgaactggctggacgacccatgaaagtgggtcacgtgaccgaacggacagacgccagctccgcttcatcattcttggactcagatgaacttgagaggacgggaatcgatctgggcaccaccggtagactgcagttgatggcccgcctggcagagggaaccgggctgcagattcccccggctgcccaacaggcgcttcagatgagcggcagcttagcattcggcgctgtagccgacctccagactcgcctgagccaacagaccgaagcttctgctttagccgcggcagcttccgttcagcctctggccacccagtgcttccagctgtctaatatgtttaatccacagactgaggaggaagtggggtgggatacagaaataaaggatgatgtgattgaggagtgtaacaagcacggaggcgttatacacatctatgtggataagaatagcgctcagggaaatgtttacgtgaaatgcccttctatcgcagcggcaatcgctgctgtgaatgccctgcacggcagatggttcgccggcaaaatgattacagccgcctacgtccctcttcctacttaccacaatcttttcccagactctatgacagcgacacaactcctggtgccgtcgaggaggtag

SEQ ID NO: 17231 - DNA, 696 bp, synthetic construct
  misc_feature 1..696: note = Description of Artificial Sequence: Synthetic coding sequence
  source 1..696: mol_type = other DNA
atggccgacgatatcgacattgaagctatgttagaggcaccttataaaaaagacgaaaacaagctgtcttcagccaacggccacgaggagagatctaagaagcgcaagaagtctaagtccaggtcaaggtctcatgagcgcaaacggtccaaatccaaagagaggaaaaggtctcgcgaccgggagaggaagaaatctaaatcacgggagaggaagcgatcccggtctaaagaaagaaggcggtctcggtcaaggagcagagataggcgattccggggacgctacaggagtccctacagtggacctaagttcaatagcgccattcggggaaaaatcggcctgccacacagcataaaactaaggcggcgaagccgcagcaaatctcccttccggaaggataagagcccagtgcgcgaaccaatagataatttgaccccggaggagcgggatgctcgaaccgtgttttgcatgcaattagccgctaggattcgaccaagagacctcgaggaattcttttccaccgtgggcaaggtgcgcgatgtgagaatgatctcagataggaactccagacggtcaaagggaatagcttatgtcgagttcgtcgatgtgtcaagcgtgcccctggccattgggctcaccgggcagcgagttctgggcgtgccaatcattgtgcaggcaagtcaggcagagaaatag

SEQ ID NO: 17232 - DNA, 1122 bp, synthetic construct
  misc_feature 1..1122: note = Description of Artificial Sequence: Synthetic coding sequence
  source 1..1122: mol_type = other DNA
atgcagctcgcagcccgcataagaccacgagacttagaggagtttttcagcactgttggaaaggtgcgagatgtacggatgatctctgaccggaactctaggagatctaaaggaatcgcttatgttgagtttgtcgatgtatcctccgtgcccttggcgataggcctcaccggacagcgcgtcctcggggtgcctattatcgttcaggcctctcaggctgaaaagaacagggccgctgctatggccaacaaccttcagaaaggatccgctggacccatgcgcctgtatgtcggaagccttcacttcaacataactgaggacatgctccgcggaattttcgaaccattcgggcgcatcgagtctattcagctgatgatggattccgaaacgggtaggtccaagggttacgggttcataacgttttctgacagtgagtgtgcaaaaaaggcgcttgaacagctcaatggcttcgagctggccggacggcctatgaaagttggtcacgtcaccgagcggacagacgcctcctccgcatcgtccttcctggactccgacgaactggagagaaccggcatcgacctggggaccactggtaggctgcagctgatggctaggctagcagaggggacgggactacaaatccctccagccgcccagcaagctctgcaaatgtctggcagccttgcattcggcgccgtggcagagttctccttcgtgatcgatttgcaaacacggctgtcacaacagaccgaagcgtcagccttggctgctgccgcgtcggttcagcctctagctacacagtgtttccaactcagcaacatgtttaatccccagactgaagaagaagtgggatgggatactgagatcaaggatgatgttattgaggagtgcaataaacacggaggcgtaattcacatttacgtagacaaaaactctgctcagggtaatgtttacgtcaaatgtccctctatcgctgccgccatcgcagctgtgaatgcactacacggtagatggtttgctggcaagatgattacagccgcctatgtacctctccccacttaccataacctcttccctgattctatgaccgcgactcagctattagtaccgtcccggagatag

SEQ ID NO: 17233 - DNA, 582 bp, synthetic construct
  misc_feature 1..582: note = Description of Artificial Sequence: Synthetic coding sequence
  source 1..582: mol_type = other DNA
atggccgatgatatcgacattgaagcaatgttggaagccccatacaagaaagatgaaaataaactgtctagcgccaacggccatgaagaaaggtccaagaagcggaagaagtctaagagccgcagccgatctcacgagcgcaagcgtagcaagtccaaggagaggaaacgcagtcgcgaccgtgagagaaaaaagtcaaaaagcagagagcgtaagagaagccggagtaaggagcgcagacggagccggagcagaagcagagacaggagatttcgaggcaggtatcggtccccatattcaggacccaagttcaactcggcaatacgcgggaaaatcgggctgccacattcaatcaagctgtctcggagaaggtcacgctctaagtctccattcaggaaggacaaatcacccgtccgtgagcctattgataatctcaccccagaagagagggatgctcgtacagttttctgtatgcagctggccgcccggatccgaccccgggatctagaagaattcttctctacagtaggtaaggtgcgggatgtccgaatgatcagcgacaggaatagccgcaggtcatag

SEQ ID NO: 17234 - DNA, 1014 bp, synthetic construct
  misc_feature 1..1014: note = Description of Artificial Sequence: Synthetic coding sequence
  source 1..1014: mol_type = other DNA
taatcaccattcagaaaagacaaatcacccgtgagggagcccattgataacctgaccccagaagagcgcgatgctcgcactgttttctgcatgcagctggccgcgagaattcgcccaagggatctggaggagttcttcagcacggtcgggaaagtgcgtgatgtgaggatgatttctgaccggaattcccggcgcagtaaaggaattgcatacgtggagtttgtagatgtgtcatcagttcctctcgccatcggcctgaccggacagagggtgctcggcgttccaatcattgtgcaggcctctcaggctgagaagaatcgtgccgccgctatggcaaataacttgcagaaaggctcagcaggcccgatgcgactctacgtagggtccctgcacttcaatataactgaagacatgctcaggggtattttcgaaccattcggcagattctccgactcagagtgtgccaagaaggccctggagcagcttaacgggttcgagctggccggacgcccaatgaaagtgggacacgtgacagaaaggaccgatgcatctagcgcctcttccttcctggactctgatgaactcgagaggaccgggattgacctcgggactacgggacgcctgcagctaatggcgcggttggcggagggcaccggcctccagattcccccagccgcacaacaagccctccagatgagcggcagtcttgcattcggtgcggtggcggaattttcattcgtcatcgatctgcaaacccgcctgtcgcagcagaccgaagcttctgcgcttgccgctgcagcttctgttcagcctctcgccacacaatgttttcagctcagcaacatgttcaacccgcagaccgaagaagaggtcggctgggatacagagataaaggatgatgtgatcgaagagtgtaacaagcacgggggtgtcatacatatatatgtggataagaatagcgcgcagggcaatgtctatgtgaaatgtcccagcattgcagctgccatagcttag

SEQ ID NO: 17235 - DNA, 1527 bp, synthetic construct
  misc_feature 1..1527: note = Description of Artificial Sequence: Synthetic coding sequence
  source 1..1527: mol_type = other DNA
atggccgatgatatcgatattgaagccatgctcgaagctccgtacaagaaggatgaaaacaagctctcatcggccaacggacacgaagagcgctcaaagaaaagaaagaagagtaagtcccgctcccgttcgcacgagcggaaaaggagcaagagcaaggaaaggaaaagatctagggatcgtgagcgaaagaagtccaagagtagggagcggaaaagatctagatcgaaggaaaggcggcggagtaggagcaggtcacgggatagacgtttcaggggcaggtacagaagtccctatcggcgaagatcccggtcaaagtctccatttcgtaaggacaagtctcccgtgcgagagccaatagataatctgactcccgaagagcgagacgctcgcaccgtcttttgtatgcaactcgcagcccggatccgccctcgagatctggaggagtttttctcgaccgtcgggaaggtgagggacgtgcggatgatttccgatcgcaattcgcgtaggtcaaaaggtatcgcctatgtcgagttcgtggacgtttcttccgtaccactggcaattgggcttacaggccagcgagtcctaggcgtgcctatcatagtgcaggcctcacaagcagagaagaaccgagccgctgccatggccaacaatctgcagaagggctccgccgggcccatgagactgtacgttggttccctgcattttaatatcacagaggatatgctgagaggcatctttgagccgtttgggcgcatcgaatccattcagctcatgatggattccgaaacaggacgaagtaaaggttatggttttatcaccttctctgactccgagtgtgcaaagaaggccctggagcagctcaatggcttcgaattggcgggcagaccgatgaaagtgggccacgtcacagagaggaccgacgcctcatccgcatctagcttccttgactcagacgagttagagcggactggcatcgatctgggcaccacgggacggctccagttaatggccaggctggccgaaggcacgggcttacaaatcccacctgcggctcagcaggctctccagatgtcaggatccctggcctttggagctgtggccgaattctcttttgttattgatctgcagactagactgtcccagcagacagaagcctctgccctggccgccgccgcttccgtgcagccgctggccacacagtgcttccagttgagtaacatgtttaacccgcagactgaagaagaggtgggatgggacacagagatcaaagacgatgtgattgaggaatgcaacaagcacggaggcgttatccatatttatgtggacaagaacagtgcacagggaaatgtttacgtgaagtgcccgtctatcgctgccgcaatagccgccgttaacgccctgcatgggcgctggttcgcggggaagatgattactgccgcttatgtgccccttcctacataccacaacctctttcctgattctatgactgccacccagctgctggtcccatcccggcgttag

SEQ ID NO: 17236 - DNA, 1176 bp, synthetic construct
  misc_feature 1..1176: note = Description of Artificial Sequence: Synthetic coding sequence
  source 1..1176: mol_type = other DNA
atggtggaggctgatcggcccggtaagctttttatcggcggtttgaacaccgaaacaaatgaaaaagctctggaggccgtcttcggaaagtatggccgaatcgtcgaagtcctgctgatgaaggaccgtgaaaccaataaaagccgaggcttcgccttcgtgacattcgaatctcctgccgacgctaaggatgccgcccgggatatgaacgggaaaagcctagacgggaaggccattaaagtcgagcaggcaacaaagccctctttcgagtcaggccgacggggcccaccgcccccccccaggtccaggggacctccaaggggcctgaggggggggaggggtggatcgggcggcacaagaggccctcctagccgaggaggccacatggatgatgggggatattcaatgaatttcaatatgagttccagtagagggcccctaccagtaaaacgaggcccgccccctagatccggggggcctccccctaaaagatctgctccctcgggccctgtacgctctagctctgggatgggtggccgcgccccagtgtctagagggagggactcttatggtggtccaccaaggagagagccactgccctcaaggcgagacgtctatctatccccaagagatgatggttatagcactaaggactcatacagcagccgcgattatccgtcctcaagagacacgagagactatgcccccccacctagagattatacttacagggactatggccattcctcttctagggatgactatccttcgagagggtacagtgacagagatggatacgggagggatagggattattctgaccaccccagcgggggcagctaccgcgatagctatgaaagctatgggaacagcagatcggctcctccaactaggggaccaccgccaagttatggaggatctagcaggtacgacgattattcatccagccgggacggctatggcggaagtagggactcttatagttcttctcgctccgacctgtatagctcgggaagggatcgggtaggacggcaggagcggggactgcctccttctatggagcggggctacccccccccaagggactcctactcctcgagctccagaggcgcccctcgcggcggcgggcggggcggtagccgaagtgatcgcggtggaggtcgtagccggtactag

SEQ ID NO: 17237 - DNA, 309 bp, synthetic construct
  misc_feature 1..309: note = Description of Artificial Sequence: Synthetic coding sequence
  source 1..309: mol_type = other DNA
tgaatgttcatatgtccccaagagatgatgggcatcttactgaaaacagccatccaggccgagatcacacaagttctcgttatcctagagattatgcatcatcatcatgagattatcctgaccgtgattatggtgatccccgtccacgtgatgaccattcatcaggaggacattgctatcgagatggacatggtggtgatagtgacaattcagattatccaagtggaggttcctaccgagatccatatgcgggttatggtgggagatttcgcccactacggcaggggtgtactgattgactcccaatag

SEQ ID NO: 17238 - DNA, 591 bp, synthetic construct
  misc_feature 1..591: note = Description of Artificial Sequence: Synthetic coding sequence
  source 1..591: mol_type = other DNA
atggtggaagcagatcggccagggaaactgtttattggggggctgaatacagagactaatgaaaaagctctcgaggccgtgttcggtaaatacggccgcatcgtcgaggtgttgctcatgaaagatagggagactaataaaagcagaggattcgcatttgttactttcgagtctccagccgacgcaaaggacgccgcaagggacatgaacggcaaactgttataccacgtggaagagatagtaatggaagtgcatctcgagggcaaccgatgcccattggtggagatgtttatctgtccacaggaaatgatgggtatcttactcaagacagctatacaggctgagattactcaggtattagtgatcctggagataatgcaccatcaccacgaaatcattctgactgttatcatggttatcccagtgcacgtgatgaccattcaccaggaggatatcgcgattgaaatggacatggtcgtcatcgtcacgattcagatcatccaagttgaagtgcccactgagatacatatgagggtcatggtgggagactttgctcactacggtcgaggggtgctgatcgactcccagtag

SEQ ID NO: 17239 - DNA, 1137 bp, synthetic construct
  misc_feature 1..1137: note = Description of Artificial Sequence: Synthetic coding sequence
  source 1..1137: mol_type = other DNA
atggtggaggccgaccgacctgggaagctcttcatcgggggcttgaataccgaaacgaacgaaaaggccttggaggcggtcttcgggaaatatggaagaatcgtggaagtcttactcatgaaggatagagagtctcccgcggatgccaaagatgccgctcgggacatgaacggcaagagcttggacggaaaagcaattaaggtcgagcaggcaactaaacctagtttcgagagtggccgtcgcgggccacccccacccccccgctcccgcggtccccctagaggcttacgcggtggccggggcggctcgggaggtaccagaggtccgccgagccgcggtggccatatggatgatggcgggtattccatgaactttaacatgtcctcctctcggggccccctgccagtaaagaggggaccccccccccggagtggcgggcctccccccaagcggtctgctccctccggccccgttagatcgtcatcaggcatgggcgggagggctccagtttcgagaggccgagattcttatggcggcccccctagaagggagcctctccctagtagaagagatgtctatctatcgcccagagacgatggctatagcaccaaggactcatattccagccgggactatccatcttcgcgcgatacaagagattacgcacctcctcctagggattatacataccgagattacggtcattcaagttcccgggatgactatcctagtcggggctactccgatcgagatgggtacggccgtgaccgcgactactccgatcatccatcgggtggctcctacagagattcatacgaatcgtacggcaattcccgctccgcaccacccactcggggtcctcctcccagttacggcgggagttcgagatacgatgattacagttcatcccgcgacgggtatggagggtcccgcgacagctatagttcaagtaggagcgacctgtatagttccggcagggatcgtgttggtcgccaggagcgcggcctgcctcccagtatggaaaggggctatccaccccctcgtgactcatattccagttcctcccgtggggctccccgcggcgggggtagaggcggatcccgttctgaccgcggcggcggtaggtcacggtactag

SEQ ID NO: 17240 - DNA, 1443 bp, synthetic construct
  misc_feature 1..1443: note = Description of Artificial Sequence: Synthetic coding sequence
  source 1..1443: mol_type = other DNA
atggccagcgacagtatttttgaatcattccctagttaccctcagtgtttcatgcgcgaatgcatcttaggtatgaatccaagtagagacgtccacgacgcaagtacctcccggcgctttacacccccatctaccgccctgtctcccggcaagatgtctgaggctttaccgcttggcgccccggatgctggcgctgctctggccggcaaactccgtagcggagataggtccatggtagaggtgctcgccgatcatcctggagagctggtgcggaccgactctccaaactttctatgcagcgtgctgcctacacactggaggtgcaacaagaccctgcctatcgcgttcaaggttgtagcactcggagacgtgccagatgggacgctagtgaccgtgatggcaggtaacgatgaaaattattccgccgaactccggaacgccaccgccgccatgaaaaaccaggtggcaagattcaacgatctgaggttcgtcggcaggagtggaaggggaaaaagcttcacgctaactattaccgtgtttaccaatcccccacaggttgccacctatcacagagccatcaaaatcacagtagatggcccaagagagccccggcggcatcgacagaagctggacgatcagacaaagcccggctcactgtcattttcggaaaggctgagtgagctggaacagctgcggcgcactgccatgagagtatcccctcatcatcctgctcccactccaaatcctcgcgcatccctgaatcacagcaccgccttcaaccctcagccacagtctcagatgcaggatacaaggcagattcagcccagtcccccatggagttacgatcagtcttatcagtatttgggctctattgcctccccaagcgtgcaccccgccactcccatctcgcctggccgtgcttccggcatgaccaccctcagcgccgagttgtctagcaggttgtccaccgctcctgacctcacagcatttagcgaccctaggcagtttcccgctctgccaagcatcagcgatcctagaatgcattaccctggagcattcacgtatagtccaacaccagtcactagcggaatagggatcggcatgagcgcgatgggatccgctacacgctaccatacctacctgcccccgccttaccctgggagttctcaagctcagggcgggcccttccaggcctccagtccgtcttaccatctgtactatggcgcaagtgctgggtcctatcagttttcgatggttggcggagagagatcaccgccacgaatcctccccccttgtaccaacgcatctacaggatccgccctgctcaaccccagtcttccaaatcagtcagatgtcgttgaagccgagggtagtcacagcaatagcccgacaaacatggctcccagtgccagactggaagaagcagtgtggaggccttactag

SEQ ID NO: 17241 - DNA, 1407 bp, synthetic construct
  misc_feature 1..1407: note = Description of Artificial Sequence: Synthetic coding sequence
  source 1..1407: mol_type = other DNA
atgcccgctgcacctcgcggccccgcacaaggcgaagccgcagctcgaaccaggtccagggatgcgagtacgagtaggagatttactcctcctagtaccgcgctttctcctggtaagatgtccgaagctttgcccttgggtgcgcctgatgccggcgccgcattggcaggaaaattgagatctggcgatcggtcaatggtggaggtactggcagatcaccccggcgagctggtcagaaccgacagcccaaactttctgtgttcagtcctgcccacacactggagatgtaacaagaccctccccatcgcgttcaaagtggtggcactcggagacgtgccagacggcaccctagtgaccgtgatggcgggtaatgacgagaattattccgccgaactgagaaacgcgacagcagcgatgaagaaccaggtcgcccggttcaatgatctgcgtttcgtaggacgctccgggaggggcaagtcgttcactctaacaatcacagttttcaccaacccccctcaggtggccacatatcacagggccataaaaatcacggtcgatggcccccgggagcctagacggcaccggcagaaactagacgaccaaacaaaacctggcagcctctcattttctgaacggttaagtgaattggagcaattacggagaaccgccatgcgggtctctccacatcaccccgctcccactccgaatccccgagcctcactgaatcacagcacagcatttaacccacaaccacagtcgcagatgcaggatacgaggcagatacagccaagtcccccatggtcctatgaccagagttaccagtatcttggttccatagctagcccttccgtccaccccgccacaccaatctctcccgggcgcgcgagtgggatgaccaccctgtcagcagagctgtccagtcgcctgtcaactgcgccggatttgacagccttctctgacccccggcaattcccagcattgccgagcatttcagaccctcgcatgcattatcccggtgcgtttacgtacagcccgacacccgtcacttctgggatcggcatagggatgtctgccatgggctccgctacccgctaccatacgtatctgccacctccatatcctgggtctagccaagctcaggggggaccgttccaggcctcatccccgtcgtaccatctgtattacggcgcatcagccggctcctaccagttttctatggtgggcggagagcggtcaccccccagaatcctgcctccttgcactaatgcctctaccggatcagccttacttaatccatccctccctaaccagtccgacgttgtggaggcggagggaagccactctaatagtcctaccaatatggctccctcggctcgtcttgaggaggctgtgtggcgtccttattag

SEQ ID NO: 17242 - DNA, 1362 bp, synthetic construct
  misc_feature 1..1362: note = Description of Artificial Sequence: Synthetic coding sequence
  source 1..1362: mol_type = other DNA
atgagaataccggtggacgccagcacctcaaggcgctttactccgcctagcaccgctctgagtccaggcaagatgagcgaggctctgccactgggcgcccctgatgctggcgctgctctggccggaaagctgcgctctggggacagatcaatggtggaggtcctggccgaccaccccggcgaattagtgaggacagacagtcccaattttctatgcagcgtgctcccaactcactggaggtgtaacaagactctcccgattgcttttaaagtggtggccttaggagacgtaccagatggcacactcgtaaccgtcatggcgggcaacgatgagaattactccgcggaactgcggaatgcaactgccgcaatgaagaaccaggtagcgcgcttcaacgacttgaggttcgtgggccgctctgggcgtggcaaaagttttacactgactatcaccgtgtttactaaccctccccaagttgcaacctaccacagggcaattaaaattacagtagacggcccccgggaaccaaggcggcacaggcaaaaattggatgaccagacgaaaccaggctccctttctttctccgagcggctgagtgaattggaacagctcagacggactgcaatgcgcgtgtcaccacaccaccctgcccctactcctaatccccgcgcctctttgaaccattccacagcatttaaccctcagccacagtctcagatgcaagatacgaggcaaattcagccatcccctccatggtcttacgaccagtcttatcaatacctcggatcgattgcaagcccgtcagttcatcctgcaactcctattagcccaggaagagcttccggcatgactacactgagtgcggagttgagcagccggctgagcactgctccggacctgaccgcgttttcagacccccgccagttcccagctctcccctccatatctgacccgcgaatgcactacccgggggctttcacttactcccctaccccagttaccagtggaatcggcattggcatgtccgccatgggaagcgctacccggtaccacacttaccttccacccccataccccggaagctcccaagctcagggcgggcccttccaggccagtagcccttcgtaccacctttactatggcgccagcgctgggagttaccaattctctatggtcgggggtgagagatcgcctcctagaattctgcccccctgcaccaatgcttccacaggctccgcattgttgaaccccagtctcccaaaccagtcagatgtagtcgaagcggaggggtcacactccaacagccctactaatatggcgccctccgcacgcctagaggaagccgtctggcgtccttactag

SEQ ID NO: 17243 - DNA, 1428 bp, synthetic construct
  misc_feature 1..1428: note = Description of Artificial Sequence: Synthetic coding sequence
  source 1..1428: mol_type = other DNA
atgaatccctcaagggatgtgcatgatgctagtacgtcccgcaggttcacgcctccttccaccgccctgtcccctggtaagatgtctgaggccctgcccctaggggctcccgacgccggggctgctttagctggaaagctgcgctccggggaccgatccatggtggaggttctagctgaccaccctggggagcttgtgcggacagacagccctaatttcctgtgcagtgtgctaccaacacactggaggtgtaacaagacccttcccatcgcgttcaaggtggtagctttgggggatgtgcccgacggaacactggttaccgtcatggcagggaatgacgaaaactactctgctgagctgcgcaacgcaacagccgcaatgaaaaatcaggtcgcccggttcaacgatctcaggtttgtgggccggagcgggcggggcaagtcattcacacttacaattacggtatttaccaatcccccgcaggtggcgacataccacagggcaattaagatcactgtcgacggtccccgggaacctcgacgacatcgccaaaaacttgacgatcaaaccaagccgggaagtctttcatttagcgaacgactgtctgagctggaacagctgcggcgcaccgcgatgagggttagtccacatcaccctgcacctacacccaatcccagagccagcctgaatcacagcaccgccttcaacccgcagcctcaaagccagatgcaggataccaggcagattcagccatcccctccatggtcctatgatcaaagttaccagtatctgggctcgatcgcctccccatctgtgcacccagcgacccccatctctcctggacgggcctcaggcatgaccaccctttctgctgaactgtcctcaaggttaagcactgccccagatttgaccgcattttctgaccctcgacaatttccagcattgcctagtataagcgaccctcgcatgcactatccaggcgcctttacttatagccctactcccgtgacatccgggatcggtatcggaatgagtgcaatgggatctgccacacgctatcatacatatctaccaccaccttatcctggttcttcccaggcccagggaggcccatttcaggctagcagtccgtcttatcacctgtactacggggccagtgccggcagctatcagttctctatggtcggaggggagagaagcccgccccgcattcttccaccttgcactaatgcctccacaggttccgccttgttaaacccgtctctacccaatcagtctgacgttgttgaagccgaggggagtcactctaattcgccaaccaacatggcgcgggccagttgtagccgccaggcacgcagggatccagggccctgggcacggcccccttcgtgggggcgaggcagaccaacagccagaataagcctttag

SEQ ID NO: 17244 - DNA, 99 bp, synthetic construct
  misc_feature 1..99: note = Description of Artificial Sequence: Synthetic coding sequence
  source 1..99: mol_type = other DNA
atggcgtcagacagcattttcgaatctttcccatcctaccctcagtgcttcatgcgggagtgcattcttgggatgaatcccagcagagacgtgcactag

SEQ ID NO: 17245 - DNA, 414 bp, synthetic construct
  misc_feature 1..414: note = Description of Artificial Sequence: Synthetic coding sequence
  source 1..414: mol_type = other DNA
atgcaggatactagacagatacaaccgagcccaccctggagctacgatcagagctatcagtacctgggttccatagcctccccatccgtgcaccccgcaacgccgattagccctggacgagcgtccggcatgaccacgcttagcgctgagctcagctcacgtctgtctacggcccctgacttgactgcattttcggatcccagacagttccctgccttgccaagtatctcggacccacggatgcattatccaggtgcgtttacttattcccctacacctgttacctccggcattggtattggaatgagcgctatggggtcagcaactcgataccatacttacctgcctccgccataccccggtagctcgcaggctcagggggggccgttccaggccagctccccctcatattag

SEQ ID NO: 17246 - DNA, 1443 bp, synthetic construct
  misc_feature 1..1443: note = Description of Artificial Sequence: Synthetic coding sequence
  source 1..1443: mol_type = other DNA
atggcatctgattccatatttgagagcttcccaagctacccacaatgctttatgagagaatgtatcctcgggatgaacccatcaagagacgtgcacgacgccagcacttcgcgccggtttacaccgcctagtacagctctgtctcctggaaagatgtccgaggctctgccactgggagcacccgacgcaggcgccgctcttgcagggaagctccggagcggggatcgcagcatggtggaagtgttggcagaccatcccggcgaactcgtccgcaccgattcccccaattttctgtgctccgtgctccccacgcattggagatgtaacaagaccctccctattgcatttaaggtcgttgctctcggagacgtcccagatggcactttggtcactgtaatggccggaaacgatgaaaactatagcgctgagctgcgcaacgccacagcagcgatgaagaaccaagtggcccgctttaatgatctgcggttcgttggacgcagcgggcgaggtaagagcttcacgctgacaattactgtttttaccaatccaccgcaggtggccacctatcaccgcgccattaagattaccgtggacgggccacgagagcctcgtcggcatcggcagaagctcgatgaccaaacaaaaccaggaagcctcagtttttcggaacgtctgtcagagctggaacaacttaggcggactgccatgagggtgtcccctcatcaccctgcccccacccctaacccgcgggcctctttgaatcatagtacagccttcaacccacagccccagagccagatgcaggacactaggcagatccagccctctccgccatggagttacgatcaatcttaccagtatttgggcagcatcgccagtccatccgttcatcctgccacgcctatttctcctgggagagcctctggtatgactactctctccgctgagctgtcttccaggcttagcacagccccggatctcaccgctttttccgatcccagacagttcccggccctgcctagtattagtgacccccgaatgcactaccccggcgcctttacgtattctcctacgccagtgacctccggcattggaatcggtatgagcgcgatgggctcagcgaccagataccatacttacctgcctccaccctaccctggatccagccaggcccaaggagggccatttcaggctagcagcccctcatatcatttatattacggcgccagcgccggctcctatcagttctccatggtgggcggtgagaggagtccccctcggatcttacctccttgtacaaacgctagcaccggaagcgccttgctgaacccctcgctccctaaccagtctgatgtagtcgaagcagagggctctcacagtaatagcccaacaaacatggccccttccgcaaggctcgaggaggccgtttggagaccctattag

SEQ ID NO: 17247 - DNA, 576 bp, synthetic construct
  misc_feature 1..576: note = Description of Artificial Sequence: Synthetic coding sequence
  source 1..576: mol_type = other DNA
atgaatcctagccgggacgtccatgatgcctccacaagtcgcagatttactccaccctccactgctcttagtcccgggaagatgtccgaggcacttccattaggggcccccgatgccggggcagcattggccggaaagctcagatctggtgataggtcaatggtggaggtcttggctgatcatcccggagagctagtgagaaccgacagccccaacttcctatgttccgtgctgcccacccactggcggtgcaataagacacttccaatagcattcaaggtggtggctctgggagacgtccctgacggtacgctggtgaccgtcatggccggtaacgatgaaaattacagtgccgagttgagaaatgcaaccgcagctatgaaaaaccaggtggccaggtttaacgatctccggttcgtggggaggtcaggccgcgggaagtccttcacactgacgatcactgtgttcaccaacccaccgcaggtggcaacctatcaccgcgccattaaaattacagtcgacgggccacgggagccacgcaattctctgacatggccgcgctatccccacatctag

SEQ ID NO: 17248 - DNA, 753 bp, synthetic construct
  misc_feature 1..753: note = Description of Artificial Sequence: Synthetic coding sequence
  source 1..753: mol_type = other DNA
atgcggatccctgtggacgcgagcacaagcaggcggtttacacccccttctaccgcactgtctccaggcaaaatgtctgaggccctgccattgggcgcccccgacgcaggagcggctctggccggtaaattaagatcaggcgatcgcagtatggtggaggtcctcgccgatcaccccggggagctcgtcaggacagactcgcccaactttctttgcagtgtcctgcctacgcattggcggtgcaacaaaacattacctatcgccttcaaagttgtagcccttggagacgtgccggacgggaccctggtaactgtgatggccggcaacgacgaaaactatagcgcggagcttcgcaatgcgaccgctgctatgaaaaaccaagtagccagattcaatgacttgcgcttcgttggtagatccggaagaggaaaatccttcactctcactataacagtgttcaccaatccgccgcaagttgcaacctatcatagggccattaaaattaccgtggatggtcctcgcgaacctcggcgccacagacaaaaattagatgatcaaaccaagcccggttccctcagtttcagtgaaagactatctgagctagagcagctacgtcggactgctatgcgtgtgtccccacaccatcctgcccccacccctaacccaagagcctcattaaatcacagcaccgcctttaatccccaaccacagtcacagatgcaagaggaagacacagcaccttggaggtgttag

SEQ ID NO: 17249 - DNA, 1770 bp, synthetic construct
  misc_feature 1..1770: note = Description of Artificial Sequence: Synthetic coding sequence
  source 1..1770: mol_type = other DNA
atgctgcactccccacacaaacaacctcagaaccataagtgcggagccaattttctccaagaggactctaagaagtcattagtgttcaagtggctgatttcagccggacactaccagccacccagacctaccgagtcgttcaaagcagcatcctcaatatataataggggatacaagttctatctaaaaaagaagggagggacaatggcctctaacagcctgttttccacagttactccgtgccagcagaatttcttctgggacccttctacaagcaggaggttttcccccccaagttcctcactgcagccaggaaagatgtcagatgtgtcccccgtggtggccgcccagcagcagcagcaacagcagcagcaacagcagcagcagcagcaacagcagcagcaacagcaacagcaggaggcggcagctgccgccgccgcggcagctgctgccgccgctgccgctgccgccgtccctaggctgagacctccccatgataatcggactatggtcgagattatcgcggaccatcccgcagaacttgtccggactgatagccccaacttcctatgtagcgttttgccatctcactggcgatgtaacaagacactacccgtggcatttaaggtagttgcgcttggagaggtgccagacggcacagttgtgactgtcatggctggcaatgatgaaaattatagtgctgagctcaggaatgcttctgccgtcatgaagaatcaggtagcgagatttaacgaccttcggttcgtcggtcgtagtggccgtggcaagtccttcaccctgaccatcaccgtgttcaccaatccgccgcaggtggccacctatcatagggccatcaaagtcaccgtggatggaccgcgcgagccccggcgacaccgacagaagctcgatgactccaagcccagcctgttttcggaccggctgtctgatctaggaagaatccctcaccccagcatgcgcgtgggagtcccgcctcagaatccaagaccaagcctgaactccgctccatctcctttcaatcctcagggccagagccaaattaccgatcctcgccaagctcaaagcagcccaccttggtcctacgaccaaagctacccgagctatctgagtcagatgacttctccctccatccactccacaacccccctctcttcaacccggggcacaggcctaccagccattacagacgtgcctaggagaatcagcgatgacgatacggctacatccgacttctgtctgtggccctccacactgtcgaagaaatctcaggcgggagctagtgaactgggccctttttctgacccgcggcagtttccctccatttctagcctgactgagagcagattttcaaatcctcgaatgcactatcctgcaacatttacttatacccctcctgtcactagcggcatgagtctgggtatgagcgccacaacccattaccatacatacctgccacctccctatcctgggtcatcacagagccagtctggaccgttccagacatcttccacgccgtacctgtactacggtacgtccagcggatcttatcagtttcctatggtgcctggaggagaccgctctccctcaaggatgctgcccccttgcacaactacttctaatgggtcgactctgcttaacccgaacctgccgaaccagaatgatggggtcgacgctgatggatctcactcgagctcccctaccgtgttaaactcctccgggagaatggacgaaagcgtgtggcggccttactag

SEQ ID NO: 17250 - DNA, 1524 bp, synthetic construct
  misc_feature 1..1524: note = Description of Artificial Sequence: Synthetic coding sequence
  source 1..1524: mol_type = other DNA
atgagaatccctgtggaccctagtacgagccgtcgattttcacccccttccagctccctccagcccggtaaaatgtccgatgttagccccgtggtagcagcccaacagcaacagcagcagcagcagcagcagcagcagcagcagcagcagcaacagcagcagcagcagcaagaggctgccgccgctgctgctgcagcagccgctgccgcagccgccgctgccgccgtccctcgcctccggccaccgcacgacaaccgcacaatggtagaaatcattgcggatcaccctgccgaactggttagaactgacagcccgaatttcctatgtagcgttctgccgagccactggaggtgcaataagacactaccagtggcctttaaggtggtggcactgggagaggtgcctgacgggacggttgtgacagttatggcaggtaacgacgagaattacagcgccgaactgagaaatgcatctgccgtcatgaagaaccaggtggccaggtttaacgacctccgattcgtcggaagatcagggaggggtaaaagctttacccttaccatcaccgtgtttaccaatcctccccaggtggccacataccacagagcaattaaggttaccgtggatggccctagagaaccgagaagacacagacaaaaattagacgattcaaagccaagcttattttccgaccggctctcggacctgggtcggatcccccacccaagcatgagagttggcgtcccaccccaaaacccaagaccctccttaaactccgctcctagcccgtttaacccgcaaggacagtctcagatcacagaccctcgacaggcccagtccagtccaccatggtcttacgatcagtcttacccttcctacctctctcagatgaccagcccctccatacactccaccacacctctgtcctccacaaggggcaccggattgccagcaatcacagatgtacctcggaggatttctgatgacgacactgccactagtgatttttgcctgtggccatctactctgtctaaaaaatctcaggccggcgctagcgaactcgggcctttcagcgaccctcgccagttcccgtccatttctagtttaaccgaaagccgctttagcaatccacggatgcactaccccgccaccttcacctacactcccccagtaacttctggtatgtcactgggtatgtccgccaccactcattatcatacatatctgccgcccccatatccagggagcagccagtctcagagcgggccattccaaacatctagcactccttacctgtactacgggacctctagcggatcctatcagttccccatggttccgggcggcgatcggtcaccatctcgtatgctcccaccatgtactactacctctaacggctcaacattactgaatcctaatctaccaaaccaaaacgacggggttgacgcggatggctcccattcctctagtccaactgtgctaaactccagtgggagaatggatgaatccgtgtggcgtccctactag

SEQ ID NO: 17251 - DNA, 1458 bp, synthetic construct
  misc_feature 1..1458: note = Description of Artificial Sequence: Synthetic coding sequence
  source 1..1458: mol_type = other DNA
atgcgcatccccgttgatccctctacctcacggcgcttctccccaccaagtagctcactccagcctggcaaaatgtcagatgtgagcccggtggtcgcagcgcagcagcaacaacagcagcagcagcagcagcaacagcagcagcagcaacagcagcagcagcaacagcaggaggcagcagctgccgccgctgctgcggcagccgcagcagcagccgccgcagctgtaccaaggttacgcccaccccacgataaccgtaccatggtggagattattgccgaccaccccgctgagctggtccggacagactcccccaacttcctatgttctgtgctgcctagtcactggcgatgtaacaagactctgccggtggctttcaaagtggtcgcgctgggcgaagtgccagacggaactgttgtgaccgtgatggccggcaatgacgagaactacagtgcagagcttagaaatgcctccgccgtgatgaagaaccaggtggcaaggttcaatgaccttcgcttcgtgggaaggagtggtaggggtaaatcctttacgctgactattaccgtgtttactaatcctccgcaagtggccacctatcaccgggccatcaaggtgactgtcgatgggcccagggagcctcgacggcaccggcagaaattggacgactccaaacccagtctattcagcgacaggttatctgacctcggccgcattccacatcccagcatgagggtaggcgtccctccccaaaatccgaggccatcactgaattcagctccaagtcctttcaatccccagggccagtcgcagatcactgatcctaggcaggcccagtccagtcccccgtggagctatgatcagtcttacccatcatacctgagccagatgacaagtccaagcatacactctacaacccctctcagttccactaggggaacaggcctccccgctataactgacgttccccggagaatcagtggcgcctccgagctagggcctttttcagatccaagacagttcccaagcatctcaagcctgaccgaatccagattcagcaatccccgcatgcattatcccgctacatttacctatacacctcccgttacaagcgggatgtctctgggtatgtccgccactacgcactatcacacctatctccccccaccctaccccggaagctctcagtcacagagcgggccgttccagacttcaagtaccccatacttgtattacgggacttcttctggaagctatcaatttccaatggtccctggtggggaccgttctccgtcccggatgctgcccccatgtaccaccaccagcaacgggtctaccctcctcaatccaaaccttcccaatcagaacgatggagttgatgctgacgggtcacactcttcttctcctaccgtgcttaacagttctgggcggatggatgaatccgtgtggcggccatactag

SEQ ID NO: 17252 - DNA, 1500 bp, synthetic construct
  misc_feature 1..1500: note = Description of Artificial Sequence: Synthetic coding sequence
  source 1..1500: mol_type = other DNA
atggcttcgaattcattgttctccacagtgaccccttgtcagcagaatttcttctgggacccttcaacttctaggcggttttctcctccttcttcctcactgcagcccggaaagatgtctgacgtctcccctgtggttgccgcccagcagcagcagcagcagcagcaacagcaacagcaacagcagcagcagcagcagcagcaacaacagcaggaggccgctgcggccgcggccgctgccgcagcggcagcggcggcagcagccgcagtaccaagactccgccccccgcacgataatcggacgatggttgaaatcatcgcagaccaccctgccgagcttgtgagaacagactcccctaattttctctgtagcgttctccctagccattggcgctgcaataaaacactcccagtggcatttaaagtcgtggctctcggagaggttccagatggcacagttgtgacggttatggcgggcaatgatgagaactactccgccgaactgcgcaatgcttcagccgtgatgaagaaccaggtcgcccgttttaacgatctacgtttcgtcggtaggagtgggagaggtaaatctttcaccctgaccattaccgtgtttaccaaccccccccaggtggccacttatcaccgggccattaaagttaccgttgatggccctcgggagcctcgaaggcaccgccaaaagctcgatgattcaaaaccgtccctttttagtgatcgattgagtgaccttggccggataccccatcccagcatgcgcgtgggcgtgcctccacaaaatcccagaccttcgcttaattccgcccccagcccattcaatcctcaaggccaaagtcagattactgatccaaggcaggcacaatccagccctccctggtcttatgaccagtcatatccctcctacctgagccagatgacgtccccatcgatccactccactactcccctctcttccaccaggggcactggacttcctgccataacggacgtcccccgacggatctcaggggccagcgaactgggcccctttagtgaccctcgacagtttcctagtatcagtagtctgaccgaatctagattttccaatccacggatgcattatccggccacctttacctacacccccccggtaacctccggaatgtccctgggtatgtccgccaccacccactaccacacatacctgccacccccttaccccggctcctcccagagtcagagcggtccattccaaacatcatccaccccatacctgtattatggcacgagctccggatcataccagttccccatggtcccaggtggcgatcgctctccctctcgaatgctacctccttgcaccactacgtcaaatggaagcaccttgttaaacccaaacctgcctaatcagaacgacggggtagatgcagacggaagccacagttcctcaccaacagtcctgaattcttctggccgcatggatgagtccgtatggcgcccttactag

SEQ ID NO: 17253 - DNA, 1566 bp, synthetic construct
  misc_feature 1..1566: note = Description of Artificial Sequence: Synthetic coding sequence
  source 1..1566: mol_type = other DNA
atggcaagcaattccctgtttagcacagtgactccttgtcagcagaacttcttctgggatccgtctacctccagaaggttctcaccaccctcaagttcactgcagccaggaaagatgtccgacgtcagcccagtagtggctgcccagcaacagcagcagcagcaacagcagcagcaacagcagcagcaacagcaacagcagcagcaacagcaggaggcggctgccgccgctgccgccgctgccgcggctgccgctgccgccgccgccgtccccagattgagacccccacatgacaaccgaacgatggtggaaatcatcgctgaccatccggctgaactcgtaagaacggactcccccaactttctttgcagcgtccttcccagccattggcgatgcaataagactctacctgttgcgttcaaagtggtggctttaggcgaggtacctgacggcacggtcgtgactgtgatggcaggcaacgatgaaaattactccgcagaattgagaaacgctagcgccgttatgaagaaccaggttgctagattcaatgatctgcgtttcgtgggtagaagtggccgaggcaaatcctttacattgactataactgtctttactaatcccccacaggtcgcgacataccaccgtgcaattaaggtgacagtcgacggaccacgggaaccccggagacaccgacagaagctcgacgactccaagccctccctgttttcagatcgcttgtctgatctggggaggatcccgcacccatccatgcgagtgggagttccacctcagaatcctagaccttccttaaacagcgccccctcccctttcaaccctcagggccagtcccagattacagaccctcggcaggcccagtctagcccaccttggtcatacgaccagagttacccttcatacctatcccaaatgacttctccctctatccattctaccaccccactgtcctccactcgaggcaccggcctgcctgcaatcacagacgtgccacgccggatatcagatgacgacacagccacctccgacttttgcctctggccgtccaccctcagcaagaagagccaagccggcgcttcggaactcgggccattttcagaccccagacagtttccatccatatcttcgctgaccgagagtcggttttcaaaccctaggatgcactatccagcaacatttacgtacactccaccagtgacctccggcatgtccttaggcatgtccgcaactacccactatcatacgtatctgccgcctccataccccgggtcctcacagagtcagtcagggcctttccaaacatcaagcacaccctacctgtactacggcacatcaagcggtagctatcagtttcccatggttcctggtggcgatcggtccccgtctagaatgctgcccccttgtaccacgacctccaatgggagtactttgttgaatccaaatctgcctaatcagaatgacggtgtggacgcagacggatctcactcatcgagtccgactgtgctaaattcttctggcagaatggacgaatcagtgtggaggccctactag

SEQ ID NO: 17254 - DNA, 1566 bp, synthetic construct
  misc_feature 1..1566: note = Description of Artificial Sequence: Synthetic coding sequence
  source 1..1566: mol_type = other DNA
atggctagcaatagtctcttctcaactgtgactccatgtcaacagaattttttctgggatccatctacttcaaggcggttctcgcctccctcatcctcccttcagcccggtaagatgtcagacgtaagcccggtggttgccgcccagcaacagcaacaacagcagcagcagcaacagcagcaacagcaacaacagcagcagcagcagcagcaggaagcagccgccgcggcggcggctgccgccgccgccgcagccgcagccgcagcagttcctaggttgcggcctcctcacgacaatagaacgatggtcgagattattgccgatcatcccgccgaactcgtcagaactgattccccgaacttcttgtgctccgtcctcccttctcattggaggtgtaataaaacactcccagtcgccttcaaagttgtcgccctgggagaagtccccgacggtaccgttgtgacagtaatggccggaaatgatgagaactacagtgccgagttgcggaacgcttcagccgtgatgaaaaatcaggtcgctcgcttcaatgacctgagattcgtcggaaggagtggaagaggcaaatcctttactctcaccattacagtcttcactaacccaccacaagttgctacttatcaccgagccatcaaggtgaccgttgatggacccagggagccccgccgccaccgccagaagctggacgatagcaagccaagcctgtttagcgatcggctctcagacctcggaaggatcccacacccgtcaatgagagtaggagtcccgccacagaatccgagaccaagcctgaattccgcaccctcccccttcaacccccaggggcaatcacagattacagaccccaggcaggcccagtccagccctccctggagttacgaccaatcttatccgagctatctttctcagatgacctctccatccattcacagcactacccccctgtccagtacgcgcggtacaggactccctgccatcaccgatgtgccacggagaatttccgatgacgacaccgccacctccgatttctgcctttggccttccacactgtcgaagaagagccaagccggcgccagtgagctgggtccgttcagcgatccgcgacagttcccctctatttcatctctcaccgaaagtaggttttcaaacccaagaatgcattatccagccacctttacctatactccccccgttacttctggtatgtctcttggaatgagtgctactacacactaccacacctacctccctccgccttaccctgggagcagccagagccaatccgggccctttcagacaagttcaaccccctacctctattacggcacgtcatccgggagttaccagttccctatggtgcccggtggagacaggtcccccagccgaatgcttcctccatgtaccacgacatccaatgggtctactttactgaatccgaacctgcctaatcagaacgacggagtggacgcagacggctctcactcatcaagccccaccgttctgaacagctctgggagaatggatgaatccgtgtggcgaccgtattag

SEQ ID NO: 17255 - DNA, 1704 bp, synthetic construct
  misc_feature 1..1704: note = Description of Artificial Sequence: Synthetic coding sequence
  source 1..1704: mol_type = other DNA
atgctccattccccccacaagcagccccagaaccataagtgtggcgcaaatttcctccaagaggattcaaaaaagagcttagtgtttaagtggctgatttccgcaggacattatcaacccccacgacccacagaatcctttaaggctgcatctagcatttataataggggatataaattctacctgaagaagaagggaggaactatggcctcaaactcactgttcagtacagtaacgccctgtcaacaaaactttttctgggatccaagtactagcaggcgcttcagcccaccttcttcctccttgcagccaggtaagatgtcagatgtctcccccgtggtggctgctcagcaacagcaacagcagcagcagcagcagcaacagcagcagcagcagcagcagcaacagcagcagcaggaggccgccgcagctgccgccgccgcagccgccgccgccgctgctgccgcagctgtgccccggctgaggcccccacacgacaatagaacaatggtggagataatcgccgatcacccagcagagctggtaagaacagactctccgaacttcctgtgctccgtcttgccctcccactggaggtgtaacaaaactctacctgtcgctttcaaagtcgtagctttgggcgaggtgcccgatggcacagtggtgactgtgatggctggaaacgatgagaattacagtgccgagttgaggaatgccagcgccgtgatgaagaatcaggtggcacggttcaacgatcttcggtttgtgggccggagcggaagaggaaagtcatttaccctgaccatcacagtgttcacaaatcctcctcaagtggccacctaccatcgagccataaaggtgaccgtggatggcccgcgcgaaccacggagacacaggcaaaagcttgacgacagtaaaccttcgctgttttcagacagactgtcagatcttgggaggatccctcacccctcaatgcgcgtgggagtccccccccagaatcctcgtccctccctgaactctgctcctagtccgtttaatccgcaagggcagagccagataacagatcctcgccaggcacagtcctctccgccttggagttatgaccagtcttaccccagttatttatcgcagatgacgtctccctccattcacagtacaacaccactctctagtacgaggggaacagggctgcctgccatcactgacgtgcccaggagaattagcggagcgtctgagctcggaccattcagcgacccaagacaatttcccagcataagttctcttaccgaaagccgcttttctaacccacgtatgcactatcccgccacttttacctacacacctcccgtcactagcggcatgagcctcggcatgtcggccaccacacactaccacacctatttgcctcccccctaccctggcagtagccagtcacagtcaggcccctttcaaacttcttccaccccctacctctactatgggacaagctccggctcttatcagttccccatggtcccaggcggagataggtcacccagccgtatgttgcctccctgcacgaccacgtcaaacggcagcaccttgctgaacccaaatttgccaaatcaaaacgacggcgttgacgcggatggatcacacagctcctcccccactgttctgaacagctccgggcgtatggacgagagtgtgtggcggccctactag

SEQ ID NO: 17256 - DNA, 1248 bp, synthetic construct
  misc_feature 1..1248: note = Description of Artificial Sequence: Synthetic coding sequence
  source 1..1248: mol_type = other DNA
atgagaattcccgtcgatccatctacaagtcggcgcttcaccccccccagccctgctttcccatgtggtggagggggaggcaaaatgggagaaaacagcggagctctgtctgcacaggcggctgttggacccgggggaagagccaggccagaagtgaggtctatggtggatgtcctcgctgatcacgctggggagcttgtcagaacggactcgcccaatttcttatgttcggttctgccctcccattggcggtgtaacaagacgctgccagtggccttcaaagtggtcgctctgggggacgtgccggacggcacggtcgttacagtaatggcaggcaatgatgaaaattattcagcagagctgcgaaacgctagtgctgtgatgaaaaatcaggtggccagatttaacgaccttagattcgtcggacggtcaggcagaggaaagtcattcaccctcacaattaccgtttttaccaaccctacccaggtggctacttaccacagagctattaaagtgacagttgacggtccgcgtgaaccacgacggcatcggcagaagctggaagaccagactaagccattccctgaccggtttggagatcttgagaggctccgcatgcgggtgacaccctccacgcccagcccccgaggctcactcagcaccacctcccacttcagctcccaaccccagactcctatacaagggacatccgagctcaatcctttctcagaccccaggcagtttgaccgttcgttcccgacccttcctacgctcacagagagccggtttcccgatcctcggatgcactaccccggcgccatgtccgccgctttcccgtattctgctaccccatcaggcacctcaatctccagtttgtcggttgcgggaatgccagccactagtcggttccatcatacctatctgcctccgccttatccgggagccccacagaaccaaagtggacccttccaggccaatcctagtccgtatcatctgtactatggcacctcgagtgggtcctaccagttctccatggtggccgggagcagctcaggtggagataggtcaccaacacgaatgcttgcatcctgcacatcctcagcagcatccgttgcagctgggaacttgatgaacccatccctgggaggacagtcagacggtgtggaggccgacggctcccattcgaacagccctactgcgctgtctacccccggccggatggacgaagcggtgtggcgcccatactag

SEQ ID NO: 17257 - DNA, 1290 bp, synthetic construct
  misc_feature 1..1290: note = Description of Artificial Sequence: Synthetic coding sequence
  source 1..1290: mol_type = other DNA
atggctagcaatagcattttcgactcatttcccacatacagtcccacttttatacgagacccctccacctctcgacggtttacaccccctagtcccgcattcccttgtggaggaggaggcggcaaaatgggtgaaaattctggggcattgagtgcccaagccgccgttggccctggggggcgggcgcgaccagaggtgagatctatggtagacgtccttgcggatcacgctggcgagttagtgagaacagatagccctaattttctgtgttccgtgctgccatcccactggagatgtaacaaaacgctgcctgtcgcgtttaaggtggttgcgcttggtgacgtacccgacggcacagtcgtcacagtgatggcaggcaacgatgaaaactatagtgcggagttgagaaatgcctctgctgtgatgaaaaatcaggtggccaggttcaacgacctgcgatttgtcggcaggtctggcagaggtaagagttttactctgactattacggtatttacaaatcccacccaggtcgcgacatatcatagagctataaaggtcacagtggatggaccaagggaaccccgaagacataggcagaaacttgaggaccaaacaaagcctttccctgacagatttggcgacctagagaggctccggatgcgggtgactccaagtacgccttctccacgagggagcctctcaaccacatcacacttttccagccaacctcaaacacctattcaagggacttccgaactcaatccctttagcgatccccgccagttcgatcgaagctttccgactcttccaaccctgaccgaaagtcgtttccccgatccgcggatgcattatcccggggccatgagtgctgcgttcccttatagtgctaccccatcagggacgtccatttcttcactgtccgtagccggtatgccagcaacttctagatttcaccacacctacctgcccccaccttatcccggtgcccctcaaaaccagtcaggaccattccaagcaaacccaagcccataccatctttactatggcacatcctcaggctcctaccagttcagcatggttgctggtagtagctctgggggtgacagaagccctaccagaatgctggcgagttgcacatctagcgcggcaagcgtagccgctgggaatttgatgaaccctagtttgggcggccagtccgatggcgtcgaagcggatggaagccacagcaatagccctactgcactgtccactccggggcggatggatgaggccgtatggaggccatattag

SEQ ID NO: 17258 - DNA, 1290 bp, synthetic construct
  misc_feature 1..1290: note = Description of Artificial Sequence: Synthetic coding sequence
  source 1..1290: mol_type = other DNA
atggcttcaaattccatattcgatagcttcccgacatatagtcctacttttatccgggacccttccacctctaggcgctttacccccccctccccagcttttccatgtggtggtggaggcgggaagatgggagagaatagcggagctctatcagctcaggcagctgtgggcccagggggtagagcaaggcccgaagttcggagcatggtggacgtactagcagaccacgctggcgaactggtgcggacagacagtcccaactttctgtgtagcgtcctcccatcccactggaggtgtaacaagacactccctgtcgcgttcaaggtcgtcgccctgggcgacgtgccagatgggacagttgtgacagtaatggcagggaacgacgaaaactacagcgccgagctgagaaacgcctccgctgtgatgaaaaaccaggtggctagatttaacgatttacggtttgttggcagatctggacgaggcaaatctttcaccttgacaatcacagtattcactaacccaacccaagtggccacttatcaccgagccatcaaggtgaccgtagatggcccaagagagccacgacgtcacagacagaagctggaagatcagacgaagccctttccagaccggttcggggacctcgaacggctgagaatgcgtgtaacaccttcaacgcctagcccacgggggtcgctaagtaccacctcccatttcagctcgcagcctcagactcctattcagggtacctcagagcttaaccctttctcagaccctcgccagtttgataggagtttcccgacccttcccaccctcacagaaagtcgattccccgaccctcggatgcactacccaggagccatgagcgctgcctttccgtacagcgcgaccccgtccggcacctctattagttctctgtccgtcgccggaatgcccgccacctcacgttttcaccacacataccttccacctccctaccctggcgcacctcagaatcagagcggtccatttcaggccaatccctctccctaccatctgtactatggcacatcatccggcagctatcaattctctatggtggccggcagttcttccggaggcgatagatctcctactcgtatgctggcgagttgcacctcttctgccgcgtctgtggcggctggaaaccttatgaacccttccttaggcggccaatcggacggtgtcgaggccgatggatctcacagtaacagccccacagcactgagtacgccaggccgcatggatgaagcagtgtggcgcccctactag

SEQ ID NO: 17259 - DNA, 1089 bp, synthetic construct
  misc_feature 1..1089: note = Description of Artificial Sequence: Synthetic coding sequence
  source 1..1089: mol_type = other DNA
atgagaataccagtggatccttccaccagtaggaggtttactcctccctcacccgcctttccctgtggaggcggcggtggaaagatgggcgagaactcaggggccctctctgcacaggccgcggtgggacctgggggtcgggctaggcctgaggtccgctctatggttgacgtgctcgccgatcacgccggagagcttgtccgtacagacagccctaatttcctgtgttcagtccttccttcccattggagatgtaacaaaacactcccagtggccttcaaggtggtcgctttaggtgacgtacccgacggaacggtcgtgacagtaatggccgggaatgatgagaactactcagcagagctccgtaacgcctcggctgtgatgaaaaaccaagttgctcgcttcaacgacctgaggttcgtcggccgatctgggagaggaaaatcgtttacactgacaataactgtcttcacaaaccccacccaggtggctacgtaccaccgggctatcaaggtcaccgtggacgggcctagagagcctcgccgaacatctgaactgaatcccttttccgacccgcgccaatttgacagaagcttcccaactctccccaccctaaccgagagccgattccctgacccgagaatgcactaccctggggctatgtccgccgcattcccatacagcgccacaccctctggaacttctatatcttctttgagcgtcgctggcatgcctgcgacttcaagattccaccatacctaccttccgcctccttatcccggagccccgcagaatcagagtggaccgtttcaggccaacccttctccctatcatctctattacggaacaagctcaggttcctatcaattctccatggtggccggttccagttccggtggcgaccgtagccctacgagaatgctggcatcttgcacatctagtgccgccagcgtggcagctgggaatctgatgaatccgagccttggcggtcagtcagatggcgtggaggccgatggcagtcactccaactcacccacagcactctcgactcctggaagaatggacgaggcggtgtggcgaccatactag

SEQ ID NO: 17260 - DNA, 969 bp, synthetic construct
  misc_feature 1..969: note = Description of Artificial Sequence: Synthetic coding sequence
  source 1..969: mol_type = other DNA
atggtcgtagctctcggcgacgtgccggacggcactgtggtaacagtgatggctgggaacgacgaaaattattctgcagaactccgcaacgctagcgccgtgatgaagaaccaggtggctaggtttaacgatctgagattcgtgggtaggtctggcagagggaagtccttcacactgaccattactgtgttcaccaatccaacccaggtggcaacttaccaccgtgcaataaaagtgactgtcgacggaccacgcgaacctaggcgtcaccggcagaaattggaggaccagacaaaaccattccccgaccgctttggggaccttgagcgcttgcgcatgagggttacgcccagcaccccatcccccagagggagcctgtcaactaccagccatttctcttctcagcctcagacacctatacaggggaccagcgagcttaatccgttctcagacccacgccaattcgatagatcatttcctacgctgcccacactcaccgaaagccggtttcctgaccctagaatgcactaccctggcgccatgtccgccgcgtttccctatagcgccactccaagtggaacgagcatttcttcgctgtcagtggctggcatgcctgcaactagtagattccaccacacatatctgccaccaccgtatccaggggcaccacagaaccagagcggccctttccaggccaacccatcaccctatcacctctactacggaacctcttcgggatcttatcagtttagtatggttgcaggaagcagcagtggtggggatagatcacccacccgtatgctggcaagctgtaccagtagcgccgccagcgtggcagccggtaatttgatgaatccatcattgggcgggcagtctgatggcgttgaggctgatgggtctcactctaattcccctacagccctctccacaccaggcaggatggatgaagcggtatggaggccttactag

SEQ ID NO: 17261 - DNA, 2439 bp, synthetic construct
  misc_feature 1..2439: note = Description of Artificial Sequence: Synthetic coding sequence
  source 1..2439: mol_type = other DNA
atggactttagccggctgcatatgtatagtccccctcaatgcgtgcccgagaatacaggttacacatatgccctatcctctagctacagcagcgacgctctggactttgagacagaacataagcttgacccagttttcgatagcccacgcatgagtcgaaggtctctcaggctcgccaccacggcgtgtacgctgggcgatggggaagcagtcggggcagactccggaacctcctccgccgtcagtctcaagaacagggccgcccgcacaacgaagcagcgacgctctacgaacaagagtgcattttccatcaaccacgtgtcccggcaggtgacctcttccggcgtcagccatggtggcacagtgtccctgcaggacgcagtaactcgtcggcctcccgtgctggacgaaagctggatccgcgaacagaccaccgtggaccacttttggggtctcgacgacgacggcgatttgaaaggcggcaataaggctgccattcaaggcaacggagacgtgggggccgcagccgccacagcacacaacggcttttcctgtagcaactgtagcatgctgtccgaacgtaaagacgtcctcacagcccatcccgcagcccccgggccggtaagtagagtttactcaagggacaggaatcagaaatgcgacgattgtaagggcaaacgacacctggacgcccacccgggccgcgcggggaccttgtggcacatctgggcttgcgctggttactttttgctgcagattctgagacggataggggccgtgggacaagcggtgagtcgaaccgcctggtccgcattgtggctcgctgtagtggctccaggcaaggctgcttctggtgtgttttggtggctgggcatcggctggtatcagttcgttaccctgatcagctggcttaacgttttcctgctcacccgatgtcttagaaatatttgtaagttcctagttctcctcatcccgctcttccttcttctggccggactgagtctgcgcgggcagggtaacttcttttcctttctgcccgttctgaattgggcatctatgcacaggacccagcgcgtagatgacccccaagatgttttcaagcctactacaagcagactgaaacagcctctgcaaggcgattccgaagccttcccatggcactggatgtccggtgtcgaacagcaggtggcttccttgagtggccagtgccatcatcatggagaaaacctgagggagctaaccacactactgcaaaagctgcaggctcgcgtggaccagatggagggtggagccgccggaccatctgcatctgttcgcgacgccgtggggcagcctcccagagagaccgatttcatggcttttcatcaggaacacgaggttcggatgagtcacctagaggacatccttggaaaactgagggagaagtccgaagccatccagaaggagctggagcaaacaaagcagaagaccatttccgcggtgggcgaacaactgcttcctactgtcgagcatctccagctggaattagaccagttgaagtctgagctttcctcttggcgccacgtgaaaacaggttgcgaaaccgtggacgccgtgcaggaacgagttgatgtgcaggtaagagagatggttaagcttctgtttagtgaagaccagcagggaggctctctggagcaactcctacagaggttctcatcccagttcgttagtaaaggcgatttgcagaccatgcttagggatctgcagctccagatactcagaaatgtgacacatcacgtctcagtgaccaagcagctacctacgtcagaggccgtagtctcagcagtgtccgaagccggcgccagtgggattaccgaggcccaggcccgtgccatagtgaatagcgccttaaagctgtactcccaggataagactggcatggtggattttgccctggagtcaggaggcggaagcatcttgtccacaaggtgtagcgagacctatgaaaccaagacggcgcttatgtcactctttggcatccctctatggtattttagccagtcccccagagttgtcatccaacctgatatttacccaggcaattgctgggccttcaaagggtctcagggttacctagtcgtgcgcctaagcatgatgatccatcctgccgcttttacactcgaacatattcctaagaccctgtctcctaccggcaacatctcatctgcacccaaagactttgcagtgtacggcttggagaatgagtatcaagaggagggacagctgctgggtcagttcacttacgaccaagatggtgaatccctgcagatgttccaggccctgaagcgcccagatgacaccgcgtttcagatagttgaactcaggatattctcaaattgggggcaccccgaatatacttgtttgtaccgattcagagtccacggtgaacccgtcaaatag

SEQ ID NO: 17262 - DNA, 2109 bp, synthetic construct
  misc_feature 1..2109: note = Description of Artificial Sequence: Synthetic coding sequence
  source 1..2109: mol_type = other DNA
atgtctcggcgcagcctgcgcctggctacaacggcctgtacactgggagacggcgaagcagtgggagctgattccgggaccagcagtgccgtgagcctgaaaaacagagcagccaggacaaccaagcagaggagatccaccaacaagtcagccttctctatcaatcatgtgagccgccaagtcacgagcagtggcgttagccacggcgggacagtttctctccaagacgcagtaacacgccgcccacctgtgctcgatgaaagctggatcagagaacaaaccacagtcgaccatttttggggcctggatgacgatggagatctcaagggcggcaataaagctgctattcaggggaacggtgatgttggcgccgccgcagctaccgcccacaacggtttctcatgctcaaactgcagcatgctctccgaacgtaaggacgttctgacagctcaccccgctgcccctgggcctgttagcagggtgtacagtcgggataggaaccagaagtggaaagccgcgtccggggtgttttggtggctgggtatagggtggtatcagttcgtgacacttatttcgtggctcaatgtgttcctgctgactcggtgtcttagaaatatctgcaagtttctcgtcttgctgatcccgttgtttcttctgctggcgggcttaagtctgcgcgggcagggaaatttcttctctttcctgcccgtcctgaactgggcaagtatgcaccgcacccagcgggtggatgacccacaggatgtgttcaaacccactacttcccgtttaaagcagcctcttcaaggggatagtgaggccttcccctggcactggatgtccggagtcgagcagcaggtggcttctctgagcggccagtgccaccaccatggcgaaaaccttcgggagcttacaactttgttacagaaactgcaggcgcgcgtcgatcaaatggaggggggagcggcgggtccctctgcgtcagtccgagacgccgtgggccaaccccctagagaaactgatttcatggcatttcatcaggagcatgaagtaagaatgtcacacttggaagatatcctgggcaagcttagggaaaagagcgaggccatccagaaggagctcgaacagacaaagcagaaaactatttcggctgttggcgaacagctgcttcccaccgtggagcatttgcagctggaactcgatcaattaaagagtgagctaagtagctggagacatgtgaaaacagggtgcgaaactgttgacgctgtgcaggagagagttgatgtgcaggtccgagaaatggtcaagctgctcttttcagaggaccaacagggcggctcattggagcagctgctgcagcggttcagctcccagttcgtgagtaagggagatcttcagactatgctgcgggatttgcagctccaaatccttcgaaatgtcacacaccacgtttcagtcactaagcaactacctacgtcagaagccgtggtctcagctgtgagcgaggctggtgccagcgggattacagaagctcaggcccgcgctatcgttaattccgccctgaaactgtactcccaggataaaaccggcatggtggactttgctctcgagtcaggcgggggctcaatcctctccactcggtgcagcgaaacgtacgagacaaagactgcgttgatgagcctttttggaattcccctgtggtattttagccagtctcctcgggtagtcatccagcccgatatttatcctggcaactgttgggccttcaaaggatcccagggttacctggtcgtaagactgagcatgatgatacacccagccgcatttacgctggagcatataccaaagacactgtcacccaccggcaatatctctagcgcccccaaggattttgctgtgtatggcttggaaaatgagtatcaagaggaaggccaactgttggggcagttcacctacgatcaagacggggagtcactgcagatgtttcaggcactaaagcggccggacgacacagcctttcagatcgtcgagctccgtattttctctaattggggacaccctgagtacacctgcctgtatagatttcgggtgcatggcgaacctgtcaaatag

SEQ ID NO: 17263 - DNA, 2358 bp, synthetic construct
  misc_feature 1..2358: note = Description of Artificial Sequence: Synthetic coding sequence
  source 1..2358: mol_type = other DNA
atggactttagcagactgcatatgtatagccccccacagtgcgttccagagaacacagggtatacgtacgctctcagtagctcctactcctcagacgcgctcgacttcgaaaccgagcataagctggaccccgtgtttgattctccacgcatgagcaggaggtccctgagactggccactactgcttgtaccctaggggatggagaagccgtcggcgccgactccggaacttcctctgctgtgtctttgaagaatagggcagcccgcaccaccaagcagcggcgatcaaccaataagtcagcattcagtatcaaccatgtgtctcggcaagtaacatcgtctggggtgagccacggtggaacagtcagtctgcaggacgccgtgacaagaagacctcccgtcctagatgaaagctggatccgggaacagactactgtggatcacttttggggcctcgacgatgatggcgatctaaaggggggcaacaaagccgccattcaggggaatggagatgtgggagccgctgccgccactgcacacaatggcttctcttgtagtaattgttccatgctcagcgagaggaaggatgtcctgacggcccatccagccgcccccgggcctgtgtcccgagtgtatagccgggaccggaaccagaagtgctattttctgctacaaatcctgaggcgcatcggggccgtgggccaggctgtgtcccgtaccgcatggagtgcgctctggcttgctgttgtagcccccgggaaagccgcatccggagtattttggtggctgggcatcggctggtatcagtttgtgacactgattagttggttgaacgttttccttcttacacggtgcctccgaaatatatgtaagttcctcgtccttctcattcctctgtttctactactggccggtctctccctgcggggccaggggaattttttttctttcctgcccgttcttaattgggcttcaatgcacagaacccaaagagtagacgacccccaggacgtgttcaagcctacaacctccaggttgaaacaaccactccagggggacagcgaggcgtttccgtggcactggatgtctggagtggaacagcaggtcgcgtccttgagcggccaatgccatcaccacggcgaaaatctcagggaactcactaccctgctgcagaagctgcaggcgcgtgtagaccagatggagggcggggccgctgggccaagtgcatcagttcgcgatgccgtaggccagccccccagagagacagactttatggcctttcaccaggaacacgaggttagaatgagtcatctggaagacatactggggaagttgcgagaaaaatctgaagcaattcaaaaagagttggaacaaacgaagcagaaaacgatttccgctgtgggcgagcagctgctccccaccgtcgaacacctgcagctggagttagaccagctgaaatcagaactgtcgagctggcggcatgtcaagacaggatgtgagaccgtggacgcggtccaagaaagggttgatgtgcaggtaagggagatggtgaaattactgttctccgaagaccaacagggaggatcgttggaacagctcttgcaaaggttttccagccagtttgtcagcaaaggggatttgcagaccatgctgcgcgatctgcagctccagattttgcgcaatgtgacacaccatgtctctgttactaagcagctgccgacctccgaggcagtggtgtctgccgtttctgaggctggcgctagtggaataacagaagcccaagctcgagctatcgtgaactccgcactaaagctgtacagccaggacaagacgggaatggtggattttgcactggagtctggtggaggctccatactgagtacccgatgctcagagacatatgagaccaagacagcacttatgagcttgttcgggatcccattgtggtacttcagccaatcccccagagtagttatccagccagacatttaccccggaaattgctgggcctttaagggctctcagggatatctcgtggtccgactgagtatgatgattcacccggcagccttcaccctggagcacatcccaaaaaccttgtcgccgaccggcaatatatcatccgcccccaaggacttcgcagtttacggactggaaaatgagtaccaggaggagggacagctgctcggccaattcacttacgaccaggatggagagagcctccagatgtttcaggctctgaagagacccgacgatacagccttccagattgtggaattacgcatttttagcaactggggacaccccgaatatacatgcttatatcggttcagggtgcatggcgagccagtaaagtag

SEQ ID NO: 17264 - DNA, 774 bp, synthetic construct
  misc_feature 1..774: note = Description of Artificial Sequence: Synthetic coding sequence
  source 1..774: mol_type = other DNA
atggacttctccaggctccatatgtactcacctccacagtgcgtgcctgagaataccggctacacctatgcactctcgtccagctattcctccgacgccctggacttcgagacagaacacaagctggatccggttttcgattcaccgaggatgtctcggcggtctttaagactggcaactacagcatgcaccttaggggacggcgaagcagtcggcgccgattcaggcactagtagtgccgtctcactaaaaaaccgcgcagcccgtacaacaaaacagcgccgatccaccaataaatcagcctttagtatcaatcacgtctcccggcaagtgacatcctccggagtgtcccacgggggcacagttagtcttcaagatgctgtcactcgacgacctccagttctcgatgagtcgtggatccgggagcagactactgtggatcacttttggggcctggacgatgacggggatctgaaaggtggcaacaaagccgccattcagggcaacggcgatgtgggggccgccgctgctaccgcccataatggcttttcctgttccaattgttccatgttgtccgagaggaaggacgtactcacagcacacccagctgccccgggccccgtaagccgggtctacagccgagaccggaaccagaaatgcaaaagccaatcatttaagacccagaaaaaagtgtgtttccccaacctgatctttcccttttgcaagtcccagtgcctccattatctgagttggcggctgaagatcatcccttag

SEQ ID NO: 17265 - DNA, 2469 bp, synthetic construct
  misc_feature 1..2469: note = Description of Artificial Sequence: Synthetic coding sequence
  source 1..2469: mol_type = other DNA
atggatttcagtcgcctgcatatgtatagcccccctcagtgtgtgccggagaataccgggtacacttacgccctctcaagttcgtactcttcagatgcattagatttcgaaacagaacacaagctggaccccgtcttcgactcgcccaggatgagtcggaggagtttaagacttgcgactaccgcctgcactctgggggacggtgaggcagtgggtgccgacagcggtacatcctctgctgtctcgctgaagaaccgggccgccaggaccactaaacaacggaggagcacaaataaaagtgctttctccataaaccacgtatcccgccaggttacttcaagcggcgtgtcccacggcggaaccgtgtcactacaggatgctgtgacccgacgcccccctgtcctcgacgagagttggatacgtgagcagaccactgtcgaccacttttggggccttgacgacgatggagacctgaaaggaggcaataaggcagcgatccagggtaatggcgacgtgggtgcagcagccgctaccgctcacaatggtttctcttgcagcaattgcagcatgctgtctgaacgaaaagatgtgctgacagcgcaccccgccgcccctggacctgtgtctcgggtctactcgagggacagaaatcagaagtgtgatgattgcaagggcaagcggcatctggatgcccataccgcagcacatagccagtccccccgcttgcctgggcgagcggggaccttgtggcacatctgggcttgcgcagggtatttcctcctccagatactgaggcgcattggggcagtgggtcaagccgtgtcgagaacagcgtggtctgccctttggctggccgtggtggctcccgggaaagccgcctcgggagtcttctggtggttaggaattggctggtaccagttcgtgacactgatttcttggctgaatgtattccttctcactcggtgtcttcggaatatctgcaagtttctggtgcttctcattccattgtttctcctactcgccggtctgtctctcagaggtcaagggaactttttcagctttctccctgtgctgaactgggcatccatgcaccgaactcagagagtggacgacccccaggacgtgtttaagcccaccaccagtcggctaaagcagcctttgcagggcgactctgaggcttttccatggcactggatgtcaggtgtggagcagcaggtagcttccctatcaggacagtgccaccatcatggcgaaaatctacgagagctaaccacactgctccagaaactgcaggcacgcgtggaccagatggagggcggtgctgctggcccttctgccagcgttcgggatgctgttggccaacctcctagggagacagatttcatggcttttcaccaggaacacgaagtccgaatgagccacctagaagacatcctgggaaagttgcgagagaaaagcgaggctatacagaaggaactggaacagacgaaacagaaaacaatctcagccgtgggggagcagctccttccaaccgttgaacatttacagctggaactagaccaactgaagtctgaactgagctcttggagacacgtcaaaacaggctgtgagactgtagacgccgtgcaggaacgcgtggacgtccaagtgagagaaatggttaaattgctgttttcagaggatcagcagggtggctctctcgaacagttactgcagaggtttagcagccagttcgtctccaaaggggacctgcaaactatgctccgagaccttcagttgcaaatcttgcggaatgtcacacatcacgtttccgtgactaaacagctgccgacttctgaggcggtggtgtcagctgtttccgaggcaggtgcctctggaattactgaagcacaagccagggcaatcgtgaattctgccctgaagttatactcccaggataagacagggatggttgacttcgccctggagtccggggggggatccatattgtccactcgctgctctgagacttacgagactaagactgctctgatgagtttgttcggaatccctctgtggtatttttcgcagagtcctcgagttgtgattcagccagatatataccctggaaactgttgggccttcaaaggatcccagggatacctggttgtgcgattatccatgatgatccaccctgcagctttcacactggagcatatccccaaaaccttgtcaccaacaggcaacatttcctcagccccgaaagattttgccgtttacggcttagaaaacgagtaccaagaagaaggccaactcctgggacagttcacatacgaccaagatggcgaatcccttcaaatgttccaggctctgaaaagacccgacgataccgcattccagattgtagaactgagaatcttctctaattggggccaccctgagtatacgtgcctctaccgattccgagtgcacggggagccagtgaaatag

SEQ ID NO: 17266 - DNA, 1752 bp, synthetic construct
  misc_feature 1..1752: note = Description of Artificial Sequence: Synthetic coding sequence
  source 1..1752: mol_type = other DNA
atgaagctgagttacgagtctgagaattataaacttaagacccatgagtctaaagattgcgagtcagaatcttataaaagcaagagtcatgagtctaaggcccacgcatcctattacggacggatgaatgtgcgggaggtgcttagagaggacggccacctaagtgtgaatggcgaggctctgtggaaggccgcttccggcgtattttggtggcttggtatagggtggtaccagttcgtaacactgatctcttggctgaacgtcttcctgcttacacggtgtcttaggaacatctgtaagtttctcgtgttactgatacccttattcctgttgctggcgggactgtccttgagagggcaggggaactttttctcctttctcccagtactgaattgggcttccatgcaccggacacaaagagtcgatgacccacaagacgtctttaaaccgacaacaagtcggctgaagcagccactgcagggtgattcagaggccttcccttggcattggatgagcggcgtggaacaacaggtggcttcactgagcggacagtgccatcaccacggcgaaaacctccgcgagctgactaccctgctgcagaaactgcaggcaagagtggaccagatggaaggaggcgccgccggcccttccgcctctacagacttcatggcctttcaccaggagcacgaggtgcggatgagccatctggaggacattctggggaagttacgagaaaagagtgaggccattcaaaaagaactcgagcaaactaaacagaagactataagtgctgtgggagagcagttgctccccacagttgagcaccttcagcttgaactggaccaattgaaatcagagttgagctcatggcgccatgtgaagaccggatgtgagaccgtggatgccgtgcaggaaagggtggacgtccaggttcgggaaatggtgaaattgctttttagcgaggaccagcagggggggtcactcgaacagcttctgcagaggttctccagccaattcgtttccaaaggcgatctgcaaactatgctgagggatctgcagctgcaaattctgcggaacgtgactcatcacgttagcgtcacaaagcaacttcctacgtcagaggccgtcgttagcgccgtcagtgaggccggagctagtgggatcaccgaagctcaggctcgggccattgtaaatagcgccctgaaactttacagtcaggataagaccggcatggtagactttgctttagagagcggaggcggcagcatcctgagtaccagatgctcggagacttatgaaacaaagactgcacttatgtccctcttcggcatcccgctgtggtacttctcccagtcacccagggtggtaatccagcctgatatataccctgggaactgctgggccttcaagggcagccagggttatttagtagtgaggttgtccatgatgatacacccagcggccttcacacttgagcacatacccaaaaccctgagccctaccggaaatatatcgagtgcacccaaagatttcgccgtctatggcttggaaaatgaataccaagaagagggacagctcctgggccagttcacctacgatcaggatggtgagagtctacagatgtttcaggccttaaaaaggcctgatgacacagcatttcagattgtcgagctgcgaattttcagcaattgggggcaccccgaatacacttgtttataccgcttccgggtgcacggagagcctgtaaagtag

SEQ ID NO: 17267 - DNA, 342 bp, synthetic construct
  misc_feature 1..342: note = Description of Artificial Sequence: Synthetic coding sequence
  source 1..342: mol_type = other DNA
atggacttctctagactccatatgtattcccccccgcagtgtgtacctgagaatactggctatacttacgccctctctagcagctatagctcggacgccctggattttgagaccgagcataaactggatcccgtgtttgactcgcctcgcatgagcagacgatcactgcggctcgccacaacagcctgcaccttgggtgacggagaggcagtcggcgcggattcaggcacatctagcgccgtctcactgaaaaaccgggccgcaaggaccaccaaacagcgcagaagtacaaataagtccgcattctcgataaatcacgttagccgtcaggtgacctcatag

SEQ ID NO: 17268 - DNA, 267 bp, synthetic construct
  misc_feature 1..267: note = Description of Artificial Sequence: Synthetic coding sequence
  source 1..267: mol_type = other DNA
atggatttttctaggctgcatatgtattcccctccccagtgtgttcccgagaacaccggctatacatatgcactgtcctcgtcatattcctccgatgccctagactttgaaaccgagcataaactggacccagtgttcgatagccctcggatgtctagacggagtctcaggctggctacaaccgcatgtaccctgggggacggcgaagctgtcggagccgatagcggcacctcgagcgccgtgtcactcaagaacagggctgcatag

SEQ ID NO: 17269 - DNA, 2109 bp, synthetic construct
  misc_feature 1..2109: note = Description of Artificial Sequence: Synthetic coding sequence
  source 1..2109: mol_type = other DNA
atgtcacggcgtagtctccgccttgctacaaccgcatgcaccctgggcgatggtgaagccgtcggcgcggactctggtacttcttcagccgtctcactcaaaaaccgtgctgcgaggaccacaaaacagcgccgctcaactaacaagtccgcttttagtatcaatcacgtaagccgtcaggtcacatcaagcggcgtgtctcacggcggaacagtgtccctgcaggatgctgtgacacgccgaccacccgtactggatgaaagctggattagggagcagacgacggtggatcacttctggggtctcgacgacgatggagatctgaaggggggtaataaagccgccatacaagggaatggagacgtgggtgccgcagccgccacagcccacaacggcttctcttgctcgaattgttctatgctgagcgaacgcaaggatgtgctcaccgctcatcctgccgcacctggcccagtttcccgtgtgtatagtagagaccgtaatcagaagtggaaggcggcttctggcgtattctggtggctggggattggctggtaccaattcgtcacattgattagctggttgaatgttttcctgttgacccgctgtctgcggaatatctgcaagtttcttgtgctgctgatccctcttttcctgctactcgccggccttagcttgaggggccagggaaacttctttagcttcctgcctgtgctgaattgggcctcaatgcatcgcacacagcgcgttgacgacccgcaggatgtattcaaacccaccacctcacggttgaaacagccactccaaggcgattctgaggccttcccctggcactggatgtcaggggtggaacagcaagtggcctcgctctcaggccagtgtcatcaccatggggagaatctgagagaattgactaccctcttgcaaaagctgcaggcaagagtagaccagatggaaggcggcgctgctgggccatctgcttccgtacgcgatgcagtaggacagccacctagggaaacagacttcatggctttccatcaggagcatgaggttcgcatgtctcatctggaagacatcctgggtaagctcagggaaaagagcgaggctatccagaaggagctggagcagaccaaacagaaaactataagtgccgttggagagcagctgttaccaactgtggagcacctgcagctggaactggatcagctcaagagcgagctgagtagttggagacatgtaaagacagggtgtgagactgtcgatgccgtgcaggaacgagtggacgtccaggttagggaaatggtaaagctcctgtttagtgaagatcagcagggaggctccttagaacagctgctgcagcggttctctagccagtttgtatccaagggcgatctgcagaccatgctgcgcgacctgcaactgcaaattctaagaaatgtgacccatcacgtgtctgtgactaaacaactgcctacttcggaggctgtcgtgagcgccgtgagtgaagctggcgcctccggcataacggaagcacaggcaagagccatcgtcaactccgcattaaagctctattcgcaagataaaaccggaatggtagatttcgcacttgagagcggaggggggtcgatattgtcgaccagatgcagtgagacatacgagaccaagactgcgctgatgtccctcttcggcatccccctctggtactttagtcaatcacccagagtcgtgattcaacccgacatctacccaggcaattgctgggcattcaaggggagtcaaggatatctagtagtacgcctatcaatgatgattcacccagctgcttttaccctggagcacatacctaagacactctcacctacggggaacatctcatctgcccctaaagatttcgctgtgtacggcctcgaaaatgaatatcaggaggagggacagttgctgggacagtttacatatgaccaggacggagagagcctgcagatgttccaggccttaaagcggcccgacgacacagcgttccaaattgtcgagctcaggatcttcagcaattggggccatccagaatatacttgtctttatcggttccgcgtccacggcgagcctgtgaaatag

SEQ ID NO: 17270 - DNA, 525 bp, synthetic construct
  misc_feature 1..525: note = Description of Artificial Sequence: Synthetic coding sequence
  source 1..525: mol_type = other DNA
atggattttagcaggctgcacatgtattctcctccgcagtgtgtccccgagaatacaggctatacatacgcactctccagtagttacagctccgatgccctggacttcgaaacggaacataagctagatccagtcttcgattcaccccgcatgtcccggcggtccctacggttggccacaacagcatgtacgctgggggacggcgaggcggtgggggccgattccggcacttcgagcgccgtaagtctaaaaaacagagctgccaggactactaagcagagaagatccaccaataagtcagccttttctattaatcatgtgagtcgccaggtgacatcaagcggtgtgtcacacggcggcacagttagcttgcaggacgctgttacccggcgccctcccgttctggatgagtcctggatcagagagcagacaaccgtcgatcacttttggggtctggacgatgacggcgacttgaaagggggcaacaaagctgctattcaaggtaatggcgacgtgggcgcctag

SEQ ID NO: 17271 - DNA, 408 bp, synthetic construct
  misc_feature 1..408: note = Description of Artificial Sequence: Synthetic coding sequence
  source 1..408: mol_type = other DNA
atggacttcagtcgattgcatatgtacagtcctccccagtgcgtcccggagaacacaggatacacctacgccctgagttcgagctatagttcggacgccctggatttcgagacagaacataaactggatcccgtatttgactctccacgcatgagtcgtaggagcctgagactggctaccacagcatgtacccttggcgatggagaggctgtgggcgccgacagcggaacgtcctccgccgtttcattaaaaaaccgcgctgcccgcaccacaaagcagcgcaggagtactaacaaatctgctttttcaattaaccatgtttcccgccaggtcacctcatccggggtctcgcatggaggcactgtgagcctgcaggatgcggtgactcgacggccacccgtgctatag

SEQ ID NO: 17272 - DNA, 267 bp, synthetic construct
  misc_feature 1..267: note = Description of Artificial Sequence: Synthetic coding sequence
  source 1..267: mol_type = other DNA
atggacttcagtcgcctgcatatgtattcaccacctcagtgcgttcctgaaaacacggggtatacttacgccctctcaagttcttacagctcggacgctcttgattttgagaccgaacacaaactggatccggtttttgattctccaagaatgtcaaggagaagtctcaggctcgccacaaccgcttgtactctgggggatggagaggctgtcggagcagacagcggtacctcgtccgccgtgagcctgaaaaatcgcgctgcatag

SEQ ID NO: 17273 - DNA, 2049 bp, synthetic construct
  misc_feature 1..2049: note = Description of Artificial Sequence: Synthetic coding sequence
  source 1..2049: mol_type = other DNA
atggatttctcacggttgcacatgtatagtcctccacagtgcgtgccagaaaacaccggctatacgtacgccttatcttcatcttattccagcgacgcccttgacttcgagaccgaacacaaattagaccctgttttcgattctccacgcatgtccaggagatctttacgtctggctacaacagcctgcacattgggcgacggtgaggcagttggcgccgattcgggaacgtccagtgcagtcagccttaagaaccgagccgcccggactacgaaacagaggcgaagcactaacaagtctgctttctcaatcaaccacgtgagtaggcaagtgacttcttctggcgtctcccacggcgggactgtgagtctgcaagatgccgttacccgcagaccccccgtgctggacgagagctggatcagagagcagactactgtggatcatttttgggggaaagccgcttcaggggtgttttggtggctgggtatcggctggtaccagttcgtgaccctgatctcctggctcaatgtatttctgctgactcgatgcctgcgcaatatttgcaagttcctggtcttgctgattcctttattcttgttgcttgggctctcactccgggggcagggaaatttctttagttttctgccggtgttgaactgggcttcgatgcacagaacacagagagttgacgatccacaggacgtcttcaagcccactacctcaaggctgaaacaaccccttcagggcgactccgaagccttcccatggcattggatgtcgggtgtggagcagcaggtggcatcgctgtctggccaatgtcaccaccacggcgagaatctccgcgaactgacaaccttattgcagaagttgcaggcgcgagtcgaccagatggaaggaggcgcagctgggccatcggcctccgtccgcgacgccgtggggcaacctcccagggagacggatttcatggcgttccatcaggagcatgaagtccggatgtctcaccttgaagacattctcggaaagctgagagaaaagagtgaggcgatccagaaggagttggagcagaccaagcaaaaaacaatttcggctgtcggtgaacagctgttacccaccgttgagcatctgcagctggagctcgatcaactcaaaagtgaactttcttcctggagacacgtgaagacaggctgcgaaaccgttgatgccgtgcaggaaagagtagatgtacaggtacgcgagatggtgaaactgctgttcagcgaggatcagcagggtgggtccctcgaacagctcttgcaaaggttttcatcccagtttgtgagcaagggggatctccagacaatgctgcgcgatttgcagctgcaaatcctgcggaatgtgacccaccatgtcagcgtaactaaacagctgccaacgagcgaagcagttgtctccgccgtgtccgaggctggcgcaagcggaatcaccgaggcacaggcccgcgccattgtgaacagtgcacttaaactgtatagccaggataagactggcatggtggattttgcgctggaatctggcgggggatccattttgtctacaagatgctctgaaacatacgagaccaaaacagctctgatgagcctgttcgggatccccctttggtacttctcccagagccccagagtcgtgatccaacctgatatctacccgggcaactgctgggccttcaaaggaagccagggatacctggtggtccgcctgtccatgatgattcaccccgccgcctttactttagaacatatccctaaaacgctttctcctaccggcaacatttccagcgcacccaaagattttgccgtttacggtctcgaaaatgagtaccaggaggagggtcaactgttgggccagttcacttacgaccaggatggtgagagtctgcagatgttccaggcactcaaaaggccggacgatacagcctttcaaatagtggagctgcggattttttctaactgggggcaccccgagtatacatgcctgtatcggttcagggtgcacggcgagccggtaaagtag

SEQ ID NO: 17274 - DNA, 2925 bp, synthetic construct
  misc_feature 1..2925: note = Description of Artificial Sequence: Synthetic coding sequence
  source 1..2925: mol_type = other DNA
atgggggacgtccgcaaagccaaagaagctctggctgaggttcaaattcctccaccagatgctggccccagccccagatgtaagccaccgcccgccgaacgccttctggggccaggcagaaggcgcaggggcctgaggagacgacgagaggcagtgtggtttgaggtggtgaatatggacttcagtcgattgcacatgtattcacctccacagtgcgtgcctgaaaacaccggttatacctatgccctaagctcctcatatagcagcgacgccttggactttgagaccgaacacaaacttgacccagtcttcgacagtccacgcatgtctcgtcggagcctgagactggccaccacggcttgcaccctgggcgacggggaggctgtaggagctgatagcgggacatcatccgctgttagcttgaaaaaccgcgctgccaggacaacgaagcagcgtcggtcgacgaataaatcagcattcagcatcaatcacgtctctagacaggtgactagttctggggtttctcatgggggcaccgtgtctctacaggacgccgtcacccggagacctcccgttctggatgaatcctggattcgggagcagacaaccgtggatcacttctggggattagacgatgacggcgatctaaaaggcggtaacaaggcggccatccagggcaatggagatgtgggagctgctgctgccacagcacataacggcttctcttgttctaactgcagcatgttgagtgagcgcaaggatgtccttacagctcatccagccgctcctgggcccgtgtctagagtgtattctcgagacagaaatcagaaatgtggggcatctttctacgtgaatcgcatcctgtggttagcaaggtacactgcgtcctcattttcatcattcctggtccagctgtttcaggttgtgttaatgaagttatcttatgaatcggagaactataagttaaaaacccacgaatcaaaggattgcgagtctgaatcatacaagtcaaagtcacatgagtctaaagctcacgcctcttactacggccgcatgaacgttcgagaggtcctgcgggaagatgggcatctctccgtcaacggggaggccctttgcgacgactgtaagggcaagcgccacttggacgcccacaccgcagctcattctcagagccccaggctgccaggtcgggccgggaccctctggcacatctgggcctgcgcgggatactttttgctgcaaattttgagacgcatcggagctgtcggccaggccgtaagccgaacggcctggtccgccctgtggcttgccgtggtcgctcctggcaaagccgctagtggagtattctggtggctggggattggttggtaccaatttgtgaccctcattagctggctgaatgtttttctgctgaccaggtgccttaggaatatctgcaagtttttggtgctgctaatcccactgtttctcctgcttgcgggattgtctctgcgaggacaagggaacttcttctcttttttaccagttttaaactgggcgtccatgcatcggacacaacgcgttgatgaccctcaggatgtttttaagcctacaactagcagattaaagcagcctctccagggggacagcgaggcatttccgtggcactggatgtcaggggtggagcagcaggtggcctctctgtccgggcagtgccaccatcacggcgagaatctgcgggagctgacgacgctgcttcagaagttacaggcccgagtggatcagatggaagggggagccgccgggccttccgctagcgttagagacgcggtgggccagccaccccgcgaaaccgattttatggcttttcaccaggaacatgaggttaggatgtcccatcttgaggatatactaggcaagctgcgcgaaaagtccgaggcaatacagaaggaactggagcagactaagcagaagacaatcagtgcagtgggtgaacagctgctccctacagtagagcacttacagctggaactggaccagctgaagtcggaattatcaagttggcgccacgtcaaaactggttgcgaaactgtcgatgccgtccaggagagagttgacgtacaagtacgcgagatggttaagctgctcttcagtgaggatcagcagggtggcagcttggagcagctgctgcaacgttttagctcccagtttgtttccaagggtgatctgcagaccatgctccgggacctgcaactacagatcctgcggaacgtaactcatcatgtaagcgtgactaagcaactgccaacgtccgaagctgttgtgagcgcggtgagtgaagcaggcgcaagtggtatcactgaagctcaggccagagctatagtgaactcagctctgaagctgtacagccaggataaaacgggcatggtggacttcgccttggagagtggggggggcagcatattgtctaccagatgctctgagacttacgagacgaaaacagcccttatgtccctcttcggaattcccctctggtatttctcccagtctccacgcgtggtaatccagcccgatatctacccgggtaactgctgggcttttaagggatctcaggggtacctggtggtgagacttagtatgatgatccatcctgccgcttttacgctcgagcatattcctaagacattgagcccaacaggcaacatctcctcggccccaaaggactttgctgtgtatggcttagagaacgagtaccaagaagaggggcaactactgggacagtttacttatgatcaggacggagagagcctccagatgttccaggccctcaaaaggcctgatgacacagcatttcagattgtggagctacgaatatttagtaattgggggcacccagagtatacttgcctgtaccgttttagagtgcacggggagcccgtcaagtag

SEQ ID NO: 17275 - DNA, 837 bp, synthetic construct
  misc_feature 1..837: note = Description of Artificial Sequence: Synthetic coding sequence
  source 1..837: mol_type = other DNA
atggggcggatatctccgggtagcccaggcctgcctcggacagtctggtttgaggtggttaatatggattttagcagactgcatatgtattcacccccccagtgcgtgccagagaataccgggtacacatacgccctctcctcttcgtactcatccgatgccctcgatttcgaaacagagcacaaacttgacccagtttttgattcccccagaatgagccggcgctcccttaggctcgctaccacagcctgcactctgggcgatggagaagctgtcggagctgactcaggtacttctagtgcagtgagcttaaaaaatagagcagctagaactaccaaacagcggcgctccaccaacaagtcagcattctctatcaatcacgtctccaggcaggtgacgagctcaggagtctcgcacggcggaacggtctctctgcaggatgccgtaacccggaggccaccagtgctagacgagagctggattcgcgaacaaacaaccgttgaccacttttggggcttggatgacgacggggaccttaaggggggcaacaaggcggccatccaaggcaacggtgacgtaggcgcggcggcagccacggcacacaacggcttttcatgtagcaactgctcaatgctctcagagcgcaaggacgtgcttacagcccatccagcagcacccggcccagtctcacgagtttactcccgcgacaggaaccaaaagtgcaaatcccagagcttcaaaactcagaaaaaggtatgctttcctaacctgatctttccgttttgcaaatctcaatgcctccactatctctcctggaggctcaaaattattccatag

SEQ ID NO: 17276 - DNA, 360 bp, synthetic construct
  misc_feature 1..360: note = Description of Artificial Sequence: Synthetic coding sequence
  source 1..360: mol_type = other DNA
atggatttcagtcgcctgcatatgtactcaccaccccagtgcgttcccgaaaatacaggctacacgtatgctctgtcaagttcctatagctccgacgcgttagacttcgaaaccgagcacaaactggatccagtcttcgacagcccccggatgagccggcgttccctaagactggccacaacagcttgcacactcggggacggggaggcagtcggtgctgacagcggcaccagttctgcggttagcttgaagaacagggccgcacggacaaccaagcagcggcggtccacaaacaagagtgcctttagcattaaccacgtaagcagacaggtgactagcagcggcgtgagccatggttag

SEQ ID NO: 17277 - DNA, 2352 bp, synthetic construct
  misc_feature 1..2352: note = Description of Artificial Sequence: Synthetic coding sequence
  source 1..2352: mol_type = other DNA
atggtgataatgtctgagttttctgctgatcctgccggccagggccagggacagcagaagccccttcgtgtcggcttttacgacatcgagagaacgctcggcaagggcaacttcgccgttgtcaaactggcccgacatcgcgtgaccaaaactcaggtagccatcaagatcatcgataaaactagacttgatagtagtaacctagaaaagatctaccgcgaagtgcaactgatgaaattgctcaatcacccccacattattaagctctatcaggtgatggaaacgaaagatatgctttacatcgtaaccgagttcgcaaaaaatggggagatgtttgactatctcacctctaacggtcatctgtctgagaacgaagcacggaagaaattttggcaaattttgtctgccgtggagtattgccacgatcatcacatcgtgcacagagaccttaaaacggagaacctgctgctggacgggaacatggacatcaagttggccgacttcgggttcggcaatttctataaatccggcgagccactctccacttggtgcggaagccccccctacgcagcacccgaggtgttcgagggtaaggaatatgaaggtcctcagttagacatatggagcctgggagtcgtgctctacgtcctcgtctgcggaagcctgccattcgacggccctaacctgccaacgctccgacaaagggtgttggagggtagattcaggatcccattttttatgtcccaggactgtgaaagcctgatcagaagaatgctggtcgtggacccagccaggcgcatcaccattgctcaaatcaggcaacaccggtggatgagggcagagccctgcctcccgggccctgcctgcccagccttttctgctcacagctacacaagcaatctgggggactatgacgagcaggcacttggcattatgcagacattgggcgtcgatagacagaggacagtcgagtccttgcagaattcctcttacaatcactttgcggccatttattacttattgctcgaaagactgaaggagtaccggaacgcgcaatgtgctcgtcctgggcctgcacggcagccccgcccacgttcatctgacctgagcgggctggaggtaccacaggaaggcttgtcgacggatccctttagacccgccctgctctgtcctcaacctcaaaccctagtgcagtccgtgctacaggctgagatggattgcgagctgcagagctcactgcagtggccactattcttccccgtcgacgcctcctgctcaggggtcttcaggcctcgtcccgtgagcccttcctctctgcttgatactgccatctccgaggaagcccgccaaggtccaggacttgaggaagaacaagatacacaggaaagcctgccctcttcaacaggcaggagacacacacttgctgaagtgtcaacccgcttaagccccctgacggccccatgcattgtcgtgagcccctccacaaccgccagtcccgcggaggggacctcatccgacagctgtctgacattctcggcctcgaagagccccgcaggcctctccggtactccagctacgcagggcctgctgggggcatgttcacctgtccgcctcgcctctccctttctgggcagccaaagcgccacgcccgtactacaggcccagggaggactgggcggtgcggtgctgcttcctgtgtccttccaggaggggagaagagccagcgatacatctctcacgcagggcttgaaagcgttccggcagcagctgaggaaaacgactaggactaaaggttttctgggccttaacaaaatcaaaggccttgccaggcaggtgtgtcaggcgccagctagtagagcaagtcgcggcgggctttcccccttccacgctcctgctcagtctccagggctccatggaggggccgccggatctcgagagggttggagcctattagaggaggtactagagcagcagcgcctgcttcagctgcagcaccaccccgccgccgctcccggatgtagccaggcaccacagccggcccccgctcctttcgtgatagcgccctgcgatggcccgggagccgccccacttccgtcgaccctcctgacctctgggcttccgctgttaccgccaccactgctgcaaacaggagcgagtcctgtagccagtgctgcccagctgctagatacccacctccacattgggactggaccaactgcgctccccgcagtgcccccgccccgactagcacgtctcgcccctggatgcgagccactcggccttctacaaggggattgcgagatggaggaccttatgccatgctccttgggaacattcgtcctagtgcagtag

SEQ ID NO: 17278 - DNA, 3744 bp, synthetic construct
  misc_feature 1..3744: note = Description of Artificial Sequence: Synthetic coding sequence
  source 1..3744: mol_type = other DNA
atggaggacgctggggccgccggccctggaccagagcccgagcctgagccagagccagaaccagagccggccccggaacctgaaccggagcccaagccaggggccggtacgagcgaggccttttcacgactttggaccgacgtcatgggcattctggatggcagcctcggcaacatcgacgacctcgcgcaacagtacgcggattattataacacatgctttagcgatgtgtgcgaacggatggaagagttacgcaagcggagggtcagccaggatctcgaagtggaaaaacctgacgcctcccccactagcctgcaactgcggtcccagattgaggagagtcttggcttctgcagtgcagtgtcaactcctgaggtagagcgtaaaaatcccctgcacaagagcaactcggaagactccagcgtgggcaagggagactggaagaagaagaataaatacttctggcagaacttccgcaagaaccaaaaaggcattatgaggcagacttcaaaaggggaagatgttggttatgtcgcttccgaaataaccatgtccgacgaggagcggatacagctgatgatgatggtgaaggaaaagatgatcaccattgaggaagcacttgctcggttgaaagaatatgaagcccagcaccgacagagtgccgcactggatcctgccgactggccagacgggtcctacccgactttcgacgggtccagtaattgtaacagccgcgagcaaagtgacgacgagaccgaggaatctgtgaaattcaaacggcttcacaaacttgtgaacagcacccggagggtgcggaaaaagctgatccgggtggaagaaatgaagaaaccctcaaccgaagggggggaggagcatgtgtttgagaattctcctgtgctcgatgagaggtcagcactgtattcaggggtgcataaaaaacctctttttttcgacgggtcccccgaaaagcctcctgaggatgacagcgatagcttgactacttcaccctcgtcttcttcactggatacctggggcgcgggtcgcaaactcgtcaagaccttctccaagggggagagccgaggcttaattaagccaccaaaaaagatgggaacctttttcagttatcctgaagaggagaaggcccagaaggtgtccagaagcttgaccgagggggaaatgaagaagggacttggcagcctcagtcacggacggacatgttccttcggggggtttgatctgacaaatcgatcattacatgtcgggtctaataactcagaccccatgggaaaggagggtgatttcgtctataaagaagtgattaagagtcccacggccagccgcatttcgctgggcaagaaggtgaaatcagttaaggaaaccatgcgcaaaaggatgagtaaaaagtactctagctcagtatctgagcaggattccggcctcgatggtatgccagggagccctcctccttctcagccagatcctgaacatctggataagccgaagcttaaggccgggggatccgtggagtccctcaggagcagcctttccggacaatcgagcatgtcgggacaaacagtctcaacaaccgattcaagcacaagcaatcgagagtcagtcaaatccgaggacggtgacgacgaagagccaccctatagaggacctttttgcggcagggcacgggtacacaccgatttcaccccctcaccatacgacacggatagcctgaagttgaagaaaggcgacatcatcgacattatcagtaaacccccaatgggaacatggatgggactattaaacaacaaagtgggaacatttaaatttatatacgtggatgttctgagcgaagatgaagaaaagcctaaacgtcccactaggcgcaggcgcaagggcaggcccccacagcccaaatctgtcgaagatctcctcgatagaattaacctcaaggaacatatgcctacttttctgttcaacggttatgaagacctggataccttcaagcttctggaggaggaggatctcgacgagctgaacattcgcgaccctgagcatagggctgtgttgttgacggccgtggaactcttgcaagagtacgacagtaactctgatcagtccgggtcccaggagaaacttctcgtcgactcacaaggcttgtcggggtgctctcccagggactcaggatgttatgaaagctcagaaaatttagagaatggcaagactagaaaggcttcgctcctgtccgctaagagctcaacagaaccttcacttaagtcttttagtaggaatcagcttggaaactaccccacacttcctctgatgaagtccggggacgcgctcaaacaagggcaggaagagggccggttgggaggggggctcgcccctgacacaagtaagagctgcgacccccctggggtaactgggctgaataaaaacaggagatcactcccggtgtctatttgccggtcttgtgagacactggagggtccacagactgtggatacctggcctcggagtcattcactggatgatttacaggtggaaccaggggccgaacaggacgtccctaccgaagtaactgaaccgccgccgcaaattgtgcccgaagtgccacagaaaaccacagcgagtagcactaaggctcagcccctggaacaggattctgcagtggacaacgccctcctgctgacacagtctaagcgattcagcgagcctcagaaactcaccacaaaaaagctggaaggctccatcgctgcctcggggcgtgggctgtctcctcctcagtgcctgcccaggaattatgatgctcagccaccaggtgccaagcacggactggcgcgtactccccttgaaggtcaccggaaagggcatgaatttgaggggactcaccacccactcggtaccaaggagggcgtggacgcggagcagagaatgcaacccaaaatcccttctcagccccctcctgtcccagcgaagaagtcccgcgaacgcctggccaatggcctgcaccccgtccccatgggaccttcgggcgccctcccatcaccagatgctccttgtttgcccgtcaaaaggggatctccagcctctcctacttcgcccagcgattgcccccccgcgcttgccccacgcccgttgtccggacaagcacccggctcaccaccatccacgagacctccaccttggctgtccgaattgcccgagaatacttcattgcaggagcatggcgtgaaactcgggcccgcactcacccggaaagtgagctgtgccagaggtgtcgacctggagacactgacagagaataaactgcatgctgagggtatcgatttaaccgaagaaccctattcggataagcacgggcgctgcggaatccccgaggccctggtgcagagatacgccgaggatctcgaccagccagaaagagatgtggccgctaacatggaccagatcagggtaaaacaactgcggaaacaacatagaatggccatcccaagcggagggcttaccgaaatctgtcggaaacctgtgagcccaggttgtatctcatcagtgtccgactggctcataagcattggtttgcctatgtatgccgggacattgtctacagcaggctttagtactctctcgcaggttccttcactgtcgcatacctgccttcaggaagcaggcatcactgaggaaagacatatccgcaagttgctatctgccgcgcgacttttcaagctgccgcctggtcctgaggcaatgtag

SEQ ID NO: 17279 - DNA, 255 bp, synthetic construct
  misc_feature 1..255: note = Description of Artificial Sequence: Synthetic coding sequence
  source 1..255: mol_type = other DNA
atggaagaacaagactgcagagatggatccctcggcaatatagacgacctcgcccaacagtacgctgattactataatacgtgcttttctgacgtctgtgagcgtatggaggagttgcgtaagcggcgagtctcccaggacttggaagtggagaagcctgacgctagtccaacctcactccagctgcggagccaaatcgaagagtcactgggtttttgctccgccgtgtcgacgcccgaagtggagcggaaatag

SEQ ID NO: 17280 - DNA, 249 bp, synthetic construct
  misc_feature 1..249: note = Description of Artificial Sequence: Synthetic coding sequence
  source 1..249: mol_type = other DNA
caggcacaggatttcaaggacgggagccttggaaacatcgatgacctggctcagcagtacgcggactactataacacctgtttttcagatgtatgcgagcgcatggaagaactcagaaagagaagggtctctcaggatctcgaggttgaaaagcctgacgctagtccaaccagccttcagctcagaagccaaattgaggaatcactggggttttgcagtgccgtgagtaccccagaagtcgagcgatag

SEQ ID NO: 17281 - DNA, 2091 bp, synthetic construct
  misc_feature 1..2091: note = Description of Artificial Sequence: Synthetic coding sequence
  source 1..2091: mol_type = other DNA
atgccgaagcctagtagagagcaatccgatgatgagacggaagagagcgtgaaattcaagcgattgcacaagctggttaacagtacccgccgggtcagaaaaaagcttattagagtggaggagatgaagaaaccctccacggagggcggtgaggaacacgtctttgaaaacagccccgtgctggatgagagatctgctttgtattctggcgtgcacaagaaacccctgtttttcgatggatcacctgaaaagccgccagaggatgattcagactctcttaccacatctcctagtagctcatctctggatacctggggggctggaaggaaacttgttaagacattcagcaagggcgagtccagaggcctgatcaagcccccgaagaagatgggaactttcttcagctaccctgaggaagagaaggctcagaaggtcagtcgcagcctcaccgagggggagatgaaaaagggattaggctctctctcacatggtaggacttgctcattcggcggctttgacctcactaatcggtcactccatgtagggtctaataacagtgatccaatgggaaaagagggcgactttgtatacaaggaagtgattaaaagccccacagccagtaggataagcttagggaagaaggtgaaatccgtgaaggagactatgaggaagcggatgtccaagaagtattcaagtagtgtgtccgagcaggacagtggcctggacggcatgcccggctcaccgcctccttcacagccagacccagagcacctggataagccgaaactcaaagctgggggttccgtcgaaagcctcaggagtagcttatctggccaaagtagcatgtcggggcagaccgtcagtaccacagattctagtactagcaacagggaatcagtgaaaagcgaagatggcgacgacgaagagcccccatatagggggccattttgtgggcgggcacgcgtgcacactgattttacgcctagcccatatgatactgactcactcaagctgaaaaagggagacataatcgacataatatctaaaccaccaatggggacctggatgggccttctgaataataaggtcggtacgttcaaattcatatacgtggatgtcctcagcgaggacgaggagaagccaaagcgacccaccaggaggaggaggaagggtagacctccgcaaccgaaatcggtcgaagacctgctcgaccgaatcaatctgaaggaacacatgcctacgttcttgtttaacggctatgaagatctggatacgttcaagcttctcgaggaggaagacctggatgagctgaacattagggatcctgaacacagggctgtgctgctcaccgccgtcgaactacttcaggagtatgatagtaattccgaccaatctggctcacaagaaaagcttcttgttgactcccaggggctgagcgggtgtagcccacgagacagcggctgctatgaatcttcagaaaatctggagaatgggaaaactagaaaagcctccctgctctctgccaagtcctccaccgagccgagcctaaaaagttttagccggaatcagctgggtaactatcctactttgcccctaatgaaatcgggggatgccttgaagcagggacaggaagaggggcggttgggcgggggcctcgctccagacacatctaagtcctgtgatccccccggtgttacagggctcaacaaaaaccggagatcgttgccagtctccatctgtcgctcctgcgagaccctggagggtccacaaaccgtggatacttggcccagatctcactcactggatgatcttcaagttgaacccggggccgagcaggacgtgcccacagaggtaaccgagccaccaccccagattgttcccgaagttccgcagaaaaccactgcctcctctaccaaggcccagcccctcgagcaggacagcgctgtggataacgccctactcctcactcagtccaagcgtttctccgagccccaaaaactaactactaaaaaactcgaggggtccattgccgcttcaggccgcggcttgtcccctccacagtgtctgcccaggaattacgatgcacagtag

SEQ ID NO: 17282 - DNA, 1974 bp, synthetic construct
  misc_feature 1..1974: note = Description of Artificial Sequence: Synthetic coding sequence
  source 1..1974: mol_type = other DNA
atgggcacctggatgggactgctgaacaacaaagttggcacattcaaatttatttatgttgatgtgctttccgaagatgaggaaaaaccgaagagaccgaccaggcgtagaaggaaggggcgacccccacagcctaagtccgtggaggatcttctggacaggatcaatctcaaagagcatatgcccacattcttgttcaatgggtacgaggacctcgacacatttaaactccttgaagaggaggatctggacgaattgaacattcgggatccggagcaccgagctgtcctgctgactgccgtagagctgctgcaggagtatgattcaaacagcgatcagagcggtagccaagagaaacttttagtggacagccagggactctcgggatgctcccccagagatagcggctgctatgagtcctccgaaaaccttgagaatggcaagactaggaaagctagtctgctgtcagctaaatcaagtaccgagccatcactgaaatctttcagtagaaatcaactcggaaattaccccaccctgcccctgatgaagtccggggatgcacttaaacagggacaggaggaggggcggctgggaggtggcctagcccccgacactagcaagagttgtgatcctcccggcgtgacggggctcaataagaatcgccgctcactgcccgtaagtatatgtcgatcgtgcgaaacgctcgagggcccccaaacagtggatacttggccccgctcacattccctcgatgacctgcaggtggagcccggtgcagagcaggacgtgcccactgaggtcaccgagccccctccacagatcgtaccagaggtccctcagaagaccacagcgagcagcaccaaggcgcaaccactggagcaagactcagccgtggacaatgccctacttctgacccagtccaaacggttttcagagccccagaagttaacgacaaaaaagctggaggggtccatcgctgcctcaggaagaggtctaagccctccacagtgcctccctaggaattacgatgcacagccaccaggggccaagcacgggctggctaggacccccctggaaggtcacaggaagggtcacgagtttgaaggtacacatcatccgctgggaacaaaagagggagttgacgctgagcagcgaatgcagccaaaaatcccatcacagccgcctccagtcccggcaaaaaagtctagagaacgcctggccaatgggctgcatccagtgccaatgggacccagcggagcactccctagtccagatgctccatgccttccggtaaagcgcggcagccccgcttcaccaaccagccccagcgattgtcctcccgctctggcccctagaccattatctgggcaggccccgggatctccccccagcacacggccccccccctggctgtcagagttgcccgagaacaccagcttgcaggaacacggtgtgaaactgggacccgccttgaccagaaaggtatcctgcgctagaggagtcgatttagagaccctgacagagaataaactgcacgccgaaggcattgatctgaccgaggagccctatagtgacaagcatggaagatgcgggatcccagaggcattagtgcagcgttatgccgaggatctggaccaaccagagcgagacgtggccgctaatatggatcaaattagagtgaaacagttgaggaaacagcacaggatggcgatcccttctggaggactgacagagatctgtcgcaaacctgtttctccaggctgtatctcatctgtcagtgactggttgatctcaataggactgccaatgtacgccggaaccttatcaaccgcagggtttagcacattgagccaggtgcctagcttaagccacacctgcctccaggaggctggcattacagaggagcggcacatacgtaagcttctttcagctgccagactcttcaagcttccacccggtcctgaagcaatgtag

SEQ ID NO: 17283 - DNA, 621 bp, synthetic construct
  misc_feature 1..621: note = Description of Artificial Sequence: Synthetic coding sequence
  source 1..621: mol_type = other DNA
atgctgccccctgctatccacttctaccttctgccactcgcctgtattttgatgaaatcgtgtctggcattcaagaacgatgcaactgaaatactgtacagccatgtcgttaagccagttccggctcacccttcttccaacagcacccttaatcaagcgagaaatgggggtcgacacttttcaaataccgggctggaccggaacacccgagtacaggtaggatgtagagagctccggagcacaaaatacattagcgatggacagtgcacgtcaattagccccctcaaggaactggtgtgcgcaggggagtgcctgcctcttccggttctgccaaactggataggcggtggttatggtaccaagtactggagcaggaggagttcacaggagtggcgatgcgtgaatgacaagacacgcacacagcgcatccagctgcaatgtcaagacggaagcacccgaacttataagatcactgtagtcaccgcgtgtaagtgcaagcgctatacccggcagcacaatgagtcgtcacacaattttgaatctatgagtccggccaaacctgtacagcatcacagggaaagaaagcgggcatcaaaatcctccaaacacagcatgtcatag

SEQ ID NO: 17284 - DNA, 693 bp, synthetic construct
  misc_feature 1..693: note = Description of Artificial Sequence: Synthetic coding sequence
  source 1..693: mol_type = other DNA
atgctgccacccgcgattcacttctacctgctgcccttggcctgtattctcatgaaatcatgcttagctttcaagaacgacgcaaccgaaatcctctattcccacgtcgtgaagcccgtgcccgcacatccctctagtaattcaacactgaaccaggccaggaacggcgggcgccacttctccaatactggactcgatcgcaataggactgagtccctgaccaggcagaactatttttggctgtttcccggtgcctttttgagacagctacaggaagctagggtccaggttggctgtcgggaactgagatctactaaatatatctcagatgggcaatgtacctcaatttctcccttgaaggaactcgtttgtgctggagagtgcttgccccttcctgtgctgccaaattggattgggggaggttacggaactaaatattggagcagaagatcaagccaggagtggagatgcgtgaatgataagacaagaacccagaggattcagttgcagtgccaggatggtagcacacggacttataaaattacagtcgttactgcctgcaaatgcaaaaggtacactaggcagcacaacgagtctagtcacaatttcgagtctatgtctcctgctaagcctgtccagcaccatagggagcggaagcgcgctagcaagagtagtaagcactcaatgtcttag

SEQ ID NO: 17285 - DNA, 2229 bp, synthetic construct
  misc_feature 1..2229: note = Description of Artificial Sequence: Synthetic coding sequence
  source 1..2229: mol_type = other DNA
atgggatctgagaacagtgctctgaaaagctatacactcagagaacctccttttactctgccttcagggctggctgtgtaccctgccgtgttgcaagacggaaagttcgcgtcagtgttcgtctacaagcgtgaaaacgaggataaggtcaataaggccgcaaagcatctgaagactctgagacacccttgccttctaagattcctgtcttgcacagtggaggctgacggaattcatctggtcaccgagcgagtgcagccactggaagtagcactagagaccctatccagcgccgaggtttgcgctggaatctatgacatcttgttggccctgatcttcctccacgaccgcggacatcttactcataacaatgtctgtctgtccagtgtattcgtttctgaagacggtcattggaaattgggcggaatggagacggtgtgcaaagtgtcacaagccactccagaattcctgcgatctattcaaagtatccgcgacccagcctcaattcccccagaggaaatgagtcccgagttcactactcttccggaatgccacgggcacgctagagacgcattcagcttcggaacccttgtcgagtcactccttactattttaaatgagcaggtttcggctgacgtgctcagttcattccagcagacgctccattccacgttgctgaatccgattcccaaatgccgccctgcactgtgcactttgctcagccacgacttcttcagaaacgactttctggaggtcgttaactttctaaagagcctcaccctcaagtctgaggaggaaaaaaccgagttcttcaagttcctgctagatcgtgtgtcctgcctgagcgaggagttgatcgcttccagactcgtcccactgctgctgaatcagctcgtgttcgccgaaccggttgcagtgaaaagcttccttccctacttacttggaccaaagaaagatcatgcacaaggggaaacaccctgtctgttgtcaccagccttgtttcagtcccgggtgataccagtcctcttacagttgtttgaggtgcacgaggaacacgtgagaatggtgctactgtcacatattgaagcctacgtggagcactttactcaggaacagctcaagaaggtgatccttcctcaggtgttgctgggtttgagagatacatccgacagcatagtagcaatcacccttcacagtttggccgtgttagtgtcacttctcggtcccgaagtggttgtaggcggagagcgcacgaagatcttcaaaaggaccgctccaagtttcacgaagaacacggatcttagcctggaagatagcccgatgtgcgtggtctgttcacatcattcacagattagccccatcctagaaaaccctttctccagcatctttccaaagtgctttttcagcggctccaccccgatcaatagcaagaagcacatccagagggattattacaacacgctgctacagaccggtgaccccttctcacagccgatcaaatttccaataaatgggctcagtgacgtcaagaacacttccgaggatagtgaaaatttcccttctagttccaaaaaaagtgaagaatggcccgattggtcggagccagaggaaccagagaatcagacagtgaatattcaaatttggcctcgtgaaccgtgtgacgatgtgaagtctcagtgcaccaccctggacgtagaggagagctcctgggatgactgcgaaccgtcgtcactggataccaaggttaatcccggggggggcatcacagccacaaaacccgtaactagcggcgagcaaaagcctattcccgcattgctcagcttgaccgaggaatctatgccctggaagtcctcgttgccacagaagatttccctggtgcagaggggagatgacgccgaccaaatcgagccccctaaggtctcatcccaggagagaccgctgaaagtaccatccgaattggggttaggcgaagaattcaccatacaggtgaaaaagaagccagttaaggatcccgagatggactggtttgccgatatgatccctgaaattaaaccctctgctgcctttctcattctgcctgagctccgaacagaaatggttcctaagaaagacgacgtgtcccctgtgatgcagttctcctccaagttcgcggcggcagaaatcactgagggtgaagctgaagggtgggaggaagaaggagagttgaactgggaggataacaactggtag

SEQ ID NO: 17286 - DNA, 2067 bp, synthetic construct
  misc_feature 1..2067: note = Description of Artificial Sequence: Synthetic coding sequence
  source 1..2067: mol_type = other DNA
atgggatccgaaaactctgctctcaaatcatataccctgcgggaacccccttttacacttcctagcggcttagcagtgtacccagctgtccttcaggacggcaagtttgcttctgtgtttgtttacaaaagggaaaatgaagataaggtgaacaaagcagccaagcacctcaaaacgttgaggcatccctgtttactgaggttcctttcctgcacagtggaggctgatggaatccaccttgtgacagagagagtgcagcctcttgaggttgcactggagaccctctcatccgctgaggtatgtgcaggcatctacgatatacttctggctctgatctttctacacgacagagggcacttgacgcataacaatgtctgcctatcgtccgtctttgtatccgaggatggacattggaaattgggcggcatggaaacagtgtgcaaggtcagccaggctacacctgaatttctgagatctattcagtctatccgggacccggctagcatccctcccgaggaaatgtcacccgagtttaccactttgccagagtgtcatgggcacgctcgggatgctttttcatttggcaccctggtggagagccttctcacaattctcaacgagcaggttagtgccgatgtgctcagctcttttcaacaaactctccatagtaccttacttaacccaattccaaaatgtcggccagcactctgtaccctgctatcacatgacttcttccggaatgactttctcgaggtggtaaatttcctgaagtcacttaccttaaaaagcgaggaagagaagaccgaattctttaagtttcttctagaccgcgtaagttgcctttccgaggagctgatcgcttctagactggtgccactcctactgaaccagctagtgtttgccgaaccagtagccgtgaaaagttttctgccttacctgcttggtcctaaaaaagatcatgcccagggagagactccctgcctgctctccccagctctctttcagtcccgtgtgattcctgttcttctccagcttttcgaggttcatgaagagcatgtgcgcatggtcctcttgtcgcatatagaagcgtacgttgagcacttcacccaagagcagctcaaaaaggtgatcctgcctcaggtcttgttggggttgcgggacacatccgatagcattgttgcaataaccctgcacagcctcgcagtcctcgtcagcttacttgggccagaggtcgtggttgggggagagcgcaccaaaatctttaaacgcacagcgccttcgtttacaaagaacactgatttatccctggagggcgaccccttctcacagcccatcaagttccctattaatgggctctctgacgtgaaaaacacctccgaggattccgagaacttcccgtcaagcagcaagaagagtgaagagtggccagactggtccgagcccgaggaacctgagaatcaaaccgtaaacatccagatctggccacgcgagccctgtgacgatgtgaagagtcagtgcacaacactggacgtggaggaatcaagctgggacgattgtgagccaagctcactcgacacaaaggtgaatccgggcggaggcattaccgctacaaaacccgttaccagcggagaacaaaaaccgatccccgcgttattatcactcacagaggaatccatgccttggaaaagtagtctcccacagaagatctcgttggtccagaggggagatgacgctgaccagattgagccaccgaaggttagtagtcaggaacgtcccctcaaggtaccgagcgaactgggattgggagaagaatttacaatccaggtgaaaaaaaaacctgtgaaggatcctgagatggattggttcgccgatatgattcctgagatcaaaccatccgcagctttcctcatcctaccggagctcagaacagagatggttcccaaaaaggacgacgtctctcctgttatgcaattctccagcaaatttgcagccgccgaaatcaccgagggcgaggcagaggggtgggaggaggagggagaactcaattgggaagataacaactggtag

SEQ ID NO: 17287 - DNA, 2229 bp, synthetic construct
  misc_feature 1..2229: note = Description of Artificial Sequence: Synthetic coding sequence
  source 1..2229: mol_type = other DNA
atggggtctgagaactccgcccttaaaagctatacactgcgagagccaccattcaccctgccctcgggcctggctgtttacccggctgttcttcaggatggaaagtttgcgagtgtcttcgtgtataaacgggagaatgaagacaaggttaataaagccgccaagcacttaaagaccttgagacacccttgtctgctgcggtttctcagctgcacagttgaagccgacggtatccatctggttacagaaagggtgcagcccttggaggttgccttggagaccctgtcctctgccgaggtctgtgcgggtatctacgacatactacttgctctcatctttttgcacgaccgtggtcacctcactcacaataacgtgtgtctgtccagtgttttcgtgagcgaagacggccactggaagctgggcggaatggagacagtgtgtaaggtctctcaagccacaccagaattcctacgctccattcagagtattagagatcccgctagtatccctcccgaggaaatgagccccgagtttacaacactaccagagtgccacggacatgcaagggatgcgttcagtttcggcaccctggtggaaagtctgttaaccatcttaaacgaacaggtgtctgctgatgtgttgtcttcgtttcagcagactctccactcgacacttttaaaccctatccctaaatgtaggcctgctctatgcacactcttgtcacacgatttcttcagaaatgattttctggaagtggtgaatttcctgaaatctctaaccttgaagtccgaggaggagaagaccgaattcttcaagtttctgctcgatcgggtgtcctgcctgtcggaggaactgatcgcatcaaggcttgtaccacttcttctcaatcaattggtgttcgctgagccagtggcagttaagtctttcctcccttacctgctgggacctaaaaaagatcacgctcagggagagactccttgcctcctttccccggcgcttttccagtcgcgagtgattcccgtgctcctgcagctttttgaagtccatgaagaacacgttaggatggtgttattgtcacacatagaggcatatgtggaacacttcacacaggagcaactaaagaaagtgattctgccccaagtattactggggctgagagacacatccgatagtatcgttgccatcaccctgcattccctcgcagttctcgtcagtcttctgggcccagaggtggtagtcggtggggaaagaactaaaatctttaaacgcactgctcctagtttcacgaagaatacagatctgagcttggaagactcacctatgtgcgtggtatgcagtcaccacagccagatcagtcccatccttgaaaatccctttagcagtatatttcctaagtgtttcttttcaggcagcacacccatcaactcaaaaaagcatatacagagggactactacaataccctgctgcaaacaggggaccccttttcgcagcctattaaattcccaatcaatggcctgagcgatgtgaaaaatacatcagaggactcagagaatttcccaagctccagtaagaaatctgaggagtggcctgattggtccgaaccagaagagcctgagaatcagacggtaaacatccaaatttggccacgcgaaccatgcgacgacgtgaagagtcaatgcactactctggacgtggaggaatcaagctgggacgattgtgagcccagctctttggacaccaaggtaaacccgggcggaggcataaccgcaacgaagccagtgacctctggagaacagaagcccatccctgcgctgctgtcgctgaccgaggagtccatgccatggaaatcttcgctaccccagaaaataagcctcgtacaaaggggagatgacgccgatcagatcgaaccccccaaagtcagttcccaggagagaccccttaaggtgccatctgagttgggcctcggggaggagttcacgatacaagtaaagaaaaaacctgtcaaggaccccgaaatggattggttcgcggatatgattccagaaatcaaaccgagcgcagccttcctgatcctgccggagctccgcactgaaatggtgcccaagaaggacgacgtctccccagtgatgcagttttcaagtaaatttgcggccgctgaaattactgaaggagaggcggaagggtgggaggaggaaggcgaactgaactgggaggacaacaactggtag

SEQ ID NO: 17288 - DNA, 1767 bp, synthetic construct
  misc_feature 1..1767: note = Description of Artificial Sequence: Synthetic coding sequence
  source 1..1767: mol_type = other DNA
atgggctctgaaaacagtgctttgaagtcatacacactccgtgaaccccctttcactttgccttcgggcttggcggtttaccctgcagttctgcaggatgggaagttcgcatccgtgtttgtgtacaaaagggaaaatgaggataaggtgaacaaggcggcaaagcacttgaagacactgcgtcatccctgtctgttgcgtttcctgtcttgcacggtggaggcggatgggatccatctcgtaaccgagcgtgtgcaacctctcgaggtcgccctcgaaactcttagctccgccgaggtgtgcgccggaatatacgatattctgttagctctgatatttctgcacgacagaggccatctcacacacaataacgtttgcttgtcctctgtgttcgttagcgaagatggccattggaagcttgggggaatggagactgtttgtaaggttagccaagccacccctgaattcctgcgctccattcagtccatccgggaccccgcttctatcccgcctgaggagatgtcccccgagtttacgactctgcctgagtgtcatggtcacgcacgggatgcttttagctttggtacgctagtcgagagcctgcttacaattctcaacgagcaggtgtctgccgatgtactgtcctcatttcagcagacactccacagtacacttttgaatccgatcccaaaatgtcggcccgccctctgtacactgctatcacacgatttcttcagaaatgatttcttggaagtagtcaacttcctgaagtccttaaccctgaagagcgaggaggaaaagacagaattctttaagtttctcctcgatagggtgagttgcctctctgaggaactcatcgcgtctaggcttgtgcccttgctgctgaaccagctagtcttcgccgagcccgtagccgtgaaatcttttctgccgtacctgctgggcccaaaaaaggaccatgctcagggcgaaacaccctgtttactcagccctgcactatttcagtctcgcgtgatcccagtgctactacagctgttcgaagtccacgaggagcatgttcgaatggtgctcctgagtcatattgaggcttatgtggaacacttcacccaagaacaactgaagaaggtcattctgcctcaggtattgctggggctcagagacacgtccgacagtattgtagctataactctccactcactggccgtcctggtgtccctgctgggccccgaggttgtggtgggcggagaacgaaccaaaattttcaaaaggaccgcgccaagcttcacaaagaacaccgatttgtcattagagggagacccattttctcagccaattaaatttcccataaatggcctgagcgacgttaaaaacacaagtgaggacagtgagaacttcccctctagctccaagaaatccgaagagtggcccgattggagtgaacctgaggaacctgaaaaccagacagtgaacattcagatttggcccagagaaccgtgcgacgacgtcaagtctcagtgcaccaccctggatgtcgaggagtcctcctgggatgactgcgagccatctagcctcgacaccaaagtgaatccagggggaggcattacggccacaaagcccgtgaccagtggtgagcagaagcccatacccgcactgttgagcctgacagaagagagcatgccatggaaaagttccttaccacagaaaatctcactggtgcagcggggcgatgatgctgatcagatcgaaccccccaaagtgtcaagctag

SEQ ID NO: 17289 - DNA, 1008 bp, synthetic construct
  misc_feature 1..1008: note = Description of Artificial Sequence: Synthetic coding sequence
  source 1..1008: mol_type = other DNA
atgaagttaccagcccgggtgtttttcactttaggtagcagactcccgtgcggccttgctccacgaaggttcttctcatatggaacgaagatcctatatcagaataccgaggccctgcaatccaagtttttttccccccttcagaaggcaatgcttccaccgaactcatttcaaggaaaggtggcgttcataactggcggcggtacagggctgggaaagggcatgaccactctgctatcgagcctgggcgctcagtgcgtcatagccagtcgtaagatggatgtcctaaaggccaccgctgagcaaatctcgtcgcagaccggcaacaaggtacatgccattcagtgcgatgttagggatcctgacatggttcagaacacagtttccgagcttatcaaggttgctggacacccgaacatcgttattaacaatgcagccgggaatttcattagcccaaccgagcggctctctccaaacgcttggaaaacaatcacggacatagtgctgaacggaaccgccttcgtgactttagaaatcggaaagcagcttattaaggctcaaaagggcgcggccttcctttcaataacaaccatatacgcggagacaggatccggcttcgtggtgccttccgcttcagccaaggctggagtggaggccatgtcaaaaagtctcgccgccgaatgggggaaatatggcatgcgctttaacgtaatacagcccggtcctattaagacaaaaggcgcattttcccgcctggaccccacaggcacctttgaaaaggagatgatcgggagaatcccctgtggtagactgggcaccgtggaagagctagcaaatttggccgctttcctctgctccgactatgcttcctggattaacggagctgtgatcaaatttgatgggggtgaggaggtcctgatcagtggcgaattcaatgaccttagaaaagttaccaaagaacagtgggacactattgaggagctgatacgaaagacaaaagggtcctag

SEQ ID NO: 17290 - DNA, 945 bp, synthetic construct
  misc_feature 1..945: note = Description of Artificial Sequence: Synthetic coding sequence
  source 1..945: mol_type = other DNA
atgggtattggccgctcagagggcggacgccgtggcgctgcgctgggagtgctgttggccttaggcgcggctttactggccgtgggctccgcgagcgaatacgattatgtgtcgttccaatccgatatcggtccataccagtccggtcgattttacacgaagcctccacagtgtgtagacatccccgcagatctccggctgtgccataatgtcgggtacaaaaaaatggtgcttccgaatcttctggagcatgagacgatggccgaagtcaagcagcaggcctcctcctgggtcccattgttaaataaaaactgtcacgcaggcacacaggttttcctgtgctcattgtttgctccggtttgtcttgaccggccgatatatccatgtagatggttatgcgaagccgttcgcgactcctgtgagcccgtcatgcagttcttcggcttctattggccggaaatgctgaagtgcgacaaattccccgagggcgacgtctgtatcgcaatgacgcctcctaatgcaaccgaggccagtaagccccagggtacaaccgtctgccctccctgcgacaatgaactgaagtccgaagcgattatcgaacacctttgtgcaagcgagttcgctctgcggatgaagattaaagaggtcaaaaaggaaaacggcgataagaagattgtgcccaagaagaaaaaacctctcaaactcggaccaataaagaagaaggacctaaagaaactcgtgctgtacctgaagaatggagctgattgcccttgccatcagctggacaacttgtcccatcatttcctaattatggggcggaaggtgaagtcccagtacttattgaccgcaatccacaagtgggataagaagaacaaagaattcaagaacttcatgaaaaaaatgaaaaatcatgagtgtcccacatttcaatccgtgttcaagtag

SEQ ID NO: 17291 - DNA, 1041 bp, synthetic construct
  misc_feature 1..1041: note = Description of Artificial Sequence: Synthetic coding sequence
  source 1..1041: mol_type = other DNA
atgtttctctccattctggttgccctgtgtttatggctacatctcgccctgggggtgcgcggcgcaccctgcgaagccgtgagaatccccatgtgtcgccacatgccttggaacataaccagaatgccaaatcacctccaccactctacccaggagaacgctatccttgcaattgagcagtatgaagagcttgtggacgtaaactgttctgcagttctcagattcttcctttgtgccatgtacgccccgatttgtaccctagagtttctgcacgatccaattaagccatgcaaatcggtatgccaaagggccagggatgattgtgagccgctgatgaagatgtacaaccacagctggccggagtcactggcctgtgatgaacttcctgtctacgaccgaggcgtctgtatcagtcccgaagcaatcgtgacagatctccctgaggatgtcaaatggattgatatcacacctgatatgatggtgcaggagagaccactcgacgttgattgcaaaagactgagccctgacaggtgtaaatgcaaaaaggtaaaaccaaccctggctacttacctgagtaaaaactactcctacgtgatacatgcaaagattaaagctgtgcagcgctctggatgcaacgaagtgaccacagtggttgacgtaaaagagatctttaaaagctcctctccaattcctaggacacaagtgccattgattacaaacagtagctgccaatgcccacatatcctgccacaccaggatgtcctcattatgtgttacgaatggagatcgagaatgatgttgctcgagaactgtcttgtcgagaagtggcgtgaccagctctccaaaagaagcattcagtgggaggagcggctacaggagcaacgtaggacagttcaagataaaaaaaaaaccgccggtcggacctcgcgatccaacccaccgaagcccaaaggcaaacctccagcacccaaaccagcaagtcctaagaaaaacattaagaccagaagcgcccagaaacggaccaaccccaaacgggtgtag

SEQ ID NO: 17292 - DNA, 1032 bp, synthetic construct
  misc_feature 1..1032: note = Description of Artificial Sequence: Synthetic coding sequence
  source 1..1032: mol_type = other DNA
atgcgcgtggcaggccgggaaggccggttcctgtccgcaggagttgctgcgagggaaggtagcgccatgttcctgtccatacttgtcgcactctgtctctggctgcacctggccctcggggtcagaggcgcaccttgtgaagctgtgcggatcccgatgtgccggcacatgccttggaatataacaaggatgccaaatcatcttcaccattcgacgcaggaaaacgctatgtatgcccccatctgtactctggagtttcttcacgaccctatcaagccttgtaaaagtgtctgccagcgagcccgtgatgattgtgaacctttaatgaaaatgtataaccatagttggccggaatccctggcctgcgacgagttgccggtctatgatcgcggagtatgcattagtcccgaagccattgtgaccgacctgccagaagacgttaaatggatcgacatcacccctgatatgatggtacaggagaggcctctcgatgtggactgcaaaagactaagtcctgacagatgcaagtgcaaaaaggtgaaaccaaccctcgcgacatatttgagtaaaaactacagttatgtcatccacgcaaaaatcaaagcagtccaacgttcgggctgcaacgaagtgactacagtggtagacgtgaaagaaatcttcaagtcaagtagtcccatccctcggacacaggtgccgctgattaccaattctagctgccagtgccctcatatcctaccccatcaggacgtcctgatcatgtgctatgagtggaggtctcgcatgatgctcctggaaaattgtcttgtagagaaatggagggaccagttatccaagcggagcatccaatgggaggaacggctgcaagagcaacgtagaaccgtgcaggataagaagaaaaccgccggaaggacttctagaagcaaccctccaaaaccgaaagggaagccgcccgctccaaagcctgccagtcctaagaagaacataaagactagaagcgcgcaaaagcggactaatcccaaaagagtgtag

SEQ ID NO: 17293 - DNA, 954 bp, synthetic construct
  misc_feature 1..954: note = Description of Artificial Sequence: Synthetic coding sequence
  source 1..954: mol_type = other DNA
atgagagccgccgccgcgggaggtggcgttcgaaccgctgccctagcactgttactgggtgctcttcactgggcacctgctcgttgcgaggagtacgactactatggctggcaggcggagcctctgcacggacgtagttattctaagcctccccagtgtctggatatcccagctgacctgccactgtgtcatacagttggctacaagcggatgcggctaccgaatctcctggagcatgaatccttagcagaggtgaaacaacaagcatccagctggcttcctctcttggctaagcgttgccacagtgatacccaggtttttctctgctcactctttgcccccgtctgcctggatcgccctatctacccatgccgcagtctgtgcgaggccgtccgggccgggtgcgcccccctgatggaggcatacgggtttccttggccagaaatgctgcactgccacaaatttcccctggataatgatctatgtatcgccgtgcaatttggccatctgccagccaccgctccgcctgtgacaaagatctgcgcccaatgcgaaatggaacacagcgctgacggactcatggagcagatgtgttccagcgatttcgtagtcaagatgcgaatcaaggagattaaaatcgagaatggagaccgcaaactcataggggcccagaagaaaaagaaactcttgaaacccggtccccttaaaaggaaagataccaagcgactggtgttacatatgaagaatggcgctggctgcccgtgtccccaactggatagtctggccgggtcattcctggtgatgggtaggaaggtcgatggacagctgctgctcatggccgtctatagatgggacaaaaagaataaggagatgaaatttgcagtgaagtttatgttcagctacccatgttccctctattacccttttttctacggggcggcggaacctcactag

SEQ ID NO: 17294 - DNA, 903 bp, synthetic construct
  misc_feature 1..903: note = Description of Artificial Sequence: Synthetic coding sequence
  source 1..903: mol_type = other DNA
atgcggatcgccgtcatctgtttctgcctcctgggcataacctgcgcaattcccgtgaaacaagcagactccggtagtagcgaggagaagcaactatacaataagtatcctgatgcagtagcgacatggctcaaccctgatccctcccagaagcagaatctactcgcacctcagaccttaccctccaaaagtaatgaatcccacgaccatatggatgacatggacgatgaggatgacgatgaccacgtagacagccaagacagcatcgattcaaacgactctgacgacgtagatgatacagatgattcccatcaatccgatgagagccaccactcagatgaaagtgatgagctggtgaccgacttccctaccgatctccccgcaacggaagtcttcactccggtggttcccactgttgacacttatgacggtcgcggagattcagttgtgtacggcctgagatccaagagtaagaagtttcgaaggcccgatattcagtacccagatgcgacagatgaagacatcacttcccatatggagagtgaggagctgaatggcgcttacaaggccatccctgtggcacaggacctgaatgcaccgtctgactgggattcccggggaaaagacagctacgagacctcgcagctcgacgaccagagcgctgagacccattctcacaagcaatctcgcctctacaagagaaaagcaaatgacgaaagcaacgaacattccgatgtgattgattcacaagaactaagtaaagtttccagagagttccattcgcatgagtttcatagtcatgaagatatgctggtcgtcgatccaaagtcaaaggaagaggataagcacctcaagttcagaatctcacacgagctcgattctgcatccagtgaagtcaattag

SEQ ID NO: 17295 - DNA, 879 bp, synthetic construct
  misc_feature 1..879: note = Description of Artificial Sequence: Synthetic coding sequence
  source 1..879: mol_type = other DNA
atgcggattgctgttatttgcttttgcttgttaggtataacgtgtgccattcctgtgaaacaggcggattctggttcctccgaggaaaagcagctctacaataagtacccagatgcagtcgccacctggcttaaccctgacccatcacagaaacagaacctgttggctcctcaaaatgccgtatcatcagaggagaccaatgattttaaacaggaaacacttccctccaaatctaacgagtcccatgaccacatggatgacatggacgacgaggatgatgacgaccaccagagtgacgaatcccaccatagcgacgagtccgatgagctcgtgacagactttcctaccgacctccctgctaccgaggtctttactcctgtggtaccgactgtcgatacatacgacggaagaggagatagcgttgtatatgggctcagatctaagagcaaaaaatttcgtcgtcccgatatccagtaccctgacgcgacagacgaggacatcaccagccacatggagagtgaagagctgaatggtgcctacaaggcgatccccgtggctcaggatttaaacgccccctctgattgggattctcgagggaaggacagctatgaaacatctcagttagatgaccaatcggcagagactcattcccataagcaaagcagactttacaaacgaaaggccaacgacgagtcaaatgaacactctgatgtcatcgatagtcaggaactcagtaaggtcagtcgcgagtttcacagccacgaattccacagtcacgaggatatgctcgttgttgacccaaaaagtaaagaagaagataaacacttgaagttcagaatttcccacgagctcgactccgccagctcagaggtgaactag

SEQ ID NO: 17296 - DNA, 864 bp, synthetic construct
  misc_feature 1..864: note = Description of Artificial Sequence: Synthetic coding sequence
  source 1..864: mol_type = other DNA
atgcgcatcgctgtgatttgcttctgccttctgggcatcacctgtgccattccggtcaaacaggctgacagcgggagtagtgaggagaaacaaaatgccgtttctagcgaagaaacaaacgatttcaagcaggagacactgcctagcaagtcaaacgagagccacgatcatatggatgacatggatgacgaggatgacgacgaccatgtggatagtcaagattcaatcgactcaaacgactctgatgacgtggatgatactgatgattcacaccaaagtgatgagagtcaccattccgatgaatccgatgaattagttactgattttccaactgatttgccggcaacagaggtttttacccccgtagttcctacggtcgatacatacgatggaaggggcgattccgtggtgtacgggttgaggtccaagagcaaaaagtttagacggcctgacattcagtaccccgatgcaaccgatgaggacatcacctcacacatggaatccgaggaactgaatggcgcctataaagcaatccccgtcgcacaggatctgaatgcaccatcagattgggacagcagggggaaggatagctatgagacttcccagcttgacgatcagagcgccgagactcatagtcataaacagtctcgtctgtacaagagaaaggctaacgatgaatctaatgagcattccgacgtaatcgacagtcaggaactcagcaaagtatctcgtgaatttcatagtcatgaatttcatagccacgaggatatgttagttgtggaccctaaaagtaaggaggaagacaagcacttaaagttccggatatctcacgagcttgactcagcctcctccgaggtgaactag

SEQ ID NO: 17297 - DNA, 945 bp, synthetic construct
  misc_feature 1..945: note = Description of Artificial Sequence: Synthetic coding sequence
  source 1..945: mol_type = other DNA
atgcgcatcgccgtgatttgtttctgtctgctgggcattacctgcgccatcccggtcaagcaggctgactcgggttcaagcgaggagaaacagctgtataacaaatatcctgacgctgtggccacatggttaaatcctgatccgtcgcaaaagcagaatctgctcgccccacaaaacgccgtgagcagcgaggagacaaatgattttaagcaggaaactttgccttcaaaaagtaacgagtctcacgatcatatggacgatatggacgatgaggatgacgacgatcacgtggattcgcaggactcgatcgatagcaacgactctgacgatgtagatgataccgacgacagccatcaatccgacgagagccaccactccgacgagagtgatgaactggtgaccgactttcccaccgatctgcccgcgaccgaagttttcacacccgtggtgccaacagtcgacacttatgacggacgcggcgactcagttgtgtacggcctgcggtcaaagagcaaaaaattcagacgaccggacatccagtatcctgatgctaccgacgaggacataacatcacatatggagtctgaggaactcaacggcgcatataaggcaatccctgtcgcccaagacctcaacgctccttccgattgggactctaggggaaaggatagttacgaaaccagtcagttggatgatcagagcgccgagacccacagtcataagcagtctcgcctgtacaagagaaaagctaatgatgagtcaaacgagcacagcgacgtgatcgattcccaggaactgtcaaaagtgagccgggagttccactctcatgagttccacagtcacgaagacatgctcgtggtcgatcccaagagtaaagaagaggacaaacacctgaagtttagaatttcacatgagttagactcggctagtagcgaggtgaactag

SEQ ID NO: 17298 - DNA, 822 bp, synthetic construct
  misc_feature 1..822: note = Description of Artificial Sequence: Synthetic coding sequence
  source 1..822: mol_type = other DNA
atgaggatcgcggttatctgtttttgcctgttggggattacctgcgccatccctgtgaagcaggctgattccggctcgagcgaggaaaagcagaccctgcccagtaagagcaacgagtcccacgaccatatggatgacatggacgatgaggacgatgacgaccatgttgattcgcaggacagcatagactcaaacgatagcgacgatgtcgacgacaccgacgactcacatcaatcggatgagtcccatcactcagacgaatcagacgagctggtgacagacttccccacagacctgccagcgacggaggtcttcactcccgtggtccccacagttgatacctacgatggacgcggcgactcagttgtgtatgggctgcgcagtaaatcaaaaaaattcagaaggcctgacatccagtacccagacgctactgatgaggatatcacatcccacatggaaagcgaggagctgaacggagcctataaggccattccggttgcccaggacctcaatgccccaagtgattgggattccaggggcaaggactcttacgagaccagtcagctcgatgaccaatccgccgaaacccacagccacaagcaaagtcggttatataaaaggaaggccaatgacgagagcaacgaacacagcgacgtgatcgactcacaggaactgagtaaagtgtcaagggagtttcatagccatgagttccatagtcacgaagatatgctggttgtagacccaaagtctaaagaggaagataagcaccttaaattcaggatctcccatgagctagactcagcctctagtgaggtaaattag

SEQ ID NO: 17299 - DNA, 2370 bp, synthetic construct
  misc_feature 1..2370: note = Description of Artificial Sequence: Synthetic coding sequence
  source 1..2370: mol_type = other DNA
atgcggacctatcattatatcccgttgttcatttggacatatatgttccatacagtagatacaatcctgctgcaggagaagcccaacagctacctttcctccaaaaaaatcgcaggcctgactaaagacgacggaaaaatgctgcggagaaccaagagaggttggatgtggaatcagttttttctactcgaggaatataccggcactgacacccagtacgttggtaaactccacaccgatcaagacaagggagacggtaacctcaaatatatcctgaccggcgatggcgccggatcactattcgttatcgacgaaaatacgggagatatccacgccgccaagaaactggatagggaagagaaatccctctatattctgcgtgccaaagcaatcgacaggaagaccggaagacaggttgagccagaaagtgagtttattatcaagatacatgatattaacgacaacgagcccaagtttacaaaggatttgtataccgcatcagtacccgaaatgagtggcgtgggaacttctgtgattcaagtgaccgccacagatgccgacgatgccaattacggaaactcagccaaagttgtgtacagcattttgcagggccaaccctatttctctgttgaccctgagtcaggcatcattaagaccgctctgcctgatatgtcacgcgagaatcgcgagcaataccaggtggtgattcaggccaaagatatgggtgggcagatgggcggcctcagcgggaccactacagtgaacattaccctaaccgatgtaaataataacccaccacggttcccacaatcaacctatcaattcaattcacccgagagcgttccattgggcactcatttagggagaattaaagcaaatgatccagacgtgggagagaacgccgagatggaatacagtatcgccgagggagacggagcggatatgtttgatgttattaccgataaagacacacaggaaggaattattacagtcaagcaaaatctcgattttgaaaatcagatgctctacaccctaagggttgacgcaagcaatacacacccggatccacgcttcctccatctgggcccttttaaagacacagcagttgttaagatcagcgtagaagatatcgatgaacctccagtgtttactaaagtcagctacctgatcgaggtggatgaggatgtgaaggaggggagcattattggccaggtcaccgcctatgatccggatgcccggaataatcttataaagtacagtgtggatcgccacaccgacatggacaggatcttcggaatacactccgagaacgggtctatcttcactctgaaagctctggaccgcgagtcatccccctggcataacattacggtcacggcaaccgagataaacaatcccaagcagagtagccacattcccgtgtttatcaggatactggacatcaatgatcacgccccagagttcgcgatgtactacgagacattcgtatgtgaaaacgctaagcctggccagttgatccagacggtctctgtgatggataaagatgatccccctcgtggccacaaattcttttttgaaccggtccccgagtttaccctcaatcccaacttcacaatcgtcgataataaagataatacagccggtatcatgactagaaaagacgggtactcccgaaacaagatgagcacctaccttctgccaattctgatctttgacaacgattaccccatccagagtagcactgggaccctgacaatccgggtctgtgcgtgcgacaaccagggaaatatgcagtcttgcacggcagaggctctgattctgtccgctggcctgtccacaggtgccctggtggccattcttctctgcgtacttattctcctaatcctggtcgtgttatttgccgccttgaagcgccaacgtaaaaaagaaccactgatcatctctaaggatgatgtgcgggacaacattgtgacatacaatgacgaaggcggtggcgaggaggacacacaagccttcgacattggaaccctgaggaatcccgaagctagagaggactccaaactccgcagagatgtcatgcccgaaacaatcttccagatcagacggaccgtgcctctatgggaaaacatcgatgttcaagatttcatccacagacggttgaaagaaaatgacgcggacccctccgcacctccatatgactcactcgctacttatgcttacgaaggcaacgattccatagcagatagtctgtctagcttggagagtctcactgccgattgcaatcaagattatgattacctgtctgattggggaccccgcttcaaaaagctcgccgacatgtatggaggggacgattctgacagagattag

SEQ ID NO: 17300 - DNA, 162 bp, synthetic construct
  misc_feature 1..162: note = Description of Artificial Sequence: Synthetic coding sequence
  source 1..162: mol_type = other DNA
atgcgagcgtggatctttttcttgctgtgtctcgccggcagggccttagccgccccccaacaggaggccctacccgacgaaacagaggtcgtagaagagacagttgccgaggtcacagaggtgtccgtaggcgctaaccctgtgcaggtggaggtagggtag

SEQ ID NO: 17301 - DNA, 336 bp, synthetic construct
  misc_feature 1..336: note = Description of Artificial Sequence: Synthetic coding sequence
  source 1..336: mol_type = other DNA
atgagagcatggatcttcttcttgttgtgcctggcaggcagagcgcttgctgcaccccagcaggaggctctgccagacgaaactgaggttgtggaggaaaccgttgccgaagtaactgaggtatctgtgggcgctaaccctgtacaggtcgaggtcggtgagttcgacgacggagcggaggaaacggaggaggaagtcgttgcggaaaatccgtgtcaaaatcatcattgtaaacatggcaaggtatgcgagctggatgagaataacacacccatgtgtgtctgtcaggatcctacaagctgtccggctccaatcggggagtttgagaaagtctag

SEQ ID NO: 17302 - DNA, 276 bp, synthetic construct
  misc_feature 1..276: note = Description of Artificial Sequence: Synthetic coding sequence
  source 1..276: mol_type = other DNA
atgaagctggctgtgaccctgacacttgtgacacttgccctgtgttgcagcagtgcctccgccgagatatgcccgtcttttcaacgcgtgatcgagactcttctaatggacactccttcttcttatgaagctgctatggaactattctcccccgaccaggatatgagagaagcaggcgctcagctgaagaagctggtggacactctgccacaaaagcctcgggagtctatcataaaactcatggaaaagattgcccaatcgagcctgtgcaattag

SEQ ID NO: 17303 - DNA, 1380 bp, synthetic construct
  misc_feature 1..1380: note = Description of Artificial Sequence: Synthetic coding sequence
  source 1..1380: mol_type = other DNA
atgattaaaaggtttctcgaggacacaactgacgatggcgagctgtcaaagttcgtaaaagatttctccggcaatgcctcgtgtcaccccccagaagcaaagacctgggcaagtaggccccaagtgcctgaaccaaggccccaagcccccgacctctacgacgacgatttggaatttcgccctccctctcgcccccagtctagtgataaccaacagtacttctgtgccccagctccactgtctccttccgcaagaccgcgctccccgtggggcaagctggacccgtatgacagctccgaagacgataaagaatatgtaggtttcgccaccttgccaaatcaggtacatcggaagtcagtaaagaagggtttcgattttaccctgatggtcgccggcgagagtggcctcggcaagtccaccctagtgaattctctattcctaactgacctatacagggacagaaagctcctcggtgctgaagaacgcatcatgcagacagtggagattaccaagcacgccgtggatattgaggaaaaaggggtaaggctcagattaaccattgtggacacccccggtttcggagacgctgtcaataacactgagtgttggaagcccgtcgcagaatacatcgaccagcagtttgagcagtattttcgtgacgaaagtggacttaatagaaagaatattcaggacaatcgtgtccactgttgtctttacttcatttctccgtttggccatgggttacgcccactggatgtcgaattcatgaaagctctccatcaacgggtgaacatcgtgcctatcctcgcaaaggcggacacgctgacccctcccgaagtcgaccacaagaaacggaagatccgggaggaaatcgaacacttcggcattaagatctaccagtttccagactgtgactccgacgaggatgaagactttaagttgcaagaccaggccttgaaggagtcgatcccatttgcagtgatcggctcgaatactgtcgttgaggcccggggacgccgggtccgtggccgattgtacccctggggtattgtagaggttgaaaatccaggacattgcgatttcgtcaaactgaggaccatgcttgtacggacacacatgcaagatctgaaagatgtgaccagagagacacactatgaaaattacagggcacaatgcatccagtctatgactcgactggttgtgaaggaacgaaatagaaacaagctcacgcgtgaatccgggactgattttccaatccctgccgtcccgcctggcactgaccccgagactgagaagctgattcgcgagaaggatgaagaactgcggcggatgcaggagatgctgcataagatacagaagcaaatgaaagaaaattactag

SEQ ID NO: 17304 - DNA, 1437 bp, synthetic construct
  misc_feature 1..1437: note = Description of Artificial Sequence: Synthetic coding sequence
  source 1..1437: mol_type = other DNA
atggatcgaagcctcggctggcaaggaaactcagttcccgaggatcgtacagaggccgggatcaagagattcctggaagatacgacagacgacggcgagctgagtaagtttgtgaaagacttttccggtaacgccagctgtcacccgcccgaagctaagacgtgggcctctaggccgcaagttcccgagcctcggcctcaggccccagacctttacgacgatgacttggaattcagaccgcctagccgcccacagagtagtgacaatcagcagtatttttgcgcacccgcgccactctccccaagcgctaggcctcgatctccgtggggcaaactcgatccttatgatagttccgaggacgacaaagagtatgtgggtttcgccaccctgccaaatcaggttcatcgaaaatcggtgaaaaaaggtttcgattttacgctgatggtggccggagaatccggactgggtaagtccaccctagtcaatagtttgtttctcaccgacctctatcgggaccgaaaactgcttggagctgaggagcggattatgcagaccgttgagatcaccaagcacgccgtggatatcgaagaaaagggcgtcaggctgagactgaccatagtggatactcccggcttcggggacgctgtgaacaacacagaatgttggaagcccgtggccgaatacatagaccagcagttcgaacagtacttccgggacgagtcgggcctgaatcgaaaaaatattcaggacaatagggtgcactgctgtctgtactttatttcgccatttggtcacggcctgcgccccctagacgtggagtttatgaaggccttacaccagcgcgtgaacattgttccaatccttgccaaagccgacacattgactccccccgaagtcgaccacaagaaacgtaagattagagaagaaatcgagcacttcggaatcaagatttatcaattcccagactgcgattccgacgaggatgaggactttaagctccaggaccaggctctcaaggagtccatcccctttgcagttattggaagtaacactgtggttgaagccagggggagaagggtgagaggccggttatatccatgggggatcgtcgaggtggaaaatcctggacattgtgacttcgtcaagctgcgaacaatgctggtacggacacatatgcaggatttgaaggacgtgactcgcgaaacacactacgagaactatagagcccagtgcatccagtcgatgaccagattggttgtcaaagagcggaatcgcaataaattaacaagggaaagcggtacagattttccgatacccgcagtgccccctggaacagaccccgagaccgagaagctaatccgggagaaagatgaagagctgcgccggatgcaggaaatgttgcataagatacaaaagcagatgaaggaaaactattag

SEQ ID NO: 17305 - DNA, 1380 bp, synthetic construct
  misc_feature 1..1380: note = Description of Artificial Sequence: Synthetic coding sequence
  source 1..1380: mol_type = other DNA
atgattaaacgctttctggaggatactactgacgacggagagttatcaaagttcgtgaaagatttttcagggaatgcatcatgccaccctcctgaggccaagacgtgggcaagcagacctcaggttcccgaaccgcgtccccaggcacccgatctctacgatgatgacctggagttccgtcctccctcaaggccacagtcatctgacaaccagcagtacttctgcgcccctgctccattgtctccttctgcacggccgcgtagtccctgggggaagctggacccctacgactccagcgaggacgacaaggaatatgtgggcttcgctactctgcctaatcaggtgcaccgaaagtcagtaaagaagggatttgattttactctgatggtagccggtgagtctggattgggcaaaagtactcttgtgaactctctgtttctgacagatttgtaccgggatcgcaagttactcggcgccgaagaacgaatcatgcagaccgttgagatcactaagcatgcagttgatatagaggaaaagggagttaggctgagattgacaattgtggacactccagggttcggggatgccgtgaataacacagagtgctggaaacctgttgccgaatacatcgaccagcagtttgagcagtatttcagagatgagtcaggattaaaccgcaagaatattcaagacaacagggtccattgctgcctttacttcattagccccttcgggcacggccttaggcctctggacgttgagtttatgaaggccctgcaccagcgggtgaatattgtacccatcctcgctaaggcagacactttgacccctccagaggtggaccacaaaaagcgtaagattagggaagaaatcgagcactttggtataaagatctatcaatttccagactgtgattctgatgaggacgaggattttaagctgcaggatcaggctttgaaagaaagcatcccatttgccgtcattgggagcaacaccgtcgtcgaggctagaggccggcgtgtgaggggacgtctgtatccttgggggattgtcgaggttgagaatccgggtcactgcgattttgttaaactccgaacaatgctggttaggactcacatgcaggacctgaaggatgtaacgagggaaacacattacgagaactacagggcccagtgcattcagtcaatgacacgtctggtcgtgaaggaaagaaatagaaacaagctcacccgggaaagtggtacggatttcccaatcccagcggtgccaccaggaaccgatcctgagacagagaagctcatccgagaaaaagacgaagaactgcgccgaatgcaggaaatgttgcacaaaatccaaaagcagatgaaggagaattactag

SEQ ID NO: 17306 - DNA, 1413 bp, synthetic construct
  misc_feature 1..1413: note = Description of Artificial Sequence: Synthetic coding sequence
  source 1..1413: mol_type = other DNA
atgcccggcttttacagcgtgatgaccgacgaggaaatcaagcgcttcctggaagacacaacagatgacggagagttgagtaagttcgtcaaggacttctctgggaacgcgagttgtcacccgccagaggctaaaacctgggcctcaaggccacaggtgccagaacccaggccccaggccccagacctttacgacgacgacctagagttccgcccaccctctagaccacagagttccgacaatcagcagtatttttgcgcccctgccccactatcaccaagtgctcgtccacgcagcccatggggcaaactcgacccgtatgatagtagcgaggacgacaaggaatacgtagggttcgctacacttcccaaccaggtgcataggaagtcggtgaagaagggtttcgatttcaccctcatggtggcaggcgagtctggtcttgggaagtctacgcttgtgaattccctgtttctcacagacctatatcgcgaccgcaagctcctcggcgctgaggaaagaatcatgcagaccgtggagattacaaaacacgctgtcgatattgaggagaaaggagtgcggctccgacttacaattgttgatacgccaggatttggggatgcggtcaacaacactgaatgctggaagccggttgcagaatatatcgaccagcagtttgagcagtatttcagagatgaaagcggtttgaatagaaaaaacatccaagataatcgcgtccactgttgcctgtacttcattagcccctttgggcacggcctgcgccccctggatgtcgaattcatgaaggcactgcaccaacgcgtgaatattgtgccgatcctggcgaaggcggacaccctgactccccccgaggtggatcataagaaacggaagataagagaggagatcgagcatttcgggatcaaaatataccagtttcctgattgcgatagtgatgaagacgaagacttcaagctgcaagaccaggccctgaaagaatcgataccattcgccgtgataggctcaaataccgttgttgaagcacgggggcgacgggtacgcggcaggctttacccatggggaatcgtggaagtggagaaccctggacattgcgattttgtgaagttacgtaccatgctcgtgcgcacccatatgcaggacttgaaggacgtgacgcgtgaaacacactacgagaattaccgagcccagtgtatacagtccatgacaaggctggtcgtgaaggaacgaaatcggaataaactgactagagaatcaggcactgacttcccgattcccgccgtgccccccggcaccgacccggagacagaaaagctgattagagagaaagacgaagaactgcgaaggatgcaggagatgctacataaaattcagaagcagatgaaggagaactactag

SEQ ID NO: 17307 - DNA, 825 bp, synthetic construct
  misc_feature 1..825: note = Description of Artificial Sequence: Synthetic coding sequence
  source 1..825: mol_type = other DNA
atgattaagagatttctcgaagacaccactgacgatggggaactgtctaagttcgtgaaagatttctccggcaacgctagctgtcacccccccgaggccaagacttgggcatctcgtccacaggtgcctgaacccaggcctcaggcccctgatctgtacgacgacgatctggagtttagacctccaagccgaccccagtcatccgataatcagcagtacttttgcgcgccagcgccactgagcccctccgcacggccaaggtccccttggggtaagctcgacccatatgactcaagtgaggatgataaggagtatgtcggttttgccaccctcccaaatcaggtacatcggaagtcagtaaagaaaggcttcgatttcacactcatggtagctggagagtcgggcctcggaaagtcaaccttggtgaactcactctttctgactgacttgtatcgggatcgtaagctgctgggggccgaggagaggatcatgcaaacagtggagattaccaagcatgccgtggatattgaggaaaaaggtgttcgcctacgactgacaatcgtagatacccctggttttggagacgctgttaacaacaccgaatgctggaagccagtggctgagtacatagatcagcaatttgagcagtactttagggacgaatctggccttaatcggaagaatattcaggacaatcgggttcactgttgcctgtacttcatcagcccatttggtcacgggtatgggccaagtctccgcctcctggcccccccaggcgccgtgaaaggtaccggccaggagcatcagggccaagggtgccactag

SEQ ID NO: 17308 - DNA, 1479 bp, synthetic construct
  misc_feature 1..1479: note = Description of Artificial Sequence: Synthetic coding sequence
  source 1..1479: mol_type = other DNA
tattcttcaccagctctatttagttcccgggctgcaccacagaaaccgcgcaaagagggctcccaagccgctggcctcttggtttttagcgatagccttgagataaagcgtttcctcgaggacaccactgatgatggcgaactgtccaaattcgtgaaggatttcagcgggaacgcctcctgtcacccgcctgaggccaagacttgggcatctaggccacaagttccagagcccaggccccaggcccctgacttatatgatgacgaccttgagttccgaccaccttcaaggccacagtccagcgacaaccaacagtacttttgtgcacctgcgcccctctctccgtccgctaggccaagatccccatggggcaagctcgacccttatgacagcagcgaagatgataaggaatacgtgggtttcgccaccctgccaaatcaagtgcacagaaaatccgtgaaaaagggatttgatttcacactgatggtcgccggcgagtcagggctgggtaagagtacacttgtgaatagtctgttcctcacagacctgtatcgagacaggaaactgctaggtgccgaggagcgcatcatgcagaccgttgaaataacaaaacacgcagttgacatcgaagagaagggagtgcggctgcgcctcacaattgtggatacccctggcttcggcgacgccgtgaacaatactgagtgttggaaacccgtggccgaatacattgaccagcaattcgaacaatattttagagatgaatctggcctgaaccgaaagaacattcaggataatagggtacattgctgcctctactttatctccccttttgggcacgggttacggccactggatgttgaattcatgaaggcactacaccaaagagtgaacatcgtgccaattctggctaaggcggatacgctaacaccgccggaggttgatcataagaaaagaaagatcagggaagaaattgagcattttggcataaagatttaccagttcccagactgcgacagcgacgaagatgaagactttaagctccaagaccaggctctgaaggagtctattccgttcgctgtcattggcagcaacacagtggtcgaggccaggggcagacgggtgcgagggcggctctacccatggggcatcgtggaggtagagaatcccggtcactgtgatttcgtgaaattgagaaccatgctcgtgagaacccacatgcaagacctgaaagacgtgacccgcgagactcattatgaaaattaccgagcccagtgcattcagagtatgacgcgtctggtcgtaaaggagcgcaaccggaataaactcactcgggagagtggaacggactttcctattcctgcagtaccaccaggtacggatccagagacagagaaactgattcgggagaaagacgaggagctcagacggatgcaggagatgctacataaaatccaaaagcaaatgaaagagaactactag

SEQ ID NO: 17309 - DNA, 996 bp, synthetic construct
  misc_feature 1..996: note = Description of Artificial Sequence: Synthetic coding sequence
  source 1..996: mol_type = other DNA
atggtcgcgggggagtctgggcttggcaaaagtacactagtgaacagcctttttcttacagacctgtatagggacagaaagctgctgggcgcagaggagcgaataatgcagacagtggagatcacgaagcacgccgttgatattgaggaaaagggggtgcggctccgccttacaattgtggatactccaggctttggtgacgccgtgaataacactgaatgctggaaaccggtggccgagtacattgaccaacagttcgagcaatatttccgggacgagagtggccttaatcggaagaacatccaagacaaccgcgttcattgttgtctctactttatctcaccattcgggcacggattgaggcccctggatgttgaatttatgaaagctttacatcaacgggtgaacatcgttcccatcctggcaaaggccgacaccctcacaccacctgaggtcgatcacaaaaagagaaaaattcgtgaggagattgagcacttcggaattaaaatctaccagtttcccgactgtgacagcgacgaggacgaggacttcaagttgcaggaccaagctctgaaggaaagcattcccttcgccgttatcggtagcaacaccgtcgttgaggcaagaggacgccgggttagaggccgcctttatccctgggggattgtggaggtcgaaaacccaggccactgtgacttcgtgaagctgcgcacgatgctagtccgcacacacatgcaggatcttaaggatgtgacccgtgaaacacactacgaaaattatagagctcagtgtattcagtctatgacgcgcctcgtggtgaaggagcgaaatcgcaataaactgacacgcgagtcagggacagacttccccattccagcggtgcctcccggaacagacccagaaacagagaaattgatccgcgagaaagacgaggagcttcgaaggatgcaggagatgctgcacaaaattcagaagcagatgaaggagaactattag

SEQ ID NO: 17310 - DNA, 1311 bp, synthetic construct
  misc_feature 1..1311: note = Description of Artificial Sequence: Synthetic coding sequence
  source 1..1311: mol_type = other DNA
atgagcgtgtccgccagaagtgccgcagcagaggaacgttcagtgaatagcagcacaatgggccagcagaagaatctggaaggttacgtcggttttgccaatctccctaatcaggtatacagaaagtctgttaagagaggattcgagtttactctcatggtggtaggtgaatccgggctaggcaaatccactctgattaatagcctttttttaacagatctatacagccccgagtatccgggcccatcacacagaattaagaaaaccgttcaagtggagcagtctaaagtgcttatcaaagaaggcggtgtgcagttgctgttgactatagttgatacacccggattcggagatgctgttgacaactccaactgctggcagccagtaattgattacatagacagcaagttcgaagactatcttaatgcagagagccgggtaaacaggagacagatgcctgacaatcgagtgcagtgttgcctttatttcatcgcccccagtggccacgggctgaaaccgctggatatagagtttatgaagagacttcatgaaaaggtaaacataatacctctcatcgccaaggccgacacccttaccccagaggagtgtcagcagtttaagaagcagatcatgaaagagattcaagaacacaaaatcaaaatatatgaatttcccgagactgacgatgaggaggagaataagctggtcaaaaaaatcaaagataggctccctctggccgttgtgggctcgaatacgatcatcgaggtgaacggcaagagagtaagaggccggcagtatccgtggggcgtagctgaggtagaaaatggcgagcactgcgacttcaccattctgagaaacatgcttattagaacacacatgcaggacctgaaagatgtgacaaataatgtgcactacgaaaattatcgctccaggaagctggccgccgtgacatacaatggcgttgataataacaaaaataagggtcaattgactaagtctccgctggcacaaatggaagaggagcgtcgtgaacatgtggcaaagatgaaaaagatggagatggaaatggagcaggtctttgagatgaaagtgaaggaaaaagttcagaagttgaaggactccgaggcagaactgcaaagacgccatgaacagatgaaaaaaaaccttgaagcacagcataaagagctcgaggaaaagagaaggcagttcgaggatgagaaagctaattgggaggcacagcagcgcatactggaacaacaaaactccagtcggactctggagaagaataaaaagaagggaaagatcttttag

SEQ ID NO: 17311 - DNA, 1317 bp, synthetic construct
  misc_feature 1..1317: note = Description of Artificial Sequence: Synthetic coding sequence
  source 1..1317: mol_type = other DNA
atgtctgttagcgccaggtccgcggcagctgaagagcggagcgtgaattcgagtaccatggaggttgctcagcagaagaatctcgaagggtacgtgggattcgctaatctgcctaatcaggtctaccgcaagagcgtgaaaagggggtttgaattcacactgatggtggtgggagagagcgggttaggaaagtctaccctgatcaactctctttttctcacggatctgtattcgccagagtatcccggtccaagccaccggatcaagaagaccgtgcaagttgagcagtctaaggtgctgataaaagagggtggagtgcaacttctactcaccatagttgacactcctggctttggcgatgctgtggacaactcaaactgctggcaacccgtcatcgattatattgacagcaagttcgaagattacctcaatgcagagagccgggtgaaccgccggcagatgcctgataaccgcgtgcagtgctgtctttattttatcgccccatccggacatggcctgaagccgttggacatagagttcatgaagcgcttacacgaaaaagtgaacataatccctttaatcgctaaagccgataccctcacccctgaggaatgtcagcagttcaaaaaacagatcatgaaggaaattcaggaacacaagattaaaatctacgaatttcctgagaccgatgacgaggaggagaacaagctcgtgaagaaaattaaagaccggcttcccctggctgtcgtgggcagcaacaccatcatcgaggttaatggcaaaagagtgagaggtaggcagtacccttggggcgtcgctgaagtggaaaacggggaacactgtgatttcactatcctgcggaatatgctcatacgaacccacatgcaggatctgaaggatgtgaccaataatgtgcattacgagaactataggtctcggaagttggcggctgtaacttacaatggggtggacaacaataagaataaggggcagcttacgaaatcccccctggcccagatggaggaggagcgaagggagcatgttgcgaaaatgaagaagatggagatggagatggaacaggtgttcgaaatgaaagtgaaagagaaagtgcagaagcttaaggactcagaggccgagctgcagagaaggcatgagcagatgaaaaagaatctcgaggcccaacataaggagctggaggagaaacgtcgacagttcgaggatgaaaaggcgaattgggaggctcaacagcggatacttgaacagcagaacagcagtcgcacccttgaaaaaaataagaagaaggggaagatcttctag

SEQ ID NO: 17312 - DNA, 1311 bp, synthetic construct
  misc_feature 1..1311: note = Description of Artificial Sequence: Synthetic coding sequence
  source 1..1311: mol_type = other DNA
atgtctgtttcagcgcgctctgccgcagcggaagagcgaagcgtgaattctagcaccatggtacaacagaagaacttggaagggtatgtcggctttgccaacctacctaatcaggtgtaccgcaagagtgtcaagcgcgggtttgagttcaccctgatggtggtgggggagagcggactgggtaagagcaccctgattaacagtctgtttcttacagatctgtactctccagagtatcctggtccatctcatcggattaaaaaaaccgtccaggtggaacaatccaaagtgctcattaaagaaggtggagtgcagctcttactgactatagtggacacaccaggcttcggagacgcagttgacaactctaattgctggcagcccgtaattgattacatagacagcaaatttgaagattatctcaatgcagaatctagggttaatcgaagacagatgccagacaatcgggttcagtgctgtctgtactttatagcaccaagcggccacgggctgaaacccctggacatcgagtttatgaaacggctccacgagaaagtgaatataatccccctgatcgccaaagcagataccctgaccccagaggaatgtcaacagtttaaaaagcagatcatgaaggaaattcaggagcataaaattaagatatacgagttccctgaaaccgacgacgaggaagaaaataagctggtgaaaaagattaaggacaggctgcccctggcagtggtcgggagcaataccataattgaggtgaatggcaagagagtgcgggggagacagtacccctggggcgtggctgaagtggagaacggagaacattgcgacttcaccatcctccgaaatatgctcattcggacccacatgcaggatttgaaggatgtgacgaataacgttcattatgagaattaccgcagtcgaaaacttgccgcggtgacatacaatggcgtggataacaacaagaacaaaggacagctgaccaagagcccactcgcccagatggaagaagaacggcgggaacacgtggcaaagatgaaaaagatggagatggagatggaacaagtcttcgaaatgaaagtgaaggaaaaggtacagaagctgaaggatagcgaggccgagctccagaggagacacgagcagatgaaaaagaacttagaagctcaacacaaggagcttgaggagaaaaggcggcagtttgaagacgagaaagccaattgggaggcgcagcagcggattcttgaacagcaaaacagtagtagaaccctggaaaaaaataagaagaagggcaaaattttttag

SEQ ID NO: 17313 - DNA, 267 bp, synthetic construct
  misc_feature 1..267: note = Description of Artificial Sequence: Synthetic coding sequence
  source 1..267: mol_type = other DNA
atgaagaagatggaaatggagatggaacaggtcttcgagatgaaagtcaaggaaaaagtacagaagctgaaagactccgaggcagaactccagcgacgccatgagcagatgaaaaagaaccttgaagctcagcataaggagctggaggagaagaggcgccaattcgaagacgagaaagcaaattgggaggcccagcagaggatcctggagcaacagaactcgagtcggaccctggaaaagaataagaagaaaggcaaaatcttttag

SEQ ID NO: 17314 - DNA, 1155 bp, synthetic construct
  misc_feature 1..1155: note = Description of Artificial Sequence: Synthetic coding sequence
  source 1..1155: mol_type = other DNA
atggtggtcggcgagtccggcctggggaaatcgaccctcatcaatagcctcttcttgactgacctgtactccccagaataccccggacctagccacagaatcaagaagaccgtccaagtggagcagagcaaggtgcttatcaaagaggggggcgtccagctgctgcttactatagtggatactcctggatttggggacgccgtggacaacagcaattgctggcagccggtcatagactacatcgatagcaaattcgaggattatctcaatgccgagtctagggtgaacaggagacagatgcccgataatcgggtgcagtgctgcttgtacttcatcgctcccagtggtcatggacttaaaccactcgatattgaattcatgaaacgtctccatgaaaaggtgaacattatcccactgattgcgaaggccgacacactcacaccagaagaatgccaacagttcaagaagcaaatcatgaaggagatccaggagcacaaaatcaagatatatgagtttccggagacagatgatgaggaggagaataagcttgttaagaaaatcaaggaccgattgcccttggcagtcgtggggagcaatacgattatcgaagtcaatgggaaacgagtgcggggccggcagtatccttggggtgtcgctgaggtggaaaatggggaacattgtgattttacaattcttaggaacatgctgattcgtacgcacatgcaagatttgaaggatgttacaaataacgtgcattacgaaaactacaggtcacgaaaattggcagccgttacatataacggggtcgacaataataagaataagggccagctgaccaaaagcccacttgctcagatggaggaggaacggagagagcacgttgccaagatgaagaagatggagatggaaatggagcaggtgttcgaaatgaaagtgaaggagaaggtacaaaagctcaaagactcggaggctgaacttcagcgacggcacgagcagatgaagaaaaacctggaggcgcagcacaaggagctggaagagaagcgtaggcagtttgaggatgaaaaagcaaactgggaggcacagcaacgaatcctggagcaacagaatagctctcggaccctggaaaaaaacaagaagaaagggaagattttttag

SEQ ID NO: 17315 - DNA, 708 bp, synthetic construct
  misc_feature 1..708: note = Description of Artificial Sequence: Synthetic coding sequence
  source 1..708: mol_type = other DNA
atgtcagtctctgctcggtctgccgccgcagaggaacgttcagttaattccagcaccatgggccaacagaaaaatctggaaggatacgttggatttgccaatttaccaaatcaggtctataggaagtccgtgaagagagggttcgagttcactctgatggtggtcggggagagcggactcggaaaatctactttaataaacagtctcttcctgactgatttgtattcaccagaataccccggcccatcacatcgcattaagaaaaccgtgcaggtcgaacagtctaaggtcctcatcaaagaaggcggagtgcagctccttctgaccatcgtggacactccaggattcggagacgcggtggacaactccaattgttggcagccagtcatcgattatatcgactcaaaattcgaggattacttaaatgccgagagtcgagtgaaccgccgtcaaatgccagacaatcgcgtccagtgctgcctttacttcatcgcgccctcaggtcacggtctgaaacctctcgatattgagttcatgaaaaggctgcacgagaaggtgaacatcatccctctgatcgccaaggccgacaccctaacacccgaagagtgtcagcaatttaaaaagcagatcatgaaagagatacaggaacacaagataaagatctacgagtttccagaaacagccaagaagaagaagaaaaagaaatag

SEQ ID NO: 17316 - DNA, 1155 bp, synthetic construct
  misc_feature 1..1155: note = Description of Artificial Sequence: Synthetic coding sequence
  source 1..1155: mol_type = other DNA
atggtagttggcgaatccggactgggaaaatccactttaattaattccttgttcttgactgacctttactctccagaatacccaggcccgtctcatcggatcaagaagactgtacaagttgaacagtccaaggttctaatcaaggaagggggcgtgcagcttttgttaaccattgttgatacccctggctttggcgatgcagtggataacagtaattgctggcaaccagtgattgattacatcgattctaagtttgaggactatctgaacgcagagtctagagtgaataggcggcagatgccagataacagagtgcagtgttgtctgtattttatcgccccatccgggcacggcctgaagcctctggatatcgagttcatgaagcgtcttcatgaaaaggttaacattattcccctgatcgcaaaggccgacacattgacacctgaagagtgtcagcaatttaagaaacaaatcatgaaggagatccaggaacataaaatcaagatttacgagtttcctgaaacggatgacgaggaggaaaataaactggtgaagaagatcaaggaccggctgccgcttgctgttgtaggcagtaacaccatcatcgaagttaatggcaagcgtgtacgcggacggcaatatccttggggcgtggctgaagttgagaacggcgagcattgcgacttcacaattttgagaaacatgctaatcaggactcatatgcaagatctcaaggacgtcacaaataatgtccactacgaaaactaccggagccgaaaactggccgctgtcacctacaatggcgtcgacaacaacaaaaacaaaggacagctcactaagtcgcccctcgctcagatggaggaagaaaggagagagcacgtggctaagatgaagaagatggaaatggagatggagcaagtctttgagatgaaggtcaaggagaaagtacaaaaattaaaagattccgaggccgagctgcaacgccgacatgagcaaatgaagaaaaatttggaggcccagcataaagaactcgaggagaaaaggcggcagtttgaggacgagaaggctaactgggaggcccagcaacgaatcctggagcagcagaactcatcaagaaccctcgaaaagaataaaaagaaaggcaaaattttttag

SEQ ID NO: 17317 - DNA, 1146 bp, synthetic construct
  misc_feature 1..1146: note = Description of Artificial Sequence: Synthetic coding sequence
  source 1..1146: mol_type = other DNA
gtcacgcatgagactattgtggagcaacagaaaaacctcgagggctacgtcgggttcgccaatttgccaaaccaagtctatcggaaatcagtcaaacgggggtttgaatttaccctaatggttgtgggtgaatctggtttgggtaaaagtacgctgatcaattctctgtttctcacagacctctactctccagagtacccagggccctctcacaggatcaagaaaacggtacaagtcgaacagagcaaagtgcttatcaaggaaggaggagtccagctgcttctcacaatcgttgacactccaggtttcggtgatgcagttgataatagtaactgctggcagcctgttattgattacatcgactccaagttcgaggactatctgaatgccgaaagccgcgtcaataggagacaaatgcccgataatcgagtccaatgttgtctctacttcatcgctcctagtggccacggactcaaaccactggacatcgaatttatgaagcgcttgcacgaaaaagtgaacatcattcctctaatcgccaaagctgatacccttacaccagaggaatgccagcaattcaagaagcagattatgaaagagattcaggagcacaagatcaagatctatgagtttccagaaacagacgacgaggaggagaataagttagttaagaaaattaaggacagactgcccttggctgtcgtggggtccaatactattatcgaggtgaatggtaagagggtgcggggacggcaatacccttggggtgtggcggaggtggaaaatggggaacactgcgactttactattctccgcaatatgttaattcgcactcacatgcaggaccttaaggatgtgacgaacaacgtgcactatgagaactacaggtccagaaaacttgcggccgtcacatacaacggcgtcgacaataataaaaacaaaggtcaacttaccaagtcacccctggcacagatggaggaggagaggagagagcacgtggcaaagatgaaaaagatggagatggaaatggagcaggtcttcgaaatgaaggtaaaagagaaggtccagaagctgaaggactccgaagccgaggttattagcctgatttcccacctgctcgccgacatcgtattcctgttcaagtag

SEQ ID NO: 17318 - DNA, 1149 bp, synthetic construct
  misc_feature 1..1149: note = Description of Artificial Sequence: Synthetic coding sequence
  source 1..1149: mol_type = other DNA
atgggggaatccggcctgggcaagtcaactttgatcaattctctgttcttgacggacctctactccccagagtatccagggcctagtcaccgcattaaaaaaaccgtgcaagttgaacagagcaaggtgctgataaaagaggggggtgtgcaattgctcctgaccatcgtggacaccccgggctttggcgacgcggtcgacaattcaaactgctggcagcctgtcattgattatattgatagtaagttcgaagactatctcaatgccgagagccgcgtgaaccgcaggcaaatgcccgacaacagagtacaatgctgcttatacttcattgctccatccggccacggcctcaagccactggacatcgaattcatgaagcgtttacacgagaaagtgaatatcatcccactcattgccaaggcggataccttaacccccgaggaatgccaacagttcaagaagcaaatcatgaaggaaattcaggaacataaaataaagatctacgagtttccagaaactgatgacgaagaggagaacaagctcgtgaaaaaaataaaggaccgactacctttagcggttgtgggatccaacactatcattgaagtcaacgggaaacgagtgcggggcagacagtatccttggggcgtggcagaggtggaaaatggcgagcactgcgattttacaatcttaaggaatatgcttattagaacacatatgcaagatctgaaggacgtaacaaataatgtccactacgaaaactatagatcaaggaagctcgcagcagtgacttacaacggcgtggataataacaaaaacaaggggcagcttaccaaatctcctctggctcaaatggaagaggaacggagagagcatgtggcaaagatgaagaagatggagatggagatggagcaggtgtttgagatgaaggtaaaggagaaagttcagaaacttaaggactctgaagcagagctccagcgaaggcacgagcagatgaaaaagaatctcgaagctcagcataaagaactcgaagagaagcggcgtcagtttgaagacgaaaaggctaactgggaagcccagcaacgcatcttggagcagcagaactcctccaggactcttgagaaaaataagaagaagggaaagattttctag

SEQ ID NO: 17319 - DNA, 1302 bp, synthetic construct
  misc_feature 1..1302: note = Description of Artificial Sequence: Synthetic coding sequence
  source 1..1302: mol_type = other DNA
atggaggtagtcgacccacagcagcttggaatgtttaccgagggtgaactaatgtctgtgggaatggatacgttcattcacagaatcgattctaccgaagtcatttaccagccccgaaggaagagagcaaagttaattgggaaatacctgatgggggacttgctaggagagggctcgtacggcaaggtcaaggaagtactcgacagcgagacgttgtgcagacgagctgtgaagatcctcaagaaaaagaagctgaggcggatccccaatggagaagccaatgttaaaaaggagatacagctgctgcggcgcctgagacacaagaacgtgatccagctggtcgatgttctgtataatgaagagaaacagaagatgtatatggtcatggaatactgcgtctgcggcatgcaggaaatgttggatagcgtgccggagaagcggtttcctgtttgtcaggcacacggctatttttgccagctgatcgatggcttggaatatttacactcccagggcatcgtccacaaggacatcaaacccgggaatttactgctcaccacgggcggcacactcaaaatttctgatctgggagtcgccgaagccctgcatccattcgctgccgacgacacttgtagaacctctcagggatcccctgcattccagccacctgagatcgccaacggactggacacattttctgggtttaaggttgacatttggagcgcaggagtgactctgtacaacatcactacgggactctacccctttgagggagacaatatctataagctcttcgagaatattggaaagggcagctacgccattcccggagactgtggacctccactctccgacctgcttaaaggcatgctggaatacgagccggctaagcgcttctctataagacagattagacagcactcgtggttcaggaagaaacaccctcccgcggaggccccagtaccaattccaccatctcccgataccaaagaccgttggcgttcaatgaccgtggtgccctacttagaggatttacacggggccgacgaagatgaggacttgtttgatattgaagatgatattatttatacgcaggattttactgtgcccggacaagtcccggaggaagaggcaagccacaatggccagcgccgtggcttgcccaaggctgtgtgtatgaacggaaccgaggccgcgcagctgtctactaaatcaagagcggagggcagggctcccaatccggccagaaaagcctgtagcgcctcatcaaaaattaggagactgagcgcttgcaaacagcaatag

SEQ ID NO: 17320 - DNA, 1299 bp, synthetic construct
  misc_feature 1..1299: note = Description of Artificial Sequence: Synthetic coding sequence
  source 1..1299: mol_type = other DNA
atggaagtcgtagacccccaacagctaggtatgtttacagaaggcgagctgatgtccgtggggatggacacattcatacataggatcgacagcacagaagtaatatatcagcccaggcggaagagggcgaaactcattggcaagtacctgatgggcgatctcctcggagaaggctcctacgggaaagtgaaagaggtcctggattcagagaccctgtgcaggagggcggtgaaaatcttgaagaagaagaagctgaggcgcatacccaatggtgaagccaacgttaaaaaagagatccagctactgcgaagacttaggcataagaacgtgatacaacttgtcgacgtgctctacaatgaggaaaagcagaagatgtacatggttatggagtactgtgtgtgtgggatgcaggaaatgctcgattcggtgcccgagaagagattccctgtgtgtcaagcgcatgggtacttttgtcagctgatcgatggtcttgaatacctgcactcccagggaattgttcataaggatattaaacctggcaacctcctcttgactactggcggaacactgaaaatctcagacctgggggtcgctgaggccttacacccctttgcagccgacgacacctgtcgcacctcccaaggatctcctgccttccagcctccagaaatagccaacgggctcgatacattttcaggattcaaggtggacatttggagtgccggggtgactctgtacaatattaccacgggtctctatccatttgagggggacaacatatacaagctatttgagaacatcggcaaagggtcttatgcaatcccaggcgattgtggccctcccctgagtgatctgctgaagggcatgctagagtatgaaccggctaagcgctttagcattcgacagattagacagcattcatggttcagaaaaaagcatccgcccgctgaagcccctgtccctattccacccagtccagatactaaggacagatggagaagtatgaccgtcgtgccctacttggaggatctgcatggcgccgatgaagacgaagacttatttgacatcgaagacgacatcatctatacacaagactttaccgtgcccggtcaggtgccagaagaagaagcaagtcataatggccagaggcgcgggcttccaaaagcagtctgcatgaatggcaccgaagccgcgcagttatctactaagtcacgggccgaggccggacccccaactctgcctgcccggcctgcagcctctagtaaaattcgaaggcttagtgcttgtaagcagcaatag

SEQ ID NO: 17321 - DNA, 1248 bp, synthetic construct
  misc_feature 1..1248: note = Description of Artificial Sequence: Synthetic coding sequence
  source 1..1248: mol_type = other DNA
atggaggatctctgtgttgctaataccctgtttgcattgaacctgtttaaacacctggctaaagcttctccaactcaaaatctctttctgagcccctggagcatcagcagtaccatggccatggtgtatatggggagtcgtgggtcgactgaggatcagatggccaaggtcctgcagttcaacgaggtgggagcaaacgcagttacacctatgacccccgaaaactttactagctgcgggttcatgcaacagattcagaaggggagctacccagacgcaatcttgcaggctcaggccgccgacaagattcacagcagttttcggtccttgtcttcagctatcaacgcctcaacgggcaactatttgcttgagtcagtaaacaagttgtttggcgagaaatccgccagctttcgggaagagtatattaggctgtgccagaaatactactcttccgaaccacaggccgtagatttcctggaatgcgcagaggaggcgcgcaaaaagataaatagctgggtcaagacccagactaaaggtaaaatccctaatttgctgcccgaaggatctgtcgacggggatacacgtatggtcctggttaacgctgtgtacttcaaaggaaagtggaagacccctttcgagaaaaagctgaatggcctgtatccattccgggtcaactccgctcaaaggacacccgtgcagatgatgtatctgagggaaaagctgaatatagggtacatagaggacctgaaagctcagattttagagcttccatacgctggcgacgtgtcaatgttcctgctcctacctgacgagatagccgacgtatcaacaggcttggaactgctcgagtcagaaatcacctacgacaaactcaataagtggacgagtaaggacaaaatggccgaagatgaggttgaagtgtacatccctcagttcaagctggaggaacactacgagctaagaagtatcttgaggagtatgggaatggaagacgcgtttaataaaggcagggccaacttcagcgggatgtctgagaggaacgacctttttttatcagaagtctttcatcaggccatggtggatgttaacgaggaagggaccgaagcggcagccggcaccggcggcgtaatgactgggcgtacagggcacggagggccacaattcgttgccgaccacccatttctgtttctcattatgcataagattactaattgtatcttgtttttcggccgtttcagctccccttag

SEQ ID NO: 17322 - DNA, 342 bp, synthetic construct
  misc_feature 1..342: note = Description of Artificial Sequence: Synthetic coding sequence
  source 1..342: mol_type = other DNA
atggaggacctgtgcgtggccaataccttgtttgccctaaatctgtttaagcatctagctaaggcctccccaacccagaatctttttctaagtccttggtccatctcctcaacgatggccatggtgtacatggggtctagaggtagtactgaggatcagatggccaaagtcttgcagttcaacgaagtaggggcaaatgcggtcacccctatgacccccgagaactttacctcctgtggattcatgcaacagatccagaagggcagttatcctgacgcaattctgcaggcacaggccgctgataagatacactccagtttcagatccttaagctcagcttag

SEQ ID NO: 17323 - DNA, 486 bp, synthetic construct
  misc_feature 1..486: note = Description of Artificial Sequence: Synthetic coding sequence
  source 1..486: mol_type = other DNA
atggaggatctttgtgtggccaatacactcttcgccttgaacctcttcaaacatctggcgaaggcctcccctacccaaaacctcttcctgtcaccatggtctatcagctctacgatggcaatggtttacatgggctcccgcggaagcactgaggaccagatggccaaggtattacaatttaacgaggtgggggccaatgccgtgactcctatgacacctgagaacttcaccagctgtggctttatgcagcagatccagaaaggtagctaccctgacgccatcctgcaggctcaggcagctgacaagattcactcctctttccggagtttgtcttccgcgattaatgcctctactggtaattacctccttgagagtgtgaacaaacttttcggcgaaaaaagtgcctcttttcgcgaggagtatatccggctgtgccagaagtactactcttcggagcctcaggccgtcgactttctggagtgctag

SEQ ID NO: 17324 - DNA, 399 bp, synthetic construct
  misc_feature 1..399: note = Description of Artificial Sequence: Synthetic coding sequence
  source 1..399: mol_type = other DNA
atggaggacctgtgtgttgcgaacacactctttgctctgaatttgtttaaacacctagctaaggctagccctacacaaaatttatttttaagcccatggtctatctctagcactatggcaatggtgtacatgggttcccgcggcagcaccgaagatcagatggctaaagttttgcaattcaacgaggtcggggccaatgccgtgacacccatgacccctgagaatttcacaagttgcggcttcatgcagcagattcaaaaaggtagctaccccgacgccatattacaggcccaagccgcagacaaaatccattccagcttcagaagtttaagcagcgccatcaatgctagcactggcaattacctgctcgagagtgtgaataagctgttcggcgagtag

SEQ ID NO: 17325 - DNA, 1248 bp, synthetic construct
  misc_feature 1..1248: note = Description of Artificial Sequence: Synthetic coding sequence
  source 1..1248: mol_type = other DNA
atggaagatctgtgtgttgctaatacgctcttcgcacttaacctgttcaaacacctggccaaggcctccccaacccaaaatctgttcctgtctccgtggtctattagttccacaatggccatggtctatatgggaagtcgcggttccaccgaggatcagatggctaaggtgctgcagtttaacgaagtcggggcaaatgccgttactccaatgaccccagagaatttcacatcctgtggttttatgcaacaaattcagaagggatcatatcccgatgccattcttcaggcccaggctgctgacaagatccacagcagctttcggtctctgtcttccgccatcaacgcatctaccgggaattacctactggaatcggtcaataaattgttcggggaaaaatctgccagtttcagagaggaatatattagactatgtcagaagtattacagtagcgagcctcaagctgtagacttcctcgagtgtgccgaggaggcacgtaagaagatcaactcatgggtgaagacacagactaaagggaagattcccaacttgctcccggagggatccgttgatggagacactcgcatggttctcgttaatgctgtgtactttaaaggtaagtggaagacccctttcgagaagaagttgaatggcctgtatccgtttagagtgaattccgcgcagcgcacacccgtgcaaatgatgtacttacgggagaaacttaacatcggttatatcgaggatctgaaggctcagatccttgaattgccctatgccggcgatgtctccatgtttctgctgttacctgacgagattgcagacgtcagcaccggactcgaacttctggagtcggaaattacatacgataaactgaacaagtggaccagcaaggataaaatggccgaagacgaggtcgaggtgtatatcccccagtttaagctggaggagcactatgaacttagaagcattctcaggagcatgggcatggaggacgcctttaataagggaagagccaacttctccggcatgtcagagcgaaacgatctgtttctctcagaagtgttccatcaggccatggtggatgtcaatgaggagggaaccgaggccgccgccggcaccggaggagtcatgaccggacgaaccggacatgggggacctcagtttgtggccgaccacccatttctgttcctcattatgcataagataactaattgcatcctgttttttggaagattcagttcaccctag

SEQ ID NO: 17326 - DNA, 2280 bp, synthetic construct
  misc_feature 1..2280: note = Description of Artificial Sequence: Synthetic coding sequence
  source 1..2280: mol_type = other DNA
atggcaggccttaccttatttgttgggcgactgcccccttcagcgcggtctgaacaactcgaagagctgttttcccaggtgggaccggttaagcagtgctttgtggtcacagaaaagggctccaaagcctgtcgggggtttgggtacgtgacattcagtatgctggaggacgtgcagcgcgcactgaaagagatcaccacctttgaaggctgcaagatcaatgtaaccgttgctaaaaagaaattgagaaataaaactaaggagaaaggaaagaatgaaaattccgagtgccccaagaaagagcccaaagccaaaaaagctaaggtagccgacaagaaggcacggctgatcatccggaatctgagtttcaagtgttctgaggacgatttgaagactgtgtttgcccagttcggggctgtactcgaggtgaacattcctcgtaagcctgatgggaaaatgcgcggatttggttttgttcagtttaagaatctgctggaagccggaaaagctctgaagggcatgaacatgaaggagatcaagggccgaacagttgccgttgattgggcggtcgctaaggacaagtacaaagacacccagagcgttagcgccattggggaagagaagagccacgagagcaaacaccaggaatcagtgaaaaagaaaggtagagaggaagaagacatggaagaggaggagaatgacgacgacgatgatgacgacgacgaggaggatggcgtcttcgatgacgaggatgaggaagaggaaaatatagagagtaaagtaaccaagcctgtgcagatccagaaacgcgctgttaaaaggcccgcacccgcaaagtcttctgaccactcagaagaagactcagatctggaggagagcgactcgatcgatgacggcgaggaattggcgcagagcgatacttccacggaggagcaagaggataaggctgttcaagtttccaacaagaaaaaacggaaattgccttcagatgttaatgaaggtaaaacagtgttcatcagaaatctgagctttgactctgaggaggaagagctcggtgagctgttgcagcagtttggcgagctgaagtatgtgagaattgtgctgcaccctgacacagaacattccaaagggtgcgccttcgcgcagttcatgactcaggaagctgctcagaaatgcctgctggctgcctcccctgagaatgaggccggcgggttgaagttagacggtcgacagctgaaagtggacctggccgtgaccagagacgaggccgccaaactccagacaactaaagtcaaaaaaccaaccggtactagaaacctgtatcttgccagagagggcctcatccgggctggcactaaggctgcagaaggtgtgagcgccgccgatatggcaaagagggaacggttcgaattgctcaaacaccagaagctgaaggaccaaaacatatttgtgtctcgcacaaggctgtgcctgcataatttgcccaaggcagttgatgacaagcagctgcgaaaattgttgctgagcgccacctctggggagaaaggagtgagaattaaggagtgtagggtgatgcgagacttgaaaggtgtgcatggcaatatgaagggacagagcctgggctacgcattcgccgagttccaggagcatgaacacgccttgaaggccctacggcttattaataataaccccgaaattttcggccctttgaaacgaccaattgtggagttcagcttagaagatagaaggaaacttaagatgaaggagctcaggatccagcggtccctccagaagatgcgctccaagccggcaactggcgaaccacagaaaggacagcccgaacctgctaaagaccaacaacagaaggccgcccagcatcacactgaagaacagagcaaagtgcctcccgagcagaagcggaaggcaggctcgactagttggacaggttttcagaccaaggccgaagtggagcaagtcgagctgcccgatggaaagaagagaagaaaggtcctggctttgccctcacatcgcggcccaaagattaggctccgcgacaaaggtaaggtgaagcccgttcacccaaagaagccaaagccccagattaaccagtggaagcaggaaaagcagcagctgagttctgagcaggtcagccgcaagaaagctaagggtaacaagacagaaacgcggtttaatcaactcgtggaacagtacaaacagaaactgctgggtccgtctaagggagcaccattagccaagagaagcaagtggtttgacagttag

SEQ ID NO: 17327 - DNA, 1164 bp, synthetic construct
  misc_feature 1..1164: note = Description of Artificial Sequence: Synthetic coding sequence
  source 1..1164: mol_type = other DNA
atgcagatgagtccagcattaacctgccttgttctaggactggccctggtgttcggtgagggctcagctgttcaccatccacccagctatgtagcgcaggcctcaaaagaccggaatgttgtttttagcccatatggcgtggcatccgtgcttgcaatgctacagttgacaacaggcggagaaacccagcagcagattcaggccgccatgggctttaaaattgatgataagggcatggctcccgccctccgacatctgtacaaagaactgatgggcccgtggaataaagacgagatctcaacaactgatgctatcttcgtccagagagacctaaagctggtgcaaggttttatgccgcatttctttcgcctgttcaggtcaacagtcaaacaggtggactttagtgaggtggaacgggcgaggttcattattaatgactgggtgaagactcatactaaaggcatgatatccaatctgctcggaaagggagcagtggaccaactcacgagactggtcctggtaaacgccctctattttaatggacagtggaaaacacctttccccgatagctctacccaccgcagactgtttcataagtctgatgggagcactgttagtgtgcctatgatggcccagacaaacaagtttaattacaccgaattcactactcccgacggacattactacgacattttggagttgccctaccacggtgatacattgtctatgttcatagcagcaccctacgaaaaagaggttcctctatccgccctcactaacattctctccgcacagctcataagccactggaagggtaacatgacaagactcccgcgactgctagtattaccgaagttctcgctggagaccgaagtcgatctacggaagccattggagaatctgggaatgaccgacatgtttcgccagtttcaagcggattttacatccttatctgaccaggagcccctccatgttgcccaggcattgcagaaagtcaagattgaggtgaacgaatctggaaccgtcgcaagttccagtaccgcagttattgtatccgcgcggatggcccccgaagagatcatcatggataggccgttcctgttcgttgtccggcataacccaacaggcacagtcctgtttatgggacaggtgatggagccttag

SEQ ID NO: 17328 - DNA, 540 bp, synthetic construct
  misc_feature 1..540: note = Description of Artificial Sequence: Synthetic coding sequence
  source 1..540: mol_type = other DNA
atgatggcccagaccaacaaatttaattacaccgaatttacaacccccgacggtcactactatgatattctggagttgccctaccatggggatacgctgagtatgtttatagcagctccctacgaaaaagaagttcccctgagcgcgctcactaatatactgtctgctcagctcatctctcactggaagggtaacatgacccggttgccaagactcctagtgttacccaagtttagtttagaaacggaagtagacctgcgaaaacccctggagaatttggggatgaccgatatgttccggcagtttcaggccgacttcacatccctaagcgaccaagagccattacatgtggcccaagcccttcagaaggttaaaattgaggttaacgagagtggtactgtggcctcttcgtccacagccgttatcgtgagcgctcgcatggcaccagaggagattattatggaccgcccctttctgttcgtagtacgtcacaacccgacaggcacggtgctgtttatgggccaggttatggaaccatag

SEQ ID NO: 17329 - DNA, 711 bp, synthetic construct
  misc_feature 1..711: note = Description of Artificial Sequence: Synthetic coding sequence
  source 1..711: mol_type = other DNA
atgctctccaaaggtctgaagcgaaagagagaggaggaggaggagaaagagcccctggcagttgattcttggtggctagaccctgggcacactgcagtagcacaggctccgcctgctgttgccagcagctccctgttcgacctctccgtcctgaagctgcaccacagccttcagcaaagcgagcctgaccttcgtcatctcgtgctagtggtcaacacacttagaaggattcaggctagtatggcccccgctgccgcattgccaccggtccctagcccacctgcagccccgtcagtggcagacaatctgctggcgagctccgacgcagccctgagtgccagtatggctagcctgttggaagacctctcacatattgagggactgagtcaggccccacagcccttggccgacgagggaccccctggccgatccatcggtggcgctgccccctccctgggcgccctggacctcctggggcctgcaacgggctgcctcctggacgatgggcttgagggattgtttgaggatatcgacactagtatgtatgataatgaactgtgggcacctgcttccgaagggctcaagcctgggcccgaagatgggccaggaaaagaagaggcccctgaactggacgaagctgagctggattatctgatggacgtgctcgttggtacgcaagccctagaaaggcctccggggcctggccggtag

SEQ ID NO: 17330 - DNA, 1527 bp, synthetic construct
  misc_feature 1..1527: note = Description of Artificial Sequence: Synthetic coding sequence
  source 1..1527: mol_type = other DNA
atgttacccacccaggcaggagccgcggctgcactcggtaggggctccgctctaggtggcagcctgaaccggacacccaccgggaggcctggaggcggcggaggcacgcggggcgcgaatggggggcgcgtgccaggaaacggggcagggctcggaccaggaagattggagagagaggcagcagccgccgctgcaaccacaccagcgcctactgcaggcgctctttacagtggcagcgagggcgactctgaatcgggagaggaggaggagctcggcgcggagcgccgcgggttgaagcggtctctttcagagatggagatcggaatggtggtgggaggccctgaggctagcgcagctgccaccgggggctatggcccagtttccggggccgttagcggggcaaagccagggaaaaagacccgggggagagtgaaaatcaagatggagttcatcgataataagctacgccggtacacaactttctctaagcggaagactggtatcatgaagaaggcgtatgagctgtctaccctcaccgggactcaagtgctgctcttggtagcatccgagacgggtcacgtgtacacattcgccactagaaaattgcagccaatgattacaagcgaaacgggaaaagcactgattcaaacctgtctgaattccccagattctccgcctcggtcagatcccacaacagaccaacggatgtccgcgaccggatttgaggaaactgacctgacatatcaagtaagcgaatcagattcatccggggaaactaaagacactctgaaacccgccttcaccgtgaccaatctcccagggacgacctcaactatccagaccgcaccgtctacttcaacaacaatgcaggtttcaagcgggccctcttttcccataacaaattatctcgcaccggtgtctgcatctgtgagtcccagtgctgtctctagcgcgaacggtaccgtgcttaagtctactggatccggaccagtttcctcaggaggactcatgcagcttccaacatctttcacgctcatgccgggcggggccgtcgcacagcaggtgcccgtccaggccatccaagtccatcaggctccccagcaggcttcaccgtctagggactcatcaaccgatctaacccaaacttcaagtagcgggaccgtaacattaccagccacaattatgacctcctccgtgccaacgaccgtcggtggtcatatgatgtacccttccccacacgctgtcatgtacgcccctactagcggcctcggagacgggagtttgacggtgttgaacgccttctcccaggccccatcaacgatgcaggtgagtcattctcaggtacaggaacccggtggcgtacctcaggtatttctcaccgctagtagtgggacggtccagattcctgtgagcgcagtgcagctccaccagatggctgtgattggtcaacaggctgggtctagttcaaacctgactgaattacaagtcgtgaaccttgacactgctcacagtactaagtcagaatag

SEQ ID NO: 17331 - DNA, 915 bp, synthetic construct
  misc_feature 1..915: note = Description of Artificial Sequence: Synthetic coding sequence
  source 1..915: mol_type = other DNA
atgatcacctctgaaactggcaaggccctgatccagacctgtctgaactcgcccgattcaccacctcggagcgatccgacaaccgatcaacggatgagcgcaaccggcttcgaagagacagacctgacataccaagtctcagaaagtgactcctctggcgaaactaaggataccttgaagcccgcgtttactgtcacgaacctcccgggcacaacctctaccattcagaccgcaccctcaactagcaccactatgcaggtcagtagtggccctagtttccctatcaccaactatttggctccagtgtccgcaagtgtcagcccgtccgccgtgtccagcgccaacgggaccgtgttgaaatctactggatcaggccccgtcagctctggaggtttgatgcaattgcccacctccttcacgctcatgccagggggtgctgtggcacaacaggttccagtgcaggcgatccaggtccatcaggcgccccaacaggcctctcccagcagagatagttctaccgatctcacgcagactagtagctctgggaccgtaacattgcccgcaaccataatgacctcaagcgtacccaccactgttggtggacatatgatgtaccctagcccccatgcagtgatgtatgctcctactagcggacttggggacggctcactaactgtgctgaacgcgttcagtcaagcaccgtcaacgatgcaggtgagccactcacaggtgcaggagcctgggggagtcccccaagtctttcttaccgcatcttcaggaaccgttcagatcccagtgtccgccgtgcagctgcaccagatggctgttatcggccaacaggccggatccagctccaatttgacagagcttcaggttgtcaacctggatacagctcactcaacgaaatcagagtag

SEQ ID NO: 17332 - DNA, 834 bp, synthetic construct
  misc_feature 1..834: note = Description of Artificial Sequence: Synthetic coding sequence
  source 1..834: mol_type = other DNA
atgagcgcaccagcagccaaggtgagtaaaaaagagctgaactcaaaccacgatggtgcggatgaaaccagcgaaaaggagcagcaggaagctatcgagcacatcgatgaggtccagaatgagattgacagactaaacgaacaggcttcagaggaaatactcaaagtcgagcagaaatataataagctgcgtcagcccttctttcagaaaaggtctgaactgatagctaagattccaaatttctgggtgacaacctttgtgaatcatccgcaggtgagtgctctgctcggggaagaggacgaggaggccctccattacttaaccagggtggaggtgacagaatttgaggacatcaagagcggctatagaatagacttctactttgatgaaaatccatatttcgaaaacaaagtcctctcaaaggaattccacctcaatgagtccggtgacccgtctagtaagtccacagaaattaagtggaagtctggaaaagaccttaccaagcggagctcgcaaacacaaaataaagctagccgcaaacggcagcacgaggagccagagtcattcttcacgtggttcaccgaccattccgacgctggggccgatgagctgggggaagtgattaaagatgatatctggcccaacccccttcagtattacctggtgccagacatggacgacgaggagggcgaaggagaagaggacgacgacgacgatgaagaagaagagggactggaagatatcgacgaagagggagatgaggatgagggtgaggaagacgaggacgacgatgaaggcgaggagggcgaagaggatgaaggtgaagacgactag

SEQ ID NO: 17333 - DNA, 798 bp, synthetic construct
  misc_feature 1..798: note = Description of Artificial Sequence: Synthetic coding sequence
  source 1..798: mol_type = other DNA
atgcctagaagtcaccagcctccaccacccccacacgagaaggagcagcaggaggcaatagagcacatagacgaggtccagaacgagatcgatagactgaacgaacaagccagtgaggaaatcctgaaagttgagcagaagtacaataaacttcgccagccgtttttccaaaagcggtccgaattaatcgcaaaaattccgaatttttgggtcacgaccttcgtcaatcacccccaggtatcagctctcctcggcgaggaggatgaggaagccctacactacttgacaagggtggaggtaactgaatttgaagacatcaaaagtggatataggatcgacttttattttgacgaaaacccctatttcgaaaataaagttctgagcaaggagttccatctgaatgaatccggtgatccatcatccaaaagcaccgagattaagtggaagagtgggaaggacctcacgaagcgaagctcccagacccagaacaaagccagccggaaacgacagcacgaagaaccagaaagtttcttcacatggtttactgaccatagcgatgctggggctgatgagcttggagaggtgattaaggacgacatctggcccaatcctctccagtattacttggttccggacatggacgatgaggaaggcgaaggcgaagaggatgacgatgatgacgaggaagaagagggtcttgaggatattgacgaagagggcgatgaggatgaaggtgaagaggacgaggatgacgacgagggagaggagggtgaggaggatgagggggaagatgactag

SEQ ID NO: 17334 - DNA, 801 bp, synthetic construct
  misc_feature 1..801: note = Description of Artificial Sequence: Synthetic coding sequence
  source 1..801: mol_type = other DNA
atgatgccccgctctcaccaacccccgccgccccctcatgaaaaggaacagcaggaagccattgagcatatagatgaggtgcagaatgaaatcgataggctgaacgaacaggccagtgaggaaatcttgaaggtggagcaaaagtacaacaagctccgccagccattcttccagaagcgctcagagttaatcgcaaaaatccctaatttttgggtcacaaccttcgtcaaccatccgcaggtttcagctttgctgggcgaagaagacgaggaggcactgcattacctcacacgagtggaggtgaccgaattcgaagatataaagtccggctatagaattgacttttattttgacgaaaacccctatttcgagaacaaagttctctctaaagagtttcatctgaacgagtccggggacccatcctccaagtcaactgaaattaaatggaagtctgggaaggaccttaccaaaagatcctctcagacccagaacaaggccagtagaaaacggcagcacgaggagccagaaagtttcttcacttggttcactgatcactccgacgctggggccgatgagctgggagaggtcattaaggatgacatttggcccaacccgctgcaatactatcttgtgccagacatggacgacgaggaaggggaaggagaagaagatgacgacgacgacgaggaggaggaaggacttgaggatatcgatgaagagggagatgaggatgaaggcgaagaagacgaagatgacgacgaaggcgaagagggcgaggaagatgaaggcgaagatgactag

SEQ ID NO: 17335 - DNA, 873 bp, synthetic construct
  misc_feature 1..873: note = Description of Artificial Sequence: Synthetic coding sequence
  source 1..873: mol_type = other DNA
atggcacccaagaggcagtccccactgccaccacagaagaagaagccccgccctcctccagccctcgggcctgaggaaacctcagccagcgcgggcttgcccaaaaaaggtgagaaagagcagcaggaggctattgaacacattgacgaagtgcagaatgagatagatcgcctgaatgagcaagcgagtgaagagatattaaaagtcgagcagaagtacaataaactgcgacagccgttctttcagaaaagatccgaattgatcgccaaaattcccaacttctgggttacgactttcgtcaaccatcctcaggtgagcgcgctcctgggcgaggaggacgaggaggccttgcactacctcacaagagtggaggtcaccgaatttgaagacataaagagcgggtatcgcatagatttttattttgatgaaaacccttacttcgaaaacaaggtgctgagtaaagagttccacctgaacgaatccggcgatccgagcagcaagtccactgaaatcaagtggaagagcgggaaagacctgaccaagaggtcatcacaaactcaaaacaaggccagcagaaaacgccagcacgaagaacctgaatccttctttacatggttcaccgaccactccgacgcaggcgcggatgagcttggcgaagtcattaaagacgacatatggcctaaccccttgcagtactatcttgtacctgacatggatgacgaggaaggcgagggagaagaagacgacgacgacgatgaggaggaagagggtctagaagatatcgacgaggaaggcgacgaagatgagggtgaagaggacgaggacgatgacgagggagaggaaggagaggaggatgagggggaagatgactag

SEQ ID NO: 17336 - DNA, 807 bp, synthetic construct
  misc_feature 1..807: note = Description of Artificial Sequence: Synthetic coding sequence
  source 1..807: mol_type = other DNA
atggggtgtcgggacctgctgccatcactgaagcctactctgctcgaaaaagagcaacaggaagccattgaacacatcgatgaggtccagaacgagatagacagattgaacgaacaggcttctgaggagattctgaaagtcgagcagaaatataacaaattacgtcagccgttcttccagaagagaagcgaactcatagcgaagatcccaaacttttgggtgactaccttcgtgaaccaccctcaggtatcagctctcctgggagaagaagacgaggaggctcttcactacctgacgcgcgttgaggtgacggaattcgaagacattaagtcgggttacagaatcgacttttatttcgatgaaaatccgtattttgaaaacaaggtgctctcaaaggaattccatttaaatgagtccggcgatccatccagcaaatctacagagataaaatggaaatctggaaaggatctcaccaagcggtcatcacagactcagaacaaggcgtcaaggaaaaggcagcacgaggagccggaatcattttttacctggtttactgatcacagtgatgctggggccgacgagctcggcgaagtcattaaggatgatatttggccaaaccctctccaatactatcttgtgccggacatggatgatgaggagggagaaggcgaggaagatgatgacgatgacgaagaagaggagggcctggaggatattgacgaagagggcgacgaggatgagggcgaggaggatgaagacgatgacgagggggaagaaggggaagaggacgaaggggaagacgactag

SEQ ID NO: 17337 - DNA, 99 bp, synthetic construct
  misc_feature 1..99: note = Description of Artificial Sequence: Synthetic coding sequence
  source 1..99: mol_type = other DNA
atggccccgaagcgacagtcccctctgcccccacaaaagaagaaaccgaggccacctcctgccctgggccccgaagagactagcgccagcgcaggctag

SEQ ID NO: 17338 - DNA, 942 bp, synthetic construct
  misc_feature 1..942: note = Description of Artificial Sequence: Synthetic coding sequence
  source 1..942: mol_type = other DNA
atgactgggaaggctacgcccccttccctgtattcatggcgtggagtcctcttcacttgtctccctgccgctcggaccaggaagcggaaagagatgtctagacaaactgctacagctctgcccactgggacaagtaaatgtccaccgtcacagcgcgtccccgcgctgacagggactaccgcaagcaacaacgacctggccagcttgtttgagtgccctgtttgtttcgactatgtcttgccccccattctgcagtgccaatctggacatctggtgtgtagcaattgtcgccctaaactgacgtgctgtccgacctgtcgcggcccactgggcagtattcgcaacttggcaatggaaaaagtcgctaactctgttctgtttccatgtaagtatgccagctccggctgcgagattacactgcctcataccgagaaagcggaccacgaggagctgtgcgagtttcgtccttattcatgcccatgcccgggcgcctcatgcaaatggcaggggtctctggacgccgtgatgccacatctgatgcaccagcataagtcgataaccacgctgcagggggaagacatcgttttccttgccactgacatcaacctcccgggagccgtggactgggtgatgatgcagagctgcttcgggtttcacttcatgctagtcctggagaagcaggaaaaatacgacggtcatcagcaattttttgctattgttcagctgattggcacacgcaagcaagctgaaaatttcgcttatcggctcgagctgaacggacatcggcgtaggctgacgtgggaagcaaccccccgttcaatccacgaaggaattgccaccgctatcatgaacagcgattgtctggtgtttgacaccagcatcgcccagctgtttgccgaaaacggtaacctgggaatcaacgttacaatttcaatgtgctag

SEQ ID NO: 17339 - DNA, 897 bp, synthetic construct
  misc_feature 1..897: note = Description of Artificial Sequence: Synthetic coding sequence
  source 1..897: mol_type = other DNA
atggtcattattattttcctgttacccccctacgtgtttatttctgaaatgagtcgccagacagctaccgccttgcctactggtactagcaaatgtcccccgagccaaagggtgcctgcgttaaccggcactacagcttccaataacgacttggcatccctatttgaatgtccggtttgttttgactacgttctcccaccaattctgcagtgtcagtcgggacatcttgtctgctccaactgccgaccaaagttaacatgctgtcccacatgccgaggccccttaggctccatcaggaatctggcaatggagaaagtagccaacagtgtcctgttcccctgtaagtacgccagcagtggctgtgagattacccttccgcacaccgagaaggcggatcacgaagaactgtgcgaatttcgcccctattcttgcccatgtccaggcgccagctgtaagtggcaggggtccttagatgcagtgatgccccatctcatgcaccagcacaaatccattacaactctgcagggcgaggacatcgtttttctcgccactgatataaatctgccgggcgccgtcgattgggtgatgatgcagtcttgttttggattccattttatgctcgtgctggagaagcaggaaaagtacgacggccaccagcagttcttcgcaatcgtgcagcttattggcacccggaaacaggccgagaactttgcctacaggcttgagctgaacggacacagaagacggctgacatgggaagcgacacctcggtccatccatgagggaatcgcaaccgctatcatgaattccgactgtctcgtcttcgatacatccattgcccaactctttgctgaaaatggcaatctgggtatcaacgttacgatctccatgtgctag

SEQ ID NO: 17340 - DNA, 849 bp, synthetic construct
  misc_feature 1..849: note = Description of Artificial Sequence: Synthetic coding sequence
  source 1..849: mol_type = other DNA
atgtcaagacagacagccacagcgctgccgacagggacttccaagtgcccaccctcacagcgtgttccagccctcactggcacgaccgccagtaataacgacctcgcctccctgtttgaatgtcccgtatgttttgattacgtgcttccccctatcttgcagtgccagagtggccacctagtttgctccaactgtcggcccaagcttacgtgttgcccaacttgcagaggccctctggggtccataaggaatcttgcaatggagaaggtggcgaacagcgtgctttttccatgtaaatatgcatcgagcggctgtgaaatcacactgcctcatactgaaaaggctgaccatgaggaattgtgcgagtttagaccgtacagttgtccttgtcctggggcgagttgtaagtggcaaggctctctggatgctgtcatgcctcacctgatgcatcaacacaaaagcatcacgacactgcagggagaagacatcgtgttcctggctacagacattaatctgcctggagctgtagactgggtcatgatgcagtcctgttttggattccacttcatgcttgtactcgagaaacaagaaaagtatgatggacatcagcagttctttgctatagtgcaactaattgggacccggaagcaggcggaaaactttgcctacaggctcgaactaaatggacaccgacgcagactaacttgggaggctacgccaaggtcaattcacgaagggatcgcgactgcgatcatgaacagcgactgtctcgttttcgacacgagcattgcacagctgttcgctgagaatgggaacctcgggatcaacgtgaccatctcaatgtgttag

SEQ ID NO: 17341 - DNA, 708 bp, synthetic construct
  misc_feature 1..708: note = Description of Artificial Sequence: Synthetic coding sequence
  source 1..708: mol_type = other DNA
atgaccttcgaccttacgaagatcaccaagactagcagcagtttcgaggtgcgtacttgggaccccgagggagtgatattctacggagacactaatcccaaggatgattggttcatgttgggccttcgcgacggccgcccggaaattcagcttcacaaccactgggcccagctgacagtgggcgccggaccaagactcgacgatggcagatggcaccaagttgaggtgaaaatggagggcgacagcgtgctgcttgaggttgacggagaagaggtgcttcggcttcggcaggtgtctggacctctgacctcgaaacggcacccaattatgcggattgccctgggaggtctgcttttccctgcatctaatctgcggctgcccctcgtgccagcactcgatggttgcctgaggcgcgatagctggctggataagcaggcggaaatctcagcgtctgcgccaacatccttgagatcctgtgacgtcgaatccaaccctggcatctttctaccacctggaacgcaggcggagtttaatctgcgggacatacctcagcctcatgccgaaccctgggcattctcgctggacttaggacttaaacaagccgcgggtagcgggcacctgctcgctctcggcacccccgagaaccccagttggctctctttacatctgcaagaccaagagaagaccctgccgcccctgttcgcttag

SEQ ID NO: 17342 - DNA, 1209 bp, synthetic construct
  misc_feature 1..1209: note = Description of Artificial Sequence: Synthetic coding sequence
  source 1..1209: mol_type = other DNA
atggaatctcgcggccccttggctactagcagactgctcttactgctgcttctgctgctgctacgacacacccgtcagggctgggctctacgaccagtcttgccaacacagtcggctcatgatccgcctgctgtccacctttccaacggccccgggcaagaaccgatcgcggtcatgacctttgacctgactaagataacaaaaacatcaagctcgtttgaggttaggacgtgggacccggagggagtgatattctatggggacacaaatccaaaagacgactggttcatgctcggactgcgggacggacgaccagaaatccaactgcacaatcattgggcccagctcaccgtgggtgcgggtcctcgactggatgacggccggtggcatcaggtggaggtgaagatggagggcgactcagtgctactggaggtcgatggggaggaggtgctgcgactaaggcaggttagtggccctcttacgagtaagaggcaccctatcatgcggatcgcactgggaggtcttcttttccccgccagtaacctgaggctgccccttgtgccagccctggatggctgtcttagacgcgatagttggcttgacaagcaagccgaaattagtgcatctgcccctaccagcttacggtcttgtgatgtggaatccaacccaggcatcttcctgcctcctggtacacaggcagagtttaacctgagggatatccctcagccacacgcagagccatgggcctttagtctggacctggggctgaaacaggccgccggttcaggtcatctccttgccctgggaactcctgaaaacccatcctggcttagcttgcacctgcaggatcaaaaagtagtgctgagtagtggaagcggaccagggcttgacctgccactggtcctggggttacctttacagctaaagctgtcgatgagtcgtgttgtgctttctcagggttccaagatgaaggccttagctctcccccctctcggacttgctcctctcctcaatttatgggccaagcctcagggacgcctcttcctgggagcccttcctggggaagattctagcacctcgttctgcctcaacggtctgtgggcccagggtcagcgtctggacgtcgatcaagccttaaacagatcccatgaaatctggacccacagttgccctcagtcccccgggaatgggaccgatgcatcacactag

SEQ ID NO: 17343 - DNA, 882 bp, synthetic construct
  misc_feature 1..882: note = Description of Artificial Sequence: Synthetic coding sequence
  source 1..882: mol_type = other DNA
atggaaagccggggcccgctggccacgagtcggctgctgcttctcctacttctgctcctgttgagacatacaagacagggatgggccctccggccggtgctgcccacccaatcggcccacgatcctcccgccgtgcatcttagtaatggaccagggcaggaacccattgccgtgatgacgttcgacctgaccaagatcacgaagaccagttcatcttttgaggttaggacctgggatccagagggtgtgattttttatggtgacacaaatcctaaggacgactggttcatgttgggactgcgggacgggcggccagaaatacagttgcataaccactgggcgcagctgacggtgggagcgggtccaagactggacgacggccgatggcatcaggttgaggtgaaaatggaaggggactctgtcttattggaggttgacggggaggaagtcttgcggctccgccaggtctctggtcctctcacctcaaaacgccatcctatcatgaggattgcgctggggggcttgctgttcccggcttctaacttgcggttgcctctggtccctgcactcgacggatgtttgcggcgtgactcttggctagataaacaagcagagatctctgcatcagctccaactagtctgcgaagctgcgacgtagaatcgaatcccggaatctttttacctccgggaacgcaggcagagtttaaccttcgggatataccccagcctcacgccgaaccatgggctttctcacttgacttaggactcaaacaggcggcgggaagcggtcatcttctggctttgggtacccctgaaaacccgagctggttgtccctgcatctgcaggaccaggaaaagaccttgccaccactatttgcttag

SEQ ID NO: 17344 - DNA, 720 bp, synthetic construct
  misc_feature 1..720: note = Description of Artificial Sequence: Synthetic coding sequence
  source 1..720: mol_type = other DNA
atggaatctcggggccctcttgctacgtccagactgctcctcctcctgctcctgctgctgctgagacacacacgccaggggtgggctctccgcccagtcttgcctacccaaagcgcgcacgatccgcctgccgtgcacctgtccaatggaccaggccaggaacctatagctgtcatgacattcgatctgacaaagattactaagaccagtagctctttcgaggtgagaacatgggatcccgaaggcgttattttctatggagacacaaatcctaaagatgattggtttatgttaggactgagggacgggaggcctgaaatccagctgcacaaccactgggcccagctgaccgtgggggcggggccgaggctcgacgatggacgctggcatcaactggttccagccctggacggttgcctgcgaagggactcatggcttgataagcaggccgagatctccgcaagcgcaccgacctctttgaggagttgcgatgtggaatccaaccctggaatctttctccctcctgggacccaggcggaatttaacctacgagatattcctcagccacacgcagaaccctgggccttctctctagacctaggacttaagcaggctgctgggtccggccacctgctcgccctggggactccagaaaatccatcgtggctgtcccttcacttacaggaccaggagaagacactgccacctctttttgcatag

SEQ ID NO: 17345 - DNA, 864 bp, synthetic construct
  misc_feature 1..864: note = Description of Artificial Sequence: Synthetic coding sequence
  source 1..864: mol_type = other DNA
atggaatctcgcgggccactggcaacctctcggttgctattgcttcttttgctactgctgctgagacacactaggcagggttgggcccttcggcctgtgttacccacacagtccgcccacgacccgcccgctgtacacctaagtaacggtcccggtcaagagcccatcgctgtcatgacttttgatcttacaaaaatcacgaaaactagctctagcttcgaggtgagaacttgggaccctgagggcgttatcttttatggtgacaccaatccaaaggacgactggtttatgctcggactcagggacggccgacccgagatccagctgcacaatcattgggcccagctgactgtcggggctggccctcgtctagatgatggacggtggcatcaggtggaggttaagatggaaggtgatagcgtgctcttggaggttgacggcgaggaggtgcttaggttacgccaggtgagtggcccactgacatccaaaagacatcccatcatgcgtatagccttaggcggcttacttttcccggccagtaatctacgcctccctttggtacccgcactagacgggtgtctgaggcgcgattcatggctcgataagcaggctgagatcagtgcatctgcgcctacatcgctccggagttgtgacgtggagagtaacccagggatctttctgccaccagggactcaggccgaattcaatctccgcggagaggacagtagcacgtctttctgtctgaatggactctgggcccagggccagcggctcgatgttgatcaggcactgaatcggagccacgaaatctggacgcatagctgcccacaatcccccggcaatggtactgacgcatcacactag

SEQ ID NO: 17346 - DNA, 423 bp, synthetic construct
  misc_feature 1..423: note = Description of Artificial Sequence: Synthetic coding sequence
  source 1..423: mol_type = other DNA
atggaatcacggggtcctctcgcgacgagcagattattactcctcctattattgttgctgttacgtcatacacgccagggatgggccctcaggccagtgctgcctactcaatctgcccacgatcctcctgccgtgcacctgtctaatgggcctggccaggaaccaattgcagtgatgacatttgacctcacaaagattacaaaaacttcaagcagtttcgaggtgcggacgtgggaccctgagggagtcatcttttatggtgacactaatcctaaagacgactggttcatgctcggattgcgggacggcagacctgaaattcagttgcacaaccactgggcgcagctgacagtgggtgctggcccacgcctagacgacggccgttggcaccaggagaagaccctgcctcccctctttgcctag

SEQ ID NO: 17347 - DNA, 1155 bp, synthetic construct
  misc_feature 1..1155: note = Description of Artificial Sequence: Synthetic coding sequence
  source 1..1155: mol_type = other DNA
atggagtcacggggcccgttggccaccagtcgactacttctgctcctactgctactgttacttagacacacccgacagggctgggctctgcggcctgtgctgccaactcagtcagcccatgatccacccgccgttcatctcagtaacggacccggacaggagcctatagccgtcatgacatttgatctgacaaagatcaccaaaaccagttcttcctttgaagttagaacttgggaccctgagggagtgattttctacggcgatacgaatcctaaggacgactggttcatgctgggccttcgggatggcaggcctgaaatccaactccacaatcactgggcacagctgactgtcggagcaggcccacgcttagatgacggtcgctggcatcaggtggaggtgaagatggagggggattcggtcttgttggaagttgatggggaagaggtccttagattgaggcaggttagcggaccactaacttcgaagcgacaccccataatgaggatcgctctcggaggccttcttttcccagcttctaacttacggctccctgccgagatctccgcaagtgcccctacctcattaagaagctgtgatgtagagtccaatccagggatttttctgccacctggtactcaggccgagtttaatctccgcgatatccctcagcctcacgccgagccttgggccttttctctcgacttgggcctgaagcaagccgcagggagcggacatctgttggccctgggtacccctgagaatccctcatggctttcacttcacctgcaggaccagaaggtggtactgtcaagcgggagcggaccagggttagatctgcccttagttctcggccttccgctccaactaaagctgtccatgagtcgtgttgttctctcccaagggagtaagatgaaggccttagccctgccccctctcggccttgcccctctgctgaatctgtgggctaaacctcagggacgtttattcttgggcgccctccccggcgaagactcttcaacttcattctgtctgaatgggctttgggcccaggggcagcgattggatgtggaccaggctctcaaccgatcccacgagatttggactcactcatgtccacagtctcctggtaatggaaccgacgccagccactag

SEQ ID NO: 17348 - DNA, 1116 bp, synthetic construct
  misc_feature 1..1116: note = Description of Artificial Sequence: Synthetic coding sequence
  source 1..1116: mol_type = other DNA
atgtcaccgtcaacgtttcagattaccgacatgacacgccggagttgccagaacttgggctacactgctgctagccctcaagcccctgaggccgcaagcaatactggcaacgccgagcgagccgaagaggttcctggcgaagggtcattgttcctgcaagccgagactagggcttggttccagaagacccaggctcactggctcttgcagcatggcgccgctcctgcttggtttcacggctttatcaccagacgggaggctgaaaggctgctggaacccaagccacaaggctgctatctcgtgcggttctcagaatcagctgtgacttttgtgctcacatacagatcgcgcacctgctgtaggcacttccttctggcgcagctgcgcgacgggcgccatgtagtattaggtgaagactctgcccacgccagactgcaggacttgcttctacactatacggcccatcccctcagcccatacggtgaaaccctgaccgaacctctggcgcggcaaactccagagcctgctggactctcgctccgaacagaggaatcaaatttcgggagcaagtcccaggaccctaacccacagtactcacccattataaaacaagggcaagctcccgtgcccatgcagaaggagggagctggggagaaggaaccatcacaactgttaagaccaaagccccctatcccggccaagcctcagctcccgcccgaagtctataccataccagttcctcggcataggcccgccccccgaccgaagccaagcaatcccatttacaatgagcctgatgagccgatcgctttctacgctatgggcagaggttccccaggcgaagcaccctctaacatctacgttgaagtcgaggacgaggggctcccagcaaccctggggcaccctgttctgcgaaagagctggtctcgacccgtgccaggaggacagaacactggagggtctcagctgcacagtgagaatagtgtgatcgggcagggaccacctctgccccaccagcccccccccgcttggcggcatacgctacctcacaacttatctcgccaggttttacaggatcgaggtcaggcttggcttcctcttggaccacctcagtag

SEQ ID NO: 17349 - DNA, 1170 bp, synthetic construct
  misc_feature 1..1170: note = Description of Artificial Sequence: Synthetic coding sequence
  source 1..1170: mol_type = other DNA
atggagttcccactagcccagatttgcccccaaggctctcatgaggctccaattcctaccttttctacatttcaaatcacggacatgacacggaggtcctgtcagaacctcggttataccgctgcaagccctcaggccccagaggccgcaagtaacacaggcaacgcagagagggccgaagaagtgcctggggagggctccttgtttctgcaggccgagacaagggcctggttccagaagacccaggcccactggctgctgcaacacggggcggctcctgcatggtttcacggatttatcacccggcgagaagctgaacggctgttggaacctaagccacaaggctgctaccttgtgcgcttttccgaatccgctgtgaccttcgtgttgacttaccggtcacggacttgttgccggcatttcttgctggcacaattgagggatgggcgtcatgtcgtcctgggcgaggactccgcacatgccaggcttcaggatctcctgttacattatacagctcacccactgtcaccctacggagaaactcttaccgaaccactggctcgacagacacctgaacctgccgggttgtcactccggacagaggagagcaattttggcagcaagagtcaggaccctaacccccagtattcacccataattaaacaggggcaggcaccagtccctatgcaaaaggagggcgcgggggagaaggaaccttcacagctcctgcggcctaaacccccaattcccgctaaacctcaactgccaccggaagtctacacaatccccgtaccgaggcatcggcctgctcctcgccctaaaccaagtaatcccatctacaatgagcccgacgagccaatcgcattctacgctatgggcaggggttccccaggcgaggcgccctctaatatttatgtcgaggtggaggacgaaggcttgcctgccaccctggggcatccggttttgcgcaaatcgtggtctcgtcccgttccaggcggccaaaatacaggtggctctcagctgcacagcgagaactcagtgataggccaggggccccccctcccccaccaaccccctccagcctggagacatactttaccccacaacctttcaaggcaggtcctgcaggataggggacaggcctggctgccactgggaccacctcagtag

SEQ ID NO: 17350 - DNA, 1200 bp, synthetic construct
  misc_feature 1..1200: note = Description of Artificial Sequence: Synthetic coding sequence
  source 1..1200: mol_type = other DNA
atggagttcccactcgcccagatctgtccccaaggctcccacgaggcgccaatacctacatttagcactttccaaatcacagatatgacgagaagatcctgtcagaacttaggatacacagctgctagtccccaggcaccagaagctgcttcaaataccggaaacgccgagagggccgaagaagtccctggcgagggctccttatttctgcaggctgaaacccgagcatggtttcagaaaactcaggcacactggctccttcagcatggggctgcacccgcctggtttcacgggttcatcaccagacgcgtgcggcctccgctttcagtgacacacagagaggctgagcgcctcttagaacctaagccccagggatgctacttggtgagattttccgaaagtgctgtgaccttcgtcctgacctacagatcccgaacatgttgtcgacatttccttctggcacagctgcgggacggccgtcatgtggtcctgggcgaagattctgctcatgcccgccttcaggacctcctcttgcactatacagctcatccgctgagcccatatggagagaccctgacagagcccctcgccagacagaccccagagcccgccggcctgtcgctccggaccgaagagagcaactttggctccaagagtcaggacccgaatcctcaatacagtcctattatcaaacagggtcaggccccagtaccaatgcaaaaagaaggggccggtgagaaggaacccagccagctgctcaggcctaagccacccatccccgcaaaacctcagctcccgcctgaggtgtataccatacccgtaccacggcaccgcccggcccctagacccaagccaagcaacccaatatacaacgaacccgatgagcccatcgccttttacgcaatgggaagaggttctccaggcgaagcgccgtctaatatctatgttgaggtggaagatgaaggcctccctgccacgttggggcacccagttctgagaaagtcttggtctcgcccggttcctggcggtcagaatacaggtggctcccaattgcacagcgaaaattcagtgattggacagggtccccccctgccacatcaacctcctcccgcatggcggcacacgctcccccataatctgtctcgccaggttctccaagacaggggtcaggcctggcttcccctgggacctccccaatag

SEQ ID NO: 17351 - DNA, 2823 bp, synthetic construct
  misc_feature 1..2823: note = Description of Artificial Sequence: Synthetic coding sequence
  source 1..2823: mol_type = other DNA
atgattttggaacagtatgtggtagtgtcgaattacaagaaacaggagaactccgaactgtctctgcaggctggagaggtcgtcgatgtgattgaaaagaacgagagtggctggtggttcgtcagcacttcagaggagcagggctgggtcccagcaacgtatttggaagcacagaatggaactcgggatgacagtgatattaacacgtctaagacgggggaagaggagaagtacgtcacagtccaaccatacacatcacaaagcaaagatgaaattgggttcgaaaagggtgttaccgtggaggtgatccggaagaacctcgaaggctggtggtacatccgctatctcgggaaggaaggatgggcgccagcttcatatctgaagaaagccaaagacgacctgcctacacggaagaagaacttggctggacccgttgaaatcatcggcaacattatggaaatctccaacctactgaacaagaaagcctcgggcgataaggagacccctcctgctgaaggagaagggcacgaagcccccatagctaaaaaagagattagcctgccgatcctttgcaacgcttctaacggttcagcggttggcgtgccagaccggactgtatcccggctggctcaagggagtccagcagtggcccggatcgctccccagcgcgctcagatatcttctccaaatttgagaacgcgcccaccacccagaagggagtcttcactggggtttcagttgcctaaacctccagaaccgcccagcgttgaggttgaatactacaccatcgccgagtttcaatcctgcatcagcgacggaatcagcttccggggcggccagaaggctgaggttatcgataaaaactccggcggctggtggtacgtccagattggcgaaaaagaaggctgggcgccagcttcatatatagataaaaggaagaagccaaacttgtctaggagaacctccacactgacccgccccaaggtgccaccccctgcacccccttccaaaccaaaagaggccgaggaagggcccacaggcgccagcgaatcccaggatagccctcgcaagttgaagtacgaggaacccgagtacgacattcccgctttcgggtttgattccgaaccagagttatccgaggagccagtagaagacagggcatcgggggagagacgccccgcccagccacacagacccagtcctgcttcctctttgcagagagctcgattcaaagtgggcgaaagctctgaagatgttgccctcgaagaggagaccatctacgaaaacgaaggctttaggccttatgctgaagacaccctcagcgctcgcggctcgtctggggattccgacagccccggaagctcctctcttagcttgacacgcaagaacagtccaaaatcgggctctcccaaatcttcttccttacttaagctaaaggctgagaaaaatgcgcaggctgagatggggaaaaaccattcctccgccagttttagcagcagtattaccatcaacaccacatgttgttcttcctctagctcttcttccagtagcctctcgaagacatccggagatcttaagccacgtagcgcatccgacgcaggcatccggggcacacccaaggttcgagcaaaaaaggacgctgatgccaatgccggtctgactagctgccccagggccaagccatccgtgaggccaaaaccttttttaaatagggccgaaagccaatctcaagaaaagatggacataagcacgctgaggcgccagcttaggcctaccggccagctgcgggggggactaaaaggtagcaagagcgaggacagcgaattgcctcctcagaccgcctctgaggccccgtctgaaggaagccgccgttcttcttctgatctaattactctccctgccacaacacctccctgccctacaaagaaggagtgggaaggcccagcaactagttacatgacctgttccgcctaccagaaggtccaggactctgaaatctcgtttccagccggagtggaggtgcaggtgctcgagaagcaggaatctgggtggtggtatgtcaggtttggagaactcgagggatgggccccgtctcactacctggttttggacgagaacgagcaaccagatcctagcgggaaagagctggatacagtgcccgcgaaaggacgccagaacgaggggaagagcgattccctcgaaaagatcgagagacgggtgcaagcactgaacacagtcaaccagagcaagaaggcaaccccgccaattccttccaagcccccgggaggattcggtaagacttccggtacacccgctgtcaaaatgcgcaacggggtccggcaagttgccgtgagacctcaaagcgtgtttgtgtcccctccaccgaaggacaacaacctcagctgtgccctgaggaggaacgagtcgctgaccgccaccgatggcctgcggggggtgcgccggaacagttccttcagcacagcacgtagtgctgccgccgaagccaaggggaggctcgccgagagggcagcttctcagggcagcgacagtcctctgctccctgcacagagaaattccatccctgtgagcccagtgcgacctaagcctatcgaaaaatctcagttcattcacaacaaccttaaagatgtgtacgtgtctatcgctgactatgaaggcgacgaagagacggccggctttcaagaaggggtcagcatggaagtgctcgagcggaatcccaacggctggtggtactgccagatcttagatggcgtaaaacccttcaaaggatgggtgccatccaactatctggaaaaaaagaattag

SEQ ID NO: 17352 - DNA, 3318 bp, synthetic construct
  misc_feature 1..3318: note = Description of Artificial Sequence: Synthetic coding sequence
  source 1..3318: mol_type = other DNA
atgctcgcttactgtgttcaggatgcaaccgtggtggatgtggaaaaacggcggaatccttcaaaacactacgtctacattattaacgtgacttggtcagactcaacctcacagactatctaccgacgctatagcaagttttttgacctgcagatgcagttgctcgataaattccccattgagggtggccagaaggatcctaagcagcgaatcattccctttctgcccggcaaaatcctgtttcggaggagtcatatcagggatgttgcagtgaagaggcttaagccgattgatgaatactgtagggctttggtgcggctcccaccccatatctcccagtgcgacgaggtctttagattctttgaagcccgcccagaggatgtcaacccacctaaggaagattatggctcctctaagcgcaagtccgtgtggctgtcgagttgggctgaatctcccaagaaggatgtcaccggggctgacgctaccgctgaaccaatgatcctggagcagtatgtcgttgtgtcaaattataagaagcaagagaatagtgagctctcactgcaggcgggtgaagtggtcgatgtgattgagaaaaatgaatcaggatggtggttcgtcagcacgtctgaggagcagggatgggtgccggccacatacctggaagctcagaatggcaccagggatgactccgacattaatacctcgaagaccggggaggaggaaaaatatgtaacagtacagccctacacctcacagtccaaagatgaaattggatttgagaaaggagttactgttgaggtaatccggaaaaacctggaggggtggtggtacatcagatacctgggcaaagaaggctgggcacccgcctcatacctgaagaaggccaaagatgatctgcctacaagaaagaaaaatctggccggtcccgtggaaataataggcaacattatggaaatctcaaatctcttgaataagaaggcttccggagataaagaaacacccccagcagaaggcgaagggcacgaggcgccaatcgctaagaaggagattagtctgccaatactgtgcaatgccagcaacgggagtgcggtgggggtgcccgacagaacggtcagccggttggctcaggggtccccggcggtcgcgagaatcgctccccagagggcccagatttccagccctaatctgcgcacccgccctcccccgcgcagagagagttcactggggtttcagctgcccaagccacccgaacctccaagcgtggaagtcgagtattacaccatcgccgaattccaatcctgtatctcagatgggatttcttttagaggaggccaaaaggcggaagtcatcgacaaaaattctggcggctggtggtacgtccagattggtgagaaggaggggtgggccccagccagctacattgacaaacggaaaaagccgaatctgagccgtcgtactagtacactgactcgccctaaagtccctcccccagctcccccctctaaacctaaagaggccgaggagggacccacaggagctagcgagagccaggacagtccccggaaactgaaatacgaagagccagaatacgatatccccgcatttgggtttgacagtgagccagagctctctgaggagcccgtggaggatagagctagtggcgagaggcggcctgcccagccccatcgcccgtcccccgctagcagcctgcagcgggcaagattcaaagttggcgagtccagtgaagatgtggcactggaggaggaaacaatctatgagaacgaagggttcaggccttatgctgaggatacattgtctgcaagaggcagcagtggggatagtgacagccctggctccagcagcctctcgctcactcgtaagaactcaccaaagagcggatctcccaagtcctcatccctgctcaagttgaaggccgagaagaatgcacaggccgagatgggaaagaatcactccagcgcaagtttttcttctagcatcaccatcaatacaacatgttgctcctcaagctccagcagttctagctctttgtctaagacaagtggtgacttgaaaccgcggtcagccagcgacgcagggatacgcggtactcctaaagtgcgcgctaaaaaagatgccgatgccaatgcggggctgacgagctgtccgagggctaaaccttccgtgagacctaaaccatttttgaatagagcagagtcccagtctcaagagaagatggatattagcacattgaggaggcagctccgtcctactgggcagctaagagggggtctcaaaggatccaagtcagaggattctgagctccctccccagaccgcttccgaagccccatcagaggggtcccggaggagctctagtgacctcataacattgcccgctaccacccctccctgcccaacaaagaaggaatgggaaggacccgccacaagttatatgacatgttccgcatatcagaaggtacaggacagcgaaatatcgtttcctgcaggggtggaggttcaggtgttggagaagcaggaatccgggtggtggtacgtgcgatttggggagttggaggggtgggctcctagccactatctcgtcctggacgagaatgagcagcccgacccatccggcaaggaactggataccgtccccgctaagggacgccaaaacgagggtaagagcgactctcttgaaaaaatagagaggagggtccaggctctcaacaccgtgaatcagtctaaaaaagccacccctccaatcccctccaagccacctggcggatttggcaagacttcaggaacaccagccgtgaaaatgcggaacggtgtgcgccaggtcgccgtgagacctcagtccgtgttcgtatccccgccccctaaagacaataatttgtcttgtgcacttagacgaaacgagtctcttacagctaccgacggcttgcggggcgttcggaggaattccagtttcagcactgctaggtccgccgctgctgaggctaaaggcagacttgcagaaagagccgcatctcaggggtccgattcacccctgcttcccgcacagcgaaactcgattcctgtgtcccctgtgcgaccaaagcccattgagaaatctcaattcattcataataatctgaaagacgtttacgtgagtattgctgattacgaaggtgacgaggagacagcaggtttccaggagggagtgagcatggaggtcttagagagaaatcccaatggctggtggtactgccagatccttgacggtgtgaagccgtttaaggggtgggttccatccaattatctggaaaagaaaaattag

SEQ ID NO: 17353 - DNA, 3402 bp, synthetic construct
  misc_feature 1..3402: note = Description of Artificial Sequence: Synthetic coding sequence
  source 1..3402: mol_type = other DNA
atgctagcatattgtgttcaggacgccaccgtggtggacgtcgaaaaacggaggaatccaagcaagcactacgtctacatcattaacgttacgtggtcagattccacttcccagaccatttatcggagatacagcaagtttttcgacctgcagatgcaactgctggataaatttccgatagaaggtggccagaaggatccgaagcagagaattatcccatttctgccaggtaagatcctattccggcgcagccatatacgggatgtcgccgtgaaacggctcaagcctattgatgaatattgtagagctttggtcaggctgccacctcatatctcccaatgtgacgaggtgtttcggtttttcgaagcccgcccggaagacgtcaaccctccgaaggaggactacggctcgtcaaaacggaaatcagtctggttgtcgtcatgggccgagtcccctaagaaggatgtgactggggccgatgccacggccgagccgatgatattggagcagtacgtcgtagttagcaactacaaaaaacaagaaaacagtgaactatctctgcaggccggcgaggtcgtcgacgtgatcgaaaagaatgagagtggttggtggttcgttagcaccagcgaagagcagggctgggtgccagccacttacctcgaagcccagaatggaactagagatgactcagatatcaacacatctaagaccggcgaagtgagcaaacgacgcaaagctcatctgcgcaggcttgaccgccgctggaccctgggtggcatggtaaaccgacagcattctagggaggaaaaatatgtgaccgtccagccatatactagccagtccaaagatgagatcgggtttgaaaagggcgttactgtggaagttattagaaaaaatctagagggatggtggtacattcggtatctgggcaaggaggggtgggcccccgcctcgtacctgaagaaggcaaaggatgacctcccaacccggaaaaaaaacctggctggaccagttgagataattggaaatattatggagatctcgaaccttctgaacaaaaaagccagcggtgataaggagacaccacccgctgagggggagggtcacgaggcccctatcgccaaaaaagagattagtttacctattctgtgtaacgcctcgaacggctcagccgtcggggtgccagatagaaccgtgagccgcctcgcccagggctcacccgcggtcgcaaggatagctcctcagcgagctcaaatctccagccccaaccttcgtacaagacctccaccccgtcgcgaatcatccctgggcttccagctgccaaagccaccagaaccaccctctgtcgaggtagaatactatacgattgctgagttccagtcttgcattagcgatgggatctctttccgcggtggacagaaggctgaagtgatcgataagaatagtggcggatggtggtatgtccagattggcgagaaagaaggatgggcgcctgcctcctatatcgataaacgcaaaaagcctaatctgtctagaaggacaagtaccctgacaagaccaaaagttcccccccccgcgcctcccagcaagcctaaggaggctgaagagggccctaccggggcctccgaaagtcaagactcacctagaaagctgaaatacgaagagcctgagtacgatattcccgccttcgggttcgactctgagcccgaactcagtgaggagcccgtggaagaccgggcctccggcgaaagacgcccagcccagcctcaccggccttcacccgcctcttccttacaacgcgcccggttcaaggtaggtgaatcgtctgaggacgttgccttggaagaggagacaatctatgaaaatgaaggattcagaccctatgctgaggataccctgtctgctcgtggctcctctggcgactccgacagccctggaagttcttccctcagcttgacccgtaagaatagcccgaaaagcggcagcccaaagagctcctctctcttaaagctgaaggctgaaaagaatgcccaggctgagatgggaaaaaatcactcatcagcgtcattttcatcaagtattactattaacacaacatgctgcagtagtagctcctcaagcagcagctcgctgtctaagaccagcggcgatctcaagccgcgctcagcctctgatgctggcatccgggggacgcccaaggtcagagctaaaaaagacgctgatgcaaacgccggcttaacctcctgccccagagctaagcccagtgtgaggcctaagcccttcctgaatagggcagagagccaatcacaggagaaaatggatatcagtacacttcggagacagcttagacctactggccagcttcgcggcggactgaagggctcgaaatctgaagattctgaactcccaccccagactgcgagtgaggctccctccgaggggagtaggcgaagctcatcggacctaatcactctccctgctacaacacccccttgtcctaccaagaaggagtgggaaggtcccgcaacttcctatatgacctgtagcgcgtatcaaaaggtgcaagatagcgagatctcctttcctgcgggggtagaggtacaagttttagagaagcaggagtctggctggtggtacgtgcggttcggcgagttagagggttgggcccccagtcattatctcgtgctcgacgagaatgagcaaccagacccctccggtaaagaactggatactgtcccagctaaggggcggcagaatgaagggaagagtgattccctagaaaaaatcgagcgtcgagtgcaagcactcaacactgttaaccagtcaaagaaagctaccccccctataccttccaagccaccgggtggatttggaaagaccagcggtactcccgctgtcaagatgaggaacggtgtacgccaggttgctgtcagaccacagtcagtgttcgtgtccccacccccaaaggacaacaatctttcctgcgccctgcggagaaacgaatcccttaccgccactgacggtctgcggggggttcgccgaaacagttcattctccaccgcacgatctgctgccgctgaagctaagggaaggctcgccgagagggcagcctcccagggcagcgatagcccactactgccagctcaacgcaactccatccccgtgtcacctgtcagaccaaagccaatcgaaaagtcacagttcatccataacaacctgaaagatgtgtatgtttctattgcagactatgaaggcgacgaagaaactgctggatttcaggaaggcgtctcaatggaggtcttggagagaaatcccaatgggtggtggtattgccagatcttagacggcgttaaaccttttaagggttgggttccaagcaattacctggaaaaaaagaactag

SEQ ID NO: 17354 - DNA, 3183 bp, synthetic construct
  misc_feature 1..3183: note = Description of Artificial Sequence: Synthetic coding sequence
  source 1..3183: mol_type = other DNA
tgattttttgacttgcaaatgcagttactggataaatttcccattgagggaggacagaaagatccaaagcaaaggatcattcccttcttgccgggtaaaatcctgtttaggagatcgcacatccgggacgtggcagtgaagagactgaaaccaatcgacgagtactgtagggcactggtgcgcttgcctccgcatatcagtcagtgtgatgaggtgttccgtttctttgaagctcgccccgaggatgtgaatccaccaaaagaggactacggatcctccaaacgcaaaagtgtgtggctttccagttgggccgagagccctaagaaagatgttacaggggccgatgccacggctgagcctatgatcctggagcagtacgtagttgtcagcaattacaaaaaacaagaaaattctgaattatcactccaggccggtgaggtggtagatgtcattgagaaaaacgagtcggggtggtggtttgtatctaccagtgaagagcagggatgggtgcccgctacctatttggaggctcagaatgggacccgggacgactctgatatcaacactagtaagaccggagaggaggaaaaatacgtaaccgtccagccctatacgagccagtctaaagacgagatcgggttcgaaaagggagtgacagtggaggtcattcggaagaatctcgagggctggtggtacataaggtatcttgggaaagaaggctgggcgcccgcctcctacctgaagaaagctaaggacgacctcccgacacgtaagaaaaatctcgccggacccgtggagataatcggtaacattatggagatctctaatctgctcaacaagaaggcgagtggcgataaggagaccccgcctgctgagggagagggtcacgaggccccaatagcgaagaaggagatctccctgccaatcctctgcaacgctagcaacggatctgccgttggtgtgccggataggaccgtcagccgactggcccagggaagccccgccgtggcccggatagcacctcagagggcccagattagttccccaaatctgaggactcgacctcctccccggagagagagcagcttggggttccagctccctaaaccccctgagccgccgtcagtggaggtggaatattatacaattgcagagttccagtcttgcatcagcgacgggatcagttttagaggcggccaaaaagcggaagtcatagacaagaactctggtgggtggtggtatgtgcagattggcgaaaaggaggggtgggcacctgctagctacatcgataagcgtaagaaacccaatctgtctaggcgtacgtcaactctgaccaggccaaaggttcccccgcctgccccaccctccaagcccaaggaagcggaggaaggaccgactggagcgtctgaatcccaggattctccccggaagttaaaatacgaagagcctgagtacgacatcccagctttcggctttgattccgaacctgaactgtccgaggaacccgtggaggacagagccagtggagaacgcaggcctgcacagcctcatcgaccttcacccgcatcatccctgcaacgagcccgatttaaggtaggcgagagctcagaggacgtggcgcttgaggaggagacaatttatgaaaatgaaggtttccggccgtacgcagaagataccctcagcgcccggggttcaagcggggacagtgactccccagggtcgtcctcgctgtcattaactcggaagaattcccccaagagcgggtctcccaaatcctcctctctactgaagttgaaggctgaaaaaaacgcgcaagctgaaatggggaagaatcattccagtgcaagcttcagttccagtattaccattaacactacttgttgctcatcttctagttctagcagctcttcgctgtccaaaacctccggcgacctgaagccccgctcagccagcgatgcgggcataagaggaaccccaaaggtgcgagctaaaaaggatgcagacgccaacgcagggctgaccagctgcccacgagccaaaccctcggtgcgcccaaagcctttcctcaatagggcagaatcccaatcccaggagaaaatggacattagcaccttacgtcggcagctgcgtcccacggggcagctcagggggggattgaaaggaagcaagagcgaggattccgagctgccccctcagacagcttcagaagcaccctccgaggggtctaggcgcagctcctccgatctaattacgttgcccgcaaccaccccaccatgtcccaccaagaaagagtgggaaggacctgcaaccagctatatgacatgttcggcctatcaaaaggtacaggactcggagatcagctttcctgcgggagtagaggtacaggttctcgaaaagcaagaaagcgggtggtggtacgtaagattcggcgagttggaggggtgggccccttctcactacctggtcctcgatgagaacgagcagcccgatccgagcgggaaggaactggatacagtgcccgctaaaggcagacaaaatgaggggaagtcagatagtctcgaaaagatcgaacggagagtgcaggccctgaacacagtgaaccagtcaaagaaggccaccccacccatcccatcaaaaccaccaggaggtttcggaaagacttcgggtacccccgctgtgaaaatgcggaacggtgttaggcaagtcgctgtgagacctcagtccgttttcgtgtcacctccgcccaaggacaataatctgtcctgcgctctgcgtaggaatgagtccctgacagctacggatgggctcagaggcgtgagaaggaattcgtccttctcaactgccaggtccgcagcggctgaggcgaagggtagattggctgaaagagctgcaagccagggttccgatagccctctgctacccgcccaaagaaacagcatccccgtgagcccagttaggcccaagcctatcgagaaaagtcagtttatccacaataatctcaaggatgtgtatgtttccatcgctgactacgaaggcgacgaagagacggccggcttccaagagggcgtgtccatggaggtgttagagagaaaccccaatggttggtggtattgccaaattttagacggcgtgaaaccgttcaagggctgggtcccatccaattacctggaaaaaaaaaactag

SEQ ID NO: 17355 - DNA, 1110 bp, synthetic construct
  misc_feature 1..1110: note = Description of Artificial Sequence: Synthetic coding sequence
  source 1..1110: mol_type = other DNA
atgagcatctgctgctgctttttcttcagggactacgggtctagtaagcgtaaaagcggcgctgacgccaccgcagaacctatgatcctcgagcaatatgtggttgttagtaattacaaaaagcaggaaaactctgagctttccttgcaggccggggaggtggtcgatgttatcgagaagaatgagtccggatggtggtttgtgtctacaagcgaggaacagggatgggtcccggccacatatctcgaagcccagaacggaaccagagacgacagcgatataaatacgtctaagaccggtgaagtatctaaaagacgaaaggcccacctccggagactcgaccgcagatggacactgggtggcatggtcaacaggcaacattctcgagaggagaagtacgtgaccgttcagccctacaccagtcagtcaaaagacgaaatcggtttcgaaaaaggagtgacagttgaggtcatccggaagaatctggaagggtggtggtacattcgataccttggaaaggaagggtgggccccagccagttacctcaaaaaagctaaggacgacctgccaactcggaagaagaacctggccggtcctgtagagataataggcaatatcatggaaatttcaaatctactcaacaaaaaggcatctggtgataaagagacccctcctgctgaaggcgaaggccacgaagcgcctatcgccaaaaaagaaataagccttccaatattgtgcaacgctagcaatggatctgcggttggtgttccggacaggaccgttagccgattagcccaggggtctcccgcggtagctcgtatcgcgcctcagagagcccagatctcttctcccaacctgcgaactagaccacctcctaggagagaaagctccttgacagagagcaggtgtaggcaagctggcgtgcagtggcacgatctgggtagtctgcagtcaccacacccccgtttcaaacgatttagttgcctctcgctgctctcatcatgggatcacaggcacatgccaccgcaccctgccaatttcttgatttttctgattgagacagggttccaccacgtgggccaggacggcctacacctactgacctcctag

SEQ ID NO: 17356 - DNA, 2898 bp, synthetic construct
  misc_feature 1..2898: note = Description of Artificial Sequence: Synthetic coding sequence
  source 1..2898: mol_type = other DNA
atgcccgtgactgctactgggaagatactttttagacgttcgcatattcgtgacgttgctgtgaaaaggctaaaacccatagacgaatattgccgagcactcgtgaggctgccccctcatatttctcagtgtgacgaagtgtttcgctttttcgaagccagacctgaggatgtgaaccccccaaaagaggactatggtagctcaaaaaggaagtctggcgccgacgctacagctgaacctatgattttggagcagtacgtcgtagtgtccaactacaagaagcaggagaactccgagctctcactgcaagctggggaagtcgtggacgtgattgaaaaaaacgagagcggctggtggtttgtgtccactagcgaggagcaggggtgggtgcccgcaacctacttagaggcccaaaatggtacacgcgatgacagtgacatcaatacaagcaagacaggcgaggtcagtaaaagacggaaggcccatttgaggcgactcgaccgcaggtggacactcggcggcatggtgaatcggcagcactcccgcgaggagaaatatgttaccgtgcagccttacacatctcagagtaaggatgagattggattcgaaaagggtgtcaccgttgaggtgattcggaaaaaccttgagggctggtggtacatcaggtatctagggaaggaaggatgggcccccgccagctatctgaagaaggcaaaggacgatctcccaaccaggaagaaaaacctcgccggccctgtagagattattggtaacatcatggaaatctctaatctcttgaacaagaaggccagtggcgataaggaaacgcctcccgcagagggcgaaggccacgaggcgcccattgcaaaaaaggagatttccctgcctattctctgcaatgcttcaaacgggtccgccgtgggcgtccctgaccgaacagtctcccggctggcacaggggagtcctgccgtagcacgcatcgccccacagcgagcccagattagttcgccaaatctgcgcacaagaccccctccgcggcgggaatcttccttaggcttccagcttcccaagcctccggagcccccatccgtggaggtggaatattacactattgccgaatttcaatcttgtatcagcgacggcatttcattcaggggaggtcagaaggcagaggtgatagacaagaatagtggcgggtggtggtatgtgcagatcggagagaaggagggctgggcacctgcctcatatatcgacaagagaaagaaacctaacctttcacgacgcactagcactcttactcgacccaaggtgccaccacccgcaccgccatctaaaccgaaagaggccgaagagggacccacaggggcttcggaatcgcaagacagccctcgaaagctcaaatacgaagagcctgaatacgatatcccagcttttggttttgacagtgagccagagttgtccgaggaacccgtagaggatagagcaagtggggagaggcggccagcgcagccccaccgcccatctcccgcaagctctttacagcgagcacggtttaaagtcggggagtcgtcggaggacgtggcactggaggaggaaaccatctatgagaacgagggattccggccatatgccgaagacaccctgagcgctcgaggttcttccggggactccgacagccccggttccagttctctgagtcttactcggaaaaattccccaaaaagcggctcccctaagagcagcagcctcctcaagctcaaagctgaaaagaatgcacaggctgagatggggaagaatcactcaagcgcctccttcagcagttccattacaatcaacaccacttgttgctcatccagcagctccagttccagctccctgtcaaaaacctctggtgatctgaagccccgatccgctagcgatgctggtatccggggtacgccaaaagtgagagctaaaaaggacgcagatgccaacgccggcctcaccagctgtcctcgcgccaaaccaagcgtgcggccaaagccgttcttgaatcgggcagaatcgcaatcacaggaaaagatggatatcagtacattgcgaaggcagcttaggcctacaggccaactgcgaggtggcttgaaaggctccaagtcagaagacagcgaactgccacctcagaccgcaagcgaagcgccttctgagggttctagacgttcatcatctgatttgatcactcttccagccacgacacccccctgccccactaaaaaagagtgggagggaccagcgacatcatatatgacatgttccgcttatcagaaagtccaagattcagagatatcatttcctgcaggagtggaagttcaagtgcttgaaaaacaggagagtggatggtggtacgtgaggttcggagagctggagggctgggctccatcacattacctggttctggacgagaatgaacaacccgaccctagcgggaaggaactggataccgttcccgcaaaaggacgccagaacgagggcaagtctgatagcctcgagaaaattgagcgtcgcgtccaagctctgaatactgtgaatcagagcaagaaggctaccccccccatcccttcaaaaccacccgggggttttggaaaaacctcaggaacacccgctgttaaaatgcgtaacggcgtgcggcaagtggcagtccgtcccatagaaaaaagccagttcattcataataacctgaaagatgtgtatgttagcatcgcagattacgaaggtgatgaggagacagcgggttttcaggagggtgtgtcaatggaagtgctggagcgaaatcccaacggctggtggtattgtcagatccttgacggagtgaagccctttaaggggtgggtgccttccaactacctcgaaaaaaagaattag

SEQ ID NO: 17357 - DNA, 2907 bp, synthetic construct
  misc_feature 1..2907: note = Description of Artificial Sequence: Synthetic coding sequence
  source 1..2907: mol_type = other DNA
atgatcttagagcagtatgttgtggtatctaattacaagaagcaggaaaattctgagctgagtttgcaggccggcgaggtggtggatgtaatcgagaaaaacgagagtggatggtggtttgtctctacatccgaagagcagggatgggttcctgccacctacttggaggcccaaaacggcaccagagatgattctgacattaatacctccaagaccggcgaggtgtccaaacggaggaaagcccaccttcggcggcttgacaggcgatggacactgggcggcatggtcaataggcagcactcccgagaggaaaagtatgttactgtccagccgtacacttcccagtccaaggacgagattgggttcgagaaaggtgtgaccgtggaagttattagaaagaacctggagggctggtggtacatcagatacctcgggaaggagggctgggctccggctagctacctcaagaaggcaaaagacgaccttcctacacgtaaaaagaacctggcaggacctgttgaaattattggcaatattatggaaatctcgaacctgctgaacaaaaaagccagtggggacaaggagacccctcccgccgaaggcgaggggcatgaggcaccaatagcaaagaaggagatatcactgccaatcctctgcaatgcaagcaacggcagtgcagtcggagtgcctgatcggaccgtgtctagactcgctcaggggagtcccgctgttgctaggattgcacctcaaagagcccagatatcgtccccgaacctgagaactcggccaccccccagacgggaaagctcactgggattccagttgccaaagccacccgaaccaccttcggtggaggtagaatattataccatcgctgaattccagtcatgtatttctgacggaatatcgttccggggggggcagaaagcggaggtgattgacaagaattcgggtggatggtggtacgtacaaattggggaaaaagagggatgggccccggcaagttatatcgataagcgtaagaagcctaatctttcccggagaacaagcaccctgaccagaccaaaagtccccccccccgctccccccagcaagccgaaagaagcggaagagggacctactggggccagcgaaagtcaggactcacccaggaagctgaaatacgaggagccagagtatgatattcccgcattcggcttcgactccgagccagaactctctgaagagcccgtggaggatcgagccagcggagaacggagaccagctcaaccacatcgcccctcccctgcttcaagcttgcaacgcgcccgcttcaaagttggcgaatctagtgaagatgtggcactggaggaagagaccatctatgaaaacgagggattccgcccttatgccgaggacacactgagtgcgagaggctccagcggcgattcagatagtcccgggtctagcagcctgtcactcaccagaaagaacagtcctaagtccggatcacccaagtccagcagcttattaaaattgaaggccgagaagaatgcccaggctgaaatgggcaaaaatcatagtagcgcgtctttttcatcatcaatcacaatcaataccacatgttgttcgagttcttcctcttcttcctcaagcctgtcaaaaacatctggggacttgaaaccacgcagcgccagtgacgctggtatccgcggaacaccaaaggttcgcgcaaagaaagatgccgatgccaacgctggcctcactagctgccctagggccaagccctcagtacggccaaagccttttttgaacagagccgaatctcagtcccaggagaagatggatatcagtacactccgccggcagctgaggcctactggccaacttcggggtggtctcaagggaagcaaatcggaagacagcgagttgccacctcagactgccagcgaagctccatccgaaggctcacggcggtcatctagcgatctgatcacactccccgcaacaaccccaccatgccccaccaaaaaggagtgggaaggacctgccactagctacatgacatgctcagcatatcaaaaggtgcaggactcagagatcagcttcccagcaggcgtcgaagttcaggtgctcgagaagcaggagtcaggttggtggtacgtcagatttggtgagctcgaggggtgggccccctcacattacctggtgcttgacgaaaacgaacagccagacccctctgggaaggaacttgataccgttccagcaaaggggcgacagaacgagggcaagtctgactccctggagaaaatcgaacgccgggtgcaggcactcaataccgttaaccagagcaaaaaggccacccctcccataccttcgaagcctccaggcggattcggcaagaccagtggtacgcctgctgtaaaaatgcgcaacggcgtaagacaggtcgccgttcggccacaatccgtatttgtgtcacccccacctaaagataataacttgtcttgcgcacttcggagaaacgagtctctcaccgctaccgatggattacgaggcgttagaaggaattcgagtttctcaacggctcggtccgctgccgcggaggcgaaggggcgcctagccgagcgggctgcctcccagggatctgactccccactgctgccagctcaacgtaacagtatacctgtaagtcctgttcggccgaagccgatcgagaagagccagtttatacataacaatctgaaggacgtgtacgtgtcgatagctgactatgagggagacgaggaaaccgccggctttcaagagggggtctctatggaagtattggagagaaatcctaacggatggtggtactgtcagatactcgacggtgtgaaaccattcaaaggctgggtcccaagtaattatctggaaaagaagaactag

SEQ ID NO: 17358 - DNA, 3003 bp, synthetic construct
  misc_feature 1..3003: note = Description of Artificial Sequence: Synthetic coding sequence
  source 1..3003: mol_type = other DNA
atgaatggcagcttcctcctgagattactattcccagtggcctctattttgcctgaaaccgtgctgctccgcggggcggacgcaactgccgaacccatgatcttagagcagtatgtggttgtgtccaactacaaaaagcaggaaaatagtgaactctcactacaggccggcgaggtggtcgatgtgattgagaagaatgaatccgggtggtggtttgtttctaccagtgaggaacaagggtgggtgccggccacataccttgaggctcagaacggcacgcgcgacgattccgacatcaacacctccaagacgggagaagtgagcaaaaggcggaaagctcatctgaggcggctggataggagatggacattgggaggcatggtcaacaggcaacacagcagagaagaaaaatacgtgaccgttcaaccctacaccagtcaaagtaaggacgagatcggcttcgagaagggcgtaaccgtggaagtaatcagaaagaacctcgaaggatggtggtacatcagatacctcggcaaggaagggtgggcacccgccagttacctgaagaaagccaaagatgatctccctaccaggaaaaaaaacctggccggaccggttgagattataggcaacatcatggaaatctcgaatttactgaataagaaagcctccggagataaggaaaccccgccggcagagggggagggtcacgaagcaccaattgccaagaaggagattagcctccccattttgtgcaatgctagtaatgggtcggcagtcggggtgccagacaggactgtgagtcgcctcgcccagggttcaccagccgtcgcccgcatcgccccacaaagagcacaaattagcagtccaaaccttaggacacgaccccctcctaggagggagagctcactaggctttcagctgcctaagccaccggagcctccctccgtggaggtcgaatactacaccattgccgagtttcagtcatgcatctctgatggcatctcctttagaggaggtcagaaggctgaggtaattgacaaaaatagcggtggttggtggtacgtccaaatcggggaaaaagaagggtgggcaccagcttcgtacattgataaaagaaagaaaccaaacctgtcaaggagaacttcaacattgacaagaccaaaggtaccgcccccggcaccaccatctaaacccaaagaagctgaggagggtccaacgggagctagcgagagccaagacagtcccagaaaattaaaatacgaggaacctgaatacgacattcctgccttcgggttcgactctgagccggagctgtcagaagagcccgtggaagatagagcttctggcgaacggaggcctgcccagccacaccggccgtcaccagcgagttcactccagagagctcgcttcaaagtaggtgaaagcagtgaagatgtggccctcgaggaggagaccatatacgaaaacgaaggatttcggccgtacgctgaagacacccttagcgccagggggagttcaggcgattcggattctcctggatcttcttccctttctctcaccagaaagaacagccctaaatccgggagccctaaatcttcatcactccttaaactgaaagcagagaagaacgcacaggctgagatgggaaagaatcattcatccgcatcattctcttcctccattactattaacactacgtgttgctctagttcttcttcttcgtcttcatccctcagcaaaacctccggagatctgaaaccaaggtccgcctcagacgcgggcattcgcggaacacctaaagtccgggctaagaaggatgctgatgccaacgctggcctcaccagctgtccccgagccaaaccctccgtgagaccaaagccatttctgaatcgtgccgagtcacagagtcaggagaaaatggacatctccacactgcgccggcagctccgtccgactggccagctgagggggggattgaaagggagtaagagtgaggatagcgagttacctccacagacagcctcagaagctcctagcgaggggagcagaagaagcagctcagatcttattacactgcccgctacgaccccaccctgtcctacgaaaaaggaatgggaaggccctgccacaagctacatgacgtgtagcgcttaccagaaggtccaggattcagaaatctcctttccagcaggcgtggaagtgcaggtgctcgagaagcaggagtctggctggtggtacgtgagattcggcgaactcgagggctgggccccatcccattatctagtcctggacgagaacgagcaaccagaccctagcggcaaggaactcgatacagtgccagctaagggccggcagaacgagggcaagtcagactcgctggagaaaattgaaagacgcgtgcaagcactgaataccgtgaaccagagcaaaaaagcaactcctccaatcccaagcaagccaccaggcgggttcgggaagacaagcgggacaccagccgtgaagatgcgcaatggggtcaggcaagtggctgttagaccgcagtcagttttcgtaagtcctccacccaaggacaataacctgagttgcgctctgcgacgaaatgaaagcctgactgccactgatgggctgagaggggtgagacgaaactcttcattttctactgctcggagcgcagctgcagaagccaagggcaggctcgctgagcgggcggccagccaagggagtgacagcccactcctgcctgctcaacggaatagtatacctgtgtcccctgtaaggcccaaaccgattgaaaagtcacaatttatccacaacaacctaaaagacgtgtacgtgtcgatagccgactacgagggggacgaggaaacagctggatttcaggagggagtctccatggaggttctggaaagaaatcccaacggatggtggtactgccagatcctcgatggggttaaaccattcaaagggtgggttccttccaattacttggagaagaaaaattag

SEQ ID NO: 17359 - DNA, 414 bp, synthetic construct
  misc_feature 1..414: note = Description of Artificial Sequence: Synthetic coding sequence
  source 1..414: mol_type = other DNA
atgaataagctctccgggggaggaggccgccgaacacgggtcgaaggcggtcagttaggcggagaagaatggactcgacacgggtctttcgttaacaagccaacgcggggatggctgcacccaaacgacaaagtgatgggccccggagtatcatatctggtgaggtacatgggatgcgtcgaggtgctccagagcatgagggctttagattttaacacccggacgcaggtgaccagagaagctataagtctggtctgtgaagccgttcctggagcaaagggagcaacacgacggcgaaaaccttgttctagaccactgtctagcattctcggtcgcagcaatctgaagtttgcaggcatgcccatcacactgacagtgtctacaagctctctgaatcttatggctgcggactag

SEQ ID NO: 17360 - DNA, 918 bp, synthetic construct
  misc_feature 1..918: note = Description of Artificial Sequence: Synthetic coding sequence
  source 1..918: mol_type = other DNA
atggccggctttgacggatctgcttgggatgaagaagaagaagaaccccctgaccatcaatactacaacgacttccccggaaaggaaccgccattggggggcgtcgtggatatgagactccgcgagggtgcggctccaggagccgccaggcccaccgccccaaatgcgcagacgccctcccatttaggtgcaacgctgcctgtgggacagcccgtcgggggtgatcctgaggtgcggaagcagatgcctccccccccaccctgccctggccgcgaactgtttgatgacccctcatacgttaacgttcaaaacttggataaggcacgccaagctgttggaggtgcagggccgccgaacccagccattaacggctctgcccctagggacctctttgacatgaaacccttcgaggatgctctgagggtcccaccacctcctcagagcgtgtcaatggcagaacagctccggggcgagccttggtttcatgggaaactgagccgcagggaagccgaagcgctgctgcaactcaacggagatttcctggtaagagagagcactaccaccccgggccagtacgtactgacgggactgcaaagcggccagccaaagcatttgctgctggttgaccccgaaggagttagatggggctttgctatgctccctaagctcttcctgaattccagggcacaggtgatacggctccctaggccgcctcgagttttaggactccaagcccggacaaccatgcccagcctccacatctttttctgtactgtctataccttgcttcgccatgccaactttcttcaggtgaagaagggcgtttattccagccaactgcattcttttcgagcagacgtggcatttgccttctcacattttacggacttgtccattcctactacagtgtctttctag

SEQ ID NO: 17361 - DNA, 1563 bp, synthetic construct
  misc_feature 1..1563: note = Description of Artificial Sequence: Synthetic coding sequence
  source 1..1563: mol_type = other DNA
atgtcaaacctgaggctggcgaaccctgctggaggaagacctggatccaagggcgagccaggccgagccgctgacgacggtgaaggcatcgtaggtgccgccatgccagatagcggtccgctgccgctgctgcaggatatgaacaaactctccgggggcggaggacggcggactcgcgttgaaggcggtcaactgggaggggaagagtggaccaggcacggctcttttgtaaacaagcccacaaggggctggctccaccccaacgataaggtaatgggccccggggtttcatatttggtcagatacatggggtgcgtagaagtgttgcaatccatgcgcgcacttgatttcaacacaaggacgcaggtgacaagggaagccataagccttgtgtgtgaagcagttcctggcgcaaaaggagcgaccaggcgacgcaaaccctgctctcgcccacttagtagcatcctgggccggtccaatctgaagttcgccggtatgccaataacactgactgtctcaaccagtagcctgaatctaatggctgcagactgcaagcaaattattgccaaccaccacatgcaatccatttctttcgcaagtggtggcgaccccgataccgcagaatacgtggcttacgtggccaaggacccagtgaaccaacgcgcctgtcacattcttgaatgtcctgaggggctggcccaggatgtgatctcaaccatcgggcaggcatttgagctgagatttaagcagtacctgagaaacccacctaaactcgtgactcctcatgacagaatggccggattcgatggaagcgcgtgggacgaagaagaggaggagccccccgatcaccaatactacaatgacttccccggtaaggaaccccccttaggcggcgtcgttgacatgaggctgagggaaggagccgccccgggcgctgctcgccctaccgcacccaacgcacagacccctagccacctgggtgctaccttgccagtcgggcagcccgtgggaggcgacccagaagtcagaaagcagatgccccctccgcccccatgtcccgcagggcgagaactcttcgacgaccctagctacgttaatgttcagaacctggataaggcccggcaggccgtcggaggcgccggacctcccaacccagcaattaatgggtccgcaccccgggacctgtttgatatgaagcccttcgaggacgccctgagggtcccccctccgccacaatctgtctctatggccgagcagctcagaggagagccctggtttcacgggaagctttccagacgggaagctgaagctcttttacagctgaatggagactttcttgttagggaatccaccaccacaccaggccagtacgtattaacaggactccagagcgggcagcccaagcacctcctgctggtggacccagagggggtagtgcgaacgaaggaccaccggtttgaatccgtgtctcaccttattagctaccacatggacaatcacctgcctatcataagtgcagggagcgaactgtgccttcagcagcccgtagagcgtaaattgtag

SEQ ID NO: 17362 - DNA, 1752 bp, synthetic construct
  misc_feature 1..1752: note = Description of Artificial Sequence: Synthetic coding sequence
  source 1..1752: mol_type = other DNA
atggaccttctaccccctaagcccaaatacaatccactccggaacgaaagtttgtcgtcgctggaggaaggagctagcggttccacacctcccgaggagctcccatctccgtctgctagttccctgggtcccatcctaccaccactgcctggagatgattctccaacaaccctttgttccttcttccccagaatgtctaaccttagattggctaacccagccggggggcgtcctggttccaaaggcgaaccaggcagggccgcagacgacggagagggaatcgtgggggcggccatgcccgactctggtcctttacccctccttcaggacatgaacaaactgagtgggggaggcggtagacggacgcgggtggagggaggccagctcgggggagaagagtggaccaggcatgggagtttcgtcaataagcctaccagggggtggctgcaccccaacgataaggtgatggggcctggagtaagttacctagtccgatatatgggttgcgtggaagttctccaaagcatgagggccctcgacttcaacacccgtacgcaggtaacgcgggaggccatttctctggtgtgcgaggcggttccgggagccaaaggtgccacacggcgacgaaagccatgcagccgaccactgtcttctattctggggcgctccaatcttaagttcgcggggatgcccatcaccctcacagtgtctaccagttcactgaatctgatggctgccgattgtaagcaaataatagccaatcaccacatgcagtccatctccttcgcatcaggcggcgatcccgacactgctgaatacgtagcttatgtggccaaggacccagtgaaccaaagagcctgccacatcctcgaatgtcccgagggtttggctcaggatgtgatttctaccatcgggcaggccttcgagctgcgattcaaacagtatctgcggaacccgcccaagctggtgactccacatgacagaatggccggtttcgacggtagcgcttgggatgaagaggaagaggagcccccagaccaccaatactacaatgacttccctggcaaggagccccctcttggtggagttgtagatatgaggctcagagaaggagctgcgccgggggccgcccgtccaacagcccctaatgcacaaaccccttctcatttgggagccacattacctgtcggccaacccgtggggggggaccccgaggtgcgtaaacagatgcctccaccaccaccttgtcccggacgggaactcttcgacgatccctcttatgtgaatgttcagaacctcgacaaggcacgacaggccgtgggcggtgctggccccccaaatcccgcaatcaatggctcagcccccagggacctattcgacatgaagccatttgaagatgcactccgcgtcccccctccaccccagagcgttagcatggctgagcagctcaggggcgagccatggttccacggaaagctctcccgcagggaagccgaagcattactccagctcaacggagacttcctcgtaagggagtccactaccacacccggacagtacgtgctgaccgggcttcaaagtggtcagccaaagcacctgctactcgtggaccccgaaggtgtggttcgcactaaagatcaccggtttgaaagcgtgtctcatctaatttcataccacatggataatcacctgcccattatttccgccggttccgagttgtgtctgcaacaacctgtggaaagaaagctctag

SEQ ID NO: 17363 - DNA, 1155 bp, synthetic construct
  misc_feature 1..1155: note = Description of Artificial Sequence: Synthetic coding sequence
  source 1..1155: mol_type = other DNA
atggacttgctgccgccaaagcctaaatataatccgctgcggaatgagagtttgtccatactgggacgtagcaacctcaagttcgctggcatgccaattactttgaccgtgtcgacctcatccttgaatctgatggccgccgattgcaaacagatcatcgcaaatcaccatatgcagtcaatctcatttgcatccggtggagacccggacaccgcagagtacgtggcgtacgtggctaaggatcctgtgaaccaacgagcgtgccatatcctagagtgccccgagggccttgctcaggatgtcatctcaaccatcgggcaggccttcgagctgcgctttaagcagtatctgcgaaatcctccaaagctggtgactccccacgaccgaatggcagggtttgacggcagcgcttgggatgaggaggaggaggaaccgcccgatcatcagtactacaatgattttccaggcaaggagccccccctgggcggggttgtggatatgcgactccgagaaggtgcagcacccggggcggcaaggcctaccgcacccaatgctcaaaccccctcccacttgggggctaccctcccagtgggccagccggttgggggcgatcccgaggtccggaagcaaatgcctccccctcccccttgtccaggtcgcgagttgttcgacgacccttcatatgtcaacgtgcagaacttggacaaggctagacaggccgtgggtggagccggaccacctaaccctgctattaatgggtctgcacctagagacttgtttgacatgaaaccttttgaggatgccctgagggttccaccacctcctcagagcgtgagcatggccgagcagctgaggggggaaccttggtttcacggcaaactgtcccggcgggaggccgaagcacttctgcagctgaatggcgatttcctagtcagggagtctaccacgacacccgggcagtacgttctgactgggctccagagcggccaaccgaagcacctattactggtagatcctgaaggagtggtaaggactaaggaccatagattcgagagcgtgtctcatcttatcagttaccatatggataaccacttacccataatctcagcaggcagtgaactgtgtctccagcagcctgtggaacgaaagctttag

SEQ ID NO: 17364 - DNA, 1422 bp, synthetic construct
  misc_feature 1..1422: note = Description of Artificial Sequence: Synthetic coding sequence
  source 1..1422: mol_type = other DNA
atgaataagctatccggcgggggcggacggcgcacacgagtcgagggggggcaacttggcggggaagaatggacccgtcacgggtctttcgtcaacaagcctaccaggggatggctgcaccccaatgacaaagtcatgggaccaggagtgtcttatctcgtgcgatacatggggtgcgtggaggttctgcagagcatgcgggccctggatttcaatacccggactcaggtcaccagggaggctatttccctggtgtgcgaggctgtacctggtgcaaagggagcaacaagaagaaggaaaccatgtagcaggcccctgtcatccatcctgggccgctcaaacctgaagttcgcagggatgcccattaccctcaccgtgagcacatctagcttaaatctgatggcggctgattgcaagcagattatagcaaaccaccacatgcagtccatttcgtttgcctcaggtggagaccctgatacagccgaatatgttgcctacgttgccaaggatccagtcaaccagcgtgcttgccacatactcgagtgtccggagggccttgcccaggatgtcatctcaaccatcggtcaggctttcgagttgcgtttcaagcagtatctgcgaaatcctcccaagttagtgacccctcacgaccggatggccggctttgacggctctgcctgggacgaagaggaggaggaaccccctgatcaccagtattataacgactttccagggaaagagccacccctcggtggagttgttgatatgcgcctgagagagggcgcagccccaggggcagccaggccaaccgcccctaatgcccagacacctagtcatctaggggcaaccttgcctgtggggcagcctgtcgggggggacccagaagtgcgtaaacagatgccccctccccccccctgtcccggccgtgagctgttcgatgacccttcatacgtcaacgtgcagaacttggacaaagcgcggcaggcggtcgggggggcgggcccccccaatccagccatcaacggatcagcgcctagagacctgtttgatatgaagccatttgaggacgctttgcgggttccacctccccctcagtctgtgagtatggcagaacagctacgaggcgagccttggtttcacgggaaacttagccggagagaagctgaagccctgcttcagctgaatggggacttcctggtccgggaaagtactactacgcctgggcaatatgttcttacagggctccagtccggtcaacctaaacatctgcttctcgtcgaccctgaaggcgtcgtgcgtacgaaggatcaccgcttcgagtccgttagccatctaatcagctatcacatggataaccacctcccaattatctcagcaggatctgagctctgcctgcaacagcctgtcgaaagaaaactctag

SEQ ID NO: 17365 - DNA, 1425 bp, synthetic construct
  misc_feature 1..1425: note = Description of Artificial Sequence: Synthetic coding sequence
  source 1..1425: mol_type = other DNA
atgaataagctctcaggtggcggtggtaggcgcaccagggtggagggcggacagctaggcggcgaggagtggacaaggcacggatcctttgtgaataaaccaacacgtggatggctccacccaaacgataaggtcatgggtcccggcgtgtcttacctggtacggtatatgggctgtgttgaagtcctccaatctatgcgggctctggattttaacacccgcacgcaggtgactagggaggccatcagcctagtttgcgaagcggtgcccggcgcaaagggggcgacaagaaggcgcaagccttgcagcagacctctttcaagcatattgggtcgttcaaacctcaaattcgcaggtatgccgatcaccctgaccgtaagcacttcatccttaaacctaatggccgccgactgtaagcagatcatagccaatcaccacatgcagtctatctccttcgcgagcggaggcgaccctgacacagctgagtacgtggcctatgttgcgaaggacccagtgaaccagagagcctgccacatcctcgagtgtcccgagggtttagctcaggacgtgatttctaccattggccaggctttcgaactgcgcttcaaacaatatcttagaaatcctcccaaactcgttacaccacacgacaggatggcaggtttcgacggctccgcatgggatgaagaggaggaggagcctcccgatcaccagtactataacgactttcctggaaaggagccaccactcggaggcgtggttgacatgaggctccgggaaggcgccgcacctggagctgctcgtcccacagctcccaatgctcagacgccttcccatctaggagcgacgttgcccgtgggtcagcctgtcggaggggatccagaggtccgcaaacagatgcctccacctcccccttgtccggctgggagggagctgttcgatgacccttcctatgtgaacgtgcaaaatttagataaagctcgccaggccgtgggaggagcaggtccccctaatccagccatcaatgggagtgcaccacgggacctgttcgacatgaagccctttgaagatgcactgagagttcccccacctccccaatccgtgtccatggctgagcaactgaggggtgagccgtggtttcacgggaaactgagccggcgagaggccgaagcccttttgcagctgaatggcgacttcctggtacgggagagcaccacgacacccggacagtatgtgcttactgggctccaatctggacagccgaagcacttattgttagtagatccagagggggttgtccggaccaaggaccaccgtttcgagagtgtaagtcatctgatatcctatcacatggataatcacctgccaattatttcagcgggcagcgaactctgtttacagcagcccgtggaaaggaaattgtag

SEQ ID NO: 17366 - DNA, 603 bp, synthetic construct
  misc_feature 1..603: note = Description of Artificial Sequence: Synthetic coding sequence
  source 1..603: mol_type = other DNA
atgaacaagctctcaggcggggggggaaggcggactagggtggagggcggtcaactagggggcgaagaatggactagacacgggagcttcgttaacaagcccaccagaggatggctgcatcctaacgacaaagtgatgggacctggtgtgagttacctggtccgctacatgggctgtgtagaagtcctgcagtccatgcgagcactcgatttcaacactaggacccaagtgacccgggaagccatcagtctggtatgcgaagcagtacccggtgccaagggcgctactagacgtagaaaaccttgctctaggcccctatctagcatcctgggaaggagcaacctaaagtttgctggcatgcccatcactctgaccgtttctacatcctccctgaatttgatggccgcggattgcaagcaggatacagccgagtacgtggcatatgtggcgaaggatcctgtcaatcagagagcatgccacatacttgaatgtccagagggcctcgcccaggacgttatatctactattgggcaggcctttgagttgcgctttaagcaatatctaagaaacccccctaaactcgtgacgccccatgatcgctag

SEQ ID NO: 17367 - DNA, 603 bp, synthetic construct
  misc_feature 1..603: note = Description of Artificial Sequence: Synthetic coding sequence
  source 1..603: mol_type = other DNA
atgcccattacattgacagtgtccacttcttcccttaaccttatggcggccgattgcaagcaggacacggcggaatatgttgcctatgtagccaaagacccagtgaaccagcgagcctgtcacatccttgaatgccccgagggactggcgcaggatgttatcagcaccatcgggcaggcattcgaactgcgctttaagcaatatctgcgtaaccctccaaaactggttaccccccacgaccgcatggcaggatttgatggaagcgcatgggatgaggaggaggaagaaccaccagatcaccagtactacaacgacttcccaggaaaagagcctcccctcgggggcgtagttgatatgcgattaagggaaggtgcggctccaggggctgctcggcccacagcacccaatgcccagaccccgtctcatctgggggcaacactccctgtggggcagccagtagggggggaccctgaggtgcggaaacagatgccacctcccccaccatgtcccgccggtcgtgaattgttcgacgacccttcttatgtgaacgtacaaaatttagacaaagcccggcaggccgtgggaggtgctggtcctccctag

SEQ ID NO: 17368 - DNA, 393 bp, synthetic construct
  misc_feature 1..393: note = Description of Artificial Sequence: Synthetic coding sequence
  source 1..393: mol_type = other DNA
atgcctatcacccttaccgtgtcgacttcaagcttaaatctgatggcagcagattgcaagcagatcattgccaaccatcacatgcagtctatctcatttgcttctggcggagaccccgacactgccgaatacgtcgcttacgttgccaaagaccccgtaaaccagagggcttgtcatattctagaatgtcctgagggactcgctcaggatgtgatctctacaataggacaggcctttgaactgcggtttaaacaatacctaagaaatccacccaagttggtgacaccacacgaccgcatggccggattcgacggcagtgcctgggacgaagaggaagaggaaccccccgaccaccagtactacaatgacttcccaggaaaggaaccaccttag

SEQ ID NO: 17369 - DNA, 894 bp, synthetic construct
  misc_feature 1..894: note = Description of Artificial Sequence: Synthetic coding sequence
  source 1..894: mol_type = other DNA
taagatgaagaggaagaggagcctcccgatcatcaatattacaatgactttcccggcaaagaaccgcccttgggtggagtcgtagatatgcgattgcgcgagggggccgccccaggcgctgcccggcccaccgcccctaacgcacagaccccctcgcatctcggtgctaccttgcctgtagggcagcccgtcgggggagaccctgaggtacgaaagcagatgcccccccctcccccttgcccggggcgcgagctgtttgatgatcctagctatgtgaacgtccagaacctagataaggcacggcaggcagtcgggggggcagggcctccgaaccccgccattaatggctcagctccaagagatctgtttgacatgaaacctttcgaggacgctctaagggtgccacctcctccacaatccgtcagcatggccgagcagctgcggggcgagccttggtttcacggtaagctgtctagacgggaggctgaggctctactacagttgaacggagacttcctggttcgtgaaagtactaccactcctgggcagtacgtgctgacgggtctgcagagcgggcagcccaagcacctcctcctcgtggaccctgagggagttagatggggatttgcaatgctgccgaagctatttctcaattcgcgcgcccaggtgattagactgccccggcctcccagggtactcggcctgcaggccaggaccactatgccatccttacatatctttttctgcacagtttacactctcttaaggcatgccaattttctacaagtaaaaaaaggagtctacagtagccaactacattccttccgggctgacgtcgcctttgccttcagccatttcactgatctcagtattcccaccaccgtgagtttttag

SEQ ID NO: 17370 - DNA, 1755 bp, synthetic construct
  misc_feature 1..1755: note = Description of Artificial Sequence: Synthetic coding sequence
  source 1..1755: mol_type = other DNA
atggacctgctccctcccaaacctaaatacaatccactcaggaatgagtccctctcctctttggaagaaggcgcctctggttccactccgcctgaagaattgcccagtccctcggcttcatctctcgggccaatcctgcctccacttccaggggatgactcccccaccaccttgtgttccttttttccacggatgagcaacctgcgtctcgctaacccggccgggggcaggccagggtctaaaggagagccaggtagggctgcagatgatggagaaggtatcgtgggggcagccatgccagatagcggcccgctgccactcctacaagacatgaataagctgagcggaggcggcggtcgcagaacccgggtagaaggcggtcagctaggtggtgaggaatggactagacacggctcatttgttaataagcctacacgtggatggctccacccaaatgataaagtcatggggccaggagtgtcatacctggtacgttacatggggtgtgttgaagttctccaatctatgcgtgccctggacttcaatactagaacacaggtcacacgggaggctataagtttggtgtgcgaagcagtaccaggcgctaaaggagctacccgcagacggaagccgtgttcccgacccctgagcagtattttaggccgatccaaccttaaatttgcaggaatgcccatcacattaaccgtttcaacctcctccctgaacctaatggctgccgactgcaagcagatcattgccaatcaccatatgcagtcaatctctttcgctagcggcggggaccccgatactgctgagtatgtggcatatgtggcaaaagatcctgtaaaccagagggcctgccacatcttggagtgtcctgagggcctggcccaggacgtcatctcaacaataggccaggccttcgaactgagattcaaacagtacctgagaaacccaccaaagctcgtcacacctcacgaccgcatggccgggttcgacgggtccgcctgggacgaagaggaggaagaacctcccgatcatcagtactacaacgacttcccgggcaaggagcctcccttagggggtgtcgtggatatgcgtctccgggaaggagctgctcccggggcagctaggcctacggcccccaacgctcagacgccgagccacctgggcgccacactgccagtaggtcagcctgtcggaggtgacccagaagtgcgcaaacagatgcctcctcctcccccctgccccgctggacgggagcttttcgacgacccttcatacgtcaacgtgcagaatcttgataaggcacgccaagctgttgggggcgctggcccccctaacccagctattaacgggtccgccccacgtgatttgttcgatatgaaacccttcgaagatgctctgagggtaccaccccctcctcagtccgtgtccatggccgagcagctcagaggggaaccttggtttcacgggaaactatctcgacgagaagcggaagccttattacaactgaatggtgacttcctggtccgtgaatcaactaccacgcccggccagtatgtgcttacaggactccagagcggtcagcccaagcacctgctcctcgttgacccagaaggcgtcgttcgcacaaaggatcacaggttcgagagcgttagccacctgatttcttatcatatggacaaccacctccccataataagtgctggcagtgagctgtgtctccagcaacctgttgagagaaaattatag

SEQ ID NO: 17371 - DNA, 1749 bp, synthetic construct
  misc_feature 1..1749: note = Description of Artificial Sequence: Synthetic coding sequence
  source 1..1749: mol_type = other DNA
atgacccaggggcccggcggccgggcgcctcctgccccccctgcccctcctgaaccggaggcacctaccactttttgcgcccttctgccgcgtatgccacagtggaagttcgctgccccggggggcttcctgggtagaggcccggcagcagcacgcgccgctggtgcctccggcggcgcggatcctcagcccgagcccgcaggcccaggcggtgttcccgccttggccgcagctgtgttgggagcctgtgagccgcgctgcgctgccccctgccctctacctgctctctctcgttgtagaggagccgggtcaagaggctcgaggggcgggcggggcgcggcaggcagtggtgatgccgctgctgctgcagagtggattaggaagggcagtttcatccataagcctgctcacgggtggctccatcccgacgcgcgggtgctgggtccgggagtgtcctatgtagtaaggtacatgggctgcattgaggtgctgcgatcaatgcgatctttagactttaatactcgcacccaggtgacaagggaggcaattaaccggctgcatgaagcagtccctggggtgcggggatcatggaagaagaaggctcccaacaaggctttagcctccgtgttgggcaaaagcaatttgagattcgcaggaatgagtatctcaattcacattagtaccgatggactcagcctgtccgtaccggccacaaggcaggtgatcgccaaccaccatatgccatcaatctccttcgccagcggaggcgacaccgacatgacagattacgttgcctacgtcgccaaggacccgattaaccagcgggcctgtcacatcctagagtgttgtgagggcttggcccagagtattattagcactgtgggtcaagcttttgagttacgctttaaacagtacttacacagcccaccaaaagtggcactacccccagagagactggcaggccccgaggaatccgcatggggcgatgaggaagacagcctggaacacaattactacaacagtatacccgggaaagagccgccactggggggtctggtcgattccaggctagcactgactcagccttgcgcactgactgctctagatcagggtccctctccaagcctcagggatgcctgctcactgccctgggatgtgggtagcactgggactgctccaccaggggacggctacgtgcaggccgatgctagaggaccccctgaccacgaagagcatctgtatgtgaatacacagggtctcgatgcacctgagcccgaagattcacctaagaaggatttgtttgacatgcgaccgtttgaagacgcgcttaagttgcatgaatgttcagtggccgccggcgtgacagcggcgccactgccacttgaagaccagtggccaagcccgccaacccgccgggcccccgtagcacccacagaagagcagctgcggcaggagccttggtatcacggacggatgtctcggcgtgctgccgaacggatgctgcgcgctgatggagacttcctggtccgggatagcgtcacaaaccccggtcagtacgtgcttacgggtatgcatgccggccaaccaaagcatctcctcctggtagatcctgagggtgtggtgaggacaaaggatgtgttattcgagtcaatctcccacctaatagatcatcacctgcagaacggccaacctatagttgcagccgagagtgagctccacctacgaggagtggtcagtagggaaccgtag

SEQ ID NO: 17372 - DNA, 1833 bp, synthetic construct
  misc_feature 1..1833: note = Description of Artificial Sequence: Synthetic coding sequence
  source 1..1833: mol_type = other DNA
atgcttgacttctttacaattttcagcaagggcgggctggtcctgtggtgttttcagggggtctctgattcttgtacaggccctgtgaacgccctgatcaggtcagtgttactgcaagtcggctttcagaaaattctgacgttgacttatgtagacaaactgatcgatgacgttcacaggctctttcgcgacaaataccggactgagatccagcagcagagcgctttgtctttactcaatggtacctttgattttcagaacgactttctccggctgcttcgcgaagcagaagagagctctaagatccgggcacccactaccatgaaaaagtttgaagacagcgagaaggcgaagaaacctgtgcggtccatgattgagacccgaggagagaagcctaaggagaaggctaaaaactccaaaaagaaaggcgcaaagaaggaaggttccgacgggcccctggccacttcaaaacccgtaccagccgaaaagagtggcctgccagtcggcccggagaacggcgtcgagctaagcaaagaagagctaatccgcaggaaacgagaggaatttatccagaagcatggcagaggaatggaaaaatccaataaatctaccaagtccgatgccccaaaggagaaaggtaaaaaagctccacgggtttgggagctgggggggtgtgccaataaggaagtgctggactatagcacacccaccaccaacggaactcccgaggcagcattgagtgaggatatcaacctcatccggggcactgggagtgggggacagctacaggacctagattgctcatcatcagacgatgagggtgcagctcaaaatagtactaaaccttccgccaccaaggggaccctcggtggcatgtttggtatgttaaaagggcttgtgggctcgaaaagcctctctcgcgaagacatggagtctgtgctggacaaaatgcgcgatcacttaatagctaagaacgtcgcggctgatatcgcagttcaactgtgtgagtccgtggccaacaagctcgagggtaaggttatgggcaccttttccactgttacttctactgtgaaacaggctctgcaggagtcactcgtccaaatcctgcaaccccagcggcgggtcgacatgctgagggatatcatggacgcccagcgcaggcaaaggccatacgttgtgacattctgtggggtcaatggcgtggggaagagcacaaacttggcgaagatttctttctggctgttagagaacggcttctccgtactgatcgcagcatgtgatacatttcgggctggggcggtcgagcagctgagaacccatacacggagactttctgcgcttcatccacccgagaaacatggggggcgaaccatggtgcagcttttcgagaaggggtacggcaaggacgctgcaggtatcgccatggaggccatagccttcgctcgcaaccaggggtttgacgttgttctggtagataccgctggccgcatgcaagacaatgctcctttgatgacggctctcgccaagctgatcaccgtgaacacccccgatcttgttctgttcgtgggggaagctcttgtcggtaacgaagccgttgaccagctcgtgaaattcaatcgggccttggcagatcactccatggctcagaccccccggctgatcgacggcattgtactgacaaaatttgacacgatcgacgataaggtgggtgccgcaatcagcatgacctacatcaccagcaagccaatcgtattcgttgggaccggtcagacctactgtgaccttaggagtctgaatgccaaagccgtggttgccgcactgatgaaagcatag

SEQ ID NO: 17373 - DNA, 2253 bp, synthetic construct
  misc_feature 1..2253: note = Description of Artificial Sequence: Synthetic coding sequence
  source 1..2253: mol_type = other DNA
atgtctcagtggtacgagttgcagcaacttgacagcaagtttctcgagcaagttcaccaactgtacgatgactcttttcctatggaaatccggcagtacctggctcagtggctggagaaacaggattgggaacacgctgcaaatgacgtgagtttcgccactatccggttccacgaccttctgtcccagctggacgatcaatactcaaggtttagtcttgagaacaatttcctcctgcaacataacatcaggaagtctaagcgcaacctgcaggacaacttccaggaggatccgatccagatgagtatgattatttatagttgcctgaaagaggagcggaaaatcctcgagaacgcgcagaggtttaaccaagctcagtccggaaatatccagagcaccgtcatgctcgataagcagaaagaactcgactctaaagtgcggaacgtcaaggacaaggtgatgtgcatcgagcacgagattaagagcctggaggacctccaggatgagtatgacttcaaatgtaagacactccagaatcgggagcatgaaacaaatggggtggctaagagcgaccagaagcaggaacaactgctgcttaaaaagatgtacctgatgctcgacaacaaaaggaaggaggtcgtacataagataatagaactgctaaacgttactgagctgactcagaatgccctaatcaatgatgagctagtggaatggaagcgtcggcagcagtctgcatgcataggagggccacctaacgcttgtctagaccagctgcagaattggttcacgatcgtcgctgagagcttacaacaagttcggcagcagctcaagaagctggaagagctggaacagaaatacacttatgagcacgaccctatcacgaaaaacaaacaggtgctctgggaccgtaccttttcccttttccagcagctgatacagtccagctttgtggtggagcggcagccatgcatgcccactcacccacaaagacctcttgtactcaaaactggagttcagtttacagtaaaactccgtctgcttgtgaagcttcaagaacttaattacaatctgaaagtaaaagtgctgtttgacaaggatgtgaatgaacgtaacacggtgaaggggttccggaagttcaacattctcgggacccacacaaaagttatgaatatggaagagtcgacaaacggcagcctggcggccgagtttcgccacttgcagctcaaagagcagaaaaacgcaggcacccgcacaaacgaaggcccacttattgttacagaggagctgcactctttgtcatttgagacacagctttgtcaaccaggactcgtgattgaccttgagaccacttctctacccgttgtggtaatcagcaatgtgtcccagctaccgtctgggtgggcttcgatcctctggtataatatgctggtcgcggaaccccgcaacttaagctttttcctgacccccccatgtgccaggtgggctcaattatcagaggtgctgtcgtggcaattttccagcgttaccaaaagaggactgaatgtggaccagctgaacatgctgggcgagaagctgttgggtccaaatgccagcccagatggtctgataccttggactaggttttgcaaggagaacataaacgacaagaacttccccttctggctgtggatcgagtctatcttggaattgatcaagaaacacttgctgccactgtggaatgatggttgcattatggggttcatcagtaaggaacgcgaaagagctctgctgaaagaccagcagccaggcaccttcctccttcgcttcagcgaaagttctagggagggcgccatcacctttacatgggtggagaggtcccagaacggcggcgagccggacttccatgcagtagaaccatacaccaaaaaggaattgtccgcggttacctttccggatataataaggaactataaggtgatggctgccgaaaatattcccgaaaaccccctcaaatacttgtaccctaacatcgataaggatcatgctttcggcaagtattatagtcggcctaaggaggcaccagaacctatggagctcgacgggcccaaaggcacaggctacataaagaccgagctcattagtgtgtcagaagttcatccgagccgcctccaaacaaccgacaatctcctaccgatgtctccggaggaatttgatgaggtgtctcggatcgtcgggagtgtggagttcgatagcatgatgaatactgtgtag

SEQ ID NO: 17374 - DNA, 2139 bp, synthetic construct
  misc_feature 1..2139: note = Description of Artificial Sequence: Synthetic coding sequence
  source 1..2139: mol_type = other DNA
atgagccagtggtacgaactgcagcagctagacagtaagttcttagagcaagtccatcagttgtatgatgatagcttccctatggagatccggcagtacctggcgcaatggctagagaaacaggactgggagcacgccgcaaatgatgtttcttttgcaaccatcagatttcacgatctgctatctcagcttgacgatcaatactccaggttcagccttgagaacaacttcctgctgcaacataatatccgaaagtctaaaagaaaccttcaggataattttcaggaagatcccattcagatgtcaatgatcatatattcatgtctaaaggaagagcgaaaaatactggaaaacgcccaacggtttaaccaagcacaatccggaaacatacagtctacagtgatgctagataagcaaaaagaactcgacagcaaggtacgcaacgttaaggacaaagttatgtgtatcgagcatgagattaagagcctcgaggacctccaggacgaatatgatttcaagtgcaagactctccagaaccgggagcacgagaccaacggagtcgctaaatcggaccagaagcaagagcagctgctcctcaaaaagatgtatctgatgctagacaacaaaaggaaggaagtggttcacaagattattgagttgctgaatgttacggaactgacacagaatgccttgatcaacgatgaattggtcgagtggaaacgcaggcagcagtccgcctgtatcggggggccgccgaatgcctgccttgatcagttacagaactggttcacgattgtcgcagaaagtctgcagcaggtgaggcagcaactaaagaaactcgaggaactcgaacagaaatacacctacgagcacgatccgatcacaaagaataaacaggtcttgtgggacaggactttctcccttttccagcaactgattcagagtagcttcgtcgtggagagacagccatgtatgccaactcacccccagcggcctctcgtgcttaagactggcgtacagtttactgttaaactgagactcctcgttaaactacaagaactgaactataaccttaaagtgaaagtcctgtttgataaggacgtgaacgaacgtaacaccgtgaaagggttccgaaaattcaacatactaggcacccataccaaggtcatgaacatggaagagagtaccaacggatccctcgctgccgagttcagacacctgcaactgaaagaacagaaaaatgccgggaccagaactaacgaagggcctctgatcgtgaccgaggagttgcatagcctgagttttgagactcagctgtgccagcctggactcgtaattgatttagaaacaacttccctgcccgttgtcgtgatttctaacgtgagccagctgccctcgggctgggcctcaatcctctggtacaacatgctggttgcagaaccgcgaaacctgagtttttttctaacacctccgtgcgctaggtgggcccagctgtcggaagtgctaagttggcagtttagctctgtcaccaagagggggctgaatgtagaccagctgaacatgctgggtgagaagctcctcggacctaacgccagcccagacggattgatcccgtggaccagattctgtaaagaaaatattaacgataaaaacttcccattttggttgtggatagaatccatcttggagcttattaagaagcatttgctgccgttatggaacgatggatgcattatgggctttattagcaaggagagagaaagggcactgctgaaagatcaacagccaggaacgtttctgcttcgtttcagcgagagcagtcgagagggggctataacctttacatgggttgagcgcagccagaatggcggggagccagactttcatgccgtggaaccctacacgaagaaggagctctccgcggtgacgttccctgatatcatccgtaactataaggtgatggctgctgaaaacatacctgagaatcccttaaagtatctttaccccaatattgataaggatcacgcatttggtaaatactacagtaggcccaaggaagcccccgaaccaatggaactggatggacctaagggaacaggatacattaagaccgaactcatctcagtgagcgaagtgtag

SEQ ID NO: 17375 - DNA, 2145 bp, synthetic construct
  misc_feature 1..2145: note = Description of Artificial Sequence: Synthetic coding sequence
  source 1..2145: mol_type = other DNA
atgtggatgagccagtggtacgaattgcagcagctggacagcaagttcctcgaacaggtgcaccagttgtacgacgattccttccctatggagattcgccagtatctggcccagtggttagagaaacaggactgggaacacgctgcaaatgacgtgagcttcgccacaatccgctttcacgatctgctctcacaactggacgaccagtactcgagatttagtctggagaacaactttctgctgcagcacaatatccgaaaatcaaaaaggaacctgcaggacaatttccaggaggatccaatccagatgtcgatgattatttactcctgtctgaaagaggagcgcaaaatattggagaacgctcagcgtttcaaccaagcacagtcaggaaacatacaatccaccgtgatgcttgacaagcaaaaggagctggattccaaggtgcggaacgtgaaagataaggtgatgtgcattgaacacgaaatcaagagtcttgaggatctccaggacgagtacgacttcaagtgtaagactcttcagaacagagaacacgaaactaatggggtagcaaagagcgatcagaagcaggagcaacttctgctgaaaaagatgtatttgatgctcgacaataagaggaaggaggttgtgcataagatcatcgaattactcaatgttacagaactgacacagaatgcgctcattaatgacgagttggtggaatggaagcgaagacagcagtcagcgtgcatcggcgggccgccaaatgcctgtttagaccagctgcagaactggttcacaatcgtggctgaatcccttcagcaggtccgacagcagctgaagaaactggaagagctggagcagaaatatacctatgagcatgatccaataacaaaaaacaagcaggtgctctgggaccgcacattttcgctctttcagcagctcatacagagcagttttgtcgttgaaagacagccttgtatgcctacgcacccgcaacggccccttgtgctcaaaacaggtgtacagttcacagtcaaactgaggctcctcgtgaagctccaggaattgaattacaatctgaaggtcaaggttctgtttgataaggacgtaaatgagaggaacacagtgaagggctttcgcaagttcaacatcctggggactcacaccaaggttatgaatatggaagagtcgaccaatggctcactcgcagctgagttcaggcatctccaattaaaggagcagaagaatgctgggaccaggaccaatgaaggtcctctgatagtcactgaagagctccactctctttcctttgagacccagctgtgccagcctggattagtgatcgacctggaaactaccagcctacctgttgtggtcatcagcaatgtatcccagctgcctagcggttgggcctctattctgtggtataatatgctggtggccgagcctaggaacttgagttttttcctgacccccccatgcgctaggtgggctcagctgtccgaagtactcagctggcagtttagtagcgtgacaaaaagaggactcaatgttgatcagctgaatatgcttggtgagaagctgctggggcctaacgccagccccgacggtcttatcccctggacaaggttctgcaaagaaaatatcaatgacaagaatttccccttttggttatggatagaatctatcctggaactgatcaagaagcatcttctcccgctttggaatgacgggtgcattatgggatttattagcaaggagagggaaagggccttgctcaaggaccagcagcccggaacttttcttcttaggtttagtgagtcctcccgtgagggggctatcacctttacatgggttgagagaagccagaacgggggagaaccagacttccacgcggtagaaccctacacgaaaaaagaattgtccgctgtgactttccccgatatcataagaaactataaagtaatggcagccgagaatattcctgagaatcctttgaaatatttataccccaatatcgacaaggatcacgcttttggcaagtattactctaggcctaaagaagccccagaacccatggagctggacgggcccaagggaactggatacatcaagacagaactcatctctgtaagcgaagtctag

SEQ ID NO: 17376 - DNA, 2253 bp, synthetic construct
  misc_feature 1..2253: note = Description of Artificial Sequence: Synthetic coding sequence
  source 1..2253: mol_type = other DNA
atgtcccaatggtacgagttacagcagctggactctaagttcttggaacaggtgcaccagctgtatgacgacagctttccgatggaaatcaggcagtatctggcacagtggttagaaaaacaggactgggagcacgccgcgaatgatgtgagtttcgcaacaatcagattccacgatctcctgtctcagctggacgatcagtatagtaggtttagtttggagaacaactttttactgcagcataacatcagaaaatccaaacggaatctgcaggataacttccaggaggatcccattcaaatgagtatgatcatatactcctgtctaaaagaggaacggaaaatccttgagaacgcccagcggttcaaccaggctcagagtggtaacatccagtcaaccgtaatgctcgacaagcagaaggaactggatagcaaggtgaggaatgtaaaagataaggtcatgtgtatcgagcatgaaatcaaatccttggaggatttgcaggacgagtatgatttcaaatgcaagaccttacagaacagggagcatgagacgaatggagtggccaagtccgaccaaaagcaagaacaattactgctgaaaaagatgtatctgatgctggataacaagcgcaaagaggtcgtgcataagatcatagaacttctgaacgtcactgagctcacacagaacgcgctgatcaatgatgagttagtggaatggaagcggagacagcagtcggcatgcatcggggggccgccgaacgcatgtcttgaccagttgcagaattggttcacaatcgttgctgagtcactccagcaggtgagacagcagctcaagaaactggaggaactggagcaaaaatacacatatgagcacgatcctattacaaaaaataaacaggtgctgtgggacaggacattctcgctattccagcagctgatccagtcttccttcgtcgtcgaaaggcaaccttgtatgcccactcacccacagcggcctcttgttctaaagacaggcgtccagtttaccgtgaaactcaggcttcttgttaagttacaggagctcaactacaatctgaaagtgaaggtgctatttgacaaggacgtgaacgagaggaacactgttaaaggatttcgcaagtttaatatcctcgggacacacacgaaagtgatgaatatggaagagtccaccaacggttctcttgcagccgaattcagacacctccagctgaaagagcagaaaaacgccggtacccgcacgaatgagggacccctcatcgttactgaggagctgcattccctgagtttcgagacccaactgtgccagcctgggctggtgatcgatcttgaaactacttctctcccggtcgtggtcatcagcaacgtgtcgcaactgccgtccggctgggccagcatactctggtataacatgttggtagcagaacctcgaaacctaagtttttttcttactcctccttgcgcaaggtgggcccaactaagcgaagtgctgtcgtggcagttttctagtgttaccaagcggggcttgaacgttgatcagcttaatatgttgggcgaaaagctgcttggccccaatgcgtcccctgatggtctcattccttggacaagattctgcaaggaaaacattaacgacaagaacttccccttttggctgtggatcgaaagcatcctggagctgatcaaaaagcatctcctccccctgtggaacgatggatgcattatggggtttatttccaaagagagagagcgagccctgctcaaggatcagcagcccggtaccttcctgctacggtttagtgagagttcccgggagggggcaattacttttacctgggtcgagagatctcagaacggtggcgagcctgattttcacgccgtggaaccctacaccaagaaagagcttagcgccgtgacattcccagacataattagaaattacaaggtcatggcagccgaaaatatcccagaaaaccctttgaaatacctctacccaaacatcgacaaggatcacgctttcggtaaatattacagtaggccaaaagaggcgcccgaacccatggagctggacggtccgaaaggtacaggatacatcaaaacagaactcatctccgtgtccgaggtgcacccctcacgcctgcaaaccacggataacctcctccctatgtcccccgaggaatttgatgaggtctcgcggattgtgggaagtgttgaattcgactctatgatgaacaccgtatag

SEQ ID NO: 17377 - DNA, 543 bp, synthetic construct
  misc_feature 1..543: note = Description of Artificial Sequence: Synthetic coding sequence
  source 1..543: mol_type = other DNA
atgtctcagtggtacgagctccagcaactggactctaagttcctcgaacaggtgcaccagctgtatgatgattcgttccctatggaaatccgccagtatctggcacaatggctcgaaaaacaggactgggagcatgcggccaatgacgtgagcttcgctaccattagattccacgacttgctgtcccagttagacgatcaatactcaagattcagcctcgaaaacaacttcttgctacagcataatataagaaaatcaaagcgtaacctgcaagacaacttccaggaagatcctatacagatgtctatgatcatttattcctgtttgaaagaagagcggaaaattctggagaacgctcagcggttcaaccaggcacagtctggcaacattcaatcaacagtgatgttagacaagcagaaagaattggacagtaaggttagaaatgtcaaagataaggtgatgtgtatcgagcacgagattaagagtttggaggatttgcaggatgaatacgatttcaagtgcaagactctccaaaataggtag

SEQ ID NO: 17378 - DNA, 213 bp, synthetic construct
  misc_feature 1..213: note = Description of Artificial Sequence: Synthetic coding sequence
  source 1..213: mol_type = other DNA
atgagccagtggtatgaacttcagcagctggattctaaatttctggaacaggtgcatcagctgtacgatgattcctttcccatggagatccgccagtatttggcccagtggctagaaaaacaagattgggagcacgccgccaacgatgtgagtttcgccacaatccgttttcacgacctcctgtcccaactggatgaccagtacagtcgctag

SEQ ID NO: 17379 - DNA, 582 bp, synthetic construct
  misc_feature 1..582: note = Description of Artificial Sequence: Synthetic coding sequence
  source 1..582: mol_type = other DNA
atgagccagtggtatgaattgcaacaattggactccaaatttctggaacaagtgcaccagttgtatgacgactccttcccaatggaaatacggcagtacctggcccaatggctggagaagcaagactgggaacacgccgccaacgatgtgtccttcgccacaataagatttcacgacttgctgtcacagctggatgaccagtattctcgcttcagcctagaaaacaactttctgctccaacataacatccgtaagtctaaaaggaacctccaagataatttccaggaggacccaatccaaatgtcaatgatcatttactcttgccttaaagaagaaagaaagatccttgagaacgctcagaggttcaatcaggcacagtcaggcaacatacaatccactgtaatgttggacaagcaaaaagaattagattcaaaggtgcggaatgtaaaggataaggttatgtgcattgaacacgagatcaaatccctggaggatctgcaagacgaatacgacttcaaatgcaaaacactgcagaaccggggtagcagctctcaaaataatcgggtggctgagtgtcattag

SEQ ID NO: 17380 - DNA, 453 bp, synthetic construct
  misc_feature 1..453: note = Description of Artificial Sequence: Synthetic coding sequence
  source 1..453: mol_type = other DNA
atgagccagtggtacgagttacagcaacttgacagcaagtttctggagcaggttcaccagttatacgacgactctttccccatggagatccggcagtacctggcccagtggctggagaagcaggattgggagcacgctgccaatgatgtgtcctttgcaaccatccgtttccacgatctgctcagccaactcgacgatcagtattccagattctccctggagaataatttcctgctgcagcataatattcggaagtccaagagaaatttgcaggataacttccaggaggaccctatccagatgagcatgatcatttacagttgtctcaaagaggaaagaaagatcctcgaaaacgcccaaaggttcaatcaggcgcaatccggaaatatccagagtaccgtcatgttggacaaacagaaggagcttgattctaaggtccgaaacgtgaagtag

SEQ ID NO: 17381 - DNA, 582 bp, synthetic construct
  misc_feature 1..582: note = Description of Artificial Sequence: Synthetic coding sequence
  source 1..582: mol_type = other DNA
atgtcccagtggtatgagctgcagcagctggactctaaatttctggaacaggtacaccagttatatgacgattcattcccaatggaaatccgccagtatctcgcccagtggctggagaaacaggactgggaacacgcagctaacgatgtgagtttcgctaccattagatttcacgatctgcttagccagcttgatgatcaatatagcagattctccttagaaaacaattttttactccaacacaacattcggaagagtaaaagaaacctgcaagacaacttccaggaggatccaatccagatgtctatgattatttatagttgtctaaaagaggagcgaaagatccttgagaacgctcagcggttcaaccaagcgcagagcggaaacatacagtccacggtgatgttagacaagcaaaaagagttggactctaaggttaggaatgtgaaggacaaagtgatgtgcatcgaacatgaaattaagtcgctggaggacttgcaagatgagtatgactttaagtgcaagactctgcaaaaccgcgggagctcttctcaaaataatcgagtggcagagtgtcattag

SEQ ID NO: 17382 - DNA, 483 bp, synthetic construct
  misc_feature 1..483: note = Description of Artificial Sequence: Synthetic coding sequence
  source 1..483: mol_type = other DNA
gaatgccacgaggatccaatacagatgtccatgataatttacagctgtttaaaagaggaacgcaagattttggagaatgctcaacggttcaatcaggctcaatccggcaatatacagagtacggtaatgctggacaagcaaaaagaattagactcaaaagtgcgtaacgtaaaagataaagtgatgtgcatcgagcacgaaatcaaaagtcttgaagacttacaggatgaatatgacttcaagtgtaagacccttcagaatcgggaacatgagaccaacggcgttgctaaatccgatcagaagcaagagcagctgctacttaagaagatgtacctcatgctggataacaagagaaaagaagtggtccacaaaataatcgagctgctcaacgtcacggaattaacgcagaacgcccttatcaacgacgaattggtcgaatggaaaagaaggcaacagtctgcatgcattgggggcccgccctag

SEQ ID NO: 17383 - DNA, 2556 bp, synthetic construct
  misc_feature 1..2556: note = Description of Artificial Sequence: Synthetic coding sequence
  source 1..2556: mol_type = other DNA
atggctcagtgggaaatgctgcaaaatttggatagccctttccaggaccagttacatcaactttactcacattcgctgcttccagtcgacattagacagtacctcgccgtttggattgaagatcagaattggcaggaagccgctctgggatctgacgacagcaaggctaccatgctgttctttcactttctggaccagttgaactacgaatgcggtcgatgctctcaagacccagagtcactgcttttacagcataacctgagaaaattttgcagggatatacagcccttttcacaggatccaacacaattagccgaaatgatatttaacctgctgctggaggaaaagaggattctgatccaggctcagcgagcacaattggagcaaggcgagcccgtccttgagacacctgtcgaatcgcagcagcatgagattgagtcccggattctggacctcagggccatgatggaaaagctggtaaaatcaatcagccagttgaaggatcaacaggacgtgttttgcttccgctataagatacaggccaagggcaagactccctcccttgatcctcaccagaccaaggagcagaaaattctgcaggaaacactcaatgaactggacaagcgaaggaaggaagttttggacgcgtcaaaggcgttgctgggtcgtctaaccacccttatcgagctgctgctgccgaagctggaggagtggaaagcacaacaacagaaagcctgcattcgcgcgccaattgatcacggactcgagcagcttgagacatggtttaccgcgggcgcaaagctgttatttcatttgcgacagctcctgaaggagctcaaggggctgtcttgtcttgtgtcttatcaggacgatccactgaccaagggtgtagatctaaggaatgcccaagtgacagaattgttgcagcgcctgctgcaccgggctttcgtagtggagacgcaaccgtgtatgccacagacgccgcatcgccccctgatccttaagacaggcagcaagttcacagttcggacgaggttgctggttaggctacaggaaggcaacgagtcactgacagttgaggttagcatagatcgcaatccaccgcagcttcaaggtttccggaaattcaatatactgacctccaaccaaaagacactcacccccgaaaaggggcagtcacagggcttgatctgggatttcgggtatctgactcttgtggaacagcgaagtggcggcagtggcaaaggcagtaataagggaccattgggtgtcacagaggagctgcacatcatttccttcactgttaagtatacatatcaagggctgaaacaagagctgaaaaccgacactctccctgttgtgatcatttctaatatgaatcagttatcgatcgcttgggccagtgtgctctggttcaacctgctgtcacctaatctccaaaatcagcaattctttagcaatcctcctaaggctccttggtcgctgttagggccagccctcagttggcagtttagttcatacgtggggcgtgggctaaattctgatcagctgtcaatgctgcgtaataagctgtttggacagaactgcaggacagaagaccccctgctgtcttgggcggattttaccaagagagaatcaccaccaggcaagctacctttctggacctggttggataagattttagagttggttcatgatcatcttaaagatctctggaatgacggcaggattatgggttttgttagccgatcccaagaaagacggttgttaaagaagactatgtcaggcacattccttctccgcttttccgaatcatcagaaggtggtatcacttgttcgtgggttgagcaccaggatgatgacaaggtgcttatttacagtgtccaaccctacaccaaggaagtcttacagtcacttccactgacggaaattatacgccattatcagttgctgaccgaggagaacattcccgaaaatccgctacggttcctatatccgcgcattccacgggatgaggcatttggctgttattaccaggagaaggtgaaccttcaagaacgccgcaagtatttgaaacatcgccttattgtggtgagcaataggcaggttgatgaactccaacaacctcttgagctgaagcctgaaccagagttggagtctctcgagttggagctggggttagtccccgagccagaactaagcttagaccttgaacctctccttaaagccgggttggatctgggtcccgagttggagtcagtcctcgaatcgacactggagcctgttatagaaccgacactatgtatggtatctcagacagtcccagagcccgaccaaggaccggtcagccagcctgtcccagagccagaccttccatgcgatttgaggcacttgaacaccgagcccatggagatttttcgcaattgcgttaaaatagaggaaataatgccaaatggagatccgcttctggccggacaaaacaccgtggacgaagtgtacgtctcgaggcctagccacttttacacagatggaccgctgatgccttcagatttttag

SEQ ID NO: 17384 - DNA, 1383 bp, synthetic construct
  misc_feature 1..1383: note = Description of Artificial Sequence: Synthetic coding sequence
  source 1..1383: mol_type = other DNA
atggctcagtgggagatgcttcaaaatctagattctcccttccaggaccagctgcaccagctgtacagtcacagtcttctgccagtggacatccgccaatacctagctgtgtggattgaggaccaaaattggcaggaagcagccctcgggagcgacgactccaaggctacgatgctgttcttccacttcctagaccaactcaattatgagtgcgggcgctgcagccaagacccagagtcgctgctgttacagcataaccttcgcaagttttgccgggacatccaagatcccacacagctggccgaaatgatctttaatctgctgttggaggagaaacggatacttattcaagcacagcgtgcacaactcgagcagggagagcctgtactagagacccctgtggaatctcagcaacacgaaatagagtcacgaattcttgacctgagagctatgatggagaaacttgtgaagtcgattagccagctcaaggatcaacaggatgtcttctgctttcggtataaaatccaagccaaggggaaaaccccctcgctcgatcctcaccagacgaaggaacagaagattctccaggaaacacttaacgagttggacaaacggcgaaaggaggtgctggacgcgtctaaggccctcttggggagactgacgactctgattgagctgctgcttccgaagttggaagaatggaaagcacagcagcaaaaagcctgcattagagctcccattgaccatggcctagaacagctagaaacatggttcacggctggcgcaaaactactgttccatctccggcagctgctgaaggagctaaagggcctttcatgcttagtcagttaccaagacgatcctttaaccaaaggagttgaccttcgaaatgcacaggtgaccgagctgctccaaagactactgcatagggcatttgtggttgaaacccagccctgtatgcctcaaacaccccaccgacctctcatactcaaaacggggtccaagttcaccgtccgtacccgcctcctggtcagattgcaggagggtaacgagtccctaacggtggaggtttcaattgatagaaatccacctcagctgcagggatttcgcaagttcaacatcctgacttcaaaccagaaaacactcacccctgaaaagggtcagagtcagggcctcatctgggacttcggctacctgacgctggtggagcagaggtccggcggttcaggcaaaggcagcaataagggcccgctgggtgtcactgaggagctgcacattatctcctttacagtaaaatacacctatcagggcctcaaacaggagctcaaggtaagcgagaacggaggccaaggtgaaaggaagcagttgtggaagaaggcttag

SEQ ID NO: 17385 - DNA, 2544 bp, synthetic construct
  misc_feature 1..2544: note = Description of Artificial Sequence: Synthetic coding sequence
  source 1..2544: mol_type = other DNA
atggcccagtgggaaatgctccagaacttggactcgccgttccaagatcagttgcaccagttgtactctcactcattacttcccgtggacattcggcaatatctggccgtgtggattgaagaccagaactggcaggaagcggcgctgggctcagatgactctaaggcgacgatgctgttcttccatttcttggatcagctcaactatgagtgcggacgctgctcgcaggacccagagagtctgctgctgcagcataacctgcggaagttttgcagagacatccaggacccaacccagctggcagagatgattttcaacttattactggaggagaaaagaatcctgattcaggcccagcgcgcccagctggagcagggcgagccagttctggagacacctgtggaatctcaacagcatgagatcgagagccggatcctcgatctaagggctatgatggaaaaactggtgaaaagcatctctcagctgaaagaccagcaggacgtgttctgttttcgctacaagattcaagccaagggcaagacccctagccttgacccccatcaaacaaaggaacagaagatcttgcaggagacattgaatgaacttgacaaacgcagaaaagaagtgttggacgcctccaaagcgttgctcggcaggctgacaacactgattgagctcctgctgcctaagttagaagagtggaaagcacagcagcaaaaggcctgcattcgtgccccgatcgatcacggccttgaacagctggagacctggtttacagccggcgcaaagctgttgtttcacctgaggcaactgttgaaggagcttaaaggactgtcgtgccttgtgtcctatcaggatgaccccttaactaaaggggtggacctgagaaacgctcaggtgaccgaactgctgcaacggctgctgcaccgggccttcgttgtcgaaacccagccgtgtatgccccaaacaccacatagaccccttatactaaagaccgggagtaagttcacggtccgcacacgtctattggttaggctccaggaagggaacgaatctttgacagtggaagtctccattgatcggaatcccccccagttgcaaggttttcgaaagtttaatatcctcactagtaaccaaaagaccctgaccccagagaagggacagtctcagggcctgatctgggacttcggatacctcaccctcgttgaacagcggtctggcggatcaggcaagggcagcaataaggggccattgggggtgaccgaggagctacatatcattagctttacagtgaagtacacctaccaagggctgaaacaggagctgaaaactgacacgttaccagtggtaatcatctctaacatgaaccagctgtctattgcctgggccagtgttctgtggttcaacctgctgtctcccaacctgcagaatcagcagtttttcagcaaccccccgaaggccccatggagcctcttgggaccagcactgtcctggcagttctcaagctacgtgggacggggcctgaatagtgatcagctctcaatgttaaggaataaactgtttgggcagaattgccgaacagaggatcctctgttgtcttgggccgattttaccaagcgtgagagcccccccggaaagctgcccttttggacctggctggataaaatcctcgaactcgttcacgatcacttgaaagatctttggaatgacgggagaattatgggctttgtctccaggagccaggagaggcggttactgaagaagacaatgtcgggaacctttcttctgcggttttctgagagttccgagggcggtattacatgtagctgggtggagcatcaagacgacgacaaggtgctcatctatagcgtgcagccttacacgaaggaggtgcttcagtccttgcccctcactgagatcattaggcactaccagctgcttacggaagagaacattcccgaaaatcccctccggttcctgtatccgcggatccctcgtgatgaagcatttggctgttactaccaggagaaggtcaatctccaggagcgccgcaagtacctgaagcatcgcttaattgttgtgtccaatcgccaggtcgacgagcttcaacagccgttagagctaaagcctgagcccgaactagaatccctcgagctggagctgggcctggtccccgaacccgagctgtccctggatttagagcccctgctgaaggcggggctggaccttggcccggagctagagtcagtacttgagtcaactttggaaccagtcatcgaacccactctatgcatggtctctcagactgtgcccgagcccgaccaaggcccggtctctcagcccgtgcccgagcccgacctcccgtgtgacctcaggcacctaaacaccgaacctatggaaatatttagaaactgtgtgaagattgaggaaatcatgccaaatggagacccgttgctggctgggcaaaatactgtcgatgaagtctacgtgagtagaccgtcacatttctataccgacggccctctcatgccatccgacttttag

SEQ ID NO: 17386 - DNA, 2313 bp, synthetic construct
  misc_feature 1..2313: note = Description of Artificial Sequence: Synthetic coding sequence
  source 1..2313: mol_type = other DNA
atggcccagtggaatcagctgcaacagctggataccaggtatttagaacaactgcaccagctatactctgatagcttccctatggagctcaggcagtttctagctccttggattgagtctcaagactgggcctatgccgcttccaaagagtctcatgcaaccctggttttccacaaccttcttggtgagattgatcagcagtacagcagatttctccaggagagcaacgtattgtaccaacacaacctgcgccggataaagcagtttttgcagtcacggtaccttgagaaacccatggaaatcgcacgcatagtggcacgatgcctgtgggaggaaagtcggttgctacagactgctgctacagccgcacagcaggggggccaagccaatcacccaacagccgctgttgtcacggaaaagcagcaaatgttggaacagcacctgcaagatgtgaggaaacgcgtgcaggacctggagcagaaaatgaaggtggttgaaaacctccaggatgatttcgactttaattataaaactctgaagtcccagggagacatgcaggatttgaatggaaacaatcaatccgtaacacgtcagaagatgcaacagctggagcagatgctgaccgctctggaccagatgaggaggagtattgtaagtgagctggcgggattactgagcgccatggagtatgtgcaaaagacattgacggacgaagagcttgcagactggaaaaggcggcagcaaatagcctgcatcggggggccccctaacatttgtcttgataggctcgagaattggattacatccttagcagagtctcagctgcagacccgacagcagatcaagaagctggaggagctccagcagaaagtgagctataaaggcgaccctatcgtccagcaccgcccaatgctggaagagagaatcgtggagttattccgtaatctgatgaagtcggcatttgtcgtagagcggcaaccttgtatgcccatgcatcctgatcgcccactggtgatcaaaacaggggtgcaattcacaactaaggtgcggctgctggtgaagtttcctgaacttaactatcaactgaaaataaaagtgtgcatcgataaggatagtggggatgtagccgctctgagggggtctcgtaagttcaatatcttaggtacaaatacgaaagtgatgaacatggaggagtcaaacaacggctccctgtccgctgagttcaagcacctgaccctcagagaacaaagatgcgggaatggagggagagctaactgtgatgcctccttaatcgtgaccgaggagcttcacctgattacattcgaaacagaggtgtaccaccaagggctgaagattgacttagagactcacagcctgcccgtagtcgtcatcagcaacatatgccagatgcctaacgcctgggccagtatattgtggtacaatatgcttaccaacaaccccaagaatgtgaacttcttcacgaagcccccgatcgggacctgggaccaggtggctgaagtcctgagctggcagttttccagcaccaccaagcgcggcctgtccattgaacagcttacaactctcgccgaaaagctgctggggccaggtgtgaactacagcggatgccaaattacctgggctaaattttgtaaggagaacatggcgggaaaaggtttctcgttttgggtgtggcttgataacatcatcgacctggttaaaaagtatatactggctttgtggaatgaagggtacataatgggattcatctctaaggaacgtgagcgagcaatcctgtctacgaagccacctggaaccttccttcttaggttcagcgaatcttcaaaggagggtggcgttaccttcacatgggttgagaaagacatttcaggcaagacccagatccagtcagtggagccctacacaaagcaacaactcaacaatatgtctttcgctgagataattatggggtacaaaatcatggatgctactaacatcctggtaagtccgctggtctacctgtacccagatatacctaaggaggaagcctttggcaagtactgcagaccagaaagtcaagagcatcctgaggctgaccccggctctgcagccccatacctaaagaccaaattcatttgtgtgacacctacgacctgttcaaatacaatcgacctcccaatgtcccctcggactctggacagtctcatgcagtttggaaacaatggcgagggggctgaaccatccgccggtggtcaattcgaatctttgacattcgacatggaattaaccagcgagtgcgccacaagcccaatgtag

SEQ ID NO: 17387 - DNA, 2019 bp, synthetic construct
  misc_feature 1..2019: note = Description of Artificial Sequence: Synthetic coding sequence
  source 1..2019: mol_type = other DNA
atggaaattgccagaatcgtcgctagatgcttgtgggaggagtctcgtttgctgcaaaccgcagctaccgccgctcagcagggcggccaggcgaatcaccctaccgcagcggtcgtgactgagaagcagcagatgctagagcagcacctccaggacgtgcgaaagcgagttcaggatcttgagcagaagatgaaggtggtggagaatttgcaggatgattttgacttcaactacaagaccctgaagtcccagggggacatgcaagacctaaatggtaataaccagtctgtgaccagacagaaaatgcagcagttggagcagatgcttactgcactcgatcaaatgagacggtccattgtcagtgagctggctggtctgctttcggcgatggaatacgtacagaaaacacttacagacgaggagctggccgattggaagaggcgtcagcagatcgcgtgtatcgggggaccccctaacatatgtctagataggctggagaattggatcacatcactagccgagtcgcaactccagacccgacagcaaattaagaaactggaggagttgcagcagaaagtgagctacaaaggagaccccatagtgcagcataggcctatgctagaagagaggatcgtcgagttgtttagaaacttgatgaaatctgcctttgttgtcgagaggcagccctgcatgcctatgcacccagacagacccctagtgattaagactggtgtccagtttaccacgaaagtgcggctgctcgttaaattcccagaattgaactaccagctcaaaatcaaagtttgcattgataaggattccggcgacgtcgcagcactgcgaggaagtagaaagtttaatattctggggaccaacacgaaagtcatgaatatggaggagtctaacaacggctcactgagtgccgagttcaagcacctaactttaagagaacagagatgtggcaacggcggccgagccaactgcgacgccagcttgatcgtgactgaagagctgcacttgatcacattcgagactgaagtgtaccaccaggggctcaaaatagacctggaaactcattccctacctgtggtcgtaatcagcaacatctgccagatgcccaacgcatgggccagcatcctgtggtacaacatgctcacaaataatcccaaaaatgttaactttttcacaaaaccccctattggcacctgggatcaggtggccgaagttctgagttggcagttctcttctaccaccaagaggggcctgagtattgagcagttaactacacttgctgagaagctcttaggcccaggcgtaaattacagcggatgccagattacatgggctaagttttgtaaagaaaatatggccggaaaagggttcagtttttgggtgtggttggacaacattatcgaccttgtgaagaaatatattctggcgctctggaatgagggctacataatgggtttcatcagcaaggaaagggaacgagctattctgagcactaagccccccggcacatttctgctgagattttccgagtcttccaaggaaggaggggtcactttcacatgggtggagaaagacatatcggggaaaacacagattcagtccgttgagccttatacgaagcaacagttgaataatatgtcttttgctgaaattattatggggtacaagatcatggacgccactaatatcctcgtgagccccctcgtatatttgtaccccgacatcccaaaagaagaagcatttggcaaatactgtagacctgaaagtcaggaacaccctgaggcagacccaggatctgctgccccctatctgaaaaccaagtttatatgtgtcacacccacaacttgttcgaatacaatcgacctgccaatgtccccgcggacccttgacagtttgatgcagtttggcaataacggagagggagctgaaccatccgctggcggccagtttgaatcattgacatttgatatggagctgacctcagaatgtgccacctcccccatgtag

SEQ ID NO: 17388 - DNA, 2310 bp, synthetic construct
  misc_feature 1..2310: note = Description of Artificial Sequence: Synthetic coding sequence
  source 1..2310: mol_type = other DNA
atggcacagtggaaccagctccagcagttggatacacggtatctggaacagctccatcagctctactccgactctttccctatggaactaagacagttcttggcaccttggatcgagagccaagactgggcctacgctgccagtaaggaatcccatgctacgctggttttccataatttactgggcgagatagaccaacagtacagccgatttttacaggagtccaacgtgctgtatcagcacaatctgcgccggatcaagcaatttctgcagtcacgatatctggagaagccaatggagattgctcgcatagtggcaaggtgcctgtgggaggaaagcaggttgttgcagaccgccgccaccgcagcgcaacagggcggccaggccaaccaccccacagctgcggtggttacggagaaacagcagatgctagagcagcaccttcaggacgttcgcaaacgagtgcaggacttggaacaaaaaatgaaggtcgtggagaacctgcaagatgacttcgatttcaactataagactctgaaaagccagggggacatgcaggacttaaatgggaacaaccagagtgtaactcggcaaaagatgcagcagttggagcagatgttgacagctctcgaccagatgagacggtcgattgtgagcgagctcgcaggactgttgagcgcaatggagtatgtacagaagactctgaccgatgaggagctggctgattggaagcgtagacagcagatcgcatgtatcggcggtcccccgaatatctgcctcgaccggctagagaactggattacatcacttgctgagtcacaacttcagactagacagcagataaagaaactggaggaactgcagcagaaagtgagttacaaaggcgatcccatcgttcagcacagaccaatgctcgaagaaaggattgtcgaactatttcggaacctcatgaaatccgcattcgtggtggagaggcagccatgtatgccaatgcacccggatcgtcccctggtgattaaaacaggcgttcagtttactacaaaggtgcggctcttggtgaagtttcccgagctgaattatcagcttaagataaaagtgtgcatagataaggattccggtgatgtggctgctctacgcggcagtagaaagtttaacatcctgggtacaaacaccaaagtcatgaacatggaggaaagtaacaacggctctttgtcagctgaatttaagcacctgacattgagagagcaaagatgtggtaatgggggacgcgcaaattgtgatgcgtcattgatcgtgactgaggaactgcacctgattacatttgagaccgaggtgtatcaccagggccttaagattgacttggaaacccacagtctccctgtggtggtgatcagcaatatctgccagatgccgaatgcctgggccagtatcttatggtacaacatgcttactaacaatcctaagaatgtgaattttttcactaagccacctatcggaacctgggatcaagtagccgaagtcctgtcttggcagttcagcagcaccaccaagcgtggcttgtcaatagaacaactaactacactagctgagaaactcctgggcccgggggttaattactccggatgccagatcacttgggcaaagttctgtaaagagaacatggcaggtaaggggttctccttctgggtgtggttggacaacataatcgaccttgttaagaaatatatcctggccctctggaatgagggctatattatgggtttcataagtaaggagcgggaaagggcaatcctctctaccaagccacccggtacattcctgctccggttcagcgagagctccaaagaagggggagtgacattcacctgggtggagaaggacattagtgggaagacgcaaattcagagtgtggagccctacactaaacagcaactgaacaacatgtcctttgcggaaattattatgggttataagattatggatgccaccaacatcttggtgagccctctcgtgtacttgtaccccgatattcctaaggaggaagcatttgggaagtactgtcgtcctgagtctcaagaacaccctgaggctgaccccggggccgccccttacctaaagacaaaattcatctgtgtgacacccactacatgttctaataccatcgacctgccaatgtccccgcgaacactcgactccctgatgcaatttggaaacaatggtgaaggtgctgagccaagtgctggtgggcaattcgaatcgttaactttcgacatggagctaacaagcgagtgtgcaacgagccccatgtag

SEQ ID NO: 17389 - DNA, 2169 bp, synthetic construct
  misc_feature 1..2169: note = Description of Artificial Sequence: Synthetic coding sequence
  source 1..2169: mol_type = other DNA
atggcccagtggaaccagttacaacagctggatactcgctatctcgagcagctgcatcagctatactccgactcctttccaatggagctccgtcagtttttagctccgtggatagaatcccaagactgggcatatgcagcctcaaaggaatcgcacgccacactggtgtttcacaatctcctgggcgaaattgatcagcagtatagccgcttcctacaggagtccaatgtcctgtaccagcataaccttcgcaggattaagcaatttctccagtcccgttacctagagaagccgatggagattgcccgaatagtggcacgctgtctgtgggaggagagtaggctactccagaccgctgctacagcagcacaacagggcggacaggccaaccacccaacagcggccgtggtgacagagaagcagcaaatgcttgagcaacacctacaggacgtcagaaaaagggttcaggacctggagcaaaagatgaaagtggtcgagaatctgcaagacgatttcgatttcaattacaagaccctgaagtctcagggggacatgcaagaccttaacggaaataatcaaagcgtgacaagacagaaaatgcagcagcttgaacagatgttgacagccctggatcagatgcggcggagcatcgtatccgagttggccggcctactttctgctatggagtatgtccagaaaacgttaacagacgaggagcttgcagactggaaaaggcggcaacaaattgcttgtattggcggaccacccaatatttgcctcgaccgcctggagaactggattactagcctagcagagtcgcaactgcaaactaggcagcagatcaaaaagctggaagagcttcaacaaaaggtctcatataagggggacccaatagtacagcatcgtcctatgctggaggagaggattgttgagttatttcgtaatttgatgaagagcgcgttcgttgtcgagcgccaaccctgcatgccaatgcaccccgaccgaccgctggtgataaaaaccggggtgcagtttacaacaaaggttcgactgctggtgaagttccccgagcttaactaccagctaaaaataaaggtttgcattgacaaggatagcggagacgtggcggcattaagagggtcacgcaaattcaacattctcggcacaaatacgaaagtaatgaatatggaagagtcaaacaacggctccctaagtgctgagttcaaacatctcaccctgagagagcagagatgtggtaacggggggagagcgaattgcgacgcaagtctgattgtgacagaagaattacatctaatcacatttgaaacggaagtgtatcaccagggactcaagattgatcttgagactcacagcctccccgtcgtcgtgatttccaatatttgccagatgccaaatgcttgggcgagtatcttatggtataatatgctaactaacaaccccaagaatgttaacttcttcaccaaacctcctattgggacctgggaccaggtcgctgaagtgctctcttggcagtttagctcaaccacgaagagaggactttctattgaacagcttacgaccttggctgaaaaacttttaggtcccggggtaaattactccggatgtcagatcacctgggccaaattttgtaaagagaacatggccggaaaggggttctcattttgggtctggctcgataatattatcgatctcgtaaaaaagtatattctggctctatggaacgaaggctatatcatgggctttattagcaaggagagggagcgagctattctgagcacaaagcctcctggaacatttctcctccgctttagtgagtccagtaaggaaggcggcgttactttcacctgggtcgagaaagatatctcgggtaagactcagatccagagcgttgagccttacaccaagcagcagctaaacaatatgtcgttcgctgaaattatcatgggctacaagattatggacgccacaaacattttagtatcccccctggtgtacctgtacccagacatacctaaggaggaagccttcggtaagtattgtcgcccagagagtcaagagcaccctgaggcagaccccggcagtgcagctccgtacctgaagaccaagtttatttgtgtcacccctttcattgatgccgtgtggaaatag

SEQ ID NO: 17390 - DNA, 2247 bp, synthetic construct
  misc_feature 1..2247: note = Description of Artificial Sequence: Synthetic coding sequence
  source 1..2247: mol_type = other DNA
atgtctcagtggaaccaggtgcagcaactggaaatcaaattcttagaacaggtggaccaattttatgatgacaatttccccatggagatccggcaccttctggcacaatggatcgagaaccaggattgggaggcagccagtaacaatgaaaccatggcaaccattctgctgcaaaatctcctgatacaactggacgagcagttgggcagagtctctaaggagaagaacctccttctgatacacaatctgaagagaattaggaaagtgctgcagggcaaatttcacggtaatccaatgcacgtggctgtcgtgatttccaattgccttcgggaggagcgcagaattctggcagcagctaacatgccagtgcaaggtcccctggaaaaatcacttcagtccagttccgtctcagagagacagcggaacgtggagcacaaggtggcagctattaagaattcagttcagatgaccgagcaagacactaaatatctcgaagacctgcaagacgagttcgactaccggtataaaacaatccagaccatggatcagagtgataagaattccgctatggtcaatcaggaagtgctcaccttacaggagatgctcaactccttggattttaaaaggaaagaggctttatctaaaatgacccagattatacacgagacagatttgctcatgaatacgatgttaatcgaagaactgcaggattggaagcgcaggcagcagatcgcctgcatcggagggccccttcataatggcctggatcaactgcaaaactgttttacattactggcggagagcttgtttcaactcagacgacagcttgaaaaactggaagagcagtcgaccaaaatgacttacgaaggtgaccccatcccgatgcagcgcacccatatgcttgaaagggtgacattcctgatctataacctatttaaaaatagttttgtggtggagagacagccctgcatgcctacccaccctcagcggcctctggtcctcaagactcttatacagttcaccgtcaagctaagactgctgatcaagctgcccgaactcaattaccaggtgaaggtcaaggcttcgatagacaaaaacgttagcacactgagcaacagaaggttcgttctttgcgggactaatgtgaaggccatgagtattgaggagtcatccaatggatccctgtcagttgagtttaggcaccttcagccaaaagagatgaagtcatcagcaggcggaaagggaaacgagggatgtcatatggttaccgaggaactccactctatcacgtttgagactcagatctgtctctatgggctgaccatcgaccttgagactagctccctgcccgtcgtgatgattagcaacgtgtcacagttacctaacgcatgggcttcaataatctggtacaacgtgtctacaaacgatagccagaacttggttttcttcaataatccaccccccgccaccctctctcaactcctcgaagtcatgtcttggcaattcagtagttacgtcggccggggcttgaattccgatcagttgcacatgctggctgagaaactgacggtgcagtcttcttactcagatggccacctgacctgggccaaattctgcaaagaacatctgccaggaaaatccttcacattttggacatggttggaggcgatcttggacctgattaagaaacatattctgcccttatggattgatggatacgtgatgggctttgtcagcaaagaaaaggagcggctgcttctcaaagacaagatgccagggacgtttctcttgagattcagtgagtcccacctgggtggcattacgttcacctgggttgatcatagtgagagcggagaggtgcgttttcactccgtcgagccctacaataaaggcaggctttcggcactcccttttgcggacattctaagggattataaggtgatcatggccgagaatattcctgagaacccactaaagtatctctaccctgatattcccaaggataaggcctttggcaaacattacagttcccagccctgcgaggtgagccggccaaccgaaagaggcgacaagggatacgtgccctcagtgttcatccccatcagtacaatccgatccgacagcacggagccccactccccatccgatctgctgccaatgtctcctagcgtgtacgcagtgctacgggaaaacctgagtccaaccactatagaaacagccatgaaaagtccctactcagccgaatag

SEQ ID NO: 17391 - DNA, 2247 bp, synthetic construct
  misc_feature 1..2247: note = Description of Artificial Sequence: Synthetic coding sequence
  source 1..2247: mol_type = other DNA
atgagtcagtggaaccaggtccagcagttggaaattaaattcctagaacaggtggaccagttttacgacgataacttccccatggaaattagacacttgctggcacagtggatcgaaaaccaagactgggaagccgcaagtaataatgagaccatggctaccatactgttacagaacttgctgatccagctggacgagcaactcggacgcgtcagcaaggagaagaatctgctacttattcacaacctcaaaagaattaggaaggtcctgcagggcaagtttcacggcaaccccatgcatgtggctgtagttattagtaattgcctgcgtgaggagcgacgcatcctggctgctgcaaatatgccagtgcaggggcccttggagaagtctttgcagtccagcagtgtttcagaacgacaacggaatgtcgagcataaagtcgccgcaattaaaaatagcgtgcagatgaccgagcaggacacaaagtatttggaggatcttcaggacgagtttgactaccggtataagaccattcagaccatggaccagagcgataaaaattctgccatggtgaaccaggaggtactgactctccaggagatgttgaactccctggatttcaagcgcaaagaagctctcagcaaaatgacgcagattatccatgagactgacctgctgatgaatacaatgctgatcgaggagcttcaggattggaagaggcgccagcagatcgcctgtatcggagggccgttgcacaatggactggaccagctccagaattgcttcacccttcttgcagagtcactgtttcagcttcgcaggcagctcgagaaactggaggagcaatccactaagatgacctacgagggagacccaattcccatgcagagaacacacatgctcgagcgcgtgaccttcctgatctacaatctgttcaagaattcttttgttgtggagcggcaaccctgcatgcccacccatccacagagacctctcgtccttaagacccttatacaatttactgtcaagctgcgcttgctgatcaaactgcccgaattgaactaccaggtcaaggtgaaggcctcaatcgataagaatgtgtctacactctctaatcgccgcttcgtcttgtgcgggaccaatgttaaagccatgtccattgaagaatcgagcaatggaagcttgtcagtcgaatttcggcacctccagccaaaggaaatgaaaagtagcgccggcggcaaaggaaatgaggggtgtcatatggtcaccgaagaactgcattctattacttttgagactcaaatatgtctctatgggttgacaattgatctagagactagctccttgcccgtcgttatgatttcgaacgtttcgcagttaccaaacgcctgggcttcgatcatttggtacaatgtgtccacaaacgattctcagaacctggttttcttcaataatccaccacctgctactctgtcccagttgcttgaagtgatgagttggcagtttagtagctacgtcggccgtggactgaactccgatcagctgcatatgttggccgagaaactaacagtccagtcatcttactccgacgggcatttaacgtgggctaagttctgcaaagagcatcttcccggaaaatctttcacattctggacctggcttgaggccatactggatctcatcaaaaagcacatactccccctgtggattgacggatacgtgatgggctttgtgtctaaagaaaaggaacggctcctgttaaaagacaaaatgcctggcacatttctgctccgcttcagcgaatcccatcttgggggaattacctttacatgggtggaccacagtgagtcaggcgaggtgcgctttcactctgtggagccatacaataaaggccgcctaagtgccttgccttttgcagacattcttcgagactataaggtcatcatggccgagaacatccctgaaaacccacttaagtatctataccccgatatccccaaagacaaagcctttgggaagcactactcaagtcagccctgtgaggtctccaggcccaccgaacggggcgataagggatatgtaccttcagtgtttatcccaatttcaaccatcaggtccgattcgactgagccccattccccaagcgatttgctgcctatgtccccctctgtgtatgcagtcctccgggaaaatctctccccaactaccattgagaccgcgatgaagagcccttatagcgctgagtag

SEQ ID NO: 17392 - DNA, 354 bp, synthetic construct
  misc_feature 1..354: note = Description of Artificial Sequence: Synthetic coding sequence
  source 1..354: mol_type = other DNA
atgagccaatggaaccaggtgcagcagttagagattaaattcctggagcaagtcgatcaattctacgacgataattttccaatggaaataagacacctcctagcgcagtggattgagaatcaggactgggaggccgcaagtaacaacgaaactatggccactattctcttacagaatctgctgatccagctggacgagcagctcggtagagtctccaaagaaaagaatctgctcttaatccacaatctgaaaagaatccggaaagttttgcaaagtccaggcctggctacagctcagctgcccttagatagacacggagagacttgtatacaaaggtccaaatcttgcccatag

SEQ ID NO: 17393 - DNA, 78 bp, synthetic construct
  misc_feature 1..78: note = Description of Artificial Sequence: Synthetic coding sequence
  source 1..78: mol_type = other DNA
atgagccagtggaaccaggttcagcagcttgaaataaagtttctggagcaggtagatcaattctacgacgacaattag

SEQ ID NO: 17394 - DNA, 240 bp, synthetic construct
  misc_feature 1..240: note = Description of Artificial Sequence: Synthetic coding sequence
  source 1..240: mol_type = other DNA
atgtcccaatggaatcaggtgcagcagcttgagataaagtttctcgagcaggtggatcagttctacgacgataactttcccatggaaatccgacatcttctggcccagtggatcgaaaaccaggactgggaggccgcgagcaataatgagaccatggctacaatactcctccagaatctcctgattcagctggatgaacagcttgggcgagtgagtaaggaaaaaaacctgctcctgtag

SEQ ID NO: 17395 - DNA, 2385 bp, synthetic construct
  misc_feature 1..2385: note = Description of Artificial Sequence: Synthetic coding sequence
  source 1..2385: mol_type = other DNA
atggctgggtggatccaggctcagcagcttcagggcgacgctctgcgacagatgcaggtgctgtacggtcaacatttccccatcgaggttcgccattacctggcccaatggattgagtcccagccatgggacgctatcgacttggataatccccaggacagagcccaggcaactcagttactggagggcctcgtgcaggagcttcagaagaaggccgagcaccaggtaggggaggacgggtttttgctgaaaattaagctggggcactatgccacccaactccagaaaacatatgataggtgtccgttagagctggtaaggtgtatcaggcacatcctctataatgaacaacgactggtgcgggaggcgaataattgtagctcccctgcgggtatcctcgtggatgcaatgtctcagaagcacttacaaataaatcagacattcgaagagctgcgcctcgttactcaggacacagagaatgaattaaaaaaattgcagcagactcaggaatatttcattatacaatatcaggaaagcttacgcattcaggcacagtttgcacagcttgcccagctcagtccccaagaacgactctctcgcgaaaccgccctgcaacaaaaacaggtatctcttgaggcatggttacagcgcgaagcccagacactccaacagtatagggttgagctggcagagaagcaccaaaaaaccctgcagctcctgaggaaacaacaaaccatcattctcgatgatgagctgatccaatggaaacgtaggcaacagctggcaggcaacggtggaccaccagaaggctcacttgacgtgctccagagctggtgcgagaaactggctgagatcatctggcaaaatagacagcagatcagaagagccgagcacctgtgccagcaacttccaatcccaggcccagtggaagagatgcttgccgaggtgaatgccacaatcaccgatattatcagtgctctcgtcacatccacctttattattgagaagcagcctccacaagtattaaaaactcaaacgaaatttgcagccactgttcgcctgctcgtcggcgggaaactcaatgttcatatgaatcctcctcaagtaaaggcaacgatcataagcgagcaacaggcgaagtcactgttgaagaacgagaatacccgcaatgagtgctctggggagatcctcaataactgctgcgtgatggaatatcatcaggcgaccggcaccttatcggcacattttcggaatatgtctttgaagcgtattaagcgagccgataggaggggcgctgaaagtgtgactgaggagaagttcaccgtcctttttgagtctcagttctcagtgggatcaaacgagctcgtcttccaggtgaagactctgtctctccccgtggtcgttattgtgcatggcagtcaggaccacaatgccactgccaccgtgctttgggacaatgcattcgcagagcccggcagggtcccctttgccgtgcccgataaagtgctttggccccagctgtgcgaagccctgaacatgaaattcaaagcggaagtacagagtaataggggccttaccaaagaaaatctggtgttcctggcccagaaactgttcaacaactcctcctcacacctggaagactatagtggtctgtctgtcagttggtcccagtttaaccgtgagaacctccccggctggaactatacattctggcagtggttcgatggcgtcatggaagtgctcaagaagcatcacaagcctcattggaatgatggagctatcttgggattcgttaataagcagcaagctcacgatctcctcattaataagccggatggtaccttccttctgaggttctctgacagtgagattggcggcataaccatcgcctggaagtttgactccccggaaagaaacctgtggaatctgaagccattcaccaccagggattttagcatcaggtcgctggccgatcgattaggagacctaagctacttgatttatgttttcccggatcgccctaaagacgaggtattcagtaagtattacacacctgtgctggctaaggcagtggacggttatgtgaaaccgcagataaaacaggtggtgccagagtttgtgaatgcctcggccgatgccggcgggagttccgccacctacatggatcaggcgccatctccagcagtctgtccacaggctccctacaacatgtacccacagaatccagatcacgtgttggatcaggacggcgaatttgatctggatgaaactatggacgtggcccgtcacgtggaggagctcctcagaaggcctatggactctctggacagtagattatcacctcccgcggggctcttcacaagcgcccgcggcagtttatcctag

SEQ ID NO: 17396 - DNA, 378 bp, synthetic construct
  misc_feature 1..378: note = Description of Artificial Sequence: Synthetic coding sequence
  source 1..378: mol_type = other DNA
atggccggctggatccaggcgcagcagctgcagggtgacgcgctgcggcagatgcaggtcctttacggccagcactttcccattgaggtccgccactacttggcccaatggatcgagagccagccttgggatgcgattgacttggataatccacaggatcgggctcaggccacccaacttttggagggactggtccaggagttgcagaaaaaggccgagcaccaagtcggtgaagatggctttctactgaaaatcaagttgggtcactacgccacacaactgcaaaagacctacgatcggtgtccattggagctggtaaggtgcattagacatatactgtacaacgagcagagactcgttagggaggcaaataactag

SEQ ID NO: 17397 - DNA, 2376 bp, synthetic construct
  misc_feature 1..2376: note = Description of Artificial Sequence: Synthetic coding sequence
  source 1..2376: mol_type = other DNA
atggcaggatggatacaggcacaacaactgcagggggacgccctccgccagatgcaggtgctgtatggtcagcattttcctatcgaggtgagacactaccttgcacagtggattgaaagccaaccttgggatgctatagatttggacaatccccaggatagagcgcaagccacacagctgctggagggcttagtgcaggagctgcagaaaaaggccgaacaccaggttggtgaggacggttttctccttaaaatcaaactcggacactacgccacgcagcttcagaaaacctacgatagatgcccattagagctagtcaggtgcatccgacacattctttataacgagcagagactcgtacgtgaggcgaataattgtagtagcccggcagggatactggtcgacgcaatgtcacagaaacatttacagatcaaccagaccttcgaagagctccgcctggtgacacaggataccgaaaacgaattaaagaagcttcagcagacccaggaatatttcatcattcagtatcaggaaagcctgcgaattcaggctcaattcgcccagctggcccagctgagccctcaagaacgactatcacgcgagactgccttacagcagaagcaggttagtctggaagcgtggttacaaagagaggctcagacgctccaacaatatcgagtggaactggccgaaaaacatcagaagacactgcagctgctgcggaagcagcagacgatcatcttggatgatgagttgatccaatggaaaagacgtcagcaactcgctgggaacggaggaccccccgagggctcactcgatgtcctgcagtcttggtgtgagaagctggccgaaatcatatggcaaaaccgccagcagatccggcgcgctgaacatctctgccagcagcttccaattcccgggccggtcgaagagatgctagccgaagtaaacgcaaccataacggacatcattagcgcactcgtcactagtacattcatcattgagaagcagccaccacaagtcctcaagacccagacgaagttcgccgcaaccgtgcggcttttggtgggtgggaagctaaatgtccatatgaaccctcctcaggtcaaggccaccataattagcgaacagcaagctaagtctctgctgaagaatgagaacacgcggaatgagtgctccggtgagattctgaataactgctgtgtcatggagtatcatcaagcaacggggacgttgagtgctcacttcagaaatatgtccctgaaacggatcaagcgcgcagaccggcgaggggccgaatcagttactgaagagaaatttacagtactgtttgagagccaattctcagtgggcagtaatgagctggtgtttcaggtaaagacgctctccctgcccgtcgtagtgatagtccatggctctcaggaccacaatgctacagcaacggtgctgtgggacaacgccttcgctgaacccggccgtgtgcccttcgcggtccctgataaggtgctatggccccagctgtgtgaggccttaaatatgaagtttaaagccgaggttcaaagcaacagaggtctgacaaaagagaacctcgtatttttggcccagaagctctttaataacagctcaagccacctggaggactactctggcctctccgtctcctggagccagtttaatagggaaaacctccctggatggaattatacattttggcagtggtttgacggcgttatggaagtgttgaagaaacaccacaaaccgcattggaatgacggcgggttcgtcaacaaacaacaggctcacgaccttctcataaacaaacccgatggtacgtttctactccggttttccgatagtgagatcggagggatcaccattgcttggaagttcgattctccagaaagaaatctgtggaacctgaagcctttcactacaagagacttcagcatccgcagtctcgccgacagactcggcgacctctcatatctcatttacgtattccctgaccgcccaaaggatgaggtctttagcaagtactacacgccagtccttgcgaaggcggtagatggatatgtgaaaccacaaataaaacaggtggtcccagagttcgtgaatgcctctgccgatgctggaggttcatctgcaacctatatggaccaggcaccaagtcctgctgtgtgcccccaggcgccttacaacatgtaccctcagaacccagatcacgtactggaccaagacggggagtttgatttagatgagacaatggatgtcgcccgccatgttgaagagttattgcgacgtcccatggattccctggacagcaggctctctccgccagcaggccttttcactagcgccaggggcagtctgtcatag

SEQ ID NO: 17398 - DNA, 2298 bp, synthetic construct
  misc_feature 1..2298: note = Description of Artificial Sequence: Synthetic coding sequence
  source 1..2298: mol_type = other DNA
actgccatggccgggtggatccaggcacagcaactacagggcgatgccctgcggcagatgcaggtgttgtacggtcagcacttcccgatagaggtgagacattatctggcccagtggattgaaagtcagccgtgggacgctatagacctggataaccctcaagacagagcccaggccacacaactactggagggtctggtgcaggaattacaaaagaaggctgagcaccaagtgggcgaggacggattcctgctcaagatcaagctgggacactacgctacacagctgcagaagacctatgacagatgccccttggaactcgtgcgatgcatccgacatatcctatataatgaacaaaggctggtacgggaagcaaataattgttcctccccggcgggtatcctggttgacgccatgtcgcaaaagcatctccagatcaaccagaccttcgaagaactacgcttggtgactcaggatactgagaatgagctaaagaagctacagcaaacgcaagagtatttcattatccaataccaggagtctttgagaattcaggcacagttcgctcaactagcccagttgagcccgcaagagcgcctttctcgggagaccgcactccagcaaaagcaagtgtccctggaggcatggctgcagcgcgaggctcagacactgcagcagtaccgagtggaattggccgagaagcatcagaagacacttcagctcctgcgaaaacagcaaaccataatcctggatgatgagctgatccagtggaagcgcagacaacagttggccggcaatggaggccccccggagggcagcctggatgtgctccaatcatggtgcgaaaagctagcggaaatcatctggcagaacagacagcagattcgaagagccgaacatttatgccaacagctgcctataccagggccagtggaagagatgttggcagaggtgaacgccactataacagacattattagcgcccttgtgactagtacatttatcatcgaaaaacaacctccacaggtactgaaaacccaaaccaagttcgccgctaccgtcagactactcgtcgggggaaaactcaatgtccacatgaaccctccccaggtaaaagcaactattatcagcgagcagcaggccaagtcactgttgaaaaacgagaatacaagaaacgagtgctcaggagaaattctgaacaattgttgcgtgatggaatatcaccaggcaacaggcacactatccgcccactttaggaacatgagtttgaaaagaatcaagcgcgccgatagacgtggtgcagagtctgtaaccgaggagaagttcaccgtcttattcgagtcacagttttccgtcgggtccaatgagctagtctttcaagtaaagggacgggtgccctttgctgttccagacaaagtgctgtggccgcaactatgtgaggctttgaatatgaagttcaaagctgaagttcagtcaaatagaggcctcacaaaagagaatctagtgttcctggctcagaagttgttcaataatagctcctcccatttggaggattactcaggcctgtccgtctcatggtcccaattcaatagagaaaacttacctggttggaactatacattctggcaatggtttgacggggtgatggaagtactgaagaagcaccacaagccacattggaacgatggcgctattttgggctttgttaataaacagcaggctcacgatctccttatcaataaaccagatggaacatttcttctaagattcagtgattctgagattggcggaatcaccattgcatggaagttcgactcccctgaacggaacctctggaacctgaaaccttttaccaccagggacttctctattagatctctggccgatcgtcttggagatctttcttatttgatatatgttttcccggaccgaccaaaagacgaggtgttctccaaatattacacacccgtactcgccaaggccgtcgatgggtacgtcaaaccacagattaaacaggtcgtgccagagtttgtcaatgcgagcgcggatgcgggcggctcatccgccacatatatggatcaggcaccaagccctgcagtctgtcctcaagctccatataatatgtatccacagaatcctgaccatgttctagatcaggacggggagtttgaccttgatgaaacaatggatgttgcccgacacgtggaggagctactcaggaggcctatggattctctcgatagtaggctgagcccacccgccggtctgtttacttcagcccgcggatccctttcttag

SEQ ID NO: 17399 - DNA, 2295 bp, synthetic construct
  misc_feature 1..2295: note = Description of Artificial Sequence: Synthetic coding sequence
  source 1..2295: mol_type = other DNA
atggccggctggatccaggcgcagcaactgcagggagacgctcttcggcaaatgcaagtcctgtacgggcagcactttcccatcgaggttaggcattacctcgcacaatggatcgaaagtcagccgtgggatgccattgacctcgacaatccacaggatcgggcacaggccactcaattgcttgaagggctggttcaagaactgcagaagaaggcagaacaccaggtcggagaggatggcttcctgctgaagataaaactcggtcattacgcaacgcagctgcagtgttctagtcccgctggcatccttgttgacgccatgtctcaaaagcatctacagatcaatcagaccttcgaagagctgcgcctggtcacacaggataccgagaatgagctcaaaaaattgcagcaaacccaagagtatttcatcattcagtaccaggaatcccttcgaatccaggctcagtttgcccagctcgcccagttgagtccccaggaacgacttagtcgagaaaccgcgttgcagcagaagcaggtaagccttgaagcctggctgcagcgggaagcacagactctgcagcagtatagggtggagctggcagaaaagcatcagaagaccctgcagttactgcgaaagcaacagacaatcatacttgatgacgagctcatccagtggaagcggcgacagcagctggctggaaatggcgggccaccggagggctcactcgacgttctccagtcatggtgtgaaaaactcgctgagataatctggcagaatcgccagcaaattcggagggccgagcacctgtgccagcagttaccgattcctggtccggtggaagagatgctcgctgaagtgaacgctacgatcaccgatataatttccgcactcgtgacaagtacattcataattgagaagcagcctccacaggtactgaaaacccagacaaagttcgccgcaaccgttcgactgttggtggggggtaaactcaacgttcatatgaatccccctcaagtgaaggctacaattatatccgagcagcaggcgaaaagtctgctgaagaacgagaacacacgcaacgagtgtagcggcgagatcctgaacaactgctgtgttatggagtatcaccaggctacagggacactcagcgcccacttcagaaacatgagcctcaagcgaataaaacgcgcagaccgtagaggcgcagagtcagtaacagaagagaaatttactgtactttttgagagtcaattctcagttgggagcaatgaacttgtgtttcaggtgaagactctgtctctgcctgtggtggtcattgtgcacggcagtcaggatcacaatgccaccgcaaccgttctttgggacaatgcctttgctgaacccggtcgcgttccattcgctgtgccagacaaagtgctgtggccgcagttatgcgaagccctgaacatgaagttcaaagccgaggtgcagagcaacaggggcctaactaaagagaatctggtgttcctggcgcagaaactgtttaacaacagcagcagtcatttggaggactattctggtctgtctgtcagctggtctcagttcaatagagagaatctgccaggctggaactatactttttggcaatggtttgacggtgttatggaggtgctgaagaaacaccacaagcctcactggaacgacggagcaatcctcggctttgtgaacaaacagcaggcacacgacctgctgataaataaacctgatggcacctttctgctgagattctcagattccgagatcggcggtattactattgcatggaaattcgattcacccgaacgaaacctgtggaatctgaaaccatttaccacccgcgattttagtatcaggtctctggctgacagattaggtgatctgtcgtacctcatttacgttttccccgatcgccctaaggatgaggtattctctaaatactatactccagtgctggccaaggccgtggatggttatgtgaaacctcagataaaacaggtcgtgcctgagttcgtcaacgcgtcggcagacgcaggcgggtcatctgcaacctacatggaccaggccccctcccccgcagtgtgcccccaggccccctataacatgtatcctcaaaatcctgaccacgtactggatcaggatggggagtttgacctggacgagacaatggacgtggcacgccatgtagaagaactcttaagacgccccatggacagcctcgatagtaggctcagccctccagccgggctctttacaagtgcaaggggctcactttcctag

SEQ ID NO: 17400 - DNA, 2295 bp, synthetic construct
  misc_feature 1..2295: note = Description of Artificial Sequence: Synthetic coding sequence
  source 1..2295: mol_type = other DNA
atggcaggctggatccaggcccagcaattgcagggcgacgccctcaggcagatgcaagttctgtacggtcaacactttcccatcgaagtccggcattatctggcgcagtggatcgaatcccagccctgggatgcgattgatctggacaacccacaagacagggcacaggcaacgcaactcctggaaggacttgtccaggagttgcagaaaaaggccgagcaccaagtgggggaagatggattcttgctcaagataaagcttggacactacgcgactcagctgcagtgctcatccccagcaggcattttagtcgatgccatgtctcagaaacacctacagatcaatcaaactttcgaagaactacggctggtgacccaagatacagaaaacgagctgaaaaagttgcagcagactcaggagtatttcatcatccagtatcaggagtccttacgcatccaggcccaattcgcacagttagcccagctgtccccccaggagcggctgtcccgagagactgcgctccagcagaaacaggtgtccttagaagcttggttgcaacgggaggcccagacgctgcagcagtaccgcgtcgagctcgccgagaagcaccaaaaaacactgcagctgttgcggaaacaacagaccataattctcgacgatgagctcatacagtggaagaggcgtcagcagctggctggaaacgggggaccccccgaaggaagcctggacgtcctacagtcctggtgtgagaaactggcagaaataatttggcagaatcggcagcaaattagacgcgctgagcacctgtgccagcagttacccattccaggtcccgtcgaggagatgctggcggaggtgaacgcaacaatcacagacatcatctctgcgctcgttacgtcgacatttatcatagagaaacaacctccccaggtgttgaaaacacagaccaagtttgctgctactgtgagactcctggtgggcggtaagttgaacgtccatatgaatccccctcaagtcaaagctacaatcatatctgaacaacaggctaagagcctgctgaagaacgagaatacccgcaacgagtgttctggcgagatccttaacaattgttgtgtcatggagtaccatcaagcaactggaactttgtcagcacacttccgaaacatgtcactgaagcggatcaagcgtgctgatcgccgtggcgctgagtccgtgactgaggagaagttcacagtcctctttgagtctcagtttagcgtaggctccaacgaattggtcttccaggtgaagaccctcagtctgcctgtggttgtcatcgttcacgggtctcaggatcacaacgccacagcaactgtcctgtgggataacgctttcgccgagcccggccgagtaccctttgccgtcccagacaaagtgttgtggccacagctgtgcgaggctctgaacatgaagtttaaagccgaggtgcaatctaataggggccttactaaagaaaatcttgtttttctggcgcagaaattgtttaacaactctagctcccatctcgaagattactctgggctttcagtgtcgtggagccaatttaatagggaaaatcttccggggtggaattatacattttggcagtggtttgatggcgtcatggaggttctgaaaaagcaccacaagccccactggaacgatggagccatcctcgggtttgtgaacaagcagcaggcccatgacctactgattaataaaccagacggcacattcctactccgtttttccgattcagaaattgggggaatcacgatcgcctggaagtttgacagcccagagagaaacctttggaacctcaagcctttcacaaccagggacttttccattcgttctctggcagatcgcctcggggatcttagttacctcatatacgtctttccggatcggcctaaagatgaagtatttagtaaatactacaccccagtgctggccaaagcagtagacggctacgttaagccacagattaaacaggttgttcctgagttcgtcaacgccagtgccgacgctggggggtctagcgcgacttatatggatcaggcacccagcccagcggtttgtcctcaggcaccttataacatgtacccgcagaacccagatcatgtcctggaccaagatggagaatttgatttagacgagacaatggacgtggctagacacgtcgaagaactgcttagacggcccatggatagcttggacagccggctgtctcctcctgctgggttgtttaccagcgcacggggcagcctgtcctag

SEQ ID NO: 17401 - DNA, 2364 bp, synthetic construct
  misc_feature 1..2364: note = Description of Artificial Sequence: Synthetic coding sequence
  source 1..2364: mol_type = other DNA
atggccgtttggattcaggcccagcaactacaaggtgaagctcttcaccagatgcaggcactctacggtcagcacttccccattgaggtaaggcattacctgtcccagtggatcgagtcccaagcctgggactcagtggacttggacaatccgcaggagaatattaaagccacccaactcctagaggggctggtacaggagctgcagaagaaggctgaacaccaggtaggggaagacggcttccttctgaaaatcaagctgggccactacgccacacagctgcagaacacctacgacagatgcccaatggaattagttaggtgtattagacatatcctgtacaacgagcagcgtttggtccgggaggcaaacaacggttcttctcctgccggcagcctggccgatgccatgagccagaagcacctccagattaaccagacgtttgaggagctcaggctcgtcacccaggatacggagaatgaactgaaaaagctacagcagactcaggagtattttatcatacaataccaggaatcactgcgcatacaggctcagttcggccccctggcacaactttcccctcaagaacggctgagtcgggaaacggctcttcagcaaaagcaagttagcctagaggcctggttacagagagaggcacagacgctccaacagtatagagtcgaacttgccgaaaagcatcagaagaccttgcaactgttgaggaagcagcaaactattattctggacgatgaactgatacagtggaaacgacgccagcaactcgccggcaacggagggccccccgaaggcagtctcgatgttttgcagtcttggtgtgagaaactggcggagatcatatggcagaataggcaacagatccggcgtgccgaacacttatgccagcagctgcctattcccgggcccgttgaggaaatgctggctgaagtgaatgctacaatcaccgatataatatccgccctggtaacctctacgtttatcatagagaagcagccaccccaagttcttaagactcagactaagttcgctgcgactgtgcgtttgttagtgggcgggaagctgaacgtacatatgaaccccccacaggtgaaggcgacgatcatttctgaacagcaggctaagagccttctgaaaaacgagaacacaagaaatgattacagcggggaaattctaaataattgctgcgtcatggaatatcaccaggcgacggggacactgtccgcccactttcggaatatgagtctaaagagaatcaagcggtccgatcggcggggagctgagtccgttaccgaagagaaattcacgatcttattcgagagccagtttagcgttggcgggaacgaactggtgttccaggttaagaccctctctctccctgtggtagtgattgttcatggcagccaggataataacgctactgccaccgtactgtgggacaacgccttcgctgagcccggacgagtgccatttgctgttccggacaaggttctctggccccagctctgtgaagctctgaacatgaaattcaaggcagaggtccaatctaataggggtctgactaaagaaaatctggtgttcttagcacagaagttgtttaacaactcctctagtcacctggaggattattccggactgagtgtatcctggtctcagttcaatcgggagaatttgcccggcaggaattatacgttctggcagtggtttgacggggtcatggaggtgctgaaaaagcatctaaagcctcattggaacgatggcgcaatcctgggcttcgtgaacaagcaacaagctcatgatctcttgataaataaacctgacggcactttcctgctcaggttctcagactcagagatcggagggatcaccatagcgtggaagtttgactcacaagaacgcatgttctggaacttgatgccgttcactacccgggatttcagcatacgatcgttagccgatagactcggcgacctcaattatctgatctacgtttttccggaccgccctaaagatgaagtgtacagcaagtattatactcctgtcccctgcgagagtgcgaccgccaaagccgttgacgggtatgtgaagcctcagatcaagcaggtcgtccctgaattcgttaatgctagcgcagatgcaggcggcggctctgccacctacatggatcaggctcctagccctgccgtctgtccccaggcccattataacatgtaccctcagaatcccgacagtgtacttgacaccgatggtgacttcgatctcgaggatactatggacgttgcccggcgggtggaggaattgctagggagacctatggatagccagtggattccccatgctcagtcctag

SEQ ID NO: 17402 - DNA, 471 bp, synthetic construct
  misc_feature 1..471: note = Description of Artificial Sequence: Synthetic coding sequence
  source 1..471: mol_type = other DNA
atggccgtttggattcaggcccagcaactgcagggagaagccctgcaccagatgcaagctttgtacggccagcactttcccattgaggtgcgccactacctgtctcaatggatcgaatctcaagcttgggactcggtcgacctcgataatccccaggagaacattaaagcaactcagcttttagagggtttggtccaggagctccaaaagaaggccgagcaccaggtgggagaagacggattcttactgaaaatcaagttgggacattacgccacgcagctgcagaatacctatgaccgctgtccaatggagctggtccgctgcatccgccatattctatataacgagcagcgcctggtgagagaggctaacaatggaagcagtcctgcagggtccctggccgatgccatgagccaaaaacatctgcagatcaatcaaaccttcgaggaactgaggctggtgactcagtag

SEQ ID NO: 17403 - DNA, 534 bp, synthetic construct
  misc_feature 1..534: note = Description of Artificial Sequence: Synthetic coding sequence
  source 1..534: mol_type = other DNA
atgcctcaggccttcctcctggggagtatccacgagcccgctggcgcccttatggagcctcagccatgcccaggctccttggccgaaagctttctggaggaggaactgcgtctgaacgccgagctctcccagttacagttctcggaaccggtaggcattatctacaacccggtcgagtacgcttgggaaccacatagaaattacgtcaccagatactgccagggcccaaaggaggtgttatttctcgggatgaatccaggtcccttcggcatggcccaaaccggcgtacccttcggcgaagtgtccatggtcagagactggctggggatcgtcggtcccgtgctgacaccaccccaggagcatcccaagcgtcccgtactgggcttggaatgcccacagtcagagggccccaggcagagcatgggacacgaaatcaaatcagagctactgatgggcggttgttcatggattcgggggaagatacagtgtgatagggtacaggtgcggcgcccaggtttttcctctcaactgtag

SEQ ID NO: 17404 - DNA, 813 bp, synthetic construct
  misc_feature 1..813: note = Description of Artificial Sequence: Synthetic coding sequence
  source 1..813: mol_type = other DNA
atgccacaggctttccttcttggctctattcatgaacctgccggagccctgatggaacctcagccatgtcccgggtctctggcggaatctttccttgaagaggagctaagactgaacgcagagctgtcgcagctgcagttcagcgaaccagttggaattatttacaatcccgtggagtacgcctgggagcctcatcggaattacgtaacacggtattgccagggccccaaagaggtgctgttcctggggatgaatcccggcccctttggaatggcccagactggcgtgccttttggtgaggtctccatggtgcgtgactggcttgggatcgttgggcctgtgctgaccccaccccaggagcatcctaaacgaccggttctcgggctcgagtgtccccagtctgaggtgtctggagctaggttctggggctttttcaggaacctgtgtgggcaaccagaagtgttcttccaccactgtttcgtacacaacttatgccctcttttgtttttagcaccgagtggtcgtaatctgacccctgcagagctgcctgcaaagcagcgggagcagcttctgggcatctgcgacgcggcactctgtcgacaagtacagctcctgggggtgaggcttgttgtgggcgtgggcaggctggccgaacagagagcaagacgcgctctcgctggcctgatgcctgaggttcaggtcgagggtctgctgcatcccagtccccgaaacccacaagccaataaaggatgggaagctgtggccaaggagagactgaacgagctgggattactgcccttgctcctaaaatag

SEQ ID NO: 17405 - DNA, 813 bp, synthetic construct
  misc_feature 1..813: note = Description of Artificial Sequence: Synthetic coding sequence
  source 1..813: mol_type = other DNA
atgccccaggctttcttattaggctccatccatgaacccgccggggcactgatggaaccacagccttgtcctggctccctggctgagagttttttagaagaggagcttcggttgaatgcagaactaagccagctgcagttttctgagcccgttggaattatctataacccagtggaatacgcttgggaacctcatcgcaattacgtgactaggtactgccaaggacccaaggaagtgttgtttcttgggatgaaccccggcccttttggcatggcccaaactggagtcccttttggcgaggtgagcatggtgcgcgactggcttggtattgtcggacctgtgctgacaccccctcaggaacaccctaaacgaccagttcttggtctggagtgcccccagagcgaagtcagcggtgcacggttctgggggtttttcagaaacctatgtggacagcctgaggtctttttccaccattgcttcgtgcataacctgtgccctctcctgtttctggcaccaagtggacggaatctgacaccagctgaactgcctgctaagcagagggaacagttactcggaatctgtgatgcagcactctgtagacaggttcagctgcttggagtgcgcctggtagtaggagtcggccggttggccgagcaacgagctcggcgcgcactcgccggtcttatgcccgaagtgcaggtagagggcctcctgcatccatcgccacgcaatcctcaagcaaacaaagggtgggaagctgtggccaaagaacgcctaaacgagctgggcctcttgcccctcttgttgaagtag

SEQ ID NO: 17406 - DNA, 249 bp, synthetic construct
  misc_feature 1..249: note = Description of Artificial Sequence: Synthetic coding sequence
  source 1..249: mol_type = other DNA
atgccacaggccttcctcctcgggagcattcacgagccagctggagcactcatggagccacagccatgccccgggtcactggcagagtccttcctcgaggaggaactgcggctcaatgcagaactgagccagttgcagttttccgagccagtgggaatcatttacaatcctgtggagtacgcctgggaaccccataggaattatgtcacccgttactgtcaagggccaaaggaagtgctcttcttatag

SEQ ID NO: 17407 - DNA, 519 bp, synthetic construct
  misc_feature 1..519: note = Description of Artificial Sequence: Synthetic coding sequence
  source 1..519: mol_type = other DNA
atgccccaggctttcctgcttggaagcatccacgaacccgccggggctctcatggaaccccagccctgtcctggaagcctggccgaatccttccttgaagaagaactgcggctgaacgcggagcttagccagctccaattctctgagcccgtcggtatcatatacaacccggttgaatacgcttgggagccacatcggaattatgtgacaaggtactgccaagggcctaaggaggttctgtttctgggcatgaacccggggcctttcgggatggcccagacaggcgttcctttcggtgaggtcagtatggttagggactggctaggcattgtaggtcctgtgttaactcctccgcaagaacaccccaagaggccagtgctcggccttgaatgtccacaaagtgaggtctccggggctaggttttggggcttcttccgcaacctgtgtgggcaacccgaggtcttcttccatcattgttttgtgcacaacctttgtcccctcctgtttctggcaccttag

SEQ ID NO: 17408 - DNA, 291 bp, synthetic construct
  misc_feature 1..291: note = Description of Artificial Sequence: Synthetic coding sequence
  source 1..291: mol_type = other DNA
atgccacaagcattccttctgggatcgatccatgagcccgccggggcactgatggaaccgcagccctgcccggggtctctagctgaaagcttcctggaggaggagctcagactgaacgccgaattaagtcagctgcaattctcagaacctgtggggattatttacaatccagtggaatacgcttgggagcctcatagaaactacgtgacaaggtattgtcagggtccaaaggaggtgctattcctggggatgaatccaggcccattcgggatggcacaaacaggagtctag

SEQ ID NO: 17409 - DNA, 273 bp, synthetic construct
  misc_feature 1..273: note = Description of Artificial Sequence: Synthetic coding sequence
  source 1..273: mol_type = other DNA
atgccacaagcatttctgctgggaagcatccatgagcccgcaggcgcattaatggagccacagccgtgtcctggctctctcgcagagtccttccttgaggaggaactgcgactgaatgcggaattaagccagttgcagttttccgagcccgtgggcatcatctataatcctgtggaatatgcttgggagccccacaggaattacgtgacaaggtactgccagggccccaaggaggttctgtttctgggtatgaacccagggccatttggatag

SEQ ID NO: 17410 - DNA, 534 bp, synthetic construct
  misc_feature 1..534: note = Description of Artificial Sequence: Synthetic coding sequence
  source 1..534: mol_type = other DNA
atgcctcaggcttttctgctcgggtccatccatgaacccgcaggtgccctaatggaaccacagccctgcccaggcagtctagctgagagcttcctggaggaagagctcaggcttaacgccgaacttagccaactgcagttcagcgaaccggttggcataatctataaccccgttgagtatgcatgggagccacacagaaattacgtcacccgctattgccaggggccgaaggaagtgctgtttctgggtatgaatcccgggcctttcgggatggctcagaccggcgttcccttcggcgaggtcagcatggtgagggattggttgggcattgtagggcccgtgttaacacctcctcaagaacaccctaaacgtcccgtccttggccttgagtgtcctcaaagtgagggcccccgtcagagtatggggcacgagatcaagtccgaattactgatggggggctgttcttggatcaggggtaaaattcaatgcgaccgtgtgcaggtccgaagaccaggatttagctcccaattgtag

SEQ ID NO: 17411 - DNA, 327 bp, synthetic construct
  misc_feature 1..327: note = Description of Artificial Sequence: Synthetic coding sequence
  source 1..327: mol_type = other DNA
atgccacaggcattcctgctcgggtctattcacgaacctgccggcgcactaatggaacctcagccctgtccgggttctctcgccgaaagtttcctggaggaagaattgaggctgaatgccgagctgtctcaactgcaattttccgaaccagttggaataatctataatccggtcgagtacgcctgggagccccataggaactatgttacacggtactgccagggaccgaaagaagtactgtttttaggtatgaatcccggcccgttcggcatggcacagacaggagttcctttcggcgaggtgtccatggttagagattggctgtag

SEQ ID NO: 17412 - DNA, 813 bp, synthetic construct
  misc_feature 1..813: note = Description of Artificial Sequence: Synthetic coding sequence
  source 1..813: mol_type = other DNA
atgccacaagcctttctgctgggaagcatacacgaacccgctggggcccttatggaaccccaaccgtgccccgggagccttgcagaaagcttcctggaagaggagctgcgcttgaacgcagagctgagccagctgcaattctcagagccggtgggtatcatttacaacccagtcgagtacgcttgggagccacacagaaattacgtgaccagatactgccagggacctaaagaagtgcttttcctggggatgaatccaggccctttcggtatggcccagaccggagtaccttttggagaagtgagtatggtgcgggactggctcggaatagtcgggcccgttctcacgcctccacaggagcatccgaagcgacccgttctggggctggagtgcccacagtccgaagtgtcaggcgcaagattctgggggtttttccggaatctgtgcgggcaacccgaggtattcttccaccattgtttcgtgcataatctgtgtccactcctctttttggccccctccggtagaaacttgactcccgccgagctgcctgctaagcagagagagcagttgcttggcatttgcgatgcggcgctctgtcgacaagtccaactcctgggcgttcgactcgttgttggggtgggacggctggccgaacaacgcgcacgaagggccctcgcaggactgatgcctgaagtgcaggtcgagggacttttacatccatccccacgaaatccgcaagcaaacaagggatgggaggctgtggccaaggagcgactcaacgagctcggtctcttgccgctccttctgaaatag

SEQ ID NO: 17413 - DNA, 534 bp, synthetic construct
  misc_feature 1..534: note = Description of Artificial Sequence: Synthetic coding sequence
  source 1..534: mol_type = other DNA
atgccacaggcctttctgctaggctccatccacgagccagctggagccctaatggagccacagccttgcccaggatcacttgccgagtccttcctggaggaggagctccgcctgaacgcagagcttagccagctgcaattttctgagcccgtcggcattatctataacccagtagagtatgcctgggaaccccaccgaaattacgtgacccggtattgccaaggacccaaggaggttctgttcctgggaatgaatccgggcccttttgggatggctcagactggcgtgccatttggtgaggtcagcatggtgcgggactggctgggaatcgtcggacccgttttgacacctccacaagagcacccaaagcgaccagtacttggtctggaatgtccgcagtcagagggcccccgacaatctatgggtcatgagataaagtccgaactcctgatgggcggttgctcctggatcagagggaaaattcagtgtgacagagtgcaggtccgccggcccggattctcgagccagctgtag

SEQ ID NO: 17414 - DNA, 534 bp, synthetic construct
  misc_feature 1..534: note = Description of Artificial Sequence: Synthetic coding sequence
  source 1..534: mol_type = other DNA
atgcctcaggctttcttgttaggatcgattcatgagcccgcaggcgcactcatggagccgcagccgtgtcctggaagtctggcggagagcttcctagaggaggagctccgcctgaacgctgaattgtcacagctccaattcagtgagcccgttgggatcatctataatcccgtggaatatgcttgggagccgcatcggaactacgtgacccggtactgccagggacccaaggaggtcctctttcttgggatgaatccaggtccattcgggatggctcagacaggagtcccattcggagaagtctcaatggtgagggactggttaggcatagtgggacccgtccttaccccacctcaggaacacccaaagagacccgttctggggctcgagtgccctcaatctgaggggcctcgccagagcatgggtcatgaaatcaaaagcgaacttttaatgggcggctgcagttggatccgtggcaagatccagtgtgatagggtgcaggtgaggcgacccggcttcagctcgcagctgtag

SEQ ID NO: 17415 - DNA, 1170 bp, synthetic construct
  misc_feature 1..1170: note = Description of Artificial Sequence: Synthetic coding sequence
  source 1..1170: mol_type = other DNA
atggccgagccagacccatcccaccccttggaaactcaggctgggaaggtgcaggaagcgcaggacagcgatagcgacagtgaagggggagcagccggtggcgaagctgacatggactttcttagaaacctgttctcacaaactctgtcattaggcagtcagaaggagcggttgctggacgaactcaccctcgaaggtgtcgcaaggtacatgcaaagcgaacggtgtaggcgagtcatctgcttggtgggcgctggaatctccacctctgctggcatcccagattttagaagcccatcgacaggcctatacgacaaccttgagaaatatcatctaccttatcccgaggctatcttcgaaatctcttacttcaaaaaacaccccgaaccattctttgctctcgccaaagagctataccccggccagttcaagccaacgatctgccactacttcatgcgccttctcaaggataagggtctgctgttaaggtgctacacccaaaacatagataccttagagcggattgcaggcctggagcaagaggacttagttgaagcccatggaactttttacacaagtcactgcgtatctgcctcctgcagacacgagtatccattgtcttggatgaaagaaaaaatcttctcggaagtcacaccaaaatgtgaagactgtcagagcctggttaagcccgacattgtgttcttcggggagtccctgcctgctcgctttttttcctgcatgcagtctgatttcctgaaggtggacttgttgttagtgatggggacttcccttcaggtgcagccgttcgcatctctgatctctaaggcccccttgtctacccccagactgctgataaacaaagagaaggcagggcagtccgaccccttcctgggcatgattatgggactggggggtgggatggactttgacagtaaaaaagcttaccgcgatgttgcttggcttggagagtgcgaccaggggtgtttggctctcgctgagctgctgggctggaagaaggagctggaggacttggtgcgaagagaacacgccagcattgatgctcaatccggggctggtgtcccaaaccccagtacttcagcatcccctaagaagtctcctccaccagcaaaggatgaggctagaaccaccgagcgagaaaaaccacagtag

SEQ ID NO: 17416 - DNA, 816 bp, synthetic construct
  misc_feature 1..816: note = Description of Artificial Sequence: Synthetic coding sequence
  source 1..816: mol_type = other DNA
atggccgagccggatccgagtcatccccttgagacgcaggctggtaaggtacaagaggcccaagactctgactccgacagcgagggcggcgcagctggcggggaagcagatatggatttcctgcgcaatttgttttcacagaccctatcgctgggatctcagaaagagcggcttctggacgagctgacccttgagggtgtagcccgctatatgcagagtgaacgatgtcggcgggtaatctgtctcgtgggggctggcatttccacctccgccggcatccccgacttccgatctccatctacaggactctacgacaatctggagaagtaccacctgccatacccagaggccatcttcgaaatctcatactttaaaaagcaccccgagccattcttcgcattggccaaggagttatatcctggacaattcaagccgacgatttgtcattatttcatgcggctccttaaagataagggtttgctcttgagatgttatacccaaaatatagacacgctggagcggatcgcaggtttggaacaagaggatctggtcgaggcccacggtacgttttacacttcacactgtgtctccgcaagctgccgccacgagtatcctctgtcgtggatgaaggagaagatattttctgaagtgaccccaaaatgtgaggactgtcaatcacttgtgaaacccgacatcgtgtttttcggggaatcattgccggcccggttcttcagttgcatgcagtcagatttcctcaaagttgacctgctgctagtaatggggacgagcttgcaaggcaggggtctcgcaggctag

SEQ ID NO: 17417 - DNA, 393 bp, synthetic construct
  misc_feature 1..393: note = Description of Artificial Sequence: Synthetic coding sequence
  source 1..393: mol_type = other DNA
atggatttccttcgcaatctattcagtcagaccttgagtcttggctcacaaaaagagagactcctggatgaattaaccctggaaggtgtggcccggtatatgcagagcgagaggtgccgaagagtgatctgcttagtcggggcaggcattagcacatccgctgggattccagactttcgaagtccctccaccgggctgtacgataacttggaaaaataccatttgccttacccagaggcaatcttcgagatttcctattttaaaaagcacccagagcctttcttcgcccttgctaaggaactctatcctgggcagtttaagcccacgatttgtcactatttcatgcggctgctgaaggacaaaggtctgctgctcaggtgctacacacagtag

SEQ ID NO: 17418 - DNA, 1059 bp, synthetic construct
  misc_feature 1..1059: note = Description of Artificial Sequence: Synthetic coding sequence
  source 1..1059: mol_type = other DNA
atggatttcctgcgcaatctgttctctcaaaccttgtctctcggaagccagaaagaacgccttctggacgaactcactctggagggtgtggcacggtatatgcaaagtgaacggtgccgccgggtgatctgcctggtgggggcaggaatctcaacctccgctggcatccctgattttcggtcgccctcaaccggactgtacgacaatttggagaagtaccacctgccctacccggaagccatcttcgagatctcttattttaaaaaacaccccgagccgttttttgccctagcaaaggaactttaccccggtcagttcaaacctaccatttgtcattattttatgcggctcctgaaagataagggtctcctgctgcgctgctatacccaaaacatcgacaccttggaacggattgcaggtctcgaacaggaagacctggttgaggcccacggtacattctatacctcccactgcgtttccgcgagttgcaggcacgaataccctctgagctggatgaaggagaagatctttagcgaagtgacccctaagtgtgaggactgccagtctctagtgaaacctgacatcgttttctttggggagagtctgcccgcaaggtttttcagctgcatgcagagcgatttcttaaaggttgacctacttctggtgatgggtacttctctccaggttcagccatttgccagcctgatctctaaagctcccctttctaccccaaggctgcttattaacaaagagaaagcaggacagagtgacccttttctgggaatgatcatgggcctggggggaggcatggatttcgactccaaaaaggcgtaccgcgacgtggcttggcttggagagtgtgaccagggttgcttggctttggctgagttgctgggatggaaaaaagaattggaagacctcgttaggcgggagcacgcttctatcgatgctcagagtggggctggcgtgccgaacccctctactagcgctagccctaaaaaaagtcctccccctgctaaagacgaagcaagaacgaccgaacgggagaaacctcagtag

SEQ ID NO: 17419 - DNA, 510 bp, synthetic construct
  misc_feature 1..510: note = Description of Artificial Sequence: Synthetic coding sequence
  source 1..510: mol_type = other DNA
atggactttctgcgaaatttattcagccagactctttcgcttgggtcacagaaggaaagactgctggacgagttgacactggaaggtgtagcccgttatatgcaaagcgagaggtgcaggcgtgtcatatgcctggtcggcgctgggatcagcaccagcgccggcattcctgattttagaagtccctccaccggtctgtacgacaatctggaaaaatatcacttaccttatccagaggcaattttcgagatcagctatttcaagaaacatcctgagccttttttcgccctcgccaaggagctgtacccaggccaattcaagcctaccatctgtcactatttcatgcggctgctcaaggataaaggactactgcttaggtgctatactcaaaatattgatacactggaacgcattgcaggtctggaacaggaggatctggttgaggcgcatggaaccttctatacttcccattgcgtttcagcctcctgccggcacgagtatccgttgtag

SEQ ID NO: 17420 - DNA, 714 bp, synthetic construct
  misc_feature 1..714: note = Description of Artificial Sequence: Synthetic coding sequence
  source 1..714: mol_type = other DNA
atggattttctgcgcaacctgttctcacaaaccctgtctttgggaagccagaaggaaaggcttctggacgaactaaccttagagggtgtcgctcggtatatgcaatcagagcggtgcagacgggtcatatgcctcgtcggagccgggatctccacaagtgccggcataccggacttccggtctccctctaccgggctgtatgacaacctggagaagtatcatttaccatacccagaggccatttttgagatcagctatttcaagaagcaccccgaacctttttttgcccttgctaaggaactttatcctggccagttcaaaccaaccatctgtcactattttatgagactgctaaaggacaagggacttctcctgcggtgctacacgcagaatattgatacactggagcggatcgcggggcttgaacaggaagacttggtcgaggctcatgggacattttacacgtctcattgcgtgtccgcaagctgccgtcacgaatatcctctgagctggatgaaggagaaaattttcagcgaggtcacgcccaaatgtgaggattgccagagtctcgtaaaacctgacattgtcttcttcggggagagcctgccagccagatttttctcctgcatgcagtcggacttcctcaaggtggaccttctgcttgtaatgggcacatcccttcaggtgcagccattcgcatctctcatcagctag

SEQ ID NO: 17421 - DNA, 237 bp, synthetic construct
  misc_feature 1..237: note = Description of Artificial Sequence: Synthetic coding sequence
  source 1..237: mol_type = other DNA
atggactttctaagaaatcttttctcacagacactgtccctcggatcgcaaaaagagcgtctgctggacgagttgacgcttgagggcgtggctcggtacatgcagtctgagcgatgtaggcgagtgatttgtctggtgggggccgggatctctacgtcagcaggcattccggacttccgaagcccatctaccggcctctatgacaacctggaaaaatatcatttaccatatccgtag

SEQ ID NO: 17422 - DNA, 222 bp, synthetic construct
  misc_feature 1..222: note = Description of Artificial Sequence: Synthetic coding sequence
  source 1..222: mol_type = other DNA
atggatttcctccggaacctcttcagtcagactctttctctggggtcccagaaggagaggctgcttgacgagcttaccctagaaggtgtagccagatatatgcagagcgagcgatgtaggcgtgttatctgtcttgttggggccggtatatcgacctccgccggtatcccagactttcgctctccgtccactggtctctatgataaccttgagaaatattag

SEQ ID NO: 17423 - DNA, 1170 bp, synthetic construct
  misc_feature 1..1170: note = Description of Artificial Sequence: Synthetic coding sequence
  source 1..1170: mol_type = other DNA
atgtcagacgaggcagaggattccgacagcgactccgaagggggcgctgccggcggtgaagcagacatggatttccttcgaaacctcttcagtcagactctgtctctgggctcccagaaggaacgactgttggacgagctgacgctagagggtgtggctaggtatatgcaatccgagagatgccggagggtcatctgtctcgttggcgctgggatttccacgagcgctggcataccagactttagatccccatcaacaggtctgtatgacaatctcgaaaaataccaccttccctatccagaggctatattcgagataagttactttaagaagcaccccgaacccttcttcgccctcgcaaaagaattatatcctggtcagtttaagcctacaatctgccactacttcatgaggctgctgaaagacaagggcctgctgcttcgctgctacacgcaaaacatcgacaccttggagaggatcgccgggttagagcaagaagacctagtggaggcccacggcaccttctacactagccattgtgtgagcgcatcttgccggcacgaatatccgctctcatggatgaaggaaaaaattttttccgaagtcacgcccaaatgcgaggactgccaatccttagtgaaaccggacatagtgttctttggcgaaagtctgccagcccggttcttcagctgcatgcagagcgacttcctaaaggttgacctactccttgtgatggggacgagtctgcaagtgcagccatttgctagcttaatctctaaggcccctctgtccacacctaggttactcattaataaggagaaagctggacaaagtgatccgttcctgggcatgattatgggcctggggggggggatggatttcgattcaaagaaagcatacagagatgttgcttggctgggtgagtgcgatcaaggttgtttagcactcgctgagctgctgggctggaaaaaggagctcgaggacctggtacgcagggaacatgcatcaattgatgcccaaggaggaggcggacctcagcctcagcatttctcgttccctcaggaggtgcctgccacatgccagggcaggggccaggataacagagagggtgagacccccgtcacagcagcgtcccctcgcagggatgcagagctcttgagggactcttag

SEQ ID NO: 17424 - DNA, 1227 bp, synthetic construct
  misc_feature 1..1227: note = Description of Artificial Sequence: Synthetic coding sequence
  source 1..1227: mol_type = other DNA
atggcggaaaatggtgacaacgaaaagatggcagcgttagaggctaaaatctgtcatcaaatcgaatactacttcggagattttaacctccctcgagacaaatttctcaaggaacagattaagctagatgaaggttgggtgccactcgagatcatgatcaagttcaacaggttaaaccgactgactaccgattttaatgtgatcgtcgaggccctatctaaaagcaaagcggagctgatggaaatctccgaggataagacaaaaatcaggagatctccctcaaagccactaccggaggtgacagacgagtacaagaatgacgtgaaaaaccgttctgtatatatcaagggttttccaacggatgctaccctcgatgatatcaaggaatggctggaggataaaggccaggtcctcaatatccagatgcggcgcactctccacaaggccttcaaaggttcgatctttgtggtgttcgacagcatcgagtctgccaagaagttcgtggaaacacctgggcaaaagtacaaggagaccgatctgcttatactgttcaaggatgactattttgcaaagaagaacgaggagagaaagcaaaacaaagtggaggcgaaactgcgggcaaagcaggagcaggaagctaaacagaagcttgaggaagacgcagaaatgaaatctctggaagagaagattgggtgtctcctgaagttttccggtgatctggacgatcagacctgtcgggaggacctgcatatccttttttctaaccatggggagatcaaatggatcgacttcgtacgaggtgcaaaggaaggtatcatattatttaaagaaaaagccaaggaggcactggggaaggccaaagatgcaaataacggtaatctgcagttaaggaataaagaagtaacttgggaagtgctggaaggcgaagtcgagaaagaggccttgaaaaagatcattgaggatcagcaggagtcccttaataaatggaaatccaaaggaagacggtttaaagggaagggtaaagggaacaaagccgcacaaccgggatccggtaaaggcaaggtgcagttccaaggcaagaagacaaagttcgcctccgacgacgagcacgacgaacacgacgaaaacggagccaccggccccgtgaagagagccagggaggagacggacaaagaagagcccgcgtccaaacagcagaagactgaaaacggagctggagaccagtag

SEQ ID NO: 17425 - DNA, 1086 bp, synthetic construct
  misc_feature 1..1086: note = Description of Artificial Sequence: Synthetic coding sequence
  source 1..1086: mol_type = other DNA
atggccgagaacggggataacgagaagatggcggcactagaggccaaaatctgccaccagatcgaatactattttggtgactttaacctccctcgagacaaattcctgaaagaacaaattaagcttgacgagggctgggtgccccttgagattatgatcaagtttaaccggctcaacagactgactaccgattttaatgtcatcgtggaagccctctccaagtccaaggccgaactaatggagatttcagaagataaaacaaagattaggcggtccccaagcaaaccgttgccggaggtgacagatgagtataagaacgacgtgaagaaccgttcggtgtatataaagggctttcctacagacgctaccctggacgatatcaaagagtggctcgaggataaagggcaggttttgaatattcagatgaggcgtacgctgcacaaggcctttaaagggtccattttcgtcgtattcgactccattgagagcgcaaagaagtttgttgaaacccctggccaaaagtacaaagagactgatctgctgattctttttaaggatgattacttcgccaagaagaacgaagagcgtaaacaaaacaaagtagaagccaagttgcgggctaagcaggagcaagaggccaagcagaagctggaagaagatgcagaaatgaagtctttggaggagaagatcggctgcctcctgaagtttagtggggatctcgatgaccagacctgtagggaggatctgcacatccttttttcgaaccatggcgaaatcaaatggatagattttgtgcggggagccaaagagggaatcatcctctttaaagaaaaggcaaaagaagcgctcggaaaagcaaaagacgccaataatggcaacctgcaactgcgtaacaaagaggtgacctgggaagtcctggagggagaggtggagaaagaagcattgaagaaaatcattgaagaccagcaagaaagcctcaataagtggaagagcaagggacctgtcaaaagagctcgggaggagaccgacaaggaagaacccgcatccaaacagcagaaaaccgagaacggtgccggagaccagtag

SEQ ID NO: 17426 - DNA, 1227 bp, synthetic construct
  misc_feature 1..1227: note = Description of Artificial Sequence: Synthetic coding sequence
  source 1..1227: mol_type = other DNA
atggcagagaacggtgacaatgagaagatggccgccttggaggccaagatttgtcaccagattgagtattattttggcgactttaacctgcctcgtgataaatttctgaaagagcagattaaactggacgaagggtgggttcccctggagattatgattaagttcaatcgtctcaatcggctcaccacagacttcaacgttatagtggaggccttgagcaaatcaaaagcagaactgatggagatctcggaagacaaaaccaagattagaaggagtccgagcaagccccttcccgaagtaaccgacgagtataagaacgacgtcaaaaatcggagcgtttatatcaaaggatttcccactgacgcgactctggacgacatcaaagagtggctggaggataaggggcaggtgctgaatatacagatgcgacggactctgcacaaagccttcaaggggtctatcttcgttgtcttcgacagtattgagagcgccaagaagtttgtggagactccggggcagaagtacaaggaaacagatctgctgatattattcaaagacgattattttgctaaaaagaatgaggagcgaaagcagaacaaagtggaagcaaaactccgcgctaaacaggaacaagaagctaagcagaaactggaagaagatgcagaaatgaagagtttggaagagaagatcggatgcctactgaaattctctggcgatcttgacgaccagacctgccgggaggatctacacatccttttcagcaatcacggtgagatcaagtggatcgatttcgtaaggggcgcaaaggagggaatcatcctattcaaggagaaggcaaaagaggccttaggaaaggctaaggatgcaaataacgggaatctgcagttgcgaaataaggaagttacgtgggaagtcctcgaaggggaggtcgaaaaggaggctctgaagaaaatcattgaagaccagcaggagtcactgaacaagtggaagtctaaaggacgaaggttcaagggcaaaggcaagggaaacaaggccgctcaacctggcagcgggaagggaaaggtgcaatttcagggcaagaagaccaagtttgcaagtgatgatgagcacgatgagcatgatgagaatggcgcaaccggccccgtgaagagagcccgagaggaaacagacaaggaggaaccggcctccaaacaacaaaaaaccgagaatggagctggggaccagtag

SEQ ID NO: 17427 - DNA, 405 bp, synthetic construct
  misc_feature 1..405: note = Description of Artificial Sequence: Synthetic coding sequence
  source 1..405: mol_type = other DNA
atggccgagaacggggacaatgagaaaatggctgcactcgaggcgaagatctgccaccaaatcgaatattacttcggcgactttaatctgccaagggataaatttttgaaggaacagataaaactggacgagggctgggtaccactggagatcatgataaagtttaacagactaaatcggctcaccacggacttcaacgtgatcgtggaggccctgtccaagtctaaggcagaacttatggaaataagcgaggacaaaaccaaaataagacgcagcccaagcaaaccactccccgaggtgaccgacgagtataagaacgacgtcaagaataggtcagtctacatctcccacccagtggcacacgttggtgtgcagtggtgtgaccatgggccactccagagttag

SEQ ID NO: 17428 - DNA, 363 bp, synthetic construct
  misc_feature 1..363: note = Description of Artificial Sequence: Synthetic coding sequence
  source 1..363: mol_type = other DNA
atgattaagttcaacaggctcaatcgcctgactacagacttcaacgtgatagtcgaagctctgagcaagtcaaaagctgaattaatggagatcagcgaggacaagaccaagattaggcgctccccttcaaaacctctcccagaagtgaccgatgagtataagaacgatgttaaaaatcggtctgtgtatattaaagggtttccaacagatgctacactagatgatatcaaggagtggttagaagacaagggacaagttctgaacattcagatgaggcgtacattacataaggcgttcaagggctcaattttcgtagtcttcgactccattgagagtgccaagaaatttgtggagaccccttag

SEQ ID NO: 17429 - DNA, 555 bp, synthetic construct
  misc_feature 1..555: note = Description of Artificial Sequence: Synthetic coding sequence
  source 1..555: mol_type = other DNA
atggcagagaatggcgacaatgaaaagatggccgctctcgaagcaaaaatctgccatcagattgaatactactttggtgattttaatctcccccgtgacaagtttcttaaggaacagatcaagctggatgaaggatgggtgccactcgagattatgattaagtttaatcgcctcaatcgcttaaccactgattttaatgtcatagtggaagctctcagcaagtctaaggccgagctaatggagatctctgaggataagacgaaaatccgcaggagcccaagcaagccactgcccgaggtcactgatgagtacaagaatgacgtgaaaaaccgatcagtctatataaaaggatttcccacggacgccacgcttgatgatatcaaggagtggctcgaagataagggccaggtgttaaacatccagatgcgccggactctgcacaaagccttcaaggggagcatctttgttgttttcgactccatcgaaagcgcgaaaaagttcgtcgagacaccaggccagaagtacaaagaaactgacttgctgattctgttttag

SEQ ID NO: 17430 - DNA, 252 bp, synthetic construct
  misc_feature 1..252: note = Description of Artificial Sequence: Synthetic coding sequence
  source 1..252: mol_type = other DNA
atgagaaggactctacacaaagccttcaagggttccatattcgtcgtgttcgacagcatcgagtccgcaaagaagtttgtggagacaccgggtcagaaatataaggagaccgatttgctgatactctttaaagacgactatttcgcaaagaaaaatgaagagagaaagcaaaataaagtagaggccaagttgcgcgctaagcaagagcaggaagccaaacagaaactggaggaggacgccgagatgaaatag

SEQ ID NO: 17431 - DNA, 5505 bp, synthetic construct
  misc_feature 1..5505: note = Description of Artificial Sequence: Synthetic coding sequence
  source 1..5505: mol_type = other DNA
atgaagctgagcgtcaatgaagcgcagcttggattctatctcggttcactctcacatctgagtgcgtgtcctggcatcgaccctagaagctcagaagaccagccagaaagcctgaaaaccggtcaaatgatggacgagtccgacgaggacttcaaagagctgtgcgcgagctttttccagagggtcaagaagcatggtataaaagaagtgtcaggcgaacgaaagactcagaaagctgcgtccaacggtacccaaattcggagcaagttgaagcgcaccaagcagacagcaactaagacaaagactttgcagggccctgcggagaaaaaaccaccatctgggagccaggctccgagaacaaagaaacagcgggtgacaaaatggcaggcatccgaacccgcacattccgtgaacggggagggcggggtgctggccagcgctccggacccacccgttctgcgcgaaacagctcagaacactcaaactggaaatcagcaggagccctcccctaatctgtcccgcgagaaaacacgcgagaatgtgcctaacagtgattcccagccccctccaagctgcttaacgactgctgtgccttctcccagcaagccaagaaccgcgcagcttgtattgcaaagaatgcagcagtttaaacgtgctgatccagagcggctcagacacgcctcagaagagtgttcattggaagcagccagagaagaaaacgtccccaaagaccctcaggaagagatgatggcgggcaatgtttacggtctggggccacccgccccggagagcgatgctgctgtggcccttactttgcagcaggagtttgcccgggtaggcgcttccgcacatgatgacagtttagaagagaaaggactgtttttctgtcagatctgccaaaaaaatctttccgccatgaatgtgacacgacgggagcaacatgtgaaccgctgcctcgatgaagccgaaaagactctacgtccgtcagtgccgcaaatccccgagtgcccaatttgcggaaagccgttcctgaccctgaaaagccgcacctctcacctgaaacagtgtgcagtgaaaatggaggtgggaccacagctgctactgcaggctgtgaggttgcagacggcacaaccagaggggagctcctctccaccaatgttttcattttcagaccacagtcgtggactgaaaagacgaggcccaacttccaagaaagaaccacgtaaaagaaggaaggtcgacgaggccccttcagaggatcttttggtagcgatggcgcttagcaggagtgagatggaacccggagccgcagtgcccgccctgcgtctggagagcgccttcagtgagagaattagacccgaggctgagaataaatcacgcaagaagaagccacccgtctctccgcctctgctgctggttcaagatagtgaaactacggggcgccagatcgaagatagggtcgctctcctcctgtccgaggaggtagaactgagctctactccacctctgcctgcctctcggatcctgaaggaaggctgggagcgggcagggcagtgcccccccccaccagagcgcaagcaatctttcctttgggagggtagtgccctgaccggcgcatgggcgatggaggacttttataccgctcgactggtgcccccattagtccctcagcggcccgcgcagggtctgatgcaggaacctgtccctcccttagtaccccccgaacatagtgaactgtcggagagaagatctccggcgctccatggaacacctaccgcagggtgtggatccaggggtccctctcccagcgcatcacagagggagcaccaggcacttcaggaccttgtcgatctcgcccgggaaggtctctcggcctcaccttggcctggctccggggggttggctggctcagaggggaccgctggactggacgtggtaccaggtggcctgccactcacaggatttgtagtcccgagccaagataaacaccccgacagagggggccgcacacttttatcccttggtttattggtcgctgactttggcgccatggtgaataacccccacctgtccgacgtgcaattccagaccgactccggagaggtactttatgcccataagttcgtgctatacgcgcgatgccccctgctgatacagtacgtcaataatgagggattctcagcagtcgaggacggggttctaacacagcgcgttctgctgggtgacgtgagcaccgaggctgccaggacgttcctccactatctctacacagctgataccgggctaccgccgggtctcagctccgaactttctagcctcgcccaccgcttcggagtcagcgagctggtccacctctgcgagcaggttcctatcgccacagattctgagggcaagccttgggaagagaaagaggcagagaactgtgaaagtagggcagagaatttccaggaactgctgcggtccatgtgggcagacgaagaagaagaagccgagacattgcttaaatccaaggaccacgaggaggatcaggagaacgtgaatgaagcggaaatggaggaaatctacgaatttgctgccacccaacggaaacttctgcaggaggaaagggcggcaggggccggagaggatgccgactggctagaaggtgggtctccggtctccgggcagctattagctggagtccaagtacaaaagcaatgggacaaagtagaagagatggagcctctggagccaggaagagatgaggctgctacgacttgggagaagatgggccagtgcgccctccctccacctcaggggcagcattccggagctaggggcgccgaggctcccgaacaagaagccccagaggaggctctcgggcactcttcatgtagctccccaagtagggactgtcaggctgagagaaaagagggctcgctgcctcattcagacgacgccggagactatgagcagctttttagtagcactcagggcgaaattagtgaaccgagccagatcactagcgaacccgaggaacaatctggcgcggttcgggagcggggcctggaggtgagccacaggctggcaccatggcaggccagtccaccgcacccttgcaggtttctgttgggaccgccacagggcggatcaccgaggggtagtcaccacacgtctgggtcctccctatcaactcccaggagccgaggaggaacgagtcaggtagggtcacccaccctcctctccccggccgtgccgagcaaacaaaagagagacagaagcattctgacactctcgaaggagccgggacaccagaagggcaaggaacgacgctctgttttggagtgtcgaaacaagggggtgttaatgttccccgaaaaaagtccatctattgatctcactcagtcaaacccagaccacagttctagccgcagccaaaagtccagctccaagctgaacgaggaggatgaggtaatcctgcttctggatagtgatgaggagctagagctggaacagacgaagatgaaatccatctccagcgaccccttagaggaaaagaaggccttggagattagcccacgaagctgcgagctcttttccattatagacgttgacgctgaccaagaaccaagtcaaagcccacccagatcggaggccgtgctgcagcaagaggatgagggcgcactccccgaaaataggggctcactcggacggcgcggcgcaccatggctgttttgcgaccgggaatcctcaccaagtgaagcaagtacaacggacactagttggctcgtaccagccacaccgctggccagcagaagtagggactgttcttctcaaacacagatcagttctctgcgctccggcctagccgtacaggcggtgactcagcacacccctcgcgcttcagtggggaatcgagaagggaacgaggttgcgcagaaatttagcgtgatacgaccccagaccccccctccgcaaactccgagctcctgcctgacgcctgtttctccaggcaccagtgatgggagaaggcaaggacacaggtccccttcccgcccacatccaggtggtcatccccatagtagccccctagcacctcaccctataagcggagatagagctcatttcagccgcaggttcctgaagcatagccctcccggcccctcctttctcaaccaaactcccgctggcgaagttgtcgaggtgggggacagcgatgatgagcaggaagtggcaagtcatcaggccaataggtctcccccgctggacagtgaccctccaattcccattgacgactgctgctggcacatggaacccttatcaccaattccgatcgatcactggaatttggaaagaaccgggcctctgagtacgagttcacccagtcgacgaatgaacgaggccgctgactccagggactgcaggagccccggccttttagacaccaccccaattagggggtcatgcacaacccagcggaaactgcaggaaaaatcttcaggagctggaagtctgggaaacagtagaccttcttttctgaattctgctttgtgggatgtatgggatggagaagaacaacgtccacccgaaaccccaccccctgcccagatgcctagtgctgggggcgcacagaaacctgaaggcctcgagactccgaagggagccaatcgtaaaaaaaacttacctcccaaggtgccgattacccccatgcctcagtattctattatggaaacgcccgtcctgaagaaagagctcgaccgcttcggagtgcgacctctacccaaacggcagatggttctgaagctgaaggagatcttccagtatacacaccaaacgctagacagcgactccgaagatgagtcccaatctagccaacccctactgcaagcacctcactgccaaacgctcgcatcccaaacatacaagccctctcgcgctggggtccatgcacagcaggaggctactacgggccctggtgctcatcgcccaaagggtccagctaagactaagggcccgcggcaccaacgcaaacaccacgaatcaattacccccccctccagaagtcctactaaggaagccccccccggcctgaacgacgacgcccagatacctgccagccaggagagcgtggccacttcagtcgatggctcagatagctcactgagttcccagtcttcctcttcctgcgagttcggcgccgctttcgagagcgccggcgaggaagaaggcgaaggcgaagtgagcgccagccaggccgccgtccaggccgctgacacagacgaagcccttagatgttatattcgctccaaacccgcattataccagaaagttctcctctaccagcccttcgagctgcgcgagctacaggccgaactgaggcagaacgggcttagggtttcatccagacggttactggatttcctggatactcattgcattacatttaccacggcggcaacacggcgggagaagttgcagggacgccgcaggcagccaagaggtaaaaagaaggtcgaacgcaactag

SEQ ID NO: 17432 - DNA, 1404 bp, synthetic construct
  misc_feature 1..1404: note = Description of Artificial Sequence: Synthetic coding sequence
  source 1..1404: mol_type = other DNA
atgtcctccattctacctttcaccccacctgtcgtgaagcgtctcctcggctggaaaaagagcgctggcgggagcggcggcgccggcggaggcgaacagaatggccaggaggagaaatggtgcgaaaaggccgttaaatctctcgtgaaaaaacttaagaagacaggaagactggatgagctcgagaaagcgatcactacacagaactgtaacaccaagtgcgttaccatcccgtccacatgctccgaaatctggggtctgtcgacacccaacaccattgatcaatgggatacaactggactctattccttctccgaacagacaagatccctggatggccgattacaggtgtcgcatagaaagggcctgcctcacgttatctactgccgactttggaggtggccagatctccacagtcaccatgagttgaaggccatcgagaactgtgagtacgccttcaaccttaagaaagacgaagtctgcgtcaacccataccactatcagcgggttgaaactcctgttctacccccagtgttggttccaaggcacaccgaaattctcacggagctgccacccctggacgattacacccacagtattcccgaaaatactaactttcccgcgggtatcgaaccccagtccaattacatcccagagaccccacctccaggttacataagcgaggatggtgagacatccgaccagcagttgaaccagtcaatggacacaggatctcctgccgagttgtcgcccactactctctctccggtgaatcacagtctggacctgcaacccgtgacttattcagagccggctttttggtgcagcattgcttactacgagctgaaccaacgagtaggggagacttttcatgctagtcagccatccctcaccgtcgatggtttcactgacccatctaatagcgaacgattttgcctgggactgctgtctaacgtaaacaggaatgccactgtagagatgacacgcagacatattggacggggtgtacggttgtactacatcggcggagaggttttcgctgagtgtctgtcggacagcgcaatttttgtgcagagtcctaattgtaatcagagatatggctggcacccagccacagtgtgcaaaattcccccaggctgtaacctgaagatttttaataatcaggagtttgcggcacttctagcccaatccgtgaaccagggctttgaggccgtttatcagctgacacgcatgtgcaccatacgtatgagcttcgttaaggggtggggggccgaataccgacgccagactgtgaccagtacaccctgctggattgaactgcaccttaacggacccctccagtggctggataaagtcctgacacagatgggctctccctcagtccggtgcagctcaatgtcttag

SEQ ID NO: 17433 - DNA, 1314 bp, synthetic construct
  misc_feature 1..1314: note = Description of Artificial Sequence: Synthetic coding sequence
  source 1..1314: mol_type = other DNA
atgagctctatcctgcccttcacgccaccggtcgtgaagcgactgttagggtggaaaaaaagtgcgggtggctccgggggggcaggaggaggcgagcaaaacggccaagaggagaaatggtgcgagaaagcggtaaaatccctcgtgaaaaagctgaaaaagacggggcgcctcgacgagctggagaaggcaattaccacgcagaactgcaacactaaatgtgtcacaatcccgaggtctttggacggcaggctgcaggtgagtcaccggaaagggctgcctcatgtgatctattgtcggctctggcgctggcccgatctgcactctcatcacgaactcaaagctatcgagaactgcgaatacgcgttcaatctgaaaaaggacgaggtatgtgttaatccttatcactatcagagggtggaaaccccggtgctgccccccgttctggtaccacgccataccgagatcctcacggagctgcctccactggatgactatacccactcaataccagaaaacactaattttccagcaggcattgagccccagagtaattacatcccagaaacgccacctccgggttacatctccgaggacggcgagacctccgatcaacagctgaaccagagcatggacaccgggagccccgcggaactttctcctactaccctgtccccagtaaatcatagtttggatctgcagcctgtaacatatagtgagccagccttctggtgtagtatagcatactacgagctgaaccaacgggtgggggagacattccacgcatctcagccgagtctgactgtggatggtttcacagatcccagtaatagcgaacgattttgcctgggactgctctccaatgttaaccgaaatgccacagtagaaatgactagaagacacatcggcaggggagtgaggctgtattatatcggaggcgaggtatttgcagagtgcttgagcgactcggcgatcttcgttcagagcccaaactgcaatcagcgctacggctggcatcctgctacagtgtgcaagattccccccgggtgcaacttgaagatctttaacaatcaagagttcgctgccctactggcacagagcgtaaatcaaggattcgaagctgtgtaccagttgacccgaatgtgtaccattcgaatgtcattcgtcaaagggtggggtgccgagtacagaagacaaaccgtcacaagtactccatgttggattgagctgcacttgaatggccccttgcaatggctggacaaggtcttgacacagatggggtctccctctgtgcgctgttcttccatgtcatag

SEQ ID NO: 17434 - DNA, 1404 bp, synthetic construct
  misc_feature 1..1404: note = Description of Artificial Sequence: Synthetic coding sequence
  source 1..1404: mol_type = other DNA
atgagttccatactgccgttcacaccccctgtagtcaagaggcttttaggttggaagaaatcagcagggggaagtggcggagcgggcggcggcgagcaaaacggccaggaagagaagtggtgcgagaaagcagtcaaatctctagtcaagaaactgaagaagacaggaaggttagatgaactggagaaggcaataaccacccaaaattgcaacactaagtgtgtgacgatcccctcaacatgtagcgaaatctggggactgtctacacctaacacaatcgatcagtgggataccactggcttgtattcttttagtgaacagacgcgctccctcgatggaagactgcaggtatcacacaggaaggggttacctcatgtgatttattgcaggctgtggcgctggccagatttgcattctcaccacgaactgaaagcgatcgaaaattgcgagtacgcatttaacctgaagaaggatgaagtgtgcgtcaacccttatcactatcagcgtgtggagactccagtgctgccacctgtgctggtgcctagacacactgagatactaacggagttgcctccattagatgattacacacattccataccagaaaacacgaacttcccagcaggtatcgaacctcagtctaactacatccccgaaactccaccacccgggtatatatctgaggatggagaaacaagtgatcagcagctgaatcagagtatggacacgggctccccagcagagctatctcccactacactctcccccgtcaatcacagcctcgatctccagcctgttacttattctgaaccggcattttggtgttctattgcctactatgagctgaatcagagagttggcgagaccttccacgcctcccagccgtcactcacagtggacggctttactgaccccagcaacagtgagcgcttctgcctgggactgctttcaaacgttaatcggaatgcgaccgtagaaatgacgcgcaggcacatcggaagaggggtgaggctatactacatcgggggcgaagtgttcgccgaatgtctaagtgactctgccatcttcgtccagtcccctaattgcaaccagagatatgggtggcacccagctacagtttgtaagataccacctgggtgtaatttgaagatctttaataaccaggagtttgccgctctcctggcccagtccgttaatcaagggttcgaggccgtgtaccaactcacacggatgtgtaccataagaatgtcctttgtcaagggatggggggccgaatacaggcgacagacagtgaccagtaccccttgctggatcgagctgcatctgaatgggcccttgcagtggctcgacaaagtgttgacacagatggggagtccctctgtacgctgttcatcaatgtcctag

SEQ ID NO: 17435 - DNA, 1278 bp, synthetic construct
  misc_feature 1..1278: note = Description of Artificial Sequence: Synthetic coding sequence
  source 1..1278: mol_type = other DNA
atgagcagtatccttccgtttaccccccctatcgtgaagcgcctacttggctggaagaagggtgagcaaaatgggcaggaggagaaatggtgcgaaaaggcagtcaagtcgcttgtgaagaagcttaagaaaacaggccagctcgacgagttagagaaggccatcaccactcagaacgtgaatactaagtgcatcacaatacctcgtagcctggacggcaggctgcaagtgtctcatcgcaaaggtttgccacatgtgatatattgccgcctgtggcggtggccagacctgcactctcatcacgaacttcgggcaatggaactttgcgagttcgcctttaacatgaagaaggacgaggtgtgcgtgaacccctatcactatcagcgggttgagacacctgtactgcctcctgtccttgtgcctaggcacacggaaattcccgcagagttcccaccactggatgactattctcatagtatccctgagaatacaaactttcctgcaggaattgagcctcagtctaacattcccgagactccaccaccaggctacttatccgaggatggggagacatccgaccatcagatgaatcattccatggacgcagggtccccaaatctctctccaaatccgatgagccctgcccacaataaccttgatttgcaacccgtcacctattgcgaacccgccttctggtgtagtatatcttactacgagctcaaccagagggttggtgaaacttttcacgcttcccagccgtcaatgactgtggacggctttacagatccctctaattctgagcggttctgcctggggctgctatcaaatgtgaatagaaacgcagccgtggaactcacaaggagacatattggcaggggggtaaggctgtattacatcgggggtgaagtctttgctgaatgcctcagcgatagcgcaatcttcgttcagtcgcctaattgcaatcagcggtatggctggcacccggcaactgtatgcaagattccacctggttgcaacctgaaaattttcaacaatcaggagtttgccgctcttctggcacagagtgtcaaccaaggctttgaagccgtttaccaactcacccgcatgtgtactatcagaatgagcttcgtgaagggatggggcgccgagtatcggcgccagacagtgacgtcaactccatgctggatcgagttgcatttgaacgggcccctacagtggctcgataaagtactgacccaaatgggcagtccgtctattagatgctcctctgtcagctag

SEQ ID NO: 17436 - DNA, 1146 bp, synthetic construct
  misc_feature 1..1146: note = Description of Artificial Sequence: Synthetic coding sequence
  source 1..1146: mol_type = other DNA
atgagttgccttcaccctcgccagacgtggaaaggagctgccctggtgcataggaaggcctggtggatgggcaggtctctcgatggccggctgcaggtctcgcaccgcaaagggctgccccacgttatatattgccggctctggcgctggcctgatctgcattcacaccacgagctgcgggccatggaactgtgtgaattcgcatttaatatgaagaaagacgaagtttgcgtgaatccatatcactatcagcgcgtggagaccccggtgctgcctccagtgctggtacccagacacaccgagatccctgcggagtttcctcctcttgacgattatagccattccataccagaaaacaccaattttcctgctggaatcgagcctcagtcgaatataccagagacacctcctccaggctacctgagtgaggacggcgaaactagtgaccatcagatgaatcatagtatggacgccgggagcccaaacttgagcccaaacccaatgagcccagcccacaacaacctggacctacaacctgtcacatattgtgaaccagcattttggtgtagtatttcttactatgaactcaatcagcgggtgggcgagacgttccacgcctcacagccgtctatgaccgttgatggcttcaccgatcccagcaactcagaacgcttttgtctcggattgttaagtaacgtaaaccgcaacgctgcagtagaactaaccagacggcatattggccggggcgttaggctgtattatatagggggcgaggtgttcgcggagtgcctgagcgacagcgccattttcgtacaatcacccaattgcaaccaacgctatgggtggcacccggctactgtgtgcaagatcccacctggctgcaatcttaaaatcttcaataaccaggagtttgctgcgttgttggcacagtccgttaaccaggggtttgaggccgtataccaactgacacgcatgtgcactatccgtatgagctttgtcaaggggtggggcgctgagtatcgccgacagacagtgacttctaccccctgttggatcgagctgcaccttaacggaccacttcagtggcttgataaagtcttgacacagatgggcagcccctctataagatgttcatccgtgtcttag

SEQ ID NO: 17437 - DNA, 1278 bp, synthetic construct
  misc_feature 1..1278: note = Description of Artificial Sequence: Synthetic coding sequence
  source 1..1278: mol_type = other DNA
atgagcagtattttgccatttactccgccaatcgttaaacgcttgcttgggtggaagaagggagagcaaaacggacaggaggagaaatggtgtgagaaagcagtgaaaagcctagtcaaaaagctgaaaaaaaccggccagctcgatgaactggagaaagccatcacgacccagaacgtgaacaccaaatgcataactattccgcgaagcctcgacggacgcctccaggttagccatcgcaaaggtctgcctcacgtgatctactgccggctgtggagatggccagatctccactcccaccatgaacttagggcgatggagttatgcgagttcgctttcaacatgaaaaaggacgaggtttgtgtgaatccctaccactaccagagagtggaaaccccagtgcttcccccggtgttagtgcctcggcatactgaaattcccgccgagttccctccactagacgattatagtcatagcattccagagaatactaatttcccagccggcatcgaaccccagtcgaacattcccgagacccccccccctggatatctgtccgaagacggagagacttcagaccaccagatgaatcacagcatggacgctggctcccctaacctgtctccaaacccgatgagccccgcacacaacaacctggatctccagccggtgacttattgtgagcctgccttctggtgtagcatatcttactacgaactgaatcaacgggtcggagagacgttccacgcaagccagcccagcatgacggttgacgggtttacagatcccagtaattctgaaaggttctgcttaggtctgctcagcaacgttaacagaaatgcggcagttgaattaacacgaaggcatatcggcagaggagtcaggctctattacattggtggcgaggtgttcgcagagtgcctgtccgactcggccattttcgtacagagtcctaactgtaaccagaggtacgggtggcatcccgccaccgtatgtaagattccacctggctgcaacctgaagattttcaataaccaggagtttgcagccctcctggctcagagcgtgaatcaaggttttgaggcggtataccaacttactagaatgtgtaccataaggatgagctttgtcaaaggatggggcgcggaatataggcgccagacggtcactagcactccgtgctggatcgaattacatctaaacggtcctctgcagtggctggataaagtgctgacccagatgggaagcccttccattagatgcagtagtgtgtcatag

SEQ ID NO: 17438 - DNA, 693 bp, synthetic construct
  misc_feature 1..693: note = Description of Artificial Sequence: Synthetic coding sequence
  source 1..693: mol_type = other DNA
atgaatcattcaatggacgccgggagcccaaatctgagcccaaatccaatgtcccctgcacacaataaccttgaccttcagccggttacttattgtgagccagccttctggtgcagcattagctactacgaactcaaccaaagagtgggagaaaccttccatgcgtcacagccttctatgaccgtggatggattcactgatccaagcaatagcgagaggttttgcctcgggcttcttagcaatgttaatcggaacgctgcagtagagctgacccgccgacatatcgggcggggcgtgagactgtattatataggtggagaagtgttcgctgaatgcctgtctgactctgccatcttcgtacagagtcctaactgcaaccaacgctatgggtggcaccccgccacagtctgcaagatccccccaggttgcaatcttaaaattttcaacaaccaagaattcgctgccctgctggcccagtccgtgaaccagggctttgaggcagtataccagttaacacgcatgtgtacaattcggatgtcatttgtgaaagggtggggcgccgagtatcgccgccaaacagtgacatccaccccgtgctggatcgagctgcaccttaacggccccctccagtggctcgataaggtcctgacccagatgggctcaccaagtatccgctgtagcagcgtcagctag

SEQ ID NO: 17439 - DNA, 963 bp, synthetic construct
  misc_feature 1..963: note = Description of Artificial Sequence: Synthetic coding sequence
  source 1..963: mol_type = other DNA
atggagctgtgtgagttcgctttcaatatgaaaaaggacgaggtttgcgttaacccctaccactaccagagggttgaaactcctgtcctgccgccagttctcgtgccccgccacaccgaaatcccggcggagttcccacccctggatgactacagccactccatacctgagaatacgaactttcctgctgggatcgagccccagtcaaacatccctgagacacctcccccagggtatctctccgaggatggggaaacatccgaccaccagatgaatcattctatggacgcgggaagccctaatctgagtccaaatcctatgtccccagctcataataatcttgacctccaacctgttacctattgcgaaccagccttttggtgctccattagctactacgaactcaatcagcgcgtgggtgagacgttccatgctagtcagccgtcaatgaccgtagatggtttcacagacccgtcgaacagcgaaaggttttgcctgggtcttttatccaacgtgaataggaacgctgcagtggagctgaccaggcgccacatcggaagaggcgttagattgtactacattggtggcgaggtgtttgcagaatgcctctctgacagcgctatcttcgtacagtcaccaaactgcaatcagaggtacggttggcatccagcgactgtatgcaagattccccccggctgtaatctgaaaatcttcaacaaccaggagtttgcggcacttctggctcagagcgttaaccaagggtttgaggccgtctatcagctgactcggatgtgcaccataagaatgtcattcgtgaagggttggggggctgaatacaggcgccagaccgtgacatcaaccccctgctggatcgaattacacttgaacggtcctcttcagtggttggacaaggttctgacccagatgggtagccctagcattagatgttcatccgtttcttag

SEQ ID NO: 17440 - DNA, 1281 bp, synthetic construct
  misc_feature 1..1281: note = Description of Artificial Sequence: Synthetic coding sequence
  source 1..1281: mol_type = other DNA
atgttccgaacaaaaagatccgcgctggtgcgccgcctgtggcgctcgcgtgcgccgggcggagaggacgaagaggaaggcgccggtggagggggaggggggggagagcttcgcggagagggtgcgaccgactcacgcgctcacggcgcgggagggggaggccccggacgcgccggatgttgcctcgggaaagctgtaagaggggccaaaggacatcatcacccccatcctcctgccgccggcgccggtgccgccggaggggccgaggccgatttaaaagcactgacccattccgtgctgaagaagctgaaggaaagacagctggagctgctgttacaagcagtggaatctagagggggcacacgaaccgcttgcctgttgctccccggcagactggattgccgcttggggcctggagcacccgccggtgcgcaaccggcccagcccccttcaagttattcactcccactcttgctgtgcaaggtttttagatggcctgaccttcgacactcctccgaggtgaagcgcctctgctgctgcgagtcttatggcaagatcaaccctgaattagtttgttgtaaccctcatcacctgtctcgcttgtgtgagttggaaagcccacctccaccttactctcgctacccaatggacttcctcaaacccactgcggactgtcctgacgcggtcccctcaagcgctgagactgggggtacaaactacctggctccgggaggcctgtccgattcacagttactgctggaaccaggtgatcggtcccactggtgcgtggtagcctattgggaggagaagacaagggtggggcgattgtattgtgtgcaggagccatcgctggatatcttctacgatctcccccaaggaaatggtttctgtctcggacagctgaattcagataataaaagccagcttgtccagaaagtccggtctaagattggctgtggcatccagcttacccgggaggtggacggcgtatgggtctacaatcggagctcgtacccaattttcattaaaagcgctaccctcgacaatcccgattctcgaacactgctcgttcataaggtcttcccgggcttttccataaaagcctttgactatgagaaagcgtacagcctccagagacccaacgaccacgaatttatgcagcagccttggacaggatttactgtgcaaatcagctttgtcaaaggctgggggcagtgctacaccaggcaatttattagcagctgcccgtgttggcttgaagttatcttcaatagtagatag

SEQ ID NO: 17441 - DNA, 636 bp, synthetic construct
  misc_feature 1..636: note = Description of Artificial Sequence: Synthetic coding sequence
  source 1..636: mol_type = other DNA
atggacttccttaaaccaaccgcagactgccccgatgccgtgccatcctcagccgagaccgggggaacgaactacctggcacccggtggtctgtcggattcccagctactgctcgaaccaggggacagatctcactggtgtgtcgtcgcctattgggaggagaagactagggtgggtcggctgtattgcgtccaggagccatcactggacatcttttatgaccttccgcaggggaacggcttctgccttgggcaactgaattccgataacaagagccagttggtgcagaaagtcaggagtaaaatcggttgcggaattcagcttactagagaagttgacggagtgtgggtttacaataggtcttcttaccccatcttcatcaagtctgctaccttggataaccctgattctcgaactctgctcgtgcataaagtgttcccgggattctcaatcaaggcttttgactacgaaaaagcctattccctgcaaagacctaatgatcacgaatttatgcagcagccctggaccgggtttacagttcagatcagcttcgttaaagggtggggacagtgttacacaaggcagttcatctcttcctgcccctgttggctcgaagttatctttaattcccgctag

SEQ ID NO: 17442 - DNA, 636 bp, synthetic construct
  misc_feature 1..636: note = Description of Artificial Sequence: Synthetic coding sequence
  source 1..636: mol_type = other DNA
atggactttctcaagccaacagccgattgcccagacgccgtgccctcttctgccgagactggcggtacaaattatctagctccaggtgggctatcagactcccagcttctgctggaacccggagatcggagccactggtgtgtagtcgcctactgggaggaaaaaacccgtgtggggagactctactgcgttcaggagccttccctggatatcttttacgatttaccccagggcaatggattctgtttggggcagctcaacagtgataacaagtcacagcttgttcaaaaggtgcggtccaaaatcggctgcggaatccagctgacaagagaggtggacggtgtttgggtgtacaatagaagctcataccctatttttattaaaagcgcaacattggacaacccggattcacgtactctgctggtgcataaagtattccctggtttctctatcaaagccttcgactatgagaaggcttacagcttacagcggcccaatgaccatgaatttatgcagcagccctggacgggcttcactgtgcagatctctttcgtgaaaggctggggccagtgttatacaaggcagtttatcagcagctgcccctgttggcttgaagtcatattcaactctagatag

SEQ ID NO: 17443 - DNA, 270 bp, synthetic construct
  misc_feature 1..270: note = Description of Artificial Sequence: Synthetic coding sequence
  source 1..270: mol_type = other DNA
atgaattcccagcagcagaagcagccctgcacacctcctccccagcctcagcaacaacaggtgaaacaaccatgccagcctccaccccaggaaccttgcatcccgaaaaccaaggaaccttgccatccaaaagttcccgaaccctgccacccaaaagtgccggaaccctgccagcctaaggtccctgaaccgtgtcaaccaaaggtacccgaaccctgcccttccaccgtcacaccagccccagcccaacagaagaccaagcagaagtag

SEQ ID NO: 17444 - DNA, 270 bp, synthetic construct
  misc_feature 1..270: note = Description of Artificial Sequence: Synthetic coding sequence
  source 1..270: mol_type = other DNA
atgaactcacagcagcagaagcaaccgtgcacacctccccctcagccacagcaacagcaagtgaagcagccctgtcagccaccccctcaggaaccttgcatcccaaagaccaaagaaccctgccacccgaaggtgcccgagccttgccaccctaaagttccggaaccctgtcagcccaaggtccccgaaccttgtcaaccaaaggtgcctgaaccctgtcccagcactgtaaccccagcgccggcccagcagaaaactaagcaaaaatag

SEQ ID NO: 17445 - DNA, 4260 bp, synthetic construct
  misc_feature 1..4260: note = Description of Artificial Sequence: Synthetic coding sequence
  source 1..4260: mol_type = other DNA
atggccgagggactggagcgggttcgaattagtgcttccgaattgcgtggcatccttgcaactttagctccccaggctggaagccgggaaaacatgaaggaactcaaagaagcccgcccacgcaaagataacaggaggcccgaccttgagatatacaagccaggattgtcccgtcttcgaaataagccaaagatcaaggagcctccagggtctgaagaattcaaagatgagattgtcaatgaccgtgactgtagcgctgtggagaacggtactcagcctgtgaaagacgtttgcaaggagttaaataatcaggagcagaatgggccaatcgatccagagaacaatcgcggccaagagagtttcccacggacagccggccaggaggacagatccctgaagataattaagcgaactaagaagcccgacttacagatttatcagccaggccggcggctgcagacagtgagtaaggaatccgcttccagggtcgaagaggaggaggtgctcaatcaagttgaacaactgagagtcgaagaggatgagtgcagagggaatgtcgccaaggaagaggtcgctaataagccagaccgagcagaaatagagaaatcacccggtgggggccgcgtcggtgccgccaaaggagagaagggaaagcggatgggcaagggagagggggttcgtgaaacccatgatgatccagctcgcgggcggccaggctccgctaaaaggtactctaggtctgacaaaagacgcaaccggtaccggacccgctctactagtagtgccggtagcaataacagcgccgaaggagcaggactgaccgacaatggatgtcggcgacgtcggcaggatagaactaaagaacgcccaagacttaagaagcaggtgtccgtctcctccacagacagcctggatgaagatagaatcgatgaaccagatggactgggaccgcggcgcagctctgaaagaaagcgccatctggaacgcaattggtccggcaggggcgagggcgagcagaaaaactctgccaaggaataccgtgggacattacgcgtcacatttgatgccgaggccatgaacaaagagtctccaatggtccgctcggctagagatgacatggaccgggggaagccggataaaggcctgagtagtggcggtaaggggtccgagaagcaagagtccaagaaccccaaacaggagctgcgaggcaggggacgagggatcctgattcttcccgcccacactaccctctctgtaaattctgccggaagccctgagtcagctccgctaggcccccgcctgctctttggtagcgggagcaaaggaagtcgttcctggggccgtggaggaacaacaaggaggctgtgggatcccaataatccagatcagaaacctgctttgaaaacccagaccccacagctgcacttcttagataccgacgatgaagttagccccacctcttggggggactcgcggcaggctcaggcctcatactacaaatttcagaatagtgataacccatattactatcctagaacccccggtccagccagccagtacccttacactgggtacaatcccctccaataccccgtcggcccaaccaacggcgtgtacccaggcccctactatcctggctatccgactcctagtggccaatacgtctgctctccccttccaaccagcactatgagtcctgaagaagtggaacagcacatgaggaacctgcagcagcaggagctgcacagactattgcgcgtggccgataaccaggagctccagctatccaacctcctgtctagagatcgcatctcccccgaagggctggaaaagatggcccagctgcgggctgagttactgcagctgtacgaaaggtgtatactgctggacatcgaattctccgataatcagaatgtggaccagatcctgtggaaaaatgcattctaccaggtgatagaaaagtttaggcagttggtgaaggatccaaatgtcgaaaacccagagcagatcaggaaccgtctcttggaactgctcgatgaggggtctgacttcttcgacagccttctgcagaagctccaggtgacttacaaatttaagctggaggattacatggatggtctggctattaggtctaagccactccgaaaaacggtcaaatacgccctgattagcgctcagagatgcatgatctgccagggcgacattgccagatatagagagcaggcctcagatactgccaactatggaaaagcaagatcctggtacctgaaagctcagcatattgctcccaaaaacgggcgtccatacaaccagctggcgctccttgccgtgtatacccgccgaaaacttgatgcggtgtattactacatgcggagcctggcggcctccaaccctatccttaccgcgaaggaaagcctcatgtccttgttcgaggagacgaagcggaaggcagaacaaatggagaagaagcagcatgaagaattcgatctcagccctgatcaatggcgtaaggggaaaaaaagcaccttcagacacgtgggagatgatactactcgactggagatctggattcatccttcgcatcctcggtctagccaggggacagagtccggcaaggattctgaacaggagaacggattgggctcattgagtccttccgacttaaacaagaggttcatcctgagttttctgcacgcccacggcaagcttttcactcgaatcggaatggaaacctttcccgccgtggctgagaaagtactgaaagagttccaggtgctattgcagcattccccatctcctatcgggagcacccgcatgttgcagttgatgacaatcaatatgttcgccgtgcacaactcccagttaaaagactgtttctccgaggagtgcaggagtgtcatccaggagcaagcagctgcattggggctggctatgttttctttgttggtgaggaggtgcacttgtctgcttaaagaatccgccaaggctcagctctcctcccccgaagaccaagatgatcaggatgacatcaaagttagctcattcgtcccagacttgaaagagctcttgccctcggtgaaggtgtggtcagattggatgctcggttacccggatacgtggaatcccccccccacatccctcgacttgccttctcacgtggctgtggacgtctggagcacccttgcagacttctgcaacattttgacagctgtgaatcagagcgaagtccctctctacaaagaccccgacgatgacctcacactcctaatcctcgaggaggaccgcctcctgtctgggttcgtgcccctcctcgctgcgcctcaggacccttgctacgtggaaaagacaagtgataaggtgatcgccgccgattgtaaacgggtcacggtgctcaagtattttttagaagctctatgtgggcaagaagagcctcttttggcatttaagggcggaaagtacgtttctgtagcccctgtgccggacacaatgggtaaggaaatggggtcacaagagggcacacgactggaagacgaggaagaggacgtggtgatcgaagactttgaggaagattctgaagcagagggcagtggtggcgaggatgacattagagagcttagggcaaaaaaattagcgcttgctcgcaaaattgccgaacagcagcgaagacaggaaaagatccaagccgttctggaagaccattctcagatgcgtcagatggaactggaaattcgaccgctgttcctggtgcccgacaccaacggtttcattgatcacctcgcaagcctggcacgtcttctcgagtctcggaagtatatccttgtggtaccattaattgtgataaacgaacttgatggattggccaagggccaggaaaccgaccacagagccggcggctatgctcgcgtggtccaggagaaggcccgtaaatctatagagtttctcgaacaaaggtttgaatcccgcgactcctgcctgcgcgccctaacatccaggggtaatgaattggagtccatagcattcaggagcgaagacattaccggtcagttgggtaataacgacgaccttatactgagttgctgcttgcattattgtaaggataaagccaaggattttatgccagccagcaaagaggaaccgataaggctgctgcgcgaggtcgttctgctcaccgacgatagaaacctcagggtgaaagcattgactcgaaacgttcccgtgcgcgatatacctgcatttcttacatgggctcaggtcggatag

SEQ ID NO: 17446 - DNA, 993 bp, synthetic construct
  misc_feature 1..993: note = Description of Artificial Sequence: Synthetic coding sequence
  source 1..993: mol_type = other DNA
atgagatttagactctgccatcagaggggatgttgcccacacgaacgcgaaaatacctgcacatgcaaaatgataattagctccctccaggtgatcgccgcagactgcaaacgagtgactgtcctgaaatattttctggaagccctttgcggtcaggaggagcctctcctggcctttaaggggggtaaatacgtgtccgtggctcccgtgcccgataccatggggaaagagatgggctctcaggaaggcacgcgacttgaagacgaagaggaagacgttgtaattgaggatttcgaagaagactccgaagctgaagggtcgggtggggaggacgatattagggagctgcgcgctaaaaagctggctttggcgaggaaaatcgccgagcagcagaggagacaggagaaaatccaagcagtgctggaagatcactctcagatgcgccaaatggagctggaaatcagaccgctgtttttggtgcctgacacaaacggtttcattgaccatttggcatcactggcgcgattgttggagtcacgaaagtatattcttgtagtcccgctgatcgtgatcaatgaattagacggactggccaaaggtcaggaaaccgaccaccgggcaggaggctacgcgagagtggtgcaggagaaggctaggaagtccattgaattcctggaacagcgcttcgagagcagagattcatgcctgagggctcttacctcccgcggaaacgagttagaatcaatagcattccgctccgaagacatcacaggccagctgggaaacaatgacgatctgatcttatcctgttgccttcattattgtaaggacaaagcaaaggacttcatgcccgcaagcaaggaggagcccattcgactgctccgcgaagttgtgctcttaaccgacgacaggaatctgcgggtgaaggccctcaccagaaatgtgcctgtaagggacataccagcattccttacatgggctcaggtcgggtag

SEQ ID NO: 17447 - DNA, 1536 bp, synthetic construct
  misc_feature 1..1536: note = Description of Artificial Sequence: Synthetic coding sequence
  source 1..1536: mol_type = other DNA
atggagactttccctgccgtcgctgaaaaagtgctgaaggaatttcaggtgcttctacagcattccccctctcccatcggttctacacggatgctgcagctcatgaccataaacatgtttgccgtgcataatagtcaacttaaagactgtttctcagaagagtgccggagcgtgattcaggagcaagccgcggcgctcgggttggcaatgttttcgctcctcgtacgaagatgcacttgcctcctgaaggagtccgcgaaggcccagctgagttcccccgaagatcaggatgaccaggatgacataaaggtttcgtcatttgttcccgatctgaaagagctgctcccctccgtgaaggtatggtctgactggatgctcggttatcctgatacgtggaacccccctcctaccagtctggatctcccttcacacgtggccgtggacgtctggagcacacttgccgacttctgcaacattttgactgccgtaaaccagtctgaggtgccattgtacaaagatcctgacgatgatttgaccctgttgatcctggaagaggaccgcctgctcagcggcttcgtgcctctgctggccgctccacaggatccatgttatgtcgaaaaaacaagcgacaaggtgatcgccgcagattgtaaaagagtgacggtgttgaaatatttcttggaagctttgtgtgggcaagaagaaccactgctcgcgtttaagggcgggaaatatgtgagcgtggctccagtgcccgatacaatgggtaaggagatggggtcgcaggaggggacacgcctggaagatgaagaagaagacgtcgtcattgaggactttgaggaggacagcgaagccgaggggagcggcggtgaggacgatattcgcgaattgagagcgaagaaattggctcttgcccggaagatcgcggagcagcagcgccgtcaggaaaagatccaggcagtcctggaggatcactcacagatgaggcaaatggaactggaaatccggcccttgttcttagtcccggatacaaacggattcatcgaccatctggcaagtttagccaggctgcttgagagcaggaagtatattctggtcgtgccattaatcgtgatcaatgagttagatggcctagccaaggggcaggaaacagatcaccgggctgggggctatgcccgggttgtgcaagagaaggcccgaaaaagcatcgagttcctggaacagcgtttcgagagtagggattcatgcttacgggcactcacgtctagaggcaatgagctggagtctatagctttccgctctgaggacatcacaggccagctcggaaataatgatgacctcatcctaagttgttgcctgcactactgtaaggacaaggccaaggacttcatgccagccagcaaagaagaaccaatcagactactgcgcgaggtcgtgctgctgaccgatgaccgcaatctccgcgttaaagcactcactcgtaacgtcccagtgagggacatcccagcattcctgacatgggcccaggtgggctag

SEQ ID NO: 17448 - DNA, 4167 bp, synthetic construct
  misc_feature 1..4167: note = Description of Artificial Sequence: Synthetic coding sequence
  source 1..4167: mol_type = other DNA
atgaaagagcttaaagaggctcggccccgaaaggataaccgacgacctgatctcgagatttacaaacccggcctaagtcgcttgaggaacaaacccaagattaaagagccgccaggcagcgaggaattcaaagacgaaatcgtcaacgaccgcgactgcagcgcggttgagaatggaacccagccagtcaaagatgtctgtaaggaattaaataaccaggagcagaacggaccaattgacccagagaataaccgcggccaggaaagctttcccagaactgcaggccaggaggacagaagtctgaaaataatcaagcgcacaaagaaaccggacctccaaatataccagcctggcaggaggctacagacagtaagcaaggagagcgccagccgcgtcgaagaagaagaagttctcaaccaggtggaacaactcagggttgaagaagatgagtgtcgggggaacgtggccaaagaggaggtcgcaaataagccagaccgcgccgagatcgaaaagtccccgggcggcggtcgggtgggggctgctaaaggagaaaaaggtaagcggatgggcaagggtgagggtgtccgcgagacacacgatgacccagccagagggcggccagggtctgccaagagatactcaagaagtgataagcgcaggaataggtataggacccgaagcacatctagtgccgggtctaacaatagtgctgaaggcgccgggctgacagacaacggatgccggcgccgccggcaagaccggactaaggagaggccacgactcaagaagcaggtctccgtgtcttcaactgacagtttagacgaggacagaattgacgagcctgacggcttgggaccaagaaggtcttccgagcggaagaggcatctcgaaagaaactggagcggcagaggtgagggggagcagaagaactccgctaaagagtaccgggggacgctgagggtgaccttcgacgcagaggcgatgaacaaggaaagtccaatggtgagatcagccagagacgatatggaccgtggaaaacctgacaagggtctgtcctccggcggcaaaggcagcgaaaagcaggagtcaaagaaccctaaacaggagcttcggggcaggggccgggggatcttgatcctacccgcccacacaactctctctgtgaactctgctggttcccctgagtccgcaccactcggcccccggttgttattcgggtcgggttctaaaggttcaagatcatggggcagagggggtactacgcgcaggctttgggaccccaataatccagaccagaagccggccctgaagacacagacccctcaacttcatttcctcgataccgacgatgaggtctctcctacatcttggggggatagtcggcaggcacaggcttcatattacaaatttcagaatagtgataacccctattactatccgaggaccccggggcctgcttcccaatatccttatactggctacaatccactccagtaccccgtcggacctacaaacggcgtctaccccggaccatactatcctgggtatcctaccccctcaggtcagtatgtgtgtagcccgttgcctacctctaccatgtcccctgaggaagtagagcagcacatgaggaacctccagcagcaggaactgcaccgcctgttgcgggtggctgataaccaggagttgcagctttccaacctcctgagccgagacagaattagcccggagggattggagaaaatggcgcaactacgggctgaactcttgcagctgtacgagagatgcatccttctagatatagaattttctgataaccagaacgtggatcagatcttgtggaagaacgccttttaccaggtgatcgagaaattcaggcagctcgtgaaagacccaaacgtcgagaacccagaacaaatccgcaacagactgctggagctgctggatgaaggtagtgatttttttgattccctgctgcagaagctccaggtgacttacaaattcaaactggaggactacatggatggcctggccatcagatcaaagccgctccggaaaacagtcaagtatgcactgatttccgctcaaaggtgcatgatatgtcaaggtgacatcgccagataccgagaacaagcgtctgatactgccaattatggtaaggcaaggagttggtacctaaaggcccagcacatcgcaccaaagaatggcaggccttacaaccagctggctctgttggctgtgtatacacgccgtaagctcgacgctgtgtattattatatgcggtcactggccgcatctaaccctatcttaaccgccaaagagtcgctgatgtccctcttcgaggaaacaaaacgcaaagccgagcagatggaaaaaaaacagcacgaggagttcgacctcagccccgaccagtggcgcaaagggaaaaagtcaacctttcgtcatgttggggacgatacaacccgcctggaaatttggattcaccccagccacccccggagtagccaaggcaccgaatctggtaaagactccgaacaagagaacgggttgggctcgctctcgccaagtgacttgaacaaacggttcatcctgagcttcttgcatgcccacggaaagttattcacgcggattggtatggaaacattcccggccgtggctgagaaagtgttaaaagaattccaagtgttgttgcagcactctccttcccctattggcagcacacggatgctacagctgatgacaattaatatgtttgccgtgcacaactcacaactgaaggactgcttcagcgaagagtgtaggtccgtgattcaggaacaggccgcagcccttggtttagcaatgtttagcctcctggtgagacgatgcacttgcctcctaaaggagagcgccaaagcccagcttagctcacctgaggaccaggacgaccaagacgacataaaggtgtcctccttcgttcctgatctgaaggagttgttacccagcgtcaaggtgtggtccgattggatgttgggctaccccgatacttggaaccccccccctaccagcctcgacctgccttcccatgtggctgtcgatgtctggtctaccttggcggacttttgcaatattcttactgccgtgaatcagtcagaagtgccactctacaaggacccggacgatgacctgacgctgctaattctggaggaagaccggttattatcaggcttcgtccctctcctggccgctcctcaagatccctgttacgttgaaaaaaccagcgacaaagtaattgctgctgactgtaaaagagtgacagtgctgaagtatttcctggaggccctgtgcggccaggaagaacctctcctcgctttcaaaggtggtaaatacgtttctgttgcccccgtgccagacaccatggggaaagaaatgggtagccaagaaggaacccgtctggaagacgaagaagaggacgtcgtgatcgaggattttgaagaggactccgaagcagaagggtctggcggagaggatgacatccgggagttacgggcaaagaagctagctctcgcccgaaaaatcgcagagcagcagcgaaggcaggaaaagatccaggctgtcctggaagatcattcacagatgaggcagatggaactcgagatccgcccccttttcctcgttcctgacacgaatgggtttatagatcatctcgcttccctagcccgccttttggagtcacggaagtatatcttggttgttccgttgatagtcattaatgaactggacggactggccaaggggcaggagaccgatcacagggcgggcggatatgcacgcgtggtgcaggagaaagctcggaaatcaatcgaattcctggagcagcgattcgaatccagggactcatgtctgagagccttaacgtctcgggggaatgaactggaatctatcgccttccggtccgaggatataaccggccagctcggcaataacgatgacctcattttgtcctgctgtctccattactgtaaggataaagcaaaggactttatgcctgctagcaaggaggagcctatcagacttttgagggaagtggtcctgttaaccgatgatcggaatttacgcgttaaagccctcaccaggaatgttccagttcgtgatattccggcctttctgacctgggcgcaggtcggctag

SEQ ID NO: 17449 - DNA, 2364 bp, synthetic construct
  misc_feature 1..2364: note = Description of Artificial Sequence: Synthetic coding sequence
  source 1..2364: mol_type = other DNA
atggcagcggctcggccagcaaggggccctgagctgccactgctgggtctgctcctgctcctattgcttggtgatcctggaagaggagcagcctccagcggtaacgccacaggtcctggacccagatccgcagggggatctgccagacgctctgcggccgtgacagggccccctccaccccttagccactgcgggagagctgccccatgtgagccactgaggtacaacgtctgtcttgggagtgttctgccctatggggccacaagtactctccttgccggtgattccgactcacaggaggaggcacatggtaaactggtgttatggagcggtctccgaaatgccccaagatgttgggccgttatccaaccactgctgtgcgccgtttacatgccgaaatgtgaaaacgatcgcgtcgagctgcccagtcgcacactttgtcaggcgacaagaggcccatgcgcgatcgtggaacgggaaagaggctggcctgatttccttagatgtacgcccgacaggttcccggagggatgcactaatgaagtgcagaacatcaagttcaatagctccgggcagtgcgaagttcccctcgtccggacagataatccgaagtcctggtatgaggacgtcgagggatgcgggattcagtgccagaacccactctttacagaggccgagcaccaggatatgcatagctacatcgcagcatttggggccgtgaccggcctgtgcaccctattcactttggccacttttgtcgccgactggcgaaactcaaaccgctatccagctgtgatcttgttctacgttaatgcctgcttctttgttggcagcatagggtggctggctcagttcatggatggggcacgccgagagatagtctgtagggcggatggcaccatgcgactgggtgaacccacatccaatgagactctgagttgcgtcataatcttcgtcatcgtatactacgccctgatggccggtgtagtgtggtttgtggtgctgacatatgcctggcacactagcttcaaggcgttgggaaccacctaccagccacttagtggaaaaacttcctattttcacctgttgacctggagtctcccgtttgtgcttaccgtggctattcttgctgtcgcccaggtcgacggcgattctgtctcgggcatttgtttcgtgggctacaagaactacaggtatcgggctggatttgtcctggcccctataggcctcgtccttattgtgggagggtacttcctgatccgcggtgtgatgacgctcttttccatcaaatcaaaccatcccggactgctctccgagaaagccgcttccaagattaacgagaccatgctaagactggggatcttcggctttttagcgttcgggttcgtactgattacattcagctgccacttctatgacttcttcaaccaggctgagtgggagcggtctttcagggattatgtgctttgccaggccaatgtgactataggcttgccaacgaaacagccgattcccgattgcgagattaaaaacagaccttccttgctggttgaaaagataaacctgttcgcaatgtttggaacgggtatcgctatgtcaacctgggtgtggaccaaggcgacactcttgatctggcgacgaacttggtgtagactgacaggccagtctgacgacgaacctaagagaataaaaaagtccaaaatgatcgccaaagccttctccaagcgacacgaactgctgcagaatcctggccaggagctgagcttttccatgcacaccgtatcgcacgacgggccagtggccggtctcgcattcgaccttaacgagccaagtgccgacgtttctagtgcatgggcacagcacgtgacgaaaatggtggcccgaagaggcgctatattgccccaggatattagtgtgaccccagtcgctacgccagtcccccccgaggagcaggctaacctttggctcgtagaggccgagattagccctgaacttcagaagcggctaggcaggaagaagaagaggcgtaaacggaagaaggaagtgtgcccattagccccccccccagaattgcatcctcctgcgcccgcgcctagtaccatccctagactgcctcagctgccacgacagaaatgcttggtggcagcaggggcctggggcgccggggatagttgcaggcagggggcctggactctcgtgtcaaacccattttgtccagagccttccccgcctcaggatccgtttctgccctcggccccggcccctgtcgcctgggctcatgggcgccgtcagggcctgggccccatccacagccggacaaatctcatggatacggaactgatggacgcagacagtgatttttag

SEQ ID NO: 17450 - DNA, 231 bp, synthetic construct
  misc_feature 1..231: note = Description of Artificial Sequence: Synthetic coding sequence
  source 1..231: mol_type = other DNA
atgtcagaccaggattcttccgagattcacttcaaagtaaagatgactacacacctgaagaagctcaaagagtcttattgccagcgacaaggcgttcccatgaatagcctgagattcctctttgaagggcagcggattgcagataaccatactcctaaagagttgggcatggaagaggaggacgtcattgaagtgtaccaggaacagaccgggggacactccactgtgtag

SEQ ID NO: 17451 - DNA, 306 bp, synthetic construct
  misc_feature 1..306: note = Description of Artificial Sequence: Synthetic coding sequence
  source 1..306: mol_type = other DNA
atgtcagatcaggaagctaaaccctcaaccgaagatcttggcgataagaaggaaggcgaatatattaaactgaaggtgatcggacaggatagctcagagatccacttcaaagtcaagatgactacgcacttgaagaagctgaaggagtcttattgtcaaaggcagggagtgcctatgaactcactccggttcctgtttgagggccagcgcattgccgacaaccataccccaaaggagctgggcatggaagaggaagatgtgatcgaagtttatcaggaacagaccggcggccactctaccgtgtag

SEQ ID NO: 17452 - DNA, 306 bp, synthetic construct
  misc_feature 1..306: note = Description of Artificial Sequence: Synthetic coding sequence
  source 1..306: mol_type = other DNA
atgtctgatcaagaggcaaagccctcaactgaagacttgggcgataaaaaggaaggcgaatatatcaagctaaaggtgattggccaagattcaagcgaaatccacttcaaggtgaagatgaccacccaccttaaaaaactcaaggaaagctactgccagcgacagggagtacccatgaattctctgaggttcctcttcgagggccagcgaatcgcggataaccatacgccaaaagagcttggcatggaggaagaagatgtgatcgaggtataccaggaacaaacaggcgggcatagtacagtgtag

SEQ ID NO: 17453 - DNA, 189 bp, synthetic construct
  misc_feature 1..189: note = Description of Artificial Sequence: Synthetic coding sequence
  source 1..189: mol_type = other DNA
atgaccactcatctcaagaagctgaaagagagttactgtcagagacagggcgtgccaatgaactccttgagatttctgttcgaggggcagcgcatcgcggataaccacacacccaaggaactgggtatggaggaagaggacgtgatagaggtgtatcaggagcagacaggtggccactctacagtctag

SEQ ID NO: 17454 - DNA, 189 bp, synthetic construct
  misc_feature 1..189: note = Description of Artificial Sequence: Synthetic coding sequence
  source 1..189: mol_type = other DNA
atgaccacacatttaaaaaaacttaaagagagttactgccagaggcagggagtgccaatgaattcactgcgctttctgttcgagggtcagcggatcgccgacaaccatactcccaaggagctgggaatggaagaagaggatgtgatcgaagtctaccaggagcaaactggaggccattccacagtttag

SEQ ID NO: 17455 - DNA, 795 bp, synthetic construct
  misc_feature 1..795: note = Description of Artificial Sequence: Synthetic coding sequence
  source 1..795: mol_type = other DNA
atgcctcgttccttcctggtgcgaaagcccagcgatcccaatcggaaaccgaattatagcgagctccaggactctaaccccgaatttacattccagcaaccctatgaccaggcccatctgctggccgccatacccccccccgagatcctgaatcccaccgcttccttaccaatgttaatatgggattccgttttagcccctcaggcccagcctatcgcttgggcaagcctaagacttcaggaatcacctcgagtggccgaattgacgtcgctgtctgacgaggattccggcaagggctcacaaccaccaagccccccctctcccgcaccatcaagcttcagctccacttccgtatctagcctggaggctgaggcgtacgccgcctttccaggactagggcaagttccaaagcagctcgcccagctgtctgaagccaaagatctgcaagcccgcaaagccttcaactgtaaatattgcaacaaagagtacctgagcctgggggcccttaagatgcatatacggagccatacccttccatgtgtctgcggaacctgcggcaaagcgtttagtcgcccctggctgctgcagggccacgtccgcacacacacgggagaaaaacccttcagctgtccgcattgtagtagggctttcgcggatagatctaacttacgtgcccacctgcagacccacagtgatgtgaaaaagtaccagtgtcaggcgtgtgctcggacattcagccggatgtcccttttgcataaacaccaggagtcaggatgcagcggatgcccaaggtag

SEQ ID NO: 17456 - DNA, 807 bp, synthetic construct
  misc_feature 1..807: note = Description of Artificial Sequence: Synthetic coding sequence
  source 1..807: mol_type = other DNA
atgccgcgctcctttctcgtgaaaaagcacttcaatgcctcaaaaaagcccaactattctgagctggacacccacaccgtcataataagtccgtacctgtatgaatcctatagcatgccggtcattccccagccagaaattctcagctccggtgcttacagcccaattacagtgtggaccaccgctgccccctttcacgcgcagctgccgaacgggctgagtccactcagcggttatagtagctctttaggaagggtcagccccccacctcctagcgacacctccagcaaagatcatagcgggagcgagtcaccgataagcgacgaagaagagaggttacaatcaaagctctctgacccgcatgccatcgaagccgaaaaattccagtgcaacctgtgcaataaaacatactccacattctcaggcctggccaagcacaaacaattacactgtgacgctcagtcccgaaaatcgttcagctgcaagtattgtgataaagagtacgtgagtctgggagcgctgaagatgcatattcgcacccacacactcccttgcgtttgtaaaatttgcgggaaggcctttagcaggccctggctgctgcagggacatatccgtacccacacaggtgaaaagccattttcctgcccacactgcaacagagcctttgctgatcgttctaaccttagggcccacttgcagacgcatagtgatgtgaagaaataccaatgcaaaaactgcagcaaaacattcagccgcatgagcctacttcataaacacgaagagtcgggctgttgtgtggctcattag

SEQ ID NO: 17457 - DNA, 807 bp, synthetic construct
  misc_feature 1..807: note = Description of Artificial Sequence: Synthetic coding sequence
  source 1..807: mol_type = other DNA
atgccaagatcctttcttgtcaagaagcactttaatgcgtccaaaaagccgaactatagtgaactagacacccacactgttataatttctccttacttgtacgagtcgtactctatgcctgtcattccgcagcccgagatcctgtcctccggagcctactctcctataacggtttggacaactgcagcgccttttcacgcccagctccccaacggattatcacctttaagcgggtatagctcgtccttaggcagggtgtcccccccacctccttccgacaccagctccaaagaccactctggctccgaatcccctatctccgatgaggaggaaagactccagtccaaactgagcgatcctcacgccatcgaagccgagaaatttcagtgtaatctgtgcaacaagacctacagtacttttagcgggttggccaaacacaaacagcttcactgtgacgcgcagtcaagaaagtcatttagctgtaagtactgcgacaaggagtacgtgtccctgggcgccctgaagatgcatataagaactcacactctcccgtgtgtttgcaagatctgcggcaaggcttttagtaggccatggttgctgcaggggcacatccgtacgcacacgggcgaaaaacctttctcatgcccccactgcaaccgggcttttgcggatcgaagcaacctcagggcccatctgcaaacccactcggacgtcaagaaataccagtgcaagaactgctccaagacgttctctcggatgtccctcttgcacaaacatgaggagtctggctgctgtgttgcccactag

SEQ ID NO: 17458 - DNA, 879 bp, synthetic construct
  misc_feature 1..879: note = Description of Artificial Sequence: Synthetic coding sequence
  source 1..879: mol_type = other DNA
atgcctcgaagcttcctggtaaagactcactcctcgcaccgggtaccgaactacaggcgtctcgaaacccagcgtgagatcaacggagcttgcagtgcctgtgggggattggtcgtccctcttttaccgcgcgacaaagaggccccgagtgtacctggcgacctgccccagccttgggatcggagcagtgcagtggcatgcatcagtttgcctctgctccccagaattgaagaggctttgggggcgagcggactagatgcactggaggtctccgaagtagaccctagagcctcccgggcggccatcgtcccccttaaggactccctcaaccatctcaacttaccacctctactggtcctgccaacacgctggtcccctaccctggggcctgatcgtcacggcgcccccgaaaaactgctgggtgcagagagaatgccccgagctcctggcggatttgagtgcttccattgccacaagccttatcataccttggctggtttagcacgtcaccggcaactccactgccatctccaggtgggacgggtgtttacatgcaagtactgcgacaaagagtatacctcactaggggccctgaagatgcatatccggacccacactcttccatgcacctgcaagatatgcgggaaagctttctctagaccttggttgctgcaggggcatgttcggacccatacgggagaaaagccatacgcatgctctcactgttccagagcctttgcggacaggagcaatctccgagctcatttgcaaacacacagcgacgccaagaagtaccgctgcagacgatgcaccaagactttcagtcggatgtccctcttagctagacacgaggagtctggatgttgccccgggccttag

SEQ ID NO: 17459 - DNA, 1398 bp, synthetic construct
  misc_feature 1..1398: note = Description of Artificial Sequence: Synthetic coding sequence
  source 1..1398: mol_type = other DNA
atggggggagcagtggtggacgaagggcctacaggagtgaaggctcccgacgggggctggggatgggccgtactgtttgggtgtttcgtaattactggattctcttatgcctttcccaaggccgtgtctgtgttcttcaaagagttaattcaagagtttggcatcgggtattcagacactgcctggatcagcagtattctactggccatgctatacggcaccgggcccctatgcagcgtgtgcgtgaacaggtttggatgccgccccgtgatgctggtcgggggcttgtttgcctcacttgggatggtggccgcttccttttgtaggagtatcatccaggtgtatctgaccactggtgtgatcactgggctgggtctggcccttaattttcagccctcgttgatcatgctgaatagatatttcagcaagagacgacccatggctaatggcttagccgccgcagggtcacccgtgttcctatgcgcccttagccccttggggcagctcctccaggatcggtacggatggagaggtggctttctcatcctgggaggcctgcttctgaactgctgcgtatgcgcagccttgatgaggcctctggtggtaactgcccagcccggtagcggacccccacgtccctcccggaggctgttggaccttagcgtattccgcgaccggggcttcgtgctctacgccgtggccgcctcagttatggtcctgggacttttcgtacctcccgttttcgtcgtgtcctatgcgaaagatttgggcgtgcccgataccaaggcagcattcctgctgaccattttgggttttatcgacattttcgcccgccccgcggccggattcgtggctggactggggaaagtgaggccgtattcagtctacctcttctctttcagcatgtttttcaacggcctggctgacttagcagggagcaccgcaggtgactacggagggctggtagttttttgtatcttctttggaatctcctatgggatggtcggcgccctgcagttcgaggtcctgatggccatcgtggggacgcacaaattttcttcagcgatcgggctcgtgctgttaatggaggcagttgcggtgctggtcgggccacccagcggtggtaagctgctggacgccactcatgtgtatatgtacgtgtttattctagcaggcgcagaagtgttaacgagcagcctgatcctgttgctaggcaattttttctgtataagaaagaaaccgaaagagccacagccagaagtcgccgctgcagaagaggaaaaactccataaaccacctgctgatagtggagtggatttgcgggaggtcgagcatttcctgaaagcagaacccgagaaaaacggagaggttgtacacacacccgagactagcgtgtag

SEQ ID NO: 17460 - DNA, 1398 bp, synthetic construct
  misc_feature 1..1398: note = Description of Artificial Sequence: Synthetic coding sequence
  source 1..1398: mol_type = other DNA
atgggcggggccgtggtcgacgagggcccaaccggcgtgaaggcaccagacggaggatggggctgggccgttctttttggctgcttcgtgattactggattctcttatgcatttcccaaagccgttagcgtgttctttaaagaactgatccaggaattcgggatcggctatagtgatacagcttggatatcttccatattgctggctatgttatacgggacgggccctctgtgctcagtctgtgtcaacaggtttggctgccggccggtgatgctagtcggtggcctgttcgcttcactgggaatggtcgctgcttcgttctgccggagcatcatccaggtttacttgacgacgggggtcattaccggactgggcctagcactgaactttcagccaagcttaataatgttgaatcgctacttctccaaacgtcgccccatggcaaacggattagccgcagcaggcagtcccgtcttcctgtgtgcattgtcgccgttaggtcagctccttcaggaccgctatggctggcgtgggggttttctcatacttggcggactgctgcttaattgttgtgtctgcgctgcactgatgagacccctggttgttacggctcagcccggatcagggcctccgcgtccttctcgacgcctcttggacctgtctgtctttagggatcgcggctttgttctctacgcagtggctgccagcgtcatggtgttgggcttattcgtgcccccagtgtttgtcgtctcatacgctaaggacttgggcgtgccagacactaaggcagctttccttctgactatcctcggttttatcgatatctttgctcggcctgcagctggcttcgttgcaggactgggtaaagtgcgcccctattccgtgtacctcttttccttttcaatgtttttcaacggactcgccgacctggctggaagcactgcaggtgactatggaggactggtggtgttctgtatcttctttggtatctcctacggaatggttggcgcactgcagttcgaggtccttatggctattgtgggaactcataaattctcgtccgctatcgggcttgttctgttgatggaagcggtcgctgtcctcgtcggccctccctccggagggaagttgttggatgcgacacacgtgtacatgtatgtattcattctggcaggggccgaggtgttaactagcagtcttattcttttgctcggaaacttcttttgcattcggaagaaaccgaaggaaccacagccggaggtggccgccgctgaagaggagaagttgcataagccacctgccgattctggtgtggaccttcgggaggtggaacactttctgaaggccgaacctgagaagaatggggaagttgtgcatacaccagagacatctgtgtag

SEQ ID NO: 17461 - DNA, 1398 bp, synthetic construct
  misc_feature 1..1398: note = Description of Artificial Sequence: Synthetic coding sequence
  source 1..1398: mol_type = other DNA
atggggggagcagtggttgatgagggtcctaccggagtgaaagctccggatggcggctggggttgggccgtgctgtttgggtgtttcgtgattaccgggttcagctatgccttccctaaggccgtttctgtgttcttcaaagagctgattcaagagttcgggattggttacagcgatactgcctggatctcctccatcttgctagcaatgctgtacggcactggacctttatgtagcgtttgtgtgaatagatttggatgccgccccgtcatgcttgtcggcgggcttttcgcctctctgggtatggtggctgcctccttctgccgatctattattcaggtgtatctgactacaggcgtaataactggactcggacttgcccttaatttccagccatcactgattatgctcaaccgctacttctctaagcgtcgtcctatggccaatgggctcgcggcggccgggagtcctgttttcctgtgtgcgcttagtccgctaggacaattgctgcaggatagatacggctggcgcggcggtttcctcatccttgggggtctcctgctgaattgttgcgtttgcgcagctctgatgagacccctagtggtcacggcccaaccaggctctggcccaccaagaccctcacggcggctcctggacttgtccgtctttcgagataggggatttgttctatatgccgttgcagcctctgtcatggtgctggggttgtttgtacctcccgtatttgtagtatcctacgctaaagacttaggagtccctgatacgaaagctgcttttctgctgaccatcctagggtttattgacattttcgcaagaccagccgccggttttgtggccggtctgggcaaagtgaggccttattcagtatacctgttttcctttagtatgtttttcaacggactcgccgacctggctggctccactgccggagattatgggggattggtagttttttgtatattctttggtatctcatacggcatggtaggagctttgcagttcgaggttctgatggcaatcgtcggcacccataaattcagctccgccattgggcttgtgctgctgatggaggctgtcgccgttctagtaggccccccctctggcggaaagctactggacgccacccacgtgtacatgtacgtgtttattttagccggggccgaagtgttaacatcctcattgattctcctcctgggcaattttttttgcattagaaagaagcccaaagaaccacagcccgaggttgccgccgcagaagaggagaaactccacaagccccctgcagattcgggcgtcgacctgcgagaggttgaacattttctcaaggctgaacctgagaagaacggagaagtggtccatacccctgaaactagcgtgtag

SEQ ID NO: 17462 - DNA, 1398 bp, synthetic construct
  misc_feature 1..1398: note = Description of Artificial Sequence: Synthetic coding sequence
  source 1..1398: mol_type = other DNA
atggggggcgcagtcgtggatgaaggacccactggagtgaaagccccggacggtggctggggctgggcagtgctgtttgggtgcttcgtgattacaggcttttcatacgcatttccaaaggcagtgagcgtgttctttaaagaactaatccaggaattcggcattgggtactcagacacagcatggatctcctccatacttctcgcaatgttgtacggcactggcccactctgctcggtctgtgtgaataggtttggatgcagacccgtgatgctcgtggggggcctgtttgctagcctaggcatggtggctgcctccttttgccgatcgatcattcaggtctacctgacaacaggtgtgatcactggtctgggcttggccctgaactttcagcccagtctcatcatgcttaacagatattttagcaagcgtcgaccaatggccaacgggctggctgcagcggggtctccggtgtttctgtgtgcactctcccctttgggccagcttctgcaggatcgttacgggtggcgtggcgggttcctgatcttagggggtctactcctgaactgttgtgtgtgtgccgcactgatgcgccctttagtcgtgaccgcgcagccaggttcaggacctccgcgtccttcacgacgtttgcttgacctgtctgtgttcagggaccgtgggtttgtcttgtatgccgtggctgctagtgttatggtgctgggcctattcgtaccaccagtgttcgtggtcagctacgcaaaggaccttggggtgccagacaccaaggctgcttttctactgacaatcctgggcttcatagacatcttcgcccgccctgccgctggcttcgtcgcaggactgggaaaagtgcgcccctatagcgtttatctattttccttcagtatgttctttaacggtctggctgacttggccgggtcaacagcaggcgactacggtggcttggttgtcttctgtatttttttcgggatttcctacggcatggttggagcactccagtttgaagttctcatggccatagtggggacccataaattttctagcgccatagggctcgtcctccttatggaagcagtggctgtcctggtgggccccccctccggagggaaacttctcgacgcaacccatgtctacatgtacgtgttcattctggccggagcagaggtcctaacaagcagtttgatccttcttctaggcaactttttttgcattcgcaagaagcctaaggagccccaaccagaggtcgccgccgccgaagaagagaaactgcataagccacctgctgactcaggggttgatttaagggaggttgaacattttctgaaagccgagccagaaaagaacggggaagtggtgcatacaccggagacctctgtttag

SEQ ID NO: 17463 - DNA, 1470 bp, synthetic construct
  misc_feature 1..1470: note = Description of Artificial Sequence: Synthetic coding sequence
  source 1..1470: mol_type = other DNA
atggtgccttcttcgccagcggtggagaagcaggtgcctgtggaaccaggtccagatcctgagttgcgatcctggaggcatctagtgtgttacctgtgtttttacggctttatggctcagattcgccctggggagagcttcataaccccataccttttgggcccggataagaactttactcgcgaacaggtgaccaatgagatcacccccgtcctgtcatattcctacctggccgtccttgtccctgtttttcttcttacagactacctgcgttacaccccagtgttgctactccagggcctgtccttcgtgtcggtgtggctccttctgctcttaggacactccgtagcacacatgcagttgatggagctgttctacagcgttacaatggccgcgagaattgcttactctagctacatcttctctttagtgaggcctgctcgctaccagcgggtagccggctactctagggccgccgttctcctcggggttttcacctcttctgtcctgggacagctcctggtgactgtcgggcgcgtgtccttcagtactctgaactacataagcctcgcctttctaacattctctgtggtactggccctttttcttaagcggcccaaacggtcactcttcttcaaccgagacgatcgggggcggtgcgagacatccgccagcgaacttgaaaggatgaatcccggacctgggggcaagctaggccatgcactgagagtcgcatgtggcgactccgtcctcgccagaatgttgcgcgagctgggcgactccctgcggcgcccccaactgagactgtggagcctgtggtgggtgttcaatagcgccggatattatcttgtggtgtattacgtacacatcctgtggaatgaagtggatccaaccaccaattcagccagggtatacaatggcgccgcagatgctgccagcacgctgctcggtgctattacctccttcgctgccggattcgtcaagattaggtgggctcgttggtctaaactgctgatcgcgggggttactgccacacaagcaggactagtatttctgctggcccacacaaggcacccgagcagcatatggctgtgctatgctgccttcgtgctattcaggggctcatatcaatttctcgtgcccattgcgacatttcagatagccagcagcctgtccaaggagctttgtgcgctggtatttggtgttaataccttcttcgccacaattgtgaaaactattattaccttcatcgtctcagatgtccgcggcctgggactccccgtgaggaaacagaacgaggagctgcatgtcgcctctctctcactgtggaaaagccacctgcgactcgccgcggacacgctgtctagtgaggggtcatcaggatccggccccagaagctggtttctgtcccccaccctccgagcagccctccacggacccgtgtgcccctcagaggtatgtccttcctag

SEQ ID NO: 17464 - DNA, 1776 bp, synthetic construct
  misc_feature 1..1776: note = Description of Artificial Sequence: Synthetic coding sequence
  source 1..1776: mol_type = other DNA
atggttccctcaagcccagcagtcgagaaacaagtgccagtggagcctggccccgaccccgaactccgtagctggagacatttggtgtgttacctctgcttctacggcttcatggcacaaataaggcccggcgagtctttcattacgccatatcttttgggcccagacaaaaattttacacgagaacaagtcaccaatgaaatcacccctgtcctcagctacagttacttggcagtgctggttccggtgttcctgctgacagactacctccgatatacaccagtgctccttctccagggcttgagcttcgtaagcgtctggttgttgcttttattgggccatagtgtggcccatatgcagctaatggagctgttttacagcgtgactatggccgctcgcatagcctatagtagctacatattctcactggttcggcccgctagatatcagagagtagcaggctactcccgggctgccgtgctcttgggggtgttcacctcatccgtactggggcagctgcttgttacagtaggccgcgtgtccttcagcaccctgaattatatctctctggcctttcttactttctcagtcgtcttggctctgttcctcaagaggcccaaaagaagcctgttcttcaatagagatgatcgggggcggtgcgaaactagcgcctctgaattagagcgaatgaaccccggacccggggggaagctgggacatgcccttagagtcgcatgtggcgacagtgtgcttgctagaatgctcagggagttaggagatagcctcagacggccccaattgcgactctggtcgctgtggtgggtgtttaatagcgccggctactatttagtggtctactatgtgcacatcctgtggaatgaagtggaccccacaaccaactctgcccgcgtgtacaacggcgccgctgatgccgcaagtaccctactcggtgccattacttcattcgccgccggattcgtcaagatccggtgggcacggtggtccaaactcctcattgcgggcgtgaccgccacacaagccggactggtattcctgctggcacacaccaggcatccctccagcatatggctgtgctacgcagcatttgtcctgtttcgcggaagctaccagttcctcgtgccaattgcaacctttcaaattgcgagcagtctatccaaggagctgtgtgctcttgtcttcggagtgaatacattcttcgccacaatcgtcaaaactattataaccttcatcgtgtccgacgtgagaggccttggtctcccagtccggaaacagttccagctttacagcgtctattttctgatccttagtatcatatattttctaggagctatgctggatggcctgagacactgtcagcgcggtcatcatccaaggcagccacctgcccaggggcttcggtccgcggccgaggaaaaagctgcccaggccctatctgtccaggataagggtctcggcgggcttcagcctgcccaaagtcctcctctaagtccagaggatagcctcggtgccgtcggccctgcctccctggagcagcggcagagcgacccctatctagctcaggctcccgcaccgcaggcggccgagttcctgtcgcctgtcacaacgccgagcccttgtacattatgctccgctcaggcatctgggcctgaagcggcggatgaaacatgccctcaactcgccgtgcatccaccgggggtctctaagctgggcctgcagtgtctgccatctgatggcgtccagaatgtgaaccagtag

SEQ ID NO: 17465 - DNA, 846 bp, synthetic construct
  misc_feature 1..846: note = Description of Artificial Sequence: Synthetic coding sequence
  source 1..846: mol_type = other DNA
atgctgagagagctgggtgactccctgagacgaccccagctgcggctctggagtctgtggtgggttttcaactctgcaggctactatctcgtggtgtattacgtgcacatcctgtggaatgaggtcgaccccacaaccaacagcgcaagggtctataatggtgctgccgatgcagcatctacccttttgggtgccataacatcttttgcggctggctttgtaaagatccggtgggcgagatggagtaagctgctcatcgctggggtcaccgctacccaggccggccttgttttcctcttagcacatacccgacacccctctagcatctggctgtgttacgccgccttcgtgttatttcgcgggtcttatcagttcctcgttcccattgcgacatttcagatcgctagtagcctttcaaaggagctatgtgcgctcgtgttcggagtaaacacgttctttgccacaatagtgaagaccatcataactttcatcgtgtcagatgtgcggggtctaggactgcccgttagaaagcaggctctccgaatgtcccggccccgcctgggactgtgtctgccaggccctttccctcctcagagcgctgcccccgccagagctggaatggctgcctcatctgccgaggaccctggctcggaacggggaccatggagaagagctggcaccgttgcggctcggggagatccgggaggagagaggggcccgtggcggcgagaagggactctggcggcgcgcggggaccctggaggcgaacggggaccatggtggcgggagggaaccttagcagccaaacctcggatgcagtgggtaacacgagctacggcaccatag

SEQ ID NO: 17466 - DNA, 810 bp, synthetic construct
  misc_feature 1..810: note = Description of Artificial Sequence: Synthetic coding sequence
  source 1..810: mol_type = other DNA
tagcttcgcctgtggtcactgtggtgggtgttcaattccgctggttactatctcgtagtttactacgttcatatcctgtggaacgaggtggaccccactacaaatagcgctcgagtgtataacggggctgcggatgctgccagcacacttttgggcgccattacttcattcgctgctggctttgtgaagatccgttgggctagatggtccaagctgctgatcgccggcgtgacagctacccaggcaggcctggtcttcctgctagctcacactaggcaccccagctctatctggctgtgttacgctgccttcgtgttattccgaggttcctatcagttcctcgtgccaatagctacattccaaattgcaagttccctctcaaaagagctttgcgccctggtgttcggcgtgaacaccttctttgctaccatcgtgaaaacaattataacattcatcgtatcagatgtgcgtggactgggactacctgtcagaaagcaggcccttagaatgagccgtccacgactgggtctgtgtctccccggtcctttcccacctcagtctgcggctcctgctagggcgggcatggcagcatctagtgcagaggatcccggatcggagagagggccatggcgccgtgcaggaacagtcgctgccagaggcgaccctgggggagaacgggggccctggcgccgcgaaggaaccttagcagccaggggagatccaggcggggaaagagggccatggtggcgagagggcacattagccgccaagcctcggatgcagtgggtgactcgcgccacggcgccgtag

SEQ ID NO: 17467 - DNA, 549 bp, synthetic construct
  misc_feature 1..549: note = Description of Artificial Sequence: Synthetic coding sequence
  source 1..549: mol_type = other DNA
atggtgcccagcagccccgctgttgagaagcaggtcccggtggagcccggtcctgaccccgaattaagatcctggcgccacttagtgtgctacctctgcttctatgggttcatggcccagatccggccaggggaatcctttatcacaccctacctcttgggcccggacaaaaatttcaccagggagcaggtgacgaatgagataacccccgtgctaagttacagttacctggctgtgctggtgcctgttttcctcctcacggactacctgaggtacacaccagtgcttttgttgcaaggcctttcttttgtctcggtatggttgcttttactcttaggacatagcgttgctcacatgcagctgatggaactgttttactcagtgaccatggctgcgcgtattgcttattcttcctacattttttccctggtgcggcccgccagataccagagggtggctggctatagtcgtgccgctgtcctgctaggggtctttacctcatcagtcctcggccaactcttggtgaccgtgggcagggtgagcttctag

SEQ ID NO: 17468 - DNA, 465 bp, synthetic construct
  misc_feature 1..465: note = Description of Artificial Sequence: Synthetic coding sequence
  source 1..465: mol_type = other DNA
atggttccaagcagccctgctgtcgagaaacaagtccctgttgagcctggcccggacccagagctgcgctcctggaggcacctggtctgctacctgtgcttttacggctttatggcacagatcagacccggagagagtttcatcactccttacctgctgggacccgataagaatttcacacgggagcaagtgactaatgagattacccctgttctgagctacagttatctcgccgtgctggtgcccgtatttttgttgaccgattacctgagatacactcctgtgctgctgttgcaagggctcagctttgtttctgtgtggttgctgctgttgctgggacactccgttgcgcacatgcagttaatggagttgttctattctgtgactatggccgcaagaattgcatacagtagttacattttcagccttgtgcgtcccgctcggtaccaacgtgtagctggctag

SEQ ID NO: 17469 - DNA, 1656 bp, synthetic construct
  misc_feature 1..1656: note = Description of Artificial Sequence: Synthetic coding sequence
  source 1..1656: mol_type = other DNA
atgcgcccacagcctgccgaacctgcccctggtggccgaggcaacgaggcttgttcaattcactcggaggttactaatgagatcacacccgtactgagttactcttacctagcggtcctggttcccgtctttcttttaaccgactatctcaggtacacacctgtgcttttattgcagggcctctcctttgtctcggtctggctcctactgttgttggggcattcggtagctcatatgcagcttatggagctgttctactctgtaactatggctgccaggatcgcttacagctcttacattttctccttagtgcgccccgcacggtatcagcgcgtggcgggctactcgagggcagcagtattgctcggagtatttacttcctccgtcttaggacagctgctcgtcacagttggacgtgtctcttttagcacgctaaattacattagtctagctttcctgacgttctcggtcgtcctcgcactgtttttaaagcgcccaaagagatcgttgttcttcaaccgtgatgatcgcggccggtgcgaaacttctgccagcgaattagagagaatgaaccccgggccagggggtaaactgggtcatgctctgagagtggcctgcggcgatagcgtcctggcgcgcatgctgagggagcttggcgacagcctgaggagacctcagcttaggctgtggtccctgtggtgggtttttaactctgctggctactatctcgttgtctactacgtccacattctgtggaacgaggtcgacccgaccacaaactctgcccgcgtgtataacggtgccgctgacgccgccagtacgctgctcggggcaatcacatcatttgccgctggctttgtgaagatccgttgggctcgatggagtaaactgctgattgccggagtgaccgcaacccaggccggtttagtctttttgttagcgcacaccagacatcccagtagtatctggctgtgctatgccgcctttgtgttgtttagaggttcgtatcaatttctggttcccattgctactttccaaatcgcttcctccctttcaaaggagctgtgcgcactggtgttcggggttaacacttttttcgcgacaatagtgaagacgatcattacatttattgtttccgacgtgagaggcctcggactgccagtacgtaagcagtttcagctgtattccgtttattttctgatactttcaatcatttatttcctgggagcaatgctggacggcctccgacactgccagcggggccatcacccaagacagcctcccgcccaggggctcaggtcggctgcggaggagaaggcggctcaagcccttagcgtgcaggataaagggttaggtgggctgcagcctgcacagtcacctccgctctcccctgaggatagccttggagcagtaggtccagcttccctcgagcagaggcagtccgatccctacctcgcacaagcacctgcgccccaggctgcagagttcctcagccccgtgacaacaccttctccatgcacgctgtgttctgcccaggcatcaggccctgaagcagctgacgagacttgtccccagctggccgtgcatccacccggtgtcagcaaattaggactgcaatgcctgccatcagatggggtgcagaatgtgaaccagtag

SEQ ID NO: 17470 - DNA, 186 bp, synthetic construct
  misc_feature 1..186: note = Description of Artificial Sequence: Synthetic coding sequence
  source 1..186: mol_type = other DNA
atggttccaagctcgcctgccgttgagaaacaggtgcccgttgagccaggccccgaccccgaactcaggagctggagacatctcgtttgctatctctgtttctatggattcatggcccagatacgccccggcgagagtttcataactccatacctgttaggcccagacaagaactttaccaggtag

SEQ ID NO: 17471 - DNA, 705 bp, synthetic construct
  misc_feature 1..705: note = Description of Artificial Sequence: Synthetic coding sequence
  source 1..705: mol_type = other DNA
atggagccctctagcaagaagttaaccgggaggctcatgctcgcagtgggaggggcagtgctcggaagtctgcagtttgggtacaacactggtgtcatcaacgctcctcagaaggtgatcgaagaattctacaatcagacgtgggtgcatcgctacggagagagcatcctccccacaacgctcacaacactctggagtctgtccgttgccatctttagcgttggaggaatgatagggtcattctccgtgggcctcttcgtcaaccggttcggacgaagaaacagcatgctcatgatgaacctcctcgcctttgtgagtgccgtgctcatgggatttagcaaattggggaagtcatttgaaatgctgattttgggaagatttatcatcggcgtatattgtggcctgactacaggcttcgtcccaatgtacgtcggcgaggtgtccccaaccgccctccggggggccctgggcacattacaccaattgggcattgtggtcgggatcctgatcgcacaagtctcctggggccgcatttacctgcctggcacggctcctgcacactcattctcaggctctcgaatatgtgcacagcagggcagggtgtcattacctccatccccccattccttagcagaggacaactatgggacacaggtacagcggacccaacaccatggcttaccggttgacagcaaaatgacatag

SEQ ID NO: 17472 - DNA, 1377 bp, synthetic construct
  misc_feature 1..1377: note = Description of Artificial Sequence: Synthetic coding sequence
  source 1..1377: mol_type = other DNA
atggagcccagcagcaaaaagctgacaggccgcctcatgcttgccgtcggcggggccgtcttgggcagcctgcagttcggctacaatactggcgttataaacgcaccacagaaagtgatagaggagttctacaatcagacctgggtccatcggtacggagaatcgatattgccaacaactctgaccactctgtggtccctgtccgtggctatattttcagtgggtggcatgatcgggagcttttcagtcggcctctttgtcaatagattcggacggaggaattcaatgctgatgatgaatttactcgcattcgtttcagccgtcctgatgggcttttcaaagttaggaaaatccttcgaaatgttaatcttagggagattcataatcggagtttactgcgggttaactactggattcgtccccatgtacgttggagaggttagtccaacagcccttagaggcgcgcttggaacacttcaccaactgggaatcgttgtaggtatcctgatagcccaagtttttggcctggatagcatcatggggaacaaggatctctggcccctgctgctgagcatcatattcatcccagccctcctgcagtgcatcgttctccccttttgcccagagagtccaaggttcctgttgataaacaggaatgaagaaaaccgtgcgaaatccgtcctgaaaaagctcaggggaactgcggatgtcacccacgatctccaggagatgaaggaggagagccggcagatgatgagggagaagaaagtcactattctggaattgttccggtcacctgcttatcggcagcccatcctcattgcagtggttctacagctaagtcagcagttatctgggatcaatgccgttttctattactctacaagcatcttcgaaaaagctggggttcagcagccagtctacgcaactatcggtagcggaatcgtgaacactgcattcaccgtggtgtcattgttcgttgtagagagggccgggagacggacattgcatctcattggactggcaggaatggctggctgtgctatcctgatgacaatagctctcgccctgctggagcagctcccctggatgtcctacctctctattgtggcaatctttggcttcgttgctttcttcgaggtggggcccggtccgataccatggttcatagttgccgagctcttctcacaagggccccgtccagccgccattgccgtagcgggtttctctaattggacatccaatttcatagtaggcatgtgcttccagtacgtggagcagctgtgcggaccttacgtttttattatttttacagtgttgttggtgctattcttcatattcactttaaacggctctatgccagaggggggcgactag

SEQ ID NO: 17473 - DNA, 1305 bp, synthetic construct
  misc_feature 1..1305: note = Description of Artificial Sequence: Synthetic coding sequence
  source 1..1305: mol_type = other DNA
atggaacctagttctaagaagctgacaggacgccttatgctggctgttggaggggccgtgctagggagcctacagtttgggtacaacaccggggtgatcaatgccccgcaaaaagttattgaggaattttacaatcagacgtgggtgcaccgctatggcgaaagcatactgcctacgactttgaccactctgtggtctctatctgtggctatttttagtgtaggcggcatgatcggatcattctccgtggggctcttcgtgaatagattcggcagaaggaacagcatgctgatgatgaatctgctcgcattcgtacctatgtacgtgggcgaggtttctcccaccgccctgagaggggctctgggtacacttcaccaactgggtatcgtggttggaatcataatcttcatccccgctttactccagtgcatcgtgcttcccttctgtcctgaatctccacgattcctgctgatcaataggaatgaggaaaatagagccaagagcgtgcttaagaagctacggggcacggccgatgtcacccatgacctgcaggagatgaaggaggagtctcgccagatgatgagagagaagaaggtgaccattctagaattattcaggtctcccgcttaccgtcaacctatcctgattgccgtggtgcttcaactgagtcagcagctaagcgggatcaatgccgttttttattacagtacctctatctttgagaaagctggcgtgcagcagccagtatatgccactatcgggagtgggattgtgaataccgcttttacagttgtcagcctgttcgtggttgagagggctggcagaagaaccctgcacctaatcgggctggccggcatggcagggtgtgccattctaatgaccatcgccctggcacttttggagcaattaccttggatgagctacctgtccattgtggcgatctttggatttgttgctttctttgaagttgggcctgggccgattccttggtttatcgtggcggagctcttcagtcaaggacccagaccggctgcaatcgccgtcgccggtttttctaactggaccagtaatttcattgtggggatgtgtttccagtatgtcgagcaattgtgcggtccttatgtctttattatattcactgtcttacttgtgcttttttttatttttacatattttaaagtacctgaaactaagggaaggacttttgatgagattgccagcggtttccgacagggcggtgcttctcaaagtgacaagaccccggaagagctcttccatccactaggcgctgatagtcaggtgtag

SEQ ID NO: 17474 - DNA, 528 bp, synthetic construct
  misc_feature 1..528: note = Description of Artificial Sequence: Synthetic coding sequence
  source 1..528: mol_type = other DNA
atggagcccagtagtaaaaaactgacagggcgtctgatgctggcagtgggaggggcggttttggggtcgctgcaattcggatacaatactggcgtaattaatgcaccgcagaaggtgatcgaagaattttacaatcagacttgggtacaccggtatggtgagagcatacttccgacaacactgactacgctgtggagcttgtccgtggccatcttctcagtgggcggaatgatcggcagtttcagtgttggtctgtttgtcaatagattcgggaggcgaaatagcatgcttatgatgaatctattggcttttgtgtccgccgtgctcatgggtttcagcaagttaggaaatcctaaattagagaccaccgacacaccactccctaaaaagtttccttttagaccccaggcccggaaggttactgcggtgcagtgtccattctgcctctctatctgtcccctccacagccttcttattttgggccctacatccacagcaactgaggccggcaagggacacaacgtgtag

SEQ ID NO: 17475 - DNA, 1479 bp, synthetic construct
  misc_feature 1..1479: note = Description of Artificial Sequence: Synthetic coding sequence
  source 1..1479: mol_type = other DNA
atggagcccagtagtaagaagcttacaggccggctcatgctggctgtggggggggctgttctgggctccctccaattcggctataataccggcgttataaacgcaccccaaaaagtcatcgaggagttctataatcagacctgggttcacagatacggggaatcgatcctgcctacgacgctcacaacactctggtcactcagcgttgcaatcttctctgtgggtggcatgattgggagcttttccgtcggcttattcgttaatagatttggacgtcgaaactccatgttaatgatgaatctgctggcctttgtatcggccgtccttatgggcttcagcaaactgggtaagagcttcgagatgttaatattggggagattcattattggtgtatactgcggtctgaccaccggattcgtgcccatgtacgtgggagaagtgtcacctaccgcactccgcggcgccttaggtacactgcatcaactgggtatcgtagtaggtatcctgatagcccaagtgttcggcctagactcaattatgggcaataaagacttgtggcctcttctgcttagcatcatctttattcctgctctgctccagtgcatcgtgctgcccttttgtccagagagtcctcgctttctgctgatcaaccgcaatgaggagaaccgagcaaagtccgttctcaagaagctacggggcaccgccgatgtgactcatgacctgcaggaaatgaaagaagaaagccggcagatgatgagagaaaagaaggttacaatcctggagctgttcagaagcccagcgtatcgccaacccattctaatcgccgtagtcctgcagctctctcagcagttatccggcatcaacgcagttttctactactctaccagtatcttcgagaaggcaggagttcagcagcctgtttacgctacaatcggatccggcattgtgaacacagcttttactgtcgtctctctcttcgtcgtggaacgagccggccggaggacgcttcatctcattggcctggccggcatggccggctgcgcaattcttatgaccatagccctggcccttttggaacagctcccatggatgagctatttgtcaattgtagccatttttggattcgtggccttcttcgaggtcggtcctggtccaataccctggttcatcgtggccgaactgttttcccagggcccgcgtccagcggctatcgccgttgccgggtttagcaattggacatctaacttcattgtggggatgtgtttccaatatgtggaacagctttgtgggccatatgtatttattattttcaccgtcttattggtgttgttcttcatctttacctattttaaagtgcctgagacgaaagggagaacatttgacgagatcgcaagcgggttcaggcaggggggcgcctcccaatcggacaaaactcccgaagaactctttcaccccctgggcgctgacagccaagtgtag

SEQ ID NO: 17476 - DNA, 753 bp, synthetic construct
  misc_feature 1..753: note = Description of Artificial Sequence: Synthetic coding sequence
  source 1..753: mol_type = other DNA
atgctgatgatgaatctgttagcatttgtgagcgccgtcctgatggggttctccaagctgggcaaaagtttcgagatgcttattttagggagatttattatcggtgtctactgtggcctgacaacaggattcgtgcccatgtatgtgggcgaggttagcccaacagcgctgcggggggctctcgggacacttcatcaattgggcattgttgtgggcatcctgatagcccaagtgttcggtttggactcgatcatgggaaacaaggatctgtggcctcttctgttatctattattttcatcccggccttgctacagtgcatagtgctgccattttgtccagaaagccctaggttcctgctgatcaacaggaacgaggaaaaccgtgctaaaagtgtgctcaagaagttacgtggaaccgccgacgtgactcatgacctgcaagaaatgaaggaagagtcacggcagatgatgagggaaaagaaagtgaccatactggagctattcagatcacctgcttataggcaaccgatcctgatcgctgtcgtgttacaattgtctcagcagctgagtggcatcaatgctgtattttactattccacatccatatttgagaaggccggtgtccagcaaccagtctatgcgacgatcggcagtggcatcgtgaacacagccttcactgtggtgtctgtgagcctgtgtctgctcgcaccgcccgccaaaccccaggggggggggtccgccatctttccctag

SEQ ID NO: 17477 - DNA, 1671 bp, synthetic construct
  misc_feature 1..1671: note = Description of Artificial Sequence: Synthetic coding sequence
  source 1..1671: mol_type = other DNA
atgccgagtttcgatgaggcactgcaaagggtgggtgaatttgggcgattccaacggcgggtgttcctcttgctgtgtctcaccggggtgaccttcgccttcctcttcgtgggcgtagtttttctcgggacacagcccgaccattactggtgcaggggccccagcgccgctgcacttgccgaaagatgtggttggagtccagaggaggagtggaatcggaccgcccccgcttcaaggggacctgagccgcccgagcggcgcggcaggtgccagaggtatctgctggaagccgcaaatgactccgccagcgcaactagtgccctttcatgtgcggatcccctggccgcgttccccaaccgttcagcacctctagtcccttgccgcggcggctggcggtacgcccaggcccactcaactatcgtttccgagttcgatctcgtgtgcgtgaacgcctggatgcttgacttgacccaggccatcctcaacttgggcttcttgactggagcctttacccttggctatgctgccgacaggtacggacgtatcgtcatctatctcctgagctgtctgggcgtcggtgtgactggagtggtagtggcctttgcccctaactttcctgtgtttgtgatcttccgttttctccaaggggtttttggaaaagggacatggatgacttgctacgtcatcgttacggaaatagttggcagcaaacagcgtagaattgttggtatagtaatccagatgttttttactctgggcatcatcattctccctggaatcgcctattttatccccaactggcaaggaatccagctggcaattacgttgccatcgttcctgttcctgctctactactgggtcgtgcctgaatcgcccaggtggctgattactagaaagaagggggacaaagccttacagatccttcgccgaatagcaaaatgtaatgggaagtacctgagtagcaattacagcgaaataactgtcacagatgaggaagtcagtaatccttcatttctcgacttagttagaacacctcagatgcggaagtgtacactgattcttatgttcgcctggtttacaagtgcagtcgtttatcaaggcctggtgatgagactgggcattatcgggggcaatttgtacattgacttctttatatcaggcgtagtagaattaccaggggcactgctgattctgctaactatcgagcgtctcggaagacgcctgcccttcgccgcttctaatatcgtagccggtgtggcctgtttagtgactgcctttctgcctgaagggatcgcctggctgcgcaccactgtagccactctcggccgattaggcataaccatggccttcgagatcgtgtatttggtcaattccgagctgtacccaaccaccctgcgcaattttggggtctctctgtgtagtggcttgtgcgatttcggaggcataatcgctcctttcctcctgtttagactggccgcagtgtggctggaactaccactgatcatctttggcattctagcgagcatctgcggcgggctagtcatgctgttacctgaaacaaaagggatcgcactccctgaaaccgttgacgacgtcgaaaaactcggaagtccgcatagctgtaaatgcggaaggaacaaaaaaacaccggtgtctcggtctcacctctag

SEQ ID NO: 17478 - DNA, 1674 bp, synthetic construct
  misc_feature 1..1674: note = Description of Artificial Sequence: Synthetic coding sequence
  source 1..1674: mol_type = other DNA
atgcccagtttcgacgaagccttgcagcgcgtgggggagtttgggcggtttcaacggcgcgtgttcctcctcctgtgtctaaccggagtgaccttcgcatttctttttgtcggggtggtttttttggggacacagcccgaccactactggtgtcgcggaccctccgctgcggcactcgcagagcgatgtggctggagtcccgaagaagagtggaataggacggctccagcttccagggggcccgagccacccgagcggcggggccgctgtcaaagatacctgctcgaggccgccaatgactctgcgagcgcaacctccgctctgtcttgcgcagacccactcgcagcatttcccaacaggagcgcacctcttgtgccatgcaggggaggttggcgctatgcacaagctcatagcaccattgtcagcgagttcgatctggtatgtgttaacgcctggatgttggacctcacccaggctattttgaatcttggtttcctgacgggtgccttcaccctcggatacgctgcagatagatatggccggatcgtaatctatctactaagttgtttaggagtcggagtcactggggttgttgtcgcttttgctcccaactttccagtgtttgtgatatttcgattcctgcagggcgtcttcggcaaaggaacatggatgacctgctacgtgatcgtcacggagatcgttggaagtaagcaacgcaggatagtcggtatcgtcattcagatgttctttacgcttggcataatcatcctgcccggtatcgcctatttcatccctaattggcaggggatacagctcgcaatcacactgccctcattcctgtttttgctttattactgggtggtgccagaatcacctcgctggctgatcacacggaagaaaggcgataaagctctccagattttgaggcgcatagctaagtgcaatgggaaatacctcagctcaaattacagcgagataactgtaacagatgaggaagttagcaatccctccttcttggacctggtgaggaccccgcagatgagaaaatgtacgctgattctgatgttcgcatggtttacgagtgcggtggtttatcagggcctggttatgcggctcggcatcattggcggcaatttgtatatcgacttctttatatcaggcgttgtcgaactacccggggctctgctaatcctgctgacgatcgaacggttgggtcgtcggctgcccttcgcagcaagcaatattgtggctggggttgcctgtctggtgacggccttcttaccggaggccgggattgcctggttgcgaactaccgttgctacattaggcaggctgggcattaccatggcgttcgaaatagtttacttagtcaacagcgaactgtaccccaccacactgcgcaactttggcgtctctctgtgctctggactgtgcgatttcgggggtattatcgccccgttccttcttttccgactcgccgctgtgtggttagagctgccgctcatcatttttggtatactggcgtccatctgcggtggcctcgtaatgctgctgcccgaaaccaagggcatagcccttcccgagacagttgacgacgttgagaagttgggatcacctcactcgtgtaagtgcggaaggaacaagaaaactcccgtttccaggtcacacctgtag

SEQ ID NO: 17479 - DNA, 1017 bp, synthetic construct
  misc_feature 1..1017: note = Description of Artificial Sequence: Synthetic coding sequence
  source 1..1017: mol_type = other DNA
atggaactccgtagcggatccgtgggtagccaggccgtggcccggagaatggacggagactccagagatggtggagggggcaaagacgccacaggatccgaggactacgagaatcttcccacatctgcgagcgtcagcacccatatgaccgccggggccatggcaggtattctggagcattccgtcatgtatccagtagatagtgtcaagactcggatgcagtcactctccccagatcccaaagctcaatatactagtatatatggcgcattaaagaaaattatgaggactgagggtttttggcggcccttgcggggggtcaacgtcatgattatgggcgccggtcccgcccacgcaatgtattttgcctgctacgagaatatgaagagaacgctcaacgacgtattccatcatcagggtaactcccacctggctaatggcatcgccggcagcatggccactctccttcatgacgcagtgatgaaccctgccgaagtcgtgaaacagagactccagatgtataactctcagcaccggagtgctatctcctgcattcgcactgtgtggcggactgaggggctgggagcattctaccggagttacaccactcaactgaccatgaacatccctttccagtcaatccactttataacctacgagtttttgcaggagcaggtcaatccccaccgcacatacaacccacagagtcatattatatccggaggtctggcaggagcactggcagccgcggcgacaaccccgctcgacgtctgtaagaccctcctgaacacccaggagaacgtcgctctttctctggctaacataagcggcagactaagcggaatggctaacgctttccggaccgtataccagcttaatgggttggcaggctacttcaaaggcattcaggcacgtgtgatttatcaaatgccttccaccgcaatatcctggagtgtctacgagttcttcaaatattttctaaccaaacggcagctcgagaacagggcaccgtactag

SEQ ID NO: 17480 - DNA, 2268 bp, synthetic construct
  misc_feature 1..2268: note = Description of Artificial Sequence: Synthetic coding sequence
  source 1..2268: mol_type = other DNA
atggcaaggaagctgtcagtgatccttatccttacctttgctctttctgtgacaaatcccctgcatgaacttaaagcagccgcgttcccccaaaccactgagaaaatatcccctaactgggagagcggaattaacgtcgatctggctatttccactcgacagtaccatctgcaacagcttttctatcgatacggcgaaaataactccctatccgtggagggtttcaggaaattgctccagaacatcggaatcgataaaatcaagcgaatccacatccaccacgatcatgaccatcacagtgatcacgaacatcatagtgaccacgagcggcattctgaccatgaacaccacagcgaacacgagcatcacagtgaccatgatcaccactcccaccacaaccatgccgcctccggaaaaaacaaaagaaaagccctttgccccgatcatgattcagattcctcgggaaaagatccgcgcaattcgcaagggaagggggcccacagacctgagcacgccagcgggcggcgcaatgtaaaggactcagtgtctgccagcgaagttacatctacggtttataacactgtgagcgaaggtacacactttctggagactatcgaaaccccgcgtcctggaaagctattccccaaggacgtctctagtagtacccctcccagcgttacctccaagtccagggtgtctagactggccggaagaaaaactaatgaatccgtcagcgaacctagaaagggttttatgtacagcaggaacacaaatgaaaaccctcaggagtgttttaacgccagcaagctgctgactagccacggcatggggattcaggtcccactgaacgccaccgaatttaactacctctgtccagccattatcaatcagattgatgccaggtcatgtctcattcacacaagcgagaaaaaggcagagatccccccaaaaacctatagtctccagattgcttgggtgggtggattcatcgccatcagcattatcagttttttgagccttcttggagtcattctagtcccacttatgaatagagtctttttcaaatttctcctgagcttcttggtcgctttggctgtgggaacattgagcggtgatgcatttttgcacttactgccccattctcacgcgagccaccaccatagtcatagtcacgaggagcccgcaatggaaatgaaacgaggacccctgttttcccatctttcgtcacagaatatagaggaatctgcttacttcgactccacatggaagggcctgaccgccctgggcggcctctatttcatgttcctggtcgaacatgtgcttacactaatcaaacagtttaaagataagaagaaaaaaaaccagaaaaagccagagaatgacgatgatgtcgagatcaagaaacaactctctaagtatgagtctcagctgagcacgaacgaagaaaaggttgacaccgacgaccggactgagggttatttgcgtgctgattcccaggagccgtcccacttcgatagtcagcagcccgcagtcctggaggaagaggaggtgatgatagcacacgctcatccccaggaggtgtataatgaatatgtgcctcgaggttgcaagaacaagtgccattctcatttccacgatacacttggccagtctgacgatttgattcaccatcaccacgactaccaccacatcctacaccaccaccatcaccagaatcaccatcctcacagccatagtcagagatatagccgggaggagctgaaagacgcaggcgtggcaaccctggcttggatggtcattatgggagatggccttcacaatttttcagatggactggctattggggctgcgttcacagaagggttgagctccggactctccacaagtgttgcagtcttttgtcacgagcttcctcatgagctcggcgacttcgccgtgcttctgaaagctggaatgactgtgaaacaagcagtgctgtacaatgctttgagtgctatgctcgcgtatttgggtatggcaactggcattttcattgggcactatgcagagaatgtgagcatgtggattttcgccctcactgccgggctgtttatgtacgtcgcacttgtcgatatggttcccgaaatgttgcacaacgacgctagtgaccacgggtgtagccgctggggatatttttttctccagaacgccggcatgctgctcggatttggaataatgctgcttattagtatatttgagcacaaaatagtctttagaattaatttctag

SEQ ID NO: 17481 - DNA, 1302 bp, synthetic construct
  misc_feature 1..1302: note = Description of Artificial Sequence: Synthetic coding sequence
  source 1..1302: mol_type = other DNA
atgggcattcaggtgcccctgaatgccactgagtttaattatctgtgtccggctattatcaaccagatcgacgccagaagctgtctgattcacacctctgagaaaaaagccgaaatcccaccaaagacttactccctgcagatagcctgggtgggaggctttattgcaatcagcattatatcttttttgagtctgctgggggttattctcgtgccactcatgaaccgcgttttcttcaagtttcttcttagctttctagtagccctggccgtcggtacgctctccggcgatgccttcctccatcttctcccacattcccatgcctctcaccatcactcccacagtcatgaagagcccgccatggaaatgaaacggggccctctgtttagtcatctcagctctcaaaatattgaggaatctgcgtacttcgactctacatggaagggcttaacagccctcgggggcctgtattttatgttcctggtcgagcatgtccttactctcataaaacagtttaaggataaaaaaaaaaagaaccagaagaaacccgagaatgatgacgacgtggaaatcaagaagcagctcagcaagtacgagtcccagttatccacaaatgaagagaaagtggatactgatgataggaccgaggggtatctcagagccgactctcaggaaccatcccacttcgacagtcaacagccagctgtcctggaagaagaggaagtcatgatagcccacgctcacccacaggaggtatataacgagtacgtgcctcgagggtgcaagaacaagtgccacagtcatttccatgacacattgggccagagtgacgacctcatacatcaccatcatgattatcatcacatcctccaccatcaccaccaccagaaccatcacccccactcgcattcccagagatactccagagaggagctgaaggatgcaggtgttgcaacccttgcttggatggtcataatgggtgacggactacacaacttttcagatgggttggctattggtgctgctttcactgagggactgtcttcaggactcagtactagtgtcgctgtgttctgtcacgagttgcctcacgagctgggggacttcgccgttcttttaaaagccggcatgaccgttaaacaagctgtcctgtacaacgcactgagcgccatgcttgcttacctgggcatggccaccgggatcttcataggacactatgccgaaaacgtgtccatgtggatcttcgccttaactgctggtctgtttatgtatgtggctctggtagatatggtctctttctag

SEQ ID NO: 17482 - DNA, 1233 bp, synthetic construct
  misc_feature 1..1233: note = Description of Artificial Sequence: Synthetic coding sequence
  source 1..1233: mol_type = other DNA
atgggcatccaggtccccctgaacgctaccgagttcaattacctctgccccgctatcatcaatcaaatagacgctagatcatgtcttatccatacgagtgagaagaaggcggaaattccgccaaaaacgtactcgctccagatagcctgggtcggagggtttattgccatttctattatctcgttcctaagtctcttgggcgtaattctcgttccattgatgaatagggtcttttttaagtttctgctatctttcctggtggccctcgccgtgggtaccctaagtggcgatgcattccttcacctgctgccccatagtcacgccagccaccatcattcccatagccatgaagagcctgcaatggaaatgaaacgcggaccccttttcagtcacctgtcctctcagaacatagaagagtcagcctacttcgatagcacgtggaagggcctgactgcacttgggggactgtatttcatgttcttggtggagcacgtgctcacattaatcaaacagttcaaggataagaagaagaagaaccagaaaaaacccgagaatgatgacgatgttgagattaaaaagcagctgtcaaagtatgaatctcagctgagtacaaacgaagaaaaagtggacaccgatgataggaccgaaggttacctgagggctgactctcaggaaccgtcacacttcgacagtcagcagccagcagtgctcgaagaggaggaggtcatgatcgctcacgcccacccgcaagaggtctataatgaatacgtgccgcgcggatgtaagaacaagtgccactcacactttcacgatacattaggccagagtgatgatctgatccaccaccaccatgactatcaccatattctccaccaccaccaccaccagaatcatcacccacattctcactctcagaggtattcgcgcgaggagttgaaggacgccggagtggctacattggcttggatggtgattatgggcgacggcttgcacaatttctccgatggcctggctatcggagccgcgtttacagagggcctctctagcggcctgtctacctctgtagccctcgttgacatggtcccagagatgttacataatgacgccagcgaccacggttgttcacgttgggggtatttcttcctgcagaacgcaggcatgctgctgggctttggcattatgctactaatttctatattcgagcataaaatcgtcttcagaatcaacttttag

SEQ ID NO: 17483 - DNA, 1833 bp, synthetic construct
  misc_feature 1..1833: note = Description of Artificial Sequence: Synthetic coding sequence
  source 1..1833: mol_type = other DNA
atggacacacctaggggaatcggtacctttgtggtgtgggattacgtcgtctttgcgggcatgctcgttataagcgccgctatcggcatttactacgcgttcgccgggggcggccaacagacatctaaggatttcctcatgggaggacgacggatgactgccgtgcccgtggccctatccctgactgcctcattcatgtcggcggtgaccgtgctgggtactccctctgaagtttaccgatttggcgcaattttctccatttttgccttcacatatttcttcgtggtggtgatctccgccgaagtcttcctgcccgtgttttacaagctcggcataacaagcacctacgagtatcttgagctgcgtttcaacaaatgtgtaagattatgcggcacagttttattcattgtacagactatactgtacaccggcatcgtgatttacgcacctgcattagcattgaaccaggttaccggtttcgatctatggggagctgtggtcgccactggagtggtctgcaccttctattgcactctaggcggcctgaaggccgtaatctggactgatgtgttccaagtgggaatcatggtggcgggattcgccagtgtcataatccaggccgtggtgatgcagggagggatctcaaccatactgaacgacgcttatgacggcggtagactgaacttttggaatttcaatcccaaccccctgcagcgacacaccttttggaccatcatcatcggcggaacctttacctggacttcgatttacggggtgaaccagagccaggtacagagatacatttcttgcaagtccagattccaggcaaaactgtctctttatatcaacctggtgggtttatgggccatcctcacctgctctgtcttctgcggattggcgttgtactctaggtatcatgactgcgacccatggaccgcgaaaaaagtatccgcacccgaccaactcatgccctacctggtgctagacatactgcaggactaccctggcttacctggcctgttcgtagcgtgtgcttactccggaactttgagcactgtgtcgagctccataaacgcactggctgctgttactgtggaagatctgattaagccctactttcggtcactaagcgagcgcagcctgagctggatctcccaagggatgtctgtagtgtatggtgctctatgcatcggcatggctgcactcgcaagcttgatgggcgctctcctgcaggctgcacttagtgtgttcggcatggttgggggcccacttatgggcttgttcgctctgggaattctggttcccttcgccaattccatcggagctctggtggggctgatggccggcttcgcgatcagtctctgggtgggaatcggagctcaaatatatccccccctcccagagaggaccttgccattacacttggacatacaaggctgtaactctacatacaacgagactaatctaatgactacaacagaaatgcccttcactactagcgtgtttcagatctacaacgtgcaaaggacgcctctaatggacaactggtatagcctgagttatctgtatttctccaccgtgggaacccttgtaacattactggtcggaatacttgtcagcctttcaacgggaggtaggaagcagaatctagacccaagatatatcctgactaaagaggatttcttatctaacttcgatatatttaagaagaagaagcatgtgcttagctacaagagccaccccgtcgaggacgggggaaccgacaatccagcatttaaccacattgagctgaattccgaccagagcgggaaatccaacggcaccaggctgtag

SEQ ID NO: 17484 - DNA, 1071 bp, synthetic construct
  misc_feature 1..1071: note = Description of Artificial Sequence: Synthetic coding sequence
  source 1..1071: mol_type = other DNA
atggatatggcggacgaacccctaaacgggagtcacacttggcttagcatacccttcgatttgaatggttcagtggtgagcaccaacactagtaatcagaccgaaccatactacgatctgacatccaacgccgtccttacatttatctactttgtagtatgtattattggcctgtgcgggaataccctcgtgatttatgtgatcttgcgatatgctaagatgaagaccattacaaacatatatattcttaacctagctatagccgacgagcttttcatgctcggcctgccctttctagctatgcaggtggccttggttcactggcctttcggaaaggcaatctgtcgggtggtcatgactgttgatggaatcaatcagttcacatccattttttgtcttactgtaatgtctatcgaccgatacctggccgtggtccatccaattaaatccgcaaagtggcgacgcccccgcactgctaaaatgatcactatggccgtatggggcgtctcacttctagtcatcctccccattatgatttatgcgggcctaagatcaaaccaatgggggcggagctcttgcaccattaactggcccggagagtcgggggcctggtataccggatttatcatctatacgttcattctgggcttccttgtgcctttaacgatcatctgcctgtgttatttatttataataatcaaagtaaaatcaagtggaatacgagtcggtagttccaagcgcaaaaaatctgagaaaaaagtcactaggatggtaagcatagtcgtggctgtgttcattttctgctggttacccttttatatcttcaacgtcagctcagtgtctatggcaatctcaccgacccccgcgctgaaaggcatgtttgatttcgtcgtggtgctgacttatgcaaactcttgcgccaatccgattttatatgcattcctgtccgacaactttaagaaatccttccagaatgttctgtgtctggtgaaggtggataacagcaagtcaggagaggaaggctcttgtctcgacatgatctttagaaataataaaaatcgtaaaaagtag

SEQ ID NO: 17485 - DNA, 1110 bp, synthetic construct
  misc_feature 1..1110: note = Description of Artificial Sequence: Synthetic coding sequence
  source 1..1110: mol_type = other DNA
atggacatggcagacgaacctctcaatggtagtcacacctggctttccatcccctttgatctgaacggctccgtggtgagcacaaacacctccaaccaaacagagccttattatgacctgacttccaacgcggtgttgaccttcatctactttgtggtgtgcatcatcggcctctgtgggaataccctggtcatttacgttattctcaggtacgctaaaatgaagacaatcactaacatctacatcctcaacctcgctattgcagacgaactgtttatgctgggattgcctttcttggcaatgcaggtcgcactcgtacactggccctttggaaaggccatttgtagggtggtcatgacagtggacgggattaaccagtttacctccatcttttgtctcactgtgatgtccattgataggtatctggccgtagttcacccgatcaagtcagccaaatggaggcgcccgcgtactgcaaaaatgatcacaatggcggtatggggagtttcccttttagtgatcctgcctataatgatctacgctggactgcgatccaatcaatggggacggagcagttgtaccataaactggcccggcgagagcggtgcctggtacaccgggtttattatttacacgttcatcctcggcttcctcgttcccctcacaattatctgcttgtgttatctgttcatcattataaaggttaagagtagtgggatacgcgtggggtctagtaaacggaagaagtcagagaagaaagtcacgaggatggtctccatcgtggtggcagtctttatcttttgctggctgcccttctatatcttcaacgtgtcaagcgtgagcatggccataagccctacgcccgctctgaaaggaatgttcgattttgtggtcgtactgacctatgctaatagctgtgccaatccgattttatacgcttttctgtcggacaactttaagaagtctttccagaacgtcctctgtctggtcaaagtttccgggacggacgacggagagaggtcagattcaaagcaggataagtcacgtctgaatgagaccactgaaacacagagaaccctcctcaatggagatcttcagacctccatctag

SEQ ID NO: 17486 - DNA, 3315 bp, synthetic construct
  misc_feature 1..3315: note = Description of Artificial Sequence: Synthetic coding sequence
  source 1..3315: mol_type = other DNA
atgcaggctcaacagctaccctatgagttcttctctgaggagaatgccccaaagtggagggggctactagtccctgcactaaagaaagtgcagggccaggtacatccgacactggaatcaaacgacgatgccctgcagtacgtcgaggaactgattttgcagcttctgaacatgctctgccaagcccagccccgtagtgcctcagacgttgaagaaagagtgcaaaaaagctttccccacccaatcgacaaatgggctatcgccgatgcccagtccgcaattgagaaaaggaagcggagaaacccattatccctcccggtcgaaaaaattcaccccttgttaaaagaagttttgggctataaaatcgatcaccaggtgagcgtatatatcgtggcggtgctcgagtatatctccgccgatatcctaaagctggtgggcaactatgtgaggaacattcgccactacgagatcaccaaacaggacataaaggtggctatgtgcgcagataaagtattaatggatatgtttcatcaggatgtggaggacattaacattttgtcgctgaccgacgaagaaccctctacctctggcgagcaaacatattatgatctggttaaagcttttatggcagaaattagacaatacatacgcgaacttaatttgattatcaaggtgttcagagagcctttcgtgagtaatagtaagctgttctcagccaatgacgtcgaaaacatcttctctagaatcgttgacattcacgaactttccgtaaagctgctgggccacatagaagataccgtggagatgactgatgaggggtctccccaccccctcgtagggtcctgcttcgaagacctcgctgaggaacttgcattcgatccatatgaaagctacgcccgagacattttgcggcctggcttccacgaccgcttcctgtcacagcttagcaagccgggcgcagccctctatctgcagtccatcggtgagggcttcaaggaggctgtacaatacgttctgcccaggctcttgctggctccggtctaccattgtctacactattttgaactactaaaacagctggaagaaaaaagcgaagaccaggaggataaagaatgcttgaagcaggcgattacagctcttctgaatgtgcagtccggaatggagaagatctgtagcaagtctcttgccaagcggaggttatctgaatcagcgtgcagattctattcccagcagatgaaggggaagcagttggcaattaagaagatgaacgagattcagaagaacatagacggctgggagggcaaggatatcgggcagtgttgcaatgagttcattatggaaggcaccttaactagagtgggcgccaaacatgaacggcacatttttcttttcgacgggcttatgatatgttgcaagagcaatcacggccagccgcgcctgcctggcgcttctaatgctgagtatcggctcaaagagaagtttttcatgcgcaaagtgcagatcaacgacaaagacgacaccaatgagtacaagcacgcatttgagatcatcctcaaagacgaaaacagcgttatcttttctgcaaaatcagccgaggaaaaaaataattggatggcggctttgatttctctgcaatacaggagcaccctggagcgaatgctcgacgtgacaatgctccaagaggagaaggaagagcagatgcgattgcccagtgccgatgtctacaggttcgccgagccggactctgaggaaaatattatttttgaagagaacatgcagccaaaggctggtattccaatcatcaaggcagggactgtcatcaaattaatagagcggctcacctatcacatgtatgccgatcctaatttcgttagaacattcctgaccacgtaccgaagcttctgtaagcctcaggaattactctcactgatcatcgaacgcttcgagattcctgaacccgagccaactgaggcggatcgaatagccatcgagaatggcgatcagcctctgtcagccgaattgaagaggtttcgcaaggaatatattcagcccgtacaactaagagtgctcaacgtgtgtcgccactgggtcgagcaccacttctacgatttcgaacgtgacgcatatctgctgcagcgaatggaggagttcatcggtaccgtccgcgggaaggcgatgaaaaagtgggtcgagtccatcaccaagatcatccagcgaaaaaagatagcgagagataacggacctggccacaacattacctttcagtccagtccccctactgtggaatggcatatctcccgaccagggcacatcgaaacctttgacttgctgacactgcatcctattgagattgccagacagctgacgttgctggaatctgacctctatagagctgtccagccgtcagaattggttggcagcgtgtggaccaaagaggacaaggaaatcaattccccaaatctcctaaaaatgattcggcacactaccaatcttactctgtggttcgagaaatgcatcgttgaaaccgagaatctggaggaaagagtggccgtcgtgtcgcgcatcatcgagatactgcaggtgttccaagagctgaataactttaatggagtcctagaggtagtctctgcaatgaactcctcaccagtgtaccgtctggatcatacatttgaacaaatcccttcgcgccagaaaaaaattttggaggaagctcacgagttgtctgaagatcactataaaaaatacctggcgaaattgaggtcaattaaccccccgtgcgtgccattctttggaatttacctgactaacatcctcaaaaccgaggagggcaacccagaggtcctcaaaagacacggtaaagagttgatcaatttcagcaaacgaagaaaggtggcagagataactggagagatccagcagtaccagaaccagccctactgtctgcgcgtggaaagcgacataaaaaggttttttgagaacttaaatcctatgggcaactccatggagaaggaattcacagactaccttttcaataaatccttagagatcgaaccgagaaatcccaaaccattgccacggttcccgaagaaatattcatacccacttaagtcacccggggttcggcctagcaatcctagacctgggaccatgcggcacccaacccctctgcagcaagaacccaggaagatatcttatagtcgcattccggagagtgagacggaaagcacggcctcagccccgaactcccctaacactgttaatacatctgcttgtttttggtgcttccagtaccacaggtgcctgcaatgtatctag

SEQ ID NO: 17487 - DNA, 3957 bp, synthetic construct
  misc_feature 1..3957: note = Description of Artificial Sequence: Synthetic coding sequence
  source 1..3957: mol_type = other DNA
atgcaggcccaacagctgccgtacgaattttttagcgaggagaacgcccctaaatggcgcggactcttggtccctgcgcttaagaaagttcagggacaggtccatcccaccctagagtcaaacgacgacgcactgcaatatgtcgaggagttaatactgcagttgttgaatatgttgtgccaggcccagccccgatcagcaagtgacgttgaggagcgagtgcaaaagtcattccctcacccgatcgataagtgggctatcgctgatgcgcagagtgcaatcgaaaaaagaaagagaagaaaccccctgtccctcccagtcgagaagatccatccactcctgaaggaagtcttgggatacaagatagaccaccaagtgtctgtatacatcgtggctgttctggaatacatctccgcggatatcttaaagttggtggggaattacgtacgcaatatccggcactacgaaatcacaaagcaggacatcaaggtggctatgtgtgccgacaaggtgctgatggatatgtttcaccaggacgtggaagacatcaatattctgtccctgaccgatgaggagccgagcacaagcggggaacaaacctactacgacctcgttaaggccttcatggcggagatacgccagtatatacgcgagcttaacctgattatcaaggttttccgtgagcccttcgtctccaattcaaagttgttttccgcaaacgatgttgagaacattttttcacgcatagtggacatccacgaactgtccgtgaaacttttagggcacatcgaagacaccgtggagatgactgatgagggatcccctcatcctttagtgggatcatgcttcgaggatctcgccgaagagctagcttttgacccttatgagtcctatgctagggacatcctgcggcctgggtttcacgaccgttttttatctcagttgtctaaacctggcgccgcactgtatctgcagagtattggggaaggattcaaggaagccgtgcagtatgtgctcccaaggcttttgctagccccagtctaccactgcctgcattattttgaactcctgaagcaattggaagaaaagtccgaagatcaggaggataaagaatgcctgaagcaggcgatcaccgctttgctgaacgtgcagtccggtatggagaagatttgctccaaaagcctcgctaagaggcgcctttcagagagcgcctgcaggttttactcccaacagatgaagggaaaacagctggccataaaaaaaatgaacgagatccagaagaatatagatggctgggagggcaaggatatcggtcaatgctgtaatgaattcatcatggagggcacgctaacccgggtcggagcgaaacatgaacgccatattttcctgttcgatggcctgatgatttgttgtaaatcaaatcacggccagccccgactgcctggggcatccaacgcagagtaccgacttaaagagaagttttttatgcgcaaggtgcaaatcaatgataaagatgacacaaacgagtacaaacatgcctttgagatcattctcaaggacgagaattccgtgatcttcagtgcaaagagcgcggaggagaaaaataattggatggccgctttgatcagcttgcagtaccgtagcactctggagcggatgcttgatgtgactatgctgcaagaagagaaggaagagcaaatgcgccttcctagtgcagacgtctaccgctttgcagaacccgactctgaagaaaatatcatttttgaagagaacatgcaacccaaggccggcatcccaatcattaaggcgggcaccgtcatcaaactgattgagaggctgacatatcacatgtatgctgatccaaacttcgtgagaacctttctaactacctaccgctcgttctgcaaaccgcaagagttgctttcacttattatcgagaggtttgagattcccgagcctgagccaactgaggccgatagaatcgctatcgagaacggcgaccaacctctttccgccgagctgaagcgctttaggaaagaatacatccagccagtccagctgcgagtgctcaatgtgtgtcggcactgggttgaacaccacttctacgactttgaaagagatgcctatcttctgcaaagaatggaggagttcatcggtaccgtgcgtgggaaggccatgaaaaagtgggtggagtccattacaaagatcatccaaaggaagaaaatcgctagagacaacggacccggacacaacatcacattccagtccagccctccaaccgtggagtggcatattagccgtcctggtcacatcgagacttttgacctgttaaccctgcatccgatcgagattgcaaggcagctgaccctgctggagtcggatctataccgcgctgtgcagccatctgaacttgtcggctccgtgtggactaaagaggacaaggagatcaatagtccgaacttgctcaagatgattcggcacactactaatttgacactgtggttcgagaaatgcatcgttgaaaccgagaacctggaagagcgagtggcagttgtctcgagaatcattgaaatccttcaagttttccaggaactgaacaatttcaacggggtgctcgaggtggtgagcgctatgaacagctctcccgtgtataggctcgaccatacgttcgaacaaattccaagcaggcagaagaaaatcctcgaggaagcccacgaactgtccgaagatcattataaaaagtacttagctaaactccgaagcattaaccccccttgcgtgccattcttcggtatctaccttaccaacattctcaaaacggaggaggggaaccccgaggtgcttaaaaggcatggtaaagaactcataaatttcagtaagcgcagaaaagttgctgagattacgggtgagattcagcaataccagaatcagccctactgcctacgggtggagtctgacattaagcgcttcttcgaaaacctgaacccaatgggcaatagtatggagaaggaattcaccgactatttgtttaataagagcctggagattgaacccaggaacccgaaacctcttcccaggttccctaagaagtattcgtatcctctgaagtcccctggcgtaaggccctccaacccacggccaggaacaatgagacaccctacacctctccagcaggagccacgtaaaatttcttacagccgaatccctgaaagcgagacagagtcaacggctagcgcccccaattccccgcgaacaccgttgaccccgccaccggcaagtggcgcaagttctaccactgacgtgtgttccgtgtttgatagcgaccatagttctccgttccacagccgttccgcctctgtctcatccatctcactcactaaagggactgacgaagtgcctgtgcctccccccgtgccacctagacggcggcctgaaagcgctccagccgagtcaagccccagcaaaattatgagcaagcatctggactcaccacccgctatccctcctcgacagcccacttcaaaggcttactcaccacgctatagcatatcagatagaaccagcatctcggatccacctgagtcccccccactgctgccgccccgggagcccgtcagaacaccggacgtcttctcaagcagtcccctgcacctgcagcctccgcctttgggcaaaaagagtgatcacggcaacgcattctttccaaactctccatcacctttcacaccgccgccccctcagacaccgtccccccatgggacaagacggcatctgcctagccctcccctgacccaggaagtcgatttgcacagcattgctggccctcctgtaccaccccgtcaaagcacttctcaacacataccaaagttaccccccaagacgtataaaagggagcacacccatccttccatgcacagggacggtcctccactactggaaaacgctcattctagctag

SEQ ID NO: 17488 - DNA, 4002 bp, synthetic construct
  misc_feature 1..4002: note = Description of Artificial Sequence: Synthetic coding sequence
  source 1..4002: mol_type = other DNA
atgcaggcccagcagctgccttatgagttcttcagcgaggaaaacgccccaaagtggcggggtctcctggtgcctgcgctgaaaaaagttcagggacaggttcaccccactcttgagtccaatgatgatgccctccaatacgtggaagaattaattctgcagctcctaaatatgctgtgtcaagcccagccacgtagtgcctccgatgtggaggaacgcgtgcagaagagctttcctcacccaattgacaagtgggccatcgctgacgcacaaagtgccatcgagaaaaggaagagacgaaacccactaagcctccccgtggaaaaaatccaccccctcctcaaagaagtgttggggtataaaattgatcaccaagtatccgtgtacattgtggccgtcctcgaatatattagcgcagatatcctcaaactggtgggcaactacgtgagaaacatcaggcattacgagatcacgaaacaggacatcaaagtagcgatgtgtgcagataaggtgctcatggacatgttccaccaggacgtggaggatataaacattctctcgctgactgatgaggaacccagcaccagcggcgaacagacctactacgatctcgttaaggcatttatggcggaaattcgacagtatatccgagagctgaatcttattatcaaggtttttagagaaccattcgtgtctaatagtaaactttttagcgcaaacgacgtggagaatatattctcccgtatcgttgatatccacgagctctccgtgaagttgctcggacatattgaggacacagtagaaatgaccgatgagggcagcccacacccacttgttgggtcatgcttcgaggatctggcagaggaactcgctttcgatccctatgagagctacgcgagggacatcctgagacctggctttcatgacagatttctgagccagttatccaaaccaggggcagccctgtacctgcagagcattggcgagggcttcaaggaggctgtccagtatgtcctgccacgcctcctcctagcaccggtgtatcactgtcttcactacttcgagctcctcaaacaactcgaagagaagagcgaagatcaggaagacaaagagtgtttgaaacaagctattacagcactgctcaatgtccagtcaggcatggagaagatctgttccaagagcttagccaaaagacgcctttccgagagtgcctgtcggttctactctcagcagatgaaggggaaacagctggctatcaaaaagatgaacgagatccagaagaacatcgacggctgggagggcaaggatatcgggcagtgttgcaatgagttcatcatggaaggaaccctgacccgtgtcggtgcaaaacacgaacgtcatatctttctgttcgacggactaatgatttgctgcaagagcaaccacgggcagccacggctgcccggagcaagcaatgccgagtacagactgaaggaaaagttctttatgagaaaggtacagatcaacgataaagacgacaccaacgagtataaacatgcttttgagatcatcctgaaagatgaaaactcagtaatcttctccgccaagagtgcagaggaaaagaacaattggatggctgctctgatctccctgcagtacagatccacactggagaggatgttggacgtgaccatgttacaggaggagaaagaagaacagatgcgcctacctagcgcagatgtataccgatttgcagagccagatagcgaggagaacattatttttgaggagaatatgcagccgaaagcaggcatccccattatcaaggcagggacggtgataaagcttatcgaacgcctgacataccacatgtatgcggatccgaattttgttaggacctttctcaccacttataggtcgttctgcaaaccacaggaattgctgtcactaatcatcgaacgtttcgaaattcctgagccggagcctaccgaggctgataggatcgcaattgaaaacggcgaccagcccctctctgccgaactgaaacggtttcgcaaagaatacattcaacccgtccagctgcgagtgttgaacgtgtgtcgccattgggtcgaacaccatttttatgacttcgagcgagacgcctatctcctgcagcgtatggaagaatttattgggacagtacgcggaaaagctatgaaaaagtgggtcgagtccataacaaagatcattcagcgtaagaagatagctcgcgataatggacctgggcacaatatcacttttcagtcttcgcctcctacagtcgagtggcacatctcgagaccaggtcacatagaaacgttcgatctcctaaccttgcacccaatcgagatagcaagacagctgactctgctggaatccgatctgtatcgcgccgtgcagcccagcgagttagttggcagcgtgtggacaaaagaggacaaggagataaactctccaaacttgctgaagatgatccggcatacgaccaacctgacattgtggtttgagaaatgcatcgtggaaaccgagaacttagaagaacgggtcgccgtggtgtcaagaattatcgagattctacaggtcttccaagaactgaacaactttaatggggtgctcgaggttgtgagcgcaatgaattcttccccagtatacaggttggaccatacctttgagcagattccatctcgacaaaagaaaatactggaggaagcccacgaactaagtgaagatcattataagaagtatctggcgaaactgaggtccattaacccaccatgtgttccattttttggaatctatttaactaatatcttgaagacagaagagggcaaccccgaggtgctgaaaagacatggaaaagaactcattaacttctccaagcggcgtaaagttgccgagataacaggcgagattcagcagtaccagaaccagccatattgtcttcgagtggaatcagatattaaacgtttttttgagaacctcaatcctatggggaattcaatggagaaagagttcactgattacctgtttaataagagtctcgaaatcgaacctagaaacccaaagcccctgccacggttcccaaaaaagtactcatatccattaaaatcgcccggtgtgcgcccttccaatccgagacctggaaccatgagacacccaaccccgctgcagcaggagccacgcaagatttcttacagccgaattcccgagagtgagacagagtctaccgcatctgcccctaactcgcctaggacacctctgacaccacctcccgccagcggcgccagctccaccacagacgtctgctctgtttttgactccgatcacagttccccctttcacagctccaacgacacggttttcattcaggtgactctgcctcacggtccaagatcagcatccgttagcagcatttcattgactaagggtactgacgaagtcccagtgccaccacccgtcccacctaggaggagaccggagtccgctcccgcggaaagctctccttcgaaaatcatgtctaaacacctcgacagtccacctgccattccccctcgacagcccactagtaaggcctacagtcccaggtactccatatcagacaggacttctatctctgatcccccagaatcaccccccctgctgccgcctagagagcccgtacgcacccccgacgtgttctcctcgtcgccgctccacctgcaacctccaccccttggcaaaaagtccgaccatggcaacgcattctttccgaacagcccctcccccttcacccccccccccccgcagacgccttctccacacggtaccagaagacacctgccaagcccccctctcactcaagaagtagacctgcattccattgcaggccctcccgtgcctcctcggcagtctacatcccaacatatacccaaactgccaccgaagacctacaagagggagcacacacatccaagcatgcaccgtgacgggccacctctgctcgagaatgcccactcgagctag

SEQ ID NO: 17489 - DNA, 4002 bp, synthetic construct
  misc_feature 1..4002: note = Description of Artificial Sequence: Synthetic coding sequence
  source 1..4002: mol_type = other DNA
atgcaagcccagcaattgccatatgagtttttcagtgaggagaacgccccgaagtggagaggcctgctggtgcccgctctgaaaaaggttcaaggccaggtgcatcccacactggagtccaacgacgacgccctgcagtatgtggaggagctgatccttcagctgcttaatatgctgtgtcaggctcagcccaggagcgctagcgatgtggaagaacgcgttcagaagtcctttccacaccctatcgataagtgggctatcgcagacgcacagagcgctatcgaaaagaggaagagacggaacccgctgagcctccctgtggagaagatccaccctttgttgaaagaagtcctgggctacaagattgatcaccaggtatccgtttacatagtggcggtgcttgaatatatctcagccgacatactgaagcttgtgggcaattacgtccggaacattcggcattatgagattacaaaacaagatattaaggtggcaatgtgcgctgacaaagtattaatggacatgtttcaccaagatgtggaggatatcaatatcctcagtctaaccgacgaagagccatctacctcgggcgagcagacctattacgatttagtgaaggcattcatggccgagattaggcaatacattcgcgagctgaatctaatcattaaggtgtttcgagagccttttgtcagtaatagcaagctgttttccgcaaacgacgtggagaatatatttagcagaatcgtggacatccacgaactgtctgtgaagctcctcgggcatatcgaggatacagttgagatgaccgatgaaggaagtccacaccctctcgtgggctcttgttttgaggaccttgccgaggaacttgccttcgacccttatgagtcctatgcaagggacattttgcgacccggcttccacgaccgattcctgtcccaactgagcaaacctggagccgcactgtacctgcagtctattggcgagggctttaaggaggccgtgcaatacgtacttccccggcttctgttggcgcccgtttaccattgtcttcattatttcgagctcctcaaacaattagaagagaaatctgaagatcaagaggacaaagaatgcttgaaacaggcaataaccgccctgctgaatgtgcagtctggcatggagaagatatgtagtaagtccctggctaaacggcgactttcagaatcagcctgtcgtttttattctcaacagatgaaagggaaacaattggccatcaaaaagatgaacgagatccaaaagaacattgacggctgggagggcaaggatattggccagtgttgtaatgaatttattatggaggggacattaacgcgggtgggagcaaagcatgaacgtcacatcttccttttcgatggcctgatgatttgctgtaaatcgaaccatggacagccccggctgcccggcgccagtaatgccgagtaccgcctcaaagagaagttttttatgcggaaagttcagatcaacgataaagacgacacgaatgaatataagcacgctttcgagattatccttaaggacgaaaactcggtgatcttttctgcaaaaagtgcagaggaaaagaacaattggatggctgccctcattagtctgcagtacaggtcaactttagaaagaatgctcgatgtaaccatgcttcaagaggagaaagaggagcagatgaggctgccatccgcggacgtttacaggttcgccgagccggatagcgaagaaaacatcatttttgaggaaaatatgcagcccaaagcaggaatccctatcataaaagccggcaccgtcataaagttgatcgagcgcctgacataccacatgtatgcagatcccaactttgtaaggacctttctgaccacctatcggtccttctgtaaacctcaggaactattgtctctgatcatcgagaggtttgagatacctgagcctgagccaacggaagctgacaggattgccattgagaacggcgatcagccactcagtgcagagctgaagcgattccggaaagagtacatacaacctgtgcaactccgggtcttgaacgtgtgcagacactgggttgaacaccatttctatgactttgagcgggatgcatatctcttacaaagaatggaggagtttatcggaacagttcggggaaaggcgatgaagaaatgggtcgaatccatcaccaagataattcagaggaaaaagattgcgcgagacaatggtcccgggcacaacatcaccttccaaagttcccctcccaccgtagagtggcatatatcccggccgggccacattgaaacatttgacctgctcactctgcatcctatcgagattgcgagacagctaaccctcttagagtcagacttgtaccgcgctgttcaaccctcggaactggtgggatcagtctggactaaggaggataaagagatcaactcacctaatctgctgaagatgatcagacacacgaccaatttgaccctttggttcgaaaaatgtatagtcgaaaccgagaacctggaagagagagtagcagtggtcagcagaatcatcgaaatcctacaggtctttcaggagctcaataatttcaacggcgttctggaggtcgtgtcagccatgaattcatcccctgtctatcggctggaccacacctttgagcagattccttccagacaaaaaaaaatcttagaggaagcccacgaattgagcgaggatcattacaagaaatacctggcaaaactgcggtcaatcaacccaccctgcgtgcctttctttgggatctacctgaccaatattctgaagaccgaggagggcaatcctgaagtgctgaagcgtcacggtaaggaactcataaactttagcaaacgtcgaaaggtggcagaaattacaggcgagatacagcaatatcaaaaccaaccatactgtcttcgagtggagagcgacataaagagattcttcgaaaatttgaaccccatggggaacagcatggaaaaggaatttacagactacttgttcaacaaatcgttggaaatcgagccacgaaaccccaaaccattgccgcggttccccaaaaaatattcttacccactcaaaagtccaggagtgcggccttcaaaccctaggccaggtacaatgagacaccctacgccacttcagcaggagccccgcaaaatttcctatagccgcattcctgagagcgaaacagagagtaccgcctctgctccaaactcacctagaacacccctgacaccgcctccagcgtcgggtgcaagttcaaccaccgatgtgtgcagcgtattcgactcggatcacagttccccatttcacagctccaacgatacagtctttatacaggtcacgctgccacacgggccccgaagcgcctccgtttcttcgatttccctcaccaagggcacagacgaagtccccgtgcctccaccagttccccctcgaaggagaccagaatcagcgccggccgagtcttccccttcaaagatcatgtctaagcatttggattccccccctgctatacccccacggcagccgacgagcaaggcttacagtccacgttattctatctccgatcgaacaagcatttcagatcccccggaatctccacctctcttgcctccccgggagccggtgagaactcccgacgttttcagctcctccccattgcacctccagccccctcccctgggaaagaaaagcgaccacggcaatgcgtttttccccaatagcccgtcaccctttacgccgcctcctcctcagactccctctccgcacggaactcggaggcacctgcctagtccacctctcacgcaggaagtagacttgcattctatagcgggtccacctgtgccacctagacaatcaaccagccagcatatcccaaagttacccccaaagacttacaagcgcgagcacactcatccctctatgcatcgagacgggcctcccctgctcgaaaacgcacacagtagctag

SEQ ID NO: 17490 - DNA, 945 bp, synthetic construct
  misc_feature 1..945: note = Description of Artificial Sequence: Synthetic coding sequence
  source 1..945: mol_type = other DNA
atgttgtgccaagctcagcctcgcagcgctagcgacgtagaggaaagagtgcaaaagagcttccctcaccctatcgacaaatgggccatagcagacgcacagagtgcaattgaaaagaggaaacgccgcaaccccttgtctttgccagtcgaaaagatccaccctctgctgaaggaagttctggggtacaagattgatcaccaggtgtcggtctacatcgtggcggtgctcgagtacatcagcgcagatatcctcaaactggtaggcaattatgtgcgcaacatcagacattatgagatcacaaaacaggacatcaaggtcgccatgtgtgccgacaaggtgctgatggatatgtttcaccaggacgtggaggatatcaatatcctttccctgaccgacgaggagcctagcacatcaggcgaacaaacttactatgaccttgttaaagcctttatggcagagattcgacaatacattcgcgaactgaatctgatcattaaggtctttcgtgaaccttttgtatcaaattcgaagcttttctcagctaacgacgtcgagaacattttttctagaatcgttgatatccacgaactatccgtcaagctactgggccatatcgaggatacagtcgagatgaccgacgaaggcagcccccatcccctcgtcggcagctgttttgaggacctcgctgaagagctggccttcgatccttacgagagctatgcgcgcgatatactgcggccgggatttcacgacaggttcctgtcccaactgtcaaaaccaggagccgccctgtatctgcagagcatcggagaaggcttcaaagaagctgtgcagtacgtccttccccgtcttttgttagccccagtttaccactgtctgcactacttcgagcttctgaagtttccctttggcgatctgtcccgtttgcgagatagcgtgtag

SEQ ID NO: 17491 - DNA, 3153 bp, synthetic construct
  misc_feature 1..3153: note = Description of Artificial Sequence: Synthetic coding sequence
  source 1..3153: mol_type = other DNA
atgaccgacgaggggagtcctcatccattggtgggatcttgtttcgaggatctggctgaggaattggccttcgatccctatgagtcttacgccagggatattttacggccaggtttccacgataggttcctgagtcagctgtccaagccaggagccgcgctgtatctacagtcaataggagaggggttcaaggaggccgtccagtacgtcctcccacgtttactgcttgcccccgtgtaccactgccttcattacttcgaactgttaaaacagctggaagagaaatcggaggatcaggaagataaagagtgcttaaaacaggccatcacagcccttctaaatgtccagagtggcatggagaaaatctgctccaagtccctggcaaaaagaaggctatccgaaagcgcatgcaggttttattcccaacagatgaagggcaagcagctggccatcaagaagatgaacgaaatacagaaaaacatcgatgggtgggaggggaaggatattggccaatgctgcaacgagtttatcatggaaggcacccttacgagagtgggtgccaaacatgagcgccacattttcttgtttgatggattaatgatctgctgtaaaagcaaccacggacagccaagattaccaggggccagcaatgcagagtaccggctgaaagaaaaattcttcatgagaaaagtgcagatcaacgacaaagacgatacgaacgagtacaaacacgccttcgagatcatcctcaaagacgagaactccgtgattttctctgcaaagtctgcggaggagaagaacaactggatggccgctcttatctcactgcaataccgtagcactcttgagaggatgctggacgtgactatgctccaggaggagaaggaggaacaaatgcgcttgcccagtgcagacgtgtaccgctttgcagagcccgattccgaagaaaacatcattttcgaggaaaacatgcaacctaaggcaggtataccgattattaaagcggggaccgtaatcaagcttattgaacgtctgacataccacatgtatgctgaccccaatttcgtgaggacgttcctaacaacataccgctctttttgtaagccccaggaacttctgtctctgatcattgagaggtttgagatacctgagccagagcccactgaagcagacaggattgctatcgagaatggcgaccaaccattaagcgcagaactcaagcgattccgcaaggagtatatacaacccgttcagctgcgagtccttaacgtgtgtcgacactgggttgaacaccatttttacgacttcgaacgtgacgcctacctgctacagcgcatggaagagtttatcggaaccgtgagaggcaaagctatgaaaaaatgggttgagagcatcacgaagatcattcagagaaagaaaatcgcacgggataatggacccggccacaacattaccttccagtccagcccaccaaccgtagagtggcatatctcacgccctggtcatatcgagactttcgatctcctgacattacacccaatcgagattgcgcgccagttgaccctgctggaaagtgacctttaccgggccgtgcagccctcggagctggtagggtccgtctggaccaaagaggataaagaaattaattcacctaatctgctgaagatgatccggcatacgactaatctcaccctgtggttcgagaaatgtattgtggagaccgaaaatcttgaggaacgggtggccgtggtgagtcgaatcatcgaaattcttcaggtttttcaggaactgaacaatttcaacggtgtgctggaagtggtttccgctatgaatagctccccagtgtaccggctggaccatacctttgaacagatcccaagtaggcagaagaaaattctcgaggaagctcacgagctgagcgaggatcactataaaaaataccttgctaagctgcggtcaattaaccccccctgtgtgccattctttggcatataccttaccaacatcctaaagactgaggaaggaaatccagaggttcttaaaagacacggcaaggagctgattaattttagcaaacgacgtaaggtggccgaaatcacgggcgagatccagcagtatcagaaccagccctactgcctgagggttgagtcagacattaagagattcttcgagaaccttaatcctatgggtaactctatggaaaaagagttcactgattatttgtttaataagagtctagagattgagccaagaaaccctaagcctttgccgcgctttcctaaaaaatattcctatccactgaagtccccaggggtgaggccctcgaatcctagacctgggacgatgcgtcatcctacgccgcttcaacaagagccccgcaagatctcctacagccggattcccgaaagtgaaacggagagtaccgcctcggcccctaattctccacggacccccctaacccctcctccggcgagcggcgctagttccacaaccgatgtctgctccgtatttgactctgatcactcatccccctttcactccagaagtgcctccgtctcttctatcagcctgactaaaggtactgacgaggttcccgtgccccccccagttcccccaagacggagacccgagagcgcaccagccgaaagcagccctagtaagatcatgtctaagcacctggattctcctcctgctatccctccacgacagcccacttcgaaggcctatagccctaggtactccatttcagatcgaacctctatctcggacccacctgaaagtcccccccttcttccccctcgcgagcctgtccggactcctgacgtgttcagtagcagtcctctgcacctacaaccacccccactcggcaagaaatctgatcatggaaatgcattcttccccaatagtccatcaccgtttaccccacctcccccccagacaccctccccccacggcacaagaaggcatttacccagccctccacttacacaggaggtggatctgcacagtattgcgggacccccggtacctccgaggcagtcaacatctcagcatattcccaaacttcccccaaaaacctacaaacgcgagcatacacacccctcgatgcatagagacgggcctccactactcgaaaatgcgcatagtagctag

SEQ ID NO: 17492 - DNA, 2358 bp, synthetic construct
  misc_feature 1..2358: note = Description of Artificial Sequence: Synthetic coding sequence
  source 1..2358: mol_type = other DNA
atgagcgatcaagaccactccatggatgagatgaccgctgttgttaaaatcgagaaaggggtgggtggcaataacgggggaaatggcaacgggggcggcgccttctctcaggctcgctcctcaagcaccggtagcagcagttctaccggggggggcggtcaggagtcccagccatccccactggccctcctcgctgccacatgcagcagaatcgaaagtccaaacgagaatagtaataatagccaaggtccctcccaaagtgggggcactggagagctcgatctgactgccactcagctgtcacagggagcaaatggctggcagattattagctcctccagcggggccacacctacctcgaaggagcagtctggttcgtcgaccaatggatccaacggatccgaatcatcaaaaaacaggacagtctccggcggtcagtatgtggtggctgccgcccccaacctccagaaccagcaagtgctgacaggactgcctggcgtcatgccaaacatccagtaccaggtaattccacagtttcagacggtggacggccaacagcttcaattcgcagccacaggcgctcaggtgcagcaggatgggagcggacagattcagatcattcctggagccaaccagcagatcatcacaaaccgcgggagtggcggcaacattattgcagctatgcctaatctacttcagcaggcagtgcctctgcaagggctggctaataacgttctgagcggccaaacgcaatacgtcacgaatgtacccgtagcactgaatggaaacattacgctcctgcccgtcaactccgtgtccgcagccacactaacaccgtcttcccaggctgtaacaatcagctcttccggttcccaggagagcggctctcagcctgtcacctctggcactactatcagttcagccagcctggtcagctcccaagcatcctcatcatcttttttcacaaatgctaattcttactcaactactaccactactagtaatatggggattatgaatttcactaccagcggctcatctgggacaaactcccaaggtcagactccccagagagtgtcagggctgcagggcagcgacgccttaaatatccagcagaatcagacttctgggggtagtctccaagcaggccagcagaaagagggggagcagaatcaacagacgcagcagcaacagatcttgatacaaccacagcttgtgcaagggggacaagccctgcaggcattacaggcagccccattgtcagggcagacctttaccactcaagcaatctctcaggaaactctgcagaaccttcagctgcaggcagtgcctaacagcgggccaattattatccgtacacctactgtagggcctaatggccaggttagttggcagactctccagttgcagaatctgcaggtccaaaatccacaggcacagacaattactttggcacccatgcagggagtgagcctgggtcagacatcttccagcaacaccactctcactcctatagcaagtgccgcctctatccctgcggggaccgttactgtcaatgccgcccagctgtctagcatgcccggcttacaaacaattaatctgtcggccctcggcacatctgggatacaggtccacccaattcagggactgccattggccattgctaacgcgcccggagaccatggcgcccagttgggcctgcacggcgccggcggtgacgggatccatgacgatacagccggtggtgaagaaggagagaatagtcctgatgcacagccccaggctgggcgacggaccagacgtgaggcatgtacttgtccctattgtaaggattcggaagggcggggaagtggcgacccgggaaaaaagaagcagcatatctgtcatatccagggctgtggaaaggtgtacggtaaaacctctcacctgcgggcccatctgagatggcataccggggagagacccttcatgtgtacttggagctactgcgggaaaaggttcactaggtctgatgagctacagcggcataagaggactcatacaggcgaaaagaaatttgcatgccccgagtgcccaaaacgcttcatgcgcagtgatcatctgtctaagcatataaagacacaccagaataaaaaaggaggccccggggtagctcttagtgtaggaacacttccattggactctggggctggctctgagggctcaggcactgcaactcccagtgccctcatcaccaccaatatggtggccatggaggccatttgtccggaagggatagcacggctggctaattctgggatcaacgttatgcaggtggccgaccttcagagcatcaatatcagcggcaatggtttttag

SEQ ID NO: 17493 - DNA, 2337 bp, synthetic construct
  misc_feature 1..2337: note = Description of Artificial Sequence: Synthetic coding sequence
  source 1..2337: mol_type = other DNA
atggacgaaatgaccgcagtggtgaagatagagaagggggtcgggggaaacaatggggggaacggtaacggtggcggagctttttctcaggcccggtcctccagtacgggaagcagttctagcacgggcggtgggggacaagagtctcagccaagtcctttggccctcctcgccgccacttgctccagaatcgagagtccgaatgagaactccaacaactcacagggcccatcacaatccggtggcacgggagagctagacctgacagccactcagctcagccagggagccaacggatggcagatcatttcttcatcaagcggtgccactcctacaagcaaagaacaatccggctcaagcactaatgggagtaatggcagcgagtcatcgaaaaataggacggtgtcagggggccaatacgtagtagctgcggcccctaacctgcagaatcagcaggtcctcacggggctgccaggtgttatgcccaacatacagtaccaggtgatcccccagttccaaacagtcgatgggcagcagttacagttcgccgctacgggggctcaggtgcaacaggatggttcaggccaaattcaaataatccccggcgccaatcagcagatcatcacaaacaggggctccggcggaaacatcatcgctgctatgcccaacttgctgcagcaggcagtgcccctgcagggactggcaaataacgtgctcagcgggcagacccaatatgttacaaacgtgcctgttgctctgaatggaaacatcactctgctcccggttaacagcgtgtcagcggccacactgacaccctcatcccaggccgtaaccatctcctcctcggggtcacaggagagtggctctcaacccgtgacttccgggaccacaattagcagcgctagtctcgtgtcttctcaggcttccagttcttctttctttaccaacgccaattcatactcaacaactactactacttcaaacatgggcatcatgaactttacaacatcaggcagcagcggtacgaatagccagggacagacgccacagagggtgagcggactgcaaggtagcgatgcactcaatatccagcagaaccaaactagcggtggaagcctccaggcaggccagcaaaaggaaggtgaacagaaccagcagacgcagcagcagcagattctgatccagccccagctggtgcagggtgggcaagctttgcaggctcttcaagcggcacctctgtcaggtcagacgttcacaactcaggccatctcacaggagacactgcagaatttgcagctacaagctgtaccaaattccggccctataatcattaggacccctactgtgggccctaatggacaggtaagttggcaaacgctccagctgcagaacctccaagtccagaatccacaggctcaaacgatcactcttgcccccatgcagggagttagcctgggacagacgagctcaagcaatactactctgacccctatcgctagcgccgcaagcattccagctgggactgtgactgtgaatgcagctcagcttagctcaatgccagggctacaaacaatcaatctgagcgccctgggcacttccggaattcaggtacaccctatccaaggcctgccattggctatcgctaacgctcctggagatcatggggcccaattaggattgcacggcgctggaggggatgggatacatgatgatactgcagggggcgaagaaggcgagaactcaccagatgctcaaccgcaggccggcaggcggacacggcgggaagcctgcacctgtccctattgcaaggacagtgagggccgaggcagcggcgatccaggcaagaagaagcaacacatctgccacatccaaggatgcggaaaagtctacgggaagacatcacatctgcgcgctcatttgaggtggcataccggggaacgacctttcatgtgcacgtggtcgtattgtggtaagaggtttacacggtccgatgaactccagagacacaaacggacccataccggagagaaaaaattcgcctgtccggaatgccccaagcgctttatgaggtctgaccatctgtccaagcatatcaagacccaccagaataagaaagggggacccggggtggctctgtcagttgggaccctccccctagattccggcgccggtagcgagggaagtggcacagcgacaccaagcgccctgataacgacaaacatggttgctatggaagctatttgtcctgagggtatcgcccggctggcgaatagcggcattaacgttatgcaggtggctgatctgcaatcaatcaatatcagcggcaatggcttttag

SEQ ID NO: 17494 - DNA, 1413 bp, synthetic construct
  misc_feature 1..1413: note = Description of Artificial Sequence: Synthetic coding sequence
  source 1..1413: mol_type = other DNA
atgtccgcacaagtgctaggatttctcaggtcgtggacccccctacccctggcagccccaaggggccccgccgcagcaggaaatgacgccggcgcccccgccgccaccgcccctggcggcgagggcgaacctcactctaggccgtgtgatgcaagactgggaagcaccgataaagagctcaaggctggcgcagctgctaccggctccgcccctactgctcctggcaccccatggcagcgcgagcccagagtggaggtgatggatcccgccggcggacccagaggcgtgctcccacggccttgtcgagttctggtgttgctcaatccacgcgggggaaaggggaaggccttacaactttttcgatctcatgtgcaaccactgctggcagaggccgaaatttcattcacacttatgttgactgagaggcggaaccatgcaagggaactggtgaggagcgaggaactggggaggtgggatgccctcgttgtgatgtctggcgatgggctcatgcatgaggtggtcaacggactcatggaaagacccgactgggagaccgcgatccagaaacctctatgtagtctccctgctggctcaggcaacgctctagctgcgtccctgaaccactacgctggatacgaacaggtcactaacgaagatctgttgaccaactgtacactcttgctctgccgtagactgctgtcccccatgaacctgctaagcctgcatacagcctctggcctacgcttattttccgtcctgtcgctggcatggggctttattgcggatgtggacttggaatcagagaaatacaggcggcttggcgagatgaggtttacattgggaaccttcctgagattggccgctctccggacctaccggggccgcctggcctacttgcccgtaggtcgggtgggaagcaagacacccgccagtccagtcgtggtgcagcagggcccagttgacgcccacctcgtaccactcgaggagccagtgccatcccactggaccgtggttccagatgaggatttcgtactggtactcgcccttctgcactcccatctgggtagtgagatgtttgcagcccccatgggccggtgtgcggccggagtgatgcatctcttctacgtccgggccggcgtatctagggctatgcttctgcgactcttcttggcaatggagaaagggcggcatatggagtacgagtgcccgtatctggtgtacgtacccgtcgtggccttcagactcgagccaaaggatggaaagggagtgtttgcggtcgacggcgagctgatggtgtctgaagcagtccaggggcaggtccatcctaattacttttggatggtgagcgggtgcgtcgagccacccccctcatggaagccccagcaaatgccgcctccagaagagccattatag

SEQ ID NO: 17495 - DNA, 1155 bp, synthetic construct
  misc_feature 1..1155: note = Description of Artificial Sequence: Synthetic coding sequence
  source 1..1155: mol_type = other DNA
atggaccccgccgggggccctcgtggagttttgccccgcccttgcagagtcctggtattgctgaacccaagaggcgggaaaggaaaggccctacaactgtttcggagccacgtgcaacccttgcttgctgaagccgagattagtttcacactgatgctgacagagcgccgaaatcatgccagagagctagtgagatctgaagaactaggcaggtgggacgccctggtcgtgatgagcggagacggcctcatgcatgaggtggttaacggcttgatggaacggccagactgggaaacagccattcagaagcctttgtgctctctgcctgccggatctggcaatgcgctggccgcttccctgaatcactacgccggctatgagcaggtgacaaatgaagacttgctgacaaattgcacactgctgttgtgtcggcgtcttctgtctccgatgaacctgttgtccctgcacaccgcatctggcctgaggctgtttagcgtattaagtctggcctggggatttattgcagacgtggatctcgaaagcgaaaagtacaggcggctcggcgaaatgcgctttactctcggcacctttttgcgattagctgctcttagaacctataggggcaggttggcatatcttccagtgggccgagtgggctctaaaacccctgccagccctgtagtcgtacagcaggggcctgtagatgcccacttggtcccattggaggaaccagtccccagccattggacagtcgtgcctgacgaagacttcgtgctcgtattagcattgttgcactctcacttaggatcagagatgtttgctgcacctatggggcgctgtgctgccggcgttatgcacctgttttacgtgcgagccggtgtgagcagggccatgttactccggttattcctggcaatggaaaaaggacgccatatggaatatgaatgcccctatctcgtgtacgtgcctgtggtcgcctttagacttgagcctaaagatggaaagggcgtgttcgctgtagatggggagcttatggtttcggaggccgttcagggacaagtgcaccctaactacttttggatggtctcggggtgcgtggaaccgccgcccagctggaaaccccagcagatgccaccacccgaggagcccttatag

SEQ ID NO: 17496 - DNA, 1152 bp, synthetic construct
  misc_feature 1..1152: note = Description of Artificial Sequence: Synthetic coding sequence
  source 1..1152: mol_type = other DNA
gaaccgacgggaggccccaggggggtgttgcctagaccttgtagagtgcttgttttgctgaaccctcgcggcggcaaggggaaggccttacagctgttccggtcgcacgtacagccgctccttgcagaagccgagatttcctttactctcatgctgacggagaggaggaatcacgccagggaactcgtgcgcagtgaagaattaggccgatgggatgcactggtcgtgatgagcggcgacggactgatgcacgaggtggtaaatggactgatggagcgcccagactgggaaactgccatacaaaagccactctgttctctgcccgcgggttccggtaatgcactcgccgcctctctgaatcactacgcaggctacgaacaggtcacgaatgaggacctcctgactaactgtaccctgctgctctgccgtaggctgctgagccccatgaatttgctttccttgcacactgcatcgggactgcggctctttagcgtgctgtccctggcctgggggttcatcgctgatgtcgatctggaatcagaaaagtatcggcggctcggggagatgcgatttacacttgggacctttcttcggcttgctgccctccgcacataccgtggcaggcttgcgtatcttcccgtgggccgcgtgggatccaaaacccccgcctcccccgttgtcgttcagcagggcccagtggacgctcatctcgtgcccctggaagaacccgtacccagccactggaccgtggtcccggacgaggattttgtcttagtcctggccctgctccactctcacctcggttccgaaatgtttgcagcccccatgggaagatgtgcggccggagtcatgcacctgttctatgtgcgggctggcgtctctagggcaatgctgctgagactctttcttgccatggagaagggcaggcacatggaatatgagtgcccttacttggtttatgttccagttgtagccttcaggttggaacccaaggatgggaaaggggtatttgccgtcgacggagaactcatggtgagcgaggcagtgcagggccaggtccacccgaactatttttggatggtaagcggctgcgttgaaccccctccctcgtggaagcctcaacagatgccaccccctgaggagcctctatag

SEQ ID NO: 17497 - DNA, 1155 bp, synthetic construct
  misc_feature 1..1155: note = Description of Artificial Sequence: Synthetic coding sequence
  source 1..1155: mol_type = other DNA
atggacccagccggaggacccagaggcgtgctgcctagaccgtgcagagtactagttctcctcaaccctcggggagggaaggggaaagcgctgcagctgtttcgctcccatgtacagcccctgctggcggaagccgaaatctccttcacactgatgttgactgaacggaggaaccatgcccgcgaattggtaaggtctgaagagctcggacggtgggacgcactcgtcgtgatgagtggggatggcctgatgcatgaggtggtaaatggactgatggagcgacccgattgggagaccgcgatccagaaacccctgtgttctttacctgccgggagcggtaatgctcttgcagccagcctgaaccactacgccggatacgaacaggtgactaacgaggacctgctgaccaactgcacgctgctcctctgcagacgcttactctcacctatgaatctgctgtccttgcacaccgcaagcggcctaaggctattctcagtgctctctttagcctggggttttatcgccgacgttgacctggagagtgagaaataccgtcgtttgggcgagatgcggttcacattaggtacgttcctgagactcgccgccctccggacatataggggcaggttagcctatctgccagtgggccgcgtgggaagtaagacccctgcaagtcccgtggtcgtgcaacaagggcccgttgatgcacacctggttcctctggaagaaccagttccttctcattggaccgtggtgcctgatgaagatttcgtgctagtgctcgctcttctccactcacacctaggaagtgagatgtttgctgcccctatgggacggtgtgccgctggcgtcatgcatctgttctacgtccgcgcaggcgtgagccgggcaatgctgttgaggctctttctggcaatggaaaagggaaggcacatggaatatgagtgtccatacctcgtatatgtgcctgttgtagctttccggctggaacctaaagatggtaagggagtgtttgcagtggacggcgaactgatggtctctgaggccgttcaaggacaggtacatcccaattacttctggatggtgagtggatgtgtggagccccccccatcttggaagccccaacagatgccccctcccgaggagccactgtag

SEQ ID NO: 17498 - DNA, 1197 bp, synthetic construct
  misc_feature 1..1197: note = Description of Artificial Sequence: Synthetic coding sequence
  source 1..1197: mol_type = other DNA
atggacccagtggtcggctgcgggcgtggactgttcgggtttgtcttctctgccgggggaccaagaggagtgctaccccgcccctgtcgtgttcttgtgctgttgaacccacgcgggggtaaggggaaggccctgcagctgttccgctcccatgtgcaacccttgctcgcagaagccgagattagttttaccttaatgctcaccgaacggcggaaccacgctagggagttggttcggtcagaagagttaggcagatgggacgccctcgtggtgatgtccggggatggtctgatgcacgaagtggtgaatggcctcatggagcggccagactgggagaccgccatccagaaaccactttgtagcctgccagccggaagcgggaatgctctggccgcatcactcaatcactatgctggatatgagcaggtgaccaatgaggatcttcttaccaactgcactcttctcctctgcaggaggctgctcagccctatgaaccttctttcgctgcacaccgctagtggcctccgtctttttagtgtattgtccctggcttggggttttatagccgatgtggatctggaatccgagaagtaccgaagacttggagaaatgcggtttaccctaggcactttcttacgactggcagcgctgcgaacctacaggggacggctggcctaccttccggtaggaagagtgggctccaaaacgccagcgtctcctgttgttgttcagcaaggtccagttgacgcccacctcgttcccctcgaagaacccgtcccctcccattggactgtggtgcctgatgaagactttgtgttggtgctagccctcctgcattctcacctggggagtgaaatgtttgcagctcccatgggccggtgtgcagccggagtgatgcacctgttctacgtgagggccggcgtatctagagccatgctcttgcgcctgttcttggccatggagaagggcaggcacatggagtacgaatgcccctacctcgtgtacgtacctgtggttgcctttcggttggagcccaaagacggaaagggtgtgttcgctgttgacggagagttaatggtgagcgaagccgtgcaaggccaagtccatcccaactatttttggatggtttctgggtgtgtggagccgccgccaagctggaagccacagcaaatgcctcctccagaagagccgctctag

SEQ ID NO: 17499 - DNA, 1155 bp, synthetic construct
  misc_feature 1..1155: note = Description of Artificial Sequence: Synthetic coding sequence
  source 1..1155: mol_type = other DNA
atggatccagcaggcggtcctagaggcgtgctcccccgcccatgcagagtgcttgtcttattaaaccccagaggcggcaaaggaaaagccttgcagttgttccgtagccacgtgcagccgcttctagcagaggccgagatatcttttacactaatgctgacagagcgtcgtaatcacgcccgggaactggtgcggagtgaggagcttgggcgctgggatgccctggtcgtgatgtctggtgacggtttaatgcatgaggtggtgaacgggctgatggaacgccctgattgggaaactgccatacaaaagcctctctgctccttacccgcagggtccgggaatgccctcgccgcctctctgaaccactacgccggatacgagcaggtgactaatgaagacctgctcacaaactgtacactgctgttgtgtcgacggctactttctcccatgaacctgcttagcctgcacactgcctctggcttgcgcctgttctccgtcctatctctggcctggggatttatcgccgacgttgatctggaatcggagaaatacagacggctcggagagatgcgctttacactcgggacattcttaagactcgcagccctcagaacatatagaggaaggctcgcctaccttccagtcggacgtgtgggttcgaaaactcctgcgagtccagtagtcgtccagcagggacccgttgacgcccatctagtacccctcgaggagcccgttccatcccactggactgtagttcccgacgaagattttgtcttggtgctggcgctactgcactctcatctgggatccgagatgttcgccgcccccatgggtcgctgtgccgccggagtcatgcacctcttctacgtcagagccggtgtaagtagggcaatgttgctgcgactctttctcgctatggagaagggtcgacatatggagtacgagtgtccttatctcgtatatgtccccgtcgtggcttttcgactcgaacccaaagacggaaagggggtatttgcagttgatggtgaactcatggtttctgaggcggtacaaggtcaggtccatccgaactatttctggatggtctctggctgcgtcgaacctcctccctcctggaagccacagcagatgccacccccggaggaaccactgtag

SEQ ID NO: 17500 - DNA, 1965 bp, synthetic construct
  misc_feature 1..1965: note = Description of Artificial Sequence: Synthetic coding sequence
  source 1..1965: mol_type = other DNA
atgaatggccacttagaagcagaggaacagcaggaccagcgacctgaccaggaactcaccggcagctggggccacggacctcgcagcactctggtgcgggctaaggcgatggcgcctcctcctccgccgttagccgcaagtacccctctgctccacggagaatttggttcatacccagccaggggacctagatttgctctgactcttacttctcaggcgttgcacatccaacgactgagacccaagcccgaagcccgccctagaggtggcttggtgcccttggcagaagtttccggctgctgtacattaagatcccgaagtcctagcgacagcgccgcctacttctgcatatacacctatccgcggggtagacgcggcgcacgtagaagggccaccaggacgttccgcgctgatggtgccgctacttacgaggagaatagagctgaggctcagagatgggctacagccctgacctgcctgcttagaggcctgccacttcccggcgatggggagattacacctgatctgctgccccgcccaccccggctgctgcttctggtcaacccgttcgggggccggggcctagcttggcagtggtgtaaaaaccacgtgttgcccatgatttctgaggctgggctgtcgttcaatctgatacaaacagaacggcagaaccacgctcgggaactggtgcagggtctgtcgctgtctgaatgggacggaattgttactgtctctggcgacggattgcttcacgaggttctgaacggactcttggacaggcctgactgggaagaagctgttaaaatgcctgtcggcattctaccttgcggctctggcaatgccctggccggtgctgttaatcagcacgggggatttgagccggccctaggtctcgatcttctactgaattgtagcctattgctctgccgcggcggaggccacccactcgacctgctgagcgtaacgctggccagtggctccagatgcttctctttcttgtcagtggcttggggatttgtatctgatgttgatattcaatccgaacgctttcgtgcgcttggatccgcacgctttacactgggaacagtgctgggccttgctaccctacacacctacaggggcaggctgtcctacctgcccgctaccgtggagccagctagcccgacccccgcgcattcactgccgcgagcgaagtctgagctgacccttactccggacccagccccacctatggcacactcacccctacatcgttctgtaagtgacttgccacttcccctgccacagccggcgctggcctcccctggcagtccagagcctctccccattctgtcgctgaacggcggagggccagaactggctggtgattggggcggggccggcgatgccccattaagccccgacccgctattaagctcccctccagggtcccccaaagcggcactgcatagtcccgtgtccgagggcgctccagtgattcccccttcatcaggtcttccactgcccacgcccgatgcccgagttggcgcgtccacatgcgggccccccgaccaccttctgcctccccttggaactcctcttcctccagattgggtgactctggaaggagactttgtgctcatgcttgctatctctccaagtcatctcggagccgacttggtagcagcaccccacgctaggtttgacgacggcttggtccatctgtgttgggtccgcagcggaatcagcagggctgccctcctgcgcttgtttttggccatggagcgaggcagtcacttcagtctcggttgcccccagctggggtacgccgccgcccgggcgttccgcttagagccactcacacctcgaggtgttcttaccgtggatggagaacaagtagaatacgggcccctgcaagcacagatgcaccctggcatcggtactctactgaccggaccaccaggctgtccgggaagagaaccttag

SEQ ID NO: 17501 - DNA, 1851 bp, synthetic construct
  misc_feature 1..1851: note = Description of Artificial Sequence: Synthetic coding sequence
  source 1..1851: mol_type = other DNA
atggctccaccaccgcctcctctcgccgccagtacgcccctgctccacggggaattcggtagttaccctgcacgcggtccccgctttgcacttaccctgacttcacaggccttgcacatccaacggcttaggcccaagccggaggccaggccacgtggcggcctggtgccacttgcagaggtgagtgggtgctgcactttgaggagtcgctcaccttcagactcagctgcctacttctgtatttacacgtacccgcgcggaaggaggggagcccgccgcagggccacacgaacattcagggctgatggggccgctacttacgaggagaacagggctgaagcccagcgctgggctaccgctttgacatgtctgctgagagggctgcccctacccggcgatggtgagattacacctgacctcctgccacgccccccccgccttttgctgctggtcaaccccttcggggggcggggcctggcttggcagtggtgcaagaaccacgtgttgcctatgatcagcgaggccggtctgtctttcaacttgatccagacagagagacagaatcatgctagggaacttgtgcaggggctgtcactctctgaatgggacggcatagtcacggtttcaggagacgggttgttgcatgaggtgctcaatggtctgctggatcggcctgattgggaagaggccgttaagatgcccgtcggaattctcccatgcggcagcgggaacgcactggcaggagccgtgaaccagcacggaggtccctcttggggcgatagagacccatacatctcccatagcgccaagccaaccgtgtcgcaggtgaaccagcctgcctgtggaatgttgactcccagctcgtggacattcctgccggcatgctttccagccgtcagcagagctcctagaacactccccggtatgggcggaactcaggcactggggagcgcccggtttactcttggaaccgtgctcgggttggctaccctgcacacataccgtggtaggttaagttacctgccagcaacagtggagcctgcctctcccacacccgcacacagccttcccagggccaagtctgagcttactctgacaccagatccagcacctcctatggcccattcccccctgcaccgttccgtgtccgacctgccacttccactcccccaacccgccttggcctccccaggttctcccgaacctcttcccatcctgtctcttaacgggggtggcccagagctcgcaggtgactgggggggcgccggggatgcccctctttcacccgatccccttctgtcctcaccgcccgggtctcctaaagccgctctacactccccagtgtctgagggagcacccgtcattcctccgagctcgggcctgcctctaccaacgccagacgctcgagtgggggcatcaacatgcggtccccctgaccatttgcttccccccctggggacgcccctgccccctgactgggtcactcttgagggcgatttcgttctaatgctggctatatctccaagccacctcggtgcagacctggtcgctgcccctcacgcccggttcgacgacgggctggtgcacttgtgctgggtaaggagcggcatcagtcgcgcagcgctgttgagactgtttctggcaatggagagggggtcccattttagcctgggttgccctcagctcggctatgctgccgccagggcctttagactggagccattaactcctagaggggtgctgacggttgatggtgagcaagtggagtacggccccctgcaggcgcagatgcaccctgggattggaaccttattgaccggccccccaggatgtcctggacgggagccctag

SEQ ID NO: 17502 - DNA, 1884 bp, synthetic construct
  misc_feature 1..1884: note = Description of Artificial Sequence: Synthetic coding sequence
  source 1..1884: mol_type = other DNA
atgaatggccatctcgaagcagaggagcaacaggatcaacgccccgaccaggagctgacagggtcttggggtcacgggcccagaagtactttggtcagggccaaagccatggctcctcctcccccgccactggctgccagcacgccccttctgcacggagagtttggcagttaccccgccaggggcccccgatttgcactgaccctcacttcacaggcccttcacattcagcgcctcaggcctaaacacagtgccgcctacttctgcatctacacttatccccgcggtcgacgaggggccaggagaagggccacacgcaccttccgtgccgatggggccgcgacctacgaggaaaaccgggcagaggcccagcggtgggctaccgcccttacatgcctgctcagaggcttgccgttgcctggcgatggtgaaattacgccagacctactccctcgcccacctcggctcctccttttggttaacccctttgggggaagggggcttgcttggcaatggtgcaagaaccatgttctgccgatgattagcgaagcgggcctgtctttcaacttgattcaaacagagaggcagaatcacgcacgtgaactggtgcagggactttcgttgagtgagtgggatggtatcgtgaccgtgtctggcgatggcctcttgcacgaggtactgaacggactgctcgacagaccagactgggaagaggcagtgaaaatgcccgttggcattttaccatgcgggtcaggcaatgcactggccggggccgtgaaccagcacggcggctttgagccagctcttggcctcgacctgctgctgaattgttctctcttgctttgtaggggcggggggcacccactagacctgctgtccgttaccttggcctcaggcagccgctgcttttctttccttagcgtggcttggggattcgtgagcgacgttgacattcagagcgagagattccgagcattgggctccgcgaggtttacactagggacagtcctcgggcttgccacgctccacacatacagagggaggcttagttatctgccagctactgtggagccagcctcaccaaccccggctcactctcttccgcgcgctaaaagtgaactcaccttgacccccgatccagcaccgccaatggcacacagcccgttgcatagaagcgtgagtgacctgccactccccctaccccagccagcattagcttcaccgggtagtccagaacccctgcctatactttcactgaatggcgggggacctgagcttgctggtgattggggaggtgcaggtgacgcgccgctctctcccgatccactgctctcatcaccgcctggttccccgaaggcagcgctccactctcctgtcagtgagggggcgcccgttattcccccatcaagcgggcttccgcttccaacacctgatgccagggtgggtgccagcacttgtgggccccctgaccaccttctgcccccgcttggaacgccccttcctcctgattgggtgaccttagagggcgactttgtgctgatgttggccatctcccctagtcacttgggtgctgatctcgtggctgccccgcacgcgcgcttcgacgacggactggtacatttgtgctgggtgcgaagtgggatatcccgagccgcactgttaaggctttttctggccatggagcgcggatctcacttttctctgggatgtccacagctgggctacgccgcagcgcgggcttttaggctagaacctttgacacccaggggggtgttgaccgtggatggagaacaggtggaatatggacccctccaggcacagatgcaccccgggataggcaccctgctgacgggtccgcctggatgccctggacgtgagccgtag

SEQ ID NO: 17503 - DNA, 150 bp, synthetic construct
  misc_feature 1..150: note = Description of Artificial Sequence: Synthetic coding sequence
  source 1..150: mol_type = other DNA
atgaacggccatctcgaggccgaggagcaacaggatcagaggtcacccctgacctgctacctgggccgccccggctgcttttattggagtattcctctaggagtcggagcatggccaggttccggagtgagaacaacctgcttcccctag

SEQ ID NO: 17504 - DNA, 2286 bp, synthetic construct
  misc_feature 1..2286: note = Description of Artificial Sequence: Synthetic coding sequence
  source 1..2286: mol_type = other DNA
atgatcgggtgtctccatgccagggtgtctggcccattatgggacgccggcctttgccctgcatcttcaagatctgcccatacgtgtctctcactgtccgtgtctgatgccccagtatcccccgcaacggccccccattgtctcctgttgtctacagcccccgcccctccatgtccctgccacggcgtgctgaatagccatccattctcgccgccttttcctcagcggccagaccaggagctcaccggttcttggggccacggaccacggtcaacattggtcagagcgaaggctatggccccccctccaccccccctggccgcaagcacacccttgcttcatggcgagttcggatcataccccgctcgtgggccacggtttgcattgacccttacttcccaagcactgcacatccaacgcctgcgaccaaagccggaagctcggccacgtggcggtctcgtgcccctggctgaggtgtccggctgctgtactctgcgttcccgcagcccctccgattctgccgcgtatttttgtatctacacatacccgaggggcagacgcggggctagacgcagagccacccgcacctttagggccgacggggccgctacttacgaggagaaccgcgccgaagctcagagatgggccacagctttgacgtgccttctgaggggtctgccactccccggagacggcgagattacgccagatctgcttccgcgcccaccacgtctcctgctcctcgtcaatccattcggaggcagagggctcgcttggcagtggtgtaagaatcacgtgctccctatgatctccgaagctggattgtcatttaatctgatccagactgagagacagaaccatgcaagggagcttgtgcaagggttatctctttctgagtgggacgggatcgtcaccgtgagtggtgacggactgctgcatgaagtactgaatggactcttggaccgcccggattgggaggaggctgtcaaaatgcccgtgggtatcctgccctgtgggagcgggaatgcgttggctggagctgtgaatcagcatgggggattcgagccggctctaggccttgatctacttctcaattgttccctcttactgtgcagaggggggggccatcctctcgacttgttatcagttaccctcgcctcgggttccaggtgcttcagctttctgtcagtcgcctggggctttgtgtccgacgtggatattcagtccgagcggttccgcgctctcggctccgcaaggtttacccttggtactgtcctgggcctggccacattgcacacttaccgagggcggctctcctatctgcctgcaaccgttgaaccagcgagcccgacgcccgctcatagcttgcctagagctaagagcgagttaacactaacccccgaccccgcacctccgatggcccacagtccgcttcacagaagcgtgtccgacctgccactgccactgcctcagcccgcactagcctcaccagggtcaccggagcctctccctatcctgtccttgaatggaggaggtccagagctcgccggagattgggggggcgctggtgatgccccattgagccccgatccccttctcagcagccccccgggcagccctaaggcggctctgcattcccctgtctcagagggagccccagtaattcccccttcatcaggactgccactgcctacccccgatgccagagtcggtgcatccacctgcggccctccagatcacctgctgccgcccctgggaacgcccctccctccggactgggtgaccctggagggcgattttgtcctgatgctggcgatatcaccatcccatcttggcgccgatctggtggctgccccccacgccagattcgacgatggtctggtgcacctctgttgggtaagatcagggatctctcgagccgccttgctgcgactgtttctggccatggaacgcggatcacatttttcactcggttgtcctcaacttggatatgccgccgcacgagccttccgtttggagccgctgaccccaaggggggtattgactgtggacggagaacaggtcgaatacggccctctccaggctcagatgcacccaggaatagcgagaggccgaacacagacacccgccctccccgccgcgccggcgctatatgggaggcagccaggcgctgcccatggtctccaacctgtgtgtcagggtgcagcgctcttcttccacaactcgtggctgtgggggtcacaagatctcttccgaatcgtgctgactgaagctgtgggcggctag

SEQ ID NO: 17505 - DNA, 1965 bp, synthetic construct
  misc_feature 1..1965: note = Description of Artificial Sequence: Synthetic coding sequence
  source 1..1965: mol_type = other DNA
atgaacgggcatctggaagccgaagaacagcaggaccagaggccggatcaagagttaaccggatcatggggccacggaccacggagcaccctggttagagcaaaagccatggctccccctcccccacccctggctgccagtacacctctgttgcacggtgaatttggctcataccctgcacgcgggccaaggtttgctctaacattgacctcccaagcccttcatattcagcgtcttagaccaaagccagaagcccgcccaagggggggcttggtccccctagctgaagtgagcgggtgttgcacattgagatcccggtccccgagcgactcagctgcttacttctgcatatatacatacccccggggtaggcggggagccaggaggcgagcaacacggactttccgggctgatggagccgctacatatgaggaaaaccgagctgaggctcaacggtgggcgactgcccttacctgtttgctccgcgggctgccactccctggtgacggggagattacacccgacttgctgccccgtcctcctcgccttctgctccttgttaaccccttcggaggccgcggccttgcttggcagtggtgtaagaaccacgtcctccccatgatcagcgaagcaggcctgagtttcaatctgattcagactgaaagacaaaaccatgcccgggaattagtccagggcctatccctttccgagtgggacgggatcgtcaccgtgtctggcgatggactcttgcacgaggtactgaatggcctgctggatcggccagattgggaagaagctgtgaagatgccagtggggatcctgccctgtggctctggaaatgccctggccggagcagttaatcagcacggaggatttgaaccagcattgggattggacctactcctcaactgtagtctgttgctgtgcagggggggagggcaccccttagacctgttatctgttaccctggcctctggttccagatgtttcagttttttgagtgtcgcctggggattcgtttcagacgtggacattcagtccgaacggtttcgggccttggggtccgctcgtttcacacttggcacagtcctcgggctggcaactcttcatacataccgtggccgactgagttacctgcccgccaccgtggaaccagcatcccctactcccgctcacagcttaccccgcgcaaaatcggagctaactcttactcccgaccccgcccctcccatggcccattcccccctccacaggtccgtttccgatctgcccttacccctaccccagcctgcattagcttctcctggttcaccggaaccccttcctattctgagtctgaatgggggcggtcctgaactggctggggactgggggggggctggagatgcacccctcagtccagaccccctactgagctcacccccaggcagtccaaaggcggctttgcactcacccgtgtccgaaggggcgcccgtaatccctccgagtagtggtttgccgctgcccactccagatgctcgcgtgggcgcgtccacttgcggtccacctgaccatctgcttcctcccctgggtacgccgctgccaccagactgggtgactctcgaaggcgattttgttcttatgctggccatttccccaagccatctcggcgcggatctggtggctgcgcctcacgcgcgttttgacgacggactcgtgcacctgtgttgggttagatctgggattagccgggctgcactgctgcgattattcctggctatggagcggggtagccacttcagccttggctgcccacagctgggctatgctgccgcaagggcttttaggctggagcctttgacacccagaggagtactgaccgtggacggtgagcaggtcgaatacggacccttgcaggctcaaatgcacccaggaattgggaccttgctaacggggcctcccggctgtcccggcagggaaccatag

SEQ ID NO: 17506 - DNA, 1857 bp, synthetic construct
  misc_feature 1..1857: note = Description of Artificial Sequence: Synthetic coding sequence
  source 1..1857: mol_type = other DNA
atggccccccctcctccacccctggccgcatccacccccctactgcacggggaattcgggtcataccctgccagaggcccgcggtttgctcttacactgaccagccaggctctgcacattcaaagacttcgaccaaagccagaggctcggcccagagggggcctggtacccctggcagaggtgtccggatgctgcacactgcgctcccggagtccctctgacagcgctgcctatttctgtatctacacctatcccaggggcaggagaggagccagacgccgagcaacaaggaccttccgtgctgacggggcagctacctatgaagaaaaccgggcagaggctcagcgatgggccacagccttgacttgcctgttgagagggctacccttgccgggggatggcgaaatcacacctgacctgctgccgcgcccgccgaggctgcttttgttagtgaatcctttcggggggcgaggtctagcatggcagtggtgtaaaaatcacgttctgcctatgatctctgaagcaggactcagcttcaatttgattcagactgaaagacaaaatcacgctagggaactcgtgcaaggactgagcttaagtgagtgggacggcatagtgacggttagtggagacggcctgctccatgaggtgctgaacggtctgctagatcgcccagattgggaagaagccgtgaagatgcctgttggtatcctgccttgcggctctgggaacgcccttgctggcgccgtgaatcagcacggggggtttgaaccagcgctgggtcttgacctcctgttgaactgctcccttcttctctgtcgcggcggaggacacccgttggatctactgtcagtgacgttagcatcagggtcgcgctgcttttcattcttgagcgtggcatggggctttgtatctgatgtggatatccagagcgagcgctttcgtgcgcttggatctgctagattcactctcggcaccgtattaggcctcgctaccctgcatacttatcggggcagattgtcctacctgccagcaactgtcgagccggcaagtcccacaccggcccatagtctgcccagagccaagtcagaactgactcttacccctgaccccgctccccctatggcccactctcctctgcatcggtctgtgtccgatctccctcttcccctcccccagcccgccctggcatcccctgggtcgcccgagccccttccaatcttgagcctcaatggcggtggcccagaattggcgggcgattggggcggtgccggtgacgcccctctgagcccagatcctcttctgtcaagtccccccggaagtcccaaagccgctctgcacagtcccgtgtctgagggagccccagtgatcccgccatctagtggcctgcctctccccacccctgacgccagggtcggtgcgtctacttgcggtccacctgatcacttgcttccaccactcggaaccccactcccgcctgactgggtcactcttgagggagacttcgttttaatgctcgccattagcccatcccatctgggcgctgatctagtcgctgccccacacgcgcggttcgacgacggcctagtccatttgtgttgggtcagatccggcatttctagagcggctctgcttcgcctgttcttggctatggagcgaggatcccatttcagcttagggtgcccacagctggggtacgccgcagcaagagccttccggctcgaaccacttacgccccgaggcgttcttaccgtggacggggagcaggtggagtacggacccctgcaggcacagatgcacccgggaatcggcactttgcttaccggaccaccaggttgcccaggaagggagccatag

SEQ ID NO: 17507 - DNA, 1149 bp, synthetic construct
  misc_feature 1..1149: note = Description of Artificial Sequence: Synthetic coding sequence
  source 1..1149: mol_type = other DNA
atgggacccacgtccgtcccccttgtgaaggcgcaccgaagtagtgtttcagattatgtgaactatgatataattgtgagacattacaattacacagggaagctgaatattagcgcagacaaagaaaacagtataaagctaacttcagtagtctttatcctgatctgctgttttatcatactcgagaatatcttcgtcctgctgactatctggaaaactaagaagttccataggcccatgtactactttatagggaatctggcccttagtgatctactcgccggcgttgcctacacggcgaatctgttgctctccggggccacgacatacaagctcacacccgcccagtggttcttaagagaaggcagtatgtttgtggcattgtctgcctccgtattttctctgttagccatcgccattgaaagatacatcaccatgctgaaaatgaagcttcacaacggttccaacaactttcgcttgtttctgctcatttctgcgtgctgggtcatcagtcttattttggggggcttgcctattatgggctggaattgtatcagcgctttaagctcttgctccacagtgcttccgttgtatcacaaacactatatcctcttttgcacaaccgtgttcacccttttgctcctgagcatagtgattttatactgtaggatctacagtctggtccggactaggagcagacggcttactttccgaaagaatatttcaaaagcctcccgcagtagcgagaaaagtctggcgctattgaagaccgttatcatagtgctcagcgtcttcatcgcgtgctgggcaccactgttcatcctgttgctgttggacgttggatgtaaagtgaaaacctgcgatatcttgtttagggctgagtactttctcgtcctggcagtattaaatagcggcaccaatccaattatttacaccctcaccaacaaggaaatgcgacgggccttcatccgcattatgtcgtgttgcaaatgtccttcaggggactcagctggcaaattcaagcgaccgatcattgcaggaatggaattcagccggagcaagtccgacaacagttctcacccgcaaaaggacgaaggcgataatcccgaaacaatcatgagcagtggcaacgtaaactcctcttcctag

SEQ ID NO: 17508 - DNA, 1353 bp, synthetic construct
  misc_feature 1..1353: note = Description of Artificial Sequence: Synthetic coding sequence
  source 1..1353: mol_type = other DNA
atgggcccaacatcagttccccttgttaaggcgcacaggtcctctgtgagcgactatgtgaattacgatatcatagttcggcattacaattataccggcaagctgaatatttcagccgacaaggagaattcaatcaagctgacatccgttgtgtttatacttatatgttgtttcattatcctggaaaacatttttgtcctgctcaccatatggaagacaaaaaaattccaccgacccatgtactacttcattgggaatctagctctgtccgatctgctagccggcgtagcctacacggccaacctgctgctgagcggtgccaccacctataaattgacgcccgcgcagtggttcctccgggaaggcagcatgttcgtggccttaagcgctagcgtgtttagcctgcttgccatcgccatcgagagatacattacaatgctgaaaatgaagctgcacaatggcagcaataatttcagactgttcttgttaatcagcgcgtgttgggtgatctccctgattctaggcgggctgcctatcatgggttggaactgcatatccgccttgtcatcctgcagcaccgtgctccctttatatcataaacattacattctattctgcactaccgttttcaccctcttgctgctgagcattgtaatcctgtattgccgcatatactccctggtgcgaactcgctcgaggaggctcacattccgcaagaacatcagtaaagcatccagatcatctgagaaatccctcgccctgcttaagaccgtgatcattgtgctgtccgtctttatcgcatgctgggctcccctgttcattctgctgttgctcgacgtaggatgtaaggtcaagacctgcgacatactgttcagggccgagtactttttggtgctcgccgtactcaactcaggcaccaaccctataatctatacattgactaacaaagaaacactgctagccaactcatctgatccgtcgtcccccgcatggaacagcgcagccgcaaatcgaaccattcctccgacacctcggaagaccaaaggaacaacccaaaggccattatgtctgctcgagacatctaccctgttgccacgtacggggagctgccctcctactgggagtgccctgtatctcgtggccgggcatccctccgtgtggaagaaaataagtggcttgcgattgctaccaggtagatcctgctgcaagcctgaagggggtcggggtcgtattaggacggcatggtggtgtcgggttctagtgggaagagtgagttcttgcgaacagtgcaccggtaaaggaggtgatcaggtgcccgcctggaatatatttagtactcccctggagctttag

SEQ ID NO: 17509 - DNA, 726 bp, synthetic construct
  misc_feature 1..726: note = Description of Artificial Sequence: Synthetic coding sequence
  source 1..726: mol_type = other DNA
atggcaaccctgaaagaccaattgatttataacctcctcaaggaggaacaaacgccccagaataagatcactgttgttggcgtaggggctgtcggcatggcctgcgctattagtatcctcatgaaggacctggcagacgaactggccctcgttgacgttatcgaagataagctgaagggggagatgatggatctgcaacacggctctctgttcttgagaacacctaagattgtaagtggcaaagactacaacgtgaccgctaacagtaagctggttatcattactgcaggcgcacggcaacaagaaggcgaatctagactgaacctagttcaacgaaatgtgaacatcttcaagttcatcatccctaacgtggtaaagtacagtcccaactgtaaactgctaatagtgtccaatcctgttgacattctgacatatgtggcatggaaaatcagtggtttccccaagaatcgggtcatcggtagtggttgcaacctcgactcagcacgcttcagataccttatgggtgaaagacttggggtgcacccactgtcctgccacggatgggtgctgggagagcacggggatagctccgtccccgtatggagcggaatgaatgtggccggcgtctcgctcaagacccttcacccagatctgggtacagataaggataaggagcagtggaaagaagtgcacaaacaggttgtcgagcgcgtgtttacagaatag

SEQ ID NO: 17510 - DNA, 813 bp, synthetic construct
  misc_feature 1..813: note = Description of Artificial Sequence: Synthetic coding sequence
  source 1..813: mol_type = other DNA
atgcttcaggcatgcaaaatggaaggctttcccctggtgcccccccctagcgaggatctggttccttatgacaccgatttataccagagacaaacccacgagtactacccctacctgagttctgatggagaatctcacagcgaccactactgggactttcatccgcaccacgttcactctgaattcgagtcctttgcggaaaacaacttcaccgagctccagtccgttcagcctccccagctgcaacaattataccggcacatggagcttgagcaaatgcacgtcctcgatacaccaatggtacctccacatcctagcttaggccatcaggttagctacctccctcggatgtgtctgcagtatccgagcctgtctcctgcacagccttccagcgatgaggaggagggagagcgacagagtcctcctcttgaggtcagcgatggggaggccgacggtctggaaccgggccccggcttgctgccaggggagaccggcagtaaaaagaagatccgcttatatcagttcctgctagatctgctgcgctccggggatatgaaagactccatttggtgggtagacaaagataaaggaacgttccagttctccagcaaacacaaagaggccctagcacatcgctgggggattcagaagggtaacaggaaaaagatgacataccaaaagatggctcgggccctccgcaactacggtaagacaggtgaggttaagaaagtcaagaaaaagctcacataccagttctcgggggaagttctgggtcgcgggggcctcgcggagaggcggcaccctcctcattag

SEQ ID NO: 17511 - DNA, 2403 bp, synthetic construct
  misc_feature 1..2403: note = Description of Artificial Sequence: Synthetic coding sequence
  source 1..2403: mol_type = other DNA
atgggctccagcaagaagcatcgcggcgaaaaagaagcagctgggaccaccgctgctgcagggaccggtggggctaccgaacagcctccccgccacagagagcataaaaagcacaaacacaggtccggcgggagcggaggtagcggtggtgagcgcagaaaaagatcacgcgaacggggtggtgagcgcgggagcggccggcggggggcagaggcggaggcacggtcatcaacacacggcagagagcgctcccaagctgaaccttccgagagaagggtaaaacgagaaaagagagatgacggatacgaagctgctgccagtagtaagacctcttcaggagacgcctcttccctgagtatcgaggagaccaacaagcttagggcaaagcttggtctcaagcccctagaggtaaacgctataaagaaggaagcaggaaccaaggaggagcccgttacagccgatgttattaatccgatggccctgcgccagagagaagaactgagggaaaaactggccgcagccaaggaaaaaaggctgttgaaccagaagctgggcaaaataaagaccctgggcgaagacgatccatggttggatgacaccgccgcttggatcgaaagaagtcgccagctgcagaaggagaaggatcttgctgagaaaagggcaaagcttctcgaggagatggaccaggagttcggagtgagcacactcgtagaggaggagtttgggcaaagacgccaggatctttactcggctagagacctacagggactgaccgtagaacatgccattgattcatttagagagggtgagacaatgattcttactttaaaggataaaggggtgctgcaggaggaagaagacgtcttggtgaatgtcaacctggtggataaggagagagcggaaaagaatgtggaattgcgaaaaaagaagcctgactacttgccgtatgcagaggatgaatcagtagatgacttagctcaacaaaagcctcgcagcatcctcagcaagtacgatgaggaactggagggagaacgacctcactcctttcgccttgaacaagggggaactgctgatggcctgcgggaacgtgaattagaggagataagagccaaactccgcttgcaggcacagagtctgtccactgtgggccctaggttagcttctgagtatctgactcctgaggagatggtgacttttaagaaaactaagcggcgagtgaagaagatcaggaaaaaggaaaaagaggtggtggtgagggctgatgatcttcttcccttgggcgatcagacacaggatggcgactttgggagtcgactgagaggccgaggcaggagacgggtcagtgaggtggaagaggaaaaagaaccagtcccccagcctctgcctagtgacgatactagagttgaaaacatggacatcagtgatgaagaggaaggaggcgctcccccacctggttccccccaagtccttgaggaggacgaggccgaattggagctgcagaagcagctggagaaaggacgccgtctgaggcagctgcagcaactgcaacagctaagggacagcggcgaaaaagtagtggagatcgtgaagaagcttgaatctcggcagcggggctgggaagaggacgaggatcccgaacgcaagggggcgattgtgttcaacgccacctcagaattttgccgtacgctcggggagattcccacctacggtctggctgggaaccgggaagagcaagaggagctgatggactttgaacgagatgaggagagatcagccaacggcggttctgagtctgacggggaggagaacatcgggtggtcaactgtcaacctcgacgaagagaagcagcaacaggacttctccgcttccagtaccactatcttggatgaggaaccaatcgtgaacagaggcctggccgcggctttgcttctctgtcaaaacaaaggacttctggagaccacagtacagaaagttgctcgggtgaaggctcctaacaagtccctgcctagcgcagtgtactgtatcgaggataagatggctatcgacgataaatatagccgacgcgaggaatatcgaggattcacccaggatttcaaggagaaggacggttataagcccgacgtgaaaatagaatacgttgacgagacaggccggaaactgacacctaaagaagcctttagacagctgagccaccgtttccatggaaaagggtcaggaaaaatgaagacggaacggcgtatgaaaaagctggatgaggaggctctcctcaaaaagatgtcctcatctgatacacctctgggcacggtagccctcctgcaagaaaaacaaaaagctcagaagacaccatacatcgtcctgtccggatctggtaaatcaatgaacgcaaatacaataactaaatag

SEQ ID NO: 17512 - DNA, 1929 bp, synthetic construct
  misc_feature 1..1929: note = Description of Artificial Sequence: Synthetic coding sequence
  source 1..1929: mol_type = other DNA
atggccttacgccagcgcgaggaattgcgcgaaaagttggccgctgctaaggaaaagaggcttttgaaccagaaacttggtaagatcaagacactaggtgaggacgacccctggcttgacgacaccgcggcctggatagaacgatctaggcagctgcagaaagagaaggacctggcggagaagagggcaaagttacttgaagagatggaccaggagtttggtgtatccaccttggttgaagaagagttcggtcagagaagacaggatctatactccgctcgcgaccttcagggactgactgtcgagcacgccattgatagttttcgggagggtgaaactatgatcctgactctaaaagataaaggtgtgcttcaggaggaggaagatgtcctggttaacgttaacctcgtcgacaaggaacgtgccgaaaagaacgtggagttacggaaaaagaagcctgactacttgccatacgcggaggatgagagcgtggacgacctggctcaacagaagcccaggagcatcctcagcaaatacgatgaagaactggagggagagcggccacattcttttagactggagcagggcggaacagccgatggtctaagagaaagggaattggaagaaatcagggccaagctgcgtctgcaggcacagagcctgtcaactgtaggcccaagactagccagtgagtacctaacaccagaggagatggtcacttttaagaagacaaagaggcgagtcaagaaaatccgcaagaaagagaaagaggtggtggtgagagccgacgatctcctgcccctgggcgatcagacacaggacggggacttcggttccagactccgcgggcgcggacgtaggcgcgtttcggaagtggaggaggaaaaagagccagtgcctcagccactgccaagcgatgacactagggttgagaatatggacatttctgacgaggaagagggaggcgctccccctccaggcagccctcaggtccttgaagaggacgaggcggagcttgaactgcagaaacagctcgagaaaggacgccggctgcgccaattgcagcagctccagcaactgcgcgactccggagagaaggtggtcgaaatcgtgaaaaagctcgaatcaaggcagagggggtgggaggaagacgaggatccggaaagaaaaggagccatcgtgtttaacgcaacgtccgagttttgtaggaccctgggggagataccgacctacggattggccgggaaccgcgaggagcaagaagagctgatggacttcgagagggacgaggaaagatccgccaacggcggctcggagagtgacggagaggagaacatagggtggagcacagtcaaccttgacgaggagaagcagcagcaggatttcagcgccagctcaacgacaatcctggacgaagagccaatcgttaacagaggactggctgccgctctcttactgtgccagaacaaagggctcctcgagaccactgtgcagaaagttgcaagggtcaaggcaccaaataagtctctgccttcagctgtgtactgtattgaggacaaaatggccatcgatgacaagtactcaagaagggaagagtacagaggattcacacaggatttcaaggaaaaggatggttataaaccagatgtcaagatcgagtacgtagacgagacaggaagaaaattgaccccaaaagaggcttttagacaattatcccataggttccatggtaagggctccggaaagatgaagactgaacgccggatgaaaaaactagacgaggaggccctgctgaagaagatgagcagttcagatacacctctggggaccgtggccttgttgcaggaaaagcaaaaagcccaaaaaaccccatatattgtgttgagtggctcagggaagagcatgaacgcaaatactatcacgaaatag

SEQ ID NO: 17513 - DNA, 4392 bp, synthetic construct
  misc_feature 1..4392: note = Description of Artificial Sequence: Synthetic coding sequence
  source 1..4392: mol_type = other DNA
atgaagaagaaaacggtgtgcacattgaatatgggggacaagaaatatgaggacatggagggggaggagaacggagacaatacaatttccactggccttctctactctgaagctgacagatgccctatctgccttaattgccttctcgagaaagaagtcggctttcccgaaagttgtaaccacgtgttttgtatgacttgcatcctgaagtgggccgaaaccttggcctcatgccctattgatcgtaagccattccaggccgtttttaagttcagtgcactggagggttatgtgaaagtacaagtgaaaaagcagctgagagaaacgaaagacaaaaagaacgagaattccttcgagaaacaggtgagctgccacgagaattcaaagtcctgcattaggagaaaagcaatcgtccgagaagatctcttatctgccaaggtatgtgatttgaagtggatccatagaaactccctgtatagcgagacgggagggaagaaaaacgctgccataaagataaacaagccacagcgtagcaactggtccactaaccagtgtttccggaatttcttcagcaacatgttctcctccgtaagccacagtggtgaatccagttttacctatcgagcctactgcactgagttcattgaagcctcagagattagtgccttaatccgacagaaacggcatgaactggaactgtcttggttccctgacaccttgcctggaattggccgaattggattcattccttggaacgtggaaaccgaggtgctccccttgataagtagcgtgttgccaaggactatctttcccacatccacaatctcttttgaacatttcggcacatcgtgcaaaggctatgcactcgctcatactcaggaaggtgaagaaaagaaacaaacatctggcacgagcaataccagaggcagccgacggaagcccgcaatgactacccctacccgtcgctcaacgaggaacacaagagcagaaaccgcctcacagtcccagagatcccctatttcagataacagcggttgtgatgcacccggcaattctaacccgtctttaagtgttccttcctccgctgagtcagagaagcaaacacgccaagcccctaagcgaaaatccgttcgcagaggcaggaagccccccctgctgaagaaaaagctcaggtcatcagtagccgctcccgagaagtcttcctcaaatgactcagtcgatgaagagactgccgagtctgacacctcccctgtactagaaaaagaacatcaaccagatgtggattccagcaatatttgcaccgtgcagacccacgtggagaaccagtcagcaaattgcctgaagtcttgcaatgagcagattgaggaatctgaaaagcatactgccaattacgacacggaggagcgggttggaagctctagctctgaatcttgtgcacaggacctgccagtgttagtgggggaggaaggggaggtgaagaaactggagaatacgggcattgaggccaacgtcctatgtctggagtcagagattagcgaaaatattctggagaagggaggcgatcccctggagaagcaggaccagatctccggtctgagccagagcgaagtcaaaaccgacgtgtgcacagttcatctacctaatgatttcccgacatgtcttactagtgaaagtaaagtttaccagcctgtgtcctgccccttgtctgacttatctgagaacgttgagtcagtggtgaatgaggaaaaaattaccgagagcagtctggtggaaattactgagcacaaagactttaccctgaaaactgaggagctgattgagtcccccaagctcgaaagctcagagggtgagattattcagactgtggaccggcagagcgtaaagagccccgaggtgcagctgctggggcacgtggagaccgaagacgtagagattatagctacctgcgacacgtttggaaacgaagatttcaacaatatacaggactctgagaataatctgttaaaaaacaacttactcaatacgaaactagagaagtctttggaagagaagaatgagagtttaaccgaacatcccaggtcaaccgagctcccgaagacccacatcgagcagatccaaaaacacttttccgaggacaacaacgagatgatccccatggaatgtgattctttctgctccgaccagaatgaaagtgaagtcgaacccagtgtgaatgccgatctgaaacagatgaatgaaaatagcgttacccactgttccgagaataacatgccgtcctctgacctggccgacgaaaaggtcgagacagtgagccagccgtccgaaagcccaaaggacactatagataagaccaagaagccccggacacgacgtagtcgtttccacagtccttcaaccacctggtcacccaataaggatacccctcaagagaagaagcgccctcaatctcctagtcctcgtcgtgagactggcaaggaaagcaggaaaagccaatcgcctagccccaaaaacgaaagcgcaaggggcagaaagaagtctcggagtcagtcccccaaaaaggatatagccagggagcggcggcaatcccagagccggtctccaaagagagacacaaccagggagagcagacggagtgaatcactgtcccctcgacgcgaaacttcccgggagaacaaaagatcccagccacgggtcaaggacagtagtcctggggaaaaatcacgctctcagtctcgggaacgcgagagcgatcgcgacgggcagcgacgcgaacgggagcggcgcacccgcaagtggagccgctcccggagccattcaagatctccgagtagatgcaggactaaatcaaagtcttcatcatttggaaggattgatagagatagctattccccacgctggaaaggtagatgggcaaacgacggctggcgctgcccaagaggaaatgatcggtaccggaagaacgacccagagaagcaaaatgaaaacacccgcaaggagaagaatgacattcatctcgacgcagacgatcctaacagcgcagataagcatagaaacgactgtcctaattggattacagagaagatcaacagcggtccagatccacgcacgcgcaaccccgaaaagctgaaagagtcgcactgggaggaaaaccgtaatgagaacagcgggaattcgtggaataaaaacttcggatcaggttgggtgagcaaccgcggtaggggccgaggcaaccgcgggagagggacctaccgatcctcttttgcctacaaggaccagaatgaaaatcgctggcagaatagaaagcctctgagcggaaacagtaacagcagcgggtccgaaagctttaagtttgttgagcaacagagctacaagagaaagtcagaacaggagttttcttttgatacacccgccgatcgttctggctggacgagcgccagttcatgggcagtgagaaagactcttcctgccgatgtgcagaattactattcacggaggggcagaaattcaagcgggccccagtccggctggatgaagcaggaagaagaaacttcgggccaggattcaagcctgaaagaccagaccaaccaacaggttgatgggtctcagcttcctatcaacatgatgcagccacagatgaatgtcatgcaacaacaaatgaatgctcaacaccaacccatgaacatcttcccctatccagtgggtgttcatgctcctctgatgaatatacaaagaaatccgttcaatatacacccacagctgccattgcaccttcacaccggcgtgcctctcatgcaagtggccacaccaacatcggtgtcgcagggcctgcccccccccccaccaccccctccccctagccagcaggtaaattacattgcgtcccaacctgacggtaagcaacttcagggcattccttccagctctcacgtttcgaataacatgtcgacgcccgttctgccggcaccaaccgctgccccagggaacaccgggatggtgcagggcccctcctctgggaacacatcaagtagctcacatagcaaagccagtaatgctgctgtcaaactggccgaaagcaaggtgtccgtcgcagtcgaagctagtgccgactcaagtaagaccgacaaaaaacttcagatccaggaaaaggccgcccaggaggtcaagctcgctattaagcccttctaccagaacaaagacattacaaaggaggaatacaaagaaatagtaagaaaggcagtcgataaggtctgtcacagcaagagcggcgaggtgaacagtacgaaagtcgcaaacctggtgaaagcgtatgttgataagtataagtattccagaaagggatcccaaaagaagacactggaggagccggtgagtaccgagaagaatattggctag

SEQ ID NO: 17514 - DNA, 4392 bp, synthetic construct
  misc_feature 1..4392: note = Description of Artificial Sequence: Synthetic coding sequence
  source 1..4392: mol_type = other DNA
atgaagaagaagacagtgtgcacgctaaacatgggcgacaaaaaatacgaagatatggaaggggaggaaaacggggacaatacaatttcaactgggttactgtactcagaggcagacagatgccccatttgcctcaattgccttctggaaaaagaggtgggattcccagaatcttgtaatcacgttttctgcatgacctgcattctaaaatgggctgagacgctcgcatcttgtcctattgatagaaagcctttccaggcagtgtttaagttttcagcactggaagggtacgtcaaggtgcaggtgaagaaacagctgcgggaaacaaaggataagaagaacgagaattcctttgagaaacaggtttcatgccacgaaaattctaagtcatgcattagaagaaaggctattgtgagagaagacctcctgagcgccaaagtgtgcgatctcaaatggattcacaggaatagcctgtacagcgagacagggggtaagaaaaacgctgctataaaaattaataagccacaacggtcaaactggtccaccaatcagtgctttcgcaactttttttccaacatgttctcctcggtaagtcatagtggggaatcctcttttacatacagggcatactgcacagagttcatagaagccagcgagatcagtgccttaattcgccagaaaagacatgaactggagctgtcttggttccctgatacactgcccggtattggcaggattggttttatcccttggaatgtggagacagaggttcttcctctgatctcttctgtgctgccccgcacgatttttccaacatccacgataagttttgaacactttgggacgtcatgtaagggctacgctctggctcatacacaggagggcgaggagaaaaagcagacctctggcacaagcaacactaggggctcgcggcgcaagcccgcaatgaccacgcccacccgacggtccacccggaacactcgcgccgaaacagcttcacagagtcagcggtcacctatctcagataactctggatgcgacgcccccggcaactcaaatccatccttatcagtgcccagctcagcggaatctgagaagcagactagacaggcaccaaagcgcaaatctgtgcgtcgcgggaggaagccaccactgctgaaaaaaaagctgaggagttcagtggctgcgcccgagaagagttctagtaacgactccgttgacgaagaaaccgccgagagcgacacgtctccagtgttagagaaggaacaccagccagatgtggatagtagcaatatctgtaccgtgcagacacacgttgagaatcagtcagcaaattgcctgaaatcctgcaacgagcaaattgaagagtccgagaaacacacggccaactacgacaccgaagagcgagtgggttcttcatctagtgaaagctgtgcccaggacctgcctgtgcttgtgggggaagagggagaggtgaagaagttggaaaataccggaatcgaagccaacgtcctctgcctggagagcgagatctccgaaaacatccttgaaaagggaggggacccgctagagaaacaggaccaaatttctgggctctcccaatcagaggttaaaactgatgtttgtacagttcatctgccgaatgattttccaacttgcctaacttcagagagcaaagtctatcagcctgtctcatgccctttaagtgaccttagcgaaaacgtagagagtgtggtcaacgaggagaaaatcacagaaagctcactggttgagattacagaacataaagattttacactcaagacggaggagttgatcgagagcccgaagctggaaagctccgagggcgagataattcagacagtggaccgtcaaagcgtgaaatcacctgaagtgcaattgcttggtcacgtggaaacagaagatgttgagattattgctacgtgtgatacattcggaaacgaggattttaataatatccaggatagcgagaacaatcttctgaagaataatttgttaaacaccaaactggaaaagtcactcgaggagaagaacgagtccttaaccgagcacccccgatctactgaactgcccaagacccacattgagcagattcagaaacatttcagcgaagataacaatgaaatgatccccatggaatgtgactcattctgcagtgatcaaaatgaatcagaagtcgaaccttccgtaaacgccgatcttaaacagatgaatgagaacagcgtgacccattgttccgagaataatatgccctcctcagatctggcagatgaaaaagttgagacagtttctcagccgtccgagtctcccaaggatacaatagataagactaagaagcctaggacccgtcggtccagattccatagtccaagcactacatggtcccccaacaaggacacaccccaggaaaaaaaacgtccacagtctccatcacctcggagagagaccggcaaagaatcaaggaaatcccagtccccctctccgaaaaacgagtccgccaggggtagaaaaaagtctcggagtcaatctccaaagaaggacatcgcgagggaaaggaggcagtcacagtcacgctccccgaaacgcgacaccactcgggagtcccgcagatccgaaagtctgagccctagacgggagacatccagagaaaacaaaagatcccagccaagagtaaaggatagctctcccggagagaaaagcagatcccaatcaagagaacgagagtcagaccgcgatggccaaagacgcgagcgcgagcggaggacaagaaagtggagtaggtccagatcgcattcaaggagtccatcaaggtgccgcacaaagtccaagtcaagctccttcgggaggattgaccgagattcctattccccccgttggaagggtagatgggcgaatgatggctggcgctgtccccgcgggaatgacaggtaccgcaagaacgacccggagaagcagaacgaaaatacaagaaaagaaaaaaacgatattcatctcgacgccgacgatcctaacagcgccgacaagcatcgtaatgattgtcccaactggattacggaaaaaataaattcaggtcctgaccctcgaaccaggaatcccgaaaagctcaaggaatcacattgggaggagaatcggaacgaaaacagcggcaatagttggaacaagaactttgggagcgggtgggtgtccaaccgcggacgagggcgtgggaacagggggagaggcacttatcggagttctttcgcctacaaggaccagaacgaaaatagatggcagaaccgaaagcccctgagtggcaattccaattctagcggctctgagtcattcaagtttgttgagcaacagtcctacaaaagaaagtccgagcaggaattctccttcgacactcccgccgataggagcggttggacctcggcaagctcctgggcggttcggaaaacgttgcccgccgatgtgcagaactattattccagacggggacgtaactcctccggccctcagtccgggtggatgaaacaggaggaagaaaccagcgggcaagactcgagccttaaagaccaaactaatcagcaggtcgacggatcacagctccctattaacatgatgcagcctcagatgaatgtaatgcagcagcagatgaacgcacagcaccagcccatgaacatctttccatatcccgtgggcgtgcatgctccactcatgaacatccagaggaacccgttcaatatccatccacagcttccccttcatctgcacacgggagtgccactgatgcaagttgccacccctacttctgtgtcccagggtctccccccacccccccccccacctccgccctctcagcaggtcaattacatcgcttcacagcccgacggcaaacagttacagggcattccaagtagctcacacgtctccaacaacatgtccacaccggttcttccggcccctaccgctgcccccggaaatactgggatggtgcaggggccctcatccggtaatacatcttcctcctcccactctaaggccagtaatgccgctgtcaaactggccgagagcaaagtgtcagtggccgtggaggcctctgccgacagtagcaagactgacaagaagctccagatccaggaaaaagccgctcaggaggtgaagctagccattaagcccttctatcaaaataaagatattactaaggaagaatataaggagattgttagaaaggcagtggataaagtgtgtcacagcaaaagcggagaagtcaacagcaccaaagtcgctaacctagttaaggcttacgtcgataagtacaaatactctcgtaagggatcccagaagaagactctggaggagcccgtttccaccgaaaaaaacattgggtag

SEQ ID NO: 17515 - DNA, 3447 bp, synthetic construct
  misc_feature 1..3447: note = Description of Artificial Sequence: Synthetic coding sequence
  source 1..3447: mol_type = other DNA
atgaccacaccaaccaggaggtccacaaggaataccagagcagaaacagcgtcacaaagccagcggagcccgatatccgacaactcaggctgcgacgccccaggcaactctaatccaagcttgtctgtgccgtcaagcgcggagagtgaaaagcagacaagacaagctccaaaaaggaagagcgtgaggaggggccggaaaccaccactgcttaaaaagaagctgaggtccagcgttgcagcaccggagaaatcatcctcaaacgactccgttgacgaggaaacggccgaaagcgacactagccctgtgctagagaaggagcaccagccagatgtcgactcatccaatatttgtaccgtgcagacccacgtggaaaaccagtcggctaactgtctgaagagctgcaatgagcagatagaggagagcgaaaaacacaccgcgaactacgacactgaagagcgggtagggagtagctcgtcagaatcctgcgcccaagaccttccagttctagttggggaggagggagaagttaaaaaactagagaacacaggaattgaagccaacgttctgtgtctagagagcgaaatatctgaaaacatcctggagaaaggcggggaccccttggagaagcaggatcagatcagcggtctctcacagtcggaggtgaaaaccgatgtatgtacagtgcacttacctaatgatttcccaacgtgtttgactagcgagtccaaagtgtatcagcctgtgtcgtgcccccttagcgatttgagcgagaatgtggagagcgtagtgaacgaggaaaaaattactgaaagcagtctcgtggagatcactgaacataaagacttcaccttgaaaactgaggagctgatcgaatcaccaaaacttgagtctagcgaaggtgaaattatccagacagtggaccggcagtccgtgaagtcacccgaggtacagctactcggtcacgttgagactgaggatgtcgaaataatcgccacttgcgatacatttggtaatgaggattttaataatattcaggactccgagaacaacctgcttaagaacaaccttctgaatactaaactagagaaatccctggaagagaaaaacgaaagtctcacggagcacccacggagtacagagctccctaaaacccacatcgaacagatccagaagcatttcagcgaggataacaacgagatgatacccatggagtgcgattcattctgctctgaccaaaacgaatccgaggtagagccttcagtcaatgcagatcttaagcagatgaatgagaattcagtaacccattgtagcgaaaacaacatgccttcaagcgatttggccgatgagaaagtggaaaccgtctcacagccgagtgaatcgccaaaggacaccatcgacaagaccaaaaaaccaagaaccagacggtctaggttccactcccctagcactacatggagccccaacaaagacacaccacaggaaaaaaaaaggccacaaagcccgagtcctagaagagagaccggtaaagagtcgcgtaaaagccaaagcccttcaccaaaaaacgagagtgccagggggcgtaagaagagtcgcagtcagtcgccaaagaaagacattgcccgggaaaggcggcagtcgcagtccaggagcccaaaaagggatacgactagggaaagtcgccgctctgaatccctgagcccaaggcgcgagacaagccgggagaacaagcggagccagccaagagtgaaagacagcagccccggggaaaagtccaggagccaatcgagagagcgtgaatccgacagggacggccagagacgcgaaagggagcgccgcacacgcaagtggagcaggagtcggagtcactctcgtagtccatcccgatgtcgtacaaagagcaaaagcagtagcttcggccgtatagaccgggactcatacagtcctcgctggaagggccggtgggctaacgacgggtggcgttgtcccagagggaacgacagatatagaaaaaacgatcccgaaaagcaaaatgagaacacaagaaaggaaaagaacgacattcacctcgatgccgatgaccccaactccgccgataaacaccgcaatgactgccctaactggatcactgagaaaataaactccggccctgaccctagaacaagaaaccctgaaaagttgaaagagtcacactgggaggagaatagaaacgagaattcaggcaattcctggaataagaactttgggtctggatgggtaagcaaccggggacgtgggagagggaaccgtggcagagggacatatcgctcgtcctttgcgtataaggatcagaacgaaaataggtggcagaatcggaagcccctaagtggcaactcaaatagttccggcagtgaaagcttcaaatttgtggagcagcaatcctataagcgcaaaagtgagcaggaattctcattcgacacgcccgctgataggagcggctggacctctgcaagctcttgggcagttcggaaaacgttgcccgccgatgtgcagaattattactccagacgtggaaggaatagtagcggtcctcagtcaggatggatgaagcaggaagaggaaacatccgggcaagacagttcacttaaagaccagactaatcagcaggtggacgggtcccagctgccaatcaacatgatgcagccccagatgaacgtcatgcagcagcagatgaatgcacaacatcagcctatgaacatattcccgtatccagtgggcgtgcacgcccccctcatgaacatccaaaggaatccttttaacatacaccctcagctccccctgcacctgcataccggagtgccactgatgcaggtggcaacccccacgtcagtgagccagggcctgcccccgccaccgccaccccccccgccatcccagcaggtgaattacattgcctctcaaccagacggtaagcaattgcagggcattccttcttccagccacgtcagtaataacatgagtactcccgtattgccggcccccaccgcagcgcctggcaacaccggcatggttcaggggccaagcagcggtaacacatcatccagttcacactctaaagcgtcaaacgccgcagtcaagctggccgaatccaaggttagcgttgccgtcgaagcctcggcagacagctccaaaaccgacaaaaaattacaaatccaggagaaagccgctcaagaggtgaagctggcaatcaaaccattctatcagaataaggacataactaaagaggaatacaaggagatcgtgaggaaggcagtggacaaggtctgccacagcaagtcaggcgaggttaattccacgaaagttgccaatttggtcaaggcttatgtggataaatataagtacagtcgaaagggctctcagaagaagacgttagaagaacctgtgtcaacagaaaagaacatcgggtag

SEQ ID NO: 17516 - DNA, 1401 bp, synthetic construct
  misc_feature 1..1401: note = Description of Artificial Sequence: Synthetic coding sequence
  source 1..1401: mol_type = other DNA
atggcggaggaacaggacttgtcagaggttgaacttagtcctgtgggcagcgaagagccacggtgcctttcacccggctctgctccgagcctcgggcccgacgggggagggggtggaagcggccttcgggcctccccagggcctggtgagctgggcaaagtcaagaaagaacagcaggacggtgaagccgatgacgataaatttcccgtgtgcattcgggaggcagtctctcaggtcctgtccggttacgactggactctggtaccgatgcccgtccgagtgaacggagcctctaagagcaagcctcacgtaaagagacctatgaatgctttcatggtctgggcgcaggctgctagacggaagcttgcagaccagtacccccacctgcataacgccgaactatctaaaacccttggaaagctgtggcgattgcttaatgaatctgataaaaggccattcatagaagaggccgaacggctgcgaatgcagcataagaaagatcaccccgactataaataccagcctcggcgacgcaagaacggcaaggccgcacagggcgaggccgagtgccccggaggggaggccgagcaaggcgggactgcagcaattcaagcacattacaaatccgcacacctcgatcacagacatcctggtgaagggtccccaatgtcggacgggaaccccgagcacccgtcagggcagtcccacgggcctccaacaccccctacgactcccaagactgaactccaaagtggtaaggcagaccctaagcgcgatggccgctccatgggcgaagggggaaagcctcacatcgattttggaaacgtcgacattggagaaattagccatgaagttatgtctaatatggaaactttcgatgtggcggagttggatcaataccttccgcccaacggtcatccaggtcacgtgtctagctattctgccgccgggtatggactaggatcggctctcgccgtcgcctctggtcactctgcctggatctctaagcctccaggagtggctttgcctaccgtgtccccgccaggtgtggatgcgaaagcacaggttaaaaccgagactgcgggaccccaagggcctcctcattatacagaccaaccaagcaccagtcagatcgcttacacatccctgagcctcccccactatggctcagcatttccgagcatcagtcggcctcagttcgactactcggaccaccagccatccggaccatactacgggcattctggacaggcctcagggctgtactcagctttctcctacatggggcctagccagagacccctgtacacagcaatatctgaccccagcccaagcggaccccagtcccacagtcccactcattgggaacaaccggtgtacaccactctgtctaggccatag

SEQ ID NO: 17517 - DNA, 1401 bp, synthetic construct
  misc_feature 1..1401: note = Description of Artificial Sequence: Synthetic coding sequence
  source 1..1401: mol_type = other DNA
atggccgaagagcaagatctgtccgaggtagagctctctcccgtgggttccgaggagcctcggtgcctgtcacctggatctgcaccctcacttggcccagatgggggcggagggggctctggcttgagagccagtcccgggccgggagaactcggcaaggtgaaaaaggagcaacaagacggagaggctgatgacgacaaattccctgtgtgcatccgtgaggccgtatctcaggtgctgtcaggttacgactggacattagtcccaatgcctgtacgagtgaatggtgcatccaaaagtaagccccatgtcaaaagaccaatgaatgcatttatggtgtgggcacaagcagcccgaagaaaactagccgaccaatatccccatctacataatgccgaactgagcaaaactctgggtaagttgtggaggcttcttaacgagtcagacaagcgaccgtttatagaagaagctgaacgactccggatgcagcacaaaaaggaccacccagattacaagtatcagcctagaagacggaaaaatgggaaagcggcacagggagaagctgaatgccccggaggggaagccgagcagggagggactgctgctatccaggcacactataagagcgctcacctcgaccacagacaccccggggaggggagcccaatgtctgatggaaaccccgagcacccctcgggacagagccacggtccacctaccccccctactactccaaaaactgaactgcaaagtggtaaggctgacccaaagcgcgacgggcgttccatgggtgaaggaggaaaaccacacatcgatttcggaaacgtcgacattggagagataagccatgaagtcatgagtaatatggagaccttcgatgtggccgagctcgaccagtacctaccacctaatggtcatcccggccacgtctccagctactcagcggctggatacggcctcggaagtgccctggccgtcgcaagcgggcacagtgcctggatttcaaagccaccaggcgtcgctctacccacagtctcccccccaggggtagatgcaaaggctcaagtaaaaacggagactgccggtccacagggaccaccccattataccgaccagcctagcacatctcagattgcatataccagcctgagtctaccccactatggctccgcatttcctagcattagtaggccacaatttgattacagcgaccaccaaccgtccggcccgtactatggccacagcggacaggcatcggggctctatagcgccttttcatatatgggaccctctcaacggcctctatacaccgcaatctctgacccaagccctagcggaccgcaaagtcactctcccactcattgggaacagcctgtctataccacgctgtcacgcccttag

SEQ ID NO: 17518 - DNA, 861 bp, synthetic construct
  misc_feature 1..861: note = Description of Artificial Sequence: Synthetic coding sequence
  source 1..861: mol_type = other DNA
atggccgaagagcaggacttgtctgaggtcgagctcagcccagtgggatcggaagaacctaggtgcctttcaccaggatctgcacctagcctggggcccgacggcggcggcgggggaagcggactgagagccagtcccggcccgggtgaactcgggaaagtgaaaaaggagcagcaggatggagaagccgacgatgataaatttcctgtgtgtatcagagaggccgtatcacaggtgctctcagggtacgattggacactcgtacccatgcccgtgcgcgtgaacggggcaagtaagtccaagccccacgtgaagcgacctatgaatgcatttatggtttgggcgcaagctgcccgtcgcaagctcgctgaccagtacccccatctacataatgcagagctatcaaagaccctaggcaagctctggcggctgctgaacgaatccgacaaacgccccttcatagaagaggcggagcggctacggatgcaacataagaaagaccacccagactataagtatcaaccgcgccgccggaaaaatggtaaggcagcacaaggcgaagccgaatgtccaggcggggaggctgagcaagggggtactgcagccatccaggcacactataaatctgcccacctcgatcatagacaccccggggagggaagccccatgtcagacggtaacccagagcacccgtcaggccagtcgcacggaccgccgaccccccctactactccaaaaactgaactacagagcgggaaagctgaccccaagcgtgacggtagaccttcaccttccggcccccagtcgcactcgcccactcactgggagcagcctgtctataccaccctcagtcggccctag

SEQ ID NO: 17519 - DNA, 642 bp, synthetic construct
  misc_feature 1..642: note = Description of Artificial Sequence: Synthetic coding sequence
  source 1..642: mol_type = other DNA
atggccgaagaacaggatctaagcgaagttgagttaagccccgttggatctgaggaaccgcgttgtctctcgcccggatccgcgccatcactcggtccagatggtggcggcggggggtccggtttgcgtgcctctccaggccctggagagctgggtaaggtgaaaaaagagcaacaagatggcgaagcagacgacgacaagttccctgtttgcataagagaagctgtctcgcaggtgctctctggatatgattggaccctggtcccgatgcccgtccgagtcaatggggcctcaaagtctaagccacatgtcaaaagacccatgaacgcattcatggtgtgggcccaagcggcacgtaggaagctcgccgatcagtacccacaccttcataacgcagagctcagtaagactctgggaaagctttggcggttacttaatgaatccgataagagaccttttatcgaggaggccgagcggctccgcatgcagcataagaaggaccatccggactacaagtatcaaccccgaaggcgaaagaacggtaaagcagctcagggggaggctgaatgtccaggaggtgaggccgagcaaggaggaaccgccgcaattcaagctcattacaaatcggcgcatcttgactag

SEQ ID NO: 17520 - DNA, 1425 bp, synthetic construct
  misc_feature 1..1425: note = Description of Artificial Sequence: Synthetic coding sequence
  source 1..1425: mol_type = other DNA
atggtgcagcagacaaataatgccgagaataccgaggccctcctggccggagagagctctgacagcggggctgggctcgagcttggcatagcctccagtcccacgccgggcagtaccgcctcgacggggggtaaggcggacgatcctagctggtgcaaaaccccatctggacatataaaaaggcctatgaatgctttcatggtttggtcacaaattgagagacgcaaaattatggagcagagccctgacatgcacaatgccgagatttccaagagactgggtaaacgctggaagctcctaaaagacagtgataaaattccattcatcagagaagcggagagactgcgactcaaacacatggcggattaccccgactacaaatacagaccacgcaagaaagtaaagagcggcaacgctaactcttctagttctgccgcagctagcagtaagcctggagagaaaggagacaaggtcggaggctccggtggtgggggacacggcggaggaggaggcggaggcagctcaaacgccggggggggaggaggtggcgccagtggcgggggggctaacagcaaacctgcacagaagaagtcatgtggctctaaagtggctggcggggccgggggtggtgtgtccaagccccatgccaagctgatcctcgctggaggcgggggcggcggaaaagccgccgcagccgcggcagcgtcttttgccgccgagcaagcaggagccgcagcccttctcccattaggtgccgcagcggaccatcattcactttataaggcaaggacaccttcggccagcgctagcgcttcctctgctgctagcgcctctgccgccctagctgcccccggaaagcacctggcagaaaaaaaggtaaagcgcgtgtatctatttggcggcctgggcacctccagtagcccagttggtggggtgggggccggggcagacccttccgacccattgggcctgtacgaggaggaaggcgccggatgttctcccgacgccccctccttatctggtaggtcatccgctgccagctctcctgctgcgggcagatcacccgccgaccaccgaggatacgcaagcctgcgcgctgcctctcccgcccctagttcagctccatcacacgccagtagctctgcatcctcccattctagctcaagctcctcgtctggtagtagctcaagcgatgacgaatttgaagacgatttactggacctcaacccctcttcaaactttgagtcaatgagccttgggtccttcagttcttctagcgccctggacagggatctcgattttaactttgaacccgggtcggggtcccacttcgagttcccagactattgtaccccggaagtcagcgaaatgatctcaggagattggctggagagctctatcagcaatcttgtgttcacttattag

SEQ ID NO: 17521 - DNA, 1425 bp, synthetic construct
  misc_feature 1..1425: note = Description of Artificial Sequence: Synthetic coding sequence
  source 1..1425: mol_type = other DNA
atggttcagcagacgaataacgcagagaataccgaggcgttattagcaggcgaaagctccgatagcggagctggcctggagctcgggatcgcgagctcccctacgcccgggtcgactgcgagcacgggcggcaaagcggacgatcctagttggtgtaaaactccttcaggccacatcaagaggccaatgaacgcgttcatggtgtggtctcagatagaacgccgtaagatcatggagcaatctccagatatgcacaacgccgagatctctaagagattgggcaaaaggtggaaactgctcaaggatagcgacaagatccccttcatccgtgaggccgagaggcttaggctgaagcatatggctgactaccccgactacaagtataggcctcgcaaaaaagtgaaatctggaaacgctaacagctcctctagtgccgctgcttcaagtaaaccgggggaaaagggagacaaagtgggcggatcgggaggcggcggtcacgggggtggcgggggcggtggatcctcaaatgccggcggggggggcggtggagcgtccgggggtggggcaaactcaaagcctgcgcagaagaaatcttgcgggtctaaagtggccgggggagccggaggaggggtgtccaaaccacacgccaagctaattttggccggaggcggtgggggcggcaaagccgccgccgccgccgcagcttcctttgccgcggagcaggctggagcagcggctcttctgcctctgggcgccgccgcagaccaccattctctgtacaaggcgcgaaccccgtctgcatctgccagcgcttcttcagccgcctcggcgtccgccgctctggcagcccccggtaaacatttggccgaaaagaaggtcaagcgtgtctatctgttcgggggcctgggtacctcgtcctcacctgtggggggcgtgggcgctggcgcagacccaagcgatcccctcggtctctatgaggaggaaggagctggctgctcccccgatgctcctagtctgtctggccgctccagtgcagcatcttcaccagccgctggtagatcccctgcggatcatagaggatacgcttctttgcgggcggcaagccctgcaccgtcttcagccccctctcacgcctcttcctctgcatcctcgcattcatctagttcttcttccagtgggtcctctagcagtgacgacgaatttgaggacgacttgttggaccttaacccttcatcaaatttcgagagcatgtccctagggagtttttcctcatccagcgcactggatcgagacctcgactttaactttgaaccaggctcgggcagtcactttgaattcccggactactgcacacccgaggttagcgaaatgatttctggtgactggttggagtccagtatctctaatttggttttcacttattag

SEQ ID NO: 17522 - DNA, 3318 bp, synthetic construct
  misc_feature 1..3318: note = Description of Artificial Sequence: Synthetic coding sequence
  source 1..3318: mol_type = other DNA
atgcttgaacctagttccgtgttacacgccaatgtcaaccaagcccctctctggtgtctggtgctcaggtggtgccgtgagtgtaaggataccgtgtgcggcgggaagcagaagtctcgggtgaaccacacatttcagcgccgcgagattgaagcaaaagaagcctgcgattggctcagggctgctggttttcctcaatacgctcagctctatgaagacagccagtttcccatcaacatcgtagccgtgaaaaacgatcatgactttctggagaaagacctggtggaaccactgtgtcggcggctaaatactctaaataagtgtgcttccatgaaactggacgttaacttccagcgcaagaagggcgacgattccgacgaagaggatctgtgtatttccaataaatggacattccagcgaacctctagacgctggagccgtgtggacgacttatatactctgctgcctcggggcgatcggaacggaagccccggcggcacagggatgcgcaataccacctctagtgagagcgtgttaacggacttgagcgaaccagaagtctgctcgatccacagcgagagctctggtggaagtgattctcgctcacagcctggtcagtgctgcacagataaccctgtgatgttggatgcacctctggtctccagctcactgccacaacctccaagagacgtgctaaaccacccatttcacccgaagaatgaaaaaccgacacgtgcccgcgctaaaagctttctcaagagaatggaaacactgagagggaaaggtgcccacgggagacataagggaagcggacggacagggggactcgtgatctccggccccatgctgcagcaggagccggaatctttcaaagcaatgcagtgcattcagatccctaacggagaccttcagaattctccgcccccagcctgtcgcaaaggcttaccctgcagcggtaagtctagcggcgaaagttcgccctcagagcatagcagtagtggtgtgtcgacgccctgtctgaaggagcgtaaatgccatgaagccaacaaacgaggtgggatgtacctcgaggacttggacgtgctggctggaaccgccctccctgacgccggagaccagagtcgcatgcatgaatttcacagccaggaaaacctggtggtacacatccccaaggatcacaagcctggcaccttccctaaagccttgtctatcgaaagcctaagcccaaccgattcaagcaatggtgtcaactggcgcaccggctctattagtctgggacgggaacaggtccctggagcacgagagccccggctcatggcgagctgtcaccgggcttctcgagtgagcatttatgacaacgtccccggcagtcacctctacgcctctactggtgaccttctggacctggaaaaggacgacctgttcccacacctggacgatattcttcagcacgtcaacgggctccaggaagtggtggacgattggtccaaggatgtactgcccgaattgcaaacccacgatacactggtcggagagccaggtctgtctacatttccctcacccaatcagataacacttgatttcgagggaaactccgtctctgaagggcgaaccacacccagtgatgtggagcgcgacgtaacttctctgaacgagtcagaacccccgggcgtgcgtgaccggcgggatagcggcgtgggagccagcttaacgagaccaaaccggagactcaggtggaatagctttcagctgtcacaccagcctcgccccgcaccagcttccccccacattagctcccagacggcttctcagctatctctgctgcagcggttttccttgctccgattaaccgcaattatggagaagcactccatgtccaataagcatggttggacctggtcagtcccaaaattcatgaagcgtatgaaggtacccgactataaagacaaagctgtttttggagtcccactgattgtgcacgtccaacgcacaggacaacccctgccgcaaagcatacagcaggccctgagatatctgaggagtaattgtctagaccaggttggactgtttcggaaatctggagtaaagtctaggattcacgctcttcgacaaatgaatgagaactttcccgaaaatgtgaattacgaagatcagtctgcgtacgatgtcgccgacatggttaagcagtttttccgcgacctgccggagcctttgtttaccaataaactgagcgagactttcctacacatataccagtacgtctctaaggagcagcgtctccaggcagtgcaagcagccatactgctactagctgatgagaatagggaggtacttcagacactcctatgctttttaaatgatgtagtcaacctggtggaagagaatcagatgacaccaatgaatctggcggtttgtcttgctcctagcttgtttcacctgaacctgcttaagaaagagagtagtccacgggtgattcagaagaagtacgccaccggcaaacccgaccaaaaagacctgaatgaaaatcttgcagcagcccagggattggcgcatatgatcatggagtgtgacaggttattcgaggtaccccatgaactcgtggcccagagcaggaacagctacgtggaagccgaaatccacgttccaacgctggaggagcttggtacacagctcgaagaaagcggagcgacttttcatacatatttgaatcaccttattcaaggcctgcagaaggaagcgaaagagaagtttaaagggtgggtaacatgttcctcaaccgacaacactgatctagctttcaaaaaagtcggagacggtaaccccctaaaattgtggaaagctagtgtggaagtagaggcgcccccgagcgttgtacttaacagagtgctgcgggagcgtcatctatgggacgaggattttgtgcaatggaaggtcgtggaaactctggatcgacagactgaaatctaccagtacgtgcttaacagcatggccccgcacccaagtagggatttcgtggtgctgagaacctggaaaactgatctcccaaagggaatgtgcaccttggtgtccttgagcgtggagcatgaagaagcccaattattgggtggcgttcgcgctgtcgtgatggactctcagtaccttatcgaaccttgtgggtccggaaagagtcggctcactcacatatgtcgcattgacctgaagggccactctcccgagtggtatagcaagggatttggccatctgtgcgcagccgaagttgctcgtatcagaaactccttccagccgcttatcgctgaaggacccgagactaaaatatag

SEQ ID NO: 17523 - DNA, 3342 bp, synthetic construct
  misc_feature 1..3342: note = Description of Artificial Sequence: Synthetic coding sequence
  source 1..3342: mol_type = other DNA
atgttcagtcaagtgccacgaactccggcttcgggttgctattacctgaattcaatgacacccgaggggcaggagatgtaccttcgtttcgatcagactactcgccgttctccataccgcatgtcccgtatcctggcccgtcatcagttggtcaccaagatacaacaggaaatcgaggcgaaagaggcctgtgactggttaagggctgctggcttccctcagtatgcacagctctatgaagactcccagttccccataaatatcgttgcagtgaaaaatgatcatgactttttggaaaaggacctggttgagcccttgtgtcggagactcaacactctgaataaatgcgcctccatgaaactagacgtcaactttcagagaaaaaagggcgacgacagcgatgaggaggatctttgcatcagcaacaaatggacctttcagaggaccagtcgaagatggagtcgtgtggacgatctctacacactcctcccgagaggcgatagaaacgggagcccaggtggcacagggatgcgcaacacaacttcttctgagagtgttctgaccgacctcagcgaaccagaagtctgtagtattcactccgagagttctggcgggtcagactctaggtcacagccagggcaatgttgtacagacaacccggtgatgctcgatgcacccctcgttagtagctctttgcctcagccaccgagggatgtgcttaaccacccattccatccgaagaacgagaagcctacaagagcgagagcgaagtcttttttgaaaagaatggaaaccttacgtggcaagggggcacacgggcgtcacaaagggagcggacgcacaggtggcctggtgatcagtgggcccatgctccagcaggagcctgaatcctttaaggccatgcagtgcatccagattcctaatggggacctgcagaactcccctcctcccgcctgccggaagggactgccctgttctggcaagtcttccggtgaatctagtccctctgaacacagttctagtggcgtatccactccatgtctgaaagaaagaaaatgtcacgaagcaaacaaacgcggcggcatgtatctggaagatctggacgtgctcgccggcacagctctgcccgatgcaggggatcagtcccggatgcatgagttccacagccaggaaaacctggtagtacacatcccaaaggatcataagcctgggactttccccaaggcactatccattgaatccctgagccctacagacagctccaacggtgttaattggcggactggcagcatctctctggggagggaacaagttcctggcgcacgggagccgcgcctaatggcatcatgtcaccgagcgtccagggtcagtatctatgacaacgtgcccgggtcccacttgtatgcctcaacgggcgacctcctcgacttagaaaaggatgatctgtttccacatctggacgacatcctgcagcacgtgaacgggttgcaggaggtagtagacgactggtccaaagacgtactaccggagctacagactcacgacacgttggtaggagaacctggattatccacatttccctctccaaatcagatcacgctagatttcgaggggaattccgtttcagagggtaggacaaccccctccgacgtagagcgggacgtaacctccctgaatgagagtgaaccacccggcgtgcgggacagacgggacagcggcgtgggagcctccttaacaagacccaacagacgcctgcgttggaacagcttccagctttctcaccagccaaggccggcacctgcttccccccacatttcttctcagactgctagtcaactgagtctactgcagcggttctccctcctgcgcctgacagccattatggagaaacactcaatgtcaaataagcacggttggacctggagcgttcccaagtttatgaagcggatgaaagtgcccgactataaggataaggcagtgtttggcgttcctctcattgtgcatgtccaaaggaccggccagcccctcccccaatccattcagcaagccttgcggtatttgcgcagcaattgcctggatcaagttgggctcttccggaaatctggcgtgaagtcccgcatccacgcgctccggcagatgaacgaaaattttccagagaacgtcaactatgaggatcagtctgcatatgatgtggctgatatggtcaagcagtttttcagagatctgcccgaacctttgtttaccaataagctgtcagaaaccttcctgcacatttatcaatacgtgtctaaggaacagagactgcaggcagttcaggctgccatacttctcctggctgacgaaaatcgggaagtgctacagacattgctctgctttctgaacgacgttgtcaacctcgtggaggagaatcagatgaccccaatgaatctcgccgtgtgcttggcccctagtcttttccacctgaacctcttgaaaaaggagagtagcccgcgtgtaatccagaaaaagtacgccacgggcaagccagaccaaaaggatctcaacgagaacctggcagctgcacaagggctagcccatatgatcatggagtgcgacagattgttcgaggtgccccatgagcttgtggcgcaatcaagaaacagctacgtagaggccgaaatccatgtcccaaccttggaagagctgggaacccagctggaagaatcaggcgcgacctttcacacataccttaaccatttaattcaaggattgcagaaagaggcgaaggagaagttcaaaggctgggtaacatgttccagtaccgataacaccgatcttgcattcaagaaagtcggtgatgggaaccccctgaaactgtggaaagccagcgtggaggtagaggcacctcctagtgtggtgctcaatcgggtgttaagagaaaggcatttatgggacgaggactttgtccagtggaaagtggtcgagaccctggatcggcagaccgagatctaccaatatgtgctgaacagtatggctccccacccctccagggattttgtggtcctgcgcacttggaagacagacctaccaaaaggtatgtgtaccctggtgtccctttcagttgagcatgaggaagcccaactgctgggtggggtgagagccgtcgtgatggattcacagtatttaattgagccctgtgggtcaggcaagagtcgactgactcacatctgtagaatcgatctgaaaggccattcccctgagtggtacagcaaagggtttgggcacctctgcgccgctgaggtagcccgcattcgcaatagcttccaacccctgattgctgaaggtccagagacaaaaatctag

SEQ ID NO: 17524 - DNA, 2064 bp, synthetic construct
  misc_feature 1..2064: note = Description of Artificial Sequence: Synthetic coding sequence
  source 1..2064: mol_type = other DNA
atgctggagccttcaagcgttcttcatgccaatgttaaccaggcccctctctggtgtctcgtgctccgatggtgccgcgaatgcaaggacactgtgtgcggaggcaaacagaagtcccgtgtcaatcatacctttcaacggagagagatcgaggccaaggaggcctgtgactggttgagagccgccggcttcccccaatacgctcagctctatgaggactcccagttcccgattaatattgtggctgtgaagaacgaccacgattttctagagaaggacctggtggagccgctctgccgacgtctgaatactctaaacaagtgtgcctccatgaagttagatgtgaactttcaacgcaagaagggagacgactccgacgaagaggacctatgtatcagtaacaagtggacatttcaaaggacgtcaagacggtggtctagggtggacgacctgtatactttattgccaagaggggatcggaatggctcgccggggggcacaggcatgcgaaacacaaccagcagcgagagtgtactgactgatctgtctgaacctgaagtgtgttccattcatagcgagtccagtgggggttcggattctcggagccagccaggccagtgctgcactgataatcctgtaatgttagatgcaccgctggtgtcctccagcttgcctcaaccgcctagggacgtcctgaatcatccattccaccctaagaacgagaaacctacgagggctcgggctaaaagcttcctcaaacgcatggagacactgagagggaaaggggcccacggcaggcacaaaggcagcgggagaactggagggttggtcatttcgggaccaatgttgcagcaggagccagagtcattcaaggctatgcagtgtatacaaatcccgaacggcgacctccaaaacagtccaccgcccgcatgccgaaaagggttaccctgcagcggcaagtcctcgggagagtctagtccgtccgaacactccagctccggcgtttccactccttgcctgaaggagcgaaagtgtcacgaagccaacaaaagaggcggcatgtacctcgaggacctggacgtgctggcaggcacagctttgccagacgcaggagaccaaagtcgaatgcatgagttccattcgcaggaaaacttggtggtccacatccctaaggatcacaaacctggcacattccccaaggccttgtctatcgaaagcctctcccctacggactcgtcaaacggggtgaactggaggacagggagtatctctcttggccgagagcaggtacccggggcgagagagccgcggctcatggccagctgccatcgcgccagcagggtttctatctacgacaacgtgcccggaagtcatctatatgcctcaaccggtgatctactggatttggagaaagacgatttattccctcacctggacgatatcttgcagcacgtgaacggtctgcaggaggtggtggatgactggtctaaggatgttctgcccgagctgcaaactcatgatacgctggtgggcgagcccggattgtctacatttccctcgccaaaccagatcacgctcgattttgagggaaacagtgttagcgaaggtcggacaacacccagtgacgtggaaagggatgtaacttcccttaacgaatccgagcccccgggcgtgcgggataggagagactcgggcgttggggcaagcctcacaagaccgaaccggagactgcggtggaactcgttccagctgagccaccaaccgcgtcctgctcctgcctcacctcacatctcatcccagaccgcctcccagctctccctgctccagcgtttctccctgctgagactgacagcgattatggaaaagcacagtatgagcaataagcatgggtggacctggtctgtcccgaaattcatgaaacgaatgaaggtcccagactacaaggataaagctgtttttggtgtgcccttgatagttcacgtccaacgcaccggtcagccactgccccagtccatccaacaggcactgagatatctccgcagcaattgcctggatcaggaatag

SEQ ID NO: 17525 - DNA, 2988 bp, synthetic construct
  misc_feature 1..2988: note = Description of Artificial Sequence: Synthetic coding sequence
  source 1..2988: mol_type = other DNA
atgaaactggacgtaaactttcagagaaaaaagggcgacgactctgacgaagaggatctttgcatctccaacaagtggacgtttcagagaacatcccgcaggtggtcacgtgtggatgatctctatacgctgctgccccgtggcgaccggaacggaagccctggaggcactggtatgcgcaatacaacaagcagcgaatcagtgctgactgacctctcggagcccgaggtctgttccatacacagtgagtcgtccgggggatctgattcaagaagtcagccagggcagtgctgtactgacaatccagtcatgctcgatgcgcctctcgtcagcagttccctaccccagccccccagagacgtgctgaatcacccctttcatcccaaaaacgagaagccgacccgtgcgcgggctaagtcttttctcaaacgtatggagaccctacgcgggaaaggagctcacgggcgacataaagggagcgggcggaccggcgggctggtgatttccggtccgatgcttcagcaggaaccagagagttttaaggctatgcagtgtattcagatccctaacggggacctacagaactcgcccccacccgcatgccgcaaaggactgccttgcagtggcaagagctctggggagagttctcctagtgagcatagttctagcggtgtctccacgccctgtctgaaggagaggaagtgtcatgaggccaacaaaagggggggaatgtatctggaggatctggatgtgcttgctggcactgccctgccagacgccggtgatcaatcccggatgcatgaatttcattcacaggagaatctcgtggtgcatattcccaaggatcacaaacctggcaccttcccaaaggcattgtccatcgaaagcctgtctccaaccgatagctcaaatggcgtgaactggcgtaccggatccatatctctgggaagagagcaggtacctggcgcgcgcgagccccggttgatggcttcatgtcaccgggcttcacgtgtgagtatatatgacaacgtcccaggctctcacctctatgcgtccactggtgatctactcgacctggagaaggatgatttgtttcctcacctggacgacatacttcagcacgtgaacggcctccaggaagtggtcgatgactggtctaaggatgtgcttccagagctgcagacccacgatacactggttggggagccgggcctgtccacatttccatcacctaatcaaataacattagacttcgagggtaacagcgtgtctgagggacggaccaccccttcagatgtcgaaagagacgtgacctcactcaacgaatcagaacctcctggggtgagggatcgccgtgactccggcgtcggcgcctctctgactaggcctaaccggcggcttcggtggaactcctttcagctttctcaccagccccgaccagcacccgcctcgccccacatctcctctcagacagcttctcagctgtcactgctgcaacgctttagtctcctccggctgactgccattatggagaaacatagtatgtcaaataaacacgggtggacctggtcagtacctaagtttatgaaaagaatgaaggttccagattataaggacaaggcggttttcggagtgcccttgatagtgcacgtgcagcgcacaggtcagccattaccacagagcatacagcaggcattgcggtatttgaggtctaactgcttggaccaggtgggccttttccgcaaatctggagtcaaaagcaggatccacgctctaagacagatgaatgagaatttccctgagaacgtgaactatgaagatcagtccgcctatgatgtggcagacatggttaaacagttctttagagacctgcctgagcctcttttcacaaataaactgtctgagaccttcttgcatatctaccagtacgtctcaaaggagcagagactgcaggccgtacaggctgccattctcctgctggctgatgaaaatagggaagtgctgcagaccctgttatgctttctaaacgatgtggtcaatttggtggaggaaaaccagatgacgccgatgaatcttgccgtgtgcctggcaccctctttgtttcacctgaatcttctgaagaaagagtcctctccccgggttatccagaagaagtacgccacaggaaagcccgatcagaaggacctgaatgaaaatctggctgctgctcaagggctcgcccacatgattatggagtgtgaccgcttgttcgaggtacctcatgagctcgtggcacaaagcaggaactcttacgtggaggcagagatacacgtgccaaccctagaagagcttggcactcagctggaggaatcaggcgccacctttcatacatacctcaatcatctgattcaaggcctgcagaaggaggcgaaggagaagttcaaaggctgggttacatgcagctcaaccgacaatactgacctggcatttaagaaggtgggggacggtaaccccctgaaactgtggaaagccagcgttgaggtggaggcccctccgagtgtcgtccttaatagagtcctgagggaacgccatctctgggacgaagacttcgtgcagtggaaggtggtggaaaccttggaccgccagacagaaatctaccagtatgtactgaactccatggccccacatcctagccgggactttgtagtgcttagaacgtggaaaacagaccttccaaaggggatgtgcacacttgtgagccttagcgtcgagcatgaggaagctcaactgttgggtggcgtgcgggccgtggttatggacagccaatacttgatcgaaccatgtggttcaggcaagagtcgtctgacccatatctgtcgcattgaccttaagggacacagcccggagtggtatagtaaaggcttcggacatctgtgcgccgctgaggtggcaagaattcgtaacagttttcaacccctcatcgctgaaggaccagagacaaagatctag

SEQ ID NO: 17526 - DNA, 450 bp, synthetic construct
  misc_feature 1..450: note = Description of Artificial Sequence: Synthetic coding sequence
  source 1..450: mol_type = other DNA
atggcgtccagcgacatccaagtgaaggagctggaaaagcgcgccagcggccaggccttcgagttgatcctcagtcctaggtcgaaagaatcggtacctgagttccccctgagcccgccgaagaaaaaagacctgtctctggaagaaattcagaagaagctcgaagccgccgaggaacgccgcaagagtcatgaagccgaagtgctgaagcagctggcggaaaaaagggagcacgagaaggaggtgctccaaaaggcgatcgaagagaacaataacttcagcaagatggccgaggagaagctgacccacaaaatggaggcgaacaaagagaaccgggaagctcaaatggcggcaaagttagaacgcctcagagaaaaagacaagcacatcgaggaggttcgcaaaaacaaggagtccaaggatcctgctgatgagacagaggccgactag

SEQ ID NO: 17527 - DNA, 450 bp, synthetic construct
  misc_feature 1..450: note = Description of Artificial Sequence: Synthetic coding sequence
  source 1..450: mol_type = other DNA
atggcttcttcggacatccaggtgaaagagctggagaaacgggcgtccggccaggccttcgaactgattctgtctccgagatcgaaagagtcggtgcccgaatttccactttcaccgccaaagaagaaggacttgtctttagaagagatccagaaaaagctggaagcggcggaagagcgacggaaatctcacgaggctgaagtcttaaaacagctggccgaaaaaagggagcacgagaaggaagtgctccagaaagccattgaagagaacaataacttttctaagatggctgaagagaaattaacacataaaatggaagcgaataaggagaatagagaggcacagatggccgccaaattggaacgcctaagggaaaaggacaaacatattgaagaggttaggaagaataaggaatccaaggaccccgccgacgagaccgaggcagactag

SEQ ID NO: 17528 - DNA, 450 bp, synthetic construct
  misc_feature 1..450: note = Description of Artificial Sequence: Synthetic coding sequence
  source 1..450: mol_type = other DNA
atggcaagcagtgacatccaggtgaaggagttggagaaaagggccagcggccaggcattcgaactgattctgtctccgcgtagcaaggaatctgtgcctgaatttcctctgagcccccctaagaagaaggacttgagcctagaagagatccaaaaaaagctggaggccgcggaggagcgtcgcaaatcacacgaggcagaggtgttgaaacagcttgccgaaaagcgagagcacgagaaggaggttctccagaaagccatcgaggagaataacaatttctctaaaatggccgaagaaaagcttacacacaagatggaggccaataaagagaaccgtgaggcgcagatggcagcaaagcttgaacggctgcgagagaaggataagcacatcgaagaagtgcgcaagaataaagaaagtaaggatcctgcagatgaaaccgaggctgattag

SEQ ID NO: 17529 - DNA, 525 bp, synthetic construct
  misc_feature 1..525: note = Description of Artificial Sequence: Synthetic coding sequence
  source 1..525: mol_type = other DNA
atggcctctagcgatattcaggtgaaggaactggagaagcgggcatctggtcaggcgttcgagctgatcctgtccccccgcagcaaagaaagtgtgcccgagttcccactgagccctcccaagaagaaggacctgtctctggaggagatacagaagaaactggaggccgcggaagagcggcgcaagtctcacgaagctgaagtgttgaagcagctggccgaaaagagagagcacgagaaagaagtcttgcagaaggctatcgaggaaaacaacaatttctcgaaaatggccgaagaaaaattgacccacaagatggaagcaaacaaagaaaaccgcgaagcccagatggctgccaaactcgagcgcctgcgagagaagatgtacttttggacacatgggcccggggcacacccagctcagatttccgccgagcagtcttgtctccacagcgtccctgctctgtgtcccgcccttggccttcagtccgctctgatcacatggtccgacctatcccaccatcattag

SEQ ID NO: 17530 - DNA, 261 bp, synthetic construct
  misc_feature 1..261: note = Description of Artificial Sequence: Synthetic coding sequence
  source 1..261: mol_type = other DNA
atggcatcatcagatattcaggtaaaagagttagaaaagagagccagtggacaggcttttgagctgatcctcagcccccggtccaaagaatccgtccctgagttccctctgtctccgccaaagaagaaggatttgtcactcgaagagatccaaaaaaagctggaggcagctgaggaacggaggaagagccatgaggcagaagtccttaaacaattggccgaaaaacgagagcacgagaaagaggttctccagaaggcttag

SEQ ID NO: 17531 - DNA, 450 bp, synthetic construct
  misc_feature 1..450: note = Description of Artificial Sequence: Synthetic coding sequence
  source 1..450: mol_type = other DNA
atggcgtcctcagatatacaggttaaggagttggagaagagagcttccggtcaggctttcgaacttatactgtctcccagatctaaagaatccgtgccagagttcccgttgtctccccccaagaaaaaggacctgagcctggaagaaattcagaaaaagttggaggctgccgaggaacggcggaagtcccatgaggccgaggtgcttaaacagctcgcggagaaaagggagcacgagaaggaagttctccagaaagccatagaagaaaataacaatttctccaaaatggccgaggagaagcttacacataagatggaagctaacaaggagaacagagaggcacagatggccgccaaacttgagagacttcgggaaaaggacaagcacatcgaagaagtcaggaaaaataaggagagcaaggatccagccgatgagacagaagcagactag

SEQ ID NO: 17532 - DNA, 3615 bp, synthetic construct
  misc_feature 1..3615: note = Description of Artificial Sequence: Synthetic coding sequence
  source 1..3615: mol_type = other DNA
atgtcatttttcaacttccggaagatatttaaattggggtcagaaaaaaagaaaaagcaatacgaacatgtgaaacgggacctgaaccctgaagatttttgggagatcattggagaactaggggacggggcttttggcaaggtgtacaaggcacagaacaaggagacctccgtcctggccgccgctaaagtgattgacaccaagtccgaggaagagctcgaggattatatggtggaaattgatatcctggcgagctgtgatcacccaaatatcgtcaaactcctggacgccttctactacgaaaataacctgtggattttgatcgagttctgtgccggcggggccgttgacgccgtgatgctggaactggaacgccctctcacagagagccaaatccaggtcgtatgcaaacaaacccttgacgcacttaattatctgcacgacaacaaaattattcacagagacctcaaggccgggaacatcttgtttactctagacggcgatatcaaattggctgactttggcgtctctgccaaaaacactaggaccattcagagaagggacagttttatcgggaccccctattggatggcccctgaagttgtgatgtgcgagacttcgaaagatcggccgtacgactacaaggctgacgtgtggtcccttggcattactttgatcgagatggcagaaatcgagcccccacatcacgagctgaatcccatgagggtactcttaaaaatagcaaagtccgagccccctacacttgctcagccctcgcgatggagttctaatttcaaagacttcctgaagaagtgcctggaaaagaatgtggatgcgcgctggacaacttcccagctgctccaacaccctttcgttaccgttgatagcaacaagcctattcgagagctcattgccgaggctaaggcagaagttaccgaggaggttgaagacggcaaggaggaggatgaggaagaggagacagagaattctctccccatccccgcaagcaaaagagcctcgtctgatctgtccatcgcaagctcagaggaggacaaattatctcaaaacgcctgtattctcgaatccgtatcggaaaaaacagaaaggtcaaattccgaggacaaacttaactccaaaattcttaatgaaaagcccaccactgacgagcccgagaaagccgtcgaagacattaatgaacacattacagatgcccagcttgaggctatgaccgaactgcatgataggacagcagttattaaagagaacgaacgggaaaaacggcccaaattggagaacctaccagacacagaggatcaagaaaccgtggatatcaactctgtgtccgaaggcaaagaaaataatatcatgattaccctggagaccaacattgaacataatctgaagtcggaggaagagaaggatcaggagaagcagcagatgttcgagaacaagcttatcaaatctgaggagataaaggatactattcttcagactgtagacctggtaagtcaggaaactggagagaaggaagcaaacatccaagccgtagactctgaggtcggccttactaaagaggacacacaggagaagctgggggaagatgacaagactcagaaggacgtgatctctaacacatccgacgtgataggaacatgcgaggcagccgatgtagctcagaaggtagacgaagacagcgcagaagacacgcagagcaatgatggcaaagaggtggtcgaagttggacagaagttaattaacaagcccatggtgggtcctgaggccggcggcacaaaggaggtccctatcaaggagattgttgagatgaacgaaattgaggaaggcaagaacaaggagcaagccataaacagttcagagaacatcatggacattaacgaggaacccggcactaccgagggcgaggagatcactgagagttcgtctactgaggaaatggaggtgaggagcgtcgtggctgacaccgatcagaaagctctcgggtctgaagtacaggatgcaagcaaagtgacgacacagattgacaaagagaagaaagaaattccggtgtctatcaaaaaagaacctgaagtgacagtcgtgtctcagcccaccgaacctcagcccgtgctcatcccttcgatcaatataaattccgattcaggcgaaaacaaagaggaaattggtagtttatcaaagacggaaacgatcctccctcctgagtcagagaatccgaaggagaatgacaatgactccggaaccgggagcaccgcagacacctcctcaatcgatcttaacctgagcatcagttcgtttctctccaaaactaaagactcaggatccatctccctgcaggagacccggcgacagaaaaagacactgaaaaaaactcgaaaattcattgtggatggcgtggaagtgagcgtcacaacatctaaaattgtgactgactccgactcaaagacggaggaacttagatttctcaggagacaagaactgagggagcttagatttcttcagaaagaagagcagcgcgcccagcagcagctgaattccaagcttcagcagcagagggagcagatctttagacgcttcgaacaagaaatgatgtcgaaaaagaggcagtatgatcaggagatcgaaaacttggagaagcagcaaaagcaaacgatagaaagactggagcaggagcacacgaataggttaagggacgaagctaagcgcataaaaggcgagcaggaaaaggagttatccaaattccagaatatgctgaagaacagaaaaaaggaggagcaggagttcgtgcagaagcagcagcaggagctggacggaagtctaaagaaaattattcagcagcagaaagcagaactagcaaatattgaaagagagtgtcttaacaataagcagcagcttatgcgcgctagagaagctgcaatctgggagctggaggagcgacacctccaagagaaacaccagctcttaaagcagcaactaaaggaccagtatttcatgcaacgccatcagctgttgaaaaggcacgagaaggagacggagcaaatgcagaggtataatcagcgtctgattgaggaattgaagaaccgtcagacgcaggaacgggcacgtcttccaaagatccagcggagcgaggcgaaaacacggatggctatgtttaaaaaaagcctaaggattaacagcaccgccacccctgaccaggatagagacaagataaagcagtttgcagcacaagaggaaaaacgccaaaaaaacgagagaatggcccagcaccagaaacacgagaatcagatgagggacctccaactgcaatgcgaagcaaatgtgcgcgagctccatcaattgcagaacgagaagtgccacctcctcgtggagcacgagactcagaaactgaaggagcttgatgaagagcacagtcaagagttgaaagagtggcgcgaaaaactgcggcccaggaagaaaaccctggaggaggaattcgcccgaaaacttcaggagcaggaggttttctttaaaatgactggagagtctgagtgccttaatccgtccactcagagcagaatttccaaattttacccaatccccagcctgcattccacgggctcctag

SEQ ID NO: 17533 - DNA, 3708 bp, synthetic construct
  misc_feature 1..3708: note = Description of Artificial Sequence: Synthetic coding sequence
  source 1..3708: mol_type = other DNA
atgtctttctttaatttcagaaaaatcttcaagctgggctccgagaagaagaagaagcaatatgaacatgtcaagagagatcttaaccctgaggacttttgggagataatcggcgaactgggcgatggggcctttggcaaagtttataaggcgcagaataaggagacatccgtgcttgctgccgccaaggtaatagacactaagtccgaggaggagttggaggactatatggttgagatcgatatccttgcctcttgtgatcatccaaatatagtgaagctgctggacgcattctattatgaaaataatctttggatcctgattgagttttgcgctggcggagctgtcgacgcggtcatgctcgaacttgagcgcccgctgacagaatcacaaattcaggtggtctgcaaacagacgctcgacgcgctgaattacctgcatgacaataaaattattcaccgcgacctgaaagccgggaacatactgtttaccctcgacggcgacatcaagctcgccgacttcggcgtgtctgctaagaatactagaaccattcagcgtagggattctttcattgggaccccctactggatggcccccgaggtcgtcatgtgtgagacttccaaggatcggccttatgattacaaagcggatgtttggtcgctggggattaccctgattgagatggccgagatcgagcctccccaccacgagttgaatcccatgcgcgtcctgctcaaaatcgcaaagagtgagcctccaacactcgcccaacccagccggtggtcgagtaacttcaaggactttcttaagaagtgtttggagaaaaatgtggatgcccgctggacaacaagtcaattgttacagcatccctttgttactgtggattctaacaagcctataagagaactcattgcagaggccaaagctgaggtgaccgaggaagtggaggacggtaaggaggaagacgaggaggaagaaacagaaaactctctgcccattcctgcctctaagagagcatccagtgatttatctatcgccagttctgaggaagacaaactgtcccaaaacgcctgcatcttggagagtgtctccgagaagactgagcgctctaactccgaggacaagttgaattctaaaatcctcaatgaaaaaccaactactgatgagcccgagaaggcagtcgaagacatcaatgagcatataacggatgcccagttggaggccatgactgaactgcatgatcggaccgccgtaataaaagagaatgaaagagagaagcgcccaaaattggagaacctccccgacactgaagaccaggaaacagtggacatcaatagcgtgtctgagggaaaggagaataacattatgataaccctggaaactaatatcgaacacaatctgaagagtgaagaagaaaaagaccaggagaaacagcagatgtttgagaacaagctgataaaatccgaagagatcaaggataccatcctgcagaccgtggatctggtctctcaggagaccggagaaaaggaggcaaacattcaggccgtggactccgaggtagggttgacgaaggaagacactcaggagaagctgggcgaagacgataagacccaaaaagatgtgatttccaatacaagtgacgtgatagggacatgtgaggcggcggacgtcgcccaaaaagtggacgaggattctgccgaggacacccagtccaatgacggcaaggaggtggtggaagtcgggcagaagctgataaataaacccatggtcgggccagaggctggaggcacaaaggaagtgccgatcaaagagatcgtagagatgaacgagatagaggaaggcaaaaacaaagagcaggccattaacagcagcgagaacatcatggacatcaacgaggaaccggggacaacagaaggtgaagagatcactgagagctcgtctacagaggagatggaagtccgaagcgtcgtagcggacacagatcagaaggcactcgggtcagaggtgcaggatgcatccaaggtgactactcagatagataaagaaaagaaggagattccagtgagcataaagaaggaaccggaagttacagtggtgtcacagcccaccgagccccagccggtgctaattccatcgatcaatattaactctgacagcggggaaaataaagaggagatcgggtccttgagcaagaccgagactattctaccacccgagtccgagaatcccaaagaaaatgataacgactctggtactggctcaaccgctgacacctcatctatcgatctaaacttaagtatctcatccttcctaagcaaaacaaaagattcaggtagcattagtctccaggagacgcgtaggcagaagaagaccctaaaaaagacccgaaagttcattgtcgacggcgtcgaagtttcggtaacaaccagtaaaatcgtaaccgactctgattccaaaacagaagagctaaggtttcttagacggcaagaacttagggagctgcggttccttcagaaggaggagcaacgcgcccagcagcagcttaattctaagttacagcagcagcgggaacagatcttccggcgttttgaacaggagatgatgtcaaagaagagacagtacgaccaggagatcgaaaatctggaaaagcagcagaagcaaaccatcgagcggctggagcaggagcacaccaatagattgcgcgacgaggccaaaaggatcaagggagagcaggagaaagaactgagtaaatttcaaaatatgctcaaaaaccgcaaaaaggaggtaattaatgaggtggagaaggcgcccaaggagcttaggaaagagttaatgaaacggcgaaaagaagaactggcccagagccagcacgctcaagagcaggagtttgttcagaagcagcagcaggaacttgatggaagcctgaagaaaatcatacaacaacagaaggccgagttagctaatatagagagagaatgtcttaataacaaacagcaactcatgagggcacgggaagctgctatctgggagctcgaagagaggcatttgcaggaaaaacatcagcttctgaagcagcaactgaaggaccagtacttcatgcaaaggcaccaattgctgaagcgccatgaaaaagagacagaacagatgcagaggtacaatcaacgactcatcgaagagttgaagaatcgccagacgcaagaacgggctcggttgcccaaaatccagcgatctgaggctaaaactcgcatggccatgttcaagaaaagcctcaggataaactccaccgcaaccccggaccaggacagagacaagatcaagcagttcgcggcccaggaagaaaagcggcagaaaaatgaacggatggcacagcaccagaagcacgagaaccaaatgcgggatctgcaattacagtgcgaggctaacgtgcgggagcttcaccaattacaaaatgaaaaatgccatctgctcgtcgagcatgagacccagaagcttaaggaattggatgaggagcactcgcaggaacttaaggaatggagagagaaactccgtccccggaagaagacgctcgaggaagagttcgccaggaaactgcaggagcaagaggttttctttaaaatgacaggagagtccgagtgcctgaacccctccacgcaatcccgaatctcgaagttttatccaatcccctcactccactccaccggatcctag

SEQ ID NO: 17534 - DNA, 3444 bp, synthetic construct
  misc_feature 1..3444: note = Description of Artificial Sequence: Synthetic coding sequence
  source 1..3444: mol_type = other DNA
atggacgaacccccgttttccgaggctgctctagaacaggcactgggcgaaccatgcgacctggatgccgcgctcctcacagacattgaggacatgctgcaactgatcaataatcaggactcagacttcccgggcctgtttgatccgccatatgcggggagcggagcaggcggaaccgatccggcctctcctgatacttcgtcccccggatccctgtccccccccccagcaaccctgagctcctccctggaagccttcctttcaggacctcaggccgccccaagccccctgagcccccctcagccggcacctaccccactgaagatgtacccctccatgcctgccttctcccccgggccgggaatcaaagaagaatcagtaccattgtctatattacagacacccactcctcagcctttgccaggcgctttactccctcagtccttccctgccccagccccaccgcagttttctagcactcccgtgcttgggtacccctctccacccgggggcttttctaccgggtcccctcccggaaatacacagcagccgctcccaggcctccctctcgccagtccccctggagtcccccctgtgagcctgcacacgcaggtgcagagcgtcgtcccccagcagcttctcaccgtgacagccgctcctaccgccgccccggtgacaacgaccgtgaccagtcagattcagcaggtaccagttctgttgcagccccactttataaaggccgactcccttcttctcaccgccatgaagaccgatggcgccacagttaaagcagcaggcctcagtccactggtatcagggactactgtacaaacagggcccttgccaactctcgtaagcggcgggaccattttggcgacagttcctctcgtggttgacgccgagaaactgcccatcaatcggttagcagccggttcaaaggcccctgcatcagcacagagtcgcggagaaaagaggaccgcacacaatgctattgagaaaagatataggagctcaatcaacgataaaattattgaactgaaggatttagtggtgggcaccgaggcaaagctgaataagtccgccgtgttgaggaaggccattgattacatcagatttttacagcattcaaaccagaaactgaagcaggaaaacctttctttgaggacagccgtgcataagagcaagagcctgaaagacctagtcagtgcctgcggtagcggcggaaacacagacgtcctgatggaaggagttaagacggaggtagaagacacgctgacacctccaccctcagatgcggggtcgcctttccagtcctccccactatccctggggtcaagaggctccggcagtggaggctctgggagcgatagcgaaccagattcccccgtgttcgaggattccaaagctaagcctgagcagcggccttcactccactcccggggaatgctggaccgcagcaggctagctctctgtacacttgtttttctgtgtttatcttgcaatccattggcgtcccttctcggagcacgtggtcttccctcgcctagcgacactacatccgtttatcactcccccggacgaaatgtgcttggtacagaatcccgcgatggtcccgggtgggcccagtggctcttgcctcccgtcgtttggctgcttaacgggcttctggttctcgtgagcctcgtgctgttgttcgtatatggtgaaccagtcacacggccgcacagcggccctgccgtttacttctggcgccatcgcaagcaggccgatttggacctggcaaggggggatttcgcacaggccgcacagcagctctggctcgctttaagagctttgggacgccctctgccgaccagtcatctggacctggcttgtagtctgttatggaacctgataaggcacttgctccagaggctgtgggttggacgctggctggccgggagagctggtggcctgcagcaggactgcgccctgagagtggatgccagcgcctctgcccgcgacgctgctttggtgtaccacaagttgcaccagctccacactatggggaagcacactggcgggcacctgactgctacgaatctagcactctccgccctgaatctcgctgaatgtgcgggagatgctgtttccgtcgccactctggcggagatctatgtcgccgccgccctccgagtgaaaacttccctgcccagggcacttcactttctcacacgcttttttctctccagtgcgagacaggcttgtctagctcagtcaggaagtgtcccaccagcaatgcagtggctgtgtcatcccgtgggtcaccgattctttgtggatggggattggtctgtcctaagcacaccgtgggaatccctgtattccttggctggaaaccctgtggaccctttggcccaggtgacccagctcttcagggaacacctgcttgagagagcattgaactgcgtgacacagcctaatccctccccaggatctgccgatggagacaaagaattcagcgatgcactgggttatcttcagctgctgaattcttgcagcgacgcggctggggcaccagcatacagtttcagcatttccagctcaatggcaaccactaccggggtggatcctgtcgccaagtggtgggcttctttgacagcggttgtgattcattggctgcggagagatgaagaggcagcagaaagactctgtccccttgtggagcacctacccagagtcctgcaagagtcagagcggcccctccctcgggccgcgctgcacagcttcaaagccgcccgcgccttactgggatgtgccaaggcagagtcggggcctgcctcactgaccatatgcgagaaagctagtggatatctccaggattcactggccactactcccgcgtcatccagtatcgacaaagccgttcagctgtttctttgcgatctgctcctggttgtccgcactagcctgtggaggcagcagcagccccctgcgcctgcccccgcagctcagggcacctctagtcgaccacaggcctctgccctcgaactcagaggattccagcgggacttgagcagcctccggcgattagcacagtcatttaggcctgccatgcggcgggtcttcctccacgaagccaccgccaggcttatggctggcgcttctcccacaaggacacaccagttgttagaccgaagtcttcgtcggagagcaggtccaggcggtaaaggaggggccgttgcagagctagaaccacggcccacacgtcgcgagcacgctgaggctctactgttggcttcatgctatctgccccctgggttcctaagcgcccctggacagagagttgggatgctcgcagaggccgcgagaaccctggaaaagcttggtgatcggagactgcttcacgattgtcagcaaatgctcatgagactgggcggagggaccacagtaacttcatcctag

SEQ ID NO: 17535 - DNA, 3216 bp, synthetic construct
  misc_feature 1..3216: note = Description of Artificial Sequence: Synthetic coding sequence
  source 1..3216: mol_type = other DNA
atggacgagccccccttttcagaagccgccttggaacaggccctgggagaaccgtgtgacctggacgccgccctgctgactgacattgaggacatgctccagctgataaacaatcaagattccgactttccgggtctctttgaccctccatatgcggggagcggagcaggcggcaccgatcctgcttcgccggatacgagctctcctggatccttgagtccacctcccgccacactgtcatcctccctcgaggcctttctaagtggaccccaggctgcccccagtcctctctcccccccccagcccgccccaacgccattaaaaatgtacccctctatgccagcttttagcccaggacccgggattaaagaggagtccgtaccactcagcatcctccagacacctacaccacagccattgcctggcgcactcctcccgcagtcgtttccggcccctgcccccccacaattttcttcaacaccagtcctgggctatccctcgccaccaggaggattctctacaggatccccacctggtaacacacagcagcccctaccagggctgcctcttgcttcgccgccgggggtgccacccgtatccttacacacccaggtccagagcgttgtccctcagcagctgctgactgtcacagccgctcctacagccgctcccgtgactacaacagtgactagtcagatccagcaggttcctgtactgctgcagcctcacttcattaaggctgactcgctgctgttgacagcgatgaagacagatggagcaaccgtgaaagctgctggcctgagcccacttgtttcagggacaactgtgcaaaccgggcccctccccacactggtcagtgggggcacaatactggccaccgtgcccttagtggtggacgccgagaaattgcccattaacagactggctgccgggagtaaggcccctgcatcagcgcaaagccggggcgagaagcggactgctcataacgccattgaaaaaagatatagaagctctatcaatgataaaattatcgagctgaaagacctggtggtcggaaccgaggccaagctgaataaaagcgccgtgctgaggaaggctattgattacattcgcttcttacagcattctaatcaaaaactaaaacaggagaacctttccttacgtacagccgtccacaagtcaaagtccctgaaagacctggtgtccgcctgcggcagtggaggaaatacagacgtacttatggagggagtgaaaacagaggtggaagataccctaactccgcccccctcggatgccggttcaccctttcagtcgagccccctaagccttggaagccggggtagtggttccggaggaagcggatccgatagtgaaccggattctcctgtgtttgaggattcgaaggcaaaacctgagcagcggccgtcgctgcattcacgaggcatgctcgacagatctagactggcactgtgtaccctggtcttcctatgcctaagctgtaacccattggctagcctgcttggtgctcgagggctgccaagtccctcagacaccaccagcgtgtatcattccccaggtcggaatgtactggggaccgagtccagagacggccctggctgggctcagtggctactgccacccgtcgtgtggctcctgaatggattgcttgtgctcgtttccctagtcctgctttttgtctatggtgaaccggtaacccgacctcactccggaccagccgtgtacttctggagacataggaagcaggccgacttagatctcgcccgcggtgattttgctcaagcggcccagcagttgtggctggctctacgggccctcgggcgaccccttcccactagccacctggatctggcgtgttccttactgtggaatctgattcgccacctccttcagaggttgtgggttggaagatggctcgctggcagagccggcggcctccaacaggattgtgctctgcgggtggatgctagcgcatctgccagggatgcagctctggtgtaccataagttacaccagctgcataccatgggcaaacacaccggtgggcacctcacagcaactaaccttgcgttgtccgctctcaatcttgctgaatgcgcgggagatgcggtctccgtagctactctggcagagatctacgttgcggctgcactcagggtgaagaccagtctgccccgggcactgcatttcctcacccggttcttcctctcctcagctaggcaggcatgtctggcccagtctggaagcgttccacccgctatgcagtggctctgtcatccagtaggccacaggttctttgtcgacggtgactggtcagtgctctcaacaccatgggagtcgctgtattctctcgcaggtaaccccgtggacccgctggcacaagtgacccagctattcagagagcatcttctcgagagagccttaaactgcgtgactcagcccaacccaagccccggctcagcagatggtgacaaggagttcagcgacgcacttggatatctgcagcttctcaacagttgttccgatgctgccggagcccctgcctactccttctctatttccagctccatggccaccaccaccggtgttgacccagtagctaaatggtgggcgagcctgacagccgttgtgattcattggcttcgcagagatgaagaggctgctgaaaggctgtgtcccctcgttgagcatttacctcgggttcttcaagagagtgagagaccactgccccgcgcagctctgcacagctttaaagcagctcgagccctcctgggctgtgcgaaggcagaaagcgggcccgcttcactgaccatatgcgaaaaggcaagtggttatctgcaggattcgctggctaccacacccgcttctagcagtattgacaaggccgttcaactgttcctatgtgacctcctcctggtcgtgcgtacgagtttatggagacaacagcagcctcccgccccagcgcccgcagctcagggaacaagtagcagaccacaggcgtctgctctagaactgaggggctttcaacgcgatctgagctccctgcgtcgcctcgcccagagcttcaggcccgccatgagacggctcatggacgttctgacaagtgagtcagcgtgggccctgccacaacacctcgggaaggggtttccatccccctctggccacaaggtgccgggctggcatggccgaatggattag

SEQ ID NO: 17536 - DNA, 3534 bp, synthetic construct
  misc_feature 1..3534: note = Description of Artificial Sequence: Synthetic coding sequence
  source 1..3534: mol_type = other DNA
atggacgaaccccccttctctgaggcagctctcgaacaggcactgggtgaaccatgtgacctggatgcggcccttctcactgacatcgagggcgaagtgggagctggcagaggccgtgccaatggactggacgcaccgcgggccggcgccgataggggtgcaatggattgcactttcgaggacatgctgcaactgattaataaccaggattccgattttcccggcctctttgaccccccctacgcgggttctggtgctgggggcacagacccggcttcacccgacacctccagcccaggatctctgtctccaccccccgccacgctctcctcctctctagaagcctttctaagcggacctcaggcggcgccaagcccactctctcctcctcagcccgcccctacacctctgaaaatgtaccccagcatgcccgccttctcccctggcccaggcattaaggaggagtccgtgccacttagtattcttcagacgcccaccccccagccattgccaggagctctgctccctcagagctttcctgcgcccgcgccaccccagttttcgtcaaccccggtgcttggctacccttccccacctggtggttttagtacgggtagccctccagggaacacacagcagccactgcccggtttgcccctcgcctcacctccgggcgtcccccctgtcagcctgcacacccaggttcaatctgtggtgccgcagcagcttctcaccgttaccgctgcaccgacggctgctccggtgacaaccacagtcacgtcccagatccaacaagtgcctgtcttattgcaaccccatttcatcaaggctgattccctcctgctgactgcgatgaagactgatggtgccacagtgaaggctgctggactgtcacccctagtatccggtacaacggtgcagacaggcccactgccaacattggtgtccggaggcacaatcttggccaccgttcccctggtcgtcgacgccgagaagttacccataaatcgtttagcggctggatctaaggccccagcgtccgcccaaagtagaggtgagaaaaggacagcccacaatgcaatagaaaaacgctacaggagctcaattaacgacaagatcatcgaactcaaggacctcgtcgtggggaccgaggccaagctgaacaagtccgccgtactaagaaaggccatcgactacatccgcttcttacagcatagcaaccaaaaattaaaacaggaaaacctttcattacgtacggccgtgcacaagtctaagtctctgaaggatctcgtgagcgcctgcgggtcgggaggcaacaccgacgtgctgatggagggcgtgaagactgaggttgaggacacactcacacctcccccttcggatgcgggcagcccatttcagagctcccctctctccctaggaagtcgtgggtctgggagtggggggtctggctctgactctgagccagattcaccagtgtttgaggattccaaagccaaacccgagcagaggccctccctgcactctagaggtatgttagaccggtctcggttggcactctgcacactagtgtttctgtgtttaagctgtaatcccttagccagcctactcggcgcacgcggactgccaagtccatccgacactaccagcgtgtatcactctcccggccgcaacgtacttggaactgagtcaagagacggtccagggtgggctcagtggcttttgccaccagtggtgtggctccttaatggccttctagtgctagtatcactcgttctgcttttcgtctatggcgagcccgtcacacgccctcatagcggccctgctgtatatttttggcgccacagaaagcaggcggatctagacctggcccgcggtgactttgcacaggctgctcaacaattgtggcttgctctgcgggccttggggagacctctaccaacgagccacctcgatttggcatgctctctgctgtggaatttgattcgtcatttgctccagcggttatgggtcgggaggtggctggccggccgcgctggagggctgcaacaggattgcgcactaagggtcgacgcatccgccagcgcacgcgacgctgcattagtgtaccataaactgcaccagctgcacaccatggggaaacataccgggggtcatctgactgctactaacttagctctttcagccctgaacctggccgagtgcgccggagacgccgtctccgtggccaccctggcggagatctacgtcgccgccgctctgagggttaagacttcactccctcgtgctctgcactttctgactcggtttttcctgtcttcggcacggcaggcttgcctcgctcagtcgggttctgttcctccagcaatgcaatggttgtgccacccagtggggcatcgcttcttcgtcgatggagattggtcagtactgagcaccccatgggaaagtctgtattctctggcgggcaacccagttgatccactggcccaggtcacccagttattccgggagcatctcctggagcgcgcactgaactgtgtcactcagcctaacccaagccctggttccgccgatggcgataaagaattttctgatgccttgggctacctccagctgcttaatagttgctcagacgctgctggagccccagcgtactctttttcaatttcctcttccatggcaacaacaactggtgttgacccagtggccaagtggtgggcatcgctaacggccgtggtcatacattggcttaggagagacgaagaggccgccgaaaggttgtgccccctcgtggagcacttgcctcgggtgctgcaggaaagtgaaagaccgctgcccagagctgcacttcactcattcaaggccgcaagggccctcctgggatgcgccaaggcggagtcaggtcctgcctcattaactatctgcgaaaaagcctctggttatctgcaggactcactggccacgactcctgcctctagctcaatcgacaaagcagtgcagctgtttctatgcgacctgcttttagtggtaagaacctctctgtggcgccagcagcagccgccagcacccgcccccgccgcccaggggacctctagccgcccccaggcctcagccttagagttgcgcggtttccaaagggatctgtcttccctgcgaagactagcacagtcgttccgtcctgcaatgagacgggtatttctgcatgaagcaacggctcggctgatggccggggcctctccgactcgtactcatcagctgctggatcgatccttacgtcgaagagccggtcctggaggcaaagggggtgccgtggccgagctggagccaaggcccaccaggagggaacacgccgaggccctcctgctggccagctgctacctcccgcccggattcctttctgctcccggtcagcgtgtgggtatgcttgcagaggcagccagaactcttgaaaaactcggcgaccggcgtctcctccatgattgccaacagatgcttatgcggttaggtggagggaccaccgtcacatctagctag

SEQ ID NO: 17537 - DNA, 3468 bp, synthetic construct
  misc_feature 1..3468: note = Description of Artificial Sequence: Synthetic coding sequence
  source 1..3468: mol_type = other DNA
tgaaagatacgaagggcactcacaggggaagtgggagcaggccgtggacgggccaatggtctagatgctccaagggcgggtgccgataggggcgctatggactgcacgtttgaggatatgctgcagctcatcaataaccaggacagcgactttcctggacttttcgatcccccctacgcaggctccggggccggggggacggatccggctagtcctgacacttcgtcccctggttcattaagccctccacccgcaacactaagttcatcactggaggcctttctgtctggaccccaggccgccccctccccactgtctcctccacagccagctccaacccccctgaaaatgtacccatctatgccggcgttttcaccaggtccggggatcaaagaggagagcgtgccactttcaatcctgcagactcctaccccccagcctttgcctggcgctctcctgccccagagcttccccgctcctgcgccaccccaattcagttcaactcccgttttaggatatcccagtccccccggaggcttctctacagggtccccccctggtaacactcagcagccactgccaggcctgccccttgcatccccacccggggttcctcccgtttcactccatacccaggtccagagcgtcgtgcctcagcagctgctgaccgtgacagccgcaccgacagccgcacccgtgaccactactgtgacaagtcaaattcagcaggtcccagtgctgctgcagccgcacttcattaaggcagactctctgttactcactgccatgaagaccgacggcgcaacggtcaaagctgctggtctgtcaccccttgtctcaggcacaacggttcaaaccggccctctgcccaccctggtatcaggcgggacaatcctagcgacagtgccgcttgtggtcgatgcagaaaaattacccatcaaccgactggcggccggctccaaagcccccgctagtgcacagagtagaggggaaaagcggactgcgcacaacgcaatcgagaaaagataccggagtagcattaacgacaaaatcattgagctgaaggacctcgtggtgggcactgaggctaaactgaataaatctgctgtgctgaggaaggccatcgactacattcgcttcctgcagcatagcaaccagaagctcaagcaggagaatctatccttgcggacggcagtccacaaatccaaatccctgaaagacctggtgagcgcttgtggatccggaggcaacactgacgttctaatggagggagtcaaaacagaagtggaagatactcttaccccccctcccagcgacgcgggctctcccttccagagttcaccgttgagtctgggctcccggggctcagggtctggcgggtctggaagtgatagcgaacctgactcccccgttttcgaggactccaaggctaaacccgaacagcgcccatccctgcacagcaggggaatgcttgatagaagccgcctggccctgtgtactctcgtcttcctgtgtctctcgtgtaatcctctggcaagcctgctgggagcacgaggcctgccttcaccgtccgacacaacgagtgtttaccactcgcctggccgaaacgtgctggggacggagtcaagggacggtcccggatgggcacaatggttgctgcctcctgtcgtatggctgctcaatggcttgctggtgctcgtgagcctggtgctgctttttgtgtacggagagcccgtgacacggccacattctgggccagcagtgtatttttggaggcacaggaagcaggccgacctcgaccttgcacgcggagattttgcccaagccgcgcaacagctctggttggctttgagggctcttggaagacctctgccaacttcgcacctggatctagcctgctccctcctgtggaatctgatcaggcacttgttgcagcggctttgggtcggaaggtggctcgctggcagagccggcggactgcaacaggattgtgcgttgagagtcgatgcgtcagcttctgctagagatgccgcactggtgtatcacaagctacatcagttgcacacaatggggaagcacacaggggggcacctgactgccacaaacttggccttatcagcactcaatttagccgagtgcgctggggacgcagtctcagtagccacactggccgagatttacgtcgctgcagcgctgagggtgaaaacaagcctgcccagagcattacactttctgacacgattcttcctgtcctccgcacgtcaggcctgcctcgctcaatcaggcagcgttcctcccgccatgcaatggctctgccaccctgtcggacacaggttttttgtggacggagactggtcagttttatcgacaccctgggaatcactgtactccctggctggtaatccagtggaccctctcgctcaggtgactcagctcttccgggagcacttgcttgagagagcactcaattgcgttactcagcccaacccatcaccaggatcggctgacggcgataaagagttctccgatgccctgggatacctgcaactgttgaactcctgctctgatgccgctggcgcgcctgcctacagcttctccatcagttcatctatggccaccactacgggcgtcgatccagttgcaaagtggtgggctagcttaactgcagtcgtgatccactggttgcggcgagatgaggaggccgcggagagattatgtcccctggtcgagcatctgcctcgtgttctgcaggagtccgaaagacctttgcccagagccgccctgcactcctttaaggctgcccgggccctgctcggttgcgccaaagctgagtcaggcccggctagtctgacaatatgcgaaaaggcgagcggttacctccaggattcactggcgacaacaccagctagctcttctatcgataaggctgtgcagctgtttctgtgcgacttgttgctggtcgtcaggacgagcctttggaggcagcagcagcccccggcgcccgctcctgccgcacagggaacttcctcacggcctcaggccagcgctttggaactgcggggattccagcgggacctgtcatcactgcgcagactcgctcagagtttccggcccgcgatgagaagggtgttcctacatgaagccaccgcccgcttgatggccggggcatctccaacacgaacacatcagttacttgataggagcctgcgccgcagggccggccccggagggaagggtggcgcagtcgccgaactcgagccccgccccactcgccgcgagcatgccgaggctctgctgctggcatcttgctatcttccccctggatttctatctgctcctggccagcgtgtgggaatgctagccgaggctgcacgcacactcgaaaagctgggcgaccgtcgcctgctccacgattgtcagcagatgttgatgcgtctcgggggagggaccacagtgacctccagctag

SEQ ID NO: 17538 - DNA, 2301 bp, synthetic construct
  misc_feature 1..2301: note = Description of Artificial Sequence: Synthetic coding sequence
  source 1..2301: mol_type = other DNA
atgttggcccatctgtcgcgtgctgccccctgcccgttggcggccggagctgtcgcggccgtggccgtggccgtgactaggtcactcacagcccagtccctacgaacggcacgactcggccctgcaacagtccccccctctcctctgccagcaatctcctctgaacctcatgatagagctggcaagacactgaccgatcccacaagtcatttcatagacaggatcaccgaagcatggtcacatgttgggtcgcattcaaaagcaaagcctgaacaaaggccaagtctgcattcaaggggaatgctggatcggagtcggcttgcattatgcaccctggtttttctgtgcctgtcctgcaatcctcttgccagtctgttaggagcccgcggacttccttccccttctgacaccacatctgtgtatcactctcccggtcggaatgtcctgggaaccgaaagtagagatggccctggttgggcccagtggctgcttcccccagtggtctggcttttgaatggcctcctcgtgttggtttctttggtcttactttttgtttacggggagcctgtgacacgcccgcacagtggccccgcagtttatttctggcgccatagaaagcaggcagacctcgacttagccaggggcgattttgcccaggctgcgcaacagctttggctggctctgagagcactggggagacctctgccaactagtcacctggatctggcttgctccctcctttggaacctcatccggcaccttttgcagcgcctgtgggtcggtcgatggctggctggccgcgctggtggactgcagcaagattgcgcgctccgggtcgatgcctcagctagcgcccgcgacgctgctctcgtctaccataagctccatcagctgcacacaatggggaagcacaccgggggccacctgacagctacaaacttggcacttagcgctttaaatctggctgaatgcgccggagacgctgtaagcgtagcgaccctggctgaaatctatgtggcagctgcgttacgagtgaagacatcactgccccgtgcacttcatttccttactagattttttctctcctccgctcgtcaagcttgtttagcccaatccgggagcgtgcccccagcaatgcagtggctctgccaccctgtgggccatcgattcttcgtggacggggactggtctgttctaagcacaccatgggaatcactgtatagcttggctggtaaccccgtggatcccctggctcaagtgacccagctcttccgggagcatttattggaaagagctctcaactgcgttacccagcccaatccgtcccctggctccgcagacggggacaaagaatttagtgatgccctggggtacctgcaactactcaacagctgctctgatgctgccggagctcccgcctatagcttctccatttctagctccatggccacaactacgggtgtggatccggttgctaaatggtgggcttcactgacggccgtggtgatccactggcttcgccgcgacgaggaagccgcagagcgtctgtgtcccctggttgaacacctgccgagggtcctccaggagtctgagcggccccttcccagggcagcactccacagtttcaaggctgccagggccctactggggtgtgcaaaggcagaatctgggccagcgagcctgaccatctgtgaaaaagcgtctggctatctccaagacagtcttgctaccaccccggcctcatcttctattgacaaagccgtccagttattcctgtgtgacctgctgctggttgtgagaacaagcttgtggcggcaacaacagccgcctgccccggctccggccgcacagggcacatcgagcaggccacaggcctcggctcttgagttaagaggttttcagagggacctttcaagtcttagaaggctcgctcagagtttccgaccggctatgaggagagtctttttgcatgaggctacagccagacttatggctggcgccagccctactcgcacacatcagctgctggatcgatctctccggcgaagagccgggccaggcggcaagggaggagccgtcgccgagctagagccccgacccacacgacgggagcatgccgaggcactgctattggctagttgctacttgcctcccggatttctttcagcccccggtcaacgtgttggtatgctcgccgaagccgcccgaaccctagagaagttgggggatcgacggctcctgcacgactgtcagcagatgctgatgagactgggagggggaactaccgtgacttcatcctag

SEQ ID NO: 17539 - DNA, 2682 bp, synthetic construct
  misc_feature 1..2682: note = Description of Artificial Sequence: Synthetic coding sequence
  source 1..2682: mol_type = other DNA
atgaaaacagatggagccacagtcaaggccgcgggcttatcacctctagtttccgggaccacagttcagactggacccctccctactttggtgagcggagggactatcctggctacagtccccttagtggtggacgcggagaagttaccaatcaataggctcgcagcaggaagtaaagctcctgcctccgctcagagccgaggcgaaaaaaggacagcacacaacgcaatcgagaagcggtatcggtcttctatcaatgacaagatcatcgagcttaaagatttggtggtgggtacagaagccaaactcaataaatcggcggtgctccgaaaagctatagattacattcggttcctccagcacagcaatcagaaactcaagcaagaaaatctgtccctgagaacagctgttcataagagcaaatccttaaaggatctggtgtcggcgtgtggttctgggggtaataccgatgtgttaatggagggagtgaagacagaggtcgaggacacacttaccccgccaccatctgacgccggatctcccttccaatcctctcccttgtcacttggctcccgggggagcggtagtggagggagcggctctgactcagagcccgactcccccgtttttgaagacagtaaggctaaacctgagcagagacctagtcttcattcgcgtggtatgttggaccgcagccgcttagcgctctgtactttagtttttctctgcctttcttgcaatccgctggcctctctcctgggtgccaggggcctgcccagcccatccgatacgacttccgtctaccactctccaggaagaaatgtgttaggcactgagagtagagacggcccagggtgggctcagtggctgcttcccccagttgtctggctgctaaatggcttgcttgtcctcgtctccctggtgctcctctttgtctacggcgaacctgtcactcgtcctcattccgggccggctgtttacttctggcggcaccgtaagcaagctgaccttgacctagctcggggtgacttcgcccaggctgcccagcagttgtggctggcccttcgcgccctaggacgacctctcccgacatcccacttggacttagcgtgttcactgctgtggaatcttatccgtcatctgcttcagcgcttatgggtgggccgctggctggctggccgagcgggcggcctgcaacaggattgcgcccttagagttgacgcctcggccagtgcccgagatgccgccctggtctaccacaagctgcatcaattgcacacaatgggtaagcacacaggtggacatctgacggccacgaatctggctctctctgcactgaacctcgccgagtgcgcaggagatgccgtttctgtggccacactcgccgagatctatgttgcagccgccctgagagtaaagaccagcctgccacgcgccctgcactttctgacccggttctttctgagtagtgctagacaggcatgtctggctcagagcggatcagtaccaccggcaatgcagtggttatgtcaccccgtggggcatcgctttttcgtcgacggcgattggagcgtgctcagcacgccctgggaaagcttatatagcctggcgggaaaccccgtggatcctctggcacaggtgacccagctctttagagagcacctgctggaaagagcgttaaattgtgtgactcagcctaacccatcccctggatcagctgacggcgataaggagtttagcgatgcactcggatacctgcagcttctgaattcatgctccgatgctgccggggcccccgcctacagcttctctatctcttcctctatggctacaactaccggcgtggaccccgtcgctaaatggtgggcctcacttacagccgtcgttatacattggctcagacgggatgaggaagccgctgagaggttatgtccactggtggagcatctgccccgagtgctccaggagtcagagagaccactgccaagagccgctctgcactctttcaaggcggcaagggccctcctgggatgtgctaaagctgaatccggtccagcgagtctgaccatttgtgaaaaggcttctggttatctacaggactcactagctaccacacctgcttcttcatctattgacaaggcagtgcaattgtttctatgtgacttgctgctggtggtcagaacaagtctttggcgccagcaacagccccctgcccccgctccagctgcccaggggacaagtagccggccacaagctagtgcactggagctgagaggctttcagagggacctgtcttccctgcggaggctcgcacagtcctttcgacccgccatgcgtagagtgttcctccacgaggctactgcccgcctcatggccggcgcaagcccaacacgcacccaccagctgctagacagaagtttacggcgccgcgccgggcccggaggcaagggaggggcggtggcagaacttgagcccaggcctacccgccgggagcatgctgaagccctcctgctagccagttgctatcttcctcctgggttcctgtcagcccccggccagcgcgtgggaatgttggctgaggcagcgcgtactcttgagaagctgggggaccgcagactgctgcacgactgtcagcagatgcttatgcgtctgggaggaggtaccacggtgacttcctcttag

SEQ ID NO: 17540 - DNA, 2955 bp, synthetic construct
  misc_feature 1..2955: note = Description of Artificial Sequence: Synthetic coding sequence
  source 1..2955: mol_type = other DNA
atggattgtacgtttgaagacatgctgcagctgataaataaccaagatagcgattttcccggtttattcgatcccccctacgctggaagtggagcaggtgggacagacccggctagcccagatacttcttctcccgggtctctgtcgcccccgccggccactctgagctcaagcctcgaggctttcttgtctggcccacaggccgcaccctcccccttatcccctccacagcccgcccccactcccttgaaaatgtacccatccatgccagcgttctctcctggtcccggaattaaagaagaaagtgttcctcttagtattctgcagacaccaaccccccagcctctgccagtgcctactctggtgtctggcgggactattctggctactgttcccctggtcgtggacgcagaaaaactgcctattaataggctggctgccgggtccaaagcacccgcctcagctcagtctagaggtgaaaaacgaaccgctcacaacgccatagaaaagcgctatcgcagcagcatcaatgacaagattatcgaattgaaagatctggtggtgggcactgaagccaaattgaacaagtcagctgttctacgcaaggccatcgactatatcaggttcctgcaacactccaaccagaaactgaagcaagaaaatctttctctgcgcacagctgtccataaaagcaaatctctgaaagatttagttagcgcctgtggcagtgggggcaacaccgacgtactgatggagggggtcaaaactgaggtcgaggacaccttaacccctcccccgagcgacgctggttcaccgtttcagtcctctccgctctctcttgggtccaggggaagcggatctggagggagcggatcagattcagagcctgatagtcccgtgtttgaagacagcaaagccaagcccgaacagaggccgtcgctacactcaagggggatgctggacagatctaggctcgcgttatgcacactggtgttcctctgcttgtcgtgtaatccccttgcctcgctcttgggagcaaggggtctcccttcgccctccgatacaacaagcgtttaccactctccagggcggaacgtgcttggcactgaatctagggacgggccaggttgggcccagtggttactccctccagtggtatggttattgaatggcctgctcgtcctggtgagccttgttctgctgttcgtgtacggcgagcctgtcacccgccctcacagtgggccggcagtgtacttctggagacacagaaaacaggcagacttggatctggcacgaggtgatttcgcacaggccgctcaacagctgtggttggcactgcgcgcactcggaagacccctgcccacaagccatttggacctggcctgttccctgctctggaatctgatccgacatcttctgcagaggctatgggtcggacgttggctagctggcagagcaggagggttgcagcaagattgcgcgttgagggtggatgcctctgcaagtgcacgggacgccgccctagtgtatcataaattgcatcaactgcacacgatgggcaaacacacgggagggcatctaacagcaactaacctggctttatccgcgttgaacctcgctgagtgtgccggagatgccgtgagtgtggctaccctcgcggagatttacgtggccgcagccctgcgagtgaagacttccctacctcgggcgctgcatttcctgactcgcttcttcctcagttcagcccggcaggcctgcctggctcagtctgggagcgttcccccagcaatgcagtggctgtgccacccggtgggacacagattcttcgtcgacggggactggtctgtactgtctaccccatgggagagcctctacagtttagctggaaatcctgtggatccactggcacaagtcacccaactctttagggagcatttactcgaacgggccctgaattgtgtgacacagcccaacccatcgcctggctctgcggacggagacaaggaattttctgacgcgctcggatatctacagttattgaacagttgttctgatgccgcaggcgccccagcctatagttttagcatctcctccagcatggcaaccacgactggtgtggatccggttgccaagtggtgggcctctctaaccgccgttgtgatccattggttaaggcgggatgaggaggcagccgaaagactttgcccattggtcgagcatctcccccgtgtcttacaggagtccgagaggccactgccgagagctgccctgcacagcttcaaggccgctagggctttgcttggctgcgccaaggccgaaagcgggcctgcatctctgaccatttgtgagaaagcatcagggtacctccaggactcgcttgcaaccaccccagcttcctcatcaattgacaaggccgtgcagctcttcttatgcgacctgctgctggtggtgcggacgagcctgtggcgtcaacagcagccacctgcccccgcccccgcagcccagggcacatctagccggccccaggcaagcgctttggagctgcggggcttccagcgggatcttagcagcctccggcggcttgcccagagcttcagaccagccatgcgaagagtgtttctgcatgaagccaccgctaggctgatggccggggcgtctcctactcgaactcaccagctgctggatcgatctctgcggcgtagggcaggacctgggggcaaaggtggcgcagtggccgaactggagcctcggccaacacgccgcgagcacgccgaggctctgttgctcgcctcctgttatctgccgcccggtttcctgagtgcccccggccagagagtgggcatgttggccgaggcagccaggaccctcgagaaactgggcgaccggaggctactgcatgactgccaacaaatgctgatgaggttgggagggggaaccactgtcacttcctcctag

SEQ ID NO: 17541 - DNA, 3222 bp, synthetic construct
  misc_feature 1..3222: note = Description of Artificial Sequence: Synthetic coding sequence
  source 1..3222: mol_type = other DNA
atggactgcactttcgaagatatgcttcagcttattaacaaccaggatagcgacttcccaggcctttttgatccgccacagcctgctccaacacccttgaagatgtacccctcgatgccagccttctctcctgggcctggcatcaaggaagagtccgtgcccctgagcatactccagactcctacaccccagcccctgcccggggccctcctgccccaaagcttccctgcaccagcaccacctcaatttagtagtacccccgtgctggggtatccatcaccgcctggaggtttcagcacaggttccccccccggtaacactcagcaacctctacccgggctgccacttgcttcccctcccggggttcctcctgtgtcacttcatactcaggtgcagtcagtggtgccgcaacagttgctgacagtcaccgcagcgccgacggctgctcccgtgacgaccaccgtgaccagtcaaatccagcaggttcccgttctcctgcagccccacttcattaaagccgattccctcctactgactgctatgaaaacagacggggccaccgtaaaagctgccgggttgagtccactggtcagcgggactaccgtgcagactgggcccctgccgacacttgtctcggggggaactatcttggctacagtccctttggtggttgatgctgaaaagctgccaattaatagactcgccgccggatctaaggccccagccagcgcacaaagccgcggagaaaaacggacggctcacaacgccatcgagaaacggtacaggtcttccatcaacgataagatcattgagctaaaggatcttgtggttggcactgaagccaaacttaataagagtgctgtgcttcgtaaggctattgactatatccggtttctgcaacactcaaatcagaagctgaagcaggaaaacctgagtctaaggaccgcggtgcataagtccaaatccctgaaagatctggtgtcggcgtgcggttctggaggcaataccgacgtgctcatggagggggtgaagacagaggtcgaagatacgctgacacctccaccaagcgacgcaggatcgccctttcagtctagcccgctttctctgggctccaggggctctggcagcgggggttccggaagcgactccgagccagatagtccagtctttgaggattccaaggcaaaacccgagcagcgcccgtctctacattcacggggtatgctcgaccgttcacgacttgccttatgcaccctagtgttcctgtgcctgagttgtaatcctctagcgtcactcctcggggcacgtggcctgccatctccaagtgacaccacctctgtctatcattcgcctgggcgcaatgttctcggcacagagagccgggatgggcccggatgggcacagtggctgttacccccggttgtttggttgctaaacggattattagtcctggtgtctctggtcctcctatttgtgtatggagaacccgttacaaggccccattccgggcccgctgtctacttttggcggcataggaagcaagccgacctcgacctggcccggggtgattttgcacaggctgcgcaacagctgtggctggcactgcgggcgctaggccgccctcttccaacaagccatttggacctggcatgctccctcctgtggaacctgatcagacacttattacagaggctctgggtgggaaggtggctggctgggagggccggaggtctgcagcaagactgcgccctgcgggtggacgcgtccgcatccgctcgggacgctgcattggtctaccataagctgcaccagcttcacactatgggaaagcacaccggcggccacctgacagctactaacctagccctgtcagccctgaacctggccgagtgtgcaggagatgccgttagtgtggcaacgctcgcagaaatatacgtggcagcagccctgcgtgtgaaaacttcccttccaagggcgctgcacttcctgactagatttttcctttcatccgcgaggcaggcctgtcttgcacagagcggctccgttcctcctgcaatgcagtggttgtgtcatccagtgggccataggtttttcgtggatggggactggagcgtgctgagcacaccctgggagagcctgtattctctggccggcaatccagtcgacccactggctcaagtgacgcagctatttcgggagcaccttctggagcgggcactgaattgtgtcacgcaaccgaatccaagtccaggatccgcggatggcgataaagagttttcggatgccttaggctacctacagctcctaaacagctgctctgatgcagccggtgctcctgcttacagcttctccatctcttcttccatggcaacgaccaccggagtggatccggtcgctaaatggtgggcctcactgaccgccgtagtgatccattggcttagaagggatgaggaggccgctgaacgtctgtgcccccttgtggagcacctgccccgcgtgctgcaggagagcgagagacctcttccaagagccgcattgcattctttcaaggccgctagagccctgcttggatgcgccaaagccgaatctgggcccgctagcctgacaatctgcgagaaggcatccgggtacctgcaagactccctagcaaccaccccggccagttcatccattgacaaggctgtccagctcttcctctgtgacctcctgctggttgtgagaacatccctatggaggcaacagcaaccacctgccccagcccccgctgcacaggggacctcatcccggccacaggcgtcagcgcttgagctgcgcggttttcagagggacctgtcctctctgcgccggcttgcacagtcctttagacctgcgatgagaagggtgttcctgcacgaagccacagcaagactgatggccggtgcctccccaacacggacccaccagttgttagatcgcagtctgcggagaagggccggacccggaggaaaaggcggcgcagtggctgagcttgagccgagacctacacggcgcgaacatgctgaggctttgcttctcgctagctgttatctaccccctggcttcctgtcagcccccgggcagagagtgggcatgctggccgaagcggccagaaccctggaaaaactcggcgaccgcaggctcctccacgactgtcagcagatgctgatgcggttaggcggggggaccacagttaccagctcctag

SEQ ID NO: 17542 - DNA, 1413 bp, synthetic construct
  misc_feature 1..1413: note = Description of Artificial Sequence: Synthetic coding sequence
  source 1..1413: mol_type = other DNA
atggatgagccccctttctctgaggccgccctggagcaagccctgggagaaccatgtgacctagatgcagccctcctgactgatatcgaggacatgctccaattaatcaataatcaggacagcgactttccaggtcttttcgatccgccttacgccggctcaggcgcaggaggtaccgaccccgcctcgcccgacactagctcacccggatcactgagtccacctccagccactctgagctcctcgctggaagcttttttatccggcccccaagctgctccatccccattgagccccccacagccagccccaacccctttgaaaatgtatcctagcatgccagctttttcaccaggcccagggatcaaggaggagtctgtcccgttgtccatccttcaaaccccgacaccacagccactccctggtgctctgctgccgcagtctttccccgcaccggcccccccccagttctcttcaactccagtgttgggatacccatccccacctggagggttctctaccggtagccctccaggaaacacacagcagcctcttccggggctcccccttgcgtccccacccggcgtgccaccagtgtctctccatacccaggtacagtctgtggtgccgcagcaactgctaacggtcactgccgctcccaccgctgctccagtgaccacaaccgtcacaagccagatccagcaggtgccagtgctcctgcaacctcatttcattaaggcagactccttgcttctgacagcgatgaaaaccgacggcgcaactgttaaggcagctggactgagccctttagtttctgggacaactgtgcagactggccccctgcctactttggtctccggtggcacgattttggctacggtacccctcgtggtcgatgcagaaaagctgccaattaatcggttggccgccggatcaaaagcgcctgcctcagcacaaagcagaggcgaaaagagaaccgcccacaacgcaattgagaagcggtaccggagtagcattaacgataaaattattgaactgaaggacctcgtggtgggcaccgaggcaaagcttaataaaagcgcagtcctgcggaaggccattgactatatcaggttcctgcagcattcaaatcaaaagcttaaacaagagaaccttagcctccgaaccgctgtgcataagtcgaagagtctgaaagacctggtctccgcctgcggcagcgggggcaacacagatgtactaatggaaggtgtcaagaccgaggtcgaggacacgctaacaccccccccttccgacgctggtagcccattccagtcatcaccgctgtcgctgggaagtagggggtctggatccggaggcagtggatcagattctgaaccagacagccccgtgttcgaagacagtaaaacggagtag

SEQ ID NO: 17543 - DNA, 645 bp, synthetic construct
  misc_feature 1..645: note = Description of Artificial Sequence: Synthetic coding sequence
  source 1..645: mol_type = other DNA
ctcatgcccgcctgccttccaggcaagcatactggaggacatcttaccgcgacgaatctcgccttatccgcactcaatcttgctgaatgcgctggagatgctgtatccgttgctacccttgccgagatttacgtagctgcagcgctgcgtgtgaagaccagcctaccgcgtgcccttcattttctgacccgtttcttcctgtcatctgctcgtcaagcctgtctcgcccagagtggttccgtgcctcccgccatgcagtggctgtgccatccagtaggacaccggttcttcgtggacggggattggtccgtgctgtctactccctgggaaagtctctactccctagcgggaaatcctgttgacccactggcacaggttacgcagctcttccgcgaacacctgctggagagagctttaaattgcgtgacccaacctaaccccagtcctggatcagctgatggggacaaggagtttagcgacgccctggggtatctgcagttgctcaacagctgttccgacgccgcaggggctcctgcgtactccttttcgataagctcgtccatggcaactaccacgggcgatccctgtcccggtcagctgtgtactccttccagactccctggcccttgctgggctgttccttag

SEQ ID NO: 17544 - DNA, 747 bp, synthetic construct
  misc_feature 1..747: note = Description of Artificial Sequence: Synthetic coding sequence
  source 1..747: mol_type = other DNA
atggaaagggcttccctgattcagaaggccaagcttgcggagcaggctgaaaggtatgaagatatggcagcctttatgaagggggctgtcgagaagggcgaggagctttcatgcgaggagagaaatctcctctcagttgcttataaaaacgtagtggggggtcagcgagctgcctggcgagtgctgtccagcattgagcagaaaagcaacgaggaagggagtgaagaaaaagggccagaggtaagagaatacagggagaaggtggagacagagctccagggggtgtgtgacaccgtcctcggactcttagactcccacctaatcaaggaggctggggacgcagagtcaagagtgttctatctcaagatgaagggagattactaccgatacctagctgaagttgcaacgggcgacgacaaaaaaaggatcatcgattcagctagatccgcttaccaagaagctatggatatcagtaagaaagagatgccacccaccaacccaatcaggctgggtttggccttaaacttctccgtgtttcattatgagatcgcaaactctcccgaggaagctatatccctagctaaaacaacatttgatgaagcgatggctgatctgcacacgctatcagaggattcctacaaggactctaccctcattatgcagctcctgcgcgacaacttaacactgtggacggctgacaacgccggcgaggaagggggcgaagccccccaggagcctcagagctag

SEQ ID NO: 17545 - DNA, 651 bp, synthetic construct
  misc_feature 1..651: note = Description of Artificial Sequence: Synthetic coding sequence
  source 1..651: mol_type = other DNA
atggaacgggccagtctgattcagaaggctaagctggcggagcaggcagagaggtatgaggacatggccgcttttatgaagggcgccgttgagaagggagaagaactgtcttgtgaggagcgaaacttgctttctgtggcttataagaacgtggtcggcggacaacgcgccgcttggagagtgcttagctctatcgagcaaaaatcgaatgaagagggctctgaggagaaaggacccgaagttcgcgagtaccgcgtcttttatctcaaaatgaaaggtgattattaccggtatttggccgaggtggcaactggggatgacaaaaagcgcattatcgatagtgcccgctccgcctatcaggaggcaatggatatcagcaaaaaggagatgccaccaaccaatccgattagactgggtttggcattgaacttttccgtcttccactacgaaattgctaatagcccagaggaggcgatctctttagccaaaacaactttcgatgaagcgatggccgaccttcacaccctgagcgaggatagctataaagacagcactctcatcatgcagctgctgcgagataacctgaccctgtggacagccgacaatgctggggaggaaggcggcgaggccccccaggagccccaatcctag

SEQ ID NO: 17546 - DNA, 3702 bp, synthetic construct
  misc_feature 1..3702: note = Description of Artificial Sequence: Synthetic coding sequence
  source 1..3702: mol_type = other DNA
atgggatttctcaaactgattgaaattgagaacttcaagagctacaaggggcgtcagatcatcggacccttccagcgctttactgccattatcggaccaaacggatcaggaaaaagcaacctgatggatgctattagctttgtgctcggtgagaagacttctaaccttcgggtaaagacactaagagatcttatacacggtgcccctgtggggaaacctgccgccaaccgggcatttgtgagtatggtctacagcgaagaaggcgccgaggacaggacattcgcacgcgtaatcgtggggggctcctcagagtacaagatcaataacaaagtcgtgcaactgcacgaatattcagaagagctcgaaaagctgggcatactgataaaggcacggaattttcttgtgttccagggcgccgttgaaagcattgccatgaaaaatccaaaggagaggactgcactttttgaagaaatatcacgatccggggaattggcacaagagtatgataagcgcaagaaggaaatggtgaaagctgaggaggatacccaattcaattaccacagaaagaaaaatatcgctgccgagaggaaagaggccaaacaggaaaaggaggaggccgatcgttatcagcgcctaaaggacgaagtcgtccgagcgcaggtccaactgcagctcttcaagctctatcacaacgaagtagaaattgaaaagctgaacaaggagctggcatctaagaacaaagaaatcgaaaaggataaaaagcggatggataaggtggaggatgaactcaaggagaagaagaaggaactaggcaaaatgatgagagaacagcagcagatcgaaaaagaaattaaggagaaggatagcgaactcaatcagaaacgaccacagtacataaaggccaaagagaacacgtctcataaaattaaaaagctcgaggctgccaagaagtcactccagaacgctcagaaacattacaagaagcggaagggggacatggacgagctagaaaaggaaatgctaagtgtggagaaggcacgacaagagttcgaggaacgaatggaggaagagtctcagtctcaggggcgtgatctgacgttggaggaaaaccaggttaaaaagtatcaccggttgaaggaggaagctagtaagcgcgctgccacactcgctcaggaactggagaagttcaaccgcgaccagaaggccgatcaggatcgcttggatctggaagagcgcaagaaggtcgagacagaagccaagatcaaacagaaattgcgggaaattgaggagaaccagaaacgcatcgagaaacttgaagagtacatcactacatccaagcagagtttggaggaacaaaagaagttagaaggggaattgacagaggaagtagagatggctaagagacgcattgatgagatcaataaagaacttaatcaggtcatggaacagcttggcgacgctcgtattgatcgccaggagtcctctcggcagcagcggaaggccgaaattatggagtctattaaacgactctatcctgggtcagtgtacgggaggttaattgacctctgtcagcctacacagaagaaataccaaatcgcagtcacgaaagttctgggtaagaacatggatgccatcatagtggattccgaaaaaacaggaagagattgtatccaatacatcaaagaacagcgcggagagcccgagacctttttgcctcttgattacttagaagtgaagcccaccgatgagaaactccgggaattaaagggggccaaactagtgattgacgtgattcggtacgaacctccacacattaaaaaggccttgcaatacgcctgcggaaacgcactcgtttgtgataacgtggaggacgcgaggaggatcgccttcggggggcaccagcggcacaagactgtagctttggacggtaccctattccagaagtcaggggtcatcagcggcggcgcctctgacctgaaagctaaggctcggcggtgggatgaaaaggcggtggacaaactgaaagaaaaaaaggaacgtctaactgaggagctcaaagaacagatgaaagccaagcggaaagaagccgaattgcggcaagtgcagtctcaggcacatggactgcagatgcggcttaagtatagccaatcagatctggaacaaactaagacgagacacctcgctttgaaccttcaggagaaatctaagctagaaagcgagctggccaattttggcccacgtatcaacgacatcaagaggattatccaatcccgcgagcgggaaatgaaagatttgaaagagaaaatgaatcaggtggaggacgaagtattcgaggagttctgtagagaaattggtgtcaggaatatccgtgaattcgaagaagagaaggtgaagcgtcagaatgagatcgccaaaaagcgcttagagtttgaaaatcagaagactcgcctggggatccagctcgatttcgagaagaaccagctgaaagaagaccaggataaagtccacatgtgggagcagacggtcaagaaggatgagaatgagattgaaaagctaaaaaaggaagagcagcggcacatgaaaattatagatgaaaccatggcccagttacaggacttgaaaaatcagcacctggcaaaaaagagtgaagtgaacgacaagaatcacgaaatggaggagataaggaagaagctgggaggagctaataaagagatgactcacctgcaaaaggaggtcacagcaattgagaccaagctcgagcagaaacggtctgaccgacataatctgctccaggcttgtaagatgcaagatataaaacttcctctgagcaaaggtacgatggatgacatcagtcaggaagaggggtcgagccagggcgaggacagcgtgagtggatcacagagaatttcgtcgatctatgccagagaagctctgattgagatcgattatggagacttgtgtgaggatctgaaggacgcccaggcagaggaagagattaaacaagagatgaataccctccagcagaagcttaatgaacaacagtccgtgcttcagaggattgctgcacccaacatgaaggccatggaaaagctggagtctgtgagagacaagttccaggagacatcagacgaattcgaagccgctcggaaaagagccaagaaagctaagcaggcctttgaacagattaaaaaggaacggtttgaccgcttcaacgcttgcttcgagtccgtagctacgaatattgacgagatctataaggccctgagtcggaatagctctgcacaggcctttctgggtcccgagaatccggaagagccatatctcgacgggatcaattataactgcgttgcgccgggtaagcgcttcagacccatggataatctatctggcggcgagaagaccgtcgctgcactcgccttgctgtttgccatacattcttacaagcccgcgccattttttgtgctcgacgaaattgacgcagcactcgataataccaatatcggtaaagtcgctaattacataaaggaacagtctacttgcaatttccaggccatcgttatcagtctgaaagaagagttctatactaaagcggagtctctgatcggggtgtaccctgagcagggcgactgtgttatttccaaggtgctgacatttgacttgacgaagtacccggacgctaaccccaatcccaatgaacaatag

SEQ ID NO: 17547 - DNA, 612 bp, synthetic construct
  misc_feature 1..612: note = Description of Artificial Sequence: Synthetic coding sequence
  source 1..612: mol_type = other DNA
atgggattcttaaaacttatcgaaattgaaaactttaagagttataaaggccgccagatcatcggacccttccagaggttcaccgcaattatcggtccgaatggctctggaaaaagcaatcttatggatgccatatcctttgtcttaggagagaagacctccaacctaagggtaaaaacactgcgcgatttgatacacggtgctccagtcggcaaacccgccgcgaaccgtgctttcgtgtcaatggtctacagcgaagagggtgcagaggaccgaacctttgctagagtgatagttggagggagttcagaatataaaatcaacaataaggtggtgcagctccacgagtactccgaagagttagaaaaattgggaattcttataaaagcgaggaatttcctcgtcttccaaggctgctgcggcatttattgccatgagacgccaaaacgtgggcaactttacttaaagatctcgagatcgggcgagctggcccaggagtacgacaaacggaaaaaagagatggtcaaggctgaggaggatacgcaatttaactatcacagaaagaaaaacattgccgcagagcggaaagaggccaaacaggagaaggagtag

SEQ ID NO: 17548 - DNA, 1551 bp, synthetic construct
  misc_feature 1..1551: note = Description of Artificial Sequence: Synthetic coding sequence
  source 1..1551: mol_type = other DNA
atgggctttctcaagttaatcgagatcgaaaactttaaaagttataagggaaggcagatcattggaccattccaaaggttcactgcaatcatcggcccgaacggatccggtaagtctaacctgatggatgctatctcatttgtattgggagagaagacaagcaatctcagagtgaaaacactgcgcgacttaattcatggagctcccgtgggtaagcctgcagctaatagagccttcgttagtatggtttactccgaggaaggtgctgaggacagaacctttgcaagagtcatcgtgggaggatcaagcgaatacaaaatcaataataaggtcgttcagctgcacgaatacagtgaagaactagagaaattgggcattcttatcaaagcaagaaatttcctggttttccaggtgaagaagtaccacaggctaaaggaagaagcctcaaaacgcgcagccacactggctcaggagcttgaaaagtttaacagggatcagaaagctgaccaggatcgtctggatctggaagaacgaaaaaaagtcgaaacggaggcaaagatcaaacagaaactccgggaaatcgaggagaaccagaagagaatcgaaaaattggaggagtacatcacaacgtctaagcagtctctcgaagagcagaagaaactcgaaggcgagttgacagaagaggtggagatggctaagcgaagaatcgacgagatcaacaaggaattaaatcaggtgatggagcagcttggagacgcaaggatcgatagacaagaatcaagtcgccaacaacgtaaagctgagattatggaatcaatcaagaggctgtatccagggtcagtatacggcaggctgattgacctgtgtcagcctacccaaaagaagtaccagatcgcagttaccaaagtactggggaagaatatggatgcaataatcgtggacagtgaaaagacgggtcgagattgtattcaatatattaaagagcaacgaggagagcctgaaacttttttacctttggattaccttgaggtgaagccgaccgacgagaagttgagggaactcaagggcgcaaagttagtcattgacgtgattcggtacgagcctcctcatattaaaaaagctttacagtatgcgtgtggaaacgccctggtctgcgataatgtggaggacgcccggcgaattgcatttggtggacatcagcgccataagaccgtcgcactggacggaacactttttcaaaagtccggggttatttcagggggcgccagcgatctcaaagccaaagccaggcgatgggacgagaaggccgtagataaactcaaggaaaaaaaagaaaggttaactgaagaactaaaagaacagatgaaagccaaaaggaaagaggccgagctccgccaggtccaatctcaggctcatggattgcagatgcgacttaagtacagtcagtcagatctggagcagaccaaaacgcgccatctcgcactcaacttgcaggtgggcccaggactgcagccatgttcccccaaagccatacacaccttcctggcgtag

SEQ ID NO: 17549 - DNA, 870 bp, synthetic construct
  misc_feature 1..870: note = Description of Artificial Sequence: Synthetic coding sequence
  source 1..870: mol_type = other DNA
tagtggtacacccccacgcccttttacagtagcctggaggctgcactgttgaacttcagaccaagcgcacccgtctttcggatgctcgaagtaagcattcctactccccatcgctacgtcagaggaaaaagtaatttgatggatgctatcagttttgtgctcggcgagaagacatctaatcttagggtgaaaacactgcgtgatctgatccacggggccccagtcggcaaacccgccgctaatagggcttttgtctccatggtatactccgaggagggcgctgaggatcggaccttcgccagggtcattgtggggggaagctctgagtacaagataaataacaaggtagtgcagctgcatgaatacagcgaggagctcgagaaactgggaattctgattaaggcgcgcaacttcctggtgttccagggcgctgtggaaagtatcgccatgaagaaccctaaggagaggaccgccctgttcgaggagatatcacggtccggtgagctcgctcaagaatatgataaaagaaagaaagaaatggttaaagctgaggaagacacccagttcaattaccatagaaaaaaaaatatcgcagccgaaagaaaggaggccaaacaggaaaaggaagaagctgatcgctatcaacgattgaaggacgaagttgtccgggcccaggttcagttacagctttttaaactgtaccacaatgaagtcgaaattgagaagttaaataaggagttagcgagcaaaaataaggagattgaaaaagataagaagcggatggacaaggtggaggatgaacttaaggagaagaaaaaggaactgggaaagatgatgcgtgaacagcagcaaatagagaaggaaatctag

SEQ ID NO: 17550 - DNA, 1995 bp, synthetic construct
  misc_feature 1..1995: note = Description of Artificial Sequence: Synthetic coding sequence
  source 1..1995: mol_type = other DNA
atgagcggggtgcgcggcctgagtcgtttactgtcggcccgacggctggccctggcaaaagcgtggccaacagtgttgcagactggcacccgaggtttccatttcacagtggatggcaacaaacgtgctagcgccaaagtgtccgattctataagcgctcaataccctgtggtcgaccacgaatttgacgcagtcgtagtcggggccggcggagccgggctgagggccgcatttgggctgtccgaggctgggtttaacactgcctgcgtgacgaagctcttcccaaccaggtctcacacggttgcagcccaaggaggaatcaacgctgccctgggcaacatggaggaggacaattggcggtggcacttctacgacacggtgaaagggtcagattggttaggagaccaggacgctatccactatatgaccgagcaggcaccagctgccgtagtagaactggagaattatggaatgcccttctctaggactgaggacggtaaaatctaccagcgagcttttggggggcaaagtctgaagtttggtaagggaggccaggcccaccgttgctgctgtgtggccgaccggaccggacactccttgctgcacaccttatatgggagatctcttcgctacgacacaagctacttcgtcgagtatttcgccctggacctgcttatggagaatggagagtgccgcggagtgattgcactgtgtattgaggatggctctatccacaggattagagcgaagaacacggtggtagccactggggggtacggccggacatactttagctgcacatccgcccacactagcaccggggacggtaccgcgatgatcacccgggccgggctcccgtgccaggatctggagtttgttcagtttcacccaaccggaatttatggcgcgggctgcctcatcactgagggctgtcggggggaagggggtatcctgattaactcccagggcgaacggttcatggaacgttacgccccagtggctaaagatctggcatcacgcgatgttgttagtcgcagcatgacactggaaatcagggaagggcgaggttgcggtcccgaaaaggatcatgtgtaccttcagctgcaccatcttccacctgaacagctggccaccagattgcccgggatttccgaaaccgccatgatttttgccggagtcgatgtgaccaaggagcctatccctgtgctgcccaccgtgcattataacatgggaggcatacccactaactacaaggggcaggtactacgacacgtgaacgggcaggatcaaatcgtgccggggctatacgcctgtggggaggcggcttgcgcctcagtgcacggtgctaaccgactgggagctaactcactgctcgacttggtcgttttcggtagagcttgcgcacttagcattgaggagtcatgccgcccaggcgataaggtgcctcctatcaagccaaacgcaggcgaggaatcagtcatgaatctagataagctgcgtttcgccgacggctccatccgcacttcagagctgagactgtccatgcagaagtcgatgcaaaaccacgccgctgtcttcagagttggctcagttctgcaggagggctgtggcaaaatttccaaactgtacggggacctcaaacatttgaagacctttgatagggggatggtttggaataccgacttggtcgaaacgcttgagctgcagaacttgatgctgtgcgctttgcagacaatttatggagcagaggctagaaaagaatcgcggggcgcacacgcccgagaggactacaaagtgcgcattgacgagtatgactacagcaagccaatccagggccagcaaaagaagccgttcgaggagcattggcggaaacacacgctttcatatgtcgatgtgggcaccgggaaggtcactctggaatatcgacctgtgatagataaaacattgaatgaggctgactgtgccacagttcctccagccatccgaagctactag

SEQ ID NO: 17551 - DNA, 1560 bp, synthetic construct
  misc_feature 1..1560: note = Description of Artificial Sequence: Synthetic coding sequence
  source 1..1560: mol_type = other DNA
atgtccggcgtaagaggcctgagccgcctgttgagcgcacgaaggctcgcgctggcgaaagcatggccgacggtgctacaaactggtacaagagggtttcactttacagtagacggaaacaaaagggcatctgccaaggtctccgacagtatctctgcccagtaccccgttgtcgatcatgagtttgacgccgtggttgttggcgccggaggtgctggcctgcgcgccgcctttgggctgagcgaagccgggttcaataccgcctgtgtgacgaagctttttcccaccagatctcacacggtggctgcccagggagggattaatgccgccctgggcaatatggaggaggacaactggcgctggcacttttatgatacgtcaaccggcgacggtacagctatgattactagggccggcctaccctgtcaggatctcgaattcgtgcagttccaccctaccggcatctatggggcgggctgtctgattacagagggatgtcggggagaaggcggaattctcatcaattcacagggggaacgattcatggaacgttacgcaccggtcgccaaggacctcgcatctagggatgtggtgtcccgcagcatgacactggagattagagaagggagaggatgcggcccagaaaaggaccacgtgtatctgcagctccaccatctccctcccgaacagctggccacacggctacctggcatctctgagaccgccatgatatttgctggcgtcgacgttaccaaagagcccatccccgtcctccctacggtgcactataatatgggggggatccccacaaattataagggccaggtactgcggcatgtgaatggtcaggatcagattgtccccgggctctatgcctgcggcgaggctgcctgcgctagcgtgcacggtgctaacaggcttggagcaaattcattgttggatctggtcgttttcgggagagcgtgtgcattatccattgaagaatcctgtcggcctggagacaaggtgccacctataaaacccaatgcaggagaggagtctgtgatgaatctggacaagctcaggtttgccgatgggagcatcaggacctcagaactccggctgtctatgcagaaatccatgcagaaccacgccgcggtcttccgcgtcggcagcgtcctgcaggagggctgcggtaagatttctaaactctatggagatttgaagcacctgaaaacgtttgacagaggtatggtttggaacacggacttggttgaaacactcgaactacagaacctcatgctttgtgctctccagaccatatatggggcagaggctcggaaggagtccagaggtgcccacgctcgcgaagattataaagtgcggatcgacgaatacgactatagtaaacctatacaaggccagcagaagaaacccttcgaagaacactggcgcaagcacaccctgtcttacgtggacgttggaacggggaaagttacactagaatatagacccgtaatagataaaactctgaacgaggctgactgcgcaactgtgccgcctgctatccgttcctactag

SEQ ID NO: 17552 - DNA, 6645 bp, synthetic construct
  misc_feature 1..6645: note = Description of Artificial Sequence: Synthetic coding sequence
  source 1..6645: mol_type = other DNA
atgaaacgcaaggaacgaatcgctcgcagattggaaggcattgagaacgatactcagcctatactactgcagagttgcaccgggctggtcacacatagactcctggaagaggacactccgcgctatatgcgagccagcgacccagcttcacctcatattggcaggtccaacgaggaagaagagactagcgactcttccttggagaaacaaacacggagcaagtattgcactgagacttcgggcgtgcatggggattccccctacggcagtgggacgatggacacccactcccttgagtcgaaagctgagaggatcgcacgttataaggctgaacggcgaagacagctcgctgagaagtacggacttacactggaccccgaagcagattccgagtacctgagcaggtacactaagagcaggaaggagcctgacgccgttgaaaagcgcggagggaagagtgataagcaggaagaatcgagcagggatgcaagctcattgtacccgggcactgagactatggggcttcggacctgcgcgggggaatccaaggactatgcattacacgtaggcgacgggagcagcgatcctgaagtcctgctgaacatagagaatcagagacgaggccaggagctgagtgctacccgccaggcccatgatctgtcacccgctgccgaatcttcatcgaccttcagctttagtggcagggattctagcttcacagaggttccccggtcgcccaaacatgcacatagttcctccttgcagcaggcagctagcagatcgcctagcttcggcgatccgcagctctcaccggaggccaggccctctactggcaagcctaaacatgagtggttcttacagaaggattcagaaggggatactccctccctcattaattggcccagcagggtgaaggtccgtgaaaaacttgtaaaagaagaatccgcgagaaactcgcctgaactcgcctccgagtctgtaacacaacgccgacatcaaccagcacccgtccattacgtctcttttcagagtgaacacagcgctttcgacagagtcccttccaaagctgccggatccacacgccaaccaattcgcggatacgtgcaaccagccgacacaggccacacggcaaaattggtgactcccgagactccagagaacgcttcagagtgttcttgggttgcaagcgccacacagaacgtcccaaagccaccaagcttaaccgtgctggagggcgatggaagggatagccctgtgctgcacgtatgtgagtcaaaggccgaggaggaggagggggaaggagagggcgaggaaaaagaggaggatgtgtgttttactgaggccctcgagcagagcaaaaagacgttactagccttggagggagacggactcgttcgatctcccgaagatccttctaggaacgaggacttcggaaagcctgccgtgtccaccgtgactctcgagcaccaaaaagaacttgaaaatgtggcccaaccccctcaggcacctcaccagcccacagagagaactggcaggagcgagatggtgctgtacatccaaagcgaacccgtcagtcaggatgccaagccgacggggcacaacagggaagccagtaagaaaagaaaagtccgcaccaggtccctaagcgacttcactggcccccctcagcttcaggccctgaaatacaaggatccagctagccgccgtgagctggagctcccatcctctaaaaccgaggggccctacggtgagataagtatgctcgacacaaaggtgtcagtggcacaattaaggagcgcatttctggccagcgccaatgcctgtcggcgacctgagctgaaatcccgggtggaaaggtctgccgaaggacccggtttgcctacaggcgtcgagcgcgagcgcgggtcccgcaaaccccggcggtatttttctcccggcgaaagccggaaaacttccgaacgattccggacccagcccatcacatccgccgagcggaaagagagcgatagatgtacatcccactccgaaacccctacagttgacgacgaggagaaggtagacgagagagcgaaactcagtgtcgcggccaaacggcttctgttccgagagatggaaaagtcgttcgacgagcagaacgtccccaaacggagaagccgcaatacggccgttgaacagagactccgacgacttcaagatcgctctctgactcagcccatcacgacagaagaagtggtgattgcggccaccgagccgatccccgcaagctgctccggcggtacccatcccgttatggcccgcctcccctcgccaacagtggccagatcagcagtgcagcccgcaagactccaggcaagcgcgcaccagaaagccctggctaaggaccagaccaatgaaggcaaggaactcgctgagcaaggggagccagactccagcacactcagcctcgctgaaaagctggcattgttcaacaagctgagccagcccgtgagtaaggcaatctccacaaggaatcggatcgacacacgacaacgaaggatgaatgctcggtaccaaacgcagccggtcactctgggcgaggtcgagcaggtgcagagcgggaagttgattcccttcagccctgctgtgaacactagcgtgtctaccgtggcaagtacggtcgcccctatgtacgcgggcgacctgaggacaaagccacctctggaccacaatgcctctgccacagattataagttttccagttcaatagaaaactccgattcacctgtgcggtcaatcctcaaaagtcaggcctggcagccgctcgtggagggatcagagaacaagggcatgcttagagaatacggcgaaaccgaaagcaagagagccttaaccgggcgggattccggcatggagaaatacggttcatttgaggaggctgaggccagctaccctattctgaatcgagccagagagggtgattcccataaagagtcgaagtacgccgtgcccaggagaggtagcctggagcgcgctaaccccccaattacacaccttggcgacgaaccaaaggaattctccatggcaaagatgaacgctcaggggaaccttgatctacgggaccgcctaccctttgaagagaaggtagaagtcgaaaatgtcatgaagcggaagttcagtctccgggccgccgagttcggagagcctactagtgaacagactggaactgcagctgggaaaaccatcgcacagactacagcacccgtctcctggaagcctcaggatagtagtgaacaaccccaggagaaattatgtaaaaacccttgcgcgatgttcgccgctggcgaaatcaaaacacccaccggcgaaggactccttgattccccaagcaagaccatgtctatcaaggaacggctagcccttctcaaaaaatccggcgaagaggattggcgcaaccgcctctctaggcggcaggaggggggcaaggcccctgcctcctcactccatacgcaagaggccggaaggagcctgattaaaaaacgtgtcaccgagtctagggaatcccaaatgactatcgaagagcgcaagcaactgataacagtgcgagaggaagcatggaaaacacgaggccgcggggctgctaatgactctacacagtttaccgtggcgggcagaatggtgaagaaggggctggcatctccaacagcaatcacccctgtggcctcccctatctgcgggaaaacccgtggaactacccccgtatcaaagcctttggaagatatagaagcccgtcccgacatgcagctggagagcgacttaaagcttgaccgcctggagacatttctgagacgattaaacaataaagttggcggcatgcatgaaaccgtgctgaccgtgacaggaaagtcagtgaaagaggtaatgaagccagatgacgatgagactttcgccaagttctaccgctccgtagattataacatgcccaggagcccggtggagatggacgaggacttcgacgtcatttttgatccgtatgcccccaagttgacaagcagcgtggctgaacacaagcgggccgtacgtccgaaacgacgggttcaggccagtaagaatcctctgaagatgttggccgcccgcgaggatcttctccaggaatatacagagcagcgccttaacgtggccttcatggagagcaagcgtatgaaagtcgaaaaaatgtcatccaactctaatttcagcgaagtcacactggctggactggctagcaaggagaacttcagtaacgttagccttcgcagcgtaaacctgacggagcaaaattcgaacaactcggccgtaccctacaaacgcctgatgcttttgcagataaaaggtagacgccatgtgcaaacaaggctcgtggaaccccgggcttctgccctcaattctggggactgctttttgctactgtcgccacattgctgttttctctgggtgggcgaattcgccaatgtaatcgaaaaggccaaagcaagtgagctggcgaccctgatacagactaagcgagagctcgggtgcagagctacatacattcagacgatcgaagaaggaatcaacacacacacacacgccgctaaggatttttggaaacttcttggtgggcagacttcctatcagtcagccggcgatcctaaggaagacgagttgtacgaagctgccatcatagagaccaattgtatttatcggctgatggacgataagctggtgcccgatgacgattactggggcaagattcctaagtgttctctcctgcagcctaaggaggtgctcgtttttgacttcggaagtgaagtgtacgtctggcacggtaaagaagtaaccctggcgcaacggaaaattgccttccagttagccaaacatctgtggaacggaaccttcgattacgaaaattgcgacatcaatcctttggacccaggcgagtgtaaccccctgattccacgcaaaggtcagggaaggccagattgggcgattttcggccgactgacagagcataacgagactattctattcaaggaaaagttcctggattggaccgaattaaagaggagcaatgaaaagaatccaggcgaacttgcccagcataaagaagatcctagaaccgacgttaaggcctatgatgttacccggatggtgagcatgccccagactactgcagggaccatccttgatggggttaatgttgggagaggatacgggttggtcgagggccacgataggaggcagttcgagataacatctgttagtgtcgacgtttggcatatcttggagttcgactattccaggctgcccaagcagtcaatcggacaatttcatgaaggcgatgcctacgtcgtcaaatggaagtttatggtgagtacggcagtgggctctcggcagaagggggagcacagtgtgcgggctgcgggtaaggaaaagtgtgtttatttcttttggcaggggagacactctacggtgtccgagaaaggcaccagcgcccttatgacagttgaacttgatgaggagaggggggcacaggttcaggttctgcagggaaaagagcctccgtgtttcctgcagtgtttccaaggtggcatggtggtgcacagcgggcggagggaagaggaagaggaaaatgtgcaatcagagtggagactctattgtgttagaggggaggtgcctgtcgagggtaacctgttagaagtcgcatgccattgcagctcactccgcagccggacctccatggttgtgctaaacgttaacaaggctcttatctacctttggcacggatgtaaagctcaggctcatactaaggaagtgggcagaaccgccgcaaataagataaaagagcagtgccccctcgaggccgggctgcactcctcatcgaaagtgacgatccacgagtgtgatgaaggatctgagccattaggattctgggatgcactcggcaggcgggatagaaaagcctacgattgcatgctccaggacccgggcagctttaatttcgctcctcggttattcattttgtctagcagctcaggggactttgcagccaccgaatttgtataccccgcccgtgcccctagcgtggtgagcagtatgcccttcttacaggaggatctgtatagtgccccacagcccgcgctgtttttagtggataatcatcacgaagtatatttatggcagggttggtggcctatagagaataagatcaccggttctgccagaattcggtgggcttccgatcgtaaatccgcaatggaaactgtcctccagtactgtaaggggaagaatctcaagaaaccagctcccaagagctacctgatccatgctggcctcgaacctctgactttcacaaatatgtttccctcgtgggaacatcgggaggatatcgccgaaatcaccgaaatggacacagaagtgtcgaaccaaataaccttggtggaggacgtgctcgccaaactctgcaagacgatctaccctttagctgatctactggctcggcctctgcccgagggagtggatccgctgaagcttgagatctacttaaccgatgaggattttgagtttgctctggacatgacaagggatgagtacaacgcacttccggcatggaagcaggtgaacctcaaaaaggcaaagggactcttctag

SEQ ID NO: 17553 - DNA, 6645 bp, synthetic construct
  misc_feature 1..6645: note = Description of Artificial Sequence: Synthetic coding sequence
  source 1..6645: mol_type = other DNA
atgaagcgcaaggagcggatcgcaaggcggctggaggggatcgagaacgacacgcagcctatccttctgcagagctgcaccgggttagtaacacaccggctgctggaggaggacacgccaagatacatgagagctagcgatcctgcgagcccccacattggccggagcaatgaggaggaggaaacctcggattccagtttggaaaagcagacccgatccaaatactgtactgaaacatcaggcgtgcatggcgacagcccatacggttctggtactatggatactcatagcttagagtccaaagcggagagaattgccaggtacaaagctgaaagacggcggcagctagcagagaaatacggtctcaccctcgaccccgaggccgactcggagtatcttagtcgctacacaaagtcccgtaaagaaccagatgccgtggaaaaacgggggggcaaatcagacaagcaggaagaatcatcccgcgacgcctcttcattgtatcctgggacagaaacaatgggcctgcggacgtgtgctggggagagcaaagactatgcactccacgtcggagatggatcttcagatccggaggtcctgctaaacatcgagaaccagaggcgaggccaagaactatcagccacaagacaggcccacgacttaagccctgcggctgaatcaagcagcacgttctcgttttctgggagagacagctctttcaccgaggttccacggtcaccaaaacacgcacatagttcctctcttcagcaggcggcatccagatccccatcgttcggggacccccagctgagccctgaggctcggccatccacaggaaagccaaagcacgaatggtttctccaaaaggattcagaaggagataccccgtctctcattaattggcctagccgcgttaaggtgcgggagaagctggtcaaagaggaatccgcccgcaactcccctgaattggcatcagagtcggtgacccagcgccgtcaccagccggctccagtccactacgtgtccttccagtccgagcacagcgcctttgatcgggtacctagcaaggctgccggctctactcggcagcctatccgcggatatgtacaaccagccgacactggacacaccgcaaaactggttacccctgagacccctgagaatgccagcgaatgctcctgggtggctagcgcaactcagaacgttcctaaacctccaagtctgactgttctggaaggagatggtcgggactctcccgtattacatgtatgcgagtccaaggcggaagaggaagagggtgaaggtgagggcgaggagaaggaagaggatgtctgttttactgaggccttggagcaatcaaagaagaccctgttggccctcgagggtgacgggctagtgaggtcccctgaggatccatctcggaacgaggacttcggcaagcccgccgtctccaccgtcacactcgagcatcagaaggagttggagaatgtggcccagcccccacaggccccccaccagcctaccgaacggacaggacgttccgaaatggtcctctacatccagtccgaacccgtctcccaggacgctaaaccaactgggcacaatcgcgaagccagcaaaaaacggaaagtgcgcacacgctccctatcagacttcacaggcccacctcaacttcaggctctgaagtacaaggacccagcatctcggcgcgaactcgagctgccttcaagcaaaaccgaagggccatatggggagataagtatgctggatacaaaggtcagcgtggcgcagctgcgatccgcttttttagcctctgcgaacgcctgtaggagaccagagctgaaatcccgggtggagcggtccgcggagggccctgggctacccaccggtgttgaacgtgagaggggctcaagaaagccaagacggtatttctctccaggagagtcccggaaaaccagcgagcggtttcgcacacaacctattacgtccgccgagcgcaaagaatccgaccggtgcacatcccactctgagacaccaacagtcgacgatgaagaaaaggtggacgagcgggctaaactctctgtggccgcaaaacgcttgctgtttcgagaaatggagaaaagctttgatgaacaaaacgtccccaagcggcgctcaaggaataccgccgtcgaacagcgcctgcggagactgcaggatcgcagcctgacgcagcctatcacaaccgaagaggtggtcattgccgcgactgagcctatacccgcaagctgcagcggcgggacccatcctgttatggctaggctgccctctcctacagttgctcgttccgcagttcagcccgcaagactgcaagcctctgcgcaccaaaaggccctagctaaagaccaaacaaacgagggcaaggagctcgctgaacagggagagcccgactccagcacactttcactggccgagaagcttgccctgtttaacaaattgtctcaacccgtttccaaagccatatccacccggaacagaatcgatacgagacagagaagaatgaatgctcgctatcagacacagcccgttaccttgggggaagttgagcaagtccaaagcggcaaattaatacccttcagcccagctgtcaacacgagtgtctctaccgtggcttccacagtggccccgatgtacgctggtgatcttcggacaaagcctccacttgatcacaatgcaagcgctactgattacaaattctccagcagtatcgagaacagcgattctcctgtgagaagcatcctgaagagccaggcatggcaaccgctcgtggaaggttccgaaaataaggggatgttgcgcgagtacggggagacagagagcaagcgagcactgactgggcgcgatagcggaatggaaaagtatggctcttttgaagaagccgaagctagctacccaattctgaaccgggctcgggaaggtgacagtcacaaggagagtaaatacgctgtacctcgccgaggaagcttggaaagggccaatcctcccatcacacacctgggcgacgagcccaaagagttttccatggcgaagatgaacgcccagggtaacctcgacctgcgggatagattaccatttgaagaaaaggtagaagttgaaaatgtgatgaagcgcaaattttctctgagagccgccgagttcggagaacccacatcggaacagactggcactgccgccggcaagactatcgcacagactaccgcgcctgtttcatggaaaccccaggactctagtgagcagcctcaagaaaaattatgcaaaaatccttgcgcgatgtttgctgctggggaaatcaagacacccaccggcgaaggacttcttgactccccaagtaaaaccatgtccataaaggaaagactcgccctcctgaaaaagtcaggtgaggaagattggcggaatagactcagcagacgtcaggaggggggtaaggcacccgcctctagtctgcatacccaggaagctggccgctcactgatcaaaaaacgcgtgacggaaagtcgggagagtcagatgaccatcgaagagagaaagcagctgatcacagttcgggaagaggcctggaagactcggggacgcggcgcagccaacgattcaacgcaattcacagtggccggcaggatggtcaaaaaaggcctggccagtcctactgctattacccctgtggcctcacctatctgcgggaagactcgtggaacaacccctgtgtcgaagcctctggaagatatcgaggcccgcccagatatgcagctggaaagtgacttgaagctggacagattggagacattcctccgtaggctgaacaataaggtgggtggtatgcatgagacagtactgactgtcacagggaagtccgtcaaggaagtaatgaagcccgacgacgatgaaactttcgccaaattctatcgcagcgtcgattacaatatgccacgcagcccagttgagatggatgaagactttgatgtgatatttgatccctacgcccctaaactgacttcgagtgtggctgagcacaaacgagccgtgagacctaagcggagagtgcaggcatccaagaatcctttaaagatgctggccgcgcgtgaagatctcctgcaggaatataccgaacagcgtttgaacgttgcttttatggaatcaaagcggatgaaggtcgagaaaatgtcaagcaactcaaatttttctgaagtaaccctagcaggcctggcttccaaggaaaatttctccaatgtatctttgcgctcagtgaatctaactgaacagaattctaacaactctgccgttccttataagagactgatgctgctccaaatcaaagggaggcgccatgtccagactagacttgtggagccaagggccagcgccctgaatagcggtgattgcttcctgctcctaagcccacactgttgctttttgtgggtgggtgagtttgcgaacgtgattgagaaggcgaaggccagtgaattggcaacattgattcagaccaaacgtgaacttggttgtagggccacctacattcagactattgaggaaggcatcaacacccacacccatgcagctaaggatttctggaaactgctaggggggcagacgtcctatcagtccgccggcgacccaaaagaggatgagctttacgaggccgctataatcgagaccaattgcatttaccgcctgatggatgataagttagtgcccgatgacgactactggggcaagattccgaaatgttcactgctccagccgaaagaggtgctggtcttcgattttggatcagaggtctacgtgtggcacggcaaggaagtgactctggcgcagaggaagatcgcattccagcttgctaagcatctgtggaacgggactttcgattacgagaattgtgatattaacccgctggaccccggggagtgtaaccctctgatccccaggaaagggcaagggaggccagactgggcaatcttcgggaggctgaccgagcataatgaaactattctgtttaaagaaaaattcttggactggacagagctgaaaaggtcaaatgagaagaatcctggggagctggcacaacacaaggaagatccgcgtactgatgttaaagcatatgatgtgactcgtatggtgagcatgccccaaaccacagctggtacgatcttagatggtgttaatgtggggcggggatacggactggtcgagggccatgataggcgccagtttgagatcacatcagtgtcggtggatgtgtggcacatcctcgagttcgactatagccggctgcccaaacagtctatagggcagttccatgaaggcgatgcatacgtggtcaaatggaaatttatggtaagcacggccgtcggaagcagacagaagggggagcatagtgttcgggccgctggtaaggaaaaatgcgtctatttcttttggcaaggtaggcacagcaccgtgtcggagaagggcacatcggctcttatgacggtcgagctggacgaggaacgcggcgctcaggtgcaggtgctgcaagggaaagagcctccttgctttcttcagtgtttccagggagggatggtggtacatagtgggaggcgtgaggaggaagaggaaaacgtgcaatccgaatggaggctgtactgcgtgaggggagaagtgccagtcgaaggcaacctgttagaagtagcctgccactgttcgagtttacgttctagaacctcgatggttgttcttaatgtgaataaggctctcatttatttgtggcacggatgtaaagcacaagcgcataccaaagaagtcggacggaccgcggccaacaagatcaaagagcagtgcccattggaagcggggttgcactctagctccaaggtgacgattcacgagtgtgacgaggggtcagaacctcttggtttttgggacgcattagggaggcgggataggaaagcctatgactgcatgctccaggacccaggctccttcaattttgcaccgcgcctgtttattctatcctcctcatctggagacttcgcagcaaccgaattcgtttaccccgctcgtgccccttcagtcgtctcttctatgcccttcctgcaggaggatttgtatagtgctcctcaacctgccttgtttttagtcgacaaccaccatgaggtttacctgtggcaaggctggtggcccatcgaaaacaagatcactggatctgctcggattagatgggcttctgacagaaaatccgccatggaaaccgtgctgcagtactgcaagggtaagaacctgaagaagcctgcacctaagagctatctcatccacgccggtctggaacccctcactttcaccaatatgttccctagctgggagcacagggaggacattgcagagattaccgagatggacacggaggtatcaaatcagattacactggtggaggatgtgcttgcaaaattatgcaagacgatctacccgttagctgacctcctggccaggcccctccccgagggcgttgaccccctgaagctggaaatctacctgactgatgaagatttcgagtttgccctggatatgacacgggatgagtataatgcgctgccagcctggaagcaggtcaatctgaaaaaggccaaaggactgttctag

SEQ ID NO: 17554 - DNA, 5367 bp, synthetic construct
  misc_feature 1..5367: note = Description of Artificial Sequence: Synthetic coding sequence
  source 1..5367: mol_type = other DNA
atgaaacgaaaagaaagaatcgctcggcgactggaaggtattgagaacgacacccaacccattctgctgcaatcatgcacagggctagtcactcataggctcttagaggaggacactccacggtatatgagggcctccgatcctgctagcccgcatataggaagatcaaacgaggaggaagagacctcagatagtagcctggagaaacaaacacgtagcaagtactgtaccgaaactagcggtgtccacggggacagcccctacgggtcagggaccatggacacccactctttggaatccaaagctgagaggatcgcacgatacaaagcagagaggaggcgacagctcgcagaaaagtacgggctgaccttggatccggaagctgattctgagtacttatcccggtataccaagagccggaaggaacccgacgccgtcgagaagcggggtggcaaatctgacaaacaggaggaaagtagcagggacgcttccagcctctacccgggaaccgagacgatggggctgcgtacatgtgcaggagaatcaaaagactacgcgcttcacgtgggggacggatcaagtgacccagaggtcctgctgaatatcgagaatcagcgtcgcggccaagagctctccgccacgagacaggcccacgacctgtcaccagccgcggaatcttcctctacattctctttcagcgggcgggactccagtttcactgaagtgccaaggagtcctaagcacgctcatagtagttctctgcaacaggccgccagtcgctctccgagcttcggagacccccagttgagcccggaagcaaggccaaggtgtaccagccacagtgagaccccaaccgtggatgatgaggagaaagtcgacgagagggcaaaactgtcagtggccgctaagcgactactgtttagggaaatggagaagagcttcgatgagcagaacgtccctaaaaggcgctctcgaaataccgctgtcgaacaaagactgcggcggttacaggatcggagtctgactcagcccatcacaactgaagaggtggttatcgcagctaccctgcaggcatccgctcaccagaaagcacttgctaaggaccagaccaacgagggtaaagaactggctgagcagggcgagccagattccagcaccctaagcctggcagaaaagctggccctgttcaacaaactctctcagcctgtgtcgaaagcgatctccactcgaaatcgcatagatacgagacagagacgcatgaatgctaggtaccaaactcagcccgtcaccttgggcgaggtcgaacaggtgcagtcaggtaaactaatccccttctcacccgccgtgaacacgtccgtttccacagtggcatcaactgtggctcccatgtacgcgggggacttgagaacgaaacctccattagatcacaacgcttcagccacagattacaaattctcctcctccattgagaactctgacagtccagtgaggagtatcctgaagtctcaagcatggcagcccctagtggaaggcagtgagaacaaggggatgctccgggaatacggagagactgagagcaaacgcgccttgaccggacgtgactccggcatggagaagtatgggagcttcgaagaggccgaagcttcataccctattttaaatcgcgcaagggaaggcgattcccacaaggagtcaaagtacgccgtgccacggaggggaagtctagaacgtgctaaccctcccattacccacctgggcgacgagcccaaagagttcagtatggcgaaaatgaatgcacaaggcaacctcgacctgagggaccggctgccatttgaggagaaggtcgaagtggagaacgtgatgaagagaaagttctctctgcgagcggctgaattcggagagcccacctcagaacagactggaacagccgctgggaagactattgcccagactaccgcacccgttagttggaagccccaggactcatctgagcagccgcaagaaaagctgtgtaaaaacccttgcgccatgttcgcagctggagagattaagaccccaactggcgagggcttactcgattctccatctaagaccatgtccattaaagagcggctggccctccttaaaaaaagtggtgaagaagactggagaaatcgcttatcacgcaggcaggagggcggaaaagcaccagcaagcagcctccacacgcaagaggctggacggtccctgatcaagaaacgtgtgacggaatctcgggaatcgcagatgaccattgaggagagaaaacaactgattactgtcagagaggaggcatggaagacacgcgggaggggggccgccaacgatagtacacaattcactgtggccggaaggatggttaaaaagggcctggcaagccctaccgctataacgcctgtggcctcccccatctgcggcaaaactagaggcactacgccagtgagtaagcctctggaagatatagaagcccggccagatatgcaactagagagtgacctcaagttagatcggctagagacatttctgaggcgattaaataataaagtaggtgggatgcacgagactgtgctcactgtcaccggcaagtccgtcaaagaggttatgaaacctgatgacgatgagacctttgcgaagttctacaggagcgtggactacaacatgcctcgatcaccggttgaaatggacgaagatttcgatgttattttcgacccgtacgctccgaaactcactagttccgtggccgaacacaagagagctgtgaggccaaaaagacgggttcaggcttccaaaaacccactgaagatgctcgccgcacgagaggatctgttgcaagagtatactgaacagcgcctgaacgtcgcattcatggaaagtaagcgcatgaaggtcgagaagatgagctcaaactctaacttcagtgaagttacgctggcgggactggcctcaaaagaaaacttttcgaacgtgtctctacggagtgtgaatcttacagagcagaactccaataatagtgctgtgccttacaagcgtctcatgttgttgcaaatcaagggccgccggcacgttcagaccagactggtcgaaccccgtgctagtgctctgaatagtggagattgcttcctgctcctgagtccacactgctgctttttatgggtcggcgagtttgcaaacgtgattgaaaaagctaaagccagcgaactagccacactcatacaaacgaaacgcgagctcggatgcagggccacctacatacaaaccattgaggagggcataaatacacatacacatgcagcgaaagatttctggaagttattgggtggacagacctcttaccagagtgccggcgatcctaaggaagacgaactttacgaagcagctatcatagagaccaactgcatctatcgtcttatggacgacaaactggtccctgacgacgactattgggggaagattcccaagtgcagcttgcttcaaccaaaggaagtgctcgtgttcgactttggatctgaggtctacgtgtggcatgggaaggaggtgacactcgcccagcgtaagatcgccttccagctggccaaacatctgtggaacggcaccttcgactacgagaattgtgatatcaaccccctggaccccggagagtgcaacccactgataccaagaaagggacagggacgtcccgattgggctatctttggacggcttaccgaacataatgagactatcctattcaaagagaaatttcttgactggacggaactaaaacgctctaacgaaaaaaatcctggcgaactagcacagcacaaggaggacccacggaccgacgtgaaggcatacgacgttactcgcatggtatccatgccccagacaacggctggtaccatcctggacggcgttaacgtgggccgtggctacggcttggtggagggccatgaccgtaggcaatttgaaatcacttctgtatctgtcgacgtttggcacattctggagtttgattactcacgcttgccaaagcagagcattggacaattccacgaaggggatgcctacgtggtgaaatggaaattcatggtctctaccgcagtgggatcaaggcaaaagggggaacactctgttagggcagcaggcaaggaaaagtgtgtctacttcttttggcaaggcagacattcgaccgtgagtgaaaaaggcacttctgccttaatgacggtggaactggatgaggagcggggggctcaggtccaggtgttacaggggaaagaacccccatgcttccttcagtgttttcagggtgggatggtggtacacagcggtagacgtgaggaagaagaggagaacgtccagagtgagtggcgactgtattgtgtgaggggagaggtgcccgtcgagggaaacctcctggaagtggcttgccactgctctagcctgagatcacgtacttccatggtcgttcttaacgtgaataaggcgctgatttacctgtggcacggatgcaaagcgcaggcacacacaaaggaggtaggccgcacagcagccaataagatcaaggagcagtgccctcttgaggccggactgcacagtagtagtaaagtgactatccacgagtgtgacgaaggcagcgagcccctcgggttctgggacgccctgggcagacgggacagaaaagcctatgactgtatgctacaggatcccgggagcttcaatttcgccccccggttattcatcctgagctcttccagtggagacttcgcagcaaccgaattcgtatacccagcaagagcaccctctgtcgtatcttctatgccgtttctgcaggaggatttgtacagcgcgcctcaaccagcgcttttcttggtggacaaccaccacgaagtctacttatggcaaggatggtggcctatagaaaacaagatcacgggatccgctcggattagatgggcatcagatcgaaagtctgctatggagacggtgctacaatactgcaaaggcaagaatttgaagaagccggcccctaaaagctacttgatacatgcaggcctggagccccttaccttcaccaatatgtttccatcatgggagcatagagaggacatcgctgaaatcactgaaatggacacagaagtttccaaccagattacactggtggaggacgttttagcaaagctctgcaagaccatataccctctggccgatttgctggctcgcccactgcccgaaggagtggatcctctgaagctggagatctacctgactgatgaagatttcgagtttgcgttggatatgacgagagacgagtacaacgcgttgccagcctggaagcaggtgaacctcaagaaagctaagggtcttttttag

SEQ ID NO: 17555 - DNA, 3387 bp, synthetic construct
  misc_feature 1..3387: note = Description of Artificial Sequence: Synthetic coding sequence
  source 1..3387: mol_type = other DNA
atgtttgctgccggggaaataaagactcctacaggagaagggctcctggatagtccgtcaaagactatgagcatcaaggagagattggcactgctgaaaaaaagtggggaagaagattggcggaaccggctgagtcggcgacaggagggaggtaaagcgcccgcatccagtctgcacacacaagaagccgggaggtctcttataaagaaggaggagggcggagttgcggatgattcagctatttctaacctcttgtggcgcgtaaccgagtccagagaaagccagatgaccattgaggagcgtaaacagctcattacagtaagggaggaagcttggaaaaccagaggccggggagcagcaaatgactctacccaattcactgtggctggaaggatggtgaaaaagggactcgcttctcctacagccattactcctgtcgcttcacccatttgtggaaagaccagagggacaaccccggtttccaagccgttggaggatattgaagctagacccgatatgcagctggagtctgacctgaagctggatcgactggagactttcctgaggagactcaataacaaagtcgggggtatgcatgaaaccgtgctgactgtgaccggcaaaagtgttaaggaagtgatgaagcctgatgatgatgaaacattcgctaagttctaccgctctgtagactataatatgccgcgctcccccgtcgagatggacgaggattttgatgtgatctttgacccttacgcccccaaactcacttcatctgtagcagagcacaagcgggccgtgcggcccaagagacgtgtccaggcgtccaaaaacccccttaaaatgctggctgcccgcgaggatttactgcaggagtacacagagcagaggctgaacgtagccttcatggagagtaagaggatgaaagtggagaaaatgagttcaaattcgaatttctcggaggtcacactggcaggactggcatcaaaagagaacttttcgaacgtaagcttgcgatcggtcaatcttactgagcaaaattccaacaactcagctgtcccctacaaacgtctgatgcttctccagatcaaggggagacgacacgtacagacaaggctagttgagccacgagcctcagccttgaattctggtgactgtttcctgctgctctctcctcactgttgctttctgtgggttggtgagtttgctaacgtgatcgaaaaggcaaaagcaagcgagttggctacactgatccagaccaagcgcgaattaggatgtcgggctacttacatccagaccatagaagagggaatcaacacccacacgcatgccgcaaaggacttttggaagctgctcggtggacaaacatcctaccaatcagccggagatcctaaggaggatgaactgtacgaggccgctatcatcgaaacaaattgtatatatcgtttaatggatgacaaactggtacccgatgatgattattggggaaagattccaaagtgttcccttctccagcctaaggaagtcctggttttcgattttgggtctgaggtctacgtctggcacggcaaggaggtaactttagcccaaagaaagatcgctttccaattggctaagcacttgtggaacggcacattcgattacgagaattgtgacatcaaccctctagacccgggcgaatgcaatcctttaattccacggaaagggcaagggcgacctgactgggccatctttgggcgcctcacagagcacaatgaaaccatcctctttaaagagaaattcctggactggaccgagctgaagagaagcaatgagaaaaaccccggcgagctagcccagcacaaggaggatccccgcacagatgtgaaagcgtacgatgtgaccagaatggtgtccatgccgcagactacagcagggaccattctcgatggtgtgaatgtgggcagggggtacggtcttgtggagggccacgacagacgccagtttgaaataacgtccgtgagcgttgacgtgtggcacatacttgagtttgactattcccgcctcccaaagcaaagtatcggtcagtttcatgagggagatgcttatgtagtcaagtggaaatttatggtgagtactgccgtaggctctagacaaaaaggtgagcattctgtcagagctgctggcaaggaaaaatgcgtgtacttcttttggcagggcagacattccacagtgagtgaaaaagggacaagtgccctgatgacagtcgagctagatgaggagcgcggcgcacaggtccaggtccttcaggggaaggagccgccttgtttcttgcagtgcttccaaggcggtatggttgtacatagcggccgcagagaagaagaagaagagaacgtccagtctgagtggcgcctatattgcgtgagaggtgaagtgcctgtagagggtaacctgctggaagtggcatgtcattgtagcagtttacggagtagaacctccatggtggtgctgaacgtcaataaagccctaatttatctctggcacgggtgtaaggctcaggcccacactaaggaggtgggtcggaccgcagcaaacaagataaaggagcagtgcccactcgaggccggccttcacagctcaagtaaggttaccatacatgaatgtgatgaaggctctgagccattaggcttctgggatgctctgggacgcagggatcgcaaggcctacgactgcatgctccaggacccaggcagcttcaattttgctccacggctttttatattgagctcttcatctggcgatttcgcagcaactgagtttgtgtaccccgcccgcgcaccttctgttgtctcttctatgcccttcctgcaggaggatctgtattcagccccgcagccggcgctgtttctggtcgacaaccatcacgaggtgtacctgtggcaaggatggtggccaattgaaaacaagattacagggtccgcgcgaattaggtgggccagtgacagaaagtctgccatggaaacagtgctccagtactgtaagggtaaaaatctgaaaaagccggcaccgaagtcctacttgatacatgcgggccttgagccgttgacctttaccaacatgttcccttcatgggagcaccgtgaggacatcgctgaaattacagaaatggacactgaagtgtcaaaccaaatcacactggtggaagacgtgttggcgaagttgtgcaaaacaatctatccactcgcagatttgctcgccaggccacttcctgagggagtcgacccactgaagctggagatttacctcactgacgaggattttgaatttgcattggacatgacaagagatgaatataacgcactcccagcatggaaacaagttaacttaaaaaaagcgaaaggactgttttag

SEQ ID NO: 17556 - DNA, 2301 bp, synthetic construct
  misc_feature 1..2301: note = Description of Artificial Sequence: Synthetic coding sequence
  source 1..2301: mol_type = other DNA
atgaagcgcaagtttagccttagagccgccgagttcggagaacccacctcggaacaaacagggaccgctgcgggcaaaacgatcgcacagacgactgcccccgtgagctggaaacctcaggacagctcggaacagccacaggagaaactgtgcaagaatccctgcgcgatgtttgcagccggcgagatcaagacgccgacaggagagggtctcctcgattccccgtccaagacaatgtcgattaaagaacggctggcgcttctcaaaaaatccggcgaagaagattggaggaatcgtctctcacgccgacaggagggggggaaggcacccgcatcctctctgcacacgcaggaggccggcagatcactaattaaaaaacgggtcacagagagccgtgaaagtcagatgactatcgaggagaggaaacaattaattacagtgagagaagaagcctggaagactcgggggcggggagcagccaatgacagcacacaatttacggtcgccggcagaatggtgaagaagggactggcttcgcctacagccatcacccccgtggcgtccccaatatgcggcaaaacccggggaaccactccagtgagcaaacctctggaagacatcgaagctcgcccagatatgcaattagagtccgatctgaagctggataggctggagacattcctccgcagacttaacaacaaagtgggcggcatgcatgagacggtgctcacagtcacagggaaatccgttaaagaggtcatgaagcccgacgacgatgagacattcgccaaattctaccgctctgtggactataacatgccacggagcccagtggaaatggacgaagattttgatgtaatctttgacccctacgcacccaaacttacaagcagtgtggcagaacacaagcgggccgtgaggcccaaaaggcgtgtccaggccagcaaaaaccccctcaagatgctggctgcccgcgaggatctgcttcaagaatacacagaacagcgactgaatgtggctttcatggaaagcaagcggatgaaggtagagaaaatgtcgtccaatagcaatttctctgaggtgacgctagccggcttggcatccaaggaaaacttttccaatgtgtcactccgcagtgtgaacctcaccgagcagaacagtaacaacagtgccgtgccttacaagcgtctgatgctgctgcagataaagggaaggagacacgtacaaaccagactcgtggaacctcgcgcatcagcacttaactcaggtgactgctttctgctgttgtcaccgcactgctgtttcttgtgggtgggagagttcgcgaacgtgattgagaaagcaaaggccagtgaactggctacactgatccaaactaagcgggaattggggtgccgagcgacttacatccaaactattgaggagggtattaatacacatacacacgcagccaaagatttctggaaacttctgggcgggcagacttcttaccagagcgcgggcgaccccaaagaagacgagctgtatgaggcagcaatcatagagaccaattgtatttacagactgatggacgacaaactggttcctgacgacgactactggggaaagatccccaaatgctcccttctccaaccaaaagaggtcctggtttttgactttggatcagaggtttacgtttggcatggtaaggaagttacgctagcccagcgaaaaatagcctttcagctggctaagcacctgtggaatggtacgtttgattatgaaaactgcgacattaatccactggaccccggagaatgcaatcctctgattcccagaaagggacagggtaggcctgactgggcaatctttggcagactgactgagcacaacgaaacaatattgtttaaagaaaagttccttgactggaccgagctgaaacgttcaaacgaaaaaaatccgggcgagttggctcagcacaaggaagacccaaggaccgatgttaaggcctatgacgttacgcgaatggtgtcaatgccccaaactacagctggaaccatactggacggcgtgaacgtggggcggggatatggattggtcgaaggtcatgaccgaaggcaattcgagatcacgtccgtaagcgtggatgtgtggcatattctggagttcgactacagtaggctgccaaaacagtccattggtcaattccacgaaggcgacgcctatgtggtgaagtggaaatttatggtttcaacggctgtattaagagcctggaggggcgcccgagggcgagagtttgccggatccggtcttagtttatag

SEQ ID NO: 17557 - DNA, 1758 bp, synthetic construct
  misc_feature 1..1758: note = Description of Artificial Sequence: Synthetic coding sequence
  source 1..1758: mol_type = other DNA
atgaatagttccgacgtctcttcgcttaaacatcccagctctcttgcatcccccaccgccatcacccccgtagcctcacccatttgcgggaagacacgaggcacaacgccagttagtaaaccccttgaggacatagaggcccgccccgatatgcaactggagagcgatctcaagctggacaggctagaaacattcctgcgacgcttgaacaacaaagtgggcgggatgcatgaaactgtcctgactgtcactggtaagagtgtgaaagaagttatgaaaccagatgacgatgaaacttttgcaaagttttacaggagtgtagactataatatgcctcgaagccctgttgaaatggatgaggacttcgatgtaattttcgacccttacgcccccaagctcacgagcagtgtggctgagcacaaacgtgctgtacggccaaagcgtcgtgtccaggcctctaaaaacccactgaaaatgctggccgccagagaggatctactgcaagagtacaccgagcagcgccttaacgttgcgtttatggaaagcaagcgcatgaaagtggagaaaatgagctcaaacagtaacttctctgaagtcacactggctggtctggccagtaaggaaaactttagcaacgtgtcgctgaggtccgtgaatctgactgagcagaattccaacaactctgccgtcccatacaagcgcctgatgttacttcaaatcaagggccggaggcacgtacaaacgagattggtcgagccaagggcaagtgccctcaacagcggcgattgtttcctactccttagcccacattgttgcttcttatgggtcggagagttcgcaaatgtcatagaaaaagctaaagccagcgaactggccaccctaatccagaccaaaagggagttgggctgccgtgccacgtatatccaaaccatagaagaaggaattaatactcacacccacgcagccaaggacttttggaagctgctgggagggcaaacaagctaccagagcgccggcgaccccaaggaagacgagttatatgaggccgccatcatcgaaacaaactgtatctatcgactgatggacgacaaactcgtgcctgacgatgattattggggcaaaatccccaagtgcagcctgctgcaacctaaggaggtactggtgttcgattttggaagcgaagtctatgtctggcacggaaaagaggtaacactcgctcagcggaaaatcgctttccaacttgcgaaacatttgtggaatggcacattcgattatgagaattgtgacattaatccgctcgatcctggcgaatgtaaccctctcatcccacggaaagggcaaggccggcctgactgggcgatcttcgggcgccttacagagcataacgagactatattgtttaaagagaagtttctggattggaccgagctgaagcgatctaacgagaaaaatcccggggagttggcccaacacaaagaggacccacgcaccgacgtgaaggcatacgatgttacccgcatggtctccatgccccagactaccgccggcaccatattagacggagtcaacgtggggcggggctatggccttgttgaagggcacgataggaggcagtttgaaatcacttccgtctctgttgatgtttggcacattctcgagttcgattattcaagactgcccaagcagtccatcggtcagtttcacgagggtgacgcttatgtggtcaagtggaaatttatggtgtccaccgcagggtag

SEQ ID NO: 17558 - DNA, 636 bp, synthetic construct
  misc_feature 1..636: note = Description of Artificial Sequence: Synthetic coding sequence
  source 1..636: mol_type = other DNA
atggtcgcgcataaccaagtggccgctgacaacgcagtgtcaaccgcggccgagcccagacgtcggcccgaaccctcctcaagtagttccagtagcccagcggctcccgcccgcccccgtccctgcccggccgtgccggccccagcgcccggggatactcactttagaacattcaggagtcatgctgactacagacgcatcactagggccagcgctctgctggatgcatgtggattttactggggtccattgagtgtgcatggcgcccatgaacgccttagggccgagcccgttgggacctttctggtaagagacagtcgacaaaggaattgctttttcgccctcagcgtgaaaatggcctcaggtcctacttccattcgcgtacactttcaggctggcaggttccaccttgatggatcgagagagtcattcgattgtcttttcgagctgcttgagcactatgtggcagctccacggaggatgctgggcgctcctcttagacagcggagagtgcgacctttacaggagctgtgcaggcaaagaatcgtcgccacagtgggcagagagaatctggccagaatcccattgaatcccgtgctgagggattatctgagcagtttcccattccagatttag

SEQ ID NO: 17559 - DNA, 678 bp, synthetic construct
  misc_feature 1..678: note = Description of Artificial Sequence: Synthetic coding sequence
  source 1..678: mol_type = other DNA
atggtcacacactcaaagtttccagccgcagggatgtcacggcctctagacaccagcttacgactgaaaaccttcagctcaaagtcggagtatcagttagtggtaaatgctgtgcgtaaactccaggagtctgggttctactggtcagcagtgacaggtggtgaagcgaacctcttgctatctgcagagcccgcaggaacgttcttgatccgagacagctcggatcaacgtcatttcttcaccctgtcggtgaagactcagtctggcacaaaaaatttaaggattcagtgcgaaggtggtagcttcagcctgcagtccgaccctagatcgacccagcctgtacccagattcgactgtgtcctgaagctcgtccatcactatatgcccccccccggcgcacccagctttccctctccaccaaccgaaccttctagcgaggtccccgagcagcccagcgcccaaccgctgccagggtcaccaccgcgccgtgcatactacatctattccggcggcgagaaaatacctctagtcctgagtcgcccactctcaagtaacgtcgctacgttacagcacctctgtagaaaaaccgtcaatggtcaccttgacagttatgagaaggttactcagttacccggtccaattcgcgaattcctggaccagtacgatgcgcccctgtag

SEQ ID NO: 17560 - DNA, 1302 bp, synthetic construct
  misc_feature 1..1302: note = Description of Artificial Sequence: Synthetic coding sequence
  source 1..1302: mol_type = other DNA
atggccgaactccggccctctggtgctcccggtccgaccgcgcctcccgcccctggcccaacagcccctccagccttcgcctcacttttcccacctggtttgcacgcgatctatggggagtgccgaaggctttatcctgaccagcccaacccattacaagtcactgccattgtcaaatactggcttgggggtcccgacccacttgattacgtatccatgtatcgcaacgtggggagtccaagtgcgaacattcctgaacattggcattacatctctttcgggctgagcgacctctacggcgataatcgggtgcatgagtttaccggaacagacgggccttctgggttcggatttgaactgacattccgcctaaagagggagaccggagagtcagcgccccctacctggccagccgaattgatgcaaggcctggctagatacgtgttccagagtgaaaacacattttgctcaggcgatcatgttagctggcactcacccctcgacaacagtgaatcacgcatccagcacatgctgcttaccgaggacccgcagatgcagcccgttcagactccattcggtgtggtcacatttttgcagatagttggggtctgtacagaggagttgcacagcgctcagcagtggaatgggcagggaatactagagcttctgcgaacggtaccaatcgctggcggcccctggctgattactgacatgcggcggggagaaactatctttgaaattgacccacatctgcaagagagagtggataaaggtatcgagaccgatggctctaacctaagtggcgtatctgctaagtgcgcttgggacgacctcagcagacctcctgaagacgatgaggactctcgcagtatctgtatcggcacgcagccacggcgtctctccggaaaggatacggaacagattcgggagacgctgaggaggggtttagagatcaacagtaaaccggtgctgccccctatcaaccctcaaagacagaatggactcgcacacgatagggcaccctcgagaaaggactcactggaatccgacagctccactgcgattatccctcacgaacttatacgcaccagacagcttgaatccgtgcatctcaaattcaatcaggagagcggcgccctgattccactttgtctacgtggacgtctgctacacggccgccactttacatacaagtccattactggagatatggcaataactttcgtctccactggcgttgaaggtgcctttgccacagaggagcacccgtacgccgcacacggcccttggctccagttatag

SEQ ID NO: 17561 - DNA, 1455 bp, synthetic construct
  misc_feature 1..1455: note = Description of Artificial Sequence: Synthetic coding sequence
  source 1..1455: mol_type = other DNA
atggccgagctccgaccctctggagccccaggacccacagcacccccagcccctggacccaccgccccccccgcctttgcgagtctgtttccacccggattgcacgccatttatggtgaatgtagacgtttgtacccagatcagcctaatcccctgcaagtgaccgcaatcgttaaatactggctcggtgggccggacccccttgactacgtctcaatgtatcgcaatgttgggtctccgtccgccaacatccccgagcactggcattatatttccttcgggctttccgatctctatggggacaaccgggtgcatgagtttaccggcacagacggaccgtccggttttggattcgagctcaccttcaggcttaagcgggagaccggagaaagcgccccacctacctggccggcggaactgatgcaaggcctagcaaggtacgtgtttcagtctgagaacacattttgttccggcgaccacgtctcctggcactcacccttagacaactccgagtcacggatccagcatatgcttttaacagaggacccacaaatgcagcccgtgcagactcccttcggcgtcgtgacattcctgcagatagtaggtgtttgcactgaggagcttcattcggctcagcagtggaacggccaggggatcctggagttactccgcactgtgccaatcgccggcgggccgtggctcataactgacatgcgtcgcggtgagactatatttgaaatcgatccgcatctgcaggagcgagtggataagggaattgagacagatggatctaatctgtctggggtcagcgctaagtgcgcttgggatgatctctcaagacccccagaagacgatgaggactctcggtctatttgcatagggactcagcccagaaggctgtcaggcaaagacactgagcagatcagggagaccctgcggaggggcctcgaaattaacagcaagccagtccttcctcccatcaatccacaacgacaaaatggactggcacacgatcgggctcccagtagaaaagacagtctcgaaagcgactcgtccaccgccatcataccccacgagctaatccgcacacgccagctggagagcgtgcacctaaagttcaaccaggagtctggagcattaatacctctgtgtctcagaggtagacttctgcatggacggcatttcacctacaaaagcataacaggcgatatggctatcaccttcgtctctaccggcgtcgagggcgcattcgcaacggaggaacatccgtacgcagcccacggaccttggctgcagattttgttgactgaggagttcgtggagaagatgctggaggatctggaggatctgacaagcccggaagaattcaaacttcctaaggagtatagctggcctgaaaagaaactcaaagtgagcattcttcctgacgtcgtgtttgattccccactgcactag

SEQ ID NO: 17562 - DNA, 240 bp, synthetic construct
  misc_feature 1..240: note = Description of Artificial Sequence: Synthetic coding sequence
  source 1..240: mol_type = other DNA
atggcaaggagccggctgaccgcaacttccgtatcacaagtgcaggagaacgggttcgttaaaaagctcgagcccaaatccgggtggatgacgttcttggaggtgaccggcaagatctgtgagatgctcttttgccctgaagcaattctattgacacgcaaagacactccgtattgtgagactgggttgatttttcttacacttaccaaaacaatcgccaacacatatttctatttttag

SEQ ID NO: 17563 - DNA, 240 bp, synthetic construct
  misc_feature 1..240: note = Description of Artificial Sequence: Synthetic coding sequence
  source 1..240: mol_type = other DNA
atggcgcgatccaggctgacagcgacttccgtcagccaggtgcaggaaaatggctttgtcaaaaagttagaacccaaatctggatggatgacatttcttgaagttacgggaaaaatatgcgagatgctcttttgtcctgaggccattcttctgactagaaaggatacaccctactgcgaaactggcctgatcttcctaaccctgaccaaaaccatcgctaatacgtacttctatttctag

SEQ ID NO: 17564 - DNA, 1245 bp, synthetic construct
  misc_feature 1..1245: note = Description of Artificial Sequence: Synthetic coding sequence
  source 1..1245: mol_type = other DNA
atgaatttgcagcgatactggggagaaatccccattagctcctcccaaactaatcgctccagctttgatctcctccctagagagtttaggctcgttgaagtgcacgacccccctctccatcagccgagtgcaaacaagcctaaacctccaaccatgctggatatacctagtgagccttgttcgctgacgatacatacgatacaactaatccaacataaccgacggctgaggaaccttattgctactgctcaggcgcagaaccagcagcagaccgagggcgtgaagacagaggagtctgaaccgctccccagctgtcctggatctccaccgctacctgacgatctgctgcctttagactgtaaaaaccccaacgcacccttccaaatccgtcatagtgaccctgagtcagatttttatagaggcaaaggtgaaccagttaccgagctaagttggcattcatgcagacagttgttatatcaggccgtggccaccatcctggctcacgctgggttcgactgtgcgaatgaaagtgtcctggagacattgacagatgtagcgcacgaatactgccttaagttcactaaacttctccgctttgcagtagatcgtgaggccaggcttgggcagaccccttttcctgacgtgatggaacaggtgtttcacgaagtaggaatcggatcagtcctttcactacaaaaattctggcagcatcgtattaaagactatcactcttacatgttgcaaattagcaaacaactttcggaagaatatgagcggattgtgaaccccgaaaaggcaaccgaagatgcaaagcccgtgaaaatcaaggaggagcccgtctcagatattacatttcccgtgtctgaggagctcgaggccgacttggccagtggggatcaatctttacccatgggcgttctcggagcgcaatccgagcgctttcctagcaacctcgaagtcgaagcttcccctcaggccagcagcgccgaagtgaatgccagtccgttgtggaaccttgcccatgtgaagatggagccccaggagagcgaggagggaaatgtaagcgggcatggtgtactagggtctgacgtgtttgaggaacccatgtctggcatgtcagaagcgggtatacctcaaagtcctgatgattccgactcgtcttatggttctcattcaaccgattcattgatgggttcatctccagtgtttaaccagagatgcaagaaacgcatgagaaagatctag

SEQ ID NO: 17565 - DNA, 840 bp, synthetic construct
  misc_feature 1..840: note = Description of Artificial Sequence: Synthetic coding sequence
  source 1..840: mol_type = other DNA
atgaacttgcaatcagggaaaggggagcccgtgactgagctctcatggcactcctgccgccagcttctgtaccaggccgtcgccactattctcgcccatgccggattcgactgcgcaaacgagtctgtgctggagaccttaactgacgtagcacacgaatattgcctgaagtttacgaagctgctgaggtttgcagtggatagggaagccaggcttgggcagaccccgtttccagacgtgatggaacaggtgttccacgaagtgggaattggcagcgtgctcagccttcaaaaattttggcagcatcgtataaaggactatcacagctacatgttacaaattagtaaacagctgtcagaagagtacgagagaatcgtgaaccctgaaaaagccaccgaggacgcaaagccagtcaaaatcaaagaagaacctgtatccgatatcacattccctgtgagtgaggagctggaggcagatcttgccagtggcgatcagtctctgcccatgggagtccttggagctcagagtgaacggttcccttccaaccttgaagtggaagcaagcccccaggcctcctcagccgaggtaaatgcatcccctctctggaacctggcacacgtgaagatggaaccgcaggaatctgaagagggcaacgtgtcaggccatggggtattggggtcagatgtcttcgaggagccgatgagcgggatgtctgaagcaggaattcctcagagcccagatgactctgattcttcatacggttctcattccaccgacagtttaatgggctcaagtcccgtgttcaaccaacgatgcaagaaacggatgcgcaagatctag

SEQ ID NO: 17566 - DNA, 1239 bp, synthetic construct
  misc_feature 1..1239: note = Description of Artificial Sequence: Synthetic coding sequence
  source 1..1239: mol_type = other DNA
atgctacggtattggggggagatcccaatttcttcctcccaaaccaacagatccagctttgatttgctgccgcgggagtttcgtctggtggaggtgcacgaccctcccttacaccaaccgtcagcaaacaagcctaaaccacctaccatgctggatatccccagcgagccttgtagcttgactatacacactatacagctcatccagcataatagacgtctgcggaacttgattgccaccgcccaagcccaaaatcagcagcaaacagaaggcgttaagaccgaagagtccgaacccctgccttcatgccctggctctcctcccctccctgatgacctgttgcctcttgattgcaagaatccaaatgcaccctttcaaatccggcattcagatcctgaatccgatttctaccgtgggaaaggagagcctgtgacagagcttagctggcacagttgtaggcagttgctctatcaagcagttgcaaccattctggcgcatgccgggttcgattgcgctaacgaatccgtgcttgaaaccctcaccgacgttgcacatgagtattgcctcaaattcaccaaacttttgcgatttgctgtcgaccgagaggctcggctaggccagacaccatttcccgatgtgatggagcaagtcttccacgaagtggggataggtagtgttctgagcttgcagaagttctggcagcatcgcattaaagactatcattcatatatgttacagatttccaagcaactgagcgaagaatacgagcgcatcgttaatccagagaaagccacagaggatgcaaagcctgtcaaaattaaggaagagcctgtgtccgacatcacattccccgtatctgaagagctggaagctgatcttgcctctggcgaccaatctctgccaatgggggtactcggcgctcagagcgagaggttcccctctaatttggaggtcgaggcatctccccaagcaagttccgctgaggtaaacgcatcaccactgtggaacctcgcgcacgtgaaaatggagccccaggagtccgaggagggcaacgtgagcgggcatggagtcttggggagtgatgtattcgaggaacccatgagcggtatgtctgaggccggcataccccagagcccggatgatagtgatagcagctacggcagccatagtactgattctcttatggggagcagtcctgtcttcaatcagagatgtaaaaagcgcatgagaaagatctag

SEQ ID NO: 17567 - DNA, 1239 bp, synthetic construct
  misc_feature 1..1239: note = Description of Artificial Sequence: Synthetic coding sequence
  source 1..1239: mol_type = other DNA
atgctgagatactggggggaaatccccatcagctcctcccaaacaaatagatcctcttttgacttgttgccgcgagaattcagactcgtagaggttcatgacccacccctgcatcagcctagtgctaataagccgaagccacccaccatgcttgatataccctccgaaccttgctccctgaccattcataccatacaactaatccagcataacagacgactccgtaacctgatcgctaccgcccaagctcagaaccagcagcagactgagggcgtgaagaccgaggagtcagagccgctaccatcttgtcctggctcacccccgttgccggacgacctgctgccattggactgcaagaaccccaacgcacctttccagatccgccattccgatccggaatccgacttttatcgaggcaagggtgagcccgtgaccgagctcagttggcacagctgtcggcagctgctctaccaggccgtggccacaatcctggcccacgcaggcttcgattgtgctaatgagtcggtgctggagaccctgacagacgtagcgcacgagtactgtttaaagtttaccaaactccttaggtttgctgtggacagggaggcccggctcggccagaccccattccctgatgtcatggaacaggtcttccatgaagtcgggattggcagtgtcctgtcgctccagaaattctggcagcaccgcataaaggactatcatagctacatgcttcagatatccaaacagctctctgaagagtatgagcgtattgtgaatcccgaaaaagccaccgaggatgccaaaccagtgaaaattaaggaagaaccggtgtccgatataacctttccggttagtgaggaactggaagccgacctggccagtggagatcaatcactgcctatgggagtcctcggcgcacaatcagagcgttttccatccaacctcgaggttgaggcaagtccccaggcttctagcgctgaggtgaacgcctcgccactgtggaacttagcacatgttaaaatggagccacaagaaagcgaggaggggaatgtaagtggacatggagtgttggggagcgatgtcttcgaggaacctatgagtggcatgagcgaggcagggatcccacagtcgcctgacgactccgactcctcttacggctctcattcaacagatagtcttatgggcagttcccctgtgtttaatcagcgatgtaaaaagcgaatgagaaaaatttag

SEQ ID NO: 17568 - DNA, 1239 bp, synthetic construct
  misc_feature 1..1239: note = Description of Artificial Sequence: Synthetic coding sequence
  source 1..1239: mol_type = other DNA
atgttaaggtattggggcgaaatcccaatcagctcaagtcagaccaatcggtcctcattcgatctactccccagggagttccgactggtcgaggtccacgacccaccactgcatcagcctagcgccaataagccgaaacctcctactatgctcgatatccctagtgagccttgtagcttgacaattcacacaatccaacttatccagcataaccgcagactgagaaacctgatcgcgaccgcccaggcacagaaccaacagcaaaccgagggcgtgaagacagaagaatctgagcctctaccatcctgcccaggatctcccccattgccggacgatctgttgccattagactgcaagaatccaaacgccccatttcagatacgccatagtgatcccgagtccgacttctaccggggaaagggcgaaccagtgactgagctgtcttggcacagttgcagacagttactctaccaggccgtggccactatcctagcacacgctggattcgattgtgcaaacgaatcggttcttgaaacactgactgacgtcgcccatgaatactgtttaaagtttactaaactcctgaggttcgccgtcgacagagaggcccgtctgggccaaacacctttcccggacgtgatggagcaggtgtttcatgaagtgggaattggctccgtcctttcccttcagaagttctggcaacatcggataaaggactaccactcctatatgctccagattagtaagcagctgtccgaggaatatgagagaatcgttaaccccgaaaaggccactgaggatgctaaacccgtcaaaattaaggaggagcccgtctccgacatcacattcccagttagcgaggagctcgaggcggatctcgcgtccggcgatcagtcgctgcccatgggggtgctaggagcgcagtctgagcggttcccctctaacctggaagtcgaggcatctccgcaggccagcagcgcagaagtgaatgcatcccctctgtggaatctcgcgcatgtcaaaatggagcctcaggagtcagaagagggaaatgtgagcggccatggcgtcctgggctcggacgtttttgaggagcccatgtccggcatgtccgaggccgggattccacagagccccgatgacagtgactcatcatacggcagccacagtaccgactcactaatgggatcgagcccagtcttcaaccagagatgtaaaaagcggatgaggaaaatttag

SEQ ID NO: 17569 - DNA, 1272 bp, synthetic construct
  misc_feature 1..1272: note = Description of Artificial Sequence: Synthetic coding sequence
  source 1..1272: mol_type = other DNA
atggtgggaatgtccaggttacgcaatgacagactcgctgaccccctgacaggctgctcagtttgttgtaagtccagttggaatcagctccaggacctctgtcgattggccaagcttagctgccccgccctaggaatttcaaagcgaaacctgtatgattttgaagttgagtacctctgcgattacaaaaaaataagggagcaggagtattacctcgtgaaatggcggggataccctgattccgagagtacctgggagcctcgacagaatttgaagtgcgtgcgaatcctgaagcagttccacaaagacttagagcgcgaactcctgagacggcaccaccgaagcaaaacaccgaggcacctagatccatcccttgccaactatctggtccagaaggcaaagcaacggagggccctcagacgctgggagcaggaattgaacgccaaacgctctcatctgggccgtattactgtggagaacgaggtggatctggacggtccaccgcgtgctttcgtgtacattaatgagtacagagtcggcgaaggtattacacttaaccaggtggctgtgggctgtgaatgccaagattgcctttgggcgcccactggcgggtgctgccccggcgccagtctccataagttcgcttacaacgaccagggacaggttaggttgagggccggcctccctatctatgagtgtaacagtcgctgcagatgtgggtacgactgcccgaaccgtgtcgttcagaagggcatacggtatgatctctgtatcttccgcaccgatgatgggcgcggatggggcgttcgcaccctggaaaagattagaaaaaacagcttcgtgatggagtatgttggagaaataattacctccgaggaagcagaacggcgtgggcaaatctatgatagacagggcgcaacctacttgtttgatctcgactacgtcgaggatgtctacactgtagacgcagcatattatgggaatatttctcacttcgtcaaccacagctgtgatccaaatctgcaagtttacaacgtgtttattgacaatctggacgagaggcttcctagaattgcattctttgctactcggactattagggcaggcgaggagctgaccttcgattacaatatgcaggttgatcctgtcgacatggagtctactagaatggacagcaacttcggactggccggactacctggcagtcctaagaaacgcgtgcgtatagaatgcaagtgcggaacagagtcctgtcgcaagtaccttttttag

SEQ ID NO: 17570 - DNA, 1239 bp, synthetic construct
  misc_feature 1..1239: note = Description of Artificial Sequence: Synthetic coding sequence
  source 1..1239: mol_type = other DNA
atggcagagaacttgaagggttgctccgtatgctgtaagtcctcttggaaccagctccaggacctttgtagattggcgaagctgtcatgccctgccctgggaatatctaagagaaatctttacgatttcgaggttgagtatctgtgtgactacaagaagattagggaacaggagtattatttagttaaatggcggggttatcccgatagcgagtccacttgggaaccgagacagaatcttaagtgcgtgcgcatccttaaacagtttcataaggacctggaacgcgaactactgaggcgccaccacaggtcaaaaactcccagacatctggacccttctctcgccaactacctggttcagaaggctaagcagagacgtgccttgagaagatgggagcaggaattgaatgcgaagcggtcccacctgggccgtataacagtcgagaatgaagtcgacttggatggacccccgagagcatttgtgtatattaatgagtacagggtcggtgaaggtatcactcttaaccaggtcgctgtaggttgtgagtgtcaggactgcctgtgggcacctactggcggatgctgccctggagcgagccttcacaaatttgcatataacgatcagggccaggtcagactgagggccggactcccgatttacgaatgtaattcacgttgccgctgcggttacgactgtcctaaccgtgttgtgcagaaaggaatccggtatgacttgtgcatcttccgcaccgatgatggtagagggtggggagttagaactctggagaagatcagaaaaaattcatttgtgatggagtacgtgggggagattatcaccagcgaagaggccgagaggcggggccagatttacgacagacagggggcgacatacctcttcgatttagattatgtcgaggacgtctatactgtagatgccgcttattacggcaacatatctcattttgttaatcactcatgcgacccaaacctgcaggtgtataacgtctttattgataatctggacgagcggcttcccagaattgctttctttgcaacgcgcaccataagagcaggcgaagaattgaccttcgattacaatatgcaggtcgatcccgtcgatatggaaagtacacgaatggatagcaattttggcctggctggcctccctgggagcccaaagaagcgcgtccgcattgaatgtaaatgtggaacggagtcatgcaggaaatacctcttttag

SEQ ID NO: 17571 - DNA, 648 bp, synthetic construct
  misc_feature 1..648: note = Description of Artificial Sequence: Synthetic coding sequence
  source 1..648: mol_type = other DNA
atggcctggatctcccgacttcgcgaacatctggatggaccacctagagcgttcgtatacatcaatgagtatcgcgttggggaaggcatcactttgaaccaggtggccgtgggctgcgagtgtcaggactgcctgtgggcccccacaggtgggtgctgcccaggggccagtctccacaaatttgcttataacgaccagggtcaagtgcgcctgcgcgcaggcctgccaatctacgaatgtaactccaggtgccgctgtgggtatgactgtcctaatagagttgtgcagaagggcattcggtacgatctatgcatcttcaggaccgacgacggaaggggttggggtgtacgtacacttgaaaagatcagaaagaatagctttgtcatggatcccgccctgctgaccgtgtgtttaaaattgcccgccttccccatggggaaagcttgggaaacagacctctccgtgacaggcacgctgggacgtgggtgtggcaggggagaggaccgcttgcaggagagtcccttcccagttcctgcacccagcgtcggttgcacctataagccaccgccaacctttaggaactcattttctacgtctcggctcagtgttgtcgggattcacggcctgctgcgaaggagtaaggggtag

SEQ ID NO: 17572 - DNA, 1230 bp, synthetic construct
  misc_feature 1..1230: note = Description of Artificial Sequence: Synthetic coding sequence
  source 1..1230: mol_type = other DNA
atggccgagaaccttaagggatgcagtgtgtgctgtaaaagttcttggaatcagctacaggatttgtgccgtttggctaagctcagctgcccagcactaggtatctctaaaagaaacttatatgatttcgaagtagagtacgtgagattgcaagaggaccctaggactggcatactccccggggaaatggcttggattagtcggttacgcgaacacctgggagcaaccgctgaaagtcaagtgtgtgcatatcctcaagccgtcccgcaaggattgaggaagggagccgcaccggcagcccctccggtcaaggatccacccgctcccgggcccaaacttggacagctgcctggagccgagggtcaagctgaggccggagccccctcccttggagcgggagcccagtgtcaggcgcacctaggacgaatcaccgtggaaaatgaggtcgacctcgacggccccccgcgagccttcgtgtatattaacgaatatcgcgttggcgaggggatcacccttaatcaggtcgccgtcgggtgtgagtgccaggattgcctttgggcacccaccgggggctgttgcccccggcactgtactagcctgcccactatgacccgggccaggtgcggctttgagcccggatgcccatccacaagtgctacccctgccgccgcagctgctatgactgcgcaaatagtatggtatcggagggttagcgatatgacgagtgcctcgagtgcacgtatgatgggcgtcgcaggtgcctccgcaccctggcgccggttcgcgagaactgcttcttcgtggagtacctgggaaaggtccctgccacaacgaagacaatccgggggccaaatatacgatagacagggagcgacctacctgttcgacctggactacgttgaagatgtttatactgtggatgcagcctattatgggaatatctcccacttcgtaaatcatagctgcgatccgaatctgcaggtctataacgtgtttatagacaacctggacgagcgcctaccttctctgtccctgccccaggagcctagtggacaggctcggagcagccctctgataacgacttgtaaatggacgccatggacttggcgtgcgcctgcatggacccccacactcgcatggttgggctctctggctcccctgcgcagcggttccgttctgaatgcatcggtaggactatcccccgctgctaacacatcaagcagtccctag

SEQ ID NO: 17573 - DNA, 555 bp, synthetic construct
  misc_feature 1..555: note = Description of Artificial Sequence: Synthetic coding sequence
  source 1..555: mol_type = other DNA
atggcttggatcagcaggttacgcgaacatctcggggcgactgccgaatcccaggtgtgcgcgtatccacaagccgtgcctcaaggacttcggaaaggagccgcccccgcagcccccccagttaaagatccacccgcaccggggcccaagctgggccaacttcctggggctgagggccaagcggagccagggtgcccttcaacttcagccacccccgccgccgctgccgccatgactgcgcaaattgtgtggtaccgaagggtctcggacatgaccagcgcttcctcagctcggatgatgggagttgccggagcctcggccccctggcggaggttcgcccgaacagcctcatcatggtcaacctgggaaaggagcctccctcaaaggcggcagtccggtggagcacgatccactacagtccgcgctccacccacttcgctgacttggacaacttggaggacgtgcaccccctggatgccccctacaatggccacttcccccaccctgtccacaaccgttgtgacaccaacgtgccgctgtaccacaagttcttag

SEQ ID NO: 17574 - DNA, 285 bp, synthetic construct
  misc_feature 1..285: note = Description of Artificial Sequence: Synthetic coding sequence
  source 1..285: mol_type = other DNA
atgcgagcaggtttctccgattttcagcttatcagggaccaggtcctgttcctccaagatcaggctcaaagactaactgagtggctacagctctctggcttcgaaaatccagtaagcgaatccaccaccctctgtttgagagagcgagaaaagcgcataccaacgtgcgtcgctgtctgtgttccatctcctggaacagtgcacactgccctgctgcatcccacaacattgtctcaaagccgcagttcgagcgaggctaagatgctgataatacacacagcctag

SEQ ID NO: 17575 - DNA, 594 bp, synthetic construct
  misc_feature 1..594: note = Description of Artificial Sequence: Synthetic coding sequence
  source 1..594: mol_type = other DNA
atggacgtgggctccaaggaggtcctcatggaatcgcctcccgactactctgctgcccctagggggaggttcggaattccatgctgccctgtacaccttaagagactactcatcgtcgtagtggtcgtcgtgttgattgtggttgtgatcgtcggggccctcttgatgggcttgcatatgtcacagaagcatacagagatggtccttgagatgagcattggcgcacccgaggcccaacagcggttggcactgtcagagcatttagtgactaccgcaacctttagcatcggtagcacaggactagtcgtatacgattatcaacaattgctgattgcatataagccagcaccaggaacctgttgctacatcatgaagatagcaccagagagtattcctagtctggaagctttgactcggaaggtacacaacttccaaatggaatgttcactgcaggcgaaacctgcagttcccacatctaagctgggccaggccgaaggcagagatgcaggcagcgcaccctctggaggggaccctgctttcctgggaatggccgtgtcgacattgtgcggcgaagtgccgctgtattatatttag

SEQ ID NO: 17576 - DNA, 576 bp, synthetic construct
  misc_feature 1..576: note = Description of Artificial Sequence: Synthetic coding sequence
  source 1..576: mol_type = other DNA
atggatgttggctctaaggaagtgctgatggagtcccccccagactattctgctgcccctagggggcggttcggaattccttgctgtccggtgcacctgaagcgattgctcattgtggttgtggtcgtagtcttgatcgttgtggtgatagtgggcgctctgttgatgggacttcatatgagccagaagcacactgaaatggttttagaaatgtccattggggcccccgaagcacagcagaggctcgcgcttagcgagcaccttgtaacaacagccaccttctcaataggctctactggactggtggtctatgactatcagcagctgctgatagcgtataagccggcaccagggacttgctgttacatcatgaaaatcgctcctgaatctattccatctctggaggctttgacgaggaaggttcacaatttccaagcaaagccagctgtacccacgtccaagctgggccaggctgagggacgcgacgcgggaagtgcaccctccggaggggaccccgcctttctaggtatggccgtcagtacgctctgcggcgaagttcccctttactatatttag

SEQ ID NO: 17577 - DNA, 1158 bp, synthetic construct
  misc_feature 1..1158: note = Description of Artificial Sequence: Synthetic coding sequence
  source 1..1158: mol_type = other DNA
atgatgatgatggccctgtcaaagacctttggtcaaaagccagtgaagtttcagctggaggacgacggagaattctatatgataggatcagaggtgggcaattacctcagaatgtttcgggggagcttatacaagcggtacccatccctatggaggcgactggctacagtcgaggaacgcaagaaaatcgtggcttcctcccatggcaaaaagactaagccaaacactaaagatcacgggtatacaaccctggccacctcggtcacactattgaaagcatctgaagtggaggaaattctggatggcaatgacgaaaaatacaaggccgtgagtatttcaacagaacctcccacatatctgagagaacagaaggccaaacgtaattcgcagtgggtgcccactttgcccaatagctcccaccacctggatgctgtgccgtgcagcaccactatcaacaggaatcggatgggtagagacaagaaacggacttttccgctttgtttcgacgaccatgacccagcagtcattcatgagaacgcttcacagcccgaggtcctcgtacctatacgactcgacatggagatagatggccagaaactccgtgatgcctttacctggaacatgaatgagaagttgatgacgccggaaatgttttccgagatcctatgcgacgaccttgacctcaatcccctcacctttgtccccgcaattgccagtgccattcgtcaacaaattgaatcatatccgaccgatagcatactcgaggatcaatcagatcagcgcgtgattatcaagcttaacatccatgttgggaacataagtttagttgatcaatttgagtgggatatgtccgagaaagaaaactcccccgaaaagttcgccctaaagttgtgctccgaattaggtcttgggggcgagttcgtgacaactattgcctattccatccggggacagctcagctggcaccaaaagacttacgcttttagtgagaaccctttgccgactgtcgagatcgctatcagaaatacgggtgacgctgatcagtggtgcccacttcttgaaacattgaccgacgcagaaatggagaaaaaaatcagagatcaggatcgaaatacaagacggatgcggcggctcgctaacacagcgcccgcctggtag

SEQ ID NO: 17578 - DNA, 1131 bp, synthetic construct
  misc_feature 1..1131: note = Description of Artificial Sequence: Synthetic coding sequence
  source 1..1131: mol_type = other DNA
atgatgatgatggctctgagcaaaactttcgggcaaaaacctgtgaaatttcagctggaggatgacggggagttctatatgatcggaagtgaggtgggaaattatctgaggatgttcaggggctcactgtacaaaaggtatccctcactctggcggaggcttgcaacagtggaagaacgcaagaaaattgttgcctcatctcatgaccacggctacaccactctggcaacaagtgtgacattgctcaaggcgagcgaggtcgaagaaatcctcgatggcaatgacgagaagtataaggccgtgtccatttctaccgagccccccacataccttcgagagcagaaggccaagaggaattcacagtgggtcccaacactgcccaactccagtcatcatctggacgccgtgccttgtagcacaacgatcaacaggaacagaatggggagggacaaaaagaggacctttccgctctgttttgatgatcacgatcccgccgtcattcacgaaaatgcctcccaaccagaagtcctggtcccgatcaggctggatatggagatcgacggacagaagctgcgggacgcatttacctggaacatgaatgagaaattgatgactccagagatgttcagtgagatcctttgcgacgacttggatctgaacccactgactttcgttccagccatcgcttcagcaatccgccagcagattgagtcataccccacggattccatactggaggatcaatcagaccagagagtaatcatcaagttaaacattcacgtcggaaatattagtctggtggatcagttcgagtgggatatgtctgagaaggaaaatagccctgagaagttcgccctaaaactttgtagcgagcttggacttgggggagaattcgtcacgacaatcgcctactcgatcaggggccagctgtcatggcaccagaagacatacgctttcagcgagaaccctctccctaccgtggagattgcgatcaggaatacaggtgatgctgaccagtggtgtccactgctggaaaccctcacagatgcggagatggaaaagaagatcagagaccaggatagaaacacaagacggatgagacggctagctaataccgcgcccgcatggtag

SEQ ID NO: 17579 - DNA, 81 bp, synthetic construct
  misc_feature 1..81: note = Description of Artificial Sequence: Synthetic coding sequence
  source 1..81: mol_type = other DNA
tggaggagactggcgaccgtggaggaacgtaaaaaaattgttgcaagcagccatgccctgatgacaatgactcagctgtag

SEQ ID NO: 17580 - DNA, 7626 bp, synthetic construct
  misc_feature 1..7626: note = Description of Artificial Sequence: Synthetic coding sequence
  source 1..7626: mol_type = other DNA
atggtggctcttagtttaaagatcagcatcgggaacgttgtcaagactatgcagtttgaaccttctaccatggtgtacgatgcctgtcgcatcatccgggaaagaattccagaggcccctgccggcccaccttcggatttcgggttatttctctctgatgatgatccgaaaaagggcatctggctggaggccggcaaagccctcgattactacatgttgaggaatggcgacaccatggagtatcgaaaaaagcagaggccccttaagattcgaatgctagacggcactgtcaaaactatcatggtggacgattcaaagaccgtaacagatatgctcatgaccatctgcgccagaatcgggattaccaatcacgacgagtactctctggtgagggaactgatggaagaaaaaaaagaggaaatcaccggaacccttagaaaagacaagaccttactgagggatgagaaaaaaatggagaagctgaaacagaaactccataccgatgacgagctgaattggctggatcacggcagaacgctgcgggaacagggggtggaagagcacgaaaccctgcttctacggcgtaagtttttttattctgaccaaaacgtggacagccgagatccagtgcagttgaatctgttatatgtgcaggcgcgcgatgatatcttaaatggaagccaccccgtcagctttgataaggcttgcgagtttgccggttttcaatgtcagattcagttcggacctcataacgagcagaagcacaaggcagggtttttggacctgaaggacttcctcccaaaagagtacgtcaagcagaaaggtgagcggaaaatcttccaggctcacaagaactgcgggcagatgtccgaaattgaggccaaagtccgatacgtaaagctggctcgatccctcaagacttatggggtcagcttctttttggtaaaggagaagatgaagggaaaaaataaactcgtgcctagactgcttggcatcaccaaagagtgtgtcatgcgggtggatgagaagacaaaagaagttatccaggagtggaacctcaccaacatcaagagatgggccgcgtcacccaagagcttcaccctcgactttggtgactaccaggacgggtactattccgtccagacgactgaaggggagcagattgctcaacttattgcaggttatatcgatattatcctgaaaaagaaaaagtccaaggaccatttcggtctagagggcgatgaggagtctaccatgctggaagattccgtgtcgccgaaaaagagtacagttctccagcagcagtacaatcgggtaggcaaagttgaacacggtagtgtcgctctgcctgccatcatgcgctctggcgcctccggacctgagaactttcaggtaggaagcatgcctcctgctcagcagcagatcacaagcgggcaaatgcacaggggtcacatgccaccgctcacatcagctcagcaagcccttaccgggactataaattcctctatgcaggccgtgcaggccgcacaggctactcttgatgatttcgacaccctaccgcccctcggccaggatgcggcgagcaaggcctggagaaaaaataaaatggacgagagcaagcacgagatccacagccaggtcgatgctatcacggccggcacggcttccgtagtgaatctgactgccggggaccccgctgaaacagattacacagcagtggggtgcgccgtgaccaccatttctagtaatttaactgaaatgtcgcgcggcgtgaagctgctggcagccctgttagaagacgaggggggctccggtcgcccgttgctccaggccgccaagggtctggccggtgccgtatccgagctgttacgatccgcacagcccgctagcgcggagcccaggcagaacctcctccaggccgccggcaatgtggggcaagcctccggcgaactgttgcagcagatcggcgagagtgacacagatcctcacttccaggacgccctgatgcaactggccaaggccgtggcgagcgctgccgcggcactggtgctcaaggccaaaagcgtggcccagagaacagaggattcaggcctgcagacacaggtgatcgcagctgctactcaatgtgcactctctacatctcagctcgtcgcctgcactaaggtcgtggcaccgacaatctcttcgccagtgtgccaagagcaactggtcgaggctggaagactcgtggcgaaggcagtcgaaggctgcgtttccgcttcacaggcagccactgaggacggtcaacttctaaggggcgtgggcgccgctgctaccgctgtgactcaggcattaaatgagcttctccagcacgtcaaggcacacgccaccggtgccggaccagccggacggtatgatcaggcgactgacaccattctgacagtgacagagaacatcttctcatccatgggggatgctggagaaatggtgcgacaggcaaggatactagctcaggctaccagtgacctggtaaatgcgatcaaagcggatgccgaaggggaaagcgatctggaaaatagcaggaaactgttgtctgctgctaaaatcctggcggacgccaccgcgaaaatggtcgaggccgctaagggcgccgctgcacaccctgattcggaagaacaacaacagcgtttgagggaagccgcggagggtctgcggatggcaactaatgctgcagcacagaacgcgatcaaaaagaaactggtgcaaagactggagcacgccgcaaagcaggcagctgcctccgctactcagaccatcgctgccgcgcagcacgctgcctccactccaaaggcctcagccggcccccagcccctcctagtgcaaagctgcaaggccgtggcagaacagatcccgctgcttgtgcagggcgttcgcggctctcaggctcagccagacagcccctcagcccaattagccctcattgctgcttcacagtcctttctgcagcccggaggcaagatggtggcagcggctaaggcaagtgtcccaacaattcaggaccaggccagtgccatgcagctctctcagtgtgctaagaacctcggaactgctctcgcagagttacgtaccgctgcccagaaagcccaagaagcgtgtggacctctcgagatggactccgcactgagcgtcgtgcagaacctcgagaaggacctgcaggaggtcaaggcggccgctagagacggaaagcttaaacccctcccgggagaaactatggagaagtgtacgcaggatctgggcaactcaacaaaggcggttagcagcgcgatcgcccaactactgggagaagtagctcaggggaatgagaactacgccggaatcgcagctagagacgtggccggaggattgcgctctctggcccaggccgcccgaggcgtggctgccctcaccagcgacccagccgttcaggccatcgtcctcgacaccgcttccgacgtcctggacaaagcttcaagcctgatcgaagaggctaaaaaagcggccggccaccccggcgatcccgagagtcagcagcgactggctcaagtggctaaagccgtcacacaggccttgaacagatgcgtctcttgcctcccaggccaacgggatgtagacaatgcgctgagagcggtcggagacgctagcaagagattactcagcgattcattacctcctagcactggtaccttccaggaggctcaaagcagactgaacgaggccgccgccggcctcaaccaagccgccactgaacttgtccaggcttcaagagggacaccacaagacctcgctcgcgcatccggtcgcttcgggcaggactttagcacatttttggaggctggagtggagatggctggtcaggctccctcccaggaggatagagcccaagtcgtgtccaatcttaaggggatctccatgtccagcagcaagctgctgcttgctgcaaaggcgctatccaccgaccccgcggcaccaaatctcaaatcccagcttgccgctgccgctcgcgcagtgacggatagcattaaccaactcattactatgtgcactcagcaggccccgggccaaaaagaatgtgataatgcactgcgcgagcttgagacagtcagagagctgctggaaaaccccgtacaacccattaatgatatgtcttattttggttgtttggactccgtcatggaaaacagcaaagtgctgggggaggcaatgaccggaatcagccaaaacgcaaaaaacggcaatcttccagaatttggtgacgccatctcaaccgcctcaaaggccctatgcggattcaccgaggcagccgcacaggcagcttacctggttggggtaagtgatcctaactcccaggcagggcagcagggactcgtagagccaacacagttcgctcgcgcaaatcaggcgatccaaatggcatgtcaatctctgggtgagcctgggtgcactcaggcccaggtgctatccgctgccacgattgttgctaagcacacttccgccctttgtaacagctgcagactcgcgtctgcaagaacaacgaacccgaccgccaagcggcagttcgtgcagagcgccaaagaggtggcaaattccactgccaatctcgtcaagacgattaaggccctggacggggcctttactgaagagaatagagcacagtgcagagccgccacagcaccattgttggaggcggttgataacctgtctgctttcgcaagcaatcctgaatttagttccatacctgctcagatttctccagagggcagggcagcaatggagcccatagtcatcagcgccaagacgatgctggaaagtgccggaggtttgattcagacggcaagagcactggctgttaacccacgcgaccccccttcatggtccgtgctagccggtcactccaggaccgtgagcgacagcattaaaaagcttataacctctatgcgggacaaggcacccggccagctggaatgcgagacagccatagccgctttgaacagctgtctcagagaccttgatcaagcgtccctagccgccgtgagccaacagttggcccctcgcgaagggatctctcaggaggccctccatacacagatgctcacagctgttcaagagataagccacctgatcgagcccctggctaacgcagctagagccgaagcctcccaactgggccacaaagtgagccagatggcgcagtatttcgaacccctcacactggctgcggtcggagctgccagcaaaaccttgtcccaccctcaacagatggcccttctggaccagaccaaaacactggcagagagtgccttgcagctgctctataccgccaaggaagcaggcggaaatcccaagcaggcagctcacactcaggaggcccttgaggaagccgtccagatgatgactgaagcagttgaagacctgacaaccacactcaatgaggcggctagtgctgcaggcgtcgtcggcggcatggttgactccattacacaggccataaatcagttggacgagggacccatgggggagcctgaaggcagtttcgtggattaccaaaccactatggtcagaaccgccaaggctatcgcggtgacggtgcaggaaatggtgacaaaatctaatacctctcctgaggagctcggccccctggctaatcagctgacttccgattacggaagactcgcatcagaggccaaacccgctgctgttgcagctgaaaacgaggagattggctcccacatcaagcaccgcgtgcaggagttagggcatgggtgcgctgctcttgtgactaaagcaggcgccctccagtgcagcccgtctgacgcttatacgaagaaggagctgattgagtgtgctcgtcgagtgtccgagaaggtgtctcatgtgctagccgccctccaagcaggaaatcgcggtactcaggcctgcatcacagcggctagtgccgtgagtgggattatcgctgacctggacactaccataatgttcgccaccgctgggaccctcaaccgtgaggggaccgaaacatttgccgaccatcgagagggaattctgaaaactgctaaggtgttggttgaggatacaaaagtgctggttcagaacgcggcaggctcccaggagaaactcgctcaagcagcacagagctctgtcgctacaattacccgattagcagatgtagttaaattgggcgctgcaagtctaggtgccgaggaccccgagacgcaggttgtgctcataaatgcagtaaaagatgtggccaaagccctgggggacctgatatctgcaaccaaggcagcggctggcaaagttggcgacgatccggctgtttggcaactcaaaaacagtgcaaaggtgatggtgacaaacgtaactagtcttctgaagaccgtgaaagcagtcgaggatgaagccactaaaggcacaagagccctggaggctaccacagaacacatcaggcaggagctggccgtcttctgttcccctgagccaccagccaagaccagcacgcccgaggacttcattaggatgaccaaaggcattaccatggccacagccaaggctgtcgctgcgggcaactcctgtcgccaagaggacgtaattgccacggctaacctgtcacgacgggctattgccgatatgctccgagcctgtaaagaagcagcgtaccaccctgaagtcgccccagacgtgaggctgcgcgcacttcactacggtcgagagtgcgccaacggctacctggaactgctcgatcatgtgctccttactctgcagaaacccagcccagaactcaaacaacagctgacaggccacagcaagagggtggcaggttcggtgaccgagctgatccaggctgcggaagccatgaaagggaccgaatgggtggatcctgaggaccccacagtgattgccgaaaatgagctcctgggagccgcagccgccatcgaggctgctgctaagaaactcgagcaactcaaaccacgggccaaacctaaagaagcagatgaaagcttgaacttcgaggagcagattctagaggctgctaagagcattgcagcggccaccagcgccctggtgaaggccgcaagcgcagcccagagggaattggttgcacagggaaaggtgggggccattccggccaatgcacttgacgacggccagtggtcacaggggctaatctctgcagctaggatggtggctgctgcgaccaataatctgtgcgaagccgccaatgcagcagtgcaaggccacgcctctcaggagaagctgatttcttccgccaaacaggtggcagctagtacggcacagttgctggtggcatgcaaggtcaaagccgaccaggacagcgaagcaatgaagcgactgcaggctgcaggcaatgccgtaaaacgggcaagcgacaacctggtgaaggcggcccagaaagctgcagcgttcgaggagcaagaaaatgaaacagtagttgtgaaagagaagatggtgggaggcattgcccagattattgccgcgcaagaagagatgctgcggaaggaacgcgagttggaagaggcacgaaagaaactggcccagataagacagcaacagtacaaatttttgccttccgaattaagggatgagcactag

SEQ ID NO: 17581 - DNA, 7290 bp, synthetic construct
  misc_feature 1..7290: note = Description of Artificial Sequence: Synthetic coding sequence
  source 1..7290: mol_type = other DNA
atggtcgctctgtccctcaagatcagcatcggaaacgtggtaaagactatgcagttcgaacctagcacaatggtctatgatgcgtgcaggatcatcagagagaggatcccagaggctccagccggtcctccctctgattttggactttttctctcagacgatgacccgaagaagggaatatggctggaagctggcaaggccctagattattatatgttgagaaacggcgatacaatggagtacaggaagaagcagaggccccttaagatacggatgctggacggaacagtgaagactattatggtggacgacagtaagacggtgacagacatgctgatgacaatttgtgcccggattggtattacaaaccacgacgagtactccctcgtccgagagctgatggaagagaagaaagaggagataaccggcaccctgaggaaagacaagaccctgcttcgggatgagaaaaaaatggaaaaacttaaacagaagctccacaccgatgatgagttgaactggctggatcacggcagaacgctacgggaacagggagtggaggagcatgaaaccctcctgctccgcaggaaattcttctattcagaccaaaacgtggactccagggatcctgtgcagttgaatctcctgtacgtgcaggcaagggatgacattcttaatggttcccaccccgtgtcctttgataaggcctgcgaatttgcagggttccagtgtcagattcagtttgggcctcacaacgagcagaaacacaaggccgggttcctcgaccttaaggacttcctgcctaaagaatacgttaaacagaaaggcgagcgaaagattttccaagcacacaagaactgcggtcagatgtcagaaatagaggctaaggtccggtacgtgaaattagctcgctctcttaagacatatggcgtgagcttctttctggtgaaagaaaagatgaaagggaagaacaagctcgtgccaaggctgctgggcatcaccaaagagtgcgtcatgcgggtcgatgagaagaccaaggaggtgattcaggaatggaacctgaccaacattaaaaggtgggcagcaagcccaaaatcctttaccctcgattttggagattaccaagacggatattattctgttcagactacagagggcgaacagatagcccagctgattgctgggtacatagacatcatcttgaaaaagaagaagtccaaggaccattttggcctcgagggggacgaagaaagcacaatgctcgaggacagcgtgtccccgaaaaagagtaccgttctccaacaacagtacaatagagtgggaaaggtagagcacgggtccgtggcactccctgcgatcatgagatctggagccagcggaccagagaacttccaggtgggtagcatgcctcctgcccagcagcaaatcacatctgggcagatgcataggggacacatgccacccctgacatccgctcagcaggctctgaccggaacaatcaactcaagcatgcaagctgtgcaggcagctcaggctacattggacgacttcgacaccctgccacctctcggtcaggacgcagcctccaaggcctggcgaaagaataagatggacgagtcaaaacacgagatccactcacaggtggatgccattaccgcgggaactgccagcgtggtgaatctgaccgccggagatcccgccgaaactgattataccgccgtggggtgtgcagtgaccacgatctccagcaacctcaccgagatgagccgcggtgtgaagttgcttgcggcgctgcttgaggacgaaggaggatctggtcggccattgttgcaggctgcaaagggtcttgcaggggccgtgtcagaacttctgcgctctgcccagcccgcctcagccgagccgcgtcagaacctgctacaagcggcgggcaacgtaggacaagccagcggcgagctgttgcagcagatcggggaaagcgacacggatccacacttccaagatgcactaatgcagttagcaaaggcagtcgcctcggcagcggctgctctggtactaaaggcaaagtcggtggcgcagcgcaccgaggattcgggtttgcagacacaggtcatcgccgctgcaacccagtgcgctctgtctaccagccagctggtggcctgtaccaaagtggtcgcccctacgatctcatccccggtgtgccaagagcagttggtcgaggccggccggctggtcgctaaagcggtggaagggtgcgtcagcgcaagccaggccgctaccgaagatgggcagttgctccgcggggtgggtgcagccgctaccgctgtgacccaggccctgaacgaactgctgcaacacgttaaggcccacgctacaggggcaggtccagctggtcgatacgaccaagctaccgatacaatcctgaccgttacagaaaacattttttcctctatgggcgacgcgggagaaatggtgagacaggccaggatactcgcccaggcaacctctgacttagttaatgccatcaaagctgatgccgagggggaaagtgacctggaaaattctcgaaagctgttaagcgccgccaagattctggccgatgctactgctaaaatggtcgaggctgctaagggtgctgcggcccaccccgacagcgaagagcagcagcagagacttagagaggccgccgaaggcttgcgcatggccactaacgccgcagctcagaacgctataaagaagaagctcgtgcagcggctggagcatgctgctaagcaggccgcagcgagtgcaacccagactattgccgcagcacagcatgctgccagcacaccaaaggcctctgcgggccctcagcccctcctggtgcagtcttgtaaagcggttgcagagcagattcccctgttggtccagggagtccgtgggtcacaggctcaaccagacagcccctctgcacaattagctctgatcgctgcatcccagagttttctccagccagggggcaaaatggttgccgccgcaaaagcttccgtcccaactattcaagaccaggcgtcagcgatgcagctcagtcaatgcgccaagaacctcggtactgccctcgctgaattacggactgctgcccagaaagctcaggaggcatgtggccccttggagatggattctgcactatcggtggtgcagaatttggagaaggacttacaagaggtaaaggcagccgcacgggacgggaaactaaagccactgcccggcgaaaccatggaaaagtgtacccaggatctcggcaacagcacaaaagccgtcagctctgccattgcgcagttactgggagaagttgcacaagggaacgagaattacgcaggcatagccgccagagacgtggctgggggactgcgctccctcgctcaggctgctaggggagtggccgccctgacctctgatcccgctgtacaggccatcgtacttgacacagcctcagatgtgctcgacaaggctagttccctgatcgaagaggccaaaaaagctgcaggccatcccggggaccctgagtctcagcagcgacttgcccaggtcgccaaagcagtgacccaggctctgaaccgctgcgtatcttgtctccccggacagagggatgtggacaatgcattacgtgcagtaggtgatgcctctaaaagactgcttagtgacagccttcctccttccacgggaacatttcaggaggcccagagcagattgaacgaggccgcagccggactcaatcaggccgctacagagctggtgcaggcatcaagagggacgcctcaggaccttgccagagcatccgggagatttgggcaggacttcagtacctttctcgaggctggtgtcgagatggcaggccaggcccccagccaggaagaccgggcacaggtcgtgtctaatctcaaggggatttcaatgagcagcagtaagctgttactggccgccaaggcactgagcactgaccccgctgcacccaacttaaagagtcaactggccgccgcagccagggcggtgaccgacagtataaatcagctcatcacgatgtgtacacagcaggctccaggtcagaaagaatgtgacaatgcgctccgcgagctagaaacggtacgcgaactactagagaatccagtccaacctataaacgatatgtcatactttggatgcctggatagcgtaatggaaaacagcaaggtcctgggggaagcaatgacaggcatatcccagaatgcaaagaacggcaatttaccagagttcggagacgccatttctactgcttcaaaggccctatgtgggtttaccgaggcagcagcccaggctgcctacctggtgggcgtgtccgaccctaattctcaggccggacagcagggcctggtggaaccaactcaatttgcccgcgctaatcaagcaatccaaatggcctgtcagagtctgggggagccgggatgcactcaggcccaggtgctctccgctgcaaccattgtggctaaacacacatccgccctgtgcaactcatgtcgactggcttccgcacgaaccactaatcccactgcaaaaagacagttcgtgcagagtgcgaaggaagtggctaactccaccgccaacctggtaaaaacaataaaagccttggacggggcttttactgaggaaaatagggcacagtgccgggcagccacggcccccctgctggaagcagtagataacctttcagcttttgcctcaaaccccgagttctcctcaatccccgcacagatcagccctgaaggcagagccgccatggagcctatcgttatatccgccaagaccatgcttgaaagcgccggtggcctcatccaaacggcgcgggctctggcagtgaacccaagggacccacctagctggagtgtgctggcaggacactcacgaactgtgtctgatagcataaagaaactgataacatcgatgcgcgacaaagctccaggccagctggagtgcgagacagcaatcgccgctttaaacagctgtcttcgagatctggaccaggccagcctggctgcagtttcccagcagttggcccccctgcaagaaatctcccaccttatcgaaccactggccaacgctgctcgagccgaagcgtcccagctgggccacaaggtttctcagatggctcagtattttgagcctctgacgctggcggccgttggtgcagctagtaagaccttaagccacccccaacaaatggctttgctggaccagacaaagacactggctgaaagtgctcttcagctgctgtacactgccaaggaggccggcggtaaccccaaattggatgaaggcccaatgggcgagcctgaggggagcttcgtggactaccagaccactatggtgagaaccgctaaggccatcgccgttaccgttcaggaaatgataggctcccacatcaagcatagggtccaggagcttggtcatggctgcgccgctctggttacgaaggctggggccctgcagtgttctcccagtgacgcttacacaaaaaaagagctgattgaatgcgctaggcgggtctctgaaaaggtgagccatgtgcttgcagccctgcaggctggcaatcggggcactcaggcctgcattacggccgcatcggccgtgtccggtattatcgctgatctggatacaaccattatgttcgcgactgctgggaccttaaaccgggagggaacagaaaccttcgctgatcatcgggaggggatcctaaagacggcaaaagtgctagtggaggacacgaaggtgctggtgcagaacgcggctggaagccaggaaaagctcgcccaggccgcgcagagcagtgtggctaccataactcgcctagctgatgtcgtcaagctcggggcagcttcactgggagccgaggatccggagacccaggtggtgctgattaatgccgtgaaggacgtggcaaaagccctgggagacctcataagcgctacaaaggctgcagctggcaaagtaggcgatgatcctgcagtctggcagttgaagaactccgcgaaagtgatggtgacaaacgtgacctctctgctaaagaccgtgaaagccgtggaagatgaggctaccaagggcactcgcgcccttgaagccacaaccgagcacatccgccaagaacttgccccccctgcaaagacttcaactccagaagattttattcggatgaccaagggcatcacaatggctactgccaaagctgtggccgccgggaactcctgccggcaggaagatgtcatcgccaccgcaaacctgagccggcgcgcaattgccgacatgctgcgcgcgtgtaaggaagcggcttatcaccctgaggtggctccggacgtgcgcctgagagcacttcactatggtcgagagtgcgctaatgggtacctggagttattagatcatgtgctgttgacgctgcagaagcctagcccggagttgaaacagcagttgaccggacactccaagagagtcgccggaagcgtcactgagctgatccaggctgccgaagcaatgaaagggaccgaatgggtcgatcccgaggacccaacagtgatcgctgaaaatgagctgctgggtgctgcggccgctatcgaagccgccgcaaaaaaactcgagcaattgaagccccgggcaaagccaaaggaagcagacgaaagcctcaacttcgaggagcagatactggaggccgccaagagcatagcggcagcaacctctgctttggtcaaggccgctagcgcggcccagcgggagttggttgcccagggcaaggtaggggctatccctgcgaatgcactggacgatggccagtggagtcagggtctgataagtgcagcacggatggtggcagctgctaccaacaacctctgcgaggccgccaacgccgcggtgcagggacacgcaagccaggaaaagctgatatcttcggcaaagcaggttgctgccagcactgcccagttgctcgttgcctgtaaggtgaaggccgaccaggattctgaagctatgaagcgccttcaggccgctggaaatgccgtgaagcgagcatctgacaacctcgtcaaagcagcccagaaagccgccgcattcgaggagcaggagaacgagacagttgttgtgaaggaaaaaatggtcggaggaatcgcgcaaatcatcgccgcgcaggaggaaatgctgcgaaaggagagagagctggaggaagctaggaagaagctcgcacagattagacagcagcagtacaagttcctcccatccgagttgagagacgaacactag

SEQ ID NO: 17582 - DNA, 3984 bp, synthetic construct
  misc_feature 1..3984: note = Description of Artificial Sequence: Synthetic coding sequence
  source 1..3984: mol_type = other DNA
atggcggcctctagacggtcccagcatcaccatcaccaccatcagcagcagctccaacctgcccccggcgcttccgccccgccgccccctccaccaccgcccctctctcctggcctcgcccctggcaccacccccgcaagtccaacagcaagcggccttgcacccttcgcaagcccgcgccacggcctggctctaccagaaggcgatggaagccgcgacccacctgataggcccaggtcaccagatccggtggatggtacatcttgttgttctactacttcaacaatttgcacagtggccgccgctccagtggtacctgctgtctctacatcttcggcggccggggtggcgcctaaccccgccgggtccgggtccaataactcccctagcagctcatcatcaccgacatcttcatcttcaagtagccccagttccccgggctctagtctggccgagtctcccgaggccgcgggtgttagctctacggcccctctgggcccgggcgccgcagggcccggcacgggggttcccgcagtctcaggagccctacgggagcttttggaggcttgtaggaatggcgatgtgtcccgggtcaagcggctggttgatgccgccaatgtcaatgcgaaggatatggctgggcgcaaaagttcccccttgcacttcgcggctggttttggaagaaaggacgtggtggaacatctcctacagatgggggccaatgtgcacgccagggacgacggggggctcataccccttcacaatgcgtgcagctttgggcacgctgaggtcgtttccctgcttctgtgccaaggtgctgacccgaatgcccgagacaactggaattatacacccctccacgaagcggccattaaagggaaaatcgacgtgtgcatcgttttgctgcagcatggtgcggacccaaatattcggaatactgatggaaaatccgcactggatcttgcggatccatctgccaaggctgtgctgaccggcgagtataaaaaagatgaacttcttgaggccgcgaggagcgggaatgaggaaaagctgatggcactgcttacccctctcaatgtcaattgccacgcatccgacggccggaagagtacgcctcttcacctagccgctgggtataatcgggtccgtatcgtgcagctgcttctgcagcatggtgcggacgtgcacgccaaggacaaagggggcctcgtaccactgcataacgcttgtagctatggccattatgaggtgaccgagctcctgctgaaacatggtgcctgtgtcaatgcgatggacctctggcagtttaccccccttcacgaggctgcatctaagaatagggtggaggtttgttctcttcttctgagtcacggagcagacccaactctggtgaactgtcacggtaaatctgcagtcgatatggcccccacccctgaactgcgggaaagactaacttatgagtttaagggtcactcccttctccaagcagctcgggaggcggatctcgcgaaagtgaaaaagacactcgcgctagagattatcaatttcaaacaacctcaatcacatgaaacagctctgcattgcgcggtcgccagcctacatccaaaacgcaagcaggtgaccgaactcctgctgcgcaaaggagctaacgtcaatgaaaagaataaggacttcatgacacctcttcatgtggcggctgagagggcacataacgacgttatggaggtgttgcacaaacacggagccaagatgaacgctctagacaccctggggcagaccgctctgcaccgcgccgcactggcgggccaccttcagacatgccggctcctcctgagctacggctcagatccatcaatcatttcattgcaaggctttacagctgctcaaatggggaatgaggcagtacagcagatcctctccgaatcaacacccattagaacttctgacgtggattatagactcctcgaggcaagcaaagcgggtgacctggaaacagtgaaacaattgtgctctagtcagaatgtgaactgtagggatttggagggtcggcacagcacccctttacacttcgccgctggctacaatcgcgtgtctgtggtcgaatatctgctgcaccatggggccgacgtgcatgccaaggacaagggaggcctcgtccccttacacaatgcctgtagttacggccattacgaggttgcagagcttttagtgcgtcacggcgcctctgtcaacgttgcagatctgtggaaatttacccccttacatgaagctgccgcgaaggggaaatacgagatctgtaagctcttactcaagcacggagccgaccctactaaaaagaacagagacggtaataccccgctcgatctcgtcaaagagggtgatactgatatccaggacctgctgcgcggggacgcggcattgttggatgctgccaagaagggatgcctcgcacgcgtacagaaactatgcactcctgaaaatatcaactgcagagatacccagggccgcaattcaacgcccctccacttggccgcaggatacaacaaccttgaggtggcggaatacctccttgaacatggagccgacgtgaacgcacaagataaagggggactcatacctctacataacgcggcaagttatggtcatgtggatattgcggctctgctgataaaatataacacatgtgtgaatgccactgacaaatgggctttcaccccacttcacgaagccgcccagaagggaagaactcagctttgcgcgctgctgttggcccacggtgcagaccctacgatgaagaaccaggagggacaaaccccactcgacttggccacagccgatgacatccgagcacttctgatagacgccatgccgcctgaagcactgcctacctgcttcaaacctcaagcaaccgtggtgtcagcgtccctgatctcaccggctagtactccttcctgtctgagcgctgcttcctccatcgataatcttactggccctctggccgagctcgccgtcgggggagcgagcaacgcaggtgatggagccgcagggacagaaagaaaggaaggagaggtggccggtctcgatatgaacatctctcagtttctcaaatcattagggctggaacacctgcgtgatatatttgaaactgaacagattacactcgacgttctggctgacatgggtcatgaagagctgaaggaaatcgggataaatgcatatggacaccgccacaagctaatcaagggcgtcgaaagactgctcgggggccagcagggaacaaatccatacctgaccttccattgtgtgaaccaagggaccatacttctggatctggcccccgaggacaaggagtatcagtccgttgaggaggagatgcagtccacaattcgagagcatagggacggaggcaacgccgggggtatatttaatcgctacaacgtaatccgcatccaaaaggtagtgaacaagaagcttcgtgagcgtttttgtcatcggcagaaggaggttagtgaggaaaaccataaccaccataatgagcgcatgctattccacggaagtcccttcatcaacgccattatacacaaaggttttgatgagagacacgcttacattgggggcatgttcggggccggtatatattttgcagaaaactcatccaaaagtaaccagtacgtgtatggcatcgggggtggcacagggtgccctactcacaaggaccgcagctgttatatctgccatcggcagatgcttttttgtagggtgacactggggaaaagtttcctgcagtttagcaccatgaaaatggcccatgcccctcctggccaccacagtgtcatcggcaggcctagtgtgaatggtcttgcctatgctgagtatgtgatctacaggggagagcaggcctatcccgaatatctgatcacataccagatcatgaagccggaggcaccatcacaaactgcaacggcagccgagcagaaaacgtag

SEQ ID NO: 17583 - DNA, 3501 bp, synthetic construct
  misc_feature 1..3501: note = Description of Artificial Sequence: Synthetic coding sequence
  source 1..3501: mol_type = other DNA
atgagtgggcgtaggtgcgctggaggaggcgcagcctgcgctagcgcagccgccgaagcagtggaaccggccgcccgggaattatttgaggcatgcagaaatggtgacgtggagcgggtgaaacgcctggttacaccagagaaagtcaactcgagggacacagcaggtcgaaaatcaacccctctgcacttcgcggctggctttgggagaaaagacgtagtcgaatacctgctccagaacggcgccaacgtacaggccagagacgatggcggcttaataccattacacaacgcttgcagcttcggccacgcggaggtcgtcaaccttttgcttcggcatggcgcggacccaaacgctagagacaactggaactacacacctctccacgaagctgcaatcaagggcaagatagacgtctgcatagtgctgcttcaacacggcgccgaacctacaataagaaacactgacggccgcactgccctagaccttgcagacccctcagccaaggctgttcttaccggggagtataaaaaagatgaactgctggagagtgcccggagcggcaatgaggaaaaaatgatggcactactgactcccctgaacgtcaattgccacgcctctgatgggcgcaagtccacgccactgcacctcgccgccggatataatcgcgtcaagatcgttcagctcctactgcaacacggggctgacgttcatgccaaagataagggcgatcttgtgccacttcacaacgcttgtagttatggacactatgaggttactgaactgctcgttaagcatggcgcatgtgtaaacgctatggatctctggcagttcacgccactccacgaagccgcttccaagaatagggtggaagtgtgctctctcctgttaagttacggcgccgacccgactttgctgaattgtcacaataagtcagccatagacctggccccaactccacagctgaaggaacgtctcgcttatgaattcaaaggtcattctctgcttcaggccgctcgagaagctgacgtcacacgcattaaaaagcacttgtcactcgagatggttaatttcaagcaccctcagacacacgagacggctttgcattgtgccgccgcctccccataccctaagcgtaagcagatatgcgaattacttctgcggaaaggggccaacatcaacgagaagacaaaggagtttctgactcctttgcatgtagcatccgagaaagcccacaacgatgtcgtcgaggtcgtcgttaagcacgaagcaaaagtgaatgctctggacaacctgggtcagacgagcctgcaccgggccgcgtactgcggccatttgcagacctgcagactactcctctcatatggatgcgaccccaacatcatcagcctacaaggcttcacagccctacaaatgggaaatgagaacgtgcagcaactgctgcaagaggggattagtttaggaaattcagaagctgatcgtcagctgctcgaagctgctaaagctggcgacgtcgagacagtgaagaaattatgtacggtgcagtcggtgaattgccgtgacatcgagggccgtcagagtactcctcttcacttcgctgctggatacaatcgggtgtctgtggtggaatacttgctccagcacggggccgatgtccatgccaaggacaaaggcggactggtgccactgcacaacgcttgctcttacggacattatgaggtggcggagttgttggtaaagcacggagccgtggtgaatgtggccgatctgtggaagttcactcccctgcacgaagctgccgcaaaaggcaagtacgagatttgtaaactgcttttgcaacatggcgccgatccaacgaaaaaaaaccgcgacggtaacaccccactcgaccttgtgaaagatggggatactgatatccaggacctgctgcggggggacgccgcattgcttgatgctgccaaaaagggttgcttagctagagtaaagaaattaagtagtccggataatgtgaattgccgggacacacaaggccgacacagtactcccctgcacctagccgctgggtataacaaccttgaagtggctgaatatctcttacagcacggcgccgatgttaacgcccaggacaaaggggggttaattcccttgcataacgcagcaagttacggccatgtggacgtagcagccctgttgatcaagtacaacgcctgtgtgaacgcaacagataagtgggccttcactcctctccatgaggccgcacaaaagggaaggacacaactgtgcgccctgttgcttgcacacggcgctgatccgactttaaaaaaccaggagggccagacccctctagacctagtcagcgctgatgacgtctctgcactcctgaccgccgcaatgcctcctagcgcactcccctcctgctataaacctcaagtcctgaatggagtgagaagcccaggggctaccgccgatgctctaagctccggaccatcgtccccttcctccctgtcagctgcaagttccttagacaacttatctggcagcttttccgagcttagcagtgtggtgtcctcctccgggaccgagggggctagttccttagagaaaaaagaggtgcccggcgtggactttagcattactcaattcgttagaaacttgggcctggagcatctgatggacatcttcgaaagggaacagatcacgttggacgttctcgttgagatgggccataaggaattgaaggagattggcatcaatgcctacggccacagacacaaacttatcaaaggcgtggaacgcctgatttcaggtcaacagggtctcaatccttacctgacccttaatacttctgggtcaggaaccattttgattgacctctcacccgacgacaaggaattccagagcgtggaagaagagatgcaatctaccgtgcgcgaacatagagatggaggacacgccggaggcattttcaacaggtacaatattcttaaaatccagaaggtgtgtaacaaaaagctctgggagcgctacactcacaggaggaaggaggtgtccgaagaaaatcacaatcatgctaatgaacgaatgctcttccacggttccccttttgttaacgccatcatccataagggctttgatgaaaggcacgcctacatcgggggcatgtttggcgcaggtatatatttcgcagagaattcttcaaaatccaaccagtacgtgtacggcattggcggcgggactggctgccccgttcacaaagatagatcatgttacatctgccataggcagcttttgttttgcagggttactctgggaaagtcgttcctgcagttcagcgcgatgaagatggctcacagccctccaggccaccatagtgtgaccggacgtcccagcgtgaacgggctggccctggctgaatatgtgatctatcggggcgaacaagcctaccccgaatacctcattacataccagatcatgaggcctgaaggcatggttgacggctag

SEQ ID NO: 17584 - DNA, 2139 bp, synthetic construct
  misc_feature 1..2139: note = Description of Artificial Sequence: Synthetic coding sequence
  source 1..2139: mol_type = other DNA
atgcgagaacccgcccttgccgcctctgctatggcataccacccattccacgctccgcggccagccgactttcctatgagcgcctttctggcagcagcccagccatcattcttccccgccctggcactgccacctggggctctggcaaagcctttgcctgatccggggctggccggagctgccgctgctgccgccgccgcagccgctgccgccgaggccgggctccacgtttcagcactgggcccacatcctcccgcagcacacctgaggagtctgaaaagtttggagccggaagacgaagtggaggatgatcccaaagtgacactggaagctaaggagctgtgggatcaatttcacaagctgggaacagaaatggtgattacaaaatctggaagacggatgttccccccattcaaagttagagtttcaggactagacaagaaagcaaagtatatcctgctaatggacatcgttgcagccgatgactgtcgctataaattccataactctcggtggatggtcgccggtaaggccgatcccgaaatgccgaaacgcatgtatattcaccctgatagtccggctacaggagagcagtggatggccaagcccgtggctttccacaaactgaaactcaccaataacatctccgacaaacatggatttaccatccttaattccatgcacaagtatcagcctagattccatattgtgcgggctaacgacatcctgaagttaccctatagcactttccggacatacgtgtttcctgagactgacttcatcgcagttaccgcctaccaaaacgacaagattacccagctgaagatcgacaataatccatttgctaagggcttccgggacactggcaacgggcgccgcgaaaaacgtaaacagcttacactgccttccttaaggctttatgaagaacattgcaagcctgagcgggacggggccgaatcagatgccagcagttgcgatccaccgcccgctcgggagccacccacatccccaggcgccgcgcccagtccactgagattacaccgcgctagagccgaagaaaagtcttgcgcagcggatagtgatcccgagcccgagcgactctcagaagagagggccggagcacccctggggaggtctcctgcccccgactcagcctcgcctacacggctgacagaaccagaaagagcgagagagaggcgttcaccagaaaggggaaaggagccagccgaatccggcggtgacggacccttcgggcttcggagcctggagaaggaacgagcagaagctcgccgaaaagacgaaggtcggaaagaagctgccgaggggaaagagcaaggattggcacctctggtcgtgcagacggacagcgcctcacctttgggagccggtcacttgcccggactcgctttctcaagccacttgcacggccagcaatttttcgggccgttgggggcaggtcagcccctgttcctgcatcccggtcagttcacaatgggaccgggcgccttctcagccatgggaatggggcacctgttagccagcgtggctggcggagggaacggagggggcggaggaccaggaactgccgctggactcgacgctggaggcctggggccagcggccagcgccgcatccacagctgcccccttcccatttcacctcagtcagcacatgctggctagtcaggggatccctatgccaacttttggtggactgtttccctatccttatacatatatggccgcagctgcagctgccgcctccgcactgccagccaccagcgcagcagctgctgcggctgcagcggctggatccctctcccgcagcccgtttttaggctcagctcgcccccgccttcggtttagcccatatcagatcccggtgactattcctcctagcaccagtttgttgaccacaggtctcgccagtgagggtagtaaagctgctggaggcaacagccgggagccctcccctctgccagaactggctctgagaaaagtgggggcaccgtctaggggggctcttagcccatcaggcagtgcaaaggaggccgccaacgagctgcagtccatccagagattagtgagtggcttagagagccaacgagccctgtcgcccggcagagaatcgccaaagtag

SEQ ID NO: 17585 - DNA, 981 bp, synthetic construct
  misc_feature 1..981: note = Description of Artificial Sequence: Synthetic coding sequence
  source 1..981: mol_type = other DNA
atgagcgcttttttagcagccgcccaaccatcattttttccggctcttgctctgccccctggggctctggcaaagccattaccagaccctggtctggccggtgccgcagctgctgcggcagcggccgccgcagccgcggaggctggtctccacgtctccgccctcggaccacacccacccgccgctcacctccggagccttaaatcacttgaacctgaggatgaagtggaggacgaccctaaggttacactagaagccaaagagctctgggaccaatttcacaagttgggcactgagatggtcatcacaaaatctggtcggcgcatgttccccccctttaaggtgagggtgagcggactcgacaaaaaagctaaatatatcctgctgatggacatcgttgcggcagatgattgccgttacaaattccataactcccgctggatggtggcgggtaaggccgatcccgagatgcccaaacggatgtacatacacccagattcgccggctacaggagagcaatggatggccaaacctgtggccttccacaaacttaaactgactaacaacatctccgacaagcacgggtttacaattctgaactccatgcataagtaccagccccgctttcacattgtgcgggccaacgatatcctcaaactgccatactcaaccttcagaacttacgtctttccagagactgacttcattgctgtgacagcctatcagaatgacaagattacccagctgaagattgacaacaatccttttgccaagggctttagggacaccgggaacggaaggcgggagaagagaaagcaactgacactgccttcacttagactgtatgaagaacattgcaagcccgagagggacggcgcagagagcgatgcctcctcttgcgaccctccccccgctagggagccacctacctctccaggtgccgctccaagtccactgcgactccaccgcgccagaggttag

SEQ ID NO: 17586 - DNA, 996 bp, synthetic construct
  misc_feature 1..996: note = Description of Artificial Sequence: Synthetic coding sequence
  source 1..996: mol_type = other DNA
atgactgagagaccccctagcgaggccgcgaggagcgacccgcagttggagggcagagatgctgcagaggctagcatggccccaccgcacctcgtcctactgaacggtgtggccaaggagaccagtcgcgcggccgccgccgagccacccgtgatagaactgggcgcaagaggaggccctggcggcggccctgctgggggtggcggcgcagcacgcgatcttaaaggacgggacgctgctaccgcagaagctaggcatagagttcccactaccgaactctgtcgccccccaggtcctgctcctgcacctgcccctgcttccgttacggccgaactgcctggagatggcagaatggtgcagctgtctccccccgccttggccgccccggccgctcccgggagagcattactctattcactgtcccagcctttggcctccttgggctcgggtttttttggtgagcccgacgccttccccatgttcactacaaacaacagggtgaagcgaaggcctagcccttacgagatggaaattaccgacgggccccacacaaaggttgtgaggcgtatatttaccaacagcagggagagatggcgacagcagaatgtgaacggtgccttcgctgagctgaggaagctcatacctacccatcctcccgataaaaaactcagcaaaaacgaaatactaaggcttgccatgaaatatatcaacttcctagcaaagttactgaacgatcaagaggaggaggggacccagcgcgcaaagaccggcaaagaccccgtcgttggggcaggtggagggggtggaggcggcggaggaggcgctccgcccgacgacctcctgcaggacgtcctaagtcccaactcctcttgtggcagtagcctggacggcgcggcgagccccgatagttacaccgaggaacctgcccctaaacacaccgcccggtccttgcaccctgctatgctgccggccgccgacggcgctggaccacggtag

SEQ ID NO: 17587 - DNA, 1002 bp, synthetic construct
  misc_feature 1..1002: note = Description of Artificial Sequence: Synthetic coding sequence
  source 1..1002: mol_type = other DNA
atgaccgagcgcccgccttcggaggcggccaggagtgatccacagttggagggccgcgatgctgctgaggcaagcatggcccctccacatctggtgctgcttaatggtgtggccaaggagactagccgggccgccgctgccgagccgccagttatagagttgggcgcacgaggggggcctggaggtgggccagctggcgggggaggtgctgcccgcgacctgaagggccgagacgcagctaccgccgaggcaagacacagagtgcctacgactgagctttgcagaccacccggcccagcacctgcccccgcacccgcttcagtgacggctgagttacctggcgatggacgaatggtgcagctgtcaccacccgcacttgctgcccccgctgcgcccggacgtgcactgctatactccctctctcagccgttagcttccttgggatcccattctggcttttttggcgagcctgacgcgttcccaatgttcactacgaataaccgtgtgaagcggagacccagtccctacgagatggaaatcacggacggcccacacaccaaggtagtgcgccggatcttcaccaactcaagagagaggtggaggcagcagaacgtaaacggggcattcgccgaacttcgcaaactgattcctacccacccgcctgacaagaagctgagcaagaatgagattctgcggctggctatgaaatatattaactttctcgcaaaactcttgaacgaccaggaggaggaagggactcaaagggcaaagacagggaaggaccccgtcgttggcgccggaggaggtggaggcggaggtgggggcggggctcctcctgacgacctgcttcaggacgtccttagtccgaattcatcctgcggctccagcttggacggtgccgcaagccctgacagctacaccgaggaaccagcacctaagcatactgcccgaagcctgcacccggccatgctgccggccgctgatggggccgggcccagatag

SEQ ID NO: 17588 - DNA, 996 bp, synthetic construct
  misc_feature 1..996: note = Description of Artificial Sequence: Synthetic coding sequence
  source 1..996: mol_type = other DNA
atgactgagcggcccccctcagaggcggcacgaagtgatccccagctagagggccgggatgcagcagaggcttcgatggccccgcctcatctagttctgctcaatggggtggctaaagaaacaagtcgagcggccgctgccgaacctccagtgattgaactcggagcgcgcggcggacctggagggggcccagctggaggaggtggcgccgctagggacctgaagggaagagatgccgccactgcggaggccagacaccgcgttccaaccacggagttgtgtcgcccgcccggccccgcccctgcgcccgccccagcgtcagtcacggccgagcttccaggtgacggaaggatggtgcagctgtcccctcctgccttagccgcacccgctgcccccggaagagccttgctgtacagtctcagtcagcccctggcttccctggggtccgggttctttggcgagcccgacgctttccccatgttcacaaccaacaatagggtaaaaagaagaccgtctccatatgagatggaaatcactgacggcccccatacaaaggttgtcaggcgcatattcaccaattcacgcgaaagatggaggcagcaaaacgtgaacggtgcttttgccgagttaaggaagttaattcctacacacccccccgacaaaaagctctctaagaacgaaattctgcgtttggctatgaagtatatcaacttcttagccaaactgctgaatgatcaggaggaggagggtacccagcgcgctaaaactggtaaggaccctgtggtgggcgcaggaggaggcggaggagggggaggcgggggggccccacctgacgaccttttacaggatgttctttcccccaatagttcgtgtggttccagcctggatggagccgcttcaccagactcatacactgaagaacctgctccgaaacataccgcccgctcactgcatccagccatgctcccagcagcagacggagcaggaccccgatag

SEQ ID NO: 17589 - DNA, 993 bp, synthetic construct
  misc_feature 1..993: note = Description of Artificial Sequence: Synthetic coding sequence
  source 1..993: mol_type = other DNA
atggagcacttagggcctcatcacctgcaccccggccatgccgagcccatttcatttgggatcgaccagattcttaactctccagatcagggaggttgcatggggcccgcttcccgcttgcaggatggggaatacggcctcgggtgtctcgtcggaggcgcatatacttacggcgggggcggatcggctgccgcgaccggtgccggcggcgctggagcatatggtactggtgggcctgggggtcctgggggtcccgcaggcggtggcggtgcgtgctccatgggtccccttacggggtcttacaatgtcaatatggcactggctggtggccccggtcccggtgggggcggcggctcaagcggcggcgccggcgcactgagtgccgccggcgtgatccgggtgcctgcccaccggcctctcgccggggccgtggcacacccacagcccctggcaaccggcttgcctactgtccctagtgtgcctgccatgcctggcgtgaataatctcactggcctgactttcccttggatggagagcaatcgtcggtacacgaaggatcggttcacgggtcacccctatcagaacagaacacctccaaagaagaagaaaccacggaccagtttcacaaggttacagatctgtgaactggaaaagcgtttccacaggcagaagtacctggcaagcgccgaaagagctgccctcgccaaggccttaaaaatgaccgatgctcaggtcaaaacctggtttcagaatagacgcactaagtggagacgacaaaccgccgaagaaagggaagccgagaggcaacaagcaaaccgaatattgttacagttgcagcaggaggcgttccagaagtctctggcccagccactcccagccgatccactgtgcgtgcacaattcttctctgtttgccttgcaaaatttgcagccatggagtgatgattccaccaagatcacctctgtgacgagtgtcgcctcggcatgtgagtag

SEQ ID NO: 17590 - DNA, 774 bp, synthetic construct
  misc_feature 1..774: note = Description of Artificial Sequence: Synthetic coding sequence
  source 1..774: mol_type = other DNA
atggagcacctgggcccccaccacctccacccaggacatgcagaacccatttcttttggcatcgatcagatcttgaattctcctgaccagggcggctgcatgggtccagctagtcgtctccaagacggcgagtacggactggggtgcctcgtcgggggagcatacacatacggaggaggcggctccgccgccgcaaccggtgcaggaggtgcgggggcttacggtacaggggggccagggggcccaggagggccagcgggcggtggcggggcctgctctatgggtcctctgaccggcagttacaacgttaacatggcgctagctggcgggccgggccctggcgggggcggaggaagcagtggaggagcgggcgccctctctgccgccggcgtcattcgggttccagcccaccggcccttggcaggggccgtggctcatccacagcctctcgcaaccggactgccgactgtgccttccgtgcctgcgatgccaggggtaaataatttgacgggcttgacttttccttggatggagtctaacagaaggtatacgaaggacaggtttaccggccatccataccaaaacagaaccccccccaaaaagaagaagcccagaacaagttttactcggctccagatctgtgaactggagaaacggttccacagacagaagtacctggcttctgccgaaagagccgctctggccaaggcgctgaagatgaccgatgctcaggtgaaaacctggttccaaaaccggcggacaaagtggaggtag

SEQ ID NO: 17591 - DNA, 345 bp, synthetic construct
  misc_feature 1..345: note = Description of Artificial Sequence: Synthetic coding sequence
  source 1..345: mol_type = other DNA
atggcggaatgtccgacactgggggaggccgtgaccgatcacccggaccggctgtgggcgtgggagaagttcgtgtacctggacgagaagcaacacgcttggctgccactgacaatagaaattaaagacaggcttcagctcagagttctgttgcgtagggaggacgtggtcttggggagacccatgactcccacgcagatagggccatcgttactgccgatcatgtggcaactctatccggacggtaggtacaggtcctcagattcctcattttggcgcttggtataccacattaaaatagatggtgttgaggacatgcttctcgaacttctaccagacgattag

SEQ ID NO: 17592 - DNA, 345 bp, synthetic construct
  misc_feature 1..345: note = Description of Artificial Sequence: Synthetic coding sequence
  source 1..345: mol_type = other DNA
atggcagagtgccctactctgggagaggctgtaactgatcacccggacagactgtgggcatgggagaagtttgtctatttagacgagaaacaacacgcctggctacctctaacaatcgaaatcaaagaccgactgcagttgagggtactgctgaggagagaggacgttgtgctgggacgccctatgactcctacacagatcggcccatccctcctgccgattatgtggcaattataccccgacggacgctacaggtctagcgacagtagcttctggcggctggtgtaccatattaagatcgatggcgttgaagacatgctgctggaattattgccagacgactag

SEQ ID NO: 17593 - DNA, 345 bp, synthetic construct
  misc_feature 1..345: note = Description of Artificial Sequence: Synthetic coding sequence
  source 1..345: mol_type = other DNA
atggccgagtgtccgactctgggcgaagctgtgacagatcatcctgatcggctgtgggcttgggagaaatttgtgtacctcgatgagaagcagcacgcatggttgcctctcacgatcgaaattaaagacaggttgcagctacgggtgttgctgcggcgagaggatgtagtcttaggtcgcccgatgactcctacacagatcggtccctcactgctgccaataatgtggcagttgtatcctgacggcaggtatcgcagcagcgactcctcattctggcggctggtttaccacattaaaattgatggagttgaggacatgcttctggaattactacccgacgattag

SEQ ID NO: 17594 - DNA, 345 bp, synthetic construct
  misc_feature 1..345: note = Description of Artificial Sequence: Synthetic coding sequence
  source 1..345: mol_type = other DNA
atggctgaatgcccaacactgggtgaggcggtcacagaccatcctgatcggctgtgggcctgggagaaatttgtctatcttgatgaaaagcaacatgcgtggctgcctctgaccatcgaaataaaggacagactgcagctgagggtcttgctgcgaagggaagatgtcgtgttgggacggcctatgaccccaacacagatcgggcccagcctgctgcctattatgtggcagctgtatccagacggccggtacaggagtagcgacagtagcttctggcggctggtgtaccacatcaagatagatggagttgaagatatgttactggagttgctgccagacgactag

SEQ ID NO: 17595 - DNA, 1407 bp, synthetic construct
  misc_feature 1..1407: note = Description of Artificial Sequence: Synthetic coding sequence
  source 1..1407: mol_type = other DNA
atggattctctggcgagtttggtgctatgtggcgtgagtcttctgctgagtgggacggttgagggcgcaatggacctcatcctcataaatagcttgcctttggtctccgatgcagagacatccctgacttgcatcgcgagcgggtggcgtccacatgaaccaataacaattggcagagactttgaggccctgatgaaccagcaccaggaccctctcgaggtgacacaggacgtcactcgcgaatgggctaaaaaggtggtctggaagcgagaaaaagcttccaagataaatggcgcatatttttgcgaggggagagtccgaggagaggcaattaggattagaaccatgaagatgaggcagcaagcttcgttcctgcctgcaaccctgacaatgactgtggataaaggagataacgtgaatatatcattcaagaaggtgctgataaaggaggaagacgccgtgatttacaagaatggctcctttatccatagcgtcccccggcacgaagtgcccgacatcctagaggtgcacctgcctcatgctcagcctcaggacgctggcgtgtactccgctcgatatatcggaggaaacctgtttacgtcagcgttcacacgtcttatagtgcgcaggtgcgaagcacagaaatgggggccagaatgcaatcacctctgcactgcctgcatgaataacggagtctgccacgaggataccggcgagtgtatctgtcccccaggcttcatggggcgcacctgtgagaaagcttgcgagctccatactttcgggcggacttgcaaagagcgttgtagcggccaggagggctgtaaatcctatgtcttctgcctaccggacccctatgggtgttcttgtgctacaggttggaaaggtctgcagtgcaacgagggaattcagagaatgactccgaagattgtagacctgcctgaccatatcgaagttaacagcggtaaatttaaccctatatgcaaggcatctgggtggcccttgcccacgaacgaagagatgacactggttaaaccagacgggaccgtattacatcccaaggattttaaccacacggaccactttagtgtcgcaatttttacgattcacaggatcctgcctcccgatagtggagtctgggtttgctccgtgaatactgtggctggaatggtcgagaagccctttaatattagcgtgaaagtgctgcctaaaccacttaacgctcctaacgtgatcgatacgggccataactttgccgtgattaatatttccagtgagccctactttggggacgggccgataaaatccaaaaaactgctgtacaaacctgttaaccactacgaagcatggcagcatatccaggtgtccatggaaaaacagcgtctgactaaagcaaactccgatatttag

SEQ ID NO: 17596 - DNA, 3375 bp, synthetic construct
  misc_feature 1..3375: note = Description of Artificial Sequence: Synthetic coding sequence
  source 1..3375: mol_type = other DNA
atggactcactcgcctccctcgtgctgtgcggcgtttctctcctcctgtctggtacggtcgaaggggcaatggaccttattcttatcaactccttgccgctcgtgagtgatgccgaaaccagcctcacctgtatcgcatcagggtggagaccccatgaacctatcactataggcagggattttgaggccttgatgaatcagcaccaggaccctttggaggtgactcaggacgtcactcgagaatgggcgaagaaagtcgtgtggaaacgcgagaaagccagtaaaatcaacggggcatatttctgcgagggtagagtgcgtggcgaggcaatccggatacggacgatgaaaatgcggcaacaagcatcttttctccccgctacgttgacaatgacagttgataagggcgataacgtaaacatttccttcaaaaaggtgttgattaaagaagaggacgcggtgatttataagaatgggtcattcattcactctgtacctagacatgaggtccctgacatcctggaagtgcacttaccccatgcacaacctcaggacgcaggggtgtattccgcaaggtatataggagggaatctgttcacgtctgcgttcaccagacttatcgtgcgcagatgcgaagcccagaaatggggcccggaatgcaaccacctgtgtaccgcttgtatgaacaacggtgtgtgccacgaagatactggcgagtgtatctgcccccccggctttatggggcgtacatgcgagaaggcctgtgaattgcacacctttggtcggacttgtaaggaacgatgctcaggtcaggaggggtgcaaatcgtatgttttttgcttacctgatccatacggttgctcatgcgcgacaggctggaaaggcctgcaatgcaacgaggcctgccatcccggtttttatggccctgattgcaaactgagatgttcttgtaacaatggagagatgtgtgaccgctttcaggggtgcctgtgcagccccggatggcagggattgcagtgtgagcgggaaggcattcagagaatgacaccaaaaattgtggacctgccagatcacatcgaggtaaattctggcaaatttaatcctatatgcaaagctagtggttggccgctacccacaaacgaggagatgacactggtgaaacccgacggaaccgtgctgcatcccaaggactttaaccacaccgaccacttctccgttgctattttcacaatccaccgtattctgcctcctgatagtggagtttgggtatgctccgtcaacacagtcgctggaatggtggagaagccattcaacatcagtgtgaaggtactccctaaacctctgaatgccccaaacgtgattgacacagggcacaacttcgcagtaataaacatatccagcgagccctactttggggacggcccgattaagagcaagaaactactttacaagcctgtgaaccactacgaggcctggcaacacatccaggtgacaaacgagatcgtgaccctgaattacctagagccgagaacggaatatgagctgtgcgtgcagctcgtccgcaggggggagggtggtgagggacacccagggccagtgagaagatttacgactgcctctattggacttccccctccgagaggccttaacttgctcccaaaaagtcagacgaccttaaatctgacatggcagcctattttccccagttctgaagacgatttttatgtggaggtggaacgccgcagcgtgcagaaatccgatcaacaaaacatcaaagtgccaggcaacctgacgtcggtgctgctgaacaatctccacccgcgggagcaatatgttgtcagagcgagagtcaatacaaaggcgcaaggcgaatggtccgaggatcttactgcgtggacgctgtccgatatcttgccgccccaaccagagaatattaagatctccaacataacccattcaagcgctgtcatctcttggacaattttggatgggtatagcatatcttctattacaatacgatacaaagtacagggcaagaatgaagatcagcacgtagatgtgaagatcaaaaacgcgacaattactcagtatcagctcaaaggactggagccggagacagcctaccaggtcgacattttcgcggagaataatatcgggtcctctaacccggcattcagtcacgagctcgtgacgctgcctgaatctcaagcaccagctgacttgggcgggggcaaaatgctgcttatagcgatcttgggtagcgctggtatgacttgtctgaccgtcctcctagcctttctaattatcctacaactaaaaagggctaacgtgcaaagacgtatggcgcaggccttccagaatgttagagaggaaccggccgtgcaatttaactcggggaccctggctctgaatcgaaaggtcaagaataatccagaccctacaatctatccagttctggactggaatgatatcaagtttcaagacgtgatcggagaaggaaacttcggccaggtgctcaaagccagaatcaagaaagacgggctgcggatggatgctgccattaaacgaatgaaagaatacgccagtaaagatgatcatagagacttcgcaggagagctcgaagtcctgtgcaagctagggcatcaccccaacattataaacctgctgggcgcctgcgagcataggggctatctatatctcgccatcgagtatgccccacacggcaaccttctggatttcttgcggaaaagtagggttctggaaactgatcctgcttttgccattgctaatagtactgcatcgaccctgagctctcaacaattattacactttgccgccgacgttgctagaggtatggactacctaagtcaaaagcagttcattcaccgtgacctcgctgcccggaacatacttgtaggagagaactacgtggccaagatagctgactttggcctgtcacgtggacaggaggtgtatgtcaagaagaccatggggcgtctgccagtacgatggatggcaatcgagtctctgaactattctgtctatactacgaacagcgatgtttggtcgtacggggtgttgctatgggagatcgttagtctggggggtactccctactgcggtatgacatgcgcggaactgtacgagaaacttccgcagggctacagattggagaagccccttaactgtgacgacgaggtgtacgatcttatgcgccaatgttggcgcgaaaaaccatacgagcggccctcatttgcccagatactcgtcagtcttaaccgcatgctcgaggaacgaaagacctatgttaatacaaccctgtacgaaaagtttacatatgccggcatcgactgctctgccgaagaagcagcctag

SEQ ID NO: 17597 - DNA, 3246 bp, synthetic construct
  misc_feature 1..3246: note = Description of Artificial Sequence: Synthetic coding sequence
  source 1..3246: mol_type = other DNA
atggatagccttgcttcactggtcctgtgcggagtctcccttctcttaagtgggactgtggaaggcgcgatggatctgatcctgattaactccttgccactcgtgtccgacgccgaaacgagtcttacctgcatcgctagcgggtggcggcctcacgagcctatcaccataggccgtgacttcgaggctctcatgaatcagcaccaggatcccctggaggtaactcaagacgtcaccagggaatgggcaaagaaggtggtttggaaaagagaaaaggcctccaaaattaacggcgcctatttctgtgaggggcgggtgcgcggggaggctattcgaattagaaccatgaagatgagacaacaggcaagctttctgcctgcaaccctgactatgactgtagacaagggcgacaatgtgaacatatcatttaagaaagttctgattaaagaggaggatgccgttatctataaaaatggctctttcatacattccgtgcctcgacatgaggtccccgatattctggaggttcacttgccgcatgctcagccacaggacgctggagtttatagtgcccggtacattggtggcaacctattcacctcagcatttaccagattaattgttcgacgctgtgaggctcagaagtggggaccggagtgcaatcacctgtgtactgcgtgtatgaataatggagtctgccacgaggatacaggcgagtgtatctgtcccccaggcttcatgggcagaacatgcgagaaggcgtgtgaactgcacacatttggccggacctgcaaggagcggtgttcaggacaggaagggtgtaagtcctacgtgttctgcctgccagacccgtacggatgctcctgcgcaacagggtggaagggcctccagtgtaatgaaggaatccagagaatgactcctaaaatcgttgacctgcctgaccacatcgaggtcaattctggaaagttcaaccctatatgcaaggctagcggctggccattgccaacaaacgaagaaatgacactggtcaaacctgatggcaccgtcctgcaccctaaagacttcaatcacactgatcatttctccgttgccatcttcacaattcacaggatcctcccccccgattccggagtttgggtatgtagcgtgaacaccgtggccggcatggttgaaaaaccgttcaacatatctgtcaaagtgttaccaaaacctctgaacgcaccaaacgtgatagatacagggcataattttgctgtgattaacatctcttccgagccgtatttcggggatggacctattaaaagcaaaaagttgctgtacaagccagttaaccattatgaggcttggcagcatatccaggtgactaatgagattgtaacgctgaactacctggaaccaagaacagaatatgagttatgcgtgcaactggtcaggagaggcgaaggcggcgaggggcaccccgggcctgtgcgaagatttaccacagcatctattggtctcccgccaccacgaggattgaacctgctcccgaagtcgcagaccactctaaacttgacctggcaacccattttcccatcttcagaggatgatttttacgtcgaagtcgaacgaagatctgtgcagaaatccgaccagcagaacattaaagtgcctggaaatttaaccagcgtgttacttaacaacttgcaccctagagagcagtacgtggtgcgggcacgcgtgaacactaaggcccagggagagtggagtgaagacttgacagcatggaccctaagcgacatcctgcctcctcagcccgaaaacattaagatctccaatataacacacagttctgccgtgatttcctggactatactggacggatatagtatatccagcatcacaatccggtacaaggtgcagggaaaaaatgaagaccagcacgtggatgttaaaatcaagaacgcgactatcactcagtatcaactgaagggtctggaacccgagacagcttaccaagtcgacatcttcgccgaaaataatataggctccagcaatccggccttcagccatgagctcgtcaccctccccgagtcccaggcccccgcagatttgggtggagggaaaatgctcttgatagccattctgggatccgcgggcatgacctgtctgactgtccttctggcattcctaatcattctgcagttaaagagagcaaatgttcaacgacggatggcacaggccttccagaatgtgagagaagagcccgccgtgcagttcaattccggcacattggcactcaacaggaaggtaaagaataacccggatccaacgatctatcctgtgctggattggaacgacataaaattccaggacgtcatcggcgaaggcaacttcggccaggtgctcaaggcccgtatcaagaaagatgggcttcgcatggacgctgccatcaaaaggatgaaagagtatgctagcaaggatgaccaccgggacttcgctggggaactggaggtgctgtgcaaactgggtcatcacccaaatatcattaacctgctcggcgcttgcgaacatagaggctatctgtacctggccatagagtatgcccctcatggaaatcttctggactttcttcgaaaatctcgggtacttgagacagatcctgcttttgccatcgccaacagtactgcttcaacattgagcagccagcagctgttgcacttcgctgccgatgtggcgcggggtatggattacttgtctcagaaacaatttatccatcgggacttagcagccaggaatatactggtaggcgaaaactacgtggcgaaaattgctgatttcggcttaagtcgcggccaagaagtgtatgtgaaaaagactatgggtcgactaccggttaggtggatggccatcgagtccttaaattatagtgtctacaccactaattcggacgtttggagctacggagttcttctttgggaaattgtgtcactgggagggacgccatattgcggaatgacctgtgccgaactgtatgagaagctaccccagggatacagactggaaaagccactgaactgtgatgatgaggtgtacgacttaatgcgccaatgctggagggaaaaaccctatgagagaccctcattcgcacagattttagtgtctcttaataggatgctggaagaaagaaaaacttacgttaacactactctgtacgaaaagttcacttacgccggaatcgattgtagtgccgaagaggccgcatag

SEQ ID NO: 17598 - DNA, 3375 bp, synthetic construct
  misc_feature 1..3375: note = Description of Artificial Sequence: Synthetic coding sequence
  source 1..3375: mol_type = other DNA
atggattcacttgctagcttagtactgtgtggtgtgagtctgctgctttctgggaccgtggagggggctatggacttgatccttattaactcactgcctcttgtgtcagacgcagagacctccttgacttgcattgcttccggctggcgccctcatgagcctataactatcgggcgggacttcgaggcattaatgaaccagcaccaggatcctctggaggttacacaggacgtcacacgcgaatgggccaaaaaggtggtttggaaacgcgaaaaggcaagtaaaatcaatggtgcctatttttgtgaaggacgggttagaggagaggccatcagaattcgcacgatgaaaatgcggcagcaggcctcattcctgccggccacactcacaatgacagtggataaaggggacaacgtaaacatttcattcaaaaaggtgctgattaaggaagaggatgcagtgatctataagaacggctccttcatacacagcgtgcctcggcacgaggtgcctgacatcctggaggtccacttgcctcatgcgcaaccccaggatgcaggcgtatactctgctagatacattggcggcaacctgtttacatctgctttcactaggttgattgtgaggagatgtgaagcccagaagtggggccccgaatgcaatcacctgtgtaccgcttgtatgaacaacggcgtgtgccatgaagacacgggcgaatgcatatgtcctcccggcttcatggggcggacgtgcgaaaaagcatgtgagctgcacaccttcgggcgcacttgcaaggaacggtgcagcgggcaggaagggtgcaagagttacgtgttttgcctgcctgatccgtatggatgttcatgcgctacaggatggaaaggcctgcaatgtaacgaggcctgtcaccctgggttttacggtcccgattgcaaactgagatgctcctgtaacaacggggaaatgtgtgatagattccagggttgtctttgctctcccggatggcaggggctgcagtgtgagcgtgagggcatacagcgaatgacgccaaagatcgtcgatttgcctgaccacattgaagtaaactccggaaaatttaatccaatttgtaaggcctcagggtggcccctgcccaccaacgaagaaatgactctggtcaaaccggatggcactgtgctgcaccctaaggactttaatcacactgaccatttttccgtcgctatatttacgatccaccgaattttacctcccgacagcggcgtgtgggtgtgctctgttaacaccgtcgccggaatggtggaaaagccctttaacatttccgtgaaagtgttacccaagcctctcaacgcacctaacgtgattgacaccggccataactttgccgtgatcaacattagtagcgaaccttacttcggagacggtccaattaagtcgaagaagttgctttacaagcctgttaaccattacgaagcttggcaacacatacaggtgactaatgagatcgtcacccttaactacttagagccgagaactgagtatgagctgtgcgtgcaactggttcgacggggtgaaggtggcgaagggcatccaggccctgtccgaaggtttacaacagcctcaattgggcttcccccccctaggggcctgaacctacttccaaaaagccaaaccactctgaacttgacttggcaacccattttcccaagtagtgaagacgatttctacgtcgaggtcgagagacgcagcgtgcaaaaatccgaccaacagaatattaaggtgcccggcaacctcacttctgtactcttgaacaacctgcaccccagagaacagtacgtggtgcgggccagggttaacactaaggcacagggggaatggtctgaggacttgaccgcctggactctgtccgatattctgcccccgcagcctgagaatattaagatttccaatattacacactcttcagcggtgatcagctggaccatactggacggctatagcatctcgtcaataaccatccggtataaggtccaggggaaaaacgaggaccagcacgtcgacgtcaagatcaagaacgcaactattactcagtaccaactgaaagggttggagcccgagacagcgtatcaggtcgatatcttcgctgagaacaacattggctcctcgaaccccgctttttcccatgaactagtcacacttcctgagtctcaggctccagccgatcttggaggcggcaagatgctgctgatagccattctgggttccgcagggatgacttgtctgactgtccttttagcattcttgataatcctgcagctgaagagagctaatgtgcagagacgaatggcacaggcattccaaaacgtcagagaagaacctgccgttcagttcaattccggtaccttggcgcttaaccggaaggtcaaaaataacccagatcctactatctacccggtgttggattggaatgatatcaagttccaggacgtgattggggagggaaatttcggacaagtactcaaagctcgcattaagaaggacgggttgaggatggacgccgctattaaacgaatgaaagaatatgcatctaaggacgaccatcgagatttcgccggagagttggaagtgttgtgcaagctcggtcatcatcctaacatcatcaacctgctgggggcatgtgaacaccggggttacctgtatttggcgattgagtacgcaccacacggaaatctcttggactttttgagaaagtcacgcgtgctcgagacagatccagcctttgctatcgccaacagtaccgcgagcaccttgtcctcgcaacaactgctgcatttcgcagcggatgtcgctcggggtatggattacctatctcaaaaacaatttattcacagagatctggccgctaggaatatcctcgttggggagaattacgttgcaaagattgcggattttggactcagtcgaggtcaggaggtgtatgtgaaaaagaccatgggacgcctgccggtgcgctggatggcaatagagtctctgaactactcggtttacaccacaaactcagatgtgtggagttatggcgttctgctgtgggaaatcgttagcttgggtggaaccccttattgcgggatgacttgcgccgagctctacgaaaaactgccgcaggggtacaggctcgagaaaccactgaactgcgacgatgaggtgtacgatctgatgcgccaatgctggcgcgaaaagccgtatgagcggccctcttttgctcagatactggtgtctcttaacaggatgttagaggagaggaagacctacgttaacacaaccctatatgaaaaattcacatacgcaggaatcgactgctccgctgaggaagccgcttag

SEQ ID NO: 17599 - DNA, 2931 bp, synthetic construct
  misc_feature 1..2931: note = Description of Artificial Sequence: Synthetic coding sequence
  source 1..2931: mol_type = other DNA
atggattccttagcctccctggtcctatgcggagtgtccctgttgctttctgcatcttttctaccagccacactgactatgactgttgacaagggtgacaacgtcaatataagcttcaaaaaggtgcttatcaaggaagaggatgcagttatctataaaaacggtagcttcattcacagcgtacctaggcacgaagtgcccgacattttagaggtccatctgccccatgcccagcctcaggacgccggggtttactctgctcgatacattggtggcaatctgtttacaagcgcttttaccagactgatcgtgcggcgctgtgaggctcagaagtgggggccagaatgcaaccatctctgcaccgcatgtatgaataacggcgtatgccacgaggatacgggagagtgtatttgcccgcccggctttatgggccggacctgcgaaaaggcctgcgaactgcacacattcggccggacctgcaaggagaggtgcagcggccaggaagggtgtaaatcctatgtcttttgtttgccagacccttatggatgcagttgcgcaacgggctggaaggggctacagtgcaacgagggcatccagaggatgactcccaagatagttgatctgccagaccacatcgaggtaaattctggcaaattcaatcccatttgtaaggcatccgggtggccactgcccactaacgaggagatgaccttggtgaaacccgatggcacggttttacacccaaaggacttcaatcacaccgaccacttcagcgtagctatttttacgatacatcgcatccttcccccggacagcggcgtctgggtgtgctctgtcaatacagtggccggaatggtggaaaaaccctttaacatttctgtcaaagtcttgcccaaacccctgaacgcaccaaacgtgatcgacacaggtcacaatttcgctgtgattaacatctcaagcgaaccatacttcggcgacggacccattaagtccaaaaagcttctgtataagcctgtgaatcactacgaggcatggcagcacattcaggtgacaaatgagattgtgaccctcaattatctggagccccgcacggagtacgagctttgcgtccaactggtccggcgcggcgaaggaggcgagggacatcctggacccgtgaggcgtttcactaccgccagcatcggacttccacctccgcgcggcctgaatttgctgccaaagtcccaaactacccttaatttaacttggcagcccatttttccaagtagtgaagatgatttctacgtggaagtagaacgtcgcagcgttcaaaagtcagaccagcaaaacatcaaagtgcctggaaatttgactagcgtcctgcttaacaacttgcaccctagagagcagtacgtagtgagagctcgggtgaacaccaaggcacagggtgagtggtcggaggatttaacagcgtggactctcagtgatattctgcctccacaaccagaaaatatcaagatttcaaatatcactcactcgtctgcagtgatctcttggaccatccttgacggctattccataagttcaatcactatccgctacaaagtccaggggaaaaatgaagaccagcatgtagatgtgaagattaagaacgccacaatcacccagtaccagctgaagggcctggagccagagaccgcttatcaggtagacatctttgccgagaacaatatcggtagctcaaatccagccttcagtcatgaattggtgacattaccagagagccaagccccagcggatctgggcggcggtaagatgctgctgatcgcaattttgggaagcgccgggatgacctgcttaaccgtgctcttggcctttctgatcatactgcagctcaaaagagcaaatgtccagcggaggatggcacaggctttccagaatcgggaagagcctgcagttcagtttaactcaggcactcttgcgctgaacaggaaggtcaagaacaatcccgacccaaccatttacccagtcttagattggaatgatattaaattccaggacgtcatcggtgaggggaattttggtcaagtcttgaaagccagaatcaaaaaagacgggctcagaatggatgctgctattaaaaggatgaaggaatacgcttccaaggatgatcaccgtgattttgccggcgagttagaagttctctgcaagctggggcatcaccctaatatcattaacctgttgggcgcctgcgagcatcgagggtacttgtacctggccatagagtacgcaccccacggcaatcttctagatttcttgcggaagtcccgcgtgctagagaccgaccctgcattcgccattgccaacagcaccgcctccactttatcctcccagcagctcctacacttcgccgcagatgtcgcacgaggaatggactacctcagccaaaagcaattcattcaccgggatctggccgcccggaatattctggtgggtgaaaactacgtagccaagattgccgacttcggcttgtcacgggggcaggaggtgtatgtaaaaaagactatgggccggctcccagtccgctggatggcaattgagtccctgaattactctgtatacactactaactcagacgtgtggagctacggggtgttactgtgggagatcgtgagcctcggaggtacgccttattgcggcatgacctgcgcagagctttatgagaagttgccgcaagggtaccggcttgaaaagcctctgaactgcgacgacgaggtgtacgatcttatgcgtcagtgttggcgcgagaaaccctacgagcggcccagtttcgcacaaatcttagtatcactgaataggatgctggaggagcggaaaacctatgtgaacaccaccctgtacgagaaattcacctatgctgggatagattgctctgccgaggaagccgcatag

SEQ ID NO: 17600 - DNA, 7884 bp, synthetic construct
  misc_feature 1..7884: note = Description of Artificial Sequence: Synthetic coding sequence
  source 1..7884: mol_type = other DNA
atggaaaaactccacggtcacgtcagcgcccatcccgatatactgagcctagaaaatcggtgtcttgcaatgctcccagacctccagccccttgagaaactgcaccagcatgtgtctactcactccgacatcctgagtctcaaaaatcaatgcctggccacactgcctgacctcaaaacaatggagaagccgcacggctatgtctccgcccatcctgacatcttatctctggagaaccagtgtctggcaaccttaagtgatttaaagacgatggaaaaacctcatggtcatgtctctgcccaccccgacatcttgagcctagagaacagatgtctcgcaaccctctcttctctcaagagcacagttagcgccagcccattgtttcagtccctccagatttcgcacatgactcaggccgacctctaccgagtgaacaactctaactgtctgttgtcggaacccccaagctggagggcccagcacttctctaagggcctggacttgtccacatgccctatcgccctgaagtctatcagtgccacggaaaccgcccaagaggccaccctgggccgttggttcgatagcgaggagaagaagggggcggagacacagatgcccagctactcccttagcctgggtgaggaggaggaggtagaggatcttgccgtgaagcttacctccggggactctgagagtcacccagagcccacagatcacgtgttacaggaaaagaaaatggctctgctcagtctcctctgcagcaccctggtgtccgaggtcaacatgaataacactagtgaccccactctggcggctatttttgagatttgcagggaactggcccttttggagcccgaattcatcctaaaagcttccctgtatgcaagacagcagctgaacgttaggaatgtggcaaacaatatcctcgccatagctgcgtttctacctgcttgccgccctcacctgagacggtacttctgcgctatagtgcagctcccctccgactggatccaggtggctgaactttatcagtctcttgccgaaggcgataagaataaacttgtaccattgcccgcttgcctccggacagcaatgactgacaagttcgctcagtttgatgagtatcagttggcgaaatataatccaaggaaacatcgggcgaagcggcaccctcggcgcccccctaggagccccggtatggagccaccatttagccaccggtgcttcccgaggtatattggctttctccgtgaggagcaacgtaagttcgaaaaagcgggcgacaccgtctcagagaagaagaatccaccacggtttacactgaagaagctggttcaacggcttcacattcataaacccgcccagcatgtacaggcactcctcgggtatagatacccgagcaatctccagctgttttcgcgctctaggctcccaggcccttgggatagctcacgagcaggtaagcgcatgaagctctcccgccccgaaacttgggagagggagctctccctgcgtggcaacaaggcaagtgtgtgggaggaactgatagagaatgggaagctaccttttatggccatgcttagaaacctctgtaatttactgcgcgtcggtatttcgagtcggcaccacgagctcatactgcagcgactgcaacatgcaaagtctgtcatccactctagacagttccccttcagatttctaaatgcgcatgacgctatcgatgccttggaagctcaactgcgcaaccaggctctcccctttcccagcaacatcacgctgatgcgacgaattctgacacggaacgagaaaaatagaccacgtaggaggtttttgtgtcacctgagtagacaacagctgaggatggccatgcgcatccccgtgctctacgaacagctcaaacgcgagaaactgcgtgtccataaggctcggcagtggaagtatgatggagagatgctgaatagatatagacaagccttggaaaccgccgtgaacctgtccgtgaagcacagcctgcctctgctgcccgggcgaacggtgctggtatacctaacagacgccaacgccgacagactttgcccgaaatccaatcctcagggaccccctctgaactacgcattactgctaataggtatgatgataacacgtgccgagcaggtggacgtggtcctgtgtgggggagacaccctgaagaccgcagtgctcaaagccgaagaaggtatcctcaagaccgccatcaaactgcaggcccaagtgcaggagtttgacgagaatgatggttggtccctgaatacattcgggaagtaccttttaagcctcgctgggcagagggtcccagtggatagggtgatcctgttggggcaatctatggacgacggaatgatcaacgtcgccaaacagctctactggcaaagggtcaattctaagtgtcttttcgtgggtatcctcctcaggcgtgtgcagtacctttcgacagatttaaaccctaacgatgtcacactaagcggttgtacagatgccatcttaaagttcatcgctgaacacggcgcgtctcacctgttggagcatgttggtcagatggacaagatatttaaaattcctccgcctcctgggaaaactggtgtccagagcctacgtcccttggaggaggacacccctagccctttggcccctgtcagccaacagggctggcgttccatccgtctttttatttctagtacatttcgagatatgcacggtgaaagagatctcttactccgctctgtgctgccagcccttcaggctagggctgcccctcaccgtatcagtctgcatggcatcgacctcaggtggggagtgaccgaggaagagactagaaggaacagacagctcgaggtctgcctcggtgaggtcgaaaacgctcaattatttgtcggtatcctgggctcccggtacggatacatcccacccagctacaacctgcctgaccatccacatttccactgggcacaacagtacccttctggccggagtgtcactgagatggaggtcatgcagtttctgaaccggaatcaacgcctgcagcctagcgctcaggctctgatttatttcagagatagttctttcctgtctagcgtgcccgacgcctggaagagcgatttcgtctccgagagcgaggaagctgccagacgaatctctgaattaaagtcatacctatcccggcagaagggcatcacatgtaggcggtacccttgtgaatggggtggggtggccgctgggcgcccttacgtgggaggtctcgaggagtttgggcagcttgtgctgcaggacgtgtggaatatgattcagaagctgtacctgcagcctggcgccttgctggagcagccggtgtctatccctgatgacgatttggtgcaggccacctttcagcaactgcaaaagccgccctctccggcccggccaaggttgcttcaggacactgtgcaaagattgatgctccctcacgggcgtctgtcactagtaactggacagtctgggcagggcaaaaccgccttcttagcgagcttggtcagcgccctgcaggctccggatggggcgaaagttgcgagcttagtgttcttccactttagtggcgcacggcccgatcagggcctagctctgactcttttgcgccgactttgcacctatcttcggggacagttaaaggaaccaggagcactgccctccacatacagaagcctggtatgggagttgcagcagcgactcctgccaaaatcagcggaatccctacatcccgggcagacccaggtcctgatcattgatggggctgatcggctggtcgatcagaacggacagcttatttccgattggatacctaaaaaactgccgcggtgcgtgcacctcgtcctcagtgtgagtagcgatgcaggactgggggagacgctggagcaatcacaaggagcgcacgtgctggcattgggtccgcttgaggccagcgcccgcgctcgcttggtgcgtgaagagctggcactgtacggcaaacggctagaagagtctccctttaataatcaaatgcgccttttgctggttaagagggagagcgggcggcccctctacctgcgtctagtaactgaccatcttcgattatttaccctgtatgaacaggtatcagagcggctgaggaccctgcccgctaccgtgcctctgctgctgcagcacattctgagcactttggaaaaagagcacggccctgacgtactcccacaagctctaacagccctggaggtaactcgcagtgggctgacagtggatcaacttcatggagtgctgtccgtgtggcgcacactaccgaagggtactaaaagctgggaagaagctgtcgcagccggcaacagcggtgacccataccccatgggtcctttcgcctgcctagtgcagagcctgcgctccctgttaggtgaagggcccctagagagacccggcgctagactttgtctgcctgacggacctctcagaacggctgctaagcggtgctatgggaagaggcccggattggaggacaccgcccatattcttattgctgctcagctgtggaaaacttgcgacgcagacgccagcggtacattccgcagctgtcctcccgaagcgttgggagacctgccctatcatcttcttcagtccgggaacagaggcctcctgtctaagtttctgactaacctgcacgtggtggcagcccacctcgagttgggcctggtgtctcggttactggaagctcatgccctatatgcttcctccgttcctaaggaggaacagaagctgcccgaggcagacgtggctgtgtttcgcactttcctgaggcagcaagcttctatcctgtcccagtatccaagattgctgccccagcaagcagcaaatcagcctttggatagccctctttgccaccaggcctcccttctgagccgccggtggcatctccagcacacactcaggtggttgaacaagcctcggactatgaaaaatcagcagtcctccagcttgtccctggccgtgtcctcatctcccactgccgttgcctttagcaccaatggacagagggccgctgtaggcaccgcgaacgggacagtttacctgctcgatttgaggacatggcaagaagaaaaatctgtggtttccggatgcgatggaatttccgcctgtttgttcctcagtgacgatacactgttcctcacagccttcgatgggctgttagaactatgggatctgcagcacgggtgcagagttctccagacgaaggcccatcagtaccagattacaggttgctgtttgagccctgactgccgcttgctcgccaccgtgtgcctcggaggctgtctgaaattgtgggacactgttagaggccaattggcattccagcatacgtatccaaaatcattgaactgtgttgcctttcacccggaaggccaggtaattgcaactggatcatgggctgggagtattagtttctttcaggtagacggccttaaagtgacgaaggaccttggggctcctggagcatctattagaactttggccttcaacgtgcccgggggtgtggtggcagtcggcaggctggacagtatggtagagttgtgggcttggcgcgagggggcccgcttggctgcttttcctgcccatcacggcttcgttgcagccgccctgttcctgcatgctggatgccagctgctgacagccggggaggacggtaaggtgcaggtatggtctggaagcttgggtcgccccagaggacaccttgggtcactgagcctgtcacctgccttgagcgtggcattaagccccgatggtgatagggtggcggttggctaccgggccgacggaattaggatctacaagatctcctcaggaagtcaaggtgcacagggccaagccctcgacgtggcggtgtccgctctcgcttggctcagcccaaaagttctggtatcaggcgccgaggatggttccctccaggggtgggctctgaaagaatgttccttgcaatctctctggctactgtctagattccagaaaccagtcctaggattagctacgtctcaggagctgcttgctagtgccagcgaggatttcacggtccaattgtggccgcgccagcttctgactcggcctcacaaggccgaggactttccatgtggaacggagctgagggggcacgagggtccagtgtcctgctgctccttcagtacagatggaggcagtctagcaaccggaggaagagataggagcctcctgtgttgggacgtcagaacacctaagacccctgtcttgatacatagcttccccgcttgtcatcgggactgggtcacggggtgcgcatggactaaagacaatctgctcatcagctgctcatctgatggttcagtcggtctgtgggacccggagtctgggcaacggctgggccagttcctgggacaccaatccgccgtatccgccgttgctgctgtagaagaacacgtcgttagtgtcagtcgagacggcacactgaaggtttgggatcaccagggagtggagctcaccagcattccagctcactcagggcccataagccattgtgctgctgcgatggagccgagagccgccggacagccaggttcagaattgctggtggtcactgtcggcctggacggggctacgcggttgtggcaccccctcttggtgtgccaaactcacaccttgctgggtcattctggccctgtgcgggcagctgccgtttctgaaacctcaggcttaatgcttacggcatcagaggatggttctgtgaggctatggcaggtcccaaaggaagctgatgacacctgcatcccccggagctcggctgcagtcaccgccgtggcctgggctccagacggatctatggcagtgtccggaaatcaggcaggggaacttatcctatggcaagaagcgaaagcagtggccaccgctcaagcccctggtcacatcggagcactgatctggagtagcgctcatacttttttcgtgctttccgccgacgaaaaaatctctgagtggcaggtgaagctgagaaagggaagcgcaccaggaaacctgtcgctgcatctcaacaggattcttcaggaggatttgggcgtgctcaccagtttagattgggctccagacggtcattttttgatcctggcaaaagccgatcttaagctgctctgcatgaagcccggggacgcccctagcgagatctggtcctcttacacagagaatccaatgattctatctactcataaggagtacggcatttttgtgctccagccaaaggatcccggtgtcctgtccttcctgcggcagaaagagagcggggaatttgaggagcgcttgaacttcgacatcaatcttgagaacccctccaggacattgattagcataactcaggccaaaccggagtctgagtcctctttcctgtgtgccagcagcgacggaatcctgtggaatctcgccaagtgtagccctgagggagaatggacgacaggaaatatgtggcagaaaaaagctaatacgcctgagacacagacacctgggacggacccttcaacatgccgggaatctgacgcctcaatggatagcgacgctagcatggactctgagcctactcctcatttaaagacccgacagaggagaaagatacattccgggtccgtgacagctctccacgtcttacctgaactcctcgtgacagcttcaaaggatcgggacgtcaaattatgggagcggccgagcatgcagctgttggggctgtttcggtgcgaaggtagcgtctcatgtctggaaccttggctcggagccaattctacactgcaactggcagtcggtgacgtccaaggaaacgtgtacttcctgaactgggagtag

SEQ ID NO: 17601 - DNA, 7860 bp, synthetic construct
  misc_feature 1..7860: note = Description of Artificial Sequence: Synthetic coding sequence
  source 1..7860: mol_type = other DNA
atggagaagctgcacggccacgtgtctgcgcatcctgatattctcagcctcgagaatcgatgtctggctatgcttccggacttacagcccctggaaaaactgcaccagcatgtgagcacccattccgacatactgtcactaaaaaatcagtgcctcgctacactgccagatttaaagactatggagaagcctcacggatatgtctcagctcacccagatatattaagcctggagaaccagtgtctggctactctatccgatctgaagacaatggaaaagccccatggccacgtttctgcacatcctgatatcttatctctggagaatcgctgcctggctactctctcttccctcaaatcaacagttagcgcgtcccccctcttccagtcccttcagattagccacatgacacaagctgacctttaccgtgtgaacaatagtaactgtttattgtctgagccccccagctggagggcacagcatttttcaaaaggtcttgacttgagcacatgtccaatagctcttaaaagtattagtgcaacagagaccgcccaagaggctacactgggaagatggttcgactctgaagaaaagaaaggggccgagacccagatgccaagctatagcttgtcactgggcgaagaagaggaagtggaagaccttgctgtgaaattaacctctggggatagtgaatcacaccctgaacccacagaccatgtgctgcaggaaaagaaaatggcgttattgtcactgctttgctccactcttgttagtgaggtgaatatgaataataccagcgatccgaccttggcagccatctttgagatatgccgggagctcgctctgctcgaacccgagtttatcctgaaggcctcactgtacgcccggcagcagctaaatgttagaaacgtggccaataatatcctggccatagccgccttcctgccagcctgtcggccgcacctgcggcggtacttttgcgcgatcgtccagcttccctccgactggatccaggtggcggaactgtaccaatctttggccgaaggggacaagaacaagctggtgcccctgcccgcctgtctgcgaaccgcaatgacagacaaatttgcccagtttgacgagtatcagctggccaagtacaaccctcgaaagcacagggcaaagcggcatcccaggcgcccgcctcggagccccgggatggagcccccctttagccaccgatgttttccccgatatattggctttctgcgtgaagagcagaggaaatttgagaaggcaggggacacagtgtcagagaaaaagaacccacctcggttcaccctgaaaaaactggtccagagattgcatatccataagccagcgcagcatgtgcaggccctactgggatatcggtaccccagcaacctgcagctgtttagccgcagcagactgcctggcccttgggactctagcagagccggtaaaagaatgaagctttccagacccgaaacttgggaaagagaactgtctttgcgcggcaacaaagccagcgtgtgggaagagctgatcgagaatggcaaactgcctttcatggcaatgctgagaaacctgtgcaacttactccgagttggcatttcctcacgacaccacgagctgattctccagagactgcagcatgccaaatctgtcatccactcccgacagttcccctttcgcttcctgaatgcacacgatgccatagacgcattggaagcacagttaagaaaccaggcgttgcccttcccgtctaacatcaccttaatgaggcgcattttgaccaggaacgagaagaaccgcccaaggagacgcttcttatgtcacctctctcggcagcagctgcggatggccatgcggatccccgttttgtatgagcagctgaaacgcgaaaaacttcgcgttcataaagctcggcagtggaaatatgatggagaaatgctaaataggtacagacaagccctggagacagctgtcaatctgtcagtgaagcactccctccccttgctgcccggtcggactgtgctggtgtacctaacagacgccaacgcagatcggctgtgccccaagtctaatccacagggaccccccctaaattatgctctccttctaattgggatgatgatcaccagggccgagcaggtagacgtcgtgctgtgtggcggcgatactttgaaaactgccgtgctgaaagctgaggaagggatccttaagacagccattaagcttcaggcacaggtccaggaatttgatgagaacgatgggtggtcgcttaacacatttggcaagtacctgctgagcctcgctggacagcgggtgccagttgatcgggtgatccttttggggcaaagcatggatgacggaatgatcaatgttgctaagcagctatactggcaacgtgtgaattcaaaatgtctgtttgtgggcattttgttgcgcagagtccagtatcttagtacagatctgaacccaaatgatgtgaccctgtctggatgtacagatgctatacttaagtttatcgctgagcatggggcttcccacctgctcgaacacgtcggacagatggataagatcttcaagatcccacccccccctggcaaaactggagtgcagtccttgcggcccctagaggaagacacccccagtccccttgccccagtctcgcagcagggatggagatctatcaggctgttcatatcttcaacatttcgcgacatgcacggggagcgggacttgttgctgcgcagtgtcctgcccgctctgcaggcccgagctgcaccacaccgtataagtctacacgggattgacctgcggtggggcgttacagaggaggaaacacgcagaaaccgccagttagaagtttgtctaggagaggtggagaacgcacagctgtttgttggaatcctcggctctcgatatgggtatatccccccttcttacaatcttcctgatcacccgcactttcactgggcccaacaatacccaagtggccggtcagtgaccgagatggaagtgatgcagttcttgaaccgcaaccaaagactgcagcccagcgctcaggccctgatctacttccgggatagtagcttcctcagctccgtgccagatgcttggaagtctgacttcgtgtctgaaagtgaagaagctgcgcgcaggatcagtgaattaaagtcatatctgtcccggcagaagggaattacctgtcgacgctacccttgtgaatggggtggagtcgcagccggacgcccctacgtgggcgggctagaggagtttggacaactcgtgctgcaggatgtatggaatatgatccaaaaattgtacttacagccaggagccctgctggaacagccggtctctattccggatgacgatctggtgcaggcgactttccagcagctccagaagccccccagccccgcccgccctcggcttctacaggataccgtgcagagacttatgctacctcacggcagactttctttggtcacaggtcaatcaggccagggcaaaactgccttccttgcgtcactggtttctgccttgcaagcaccggacggagccaaagtcgcctccctggtgtttttccatttctcaggagctaggcccgatcagggactggccttgacactgcttcggaggctttgcacttacctgaggggccagctaaaagaaccaggcgcacttccttccacgtaccgaagcctggtatgggagcttcaacagcgcctactccctaaaagcgctgaaagtctgcacccagggcagacgcaggtgttaattatcgacggcgccgatcgcctcgtagatcaaaatggccagctcatctccgactggattccaaagaagctgccccggtgtgtgcacctggtgctgtcagtgtcctcagatgctgggttgggagagaccctggaacaaagccagggcgcgcacgtgctggccttaggacctctagaggcatcggcccgggcccgactggttcgagaagagctagccctctatgggaaaagactcgaagagtccccatttaacaatcagatgcgcctgcttctggtcaagagggaaagcgggaggccgctctatctgcgcctggtgactgatcacctgcgcttatttacactgtatgagcaggtgagtgagagactcagaacactcccagctacagttcctctcctgcttcagcatattctgtccacactggaaaaagagcacgggccagatgtgctgcctcaggctctcacagcgctcgaggttactagaagcggtctcacagtcgaccagttgcacggtgtgctgtcagtatggagaacattgcctaaggggaccaagtcatgggaagaagcagtggcagctggaaattccggcgatccatatccaatggggccctttgcctgtttagtgcagtctttgaggagcctactgggggaggggccccttgaaaggccaggcgccagattatgcctgcccgacggaccactgcgcacagctgcaaagaggtgctatggcaagaggcctggcttagaagacaccgcacatatcttgatagccgcgcagctgtggaagacttgtgacgctgatgcgagtggaacttttaggtcatgcccgcctgaagctctcggcgacttgccataccacctgcttcagagcggaaacagggggttactgtcaaaatttttgactaacttacacgtggtcgccgctcatttggagctaggcttggtctcacggcttttagaggcgcatgccctttacgcctcttccgtcccaaaggaggaacagaagttacctgaggccgacgtggccgttttcaggacatttttacgacagcaggcaagcattctgtctcaatatcccagattgctgcctcaacaagctgcgaatcaacccctggactctcctttgtgtcatcaggcatcactcctgtcacggcggtggcatctgcagcacaccctacgctggctaaataagccacgcactatgaagaaccaacagtccagttcactgagtctggcagtgtcgtcgagccccactgccgttgctttctcgacaaatggccagagggcagcggtgggcacagccaacggaacagtttatctgctggacctaaggacttggcaggaggagaagtcagtagtgagcggttgtgatggcatcagcgcttgcctgttcctgtctgacgacacattattcctgactgcctttgacggcctgttggagctgtgggatttacaacacggctgtcgcgtgctgcagaccaaggcacaccagtatcagatcactggctgttgtctctcccctgactgccgcctgcttgccacagtttgtttgggcggatgtcttaagctctgggacacagttaggggacagctggcattccagcacacctaccctaaatcccttaactgcgtggcctttcaccccgaggggcaggtgatcgctaccggatcgtgggctggaagtatctcattctttcaagtcgatggcttgaaggttacaaaagaccttggagccccaggtgccagcatccggacattggcattcaatgtgcccggaggcgtggtcgccgtgggtcgtcttgattctatggtggagctctgggcatggagagagggagctaggctggcggcatttcccgcccaccacggcttcgtagcggccgctttgttcctacacgccggctgtcagctactgacagccggggaagacggcaaggtgcaggtgtggagcggttcactgggccgcccccgagggcatctgggctcattgagtctctcccccgcgctgagtgtcgctctctcaccagacggagatagggttgcagttggttatcgcgctgacggtatccgcatctacaaaatatcaagcggcagccagggtgcccagggacaggctctcgatgtcgctgtctccgccctcgcctggctgtcccccaaagtcctggtgtcgggcgcagaggacggaagcctacaggggtgggcgctcaaggaatgctcacttcagtcactctggctgctgtcacgttttcagaaaccagtgctgggcctagccacttcccaggaattattagcgtcagcatccgaagactttactgttcagctgtggccacgccagctgctgacccgaccccataaggctgaggatttcccctgcggaactgagttgcgtggtcacgagggcccagtttcgtgttgtagcttttcaactgacggagggagtttagccacaggcggcagagatagaagtctcctttgttgggacgtgcggacgcctaaaacccctgttctcatccatagctttccagcatgccaccgagattgggtcaccggttgtgcctggacaaaggataacctgctgatctcttgctcctctgatggaagcgtaggcttgtgggatccagagagcggtcagagactcggacagttcttgggacaccagtctgctgtgtcagctgtggcagccgtggaagagcatgttgtgtcagtgagccgcgacggtaccctcaaggtatgggaccaccagggggtggaactgacttctataccagcccactccggaccaatctcccactgcgccgccgcgatggagccgcgggccgccgggcagcctggcagcgagctgctggttgtgactgtgggcttggatggagccaccaggctgtggcatcctctactggtgtgccaaacccatactctcctgggtcacagtggaccggtgcgtgccgccgcagtcagcgagaccagcggactcatgctcacggcttccgaagatgggtcggtcagactgtggcaggtgcccaaggaagctgacgacacctgcataccgcgcagttccgcggccgtcaccgccgtggcctgggcccctgacggcagtatggcagtgagcggcaaccaggccggagagctgatcctctggcaggaagcaaaagccgtagcaacggcccaagcccctggccacataggagccctgatctggtcctccgctcatacattctttgtcctttccgccgatgagaaaatttccgagtggcaggtgaaacttcgcaagggaagcgctccggggaatctgtctctgcacctgaatcggatactccaggaggatttaggcgtactgacgtcattggattgggcaccagatggacatttcttgatcctggccaaggccgatcttaagttgctgtgcatgaagccaggggatgcaccgagtgaaatctggagcagctatactgagaaccctatgattttgtcgacccataaggaatatggcatattcgtgttacagccgaaggatccgggcgttctcagctttttacggcagaaagagtccggcgagtttgaggagagacttaatttcgacataaatctagaaaatccttcccgtaccttgatttctattacacaggccaagcctgagtcagctctgatgggctcttacggaacctggccgaatgccgcccagaaagagaatggaccacaggtgacctgcgggagaaagaaaaacacacccgagacacagacaccaggcacagacccctctacttgccgtgagtcagacgcgtcaatggactccgatgcatctatggacagtgagccgaccccccatctcaaaacaagacagcggcgcaaaattcatagtggctctgttaccgccttacacgtgttacctgagcttctcgtgacagcctcaaaagaccgggatgtgaagctgtgggagagaccatccatgcagctcctgggtttattccgttgtgagggctccgtctcttgtttggaaccttggctgggggcaaatagcacactccagcttgccgtgggggacgtgcaggggaatgtgtatttccttaattgggaatag

SEQ ID NO: 17602 - DNA, 2031 bp, synthetic construct
  misc_feature 1..2031: note = Description of Artificial Sequence: Synthetic coding sequence
  source 1..2031: mol_type = other DNA
atgaagaaccagcagtcttcctctctttccctggcggtctcaagctctccaaccgcggtggcatttagcaccaacggccaaagggccgctgtgggtaccgcaaatggcaccgtgtaccttctagatctcagaacatggcaggaagagaagtcagtcgtttccgggtgtgacggcatcagcgcctgcctatttctcagcgatgataccctctttcttaccgccttcgatggcctcctggagttgtgggatctacaacacggctgtagagtactccaaaccaaagctcaccaataccaaatcacaggctgttgtctgtcacctgattgccgtctcctcgctaccgtgtgcctgggagggtgtctgaaactgtgggacactgtccgaggccaactcgcctttcagcacacctaccccaagagcctgaattgcgtggcattccatccagaaggtcaggttatagcaaccggcagttgggctggatccattagcttcttccaagtggacggactcaaggtgacaaaggatctcggcgcacccggtgcatctatacgtacattagctttcaacgtgccagggggggtagtggcagtcggtaggctggattctatggtggagctttgggcttggcgggaaggggctagactggccgccttccctgcccaccacgggttcgtcgccgccgccttattcctgcatgctggctgtcaattgctcaccgctggagaggacgggaaggtacaggtttggtcaggcagtctgggccgaccaagaggacacctgggtagcttgagcctctcacccgctctctctgtcgcccttagtcccgacggcgacagagtggccgtgggatatcgcgcggatggcataagaatctacaaaatttccagtggtagtcagggggcccaggggcaggcactggacgttgcggtgtctgccctggcctggctgtctcctaaggtactggtgtcgggagctgaggatggatcattacagggctgggcactgaaagagtgctctttgcaatcattatggctactttctaggttccaaaaacccgtccttggtctggccaccagccaggagttgctcgctagcgcctccgaggattttaccgtacagttgtggcctcggcaacttttaacacggccccataaagccgaagattttccctgtggtactgagttgagaggccacgagggaccagtgtcctgttgctctttcagtactgatgggggatctctcgcaacaggaggccgggatcggagtctgctgtgctgggacgtgagaacccccaaaacgccagtgctgattcattcattccccgcatgtcaccgcgattgggtgactggttgcgcatggaccaaagataacttgctgatcagttgttcctcagacggatcggttggactctgggacccagagtccgggcagcgcctcggtcagttcctcggacatcagagcgcagtgtctgcagtcgccgccgtggaagaacacgtcgtgagcgtttcccgggatggaaccctgaaggtgtgggaccatcagggcgttgagttgactagtattcccgcacactctgggcctatcagccactgtgccgctgcaatggagccccgcgcggccggccagccgggaagtgagctgctcgtggtaactgtgggcttagacggggcaacccgcctttggcaccctctgttggtttgtcaaacgcatacactcctagggcactccgggccagtccgcgccgctgccgtgtctgaaacatccggattaatgctgaccgcttctgaagacggtagcgtccggctgtggcaagtccctaaggaagctgacgacacctgtatccccagatctagcgcggcagtcaccgcggtggcatgggctccagacggcagcatggccgtttctggtaaccaagccggcgagctcatactctggcaagaagcaaaagccgtcgctacggcccagagttctcccgagcccaattcgacgggaggcttacgcggagctgacaaatccggtctggggtcgtag

SEQ ID NO: 17603 - DNA, 501 bp, synthetic construct
  misc_feature 1..501: note = Description of Artificial Sequence: Synthetic coding sequence
  source 1..501: mol_type = other DNA
atggagaagttacacggacacgtgagtgctcaccctgatattttgagcctggagaacagatgcctcgcaatgcttcctgacctccagcctctggaaaaattacaccagcacgtgagcacccactcggacatccttagcctcaaaaaccagtgcttggccactctgccagatttgaaaactatggaaaaacctcatggatacgtttctgcccacccggacatccttagcctggaaaatcagtgcctggcaaccctctcggacttgaaaactatggagaagcctcacggacatgtttccgctcaccctgatatcctctccctggagaaccggtgtctggccactctgtcatccctcaagtctaccgtgagcgccagccccctgtttcagagcctgcagattagccacatgacacaggcagacctttaccgggtgaataactccaactgtctgctaagcgaaccgccgtcatggagagctcagcacttcagcaaaggtctctag

SEQ ID NO: 17604 - DNA, 1260 bp, synthetic construct
  misc_feature 1..1260: note = Description of Artificial Sequence: Synthetic coding sequence
  source 1..1260: mol_type = other DNA
atggctgaggatgtgagttcagctgctccgagcccccgcggttgtgccgatggcagggacgccgaccctaccgaagagcagatggccgaaacagagagaaacgatgaagagcagtttgaatgtcaagaattactggaatgtcaggttcaggtgggagcccctgaggaggaagaagaggaggaggaggatgccgggcttgtagctgaagctgaagccgtggccgccggctggatgttggactttctttgtctgagtttatgtcgcgcgttcagggacggcaggtcagaagactttcgccgaacacgtaacagcgcagaagcaatcatccatgggctgagttctctaaccgcttgccaactccgcacgatttatatttgtcaattcctaaccaggattgcggccggaaagaccctggacgcgcagtttgagaacgatgagcgcattacaccacttgagagcgcgctgatgatttggggcagtattgagaaggagcacgacaaactgcatgaggagatccagaacctgattaagattcaggccatcgctgtgtgtatggagaacggcaattttaaagaggcagaagaagtcttcgagagaatctttggcgaccctaacagtcacatgcccttcaagtctaagctcctcatgatcatcagtcaaaaagacacttttcactcttttttccaacatttctcttacaaccacatgatggagaaaataaagagttacgtgaattacgtgctgtccgagaagtccagcaccttcctgatgaaggccgccgcaaaagtagtggaatcgaaaaggacgcgaacaattacatctcaagataagccaagtggcaatgacgttgaaatggaaaccgaagcgaatctcgatacaaggaagagaagccataagaatctctttctcagcaagctgcagcacggtacacagcagcaggatctgaataaaaaggagaggcgagtgggaaccccacagtcgacgaaaaagaaaaaagagtctcgacgggcaacagagtcccggatcccggtgagcaaatctcaaccggtaactccggaaaagcatcgtgctcggaaacggcaagcgtggctctgggaggaagacaaaaaccttagatccggcgttaggaaatacggggagggaaattggtccaagatcctacttcattataagtttaacaatcggacttctgtgatgctgaaagaccgttggaggaccatgaaaaaattgaaactgatcagctcagattccgaagattag

SEQ ID NO: 17605 - DNA, 1320 bp, synthetic construct
  misc_feature 1..1320: note = Description of Artificial Sequence: Synthetic coding sequence
  source 1..1320: mol_type = other DNA
atggcagaggatgtgtcgagtgcagccccctcgcctcgcggctgcgccgatggacgtgatgccgaccctacagaagagcagatggcggagactgaaagaaatgacgaagaacagttcgaatgtcaggagcttctcgaatgtcaggtgcaggtaggagccccagaggaggaagaagaggaggaagaggatgccgggcttgtcgcagaagcagaggccgtggctgccggttggatgctggattttctatgcttaagtctgtgccgcgctttccgcgacggaaggtctgaggacttccggcgcacccgcaactcggccgaagccatcatccacggcctttcctctcttacggcatgccagctgagaactatatatatttgccagttcctcacacggatagccgccgggaaaactttagatgctcagtttgaaaacgatgaaaggatcacaccgttagagagtgccctgatgatttggggttctatcgagaaggagcacgataagctacacgaggaaatccaaaacctaatcaaaatccaggcaattgctgtgtgcatggagaacgggaacttcaaggaggccgaggaggtgtttgagaggatatttggcgaccctaattctcacatgccttttaaatcaaagctcctcatgattataagtcagaaagacacatttcattctttcttccagcacttcagttacaaccacatgatggagaagataaaatcttatgtgaactacgtgctgagtgaaaagagttcgacctttctaatgaaggccgcggccaaggtcgttgaatctaagcggactaggacaatcacctcccaggacaagccatccgggaacgacgtggagatggagaccgaggctaacctggatacgagaaagtcagtttctgacaagcagtccgccgttaccgagtcctcagagggaacggtttcccttctgagaagtcacaaaaacttgttcctctcgaagctccagcacgggactcagcagcaagacctgaacaagaaagaaagacgtgtgggaaccccgcagtctactaagaagaagaaagagtcaagacgggcaacggaaagccgaatcccagtttcgaagtcacagcccgtcacaccggagaagcatcgtgcccgcaagcggcaggcttggctctgggaggaggataagaatctcaggagtggtgttcggaagtacggagagggcaactggtccaagattctgctgcactataaatttaataatcggacatccgtgatgctaaaagatcgttggcgaaccatgaagaaactgaaattaattagttcggactctgaagattag

SEQ ID NO: 17606 - DNA, 153 bp, synthetic construct
  misc_feature 1..153: note = Description of Artificial Sequence: Synthetic coding sequence
  source 1..153: mol_type = other DNA
atattttctattatacacggactcagctctctgacagcctgtcagttacgcactatctacatttgccaatttctgacccgaatcgcagccggaaaaacgctggacgcccagttcgagaacgacgagcgcatcacccctcttgagagcgcctag

SEQ ID NO: 17607 - DNA, 1503 bp, synthetic construct
  misc_feature 1..1503: note = Description of Artificial Sequence: Synthetic coding sequence
  source 1..1503: mol_type = other DNA
atggcaggcggtggaggctcctctgacgggtcgggaagagccgccggcaggcgggcatccaggtcttcaggccgcgctcggaggggtcggcatgagcccggattgggcggccccgcggaaaggggagccggagaggctcggcttgaggaggccgtgaaccgctgggtgctgaaattctactttcacgaggccctgagagccttcaggggatctagatacggggatttcaggcaaattcgtgacataatgcaggcactgctggtcagaccattgggcaaggaacacactgtgagtaggctccttagggtcatgcagtgcctgtcgcgaattgaagaaggggagaatctcgattgtagcttcgatatggaggccgagctgaccccgctggaatcagctatcaatgtgttggagatgatcaaaaccgaatttaccctaacggaagcagtggtggagagttcacggaagctggtgaaagaagccgcagtcattatctgtattaaaaataaagaattcgaaaaggccagtaaaatcctcaagaagcacatgtctaaagacccaaccacacagaagctccggaacgacttactaaatatcatacgcgagaagaatctcgctcacccagtcatacagaacttttcatacgaaacatttcagcagaagatgctgcggttcctagagagccatcttgatgatgctgaaccttatctgcttacaatggctaagaaggctctgaagagcgagtcagccgcctcttcaaccgggaaagaagataaacagccagctcccggccctgtggaaaagccgccaagagaaccggctcgacaactgaggaatccgcccacgaccatcggaatgatgactctcaaggccgcattcaagaccctgtctggggcccaggactccgaagcagccttcgctaagctggaccagaaagacctggtattaccaacccaggccctacccgcctctcccgcattgaaaaataagagaccaagaaaagacgagaacgaatcttccgcccccgccgacggcgaaggagggtccgaattacaaccaaaaaataagagaatgacaataagcagattggtactggaagaagattctcagtcaaccgaaccaagcgctggattgaactcttcccaggaggccgcttcagcaccaccttccaaaccaacggtcttgaaccagcctctgcctggggagaagaaccccaaagtgccaaaaggaaagtggaattccagtaacggcgtcgaggagaaagagacttgggttgaggaggacgaacttttccaggtccaggcggcccctgatgaggattcaactactaacataacaaaaaaacagaagtggaccgtggaggaaagtgagtgggtcaaagctggtgtgcagaaatatggcgagggaaactgggctgccatttcaaagaattatccctttgtcaacaggactgctgtcatgatcaaagataggtggcgcaccatgaaacgcctgggaatgaactag

SEQ ID NO: 17608 - DNA, 1200 bp, synthetic construct
  misc_feature 1..1200: note = Description of Artificial Sequence: Synthetic coding sequence
  source 1..1200: mol_type = other DNA
atggccgaagcaatggatctgggcaaagatccaaacggcccaactcactctagtactctctttgtcagagatgatggctcatctatgtccttctatgtgcgaccttccccagccaaacgccgcctctccaccctgattctgcacggcggcggaactgtgtgcagggtccaggaacctggggctgttctgctggcacagccgggggaggccctggccgaggcctctggcgactttatatcaacccagtacatccttgattgtgtggaaaggaatgaaaggctggagctggaggcttatagactggggccagccagcgctgccgacaccggatccgaggctaagcctggcgcactcgccgagggagccgccgagccggagccccagaggcacgcgggacgaatcgcgtttactgatgctgatgacgtggctattctaacttatgtcaaggagaatgcccggagtccctcaagcgtaactgggaatgctctatggaaagcaatggagaaatcttctttgacacagcactcatggcaaagcctgaaggataggtacctgaaacatctgcgggggcaagaacataagtatcttctcggggatgcacccgtgtccccgtcgagccaaaaattgaagcgcaaggctgaggaagaccctgaagctgcagattcgggcgagccccaaaacaaaagaacccccgacctgcccgaggaggagtacgtgaaggaggaaattcaggaaaatgaggaagcagtgaaaaagatgttggttgaggcaacgagagagttcgaggaagtagtagtggacgaatcccctccggacttcgagatacacatcaccatgtgcgatgacgacccacccacacctgaggaagacagcgaaactcagccagatgaagaagaagaggaggaggaagagaaggtgagtcagccagaggtgggggccgctatcaagatcatacggcagctgatggagaaattcaatctcgatctctccactgtgacccaagcatttttgaagaattctggggagttagaggcaaccagtgcttttctggcctcgggccagcgggctgatgggtacccaatctggtcacggcaggacgacattgatctacagaaggacgatgaagacacccgggaagctctggtcaaaaaatttggcgcccagaacgttgccaggcggattgagttccgaaaaaaatag

SEQ ID NO: 17609 - DNA, 12735 bp, synthetic construct
  misc_feature 1..12735: note = Description of Artificial Sequence: Synthetic coding sequence
  source 1..12735: mol_type = other DNA
atgatgcctgcccagtatgcactcacttccagtctggtgctattagttttgctcagtactgctagggccggtccattctccagccggtctaacgtaaccctaccggctcccagaccccccccccagccgggaggacacaccgtgggcgccggcgtggggtcccctagctcacagctatacgaacacacggtagaaggtggtgagaagcaggtcgttttcactcacaggatcaacttgccgccaagcacaggatgtggctgtccccctggaacagagcctcctgtgctggcctctgaggtacaggcactccgggtgcgtctcgaaatcttagaggaacttgtgaaagggctgaaagagcagtgcaccggaggttgctgtccggcatcagcccaggctggtaccggacagaccgacgtgaggacactgtgcagcctccatggggttttcgatctctctaggtgcacctgcagttgcgaaccaggatggggcggtcccacttgcagcgaccctacagatgcggagatacctccctcctcccctcctagcgcaagcgggagttgtcccgacgactgcaacgaccagggacgatgtgtgcgcggaagatgcgtgtgttttcctgggtacactggtccttcttgtgggtggcccagttgccctggcgattgccagggaagaggtagatgcgtgcagggtgtttgcgtttgcagagccggcttcagcggcccagactgcagccagcgaagttgccctaggggctgctcacagaggggccgctgcgagggtgggagatgtgtctgcgacccggggtacacaggcgacgattgcggcatgcggtcttgtccacgagggtgctctcagcgaggacgctgtgagaacggccgctgcgtctgcaacccaggttatacaggggaggactgtggcgtgcgtagttgcccacgtggttgctctcagcgtggcagatgtaaggacgggcgatgtgtatgtgaccctggctatactggagaggattgcgggactcgttcatgcccttgggattgtggcgaaggcgggcgctgcgtggacggtcgatgtgtctgttggcccggatacactggggaggactgctccacaagaacctgtcctcgggattgtcgtggtagaggcaggtgtgaggatggtgaatgtatttgcgataccggatatagcggtgatgactgtggggtccgaagctgccccggcgattgcaaccagcgcgggcgctgcgaggacggaagatgcgtgtgttggcccggctataccggtactgattgtggcagcagggcttgcccccgggattgtagagggcgcgggagatgtgagaacggagtttgcgtctgtaatgccggatactcaggagaggactgcggggttcgatcgtgtcctggcgactgcaggggaaggggcaggtgtgaaagtgggagatgtatgtgttggcccggttacaccggacgtgactgtggcacacgcgcttgtcctggcgattgtagagggcggggtcgctgtgttgacggtcgctgcgtgtgcaatcctggcttcacgggggaggactgcgggtctcgtagatgtcctggggattgtcgcggacacggcctctgcgaggacggggtttgcgtatgcgatgccggctactcaggcgaagactgttcgacgagaagttgcccaggcggctgccgcggcaggggccagtgtctggacgggcgctgcgtttgtgaggacgggtactctggggaagactgcggggtacggcagtgcccgaatgactgtagtcagcacggcgtatgccaggacggcgtgtgcatttgctgggagggatacgtctcagaggactgttcaattagaacgtgcccatccaattgccacggtaggggaagatgcgaggaaggacgctgcctgtgtgaccctggttatactggcccaacgtgcgccacgcgcatgtgcccagcagactgcagggggaggggacgctgtgtccagggggtatgtctttgtcacgtggggtatggtggtgaagactgcggccaagaggagcctcccgcatccgcctgccccggcgggtgcggacctagagagctgtgccgggcaggtcaatgcgtgtgtgttgagggtttccgcggaccggattgtgctatccagacttgtccaggagattgccgggggcgtggcgaatgtcacgacggatcatgcgtgtgcaaggatgggtatgccggggaagattgtggtgaagaagtgccaaccatagaagggatgagaatgcacctgctcgaggaaacaactgtgcgcaccgaatggacgccggccccgggacccgtggatgcgtacgagattcagtttatacccacaactgaaggggcttcacctccatttaccgcacgagtgccaagttcagcttctgcctacgatcagcgggggttggccccaggacaggaataccaagttactgtcagagccctgcgcggcacttcctggggactcccagcctccaagacaattacgaccatgatcgatggccctcaggacttgcgagtcgtagctgtgacacctacgacactggaactgggctggctgagacctcaggctgaggtcgacagattcgttgtgtcctacgtgagcgcaggtaaccaacgggtcaggctggaggttccgccagaagccgatggaaccctgcttaccgatctgatgcctggcgtcgagtatgtggtgacagtgaccgccgagcgtggaagagctgtgagctaccccgcgtcggtgcgggccaacaccgggtcatcgcctctcggcctgcttggcactacggacgagcctcctccctccggacctagtactacccagggtgcccaggcgccactcctgcagcagaggccccaggagcttggcgagctgcgcgttctcggcagggacgagaccggacgcctgcgggtggtgtggaccgcccagcctgacacattcgcttactttcagctacggatgagggtgcccgaggggccaggcgcacatgaggaggtcctgccgggggatgtccggcaggctttagtgcccccacccccaccagggacaccttatgaactgtccctgcacggcgtgccaccagggggtaagccatccgatccgattatctatcaggggatcatggataaggacgaggaaaaacctggcaaatcctccggaccaccccgattaggcgaactgacagtgacagaccgaacatcagattcacttttactcaggtggacagtaccggaaggggagtttgactcgtttgtgattcagtacaaggaccgggatggccagcctcaggtagtacccgttgagggaccacagcgatctgctgtgatcacttcattagacccaggccggaagtataagttcgtgctttacggctttgtagggaaaaagagacatggccctctcgtagccgaagccaaaatcctgccacagagtgatccttctcctggaacgccccctcatctgggtaacctttgggtgactgaccccacccccgattctcttcacctctcctggactgttcccgaaggacaattcgatacattcatggtacagtatagggatagagatgggagaccccaggttgtcccagtggaggggcccgaaagatcattcgtggtcagctccctggaccctgatcacaaatacaggttcaccctgttcggcatcgcaaataagaaacgatacggtcctttgaccgccgacgggacgaccgccccggaaaggaaggaagaacctccaaggcccgagttcctagaacaacctctactcggagagctcacagtaactggtgtgacccccgatagcctcaggctctcctggaccgtcgctcaggggccttttgacagctttatggtacagtacaaggacgcccagggccaaccccaggccgtcccggttgctggagacgagaacgaagtgactgtcccgggcctcgaccccgacagaaagtacaaaatgaacttatatgggctacgtggtcgccagagggtgggccccgagagtgtggtggccaagaccgccccccaggaggatgtggacgaaaccccctctcccacggaactcggaactgaggcacctgagtcgccagaggaacctctgctgggcgagttgacagtcaccggcagctctccagacagtctttctctcttttggaccgtgccccagggaagcttcgacagctttaccgtacagtacaaggatagagacgggaggcccagggccgtgagggtggggggaaaggagtccgaagtgactgttggcggtctggaaccaggccataagtataagatgcacctgtacgggctgcatgagggtcagagggtggggcccgtgagcgccgtgggagtcactgcgccgcagcaagaggaaaccccgcccgccacagagagcccactcgaaccacgcttgggcgagctgacagtaacggacgtcacccctaactcagtcggactctcttggacggttcctgagggacagtttgacagttttatcgtgcaatataaagacaaagacgggcagcctcaggtggtgccagtggccgctgatcagagagaggtaaccgtgtacaacttagagcctgagcggaagtacaaaatgaatatgtatggcctgcatgatggccaacggatgggccccctgtcagttgtgatcgtgactgcccctttgccgcctgcgccagcaaccgaagcatcaaaaccccctctcgaaccccggctgggggagctgacagtcacagacataaccccagacagtgtcggcctctcctggaccgtgcccgaaggagagttcgattcctttgtggtacagtataaggatagggatggccaaccacaggtcgttcccgtggccgctgaccagcgtgaggtgacgatcccggacttggaaccatccaggaagtataagttcctgctttttggaattcaggatggaaaacgccgctcacccgtttctgtggaggctaaaacagttgccaggggcgatgcctcgcctggcgctccaccaaggctgggagagctgtgggtaaccgatcccaccccggatagcttgcggctaagctggacggttcccgaaggtcagttcgactcttttgtggtgcagttcaaggataaggacggtccccaggtggtaccggtggagggccacgagcggtctgtgacagtgacgccactcgatgccggaaggaaatatcgattcctgctgtacgggctgctgggtaagaagaggcatggccctctgactgcggatgggacaacagaggcccgatcagcgatggatgatactggaacaaaacgcccacctaagccccgtctcggggaggagcttcaggtgacaaccgttacccaaaatagtgtgggcctttcatggactgtgcctgagggccaatttgacagctttgtggtacagtataaagatagagacggccagccacaggttgtgccagtggaaggtagcctgagagaggtgagcgttccaggactggaccctgcacaccgttataagttgctgctctacgggctgcatcacggcaagagggtcggcccgatatctgcagtcgccatcaccgcgggccgagaggaaacagagaccgaaacaactgccccgacgccgccagcaccagagccgcatctgggcgagctaacagtcgaggaggccacatcgcacaccctccacctgtcttggatggtcactgaaggggagtttgactccttcgagatccaatacaccgaccgtgatggccagctgcagatggtgaggattgggggagaccgaaatgatatcaccctgtccggactggagtctgaccatcggtatctcgttaccctctatggcttcagcgacggcaagcatgtaggccccgttcatgtcgaggctcttacggttccggaagaggagaaaccatctgagcctccaaccgcaactccagaacctccaataaagcctcgcctgggtgaactaactgtcacggacgctacaccggattccctctcgctttcttggactgttccagagggacagtttgaccatttcttagtccagtaccgtaatggggatggtcagccaaaggcagttagagtcccagggcacgaagagggagtcactatctcgggcctggaaccggatcacaaatacaaaatgaatttgtatgggtttcatggggggcagagaatgggacctgtttcggtggttggggtaaccgcggctgaggaagagacgccctcccccaccgaaccatccatggaggcaccggagccggctgaggagcctcttctcggcgagctcaccgtcactggttcttcaccagattctctgtccctgagttggactgtaccccagggacggtttgacagcttcaccgttcaatataaggaccgggatggacgtcctcaggtcgtccgtgtaggcggcgaggaaagcgaggtcaccgtaggaggtttggaacccgggagaaagtacaaaatgcacctatatgggttacacgagggcagacgggttggccccgtgagcgctgtcggggtgacggcccctgaggaagagtccccagatgctccactggcgaaactcaggttggggcagatgacagtaagggatattacttccgattctttgtccctgagctggacagtgcctgagggccagttcgatcacttcctagttcagtttaagaatggagacggacagccaaaagccgtacgagtccctggccatgaagatggggttacaatttccggtctagaaccagaccacaaatacaagatgaacctttacggctttcatggcggccagcgggtcgggccagtgtctgctgtgggcttgactgctcccgggaaggatgaagagatggcgccagcctcgaccgagccccccaccccagagccacccattaagcctcgactggaagaacttactgtcaccgacgctacgccagacagtctcagcctgtcctggacggtgcccgagggacagtttgatcattttctcgttcagtacaaaaatggagacggacaaccaaaagccacccgggtgcccggacacgaagatagagtgacaatctcaggcctggagcccgataataagtacaagatgaatttatatggatttcatgggggccaacgggtggggcctgtgagtgctatcggcgtgacagccgccgaggaagagacccctagtccaaccgagccatctatggaggctcccgagcccccagaagagcccctcttgggcgagttaaccgtaactggcagcagtcccgactctcttagcctcagctggaccgtgccacaaggacgatttgactcatttacagtgcagtataaagacagagacggacgaccccaagtggtacgcgtgggcggggaggagtccgaagtcaccgtcggtggtttagagcccggccgcaagtataagatgcacctgtacggactgcacgagggacggcgggtagggcctgtatctacggtgggggtgactgctcctcaggaagacgtagacgagactccaagccccaccgagccagggaccgaggcccccgggccacccgaggagccactgctgggtgaactcaccgtgacaggtagtagtcccgacagcctgtcgttaagctggaccgtgcctcagggccgtttcgactcttttacggtacaatacaaggacagggacggtcgcccacaggccgttagggttggaggtcaggagtccaaggtgactgtgcggggattggagccggggcggaagtataagatgcacctgtatggtctgcacgaggggcgtcggctcggccccgtttcagccgtcggggttacagaggacgaagctgagactactcaggctgttcccactatgacacccgaaccccctattaagcccaggctgggagagctgaccatgacagatgccactcccgactcactgagcctgtcctggaccgtaccagaagggcagttcgatcactttctggtgcagtatcggaatggggacgggcagcctaaagctgtgcgtgtgcccgggcacgaagatggggtgacaatcagtgggctggaaccagaccacaagtataaaatgaacttatacgggttccatggaggacagagggtggggcccatttctgtgatcggcgttactgctgcggaggaggaaaccccctcacccacggaactgtccacagaagcccccgagccaccagaggagcccctgttgggggagctgacagtcactggctcttcccctgactctctatccctttcctggacaataccccagggtcactttgacagtttcactgtgcagtacaaggatagggacggccggccccaggttatgcgcgttaggggcgaggaaagcgaagttaccgttggcggcctggaacccggccgcaagtataaaatgcatctgtatgggctgcatgaggggcgacgcgtgggccctgtgtctacagtgggagtgacagcaccagaggacgaagcggaaactacccaagctgtgccaactaccacacctgaacctcccaacaaaccccgtttgggtgagttaacagttaccgacgctaccccggattccctcagtctaagttggatggtcccggagggccagtttgatcatttcctggtccaatacaggaacggggacgggcaacccaaggttgtgcgggtgccaggccatgaggacggggtcaccatctccggactagagccagatcataaatacaaaatgaacctttacggcttccatggggggcaaagagttggcccaatttccgtcattggagtcaccgccgccgaagaagagacccccgcccccacagagccaagtaccgaggcgcctgagcctccagaggaaccactcctgggggaattgaccgtgactgggagctcccctgactctctctctctgagctggaccattccccagggcagatttgattctttcaccgtacagtacaaagatcgcgatggcaggccccaggtggtgcgcgtgcggggagaagagtctgaggtaacagttggcggcctcgagccagggtgtaagtacaaaatgcatctatatggtctgcacgaaggacagcgggtcgggcccgtgtccgcagtgggcgttacagcgcccaaagatgaggccgagaccacacaggccgttccaactatgacacctgaaccccccatcaaacccagactgggtgagctcacagtaaccgatgctacacccgattctctgtccctctcctggatggtaccggaaggccaatttgatcacttcctggttcagtacaggaacggtgatggacagcctaaagcggtccgggtaccaggacacgaggatggcgtcaccatcagcggattagagcccgaccataagtataaaatgaatctatatggcttccatggcgggcagagggtggggccggttagtgcgatcggggtcactgaagaggaaaccccgagccccacggaaccctcaaccgaggctcctgaagcccctgaggagccactattgggcgaactgaccgttaccggttcaagtcccgattccctgagtcttagctggacggtgccgcagggacgcttcgactcctttacagtgcagtataaagacagagacgggcaaccacaggttgtcagagtgaggggtgaagagtccgaagtgacagtcggaggccttgagccaggacgcaagtacaaaatgcacctctacggactgcacgagggacaaagagtggggcccgtctcgacggtaggcattaccgcacccttgcccacccccctgcctgttgaacctcggctgggcgaactggctgttgctgctgtgacaagcgactctgtgggactttcctggaccgtggctcagggacctttcgacagcttcctggtgcaatatcgcgacgcgcaaggccagccgcaggccgtgcctgtctctggagatttgagggcggtcgcggtgagtgggctggacccagcaagaaagtacaagttcttactcttcggactgcaaaatggcaaacgacacggacccgtacccgtagaagctcggacagccccggacacaaaaccatcccctcgcctgggggaactcacagtcactgacgctacacctgactcggtgggcctatcttggacggtcccagagggagaattcgattcatttgtcgtccagtacaaggataaagacggccgcctgcaggtagtaccagtggctgctaatcagcgggaagtgaccgtccaaggccttgaaccatcgcggaagtatcggttcttgctgtatggcctgtctggacgcaaacgccttggtccaatctctgccgattctaccaccgcccccctggagaaagagcttccgccccatctgggggaattgactgtcgcagaggaaacttccagtagcctgaggctatcctggaccgtggcacaaggcccctttgacagcttcgtggtccagtaccgggacacagatggacagccacgggccgtgcctgtggcagcggaccaacgcaccgttacagtggaagatttggaacctggtaagaaatacaagttcttattgtacggcttgctaggaggcaagaggctcgggcccgtgtcagctctggggatgaccgcacctgaggaggacacccccgctcccgagttagccccagaggcccccgaacctcctgaggagcctaggctgggggtcttgactgttacagacacaacacccgacagcatgcgcctgagctggtctgtcgcgcagggcccattcgatagttttgtggttcagtatgaagatacaaatggacagcctcaggccctgctggtcgacggagaccaaagcaagatccttattagcggattggagccaagtaccccctatcgctttttgctatacgggctccatgagggtaagcggctggggcctctaagcgcagaggggactaccggtctggccccggctggacagacgtctgaagaatctaggcctaggctctcacagttgtctgttaccgacgtcaccacatcatctctccgcctcaattgggaagctccaccgggagctttcgactcctttctcctgcgattcggagtgccgtccccttctactttggagcctcatcctagaccattgttacagagagagctcatggtcccaggcaccagacattctgcagtgttaagggacctgaggtctggcaccctatactcactgaccttgtatgggctgaggggtccacacaaggcagactccattcaggggaccgccagaacactctccccagtgctggagagccccagagacctgcagttcagcgaaattcgggagacttcggctaaagttaattggatgccacccccgtcacgagcggattcatttaaggtcagttatcagcttgccgacgggggcgagccacagagtgtccaagtcgatggccaggccagaacccagaagcttcaaggtctcatcccaggggcccgatacgaggtcacagtggtcagcgtgagaggattcgaagagagcgaaccactgactggtttcttaacgaccgtgcccgacggcccaactcagcttcgcgccctcaatttaacagaagggttcgctgtgctgcactggaagccaccccagaatcccgtcgacacatacgatgtccaggtgacagcacccggcgcccccccgctccaagccgagacccctggaagcgccgtcgactatcctctacacgacctggtgctgcatacgaattataccgctactgtgaggggtctcaggggaccaaatctgacatctcccgcatcgattacattcactacaggcctggaggctcccagggacttagaagcaaaggaagtgaccccccgaacagcccttctcacctggacagagccacctgtgaggcccgctggttacctgctaagttttcacactccaggcgggcagaaccaggaaattctgctccccggcggcataacctcccaccaactgctggggctgttccctagcaccagttacaatgcaagactgcaagccatgtggggccagagcctgctgccaccagtgagcacttcctttaccactggggggctacgcattcccttcccaagggactgtggggaggagatgcaaaacggagcaggcgcgtctagaacaagcacgatttttctgaacggcaatcgggaacggccactgaacgtgttctgcgacatggagactgacggcggtgggtggttagtgttccaaagaaggatggacggccaaacagacttctggagggactgggaggattacgcccatggatttggtaacatttctggcgagttctggttgggcaacgaggcactgcatagcctgacccaggccggggactactccatgagggtcgatttgagagcaggcgacgaagcggtctttgcccagtatgactcattccatgtggattctgctgccgaatactaccgactccacttggagggctaccatggaaccgccggagattccatgtcataccattctggctcagtgtttagcgctcgggaccgggaccccaattctctgcttatctcatgcgcagtgtcctatcgtggcgcctggtggtaccggaactgccattatgctaacctgaacggactctatggctccaccgtcgatcaccagggtgtgtcttggtaccattggaagggattcgagtttagcgtgccattcactgagatgaagcttagacccagaaattttcgtagtcccgccggaggaggctag

SEQ ID NO: 17610 - DNA, 12729 bp, synthetic construct
  misc_feature 1..12729: note = Description of Artificial Sequence: Synthetic coding sequence
  source 1..12729: mol_type = other DNA
atgatgcctgctcaatatgccttaacaagtagtcttgtgctactggtcttgttaagcactgcccgggccggacctttttcctcccgctccaacgtcactctccccgccccccggccccctccgcagccgggcgggcacacagtgggcgccggcgtcggaagtcccagcagccagctgtacgagcatactgttgaaggcggagaaaaacaggtggtgtttacacatcggattaatctgccaccatccactggctgcgggtgcccacctggcactgagcctccagtcttagcctctgaggtgcaagccctacgcgtgagattagaaatcctggaagagttggtaaaaggcttgaaggagcagtgcaccggaggctgctgtccagccagtgcacaggcagggacgggccaaacggatgtgcgaaccctgtgctcgctacacggcgtcttcgatctctctcggtgcacgtgctcctgcgagccaggctggggcgggcctacttgcagcgacccaactgacgccgagattcctccgtcaagccccccctcagcgtctggatcttgccctgacgattgcaatgaccagggcagatgcgtcagaggccggtgtgtttgtttccctgggtacaccggacccagctgcggctggccgagctgtcctggcgactgccagggacgaggcagatgcgtgcaaggggtctgtgtatgtcgcgccgggttcagcggcccagactgttcacagaggagttgcccgcggggatgctcacagagggggcgctgtgagggcggacgatgcgtttgcgaccctggctacactggagatgactgcggcatgagatcctgtcccagaggttgttcacagcgcgggaggtgcgaaaacggtagatgcgtgtgtaatccaggctatacaggagaagactgtggagttcgtagttgtccccgtggctgtagtcagaggggacgatgtaaagacggtaggtgcgtgtgcgatccggggtatacaggggaagattgcggtactcgctcatgcccatgggattgcggggaaggtggtcgctgcgtggatggcagatgtgtgtgttggccaggctatacaggagaagattgttcaacgcgtacatgcccccgagattgcagagggcggggtcggtgcgaggatggcgagtgtatctgcgacaccggatactcaggagatgactgcggagttcgctcttgccccggggattgtaaccagaggggtagatgcgaggatggccggtgcgtttgctggcctgggtacacaggtacagactgtggaagcagggcttgtccccgcgactgccgtgggcgcggtcgttgcgagaacggggtgtgcgtgtgcaacgcgggatatagcggcgaggattgcggggtaaggtcatgtcccggcgattgcagaggcagagggcggtgcgagtcgggccgctgtatgtgttggcctggctacaccggcagagattgcggcactcgagcctgcccaggggactgtaggggaagggggcgctgtgttgacgggaggtgcgtttgcaatcccggcttcactggcgaggactgcggcagtcggcggtgtcctggagactgccgcgggcacggactttgtgaggacggcgtgtgcgtctgcgatgccggctactccggggaagactgcagcacacgaagctgtccaggagggtgccgtggtcgggggcagtgtttggacggacggtgtgtttgtgaggacggatacagcggcgaggattgtggcgtgcgccagtgccccaacgactgttcccagcacggagtctgccaagatggtgtgtgcatatgctgggagggttacgtgtcagaggattgttcaatacggacatgcccaagcaactgccacggccgcggacggtgcgaggagggaaggtgcctgtgcgaccccggctacactgggcctacctgcgcaacccggatgtgccccgccgactgcagggggagaggcagatgcgtgcagggagtgtgtttatgtcacgtggggtatggaggtgaggactgcggccaggaggaaccacctgcttcagcttgtcccggaggctgtggcccaagagaattgtgccgtgcaggccagtgtgtgtgcgtcgagggattcagaggcccagactgtgccatccaaacatgcccaggggattgccgcggccggggcgagtgccatgatggaagttgcgtttgtaaggacgggtacgccggagaagattgtggcgaagaggtgcccaccatcgagggaatgagaatgcatctcctggaagagacgaccgtacgaactgagtggacccctgcccccggccccgttgacgcctacgaaattcagttcatcccaacgactgagggtgcctcccctccatttacagctcgagtccctagctcagccagcgcatacgatcagcgtggccttgccccgggccaggaatatcaggtcaccgtaagagccctgcggggtacctcatggggactcccagcatcaaagacaatcacaacaatgattgatggaccccaggacttgagagttgtggccgtaacacccacgaccctggagctgggctggctcagaccgcaggccgaggtcgataggtttgtagtcagctacgtgagtgccggaaatcaacgcgtgcggcttgaggtaccacccgaggctgacgggacgctcctcacagatctgatgcctggagttgagtacgtcgtgactgtgaccgctgaacgcggacgcgccgtctcttacccagccagtgtgcgggcgaatacagggtcatctcctctgggactcctcgggactaccgacgaacccccacccagcgggccatcaaccacgcagggcgcgcaggcccccctgctacagcagcggcctcaagagctcggagaactgcgagtgctgggccgagatgaaactgggagattaagagtggtctggacggctcagcccgataccttcgcgtatttccaactgcgcatgcgtgtccccgagggccccggggcacacgaggaagtgcttccaggcgatgttcggcaggctctcgtgcccccacccccacccggtaccccttatgaactttccctgcacggcgtgccaccaggcggtaagccgagcgatcccatcatttaccaggggattatggataaagacgaggaaaaacccggcaagtcaagcgggcctccccgcctaggagaactgacagtgaccgaccgaaccagtgactcattactcctgaggtggacagtgccggaaggagagtttgattccttcgtcatacaatacaaagaccgggacggacagcctcaagtagtccctgtcgaaggtcctcagcggtccgccgtgatcacgagtctggatcccggacgcaaatataaatttgtcctgtacggcttcgtcggtaaaaagcgacatggtcctctcgtggcggaggctaagatcctgcctcaatcggacccttcaccgggtacgccgccccacttggggaacctgtgggtgactgacccaacgcccgattctctccacctttcctggaccgtccctgaagggcaattcgacacgttcatggtccagtaccgggatcgggatgggagaccccaagtggtcccagtggagggacccgagaggtcttttgtagtctcatcactggacccagaccataagtaccgcttcactctgttcggcatcgctaataaaaagcgctacggaccgctgacagccgatggcacaaccgcacctgagaggaaagaagagccacctagacctgagtttttagagcagccactgctgggggaactgacagtcaccggtgttacccctgatagcctgcggctatcatggacagtggcacaagggcctttcgattcctttatggtgcaatacaaagacgcccagggccagcctcaggccgtacctgtggctggggacgagaacgaggtcaccgtacccggactcgaccctgaccggaagtataagatgaatctatatggcctgaggggacggcaacgtgtggggccagagtccgtcgtagctaaaacagccccacaggaggatgttgatgagacgccttcccctaccgagctcggaactgaggcgcccgagagcccagaggagccccttttaggagaactgactgtgaccggatcctcgcctgatagcctctcgctgttttggacggtgccccagggcagcttcgactcgttcaccgttcagtacaaggaccgtgatggcaggccacgcgcagtgcgggttggaggtaaggaatccgaagtcacggttggcggattggagccagggcacaagtacaagatgcacctgtacgggctccacgagggccaacgggtgggacctgtatctgcggtcggggtgactgcccctcagcaggaagagacaccgcctgctacagaaagtcctcttgaacccagactcggcgaacttacggttacagacgtcaccccaaactctgtaggtctgtcttggaccgtgcctgaaggccagttcgactcttttattgtccagtacaaggataaagacggccagccgcaggtcgtgcccgttgcggccgatcagcgggaagtcaccgtgtacaacctggagccagagcgtaagtacaagatgaatatgtacggtttgcatgatgggcagcggatgggcccactctcagtggtcattgttacagctccactgccacctgcacccgccacagaggctagcaagccacctctcgaaccacgactgggggaattaacagtcacagacataaccccggattctgtcggtttaagctggactgtgcctgagggtgagttcgattcctttgtcgttcaatataaggaccgtgacggacagccccaggtggtgcctgtcgccgcggaccaacgcgaggtgacaattccagatttggaacccagccgcaaatacaagttcctgctgttcggcatacaggacggtaagagacgaagtcccgtgtcagttgaggctaaaacagttgctcggggcgacgcctccccgggcgcaccccctcgactcggggagctgtgggttaccgacccgacgccggactctctgcgactgtcctggacggtgcctgagggacagttcgactcatttgtagtgcagtttaaggataaggatggaccccaggtggtgccagtggagggccacgaacgctccgtgaccgtgaccccccttgacgctggtcggaagtacagatttctgctgtatgggctgttaggtaagaaacgacacggaccgctcacggccgatggcacaactgaggctcgatccgccatggacgataccggaaccaagcgcccgcccaagccaagactgggagaggaacttcaggtgacaaccgtgacgcaaaattccgtgggactctcctggactgtacccgaaggacagtttgactctttcgtcgtccagtataaagacagggacggccagccgcaagtagtgcctgtggaaggctctcttagagaagtatctgtgcctgggctcgacccggcacatcgctacaaactgttgctctacggcctgcaccacggcaaacgcgtcggtcctatttcagccgtcgctataaccgccgggagagaagagaccgaaactgaaaccacagccccaaccccccccgctccagagccacacctgggagagctgaccgtcgaagaagccacatctcacacattgcatctctcatggatggtgaccgagggcgaattcgactcctttgagatccaatacacagatcgtgacgggcagctgcagatggtgagaatcggaggcgatcgaaatgacataacactgagtgggctcgaatccgaccatcggtatctagtaaccctatacggctttagcgatggcaaacacgtgggacctgtgcacgttgaggcactcactgtcccggaagaggagaaaccctctgaaccccctaccgccacccctgaaccccccatcaagccccggctgggcgagctcaccgtgaccgatgctacgccagatagtctctccctgtcatggactgtccccgaaggccagttcgaccactttcttgtgcagtatcgaaacggggatgggcagcctaaagcagtgagggtgcctggccatgaggagggtgtgacaatttctgggctggagcccgaccataagtataaaatgaacctgtacggctttcacggaggacagcggatgggacccgtctctgttgtcggagtcactgcagcagaggaagagactccctcaccgactgaaccaagtatggaagctcccgagccggcagaagagccattgctgggagagcttaccgtgactggctcgtccccagattctctttccctgtcatggaccgtgccacaaggtagattcgattcgtttaccgtgcagtataaggacagagatgggaggccacaagtcgtacgtgtgggaggtgaagagagcgaagtgactgtaggtggattggagcctggacgcaagtataagatgcatctctacgggctgcatgaagggcggcgggtaggacccgtgtccgccgtgggcgtgacggctcccgaggaggaatcgcctgacgcgcctctggccaagttgaggctgggtcagatgacagttagagatattacatcagatagcctttccttatcttggaccgttccagaaggacagttcgatcactttcttgtgcagtttaagaatggtgatggtcaacccaaagcagtccgggtgcccggacacgaagatggggttaccatctcagggctggaacccgaccacaagtataagatgaatctgtacgggttccatggcgggcagcgggtcggccctgtttcagcggttggtctgacagctccaggaaaagacgaggagatggcccctgcgagcaccgaaccacctacccctgaaccccctattaaacctcgcctggaggaactcactgtgactgacgccacccctgatagtttatctctaagctggacagttccagaggggcaattcgaccatttcctggtgcagtataaaaatggggacggccaaccaaaagcaaccagagtgccagggcacgaggacagagtaactattagtggtctggaacctgacaacaagtacaaaatgaacctttatggcttccatggaggccaaagagtgggccccgtatcggctataggagtgactgccgcggaggaggagacaccaagccccacggagccatctatggaggctcctgaacctcccgaagagcctctcctcggtgagctgaccgtgacgggatctagtccagattcactgtccctgtcatggacagtacctcagggacgatttgacagtttcactgtacagtacaaagacagggatggcaggccacaggttgttcgagttggcggggaggagagcgaggtaaccgtgggaggcctcgagcccggccgcaaatacaaaatgcatctctatggccttcacgagggcagacgtgtggggccagtatccactgtgggggtaacagcacctcaggaggacgtagacgaaacgcccagtccaaccgaaccaggcactgaggcaccgggtccgccagaagaacctctgctcggggaacttaccgtaactggcagttcaccagactccctgtcgttgtcctggaccgtccctcagggccgttttgatagctttaccgtccagtataaggatagggatgggagaccgcaggctgtgcgagtaggtggacaagaatctaaagtgacggtccgaggtctcgagccaggccgtaagtataaaatgcatctttacgggctccatgagggaagaagactgggacctgtctcagccgttggggtgaccgaagatgaagccgagacaacccaggctgtgccgacaatgacgcccgagcctcccataaagcccagacttggggaactgacaatgacagacgccactcctgattcccttagcttatcctggaccgtgccagaggggcaattcgatcacttcctcgtacagtatagaaacggagatgggcagccaaaagcagtcagggtaccagggcatgaggacggggtgactatttctggccttgaaccagatcacaagtataagatgaacctttacgggtttcacggaggccagcgcgtgggccctatctcggtcatcggcgtgacggccgcggaagaagagactccttcacctactgagctgtccactgaagcccccgagcccccagaggagcccctcctgggcgaactgaccgtgacagggtcgagccccgattctctgagtctctcttggaccatacctcagggccacttcgacagttttactgtgcaatacaaagaccgggacgggcggcctcaggtgatgagagtgaggggtgaggaatcagaagttaccgttggtggtctggagccggggcggaagtataagatgcacctgtatggcctgcacgaggggcgccgggtcggccccgtctcgactgtgggtgtcaccgaagatgaagcggaaaccacacaggctgttccgaccacaacacctgagcctcccaataagcccaggctaggggagctgaccgttaccgacgcaactcctgactccttgagcctgtcttggatggtgccagaaggacagttcgaccattttctcgtccagtacaggaatggtgatgggcaacccaaggtcgtgagagtgccaggtcatgaagacggtgttaccatctcaggtctagaacctgaccataagtataagatgaacctctacggattccatgggggccagagagtgggaccaatcagcgtgatcggcgtgactgcagccgaggaggaaactcccgcccctactgagcccagtacggaggctccagaacctcctgaggagcccctcctcggagaactcaccgtgactgggtcgtcccccgacagcctgagcttgtcttggaccattccccaggggagattcgatagctttacagttcaatataaggacagggacggccgtccgcaggtggtacgggtccgcggagaagaaagcgaggtgacagttggaggtctggagccaggttgtaagtataagatgcacctgtacgggctccatgaaggccagcgtgtgggccccgtttcagctgtcggtgttacagcccctaaagatgaagccgagacaactcaggctgttccgaccatgacccccgaaccacctattaagcctcgcttaggggaattaacagtaacggacgctacaccagattccctgtctttgtcatggatggtcccagaaggacagtttgaccatttcctggtccaataccgtaacggtgacggacaacccaaggccgtgcgcgtgcctgggcacgaggacggcgtgactatcagtggcctggagccagatcacaagtacaaaatgaacctgtacggctttcacggagggcagagggtgggacctgtgtccgccatcggagtgacagaagaggaaacaccatccccaaccgagccttccactgaagcgccagaggccccagaggagcccctgcttggcgaactcactgttactggatcctcccccgattccctctcactttcatggacagtacctcaagggcggtttgattccttcacagtgcaatataaggacagggacggtcagccccaggtcgttcgggtccgaggagaggagtcagaagtcacagtgggtggtttggagccaggcaggaagtataaaatgcacctgtacggtctccacgaaggacagcgagtgggtcccgtgtccaccgtgggtataaccgccccactccccacccctctacctgtggagcccaggcttggcgaactggccgtcgcagctgtcaccagcgactcagtcggcctgtcttggaccgtggcgcagggaccctttgattcctttctggtgcagtatcgtgacgcgcagggccagccacaggctgtgcccgtatccggagaccttcgcgctgtcgccgtgagcgggctggaccccgcacgtaagtacaagttcctgttatttggccttcaaaatgggaagcggcatggacccgtgccagtcgaagcccggaccgcccccgatacaaagcccagtcctcgactgggtgaactgactgttactgacgccacccctgactccgtgggcctctcttggacagtcccggaaggtgagttcgattcctttgtggtgcaatacaaggacaaagatggcaggctgcaggtcgtcccggttgccgccaatcagcgagaggtcacggtgcaaggactcgaaccttctagaaagtacagattcttgctctacgggctgtccgggagaaaaagactgggccctatttccgccgattctaccaccgccccactagaaaaggagctgcctccccacttaggtgagctcacggtagccgaggagacatctagctcccttcggctctcttggacagtggcccagggaccttttgattcgttcgtcgtgcaataccgagataccgatggacagcctagggcagtccccgtagcagctgatcagaggactgtgacagtcgaagacctcgagcccggaaagaaatacaaattcctcctatatggcctgcttggcggcaagcggttggggcctgtgtccgctttgggcatgactgccccggaggaggataccccagccccagaattagcacccgaggcacccgaacctcccgaggagcccaggctcggggtgttgactgtcactgatacaactccggactcgatgaggctaagctggtccgtggcacagggacccttcgattcatttgtggtgcagtatgaggacacaaatggacagccccaggccctcttggtggacggggaccagtctaaaatactcattagcgggctggagccatccaccccctatcgcttcctcttatacggtctccatgagggaaaaagactggggcccctgagcgccgaagggacaacaggcctcgcaccggctgggcagactagcgaagagagcaggccaaggctctctcagctgagcgtcaccgatgttactacttccagtctgaggttgaactgggaggcaccacccggcgcgtttgattcctttctgttgcgctttggcgtgcccagcccatctaccctcgagccccatcctcgtccccttctgcagagagaactgatggtgcccggcacccggcactcagcagtcctgcgggacctgagatccggcacactgtactctttaacactgtatgggctgagaggtcctcacaaggccgatagtatccagggcactgcccggactctgagtccagttctagaatcccctcgggatctgcagttctcagaaatcagggagacctctgccaaggtgaattggatgccccctcccagccgtgcagatagtttcaaagtttcctaccagttagcggacgggggggaaccgcaaagcgtacaggtggatggccaggctcgcacccagaaactgcagggcctaattccaggcgcccggtatgaggtaacggtcgtctccgttcgagggttcgaagaatccgagcctctaactggcttcctgaccacggtgccagacggaccaactcaacttcgcgccctgaacttaacggaagggtttgccgtactacactggaaaccaccacaaaatcctgtcgatacctacgatgttcaggtaacagcgcctggcgcgccccccctacaggccgaaactccaggcagtgccgttgattatccactgcacgatcttgtgctgcatacaaactatacagcaaccgtgaggggactccggggccccaatttaacatccccggcgagcattacctttaccactggtctggaagcgccaagagatctggaagccaaagaggtgacgccaaggacagccctcctgacttggactgagcccccagtacgtccagcaggctacctcttgtctttccacacgccgggggggcaaaaccaagaaatcttgctccccggcgggataacgagccaccagctcctcgggctgttcccttcaacttcttacaatgcaaggctacaggcaatgtggggacagtcactcctgcctccagtgtctaccagctttacaacaggagggcttcgtatcccctttccaagagactgcggcgaagagatgcaaaatggagccggagctagcagaacctcaaccattttcttgaacggaaatcgggagaggccactcaacgtattctgtgatatggaaaccgatggcggaggatggttagtatttcagagaaggatggatgggcagacggatttctggagagactgggaagactacgcccatggctttggaaacatctccggcgaattctggctgggaaacgaggccctgcacagcctgactcaagctggtgactatagtatgcgggtggacttgagagctggcgatgaagcagtgtttgcacagtatgattcctttcacgtggactcagccgctgaatactataggttacatttggagggataccatggaaccgccggggactctatgtcctatcattccggatccgtattctctgccagggatcgcgaccctaattctctactcatctcctgtgcggtttcatatagaggtgcctggtggtaccgcaattgtcattacgctaacctgaatggtctgtacgggtcgacagtcgatcaccagggagtttcttggtatcactggaaaggtttcgagttttctgttccttttaccgagatgaaattaagacctcggaattttagaagccccgccggaggtgggtag

SEQ ID NO: 17611 - DNA, 2022 bp, synthetic construct
  misc_feature 1..2022: note = Description of Artificial Sequence: Synthetic coding sequence
  source 1..2022: mol_type = other DNA
atgcgactttcatggtcagtagctcagggcccgtttgactccttcgtggtccagtacgaggacaccaatggccaaccacaggccttgctcgtcgacggcgaccagagcaagattctaatcagtgggttggaaccctctaccccctatcggttcctactttacggcttgcatgagggtaaaagattgggaccattgagtgcagagggaaccacaggtctcgcgcctgctgggcagactagcgaggaatcccggcccaggttatcccaactgagtgtgacggatgtgaccaccagctctctccgtctcaactgggaggcccctcccggtgcgttcgacagcttcctgttgcggtttggggtgccttctccctctacactggaacctcacccccggccgctgttgcaacgagagctgatggtacctggtacacgccattctgccgtcctccgcgatctccgctcagggaccctttacagtctaacactgtatgggttgagagggccgcacaaagccgatagcatccagggtaccgctagaactctaagtcctgtgcttgagtcacccagggatttacagttttctgaaataagggagacaagtgccaaagtgaactggatgccaccaccctctagggcggacagctttaaggtgagttaccagctggcagacgggggggagccccaatcagtgcaggtggacggccaggcccggacccaaaaactgcaggggctgattcccggcgcaaggtacgaagtgaccgttgtttcggtcaggggtttcgaggagtcagaacccctgacggggttcttgaccaccgttcctgacgggccaacccaactgagagcactgaacctgacggaaggattcgcagtgcttcactggaagcctccccagaaccctgtcgatacatatgatgttcaggtgacggcccccggagccccgcccctgcaggcggaaactcctggcagcgccgtggattatcccctccacgatctggtgctgcacacaaattacactgccacggtgcggggactccgcggccccaacctgaccagcccagcatctatcaccttcactacgggccttgaagccccccgcgacctggaggcgaaagaggttaccccgagaaccgccctgcttacctggactgaaccaccggtgcgccccgccggctacttactctcctttcatactcccggcggacaaaatcaggaaatccttctgcccggcggcatcacaagccaccagcttttgggtttgtttcctagcacgagttataatgcgcggcttcaggccatgtggggccagtcccttctccctccagtctcaacctctttcacaacaggaggcctgaggattccatttccccgcgactgtggagaggagatgcaaaacggtgcaggcgcttctcgcacctcaactatttttctgaatggcaacagggagagaccgctcaatgtcttctgcgacatggaaactgatggcgggggatggctagtcttccaacggcgtatggatggacagacagacttctggagggactgggaggattatgcacatggttttgggaatatatctggggagttttggttaggaaatgaagctctgcacagtctgacgcaggccggagattactctatgagagtagacctgagagctggggacgaagccgtgttcgcgcaatatgacagcttccacgtcgactccgcagcagagtactacagacttcacctggaagggtaccacgggaccgcgggggactcaatgagttatcacagtgggtccgtattctctgctagagaccgcgaccctaattccttactcatctcatgtgccgtcagctacagaggtgcttggtggtaccgtaactgccactatgccaacctgaacggattatatggttcaactgttgatcatcagggcgtgtcttggtatcactggaagggcttcgaattttctgtccccttcaccgagatgaagttacggccccggaatttccggtcaccagcgggcggaggctag

SEQ ID NO: 17612 - DNA, 954 bp, synthetic construct
  misc_feature 1..954: note = Description of Artificial Sequence: Synthetic coding sequence
  source 1..954: mol_type = other DNA
atggcaaaaaatccacccgaaaactgcgaggattgtcacatactgaacgccgaggccttcaagtccaagaagatttgtaagagtctgaagatttgtggcctcgtctttggcattttggctttgaccctaattgtgctattttgggggagtaaacatttctggccagaagtgcctaagaaggcttatgatatggaacacacgttttacagcaatggtgagaaaaaaaaaatctacatggaaatcgatcccgttaccaggacagaaatcttcaggagtgggaatgggaccgacgagactctggaagtgcacgatttcaagaacggttacacgggaatctactttgtaggtcttcagaaatgctttatcaaaacccaaataaaggtgatcccagaattctcagaacccgaggaggagattgacgagaatgaagagattacaacgaccttcttcgagcagtcagttatttgggtgccagccgagaagcctatcgagaacagggattttctgaagaattctaagatactagagatttgcgataatgtgaccatgtactggattaatcctaccctgatcagtgtgagcgagcttcaggattttgaggaggagggagaggacctacatttccccgccaacgaaaagaaaggcattgaacagaatgagcaatgggtggttccccaggtgaaggtggagaagacacggcatgcaagacaggcctccgaagaagagcttcccattaacgactacaccgaaaacggaatcgaattcgaccctatgctggatgaaagggggtattgttgcatttattgccgaagggggaatcgatactgtcggcgggtatgcgagccattgctgggttattatccatacccttattgctatcaaggagggcgggtgatttgccgggttatcatgccttgcaactggtgggtggccaggatgttaggccgcgtctag

SEQ ID NO: 17613 - DNA, 1356 bp, synthetic construct
  misc_feature 1..1356: note = Description of Artificial Sequence: Synthetic coding sequence
  source 1..1356: mol_type = other DNA
atggcaacccctctggttgccggacccgccgccctgcggtttgcggccgcagcttcttggcaggtggtgaggggccggtgcgtggaacactttcctcgcgttctcgaattcctgcggtcgctgagggctgtggcgcctggcttggtgaggtatagacatcatgaacggttgtgcatggggctcaaggcaaaggtggtagtggagctcattctgcagggaagaccctgggcacaggtcttaaaggcgcttaaccaccattttccggagagcggacctattgtgcgtgaccctaaagccactaagcaggaccttcgcaagatcctggaagctcaagagacattctaccagcaggttaaacagctgtctgaggcacctgtggacctggcaagcaagctgcaggaactcgaacaagagtacggagagccgtttctggccgccatggagaagctgctcttcgagtacctctgtcaactggagaaggctctccccacacctcaagctcaacaactccaggacgtattatcctggatgcagcccggtgtgtctattaccagtagcctggcgtggcggcagtacggagtcgatatgggatggctgctgccggaatgctcagtcaccgactcagtcaaccttgctgagcctatggagcagaaccccccccagcaacaacgcctggccttacacaatcccttacccaaggccaaaccaggcacccacttgccccagggcccgagttcccgtacccatccagagcctcttgctggccgacattttaacctggcacccttggggaggcgcagagttcaatcccaatgggcttccactcgcgggggccacaaggagcgcccaacagtgatgcttttccccttcagaaacctaggctcccccactcaagtgattagcaagcccgaaagcaaggaggaacacgccatatacacagcggatcttgctatggggacaagggctgcttcaaccgggaaatctaagagtccttgtcaaactctgggtgggcgcgctctcaaggagaatccagtagaccttccagcaacagaacagaaagagaactgtctggactgctatatggaccctttgcgactgtctcttttgccacccagggctcggaagcctgtgtgtcctccgtcactgtgcagctccgtgataaccattggcgacctggttcttgattcagacgaggaggaaaatggacagggagaggggaaagaaagcctagaaaactaccagaaaacaaagtttgacacattgattcctacactttgtgagtacctgccgccatccggtcacggagctatccccgtgagctcttgtgattgtagagactccagccgcccgctgtag

SEQ ID NO: 17614 - DNA, 1065 bp, synthetic construct
  misc_feature 1..1065: note = Description of Artificial Sequence: Synthetic coding sequence
  source 1..1065: mol_type = other DNA
atggctacacctctggtggctgggcccgcagctctgagattcgccgccgcagcatcctggcaggtggtgagaggccgttgtgtcgagcatttcccacgtgtcttagagttcttgaggtctcttcgggctgtggcgcccggccttgttcggtatcgacaccatgagagattatgcatggggctgaaggcaaaggtagtcgtcgaacttattttgcagggtaggccatgggcacaggttctgaaggcccttaatcatcactttccagagagcggcccaatagttcgagaccccaaggccacaaaacaagacctaaggaagatcttggaggcacaggagacgttctaccagcaggttaagcagctgagtgaggcacctgtggaccttgcttcgaagttgcaggaactggagcaggaatacggagagcccttcctggcagccatggaaaagctgctcttcgagtacttgtgccaactcgaaaaggcactgcctacaccccaggcacagcagttgcaggacgttctgtcatggatgcagcctggggtgtccatcactagctcgttagcttggaggcagtacggggtcgacatgggatggctgcttcctgagtgctccgttactgacagtgtcaatctggcagagccgatggaacagaaccccccccaacagcagcggcttgcgttacataacccattgcctaaggccaaacctggtacccatttgccacagggcccctcttcccgcacccaccccgaaccgctggctggacggcacttcaacctggcccccctgggcagaaggcgtgtacaatcacagtgggcaagcactcgggggggtcacaaagagcgcccgaccgtaatgctgtttccctttagaaacctcggctcaccaacacaggtaatctcaaagccggaaagcaaagaggaacacgcaatatataccgccgatctggctatgggcacaagagccgctagtaccgggaaatctaagagcccctgccagacgctcgggggtcgcgcactgaaggagaacccagtagatcttcctgctaccgaacaaaaagagtag

SEQ ID NO: 17615 - DNA, 423 bp, synthetic construct
  misc_feature 1..423: note = Description of Artificial Sequence: Synthetic coding sequence
  source 1..423: mol_type = other DNA
atggaacaaaaccccccgcaacagcagagactcgcgcttcataatcccctcccgaaggcaaagccaggaactcatttgccacagggtccaagtagccgtacgcaccccgaaccactcgcaggcaggcactttaacctggcaccattgggacggcggcgcgtgcagtcccaatgggcaagcaccagggggggacacaaggagcggcccactgtaatgctctttcctttcaggaacctcggaagtccaacacaggtaatcagcaagccagagtctaaggaggagcacgctatctacacagccgacctggcaatgggtacaagggccgcatctacggggaaatctaagtccccttgccagacactcggcggacgcgccctgaaggaaaatccagttgacctacccgcaacagaacagaaggagtag

SEQ ID NO: 17616 - DNA, 1251 bp, synthetic construct
  misc_feature 1..1251: note = Description of Artificial Sequence: Synthetic coding sequence
  source 1..1251: mol_type = other DNA
atggctacccccctcgtagcaggacctgctgctttgcgcttcgcagccgccgcctcttggcaagtggtccggggaaggtgtgtggagcactttccaagggttcttgaatttctacgttcgctgcgagccgtcgcccctggacttgtccgttaccgccatcatgaaagactatgcatggggctcaaggctaagaccaagcaagacttgcgaaaaattctggaggcacaggagaccttctaccaacaagtgaagcagctttctgaagcacctgtcgatcttgcctccaagctgcaggaactggaacaggagtatggagagccatttttagctgccatggagaaactcttgttcgagtacctctgccagctggaaaaagcattacccacccctcaggctcagcaacttcaggatgtgctcagctggatgcaacccggcgtgtcgataacttcaagccttgcctggagacaatacggagtggatatgggatggctcttgcctgagtgtagcgtgacggatagtgtgaaccttgccgagcctatggagcagaatccaccccagcagcagagattggcgctgcacaaccctctccctaaagccaagcccgggacacatctcccacaaggcccctcttcgaggacacatccagagccattagctggccggcattttaatctcgcccctctcggaagaaggcgcgtgcaaagccaatgggcgagcacccggggaggtcacaaggagaggccaacagtgatgctatttccttttaggaacctggggtcccctacccaggtcatctcaaaacccgaatcaaaagaggaacacgcaatttataccgcggacttggcaatggggaccagggctgccagtactgggaagagtaaatccccgtgccaaacactgggaggccgcgctctcaaggagaatcctgtggacctgcccgctactgaacagaaagaaaattgcctggactgctacatggaccctcttcggctgagtcttttgccaccgagagctcgcaagcccgtttgcccccccagcctgtgtagctcagtgatcactatcggtgacctggtgctggattccgatgaagaggagaatggccagggcgaagggaaggagtccctagaaaattatcagaagactaaattcgacactctcataccaactttgtgcgagtacctgccaccttccggtcacggagcaatcccagtgagcagctgcgattgccgggactcaagcagacccctgtag

SEQ ID NO: 17617 - DNA, 3498 bp, synthetic construct
  misc_feature 1..3498: note = Description of Artificial Sequence: Synthetic coding sequence
  source 1..3498: mol_type = other DNA
atggaacaggacaggacgaatcatgtagaaggcaatcgcctgtcccctttcctcatcccctcccctcccatttgtcagacagagccactggccacaaaactgcagaacggcagcccccttccggaaagagcccatccggaggtgaacggcgacaccaagtggcactcgttcaagagctattacggcatcccctgtatgaagggttctcagaattctagagtctcgcccgacttcactcaggagtcacgcggttattcaaagtgtctccagaacggtggcattaagcgtacagtatccgagccatcactgagcgggctgcttcagattaagaaactcaaacaagaccagaaggccaacggtgagagaaggaacttcggtgtcagccaggagcgcaacccaggcgagtcctctcagcctaacgtatcagacctatctgacaagaaggagtctgtgtcttccgtggcacaggaaaacgccgtaaaagattttacatccttctcgacgcacaattgtagtggtcctgaaaatcccgaacttcagattctgaatgaacaggagggaaaaagtgccaattaccacgacaaaaatattgtgcttcttaagaacaaggctgtcttgatgccaaatggcgccactgtgtcggcatcctccgtcgagcatacccacggtgagcttctggagaaaaccctgagccaatactatcctgattgtgtgagtattgctgtccaaaagacaacgagccatatcaatgccatcaacagccaggccactaacgagttgtcctgtgagattacccacccttctcacacttcaggacagataaacagcgcccaaacaagcaactctgaactcccaccaaagccagcagcggttgtgagcgaggcctgtgacgctgacgacgctgacaacgcaagtaaactcgctgccatgctgaacacatgtagctttcagaagcccgaacaactgcaacagcagaaatctgtattcgagatatgccctagcccagccgagaacaatatccagggcaccaccaaactcgcatccggagaagagttttgctctgggtcgagcagcaacctgcaggctccgggcgggtccagtgaacgctaccttaagcagaatgaaatgaatggagcatactttaaacagagttccgtgtttacaaaagacagtttcagcgcaaccactacccctccaccaccttcccagttactactcagccctcccccaccgctgccccaggtcccacagcttcccagcgaaggaaagagtacccttaacgggggcgttctcgaggagcaccatcactaccctaaccagtccaacaccactctgttacgagaagtaaagatcgaaggaaaacctgaagcccccccaagtcaatcacctaatccatctacgcacgtgtgctcccccagcccaatgttgagcgagcgtccccagaataactgcgttaataggaacgatatccagactgccgggaccatgacagttcctctgtgttcggagaaaactaggcctatgtccgagcacttaaaacacaacccaccaatttttggctctagcggagaacttcaggacaactgccagcaactaatgaggaacaaagaacaggagatcttgaaggggcgcgataaggagcagactagggatttggttcctccgacccaacactacctcaagcccgggtggatcgagctaaaggccccgaggtttcatcaggctgagtcgcacttgaaaaggaacgaagctagcttacccagtatcctgcaataccagccaaatctcagtaaccaaatgacatcaaagcagtatactggtaacagcaatatgccaggcggcttgccacgccaggcctacacacagaagacaactcaactcgagcacaagtcacagatgtaccaggtggaaatgaatcagggccaatctcaaggaacggtggatcagcatctgcagtttcagaaaccttctcaccaagtgcacttctcaaagacggatcacctgcctaaagctcacgtgcaaagtctctgtggtacccggttccattttcagcagcgggcagactcacagactgagaagctgatgtccccagtgctcaaacaacacttgaaccaacaggcatcagagacggagcctttcagtaattctcatcttctgcagcacaagcctcacaagcaggctgcccagacacagccctcccagtctagccacctgccccaaaaccagcaacagcagcagaaactgcaaatcaaaaacaaagaagagattctgcaaacatttccacaccctcagtctaataacgaccaacagagggaagggagcttctttggccagaccaaggtagaggagtgctttcacggcgagaatcaatacagcaagagcagcgagtttgaaactcacaacgtgcagatgggcctggaagaagtacagaatataaaccggcgcaactctccatacagtcaaactatgaagtccagcgcttgtaaaatccaggtgtcatgctccaacaacacccatctggtcagcgagaataaggaacagactactcaccctgagctgttcgccggaaacaagactcaaaatttgcaccacatgcagtattttccaaacaatgttataccaaaacaagacctacttcaccgatgtttccaagagcaggagcagaagagtcagcaggcaagtgtgcttcagggctacaaaaacagaaatcaggatatgagtggacagcaggctgcgcagctggcacagcagagatatctcatccacaaccacgccaatgtattcccagtccccgatcagggtgggtcacacacacagacaccaccacagaaagacacacagaaacacgctgctctcaggtggcacttgttgcagaagcaagagcaacagcagacgcagcagccacagaccgaatcctgccattcacagatgcaccgcccaataaaggtggagccgggatgtaaacctcacgcctgcatgcacacggctcccccagaaaataagacatggaagaaggtgactaagcaggaaaaccccccagcatcttgtgacaacgtgcagcagaagagcattattgagacaatggaacagcacttgaagcagtttcacgcaaagtctctattcgaccacaaggccctgacgcttaaaagccaaaagcaggtgaaggtagaaatgagcggaccggtgaccgtgctaaccagacagactactgctgcagaactcgatagccatacacccgcccttgaacagcaaaccacttcaagcgagaagactccaaccaagcggacagccgctagcgttcttaataactttatagagagccctagcaagctgcttgacactcctattaaaaatctgcttgatactcctgtcaaaacacaatacgattttccttcctgtcgctgcgtaggaaagtgtcaaaagtgtacagagacgcacggcgtgtaccctgagctcgccaatctatcctccgatatgggattctctttcttcttttag

SEQ ID NO: 17618 - DNA, 6009 bp, synthetic construct
  misc_feature 1..6009: note = Description of Artificial Sequence: Synthetic coding sequence
  source 1..6009: mol_type = other DNA
atggaacaagacagaaccaaccacgtggagggcaacagactcagtccttttctgatcccgagtcctcctatttgccagactgaacctctcgctaccaaactccagaacgggagccctctccctgaaagagcccaccctgaagtgaatggggataccaagtggcattctttcaaatcttattacggcatcccctgcatgaaggggtcacagaattctcgggtgtctccggatttcacgcaggagagtagaggatactcaaagtgcctgcaaaacggaggcattaagcgcacagtgagtgaaccgagtttgtcgggtctcctccagattaagaagctcaaacaggatcagaaggcgaacggagaaagaagaaatttcggtgttagccaggagcgaaatcctggggaaagcagccagccaaatgtctcagacctcagcgacaagaaggaatcagtgagtagcgtggcccaagaaaatgcagtgaaggacttcacaagctttagtacgcacaactgcagcgggccagagaaccctgaactgcaaatcctgaatgagcaggagggaaaatcggcgaattatcatgacaagaacattgtgctgctgaaaaataaggcagttctgatgcctaatggcgccacagttagtgcctcaagcgtggagcacacccatggagagctgctagaaaagactctgtcgcagtactatccggattgcgtgtcaatagctgtacagaaaacgaccagccacataaatgccattaattcgcaagccactaatgaactttcttgtgagatcacccatccctcacatacatcaggccagatcaactccgctcagactagcaattctgaactgcctccaaaaccagcagctgtcgtaagtgaggcatgcgatgcagatgatgcggacaatgcttctaaactcgccgctatgctgaacacttgttcttttcagaaaccagagcaactacagcaacagaagtccgtgttcgaaatttgtccttcccctgcagagaacaacatacagggaaccactaagctggcctctggggaggagttctgttcaggcagcagctcaaatttgcaggccccaggcggttctagcgagcggtaccttaagcaaaatgaaatgaacggggcctacttcaagcagtcctcagtgttcactaaagactcttttagtgccacgacaactccccctcccccgtctcagttgcttctctcccctcctccaccgctcccccaagtgcctcagctcccctctgaggggaagtccacactgaacgggggagtgttggaagagcaccaccactatcccaatcagagcaatactacgctcctacgcgaggtcaagatcgagggtaaacctgaagccccccccagccagtcgcccaacccttccacacatgtgtgtagtcccagccccatgttaagcgaaagacctcagaacaactgtgtgaaccgaaacgacattcaaacggctggaacgatgactgtcccgttgtgttctgagaagacacgaccaatgagcgagcatctgaaacacaaccctccaattttcggaagtagcggcgagctgcaggacaattgccagcaactgatgagaaacaaggaacaagagattctcaagggacgagacaaagagcagaccagggatctggtaccacccacccaacattacctgaagcctgggtggatcgagcttaaagccccgaggtttcaccaagcggaatcccacctgaagaggaacgaagcctcactgccaagcattctgcagtaccaacctaacctgagcaaccagatgacaagtaaacaatataccggaaactcaaacatgccagggggacttcctcgacaggcatacacccagaaaacaacccagctggagcacaaaagccagatgtatcaagtagaaatgaaccaggggcaaagccagggcacagtggatcaacacctacagtttcagaagccatcacaccaggttcactttagcaagaccgaccacctgccgaaggcgcacgttcagtccctgtgcggaactcgatttcatttccagcaacgggcagattcccagacagaaaaactgatgtcacctgtgctgaagcagcatctcaaccagcaggcttccgaaacagagccgttttcgaacagccatctgctgcagcataagccgcacaagcaggctgcccagacgcagccctcccaaagtagtcacttgccgcaaaatcagcagcagcagcagaagctgcaaatcaaaaacaaggaagagattctccaaacctttcctcaccctcagtccaacaatgaccaacaaagggagggctcgttctttggccaaaccaaagtcgaggaatgcttccatggcgagaatcaatactcaaagagttccgagtttgaaacacacaatgtgcaaatgggcctcgaggaggttcagaacataaacagacgaaattcaccttatagccagaccatgaaatcatctgcttgtaagatccaggtgagttgctcaaacaacacacacctcgtgtcagagaataaagagcaaaccacccaccctgagctgtttgctggcaacaagacgcagaatcttcatcatatgcagtattttccgaacaatgtgatcccaaagcaggacttgctacatagatgcttccaggagcaagaacaaaagagccagcaggcgagtgtgcttcaggggtataagaaccgtaaccaggatatgtcaggacagcaggcagcacagctggcccaacagcgttacctgatacataatcacgccaacgtattcccggtccccgaccagggaggcagccacacccagactccaccgcagaaagatacccagaagcatgcagctctgcgttggcacttgctgcagaaacaggaacaacagcagacccagcagccacagaccgagagctgtcactcccagatgcatcgacctattaaagtagaacccggctgcaaacctcatgcctgcatgcatacggcaccacctgaaaataaaacttggaagaaagtgacaaaacaggagaaccccccagcttcctgtgacaatgttcaacaaaaatctatcattgaaaccatggagcagcacttgaaacagttccacgccaagtctcttttcgaccacaaggcgcttacactcaaaagtcaaaaacaggtcaaggtcgagatgtctggtcccgtgaccgtgcttacaaggcagaccacggccgcagagctggattcccatactccagccctggaacagcaaaccacgagctctgagaagaccccgaccaagcgcaccgcagccagcgtcctcaataattttattgagtcaccgtccaagctgcttgatacacctatcaaaaacttgctggatacgccggtaaaaacccaatatgacttcccttcgtgccggtgtgtggaacaaatcatcgagaaagacgagggaccgttctatacccacctcggcgccgggcccaacgtggccgcaattcgtgagattatggaagaacgttttggacagaagggaaaagcaatccgaattgagagggtaatttacacggggaaggaagggaagtcatcacaaggctgtcctatcgctaagtgggtggtccgcaggagtagttctgaagaaaagctgttgtgcctcgtgagggaacgagctggtcacacatgcgaagctgctgtcattgtgattttaatcctcgtatgggagggaataccacttagtttagccgacaagctatattccgagctgactgagactttacgaaaatacggaactctgaccaacaggcgctgcgccctgaacgaggagagaacatgcgcctgccaaggcctcgaccctgagacctgcggagcaagcttcagcttcggttgcagctggtctatgtattacaacggttgtaaatttgccaggtctaagatacccaggaagttcaaactccttggagatgaccccaaagaagaggagaagctggagtcccacctccagaatctgagtactttgatggcccctacttataagaaattggctcccgatgcctacaacaaccagatcgagtacgagcatagggccccagaatgccggctgggactgaaagaagggagaccattctcgggcgtaacagcctgtctcgacttttgcgcccatgcccaccgggacctgcacaacatgcaaaatggcagcacactggtgtgcaccttgaccagggaggacaaccgggagtttggaggtaagccagaagacgagcagttgcacgtcctacctctctataaggtaagtgatgtcgatgagttcggcagcgtggaggcacaagaggagaaaaagcggtccggggccattcaggtcctatcatcttttagacggaaggtgcggatgctggcagaacccgtgaagacgtgtaggcagcggaagctggaggcaaaaaaggccgcggcagagaaactgtcctcattggaaaactctagcaataagaacgaaaaggaaaagagcgcaccttctagaacaaaacaaacggagaatgcctcacaagccaagcagttggccgaattgctgagattgtcaggtcccgtcatgcaacaatctcagcaaccccagccccttcagaaacaacctccccagccacagcagcagcagagacctcagcaacaacaaccccatcatcctcagactgagagcgtaaactcatactctgctagcggaagtaccaacccttacatgcgaagaccgaaccccgtgtccccttatccaaactcttcacacacaagcgatatatacggcagcaccagcccaatgaacttttacagcacaagctcccaggcggccggtagttatctcaattctagcaaccccatgaatccctacccaggcctgctgaaccagaatacacagtacccaagctaccagtgtaatggcaaccttagcgtggacaattgctccccgtatctaggcagttactcgccacagtcacagcccatggatctctaccggtaccccagtcaggacccactgagcaaactctctctgcctcctattcataccttgtaccagccccggtttggcaattcacaatctttcacatctaagtacctggggtatggaaaccagaatatgcagggcgacggttttagctcctgtactatacgccccaacgtccatcatgtgggcaagctgccaccataccctacacatgaaatggatggccacttcatgggcgcaaccagtaggcttcccccgaacctgtcgaaccccaacatggactataagaacggggaacatcactcaccctcacatatcattcacaactacagcgccgcgccaggcatgttcaacagtagcctgcatgcactgcacttgcagaacaaggaaaacgacatgttaagtcacacagcaaacggcctgtcaaagatgctgcccgctctcaatcatgaccgtaccgcgtgcgtccaaggcggacttcacaaattgtccgatgccaacggtcaagaaaaacagcctctcgcccttgtgcagggcgtggcttcaggagcggaagacaatgacgaggtgtggtccgacagtgagcaatcttttcttgatccagacatcggaggggtggctgtagcgccgacccatggctcaatcctgatagagtgcgccaagagggagctgcacgcaactacacccctgaaaaatcctaatcgtaatcaccccacccggatcagccttgtgttctaccagcataagagtatgaacgagcctaagcacggcctcgccctctgggaagcgaaaatggccgagaaggcccgcgagaaagaagaggaatgtgagaagtacgggcctgactatgtgccccaaaagtctcacggcaagaaagttaaacgggagcccgcagagccccatgagacctcggagccaacatatttgcgatttatcaagtccctcgccgaaagaaccatgtcagtcacaaccgattccacagtcacgacaagcccatacgcatttactcgggttaccggaccctacaatcggtatatttag

SEQ ID NO: 17619 - DNA, 3498 bp, synthetic construct
  misc_feature 1..3498: note = Description of Artificial Sequence: Synthetic coding sequence
  source 1..3498: mol_type = other DNA
atggaacaagacaggacaaatcatgttgagggcaaccgcctctcccctttcctgattccctctccccccatttgtcagacggaacccttagccacaaagctccagaacggcagtccgctcccggagagggcgcatccagaagtgaatggcgacactaagtggcacagttttaagtcttattatggaattccatgtatgaaggggtcacagaactctagggtgtctcccgacttcacccaggaatcacgaggctatagtaagtgtcttcagaatggtggtattaagaggactgtgtccgagcccagcctgtctgggttgcttcaaatcaagaagctaaagcaggaccagaaggccaatggcgagaggcgaaacttcggtgttagccaggagaggaatcccggggaatcctcacagcctaacgtgtctgatctgagtgacaagaaggagagcgtcagctctgtggcccaagagaacgccgtgaaggactttacctctttttctacccataactgttcagggcccgagaacccagagctccagatcctcaatgagcaggaagggaaatcagctaactaccatgacaagaatatagtcttgctaaagaataaggcagtgctgatgcctaatggcgcaacagttagcgcctcctctgtggaacatacccatggcgaattgcttgaaaaaacgctcagccaatactatcctgactgcgtgtctattgcggtacaaaagacaacaagccatatcaacgcgatcaacagccaggctacgaacgaactgagctgcgagattacgcatccctcccacacttcaggccaaattaattcagcacagacaagcaatagcgaactgcctcccaagccggccgctgttgtgagcgaagcatgtgacgccgacgatgcggataatgcaagcaagctcgcagctatgctgaatacctgttccttccagaagccggagcagctacagcagcagaagagcgtgtttgagatttgtccaagccccgcagaaaacaacattcagggaaccaccaaacttgcctcaggcgaggaattttgctctgggtcatcctccaacctacaggcgccaggcgggtcaagcgagcggtatctgaagcagaatgagatgaacggagcctacttcaagcagagctccgtgtttaccaaggactctttttccgccacaactacacctccacctcctagtcagctactcctttctcccccgccgcccctgccacaggttccgcaactgccaagcgaagggaagagcacattgaatggtggtgtgttggaagagcatcaccactacccaaatcagagcaacaccacgctgctgcgtgaagtcaagattgagggaaaacccgaggccccaccatcccagagccccaatcctagcacccatgtctgctctccaagccccatgctgtctgagcgaccgcagaacaactgtgtgaaccggaacgatattcagaccgccggcacaatgacagtcccactatgttctgaaaagactcgacctatgtccgagcacctgaagcacaatccaccaatttttggctcctctggggagctccaagacaactgccaacagctcatgcgaaacaaggagcaggagattctgaaaggacgtgataaggagcagacaagagatttggtgccacctacacagcattatctcaaaccaggatggatagagttgaaggcgccaagattccaccaggccgagagccatttgaagaggaacgaggcaagcctcccaagcattttacagtatcagccaaacttgtctaaccagatgacgagcaaacagtatacgggcaatagtaatatgccaggtggcctgcctcggcaggcctatacccagaaaactacccaactggaacataagtcccaaatgtaccaggtcgagatgaaccagggtcagtcccaggggaccgtcgaccagcatttacagtttcaaaagcctagccaccaggtgcacttctcaaagaccgatcacctaccgaaagcccacgtccagagcctgtgtggaacccgctttcattttcagcagcgggccgactcgcaaaccgagaaactgatgagccccgtgctgaagcagcatctaaatcagcaagctagcgagacagagcctttcagcaattcccatttgttgcagcacaagcctcacaagcaagcggcccagacgcagccttcccagagctcccatctgccgcagaatcagcagcagcagcagaagctccagatcaagaataaagaggagattcttcagacatttcctcatccccagtcaaacaacgaccagcagcgggaaggttccttcttcggccaaaccaaagtagaggagtgtttccacggcgagaaccaatactccaagtcaagtgaatttgaaacacacaatgtacagatgggactggaagaagtacagaatatcaataggagaaacagcccctatagccaaacaatgaagtcctctgcttgcaaaattcaggtgtcctgtagcaataacacacatctggtgagtgagaacaaggagcagaccacccaccctgagctcttcgccggtaacaaaacccaaaacttgcatcatatgcaatactttccgaataacgtgatcccaaagcaagacctgctccaccgctgcttccaggaacaggagcagaaaagccagcaggcttcagtgttgcaggggtataagaatcggaatcaagacatgtccggccaacaggccgcacagctggcacagcagcgctacctcattcacaatcatgctaatgtgttccctgtgccagaccagggtggaagccatacacagactcccccccagaaggacacacaaaagcacgccgccctccgctggcatctcctgcagaagcaggaacagcagcagacgcagcagcctcagacagagagctgccatagccagatgcatcgcccgataaaagtggagccgggttgtaaacctcacgcttgcatgcatacagcacctcctgagaataagacatggaagaaggttaccaagcaggagaaccctcctgcgtcttgtgataatgtacagcagaagtctatcatcgagacaatggagcagcacctgaaacaatttcacgctaagtcccttttcgatcataaggccctgacactaaaatcccaaaagcaggtcaaggtggagatgtctggtcccgttaccgtgcttactcggcaaaccactgccgccgaattggacagccatacccctgctttggaacagcagacgacatcttcagagaagacgcctaccaagcgcactgctgcgagtgtgttgaacaacttcatcgagagccctagcaaactcctggacacccccattaaaaatttactcgacactcccgtaaagacccaatatgactttccctcgtgtagatgcgttggcaaatgccagaagtgcacagaaacacatggcgtctatccggaactcgctaacttgtcaagtgacatgggcttctcatttttcttctag

SEQ ID NO: 17620 - DNA, 333 bp, synthetic construct
  misc_feature 1..333: note = Description of Artificial Sequence: Synthetic coding sequence
  source 1..333: mol_type = other DNA
atggaacaagaccgcaccaaccacgttgaaggtaatagactaagcccattcctcatcccttccccgcctatctgtcagacagagccgctagccacaaagctccagaatggttcccctctacccgagagggcacatccagaagtgaacggagacacaaagtggcatagctttaaatcgtactacgggattccatgtatgaagggctctcaaaattccagggtctccccggacttcacccaggagtcacgggggtattctaagtgtctgcagaatggcggcattaagcgtaccgttagcgagccttccttgtccggcctcctgcagataaagtag

SEQ ID NO: 17621 - DNA, 1914 bp, synthetic construct
  misc_feature 1..1914: note = Description of Artificial Sequence: Synthetic coding sequence
  source 1..1914: mol_type = other DNA
atggagcaggatcggacaaaccatgtggaagggaataggctgagcccattcctgatcccaagcccccccatctgccaaacagaacctttggcgacaaagctgcaaaatggctcacccttgcctgagagagctcaccccgaggtcaacggagatactaagtggcactctttcaaaagctactatgggatcccgtgcatgaaaggcagccagaattctagagtctcccccgacttcactcaggagtctcgcggatactcaaaatgtctgcagaatgggggcataaagaggactgtgagcgaaccatcactcagtgggctgctgcagatcaaaaagcttaagcaggaccaaaaggctaatggcgagcgtcgaaatttcggcgtatctcaggagcgcaacccaggcgagtcaagtcagcctaatgtgtcagatttgagtgacaagaaagagtctgtgtcctctgtggcccaggagaacgcagtgaaggacttcaccagtttctcaacacataactgtagcggacccgaaaatccagagctacagatcctgaatgagcaggaaggaaagtcagccaactaccacgacaaaaacatcgtgctgttgaaaaacaaagccgtcttaatgccgaatggcgccaccgtctcagcctcttcagttgaacacactcacggcgagctgctcgaaaaaaccctttcccagtactaccccgattgcgtatccattgcggtgcagaagactacgtctcacatcaatgcaatcaactctcaggctacgaatgagctaagctgtgagatcacccacccttcccacacctcggggcagattaacagcgctcagaccagtaatagtgaactgccacctaaaccggcagctgtcgtaagtgaagcttgtgatgctgacgacgctgacaatgcctctaagctggcagcaatgctgaacacatgcagcttccagaagcccgaacagctgcagcagcagaagagcgtctttgagatctgtccttcccccgccgagaacaacatacagggaacaacgaaactcgcttcaggcgaggagttctgctctggttcaagtagtaatctccaggcgccaggcggaagttccgagcgatacctcaagcagaacgagatgaacggggcatatttcaagcagtcttcagtgttcaccaaggattctttctctgctaccactaccccacctcccccatcacagcttcttttgtccccgccccctccactgccgcaggtgccacagctcccttccgagggcaagtcaacactcaacggcggtgttctcgaagagcatcatcactacccaaaccagtcaaacaccactttactgcgggaggtgaaaatagagggtaagcccgaagccccaccatcccagtcccctaacccctccactcatgtgtgcagcccctcccctatgctgtccgagaggcctcagaacaactgcgtgaacagaaatgacatccagaccgcgggcaccatgacggtgcccctttgttcagagaagacccggcccatgtcagaacaccttaagcacaatcctcctatcttcggctcaagcggggagcttcaggacaattgtcagcaactgatgcgtaacaaagagcaggaaatccttaaaggcagagataaagagcaaacccgagacttggtccctcctacacaacactatctgaaacccgggtggatcgagctaaaggcacccagatttcatcaggccgaatcacatctaaaaaggaacgaggcttctctgccctctatcctgcaatatcagcccaacctctccaaccagatgaccagcaagcagtatacagggaactcaaacatgccggggggcctgccccgacaagcttacactcagaagactactcagctgagcacctcacacaagtgcactaagctgaaatag

SEQ ID NO: 17622 - DNA, 6009 bp, synthetic construct
  misc_feature 1..6009: note = Description of Artificial Sequence: Synthetic coding sequence
  source 1..6009: mol_type = other DNA
atggagcaggatcgcaccaaccacgtggagggcaaccgcctcagcccttttttgattccgtccccccccatctgtcagaccgagcccctagcaactaaacttcaaaatgggagccctcttcccgagcgagcccaccccgaggtgaatggagatacaaagtggcacagtttcaagagctattacggtatcccctgcatgaaggggagccagaacagtagagttagcccagacttcacccaggagtcacggggttattctaaatgcctgcagaacggcgggataaaacggactgtatccgagccctctttatcaggtctcctccagatcaagaaattgaagcaggaccagaaggccaatggcgaacgcagaaactttggtgtgtctcaggaacgaaacccaggcgaatccagccaacccaatgtgagcgacctttccgataagaaagaaagcgtttcatccgttgcccaggagaacgcagttaaggattttacctcattttctacccacaattgctctggccccgaaaatcccgaactgcagatcctaaatgagcaagaggggaaaagtgccaattaccacgacaagaacatcgtcctcttaaaaaacaaggcagtgctgatgccaaacggtgccacagtgtccgctagctcagtcgaacatacccacggtgagctcttggagaagaccctgagccagtactaccccgattgtgtatcaatcgcagtgcaaaaaactacaagtcatatcaacgctattaactctcaagccacaaacgagctgtcctgcgagatcacgcacccttcacacaccagtggccaaatcaactctgcgcaaacaagcaactcagagctgcctccaaaacctgccgctgtggtaagcgaggcttgcgacgccgacgatgctgacaatgctagtaagttagctgcaatgcttaacacttgtagcttccagaagcccgagcaactgcaacagcagaagagtgtgttcgagatttgtcctagcccagcagagaataacattcaagggaccacgaagttggccagcggtgaggagttttgctccgggtcgagcagtaatctgcaggccccaggaggaagctccgaacgataccttaagcaaaacgagatgaacggtgcgtatttcaagcaatcatctgtctttactaaggattccttctctgcgaccaccactcctccccctccaagccagctcctactctcccccccgccgcctctgccccaggtgcctcagcttccctcagagggcaagtctacgctgaacggaggtgtcctcgaagaacatcaccactatcccaaccagtcaaatactacactgctaagagaagtgaaaatagagggtaaacccgaggccccacctagccagagccccaacccgagtacccatgtgtgctcaccttctcccatgctgtctgaacgcccacagaacaattgtgtgaaccggaatgatatccagacagcaggaacaatgaccgtgcctttatgcagcgagaaaacccgacccatgtctgaacatctgaaacataatcctccaatttttggaagcagtggtgagctccaggacaattgccagcaactgatgagaaataaagaacaggagattctgaaagggcgagataaggagcagacgcgcgacttagttccgccaactcagcactatctgaagcccggctggattgagctcaaagctccccggttccaccaggcagaaagtcacttgaagaggaatgaagcctctcttcccagtatattacagtatcagcctaatttgagtaaccagatgacatccaaacagtatacaggcaattctaatatgccaggcggactcccacgtcaagcctacactcaaaagacaacacagctggagcataagtctcaaatgtaccaggtggaaatgaatcaggggcagtctcagggtacggtcgaccagcatctccaattccaaaagccttctcaccaggtgcatttctctaaaactgatcacctcccgaaggcccacgtccagtctctgtgtgggactcgcttccactttcagcagagggctgattcacagacagagaagctgatgtccccagtcctgaagcaacacttgaatcagcaggcctcagaaacagaacccttcagcaacagccatctgctgcagcacaagcctcacaagcaggcagcacagacccaaccaagccagagctcccatctaccacagaatcagcaacaacaacaaaagctccaaataaagaataaagaggagatcttacagacgttcccccacccccagagcaacaacgaccagcaacgcgagggcagctttttcggtcagaccaaagtggaggaatgcttccacggagagaaccagtactctaaatccagtgaattcgaaacgcacaatgtgcagatggggcttgaggaagttcagaatattaatcggaggaattctccgtatagccagactatgaagagctcagcttgtaagatacaggttagctgctccaataatacccacctggtctccgagaataaggagcaaacgacgcatccggagttgttcgctggcaataaaacgcagaatctccaccacatgcaatacttccctaataatgtaattccaaagcaggatctccttcaccggtgctttcaggagcaggaacaaaagtcgcagcaagcttcggtattgcagggctataaaaataggaaccaggatatgtcagggcagcaggcggctcagctcgcacagcagcgctacctcattcataaccatgcaaacgtgttcccagtgccagatcaagggggaagtcacacgcagaccccccctcagaaagacacgcaaaagcacgccgccttgcggtggcacctgctccagaaacaggagcagcagcagactcagcagccccagaccgagtcctgtcactcccaaatgcaccggcctataaaggtagaacctgggtgcaaacctcacgcttgcatgcacactgccccaccagaaaacaaaacgtggaagaaggttactaaacaggaaaaccctccagcgagttgcgataacgtgcagcagaagagtataatcgagacaatggagcaacacctgaagcaattccacgcgaaatcgttgttcgaccacaaagccctcactctaaagtcacagaagcaggtcaaagtcgagatgtctgggcccgtgacagtgttgaccaggcagactacagcagcagaattagatagccatactcccgcccttgaacaacagaccacctcttcagagaagacccccaccaagcgcactgctgcctcagtgctgaacaattttatagagagccccagcaaattgctcgacacccctatcaagaatctgctagatacgccggtcaaaactcagtatgatttcccatcctgccgatgcgtggaacaaataattgagaaagacgaggggccattttacacccatctgggggctgggcctaatgttgccgctatcagagagatcatggaagagcggtttggtcagaagggaaaagctatcaggatcgagcgcgtcatttatactgggaaggaggggaagagctcacagggatgcccaatcgccaaatgggtggttcgtcgctcatcctccgaagaaaagttactgtgcttagtgcgcgaaagagccggtcacacttgtgaagctgcggtgatagtgatcttaatcctggtttgggagggtatccccttgtcgctggcagataaactgtatagcgagctgaccgagacactgcgcaagtatggaaccctcacaaaccgacgatgtgcgctcaatgaggaaagaacgtgcgcttgccagggcctagatcccgaaacttgcggtgcttctttctccttcggatgcagctggtcaatgtattataatggttgcaagttcgcacggtctaaaatccccaggaagttcaagttgctaggagacgacccaaaagaagaagagaagttggaatctcacctgcagaacctgtccaccctgatggcaccgacatataagaaactggctccagacgcctacaataaccagattgaatacgagcacagagcaccggagtgcagattgggtctcaaagaaggtcgtccattcagcggggtaaccgcgtgcctggacttctgcgctcacgcccatagagatctgcataatatgcagaatgggagcacactggtttgtacccttacgcgagaggataaccgggaatttggcggcaagccagaggacgagcagctccatgtgctccccctgtacaaagtgtcagatgtggatgagttcgggtcagtagaagcccaagaggaaaaaaaaagaagtggcgccatacaagtcctgtcatcctttcgtaggaaggtgcggatgctggccgagccggtcaagacatgtcgtcagcggaaacttgaggctaagaaagccgcagccgaaaagttgtcctccttggaaaatagctctaacaagaacgaaaaagaaaagagcgccccctctcggaccaaacagacagagaatgcctctcaggccaagcagcttgccgagctactgcgccttagcggccccgtcatgcagcagagccagcaaccccagcccctgcagaaacagccgccacagcctcagcagcagcagaggccccagcagcaacaaccccaccacccacaaaccgagagcgttaacagctactcagcgtctggctccaccaatccttacatgcgacgtcctaatccggtctccccatacccgaatagctctcataccagtgacatatatgggtccacatcgcccatgaacttttactcaacctctagccaggcggcgggctcctatctcaactccagcaatccgatgaatccttacccaggtttgctgaatcagaacacccagtacccgtcctaccagtgtaacgggaacttaagcgtagacaactgtagtccctatctcggaagttactccccccagtcccagcccatggacctgtacagatacccaagccaggatcccttatctaaactgagcttgccacctatacatacattgtatcagccccggttcggtaatagccaatccttcactagtaaatacctcggatatggtaaccagaacatgcaaggtgacggcttttcaagttgtacaattcgccccaatgtgcaccacgtgggcaaactccccccttacccgactcatgagatggatggacactttatgggagccacatcgcgtctcccaccaaacctctctaatcctaacatggattacaaaaacggcgagcatcattccccaagccacattatccataactattcggccgctcccggaatgtttaactcctcattgcacgcccttcacttacagaacaaagagaacgacatgctctctcatacagcaaacggactgtctaaaatgttgcccgctttgaaccatgatagaacagcctgcgtccagggaggacttcacaaactgtctgatgctaacggccaggagaaacagccactggccctggtgcaaggcgtcgcatccggtgccgaggacaatgatgaggtgtggtcagatagcgagcagtcgttcctggaccctgacataggcggcgtggcagtggcaccaacacatggcagcatactcatcgagtgcgcaaagcgtgaactccacgcaacaacccccctgaaaaatccaaatcgcaaccatccgactcggatcagcctagtcttctaccaacacaaaagtatgaatgaaccgaagcacggtttggccctgtgggaagcgaagatggccgaaaaggccagagaaaaggaagaggagtgtgagaaatacggcccagattatgtgccacaaaagagtcacggcaaaaaggttaagagagaaccagctgagcctcacgaaacatccgagccaacttatctaagatttatcaagagcctagccgagcgaaccatgagtgtcacaaccgatagtacagtgacgacgtccccgtatgcgtttacccgcgtgactggtccctacaatcgctacatttag

SEQ ID NO: 17623 - DNA, 3585 bp, synthetic construct
  misc_feature 1..3585: note = Description of Artificial Sequence: Synthetic coding sequence
  source 1..3585: mol_type = other DNA
atggagcaggatcggaccaaccacgttgaaggaaaccgcttgtcaccctttctcattccatcacctcctatttgtcagacagaacccctcgccacgaagttgcaaaacggaagtcccctgccagaaagggcacatcccgaagtgaacggggacactaaatggcactccttcaaatcgtactatggaatcccatgtatgaagggcagtcaaaatagtcgcgtttcccctgacttcacccaggaatctcgagggtacagtaaatgcctccagaatggtggtatcaagagaaccgtgtcagagccgtccctcagcggcctgttgcagattaaaaagttaaagcaggaccagaaagcaaatggtgagagaagaaactttggagttagccaggaacgtaacccaggcgagtcttcacaacccaatgtctctgacctgagtgacaagaaggaaagcgtttcatcagttgcgcaggagaatgccgtcaaagacttcacctcattctctacacataattgttccggcccagaaaatcccgaactgcagattttgaatgaacaggagggtaagagtgccaactaccacgataagaacattgttctgctgaagaataaagctgtgctcatgcctaacggtgctactgttagcgcctccagcgtggagcacacacatggagagttacttgagaagaccctcagtcagtactaccctgactgcgtgtccatcgcagtgcaaaagaccacgtcccacatcaatgcaatcaattcacaggccactaacgaactgtcttgcgagattacacatcctagtcatacgtctgggcagatcaacagcgcgcagacctccaattctgagctgccaccaaagccagcagccgtggtgtctgaagcctgtgatgccgatgatgcggataatgcctcaaagttggcagctatgctcaacacatgcagcttccagaagccagagcagctgcagcagcagaaatctgtgtttgaaatttgcccaagtcccgcagagaataacatccaaggcactaccaagctggcaagtggggaagagttctgtagcgggagtagttcgaatctgcaggcccctggcggctccagcgaacggtatctgaagcagaacgagatgaatggcgcgtatttcaagcagagtagtgtgttcactaaagattctttttccgcaacaactacacctccacctccgtctcagctcctgctaagcccccccccacccttgccacaagtgccccagctcccttctgaaggcaaaagtacacttaatggtggcgtactcgaggagcaccaccattaccccaaccaatctaacaccacgctgttgcgggaggtaaagatcgagggtaagcccgaggcccccccctcccagagtcccaacccaagtacacacgtttgttccccaagtcctatgctgagcgaaagaccccagaacaactgtgtgaatcggaatgacatacagaccgccggcacaatgaccgtccctttgtgcagtgaaaagactcgccctatgtcagagcacctgaagcacaatccaccaatcttcggttcatctggcgagctgcaggataattgccagcagctcatgaggaacaaagagcaagagatcctcaaaggccgggacaaggagcagaccagggatttagtgccacccacccagcactatttgaagccggggtggattgaacttaaggctcctcgtttccaccaggccgaatctcacctgaaacgtaacgaggcttcgctcccctccattctgcagtatcagcctaacctgagtaaccagatgacctcaaaacaatacaccggaaattccaacatgccaggaggtttgccacggcaggcctatacacagaagactacacagttggagcataaaagtcagatgtaccaggttgaaatgaatcaagggcagtcccaggggacagtggaccagcatctgcaattccagaagccttcacaccaggtccacttttcaaagactgaccatctgccgaaggctcatgtgcagtccctatgcgggacacgcttccacttccaacagagagcagattcacaaacagagaagctgatgtccccggtgctgaaacagcaccttaaccagcaggccagtgagaccgagcctttttcaaattcccacctactacagcacaaacctcacaaacaggccgctcaaacccaaccaagccaaagctctcatctgccgcaaaatcagcagcagcagcagaagttgcagattaaaaataaggaggagatcttgcagacctttccacaccctcagagtaataatgatcagcagcgcgagggatccttttttggacagactaaggtggaggaatgtttccatggggagaaccaatatagcaaatcgtctgagtttgagacacataatgtccaaatgggtctcgaggaggtgcagaatatcaatcgccggaacagtccttattcgcagacaatgaagagttctgcctgtaagattcaggtgtcttgctccaataatactcacctcgtgagtgagaacaaagaacagactacacatcccgagctctttgccggcaacaagactcaaaacttacatcacatgcaatatttcccaaataatgtgatacccaaacaggacctgctgcaccgctgttttcaagagcaggagcagaagagccagcaggcaagcgtcctacaggggtacaaaaacagaaaccaggacatgagcggacagcaggctgctcagcttgcccagcaaaggtacctgattcataatcacgcaaacgtgtttccggttccagatcaaggcggaagtcacacccaaaccccaccgcagaaggacacacagaagcacgctgccctgcggtggcacctactgcaaaaacaggaacaacagcagactcagcagccacagactgaatcatgccatagccagatgcaccggccgattaaggtggagcccggatgtaagccacatgcttgtatgcatacagctccgcccgaaaataagacttggaaaaaggtgacaaaacaagaaaacccaccggcgtcctgtgataacgttcagcaaaagtccataatcgagacgatggagcagcatctcaagcagttccacgcaaagagcttattcgaccacaaggcactcacactgaaatcgcagaaacaagttaaagtcgagatgtcagggcccgtgactgttctgacgcggcagacgacagccgcagaactggactcccacacccctgccctggagcaacagacaacctcatccgaaaagacaccaactaagagaacagccgccagcgtccttaataacttcatagaaagtccatctaagctgctggatacccccataaaaaatttgctggacacaccagtgaagacacagtacgacttcccatcttgtcggtgtgtcggactggataggcgcgtgaagttgctcgggctgaaggaatctagtatacttgtgaaaaaggctaaagtgcttagagacgtgttactgctgtctggttggtttgccgaagctgccgtgaagcgcagttattgcgtctggtgcggtagcgagctcgcgactcccgtgaggcttcagtag

SEQ ID NO: 17624 - DNA, 6072 bp, synthetic construct
  misc_feature 1..6072: note = Description of Artificial Sequence: Synthetic coding sequence
  source 1..6072: mol_type = other DNA
atgatccaggaggagcagatccagctggagggatcgcttgttgatgggccagaggccagcttgatggagcaagatagaacaaaccatgtcgaagggaatcggttgtccccctttctgatcccttcccctccaatttgccaaactgagccactggccacaaaactgcaaaacggatcaccactgccagagagagcgcacccggaagttaacggggatacgaagtggcatagcttcaagagttactacggcattccgtgcatgaagggcagccagaacagccgagtaagccccgacttcacccaggaaagccgaggttattcgaaatgcctccagaacgggggcatcaaaaggaccgtaagcgaaccttcactgtcaggattactgcagatcaagaagctcaagcaggaccagaaagcaaatggagaacgccggaacttcggggtctctcaagagcgcaatccaggcgaatcttcgcaacctaatgtgagcgatctgagcgacaagaaagaatccgtgtctagtgtggcccaggagaatgctgttaaggatttcactagcttttccacacacaactgttccggacctgagaaccccgagctccaaatattgaacgaacaagagggcaagagcgcaaattatcatgacaagaacatcgtcttgctgaagaacaaagcggtcctgatgccaaatggcgccacagtgagtgcttcctctgtagagcacacccatggtgaactgttggagaagactctgagccagtactaccctgattgtgtgtcgatcgctgttcagaaaacaacatcccacattaacgctatcaacagtcaagcgaccaatgaactgagctgcgagatcacacacccatcacatacaagtggacagattaacagcgcacaaaccagtaactctgaactacctccaaagcctgctgctgtagtgtctgaggcctgcgacgccgacgacgctgataacgcatccaagttagcagctatgctaaatacctgctcgtttcaaaagccagaacaactgcaacaacagaaatctgtctttgaaatctgtcctagtcccgccgaaaacaacatccaaggtactaccaaactcgctagcggcgaggagttctgtagcggctcgtcttctaacttgcaggcccccggcggctcctcagagaggtatttgaaacaaaatgagatgaacggggcatattttaagcaaagttccgtattcaccaaagacagctttagtgctaccactacgccaccccctcctagtcagctgttgcttagtccgcctccacccctgccccaggtgcctcagcttcccagtgagggtaaatctacactgaatgggggagtattagaagaacatcaccactaccctaaccagtccaataccaccctcctgcgggaggtcaaaatcgagggcaagccagaagctcctccaagccaatccccgaatccatccacacacgtgtgctcgccatcaccgatgctttctgagaggcctcagaataactgcgtgaacagaaacgacattcaaaccgcgggaacaatgacagtccctctgtgctccgagaaaacccgccccatgagtgaacatctgaagcacaaccctcccatcttcgggagctctggcgaactgcaggataattgtcaacagctgatgcggaataaggaacaagagatacttaaggggcgggacaaggagcagactagagatttagtccccccaacgcagcactaccttaagcccgggtggattgaattgaaagctccccgtttccatcaggcggagtcacatcttaagagaaatgaagctagcctgccttcaatactgcaatatcaacccaacctgtcaaaccagatgacttcaaagcagtacactggaaactccaacatgcctgggggcctgccgcggcaggcctacacacagaaaacaactcagctggagcataagagtcaaatgtaccaggtggaaatgaatcagggacagtcccaagggacggtggaccagcacctacagttccagaagcctagtcaccaggtacacttctccaaaactgaccatctaccgaaagcccatgtacagtccttatgcggtacaagatttcactttcaacaaagagccgattcccagactgagaaactgatgtctccagtgcttaagcaacacctgaatcagcaggcaagcgagacagaacccttcagtaactcccatctactccagcataaaccgcacaagcaggctgcccaaactcagccgtctcagagcagtcatctgccccagaatcaacagcagcagcagaagctgcagattaagaacaaggaggagattcttcagacgtttccccatccgcagtccaataacgatcagcagcgcgagggtagcttctttggacagaccaaagtggaggaatgctttcatggagagaaccagtacagcaaaagctcggagttcgaaactcacaacgtgcagatgggacttgaagaagtacaaaatattaaccgtcggaatagtccctactcacaaacaatgaaatcatccgcctgcaaaattcaagtttcctgcagcaataatacccacctggtgtctgagaacaaagagcaaacaacccatccagagctgttcgccgggaacaaaacccagaatctgcaccacatgcagtacttccctaacaacgtcattcccaagcaggatctcctgcaccgatgttttcaggagcaggagcagaagtcccaacaggcctcagttttacaagggtataagaaccggaatcaagacatgtctggccagcaagccgcacagttggcacagcaaagatatctcatccataaccacgctaacgtatttcccgtgccagaccaggggggttcacacacacagacaccccctcagaaggatacacagaaacatgcagccctccgctggcaccttctccagaagcaggaacaacaacaaacccagcagccccagacagagagctgccacagtcagatgcacaggcccattaaggtcgagccaggctgcaagccccatgcttgcatgcataccgcgccacccgaaaataaaacttggaagaaagtaaccaaacaagagaatcctccggcctcgtgtgataacgtgcagcaaaaatcgataatagagacgatggaacagcacctgaaacagttccacgctaaatctctgtttgatcacaaggccctcacactcaagtctcagaagcaggtgaaagtggagatgtcggggcccgttaccgtgctcacccggcaaaccacagcagctgagctggatagccacaccccagctctcgagcaacagactaccagcagcgaaaagacacctactaaacgcacagccgcaagcgtcctgaacaacttcatcgagagccccagtaagctgctggatacccccattaaaaacctgcttgatacccccgtgaagacacagtacgattttccaagttgtaggtgcgtggaacagattatcgagaaggacgagggccccttctacacccacctgggtgccggcccaaacgtggcagccatacgtgagataatggaggagcggttcggtcagaaaggaaaggcgatccgcatagagagggtcatttataccggaaaagagggtaaaagttcccaagggtgcccaattgctaagtgggttgtgcggcggagttccagtgaagagaagctcctgtgtctggtgcgtgagcgtgccggccacacctgtgaggcagcggtgatagtgatccttatcctggtatgggaaggaataccactgtctctcgcggacaagctatatagtgaactcactgaaactttgcgaaagtacgggaccctgacaaataggaggtgtgctttaaatgaagagagaacgtgtgcctgtcaaggactcgacccggaaacctgcggagcctcattctccttcggctgctcatggagcatgtattacaatggatgtaaattcgcccgttctaaaatccctaggaagttcaaactcctgggagacgacccgaaagaggaagaaaaactcgagagccacctccagaatctgtccaccctgatggcacccacatacaagaagctggcacctgacgcctataataatcaaatagagtacgagcatcgagctcccgagtgccgtctgggattaaaagagggcagacccttttcgggcgtgacggcgtgtctggatttctgcgcccacgcccacagagaccttcacaacatgcagaacggcagcaccctcgtgtgtaccctcacacgggaggacaatagagaatttggtggcaaacccgaggacgaacagctgcacgtgctgccgctctataaagtctcagacgtagatgaatttgggtcagtagaggcacaggaggagaagaaacgctccggcgctatccaagtactgtcctccttcagaaggaaggttcgtatgctagccgagcctgtgaagacctgtcggcaaagaaaactggaagccaagaaagcagcagcagaaaaactatcatccctcgaaaactcatctaacaagaacgagaaagagaaatccgcccccagtaggaccaagcagaccgaaaacgccagtcaggcaaagcagcttgccgagctgttacggttgtctggccccgtcatgcaacaatctcagcagccacagcccctgcagaagcagccacctcagcctcagcagcagcagcgtccccaacagcagcagccacaccacccccaaaccgaatccgtcaacagctacagcgcttctgggtcgactaacccttatatgagaagacctaatcccgtgtccccgtatccaaactctagccacacctccgatatctacggcagcactagccctatgaacttttacagcacgtccagccaggctgcgggttcatacctgaatagctctaaccccatgaatccttaccccggactgcttaaccagaatacgcagtatccaagctaccagtgcaatgggaatcttagcgtggataattgcagtccatatttgggatcctactctcctcaatcgcagcctatggatctgtacaggtatccgtcccaagacccgctttcgaaactttcgttgccacccatccataccctgtatcagcctcggtttgggaattctcagagctttacgagcaaatacctggggtatgggaatcagaatatgcagggcgatggcttctcaagttgcacaatccgcccaaacgtccatcacgtcggcaaactcccaccgtatcccactcatgagatggacggacactttatgggcgcaacgagccgccttcctcccaacttaagcaaccccaacatggattacaagaacggcgaacaccattccccaagtcatatcatccacaactattcggccgctccggggatgttcaattcaagcctccacgccttacatttgcagaacaaagagaacgatatgctgtcacataccgccaatggccttagcaaaatgctgccagcccttaaccatgatcgcacagcttgcgtccagggcgggctgcacaagcttagtgatgctaacgggcaggagaaacaacccctcgctttggtgcagggcgtagcttccggggcagaagacaacgacgaggtgtggtccgatagtgaacagagttttctagaccccgacatcgggggagtggctgtggcacctacccatgggagcattctcatcgaatgtgcaaagcgagagctgcatgctaccaccccactaaaaaatccaaacaggaatcatcctaccagaattagcctggtgttttaccagcataaaagtatgaatgaacccaagcatggcctggccctgtgggaggcaaaaatggccgagaaagcgcgggaaaaggaggaggagtgtgagaagtatggaccagattatgtccctcagaagagtcacggaaagaaggtcaaacgggaacccgcagaacctcatgaaacctccgaacccacctatctgaggttcatcaaaagcctagcagagagaaccatgtctgtcaccacagattcaacagtgacaacatccccttatgccttcacccgcgtgacgggtccttataaccggtatatttag

SEQ ID NO: 17625 - DNA, 615 bp, synthetic construct
  misc_feature 1..615: note = Description of Artificial Sequence: Synthetic coding sequence
  source 1..615: mol_type = other DNA
atggtgtgcggtggtttcgcctgcagcaaaaactgcctttgcgcccttaatctattgtatacactggtctctctattactgatcgggatagctgcatggggcattggcttcggcctgatttcatctctgcgcgtcgtgggcgtcgttattgccgttggaatttttctctttttgatagctctagtaggcctgattggtgcagtgaagcaccaccaagttctgctgtttttttatatgatcatactgttgctggtcttcattgtacagttctctgtgtcatgcgcctgccttgccctcaaccaggagcagcaagggcagctgctggaggtggggtggaataataccgcttctgctagaaacgacatacagcgcaacctgaactgctgcggcttccgaagtgtaaatccgaatgatacttgcttggcatcctgtgttaaaagtgatcacagctgcagcccctgcgccccaatcattggtgagtacgcaggggaggtgttgcggttcgttggaggaatcggactgttttttagctttaccgagatcttaggcgtgtggctcacgtatcgttatcgtaatcagaaagatcctagagcgaaccctagcgccttcctttag

SEQ ID NO: 17626 - DNA, 738 bp, synthetic construct
  misc_feature 1..738: note = Description of Artificial Sequence: Synthetic coding sequence
  source 1..738: mol_type = other DNA
atggcctctccctcacgcaggctccagacaaagcctgtgataacatgctttaaatctgtgctactcatctacactttcatattctggatcactggggtcatcctcctcgctgtcggcatatggggtaaggtgtccctggaaaactacttttccctcctgaatgaaaaagccaccaatgtgccattcgtgctaatagctaccgggacggtgatcatcttgctcgggaccttcggctgtttcgcaacatgtcgcgcttctgcgtggatgctcaaactgtacgccatgtttttgacactggtctttctggtcgagctagtcgccgccattgttggctttgtctttcggcacgagatcaagaacagcttcaagaataattacgaaaaagctctgaagcagtacaattccacgggcgattataggagccacgccgtggacaagattcaaaacacacttcattgttgtggggtgactgactatcgagactggacggacacaaactattactccgagaagggttttcccaaaagttgctgtaaactcgaggactgcacaccccaacgggatgcagataaagtaaataatgaggggtgtttcattaaagtaatgactatcatagaatccgaaatgggagttgtagccggcatctcctttggtgtcgcttgcttccagttaatcggtatattcctggcctactgcctgagcagggcgatcacaaataaccagtacgagattgtctag

SEQ ID NO: 17627 - DNA, 684 bp, synthetic construct
  misc_feature 1..684: note = Description of Artificial Sequence: Synthetic coding sequence
  source 1..684: mol_type = other DNA
atggcatccccctccaggagactgcagacgaagcccgttatcacgtgcttcaagtcagttctgctgatctacacatttatattctggatcacgggggtgatccttctggcagttgggatctgggggaaagtgtccctggagaattatttcagccttttgaacgagaaagccacatttggatgtttcgccacttgcagggcatctgcttggatgttgaagttatacgctatgttccttacactcgtctttctcgtcgaactggtggcggccatcgtgggtttcgtattccgtcacgaaattaaaaacagctttaaaaataactacgaaaaggccttgaagcagtataactctactggagactaccgctcccacgccgttgataagattcagaataccctgcattgctgtggagttacagattaccgggactggactgacaccaattactatagtgagaaagggtttcccaagtcctgctgcaagctcgaggattgcactccccagagggacgcagacaaggtcaataacgagggttgtttcataaaggtcatgaccatcatcgaatctgagatgggtgtcgtggccggtatcagttttggcgtggcatgcttccagctaattggcattttcctcgcttactgtttgagtagagcaattacgaataaccagtatgagatcgtctag

SEQ ID NO: 17628 - DNA, 669 bp, synthetic construct
  misc_feature 1..669: note = Description of Artificial Sequence: Synthetic coding sequence
  source 1..669: mol_type = other DNA
atggagagaaaaggctccgctgccggagccaagggcaatccctcaccccccgcggcaggtgaggggcaacggccaccgcccccactctgcgtgccaggcgggggcggaggcgcccccgccaggggccaggtaggtgctgccgctgagcccgctgagctcatccggagagcccatgaattcaagagccagggggcccagtgttataaagataagaagtttcgggaagcgattggaaaataccatagggctctcctggaacttaagggcttactccctcctccaggtgagcgcgagcgggacagccgccctgcctcacctgcgggtgctctgaagccaggccggctgagtgaagagcagtctaaaacagtggaagcaatcgaaatagactgttacaattcacttgcagcctgtctgctgcaggcagaattggttaactacgagcgcgtgaaagagtattgtctgaaagtattgaagaaagaaggcgagaactttaaggccctgtacagatctggcgtggctttctaccatttaggagattacgataaggctctgtactacctgaaggaggccagaacacaacaaccaaccgataccaacgtgatccgatatatccaactcaccgagatgaaattatccagatgttctcaacgggagaaggaggcaatgtag

SEQ ID NO: 17629 - DNA, 258 bp, synthetic construct
  misc_feature 1..258: note = Description of Artificial Sequence: Synthetic coding sequence
  source 1..258: mol_type = other DNA
atggtcaaacagatagaatcaaagacagcctttcaggaggcgttggacgccgccggtgacaagctggtggtggtcgacttctctgctacatggtgcggcccctgcaagatgattaagccatttttccacgatgtagcctcagagtgtgaagtgaaatgtatgcctaccttccaattcttcaagaagggacagaaggtgggtgagttctcgggggcaaataaggaaaagctagaggccacaatcaacgaattggtatag

SEQ ID NO: 17630 - DNA, 318 bp, synthetic construct
  misc_feature 1..318: note = Description of Artificial Sequence: Synthetic coding sequence
  source 1..318: mol_type = other DNA
atggtcaagcagatagaaagtaagactgccttccaggaagcattagatgccgccggcgacaaactggttgtcgtggacttttcagctacatggtgcggcccgtgcaaaatgattaagccatttttccactctctctcagaaaagtattctaatgtgatttttttagaggtggacgtggacgactgccaggacgtggcttcagagtgcgaggttaaatgcatgccgacctttcagttcttcaaaaagggccagaaagttggtgaattcagcggagccaacaaagagaaactggaggccaccatcaatgagctggtgtag

SEQ ID NO: 17631 - DNA, 1176 bp, synthetic construct
  misc_feature 1..1176: note = Description of Artificial Sequence: Synthetic coding sequence
  source 1..1176: mol_type = other DNA
atggttatgtttaagaaaatcaaaagcttcgaagtggtcttcaacgatcccgaaaaagtgtacggcagcggcgaaaaagtggccgggagagtgattgtagaagtgtgcgaagtcacacgggtgaaggccgttaggatcctggcttgtggtgttgctaaggttctgtggatgcaaggcagccagcagtgcaagcagacaagtgagtatcttcgttacgaagataccctgctactggaagaccaacctactggtgagaatgagatggtgataatgcgacccggcaataaatatgagtataaattcggctttgagttaccccagggcccgctaggcacttcttttaagggtaaatatggatgtgtggactattgggttaaagctttcctggatagaccatcacaaccaactcaggagactaaaaagaatttcgaagtagttgacctagtcgacgtgaatacacctgatctcatggcaccagtgtcagcaaaaaaggagaaaaaagtctcttgcatgttcatccccgacgggagggtgagcgtgtcagccaggatcgacaggaaggggttttgcgagggcgatgaaatctccattcatgctgattttgaaaacacttgctctcgaatagtggtacctaaagcggccatcgtggctcgacatacctacctggcgaacggccagaccaaggttctgacacagaaactgtcatccgtacggggaaatcatataatttcaggcacctgtgccagttggcgcgggaaaagcctgcgagtgcagaagatccgcccctctatcctgggctgtaatatcctacgcgtcgagtatagccttcttatttacgtcagcgtaccaggtagcaaaaaggtcatcttagacctgcctcttgtcatcggctcacgctctgggctcagttctaggacttccagtatggcttctcggacctcctcagagatgtcgtgggtcgatctgaacatccccgacactccagaggctcctccatgttacatggacgtcattccagaagatcataggttggaaagtcccaccacaccgctacttgatgatatggacgggagccaggattccccgatcttcatgtacgctcccgagttcaagtttatgcctccaccaacgtataccgaagttgatccttgtattctaaacaataacgtccagtag

SEQ ID NO: 17632 - DNA, 1494 bp, synthetic construct
  misc_feature 1..1494: note = Description of Artificial Sequence: Synthetic coding sequence
  source 1..1494: mol_type = other DNA
atgaatgggcccgaggatttgcctaaaagttacgattacgacttgatcatcatcgggggtggatccggaggcctggcggccgccaaggaggcagcccaatacggcaagaaagtgatggtgttggactttgtcacgccaacccccttgggcacccgttggggcctgggggggacatgcgtgaacgtgggctgcattccaaagaaactgatgcaccaggctgccttgctcgggcaggcactgcaagattcacgcaactatggatggaaagtagaggagactgtgaagcatgactgggatcggatgattgaggctgttcagaaccacatagggtccctcaactggggctatcgggtcgcactgcgcgagaaaaaggtggtgtatgagaatgcttacgggcagttcatcggccctcacagaatcaaagcaactaacaacaagggtaaagaaaagatttatagtgcggaaagatttttgatcgcgacaggggagcgacccagatatttgggtatccccggagacaaagagtattgcatttcaagcgacgacttattctctttgccgtactgtcctggcaagaccctggtagtcggagcgagttatgtggccttggaatgcgccggatttctggctggcattggcttggacgtaaccgtgatggtgcgctccattttgctgagaggcttcgatcaggacatggctaataaaattggggaacatatggaggagcatggtattaagttcatcaggcagtttgtgcccatcaaagtggagcagatcgaggcaggcacccctgggcgactgagggtggtggcacagagtaccaattctgaggagatcattgagggcgagtacaataccgtaatgcttgccatcggtagagacgcatgcacacggaaaattgggctggaaaccgtgggcgtaaaaatcaatgaaaaaactggaaaaatcccagtgacagacgaggagcaaaccaacgttccttacatttacgctatcggggacatcctcgaagataaagtagagctgactcctgtcgcaatccaggcgggccggctcttggcccaaagactgtatgcagggtctacagtgaagtgtgactacgagaacgtacctaccacggtctttacgcctctcgagtacggggcctgtgggctcagcgaggaaaaggccgttgagaagttcggcgaagagaacattgaggtttaccactcctacttctggccgctggagtggaccatacccagtagagacaataacaaatgctatgctaagataatctgtaacactaaagacaatgagagagtggtcggcttccacgtgctcggcccaaacgctggagaagtcactcaaggctttgctgccgccctcaagtgcggcttgacaaaaaagcagctcgatagcacgatcggcatccatccggtgtgtgctgaagtctttacaaccctgtccgtcaccaaacggtctggggcatcaatcctgcaagccgggtgttag

SEQ ID NO: 17633 - DNA, 1746 bp, synthetic construct
  misc_feature 1..1746: note = Description of Artificial Sequence: Synthetic coding sequence
  source 1..1746: mol_type = other DNA
atgcaacaagtgatgctgacttgcaaaggagtgaatagaggtcacgctgtgcccgctggcccaggtcgaaagcctcggcccagaaggtcttcgcgactgctagcaggcgaaaaacatctaacacgaagcgctttacttctgtgtcatacagaggacggcagagccttagaggggacgctgagcgagctcgccgccgagaccgacctccccgtcgttttcgtgaagcagcgcaaaatcggcgggcacggtccaaccttgaaagcgtaccaggaaggtagattgcaaaagttgctgaaaatgaatggacctgaggatttacctaaatcttatgattacgatttgataatcataggcgggggatccggtgggctcgctgcggctaaggaggccgcccagtacggcaaaaaggtgatggtgctggattttgtgacaccaacacctttgggcacccgctgggggctcggtggcacctgtgttaatgtaggctgtatccccaaaaaattgatgcatcaggcggccctgctaggacaggctttgcaggacagtcgaaactacggttggaaggtagaggaaacagttaagcacgattgggatagaatgatcgaagcagtccagaatcatattgggagcctgaactggggatatcgcgtggctttgagagagaaaaaagtggtatatgagaatgcatatggacagtttattggaccacatcgaatcaaagcaaccaacaacaagggcaaggaaaaaatatatagtgcagaacggttcctaattgccacaggcgaacggcctagataccttggtatccctggtgataaggagtattgcatctcaagtgatgacctattcagcttaccatactgtcctggaaaaactttagtagtgggggcttcatacgtggcacttgagtgcgccggattcctcgccgggatcgggctagacgtgaccgtgatggtgcgatctattcttttgcggggcttcgatcaggatatggcaaacaaaatcggtgagcacatggaagaacacggcatcaagttcatccgccagttcgtgcctatcaaggtcgagcaaatcgaggctggtacgcccggcagacttagagtggtagcacagagtacaaacagtgaggagatcatcgagggcgaatacaacacggttatgctggcgatcggcagggacgcctgcacccgcaagatcgggctggagactgttggggtcaaaatcaatgaaaaaacgggcaaaattccagtaacagatgaggagcaaaccaacgtgccttacatttatgccattggagatattctcgaggacaaagttgagctcactccagttgccattcaggccggccgactcttagcacagaggctgtacgctggatcaacagtgaagtgcgactatgaaaatgttcccaccaccgtgttcaccccgctggaatacggcgcttgtgggctctccgaagagaaggcggtggagaaatttggagaggaaaacatcgaagtttatcactcgtatttttggcctttggaatggacgatacccagccgtgacaataacaaatgctacgcgaagattatctgcaacacaaaggacaacgagagagtggtaggattccacgtgctcggcccaaacgctggcgaggtgacccaaggtttcgccgcagcgctgaagtgtggccttaccaagaagcagctcgattctacaatcggaattcacccggtctgcgccgagtttttttccttcatatag

SEQ ID NO: 17634 - DNA, 1650 bp, synthetic construct
  misc_feature 1..1650: note = Description of Artificial Sequence: Synthetic coding sequence
  source 1..1650: mol_type = other DNA
atgtcctgcgaagacggacgcgcgcttgagggaaccctaagtgagctcgcagcagagaccgaccttcctgtggttttcgtgaagcagcgcaaaataggaggccatggccccaccctgaaagcataccaggagggaagactgcaaaagttattgaaaatgaacgggccagaggaccttcccaaatcatacgattacgatcttatcatcattgggggaggaagtggtggactggcagctgccaaggaagctgctcagtacggcaaaaaggttatggtattagatttcgttactcccactccgctggggacccgttggggtctgggcggcacctgtgtgaacgttggatgcattcccaagaagctgatgcaccaggcggctttgttgggtcaggcgctgcaggactcgcgcaattacggctggaaagtggaggagacagttaagcacgattgggaccgcatgattgaagccgttcagaatcatattggttccttgaactgggggtatcgggtggccctgcgcgaaaaaaaggttgtatacgaaaatgcttacggccagttcatcggtccccatcgaattaaagccacaaacaataaaggaaaagagaagatttattctgcagagcggtttttgattgctaccggggagaggcctagatatctgggtattcctggagacaaggagtattgtatcagctctgacgacctgttttcattgccttactgccctggcaagacacttgtcgtgggcgcatcctatgtggccctggagtgcgctggcttcctggcgggtatcgggttggacgtgacggtgatggtccggagcatactgctccgcggctttgaccaggacatggctaataagatcggagagcacatggaggagcatggcatcaagtttattcggcagtttgtgcctatcaaagtggaacagattgaggctggcacaccagggcggctgagagttgtggcccagtctaccaactcggaagaaatcattgagggagagtataatacagtgatgcttgcaattggtagagacgcttgcacgagaaagatcggccttgagactgtcggggtaaagatcaatgagaaaaccggaaagattcctgtaacagatgaagagcaaacgaacgtcccttacatctatgcaattggcgacatccttgaagataaagtcgagctcactccagtggccatccaagcaggtagattactggctcaacggctgtacgcgggctctaccgttaagtgtgattacgagaatgtgccaacaactgtttttacacccttagaatacggcgcatgtggactatcagaagaaaaggccgtggaaaaattcggcgaggagaatattgaagtttatcattcttacttctggcctctggagtggaccattcccagccgcgacaacaacaaatgctacgcgaagatcatttgcaatactaaggacaatgagcgggtggtaggcttccacgtgttgggtcccaacgctggtgaggttacacaagggtttgctgccgccctgaagtgtggtctcaccaagaaacagcttgacagcactattggcattcacccagtgtgcgccgaagtcttcacaaccttgtctgtcacaaagaggtccggcgcttcaattctgcaggccggttgctag

SEQ ID NO: 17635 - DNA, 1626 bp, synthetic construct
  misc_feature 1..1626: note = Description of Artificial Sequence: Synthetic coding sequence
  source 1..1626: mol_type = other DNA
atgcttagtcggctcgtccttaactcctgggcccaagccattattcgcccgcgtcctcccaaggtgttgggcctgcaggtcactacctttagcgaggcctaccaggagggcaggctccagaagttactcaagatgaatgggcctgaagatctccccaagtcttatgattacgacctgattattatcggtggcggatcaggcgggttagctgccgccaaggaagctgcacagtatgggaaaaaagttatggtccttgactttgtaacacccacacctctcggcactagatggggactggggggcacttgtgttaatgtggggtgcattcccaagaagctgatgcaccaggcagcgctgctgggtcaggccctgcaggatagccggaactacgggtggaaggtcgaggaaaccgtgaaacacgactgggatcgcatgatcgaggccgtccagaatcacattggcagccttaactggggataccgcgtggcattacgcgaaaaaaaagttgtttacgagaacgcgtacgggcagttcatagggcctcatcgcatcaaggcgacgaataataaggggaaagagaagatctactctgctgagagattcctgatagccaccggcgagcgtccccggtatctagggattccaggagataaggaatattgcatctcatcagacgatctcttttccttgccatattgccctgggaaaaccctagtggtcggggcaagctacgtcgccttggaatgtgcaggattcctcgctggcattggccttgacgtgactgtgatggtccgaagcatactactaagaggcttcgatcaggatatggccaacaagatcggagagcacatggaggagcatggtattaagttcatcaggcagtttgtcccaataaaagtggaacagattgaagctgggacaccaggacgcctcagagtggttgctcagtctaccaacagcgaggagatcattgagggagagtataacacggtgatgcttgcaatcggaagagacgcatgcactcgcaaaattggactggagacagtgggcgtgaagataaatgaaaagaccgggaaaatccctgtcaccgacgaggaacagaccaatgtaccatacatttacgctataggggatatcctggaggataaggtggagctcactcctgtagccatacaggctgggcgcttacttgcccaaaggttgtatgctggctctaccgtaaagtgtgactacgagaacgtgcccaccacagtatttaccccactcgaatacggtgcctgtggcctgagcgaggagaaagcagttgagaagtttggcgaggagaacatagaagtgtatcacagttacttctggcccctggagtggacaatcccatccagggacaataacaagtgctacgccaaaatcatttgtaacacaaaggacaacgagcgggttgtggggttccacgttctggggcctaatgctggcgaggttacccagggtttcgccgctgctctgaagtgcggacttactaagaagcagcttgattctacaataggcatccaccctgtctgcgcggaggtgtttacgacattgagcgtcaccaagagatcaggcgctagcattcttcaagcaggatgctag

SEQ ID NO: 17636 - DNA, 1839 bp, synthetic construct
  misc_feature 1..1839: note = Description of Artificial Sequence: Synthetic coding sequence
  source 1..1839: mol_type = other DNA
atgccagtcgacgactattggctctgcctcccagcctcctgtgccagaccgttcgtccaaaccgtcagggttgtgcaatcttgtccccactgctgttggtttcccggcgttctgccatcagtccccgaacctttacgcatgccagcaatgctgcctaccggttcccacagcgctgtgctgccaccctcacactgctctaccgctcctccctctactagccaggaaccatcctccagtgccgatccaaaactgtgcctgagccctcctacaagcgattcacgccaagagcggaacgtgcaattcggactagcttaccaggagggccggctgcaaaaattattaaagatgaatggacctgaggatctgcccaaatcttatgactatgatctcattatcattggagggggctctggggggctagctgccgccaaagaggcagcccagtacggcaaaaaggtcatggttttggattttgtaacgcccacacccttaggcacacgatggggcctgggcgggacgtgcgtgaatgtgggctgtattcccaaaaagctcatgcaccaggccgcactgcttgggcaggccttgcaagatagccgcaattatggttggaaggtcgaggaaacagtgaaacatgattgggaccgaatgattgaagcggtgcaaaatcatatcggtagccttaactgggggtaccgtgtcgccctcagggagaaaaaagtagtgtatgaaaatgcttatggccaatttattgggccgcacaggataaaagcgaccaataataagggcaaggagaagatctatagtgctgaaagattcctaattgcaaccggagagcggcctaggtacctgggaatccccggcgacaaggagtactgtatctcctcagacgacttgttttctcttccgtactgtccaggcaaaaccctcgtcgtcggagcgtcatatgtggcccttgaatgtgctggttttctggccggcatcggactggacgtcaccgtcatggtgcggtcaatcctgttgcgtggatttgatcaagacatggcaaacaagatcggtgagcatatggaagaacacggcattaagttcataagacaattcgtgcccatcaaagttgagcagatcgaggccgggaccccaggacgactgcgagttgtggctcagagcactaactctgaggagattattgagggggagtataataccgtcatgttggccatcggtagagatgcttgcacgaggaaaatagggctggagactgtgggcgtcaagattaacgaaaaaactggaaaaatcccggtcactgatgaagaacagactaacgtcccctatatctatgccataggcgacattctggaggacaaagtagaacttacgcctgtggctattcaagctggcaggttacttgcacagagactgtatgctgggagcaccgtgaagtgcgattatgaaaacgtgcccactaccgtgtttaccccactggagtatggggcatgcggtctgtctgaagagaaggcagtcgaaaagtttggggaggagaatatcgaagtatatcattcttatttctggccacttgaatggacaataccctccagggacaacaataagtgctatgcgaaaataatatgcaacactaaggataacgagagggtggtgggctttcatgttctgggacctaatgccggggaagtgactcaggggttcgccgccgcactcaagtgcgggcttaccaaaaagcaactcgatagcactatcgggatccacccagtgtgcgccgaggtttttaccaccctctcggtaacaaagcggagcggagcaagtatcctccaggcaggctgttag

SEQ ID NO: 17637 - DNA, 1944 bp, synthetic construct
  misc_feature 1..1944: note = Description of Artificial Sequence: Synthetic coding sequence
  source 1..1944: mol_type = other DNA
atggggtgtgcagaaggcaaggctgttgcggccgccgcgccaactgagcttcaaactaaaggtaagaacggagacggcaggcggcgtagcgctaaggaccaccacccaggcaagacgcttcccgagaaccccgccggatttacgtcaaccgcgaccgccgactcgcgggcccttctacaggcctatatcgatggacattccgtggtgatcttcagtaggagcacttgcactcggtgtaccgaagtgaagaagctttttaagtccctctgcgttccctactttgtcttggaattggaccaaactgaggacggtagagcattagaggggactttatccgagctggcagcagagacagatctccctgtggtgtttgtcaagcagcggaaaatcggaggtcatgggcccacgctgaaagcctaccaggagggccgccttcagaaactcctgaaaatgaacgggcctgaggacctgcctaagtcttatgactacgacttgatcataattggaggcggctccggcggcctggccgctgcaaaggaggccgcacagtacggcaagaaggtgatggtgcttgactttgtcacccctacaccactgggtaccaggtggggcttggggggtacctgcgtgaatgtggggtgcatccccaaaaaactcatgcaccaggccgccttgttggggcaggctctccaggacagcagaaactatgggtggaaagtagaagagacagtgaagcacgactgggatcgcatgatcgaggcggttcagaatcatatcggatccctgaattgggggtacagagtggctcttcgcgaaaagaaagtggtgtatgagaacgcctacggccaattcataggtcctcatcgaattaaagccaccaacaacaagggcaaagaaaagatctacagtgcagaacgctttttaattgccaccggggaacgacccaggtacctcggcattccgggggataaggagtattgtatttccagcgacgatttgtttagtctaccatactgtccgggaaagacgctggtcgtcggggcatcctatgtcgctttagagtgcgctggtttcttagccgggatcgggttagatgtaacggtcatggttcggagtattctgcttagagggtttgatcaagacatggccaacaaaattggagaacacatggaagagcacggaatcaagtttattagacagttcgtacccataaaagttgaacagatagaagccggaacccctggaaggttgcgggtggtcgctcagagtacaaactccgaggagattatcgagggggaatataacaccgtgatgcttgccataggtcgggacgcttgcacccggaagatcggcctcgaaaccgtgggcgtcaagataaatgagaagacaggcaagatcccagttaccgacgaggagcaaaccaatgttccatacatatatgctataggcgacatactcgaagataaggtggagcttaccccggtagctattcaagcaggccggctgctagcacaacgcctgtatgccgggtcgacagtcaagtgtgattacgaaaatgtccctaccactgtgttcactccgctggagtatggggcctgcggtctgtccgaggaaaaggccgttgagaaattcggggaggaaaacatagaggtctatcactcctatttctggccccttgagtggactatcccgtcgagggacaataataagtgctacgccaagattatttgcaacacaaaggataatgagcgtgtggtggggttccatgtgctggggccaaatgctggagaggtgacccagggcttcgcagccgccctgaaatgcgggctcaccaaaaagcagctggattcgacaataggaattcatcccgtctgcgccgaggtatttacaacgctcagcgtcaccaagcggtctggggcatctatattgcaggctggctgctag

SEQ ID NO: 17638 - DNA, 1500 bp, synthetic construct
  misc_feature 1..1500: note = Description of Artificial Sequence: Synthetic coding sequence
  source 1..1500: mol_type = other DNA
  modified_base 1492: mod_base = OTHER; note = uracil
atgaatggaccggaagatcttcctaaaagctacgactacgacttgattatcataggcggcggtagcggggggctcgccgcagcaaaggaggccgcacagtacggaaagaaggtgatggtactggactttgtcacccccacgcccttagggacacgctggggcctcggtgggacatgcgttaacgtgggatgcattccaaagaaattaatgcatcaggccgcgctgctgggacaggctcttcaggactccagaaactatgggtggaaggtcgaagaaaccgtgaagcacgattgggaccggatgatcgaagccgtgcagaatcatattggatcattgaattggggctacagagtggcacttagggaaaagaaggtcgtctacgagaatgcttacggacagttcatcgggccgcaccgcataaaggcaacaaacaataagggaaaagagaaaatctattcagcagaaagattcctgatagctacgggcgagagacctcgatatcttggaatcccaggtgataaggagtactgcatctcctcagacgacctgttcagtctcccatattgtccgggtaagaccttggtcgttggtgcctcatacgtggcattggaatgcgcaggcttcctagctggaatcggactcgacgttactgttatggtcagatctattctgttacgaggcttcgaccaggacatggcaaataaaatcggtgaacacatggaagagcacggcattaagttcatcagacagttcgtgccaatcaaagtcgagcagatagaggccgggacccccggtcgcctacgggttgtggctcagtcaaccaattccgaagagatcattgaaggagagtataacacagttatgttggctataggcagggacgcctgcacaagaaaaattggtctcgagacagtaggagtgaagattaacgagaagacaggtaaaatccccgtgactgacgaagagcaaacaaatgtgccctatatctatgccattggagacatcctggaggacaaggtggagctgacacctgttgccatccaggcaggcaggttgcttgctcagcgcttgtacgcgggctctaccgttaagtgtgactatgaaaacgtccccacaaccgtcttcacgccgctggagtatggtgcatgcgggctgagcgaggaaaaggcagttgagaagtttggtgaagaaaacattgaggtgtaccatagctacttctggcctctggaatggactatcccctccagggataataacaagtgctacgcgaagataatctgcaacaccaaggataatgagcgagtcgtgggattccatgtgctcggcccaaacgccggagaagtgactcaggggtttgcagccgcactgaagtgtggcctcaccaaaaagcagttggattccaccatcggcattcatcctgtatgtgccgaagtgtttactactttgagcgtaacaaaaagatcgggcgcttcgatccttcaggccgggtgttgagggtag

SEQ ID NO: 17639 - DNA, 1500 bp, synthetic construct
  misc_feature 1..1500: note = Description of Artificial Sequence: Synthetic coding sequence
  source 1..1500: mol_type = other DNA
  modified_base 1492: mod_base = OTHER; note = uracil
atgaacggaccagaggaccttcccaaaagctatgactacgatctgatcattattggaggtggaagcgggggactcgcggctgccaaagaggcagcccagtatggcaagaaagtgatggtcctggacttcgttacacctacacctctgggtacacgatgggggttaggcggcacgtgcgttaatgtgggatgtattccgaagaagctaatgcaccaggccgccttgctcgggcaggcattacaagactcaaggaactatggatggaaggtcgaggaaactgtaaagcacgactgggacaggatgatagaagctgtccagaaccacatcggttccttaaattgggggtaccgagtggccctgagagagaagaaagtggtttatgaaaacgcatatggacagtttattggaccccaccgcatcaaagctacgaataataagggcaaggagaagatctactcggcagaaagattcctaatcgccactggcgagaggcctcgctatctaggcattccaggggacaaagaatattgtatctcctcggatgaccttttctctctcccttattgtcccggtaaaaccctcgtggtgggagcatcctacgtggctcttgagtgcgccggattcctggctggcattggtctggacgtgacggtaatggtgagaagtattctactgagagggttcgatcaggacatggcgaacaagattggagagcatatggaggaacacggcatcaaatttattagacaattcgtgcctattaaggtcgagcagattgaagctgggaccccaggccgccttcgggtggtggcccagtccaccaatagtgaggaaataatcgagggtgaatataatacagtgatgctcgcaattggccgggacgcatgcactagaaaaatcggcctggaaaccgtcggggtgaaaatcaatgagaagactggaaaaatcccagtgacggatgaagagcaaactaacgtcccatacatttatgcgataggcgatattctggaggataaagtcgaattaacccctgtggccattcaggctggcagattgttggcccagcggttgtacgccggcagcacagtaaagtgtgattacgaaaacgtgcctaccaccgtgtttacacctctggaatacggggcttgtggcctgagtgaggagaaagctgtggaaaaattcggagaggagaatattgaagtctaccatagttacttttggccattggaatggaccatcccctctagagacaataataagtgttatgcaaagattatttgcaacacaaaagataatgagcgtgtggtaggctttcacgtcctcggaccaaacgcaggcgaagtcacccagggattcgccgccgcactaaaatgcggccttaccaagaagcagctggacagcacaatagggattcatccagtctgcgctgaagtgtttaccaccctgtccgttacgaaacggtcgggggccagtatactgcaggcggggtgctgagggtag

SEQ ID NO: 17640 - DNA, 1950 bp, synthetic construct
  misc_feature 1..1950: note = Description of Artificial Sequence: Synthetic coding sequence
  source 1..1950: mol_type = other DNA
  modified_base 1942: mod_base = OTHER; note = uracil
atggggtgcgcagagggcaaggccgttgcggccgcagcgcccaccgagctgcagactaagggcaaaaacggagacgggagacggcggtcagctaaggatcaccatccggggaaaacgttgccagagaaccccgctggatttacctccacagcgacggccgattcacgcgccttgttacaggcgtatattgatggacattctgtggttatattctcaagatccacctgtacgcgctgcaccgaagtcaagaagctcttcaagagcctctgcgttccttatttcgtactggagctagatcagacagaagatggtagagcactcgagggaacgctctccgagctggccgcagaaaccgatctgcctgtcgtgttcgttaagcaaaggaaaatcggaggccatggccctacactcaaagcctatcaagaagggaggctccagaagctgttgaagatgaatggcccagaagatctgcctaaatcatacgattacgacctgattattatcgggggtggttccggcggcctggctgcagccaaagaagccgctcaatacggcaaaaaggtaatggtactggattttgtcacccccaccccattagggacccgctggggcctcggaggaacttgtgttaatgtgggatgtataccgaagaaactgatgcatcaagccgccctccttggacaggctcttcaagattcccgaaattacggatggaaggttgaggagactgtgaaacatgactgggacagaatgatagaagcagtccagaatcacatcggatctctgaattggggctacagggtcgccctccgagaaaagaaagttgtgtatgagaacgcatacggacagtttatcggacctcacaggattaaagccactaacaacaaaggcaaagagaaaatttatagcgcagagcgattcctaatcgctactggtgagagacccagatatctgggcatacccggcgacaaggagtattgcatctccagcgacgacctgttctctctgccttactgccccggaaagacactagtggtgggagcctcctacgtggccctggagtgcgccggttttctggccggtatcggactagacgtgaccgtcatggtgcgctcaatcctgctgaggggatttgaccaggatatggctaacaagatcggtgagcatatggaggagcatggaattaaatttattcggcagtttgtcccaattaaggtggagcagattgaggcgggtactccgggccgtctgcgcgtggtcgcccaaagcactaactctgaagagataatcgagggtgaatacaacaccgtcatgctcgctataggcagggacgcgtgcacccgaaaaattggactcgaaacggtgggcgtgaagattaatgagaaaacaggcaagatccccgtaacagacgaagagcaaacaaatgtgccttacatttacgctataggagacattctggaggacaaggttgagctcactccggtggcgatccaggcgggaagactccttgcccagaggctttacgctggatccaccgtaaaatgcgattacgagaacgtgcccaccaccgtctttacacctctagagtacggagcttgcggcctctccgaagagaaagccgttgaaaagtttggggaggagaacatcgaagtgtaccactcttacttctggccccttgagtggactattccctcacgcgataataataaatgctatgcgaaaattatctgcaacaccaaagacaatgagcgtgtggtcgggtttcatgtgttggggccaaacgccggagaggtgacgcaagggttcgctgctgcactgaagtgcgggctaactaaaaagcagttagattccacaatcggaatacatccagtttgtgctgaggtgtttactacattatccgtgacgaagagatcgggggccagtatcctgcaggctggctgttgaggatag

SEQ ID NO: 17641 - DNA, 213 bp, synthetic construct
  misc_feature 1..213: note = Description of Artificial Sequence: Synthetic coding sequence
  source 1..213: mol_type = other DNA
atgaacggcccagaggacttgccaaaatcttatgattacgatctcatcataataggtggaggttctggggggcttgccgcagccaaggaagccgcccaatatggcaaaaaagtgatggtgctggactttgttacacccacacctctgggtactcggtggggactcggcggaacttgtgtgaacgtcggctgcatcccgaagaagttgatgtag

SEQ ID NO: 17642 - DNA, 1632 bp, synthetic construct
  misc_feature 1..1632: note = Description of Artificial Sequence: Synthetic coding sequence
  source 1..1632: mol_type = other DNA
  modified_base 1624: mod_base = OTHER; note = uracil
atgctgtcccggttggtgctcaatagctgggcccaggccatcattcgcccccgtcccccaaaagtgctcggactgcaggttacaacatttagcgaggcataccaggaaggcaggctacagaagcttctgaagatgaatggaccagaggaccttcctaaatcttacgactatgacctcattattattgggggaggttcagggggacttgctgccgcaaaggaagcagcgcaatacggtaagaaggtgatggtgctcgactttgtcacacccaccccactggggacacgttggggcctgggggggacctgtgtcaacgtcggatgtattcctaaaaagctgatgcatcaggcagccctgctaggtcaggctctgcaggattcacgcaactacgggtggaaagtggaggaaaccgttaagcatgactgggaccggatgattgaggcagttcagaaccacatagggtcccttaattggggctaccgagtggccctgcgtgaaaaaaaggtggtgtatgagaatgcctatggccagttcatcggccctcataggatcaaggccacaaacaataaggggaaggaaaagatctactccgctgagaggttcctgatcgcaaccggggaaaggccgaggtacctgggtatccctggagataaagaatactgtataagttccgatgacctgttttctctgccgtactgccccggcaaaaccctggtcgtgggtgcctcctacgtggccctggaatgcgctgggtttctcgcagggatcggactggacgtcaccgtgatggttcgctctatcttgctgcggggattcgaccaagacatggctaataaaataggggagcacatggaggagcacggcataaagttcattcgtcaatttgtccctattaaagttgaacagatcgaggctggtacaccaggtaggctgcgtgtcgtagctcagtctacgaattccgaagaaatcatcgagggggagtacaatacagtgatgcttgctatcggacgcgatgcctgtaccaggaaaatcggccttgaaactgtgggcgtgaagatcaatgaaaagacagggaagatccccgtcaccgatgaagagcagactaatgtgccttatatttacgctatcggcgacatcctggaagacaaggtcgagctgactcccgttgccatacaggccggtagactgttggctcagagactgtacgcaggttcaaccgtgaagtgcgattacgagaatgtaccaacgacagtgtttactcccctggaatacggcgcgtgcgggctgtccgaggaaaaggcggtggagaagttcggggaagagaatatcgaggtgtaccacagttacttctggcccctggaatggactattccctcccgagacaataacaagtgctacgcaaaaattatctgcaacaccaaagataatgagagagttgtcggttttcatgtgttagggcctaatgctggagaggtaacacagggcttcgcagccgcacttaagtgcgggctaactaaaaagcagcttgactcaaccatcgggatccaccctgtatgcgcagaggtcttcactacactttcagtcactaagcgctccggggcatccatattgcaggccggatgttgaggttag

SEQ ID NO: 17643 - DNA, 315 bp, synthetic construct
  misc_feature 1..315: note = Description of Artificial Sequence: Synthetic coding sequence
  source 1..315: mol_type = other DNA
atgaatggacccgaggatctgcctaagtcttacgactacgacctgatcattattggcggcggctcgggaggcctcgcggcagccaaggaggccgcacagtacggaaaaaaagtaatggtgctagactttgtaacacctaccccactgggtacgcgatggggcctagggggaacatgtgttaacgtgggttgcattccaaagaaactgatgcatcaggccgctcttctggggcaggccttacaggattcccggaactacggttggaaggtcgaagagactgtgaaacacgactgggacaggatgattgaagcctag

SEQ ID NO: 17644 - DNA, 1656 bp, synthetic construct
  misc_feature 1..1656: note = Description of Artificial Sequence: Synthetic coding sequence
  source 1..1656: mol_type = other DNA
  modified_base 1648: mod_base = OTHER; note = uracil
atgtcgtgcgaagacggccgggccctcgaagggacacttagtgagcttgccgccgagactgacctgcctgtggtgttcgtcaaacagcgcaaaattggaggacatggccccaccttgaaagcctaccaagaggggcgattgcaaaaactgcttaaaatgaacggccctgaagacctgcccaagtcttacgattacgacttgataatcattgggggcggctctggcgggctagcagcagcaaaagaggccgcacaatatggcaaaaaggttatggtcctggactttgtaacccccaccccattggggacccgctgggggctcgggggaacctgtgttaatgtgggctgtattccaaaaaaattgatgcaccaggccgccctgttgggacaggcgctgcaagacagccggaactatggctggaaggttgaggagacagttaaacatgattgggaccgcatgattgaggctgtgcagaaccacattggctctctgaactgggggtatagagtagccctgcgggagaagaaggtcgtctatgaaaatgcctatggccaatttatcggaccccacagaatcaaagccaccaataacaaaggaaaagaaaagatttactccgcagagaggttcctcatcgccaccggggagaggcccaggtatttggggatcccgggtgacaaggagtattgtatttccagcgatgacctcttcagcctgccctactgtccaggaaagaccctagtggtcggcgcctcgtacgtggcactggagtgcgccggtttcctcgcggggatcgggcttgacgtgactgtcatggtcaggagcatacttcttagaggatttgaccaagatatggctaacaaaattggggagcatatggaggagcatgggattaaatttatccgccagtttgtgcctatcaaggtggagcaaatagaagccggtacccctggccggcttagggtagtcgctcagtcaaccaactctgaagagattattgagggcgaatataacacagtgatgttagcaatcggtcgagatgcttgtacaaggaagatcggactcgagacagtgggtgtgaaaattaacgagaagacaggcaaaattccagtgaccgatgaggagcagacaaatgtcccgtacatttatgcaatcggcgatatcctcgaggacaaagtggagttgacacctgtagctatccaggccgggaggctcttggctcaacggctgtatgcagggagcactgtgaaatgtgactacgaaaacgtgcctacaactgtctttaccccgctggagtacggtgcctgcggactcagcgaggaaaaagctgtggagaagtttggggaagaaaacatcgaggtgtaccatagctacttttggccgctggagtggacaattccaagccgagacaataataagtgttatgccaagatcatctgcaacactaaagacaatgaacgtgtggtagggtttcacgtgctggggcctaatgctggtgaggtcactcagggattcgcagccgctctgaagtgtggtcttacaaaaaagcagcttgactcaaccattggaattcaccccgtgtgtgcagaagtcttcacgaccctgtccgttaccaagcgttcaggtgctagtatcctgcaggcaggatgctgagggtag

SEQ ID NO: 17645 - DNA, 1707 bp, synthetic construct
  misc_feature 1..1707: note = Description of Artificial Sequence: Synthetic coding sequence
  source 1..1707: mol_type = other DNA
  modified_base 1699: mod_base = OTHER; note = uracil
atgccagcgatgctgccaaccggctcacactcagcagtgttgccgcccagtcattgcagcacagctccaccttccacgtctcaggagcccagctcatcagctgaccctaaactctgtttgagtccgcccacaagtgactcccggcaagagcgcaatgtgcagtttggcctagcataccaggaggggagattgcagaagctgctgaagatgaatgggcctgaagatctgccgaagagctacgattacgatctgattatcataggggggggcagtggagggctggcggctgctaaggaagccgcccagtacggaaagaaagtcatggttctcgacttcgtgacacccacccccttaggaacacgctggggtctgggcgggacctgcgtgaatgtgggatgtattcccaagaagctcatgcatcaggcggcactgcttggccaggcactccaggacagccgtaactacgggtggaaagtggaggaaactgttaagcacgattgggaccggatgattgaggccgttcagaatcacatagggtctttaaattgggggtatcgcgtggctctacgagagaagaaggtggtctacgaaaacgcctacgggcagtttatcggaccccatcgaattaaagcaacaaataataagggaaaggaaaagatctatagcgccgagagatttctaattgccacaggggagcgcccacggtaccttggtatcccaggagacaaggaatattgtatctcgtcggacgatctgttctctctaccctattgcccagggaaaaccttggttgtcggtgccagctacgtggcactggagtgtgccggttttcttgcaggcataggactcgatgtcacggtgatggtgcggagcattctcctgaggggctttgaccaggatatggcgaataagattggcgagcatatggaagaacatgggattaaatttatacgccagttcgtcccaatcaaggtggaacagattgaggctggaaccccaggacgtctcagagtggtggctcagtctacaaattcagaggagattatcgagggcgaatacaacacagtaatgttagccatcggccgggatgcatgcactcgaaagatcggcctggagaccgtgggggtgaagattaacgagaaaactggcaagatcccagtgactgatgaagaacaaaccaatgtaccgtatatctacgccatcggtgatatcctcgaagataaggtggaactcactcctgtggctattcaggctggcagacttctggcccagagattgtatgcaggtagtaccgtcaagtgtgactacgagaatgtgccaacaacagtctttacacccctcgaatacggcgcctgtggcctgagcgaggagaaggccgtggaaaagtttggagaggagaatattgaggtctaccattcatatttctggccgcttgagtggactattccttctagagacaataacaagtgctacgcgaaaatcatttgcaacactaaggacaacgagcgcgtggtcgggtttcacgtgcttgggccgaacgctggcgaggtgacacaggggtttgccgcggccctgaagtgtggcctgactaaaaaacagctggactctaccattggaattcatcctgtgtgtgccgaggtgttcacgacgttgtctgtcaccaaacgaagcggcgccagcatactccaggctggttgctgaggatag

SEQ ID NO: 17646 - DNA, 528 bp, synthetic construct
  misc_feature 1..528: note = Description of Artificial Sequence: Synthetic coding sequence
  source 1..528: mol_type = other DNA
atgaacggtccagaggaccttcctaagtcctatgactatgatcttatcattatcgggggtgggagcggagggttagctgccgccaaagaggctgcccagtacggaaagaaggtaatggtcctggactttgtgactccgacccccctgggcactcgttgggggctgggggggacctgcgtgaatgtggggtgcattccaaagaagctgatgcaccaggctgccctcctcggacaagcattgcaagattctagaaattacgggtggaaggttgaagagaccgtgaagcacgactgggatcgaatgatagaggcagttcagaatcatataggcagcttgaactggggctacagggtcgccctaagggaaaagaaggtagtgtacgaaaatgcatacggtcagtttattggcccacatcgcattaaggcaacgaataataaaggtaaggagaaaatttactcagcggaaagatttctgattgctacaggggagaggccaagatacctgggcattccaggtgacaaggaatag

SEQ ID NO: 17647 - DNA, 162 bp, synthetic construct
  misc_feature 1..162: note = Description of Artificial Sequence: Synthetic coding sequence
  source 1..162: mol_type = other DNA
atgaatggccctgaagacttgccgaagagttatgactacgatctgatcatcataggaggggggtccggcgggttggcagcggcaaaagaggcggctcagtatggaaagaaagtgatggtcctggactttgtgactccgacacccctggggacacgatggtag

SEQ ID NO: 17648 - DNA, 219 bp, synthetic construct
  misc_feature 1..219: note = Description of Artificial Sequence: Synthetic coding sequence
  source 1..219: mol_type = other DNA
atgaatgggcctgaggaccttcctaagagctatgattatgacctaataattataggaggcggaagtggcggcctcgctgccgctaaggaggccgcacagtatggcaagaaagtgatggtgttggatttcgtgacccctacaccacttggcacaaggtggggcctggggggcacttgcgtgaacgtcggctgtattcccaagaagcttatgcaccagtag

SEQ ID NO: 17649 - DNA, 420 bp, synthetic construct
  misc_feature 1..420: note = Description of Artificial Sequence: Synthetic coding sequence
  source 1..420: mol_type = other DNA
atgctgtctagacttgtcctcaatagctgggcccaggcaattatcaggcctcgaccccccaaggtgctaggcttacaggtgacgacgttttcggaagcctatcaggagggccgcttacagaagcttcttaagatgaacggtccagaagaccttccaaaaagctatgattatgacctgataattattggcgggggcagcggtggcctagccgcggccaaggaagctgcacaatatggaaagaaggttatggtcctcgacttcgtgacccccaccccactgggcacaaggtggggtttaggagggacatgcgtcaacgtcgggtgcatccctaaaaagctgatgcaccaggctgctctgctcgggcaggcactacaggactctcggaactacggctggaaggtggaagagactggaatgtag

SEQ ID NO: 17650 - DNA, 1380 bp, synthetic construct
  misc_feature 1..1380: note = Description of Artificial Sequence: Synthetic coding sequence
  source 1..1380: mol_type = other DNA
atggtgctggatttcgtaacccccacccctctaggcactcgttgggggttgggaggaacgtgcgtgaacgtgggctgtattcccaagaagcttatgcaccaggctgctctgctaggacaggcactgcaggacagccggaactacggctggaaggtagaagagactgtgaaacacgactgggaccgtatgatcgaggctgtccagaatcacatcggcagtctgaactggggataccgcgtggctttgcgtgagaagaaggtggtgtatgagaatgcttacggccagtttataggccctcacagaatcaaagccacaaataacaagggcaaagaaaagatctactctgcagagcgtttcttaattgctactggggagcgaccgaggtatctcggtatcccaggcgacaaggagtattgcatctcctctgacgatcttttctctctgccttactgtccaggaaagaccctggtggtgggcgcatcctacgtggcccttgagtgcgcagggtttctcgccggtatcgggcttgacgtcactgtgatggtgagatccattctcctccggggcttcgaccaggatatggccaacaagataggcgaacatatggaggagcacggaattaaattcatccggcagtttgtgccgatcaaggttgagcagatcgaagctgggacgcccggacgtttaagggtggtcgcccaatccacgaactccgaggaaataatcgaaggcgaatataacactgttatgctggcgatcggcagagacgcttgcaccaggaagataggattggaaactgtaggcgttaaaataaatgagaagacagggaaaatacctgtgacagacgaggaacagacaaatgtcccttatatatacgcgatcggagacatccttgaggacaaggttgaattaaccccggttgctattcaggccggtaggctattggcccagcgcctttacgcaggctctaccgtaaaatgtgactatgaaaatgtgcctaccactgtgtttacacccctggagtatggcgcctgcggcttgagtgaagaaaaggcggtggaaaaatttggtgaggagaacattgaggtataccacagttacttttggcctctcgaatggaccatcccaagcagggacaacaacaagtgttatgccaagatcatctgcaatactaaagataacgagagagtagttggcttccacgtgctggggcccaacgcaggggaggtgacacagggtttcgccgctgcccttaagtgtggattgactaagaaacaactggactccacaataggaattcaccctgtgtgcgcagaagttttcacgaccttgtccgtgactaagcgatccggcgcgagcattctgcaagctgggtgttag

SEQ ID NO: 17651 - DNA, 1644 bp, synthetic construct
  misc_feature 1..1644: note = Description of Artificial Sequence: Synthetic coding sequence
  source 1..1644: mol_type = other DNA
atggaggatgggcgcgccctagagggtaccctgtccgagcttgcagccgagaccgacctgcctgtcgtcttcgtcaagcagcgcaaaattggcggacacggtccaacattgaaagcttaccaggaaggacgccttcagaagctgctgaagatgaatggacctgaggacttgccaaagagctacgactacgaccttatcattattgggggaggttcagggggcttggcagcggctaaggaggcagcgcagtacggaaagaaggtgatggtgctggattttgtgacccccacgcctctcgggacacgttgggggttaggaggaacctgtgtcaacgtggggtgtattcctaaaaagctgatgcatcaggccgccctattaggccaggcgctgcaagatagccgcaactatggctggaaggtcgaagaaacagtgaaacatgactgggatagaatgatagaggctgtgcagaatcatatcgggtctctgaattgggggtaccgggtggccttgagagaaaaaaaggtcgtgtatgaaaacgcctacgggcaattcatcggaccccaccgaatcaaagctactaacaacaaaggcaaggagaaaatttacagcgctgagaggttcttgattgccactggcgagcggccgaggtatcttgggatccctggggacaaggagtactgtatctcatccgacgatctcttttcccttccctactgtccaggaaaaaccttggtggttggcgccagttatgttgcccttgaatgtgctgggttcctggccggaattggactcgacgtgacggtgatggtccggtcaatcctgctgcggggttttgaccaggatatggctaacaagataggcgagcatatggaagagcatggcattaagttcattcggcagtttgtgccaatcaaagtcgaacaaatcgaagcaggtacacccggacgcctgcgcgtagtcgcgcagtcaaccaactccgaagagataatagaaggggaatacaatactgtgatgttggcaatcggtcgcgacgcttgcacccgtaagattggcttagagacagtgggggtgaagatcaacgagaagacaggaaaaattccagtcactgacgaggaacagaccaatgtgccatacatctacgccattggcgatatcctcgaggataaggttgagttgacgcctgtggcaatccaggccggcagattactcgctcagcgactgtatgcaggtagtaccgtgaagtgtgattatgaaaacgttcctacgactgtttttacgcctctcgagtatggtgcctgcggactgtcggaggaaaaggcggtggaaaagttcggcgaggagaatattgaagtctaccattcttatttctggccacttgagtggactatcccatcgagagacaacaacaagtgctacgctaagataatatgcaacactaaggacaacgaaagagtggtcgggtttcacgtcttaggcccgaatgcaggggaggtcactcagggattcgcggccgctcttaaatgtgggttgaccaagaaacagctggattcgaccattgggatacaccccgtttgtgctgaggtcttcacaaccctatcagtgactaaacggagcggggccagcatcttgcaagctgggtgttag

SEQ ID NO: 17652 - DNA, 945 bp, synthetic construct
  misc_feature 1..945: note = Description of Artificial Sequence: Synthetic coding sequence
  source 1..945: mol_type = other DNA
atgggctcccaagccctgccccctggaccgatgcaaacgctcattttttttgacatggaagctacaggcctgcccttctcacaaccaaaggtgacagaactgtgcctgctggcagtccacaggtgcgcactcgaatctcctcccacgagccaagggcctcctcctaccgtgccaccaccacccagagtggtggacaaactgtccctgtgtgtagctccggggaaggcctgttctccagcagctagtgagatcacaggcctgtcgacagcagttttggccgcccatggtaggcagtgttttgacgacaacctagcaaatctgctgttagctttcctcagacgccaaccacagccctggtgcttagtggctcacaacggcgacagatatgattttccactgctgcaggctgagctcgctatgctcggcctgacgtctgccctcgacggcgctttctgcgtggacagcatcactgcccttaaagcgttagagcgcgcctcaagccctagcgaacacgggccccgaaagagttactcgttaggatccatctacacacggttgtatggccagagccctcccgactctcacacggcagagggtgatgtgctggcccttctgtcaatctgtcagtggcgcccacaagctctgctcagatgggttgatgcccatgccagacctttcgggaccattcggcccatgtacggagtgaccgccagcgcaaggaccaagccccgcccttccgccgtgaccacaacagcccatctggcaactaccaggaatacgtccccatcactgggcgagtctcgtggcactaaggacctacccccagtgaaggaccccggtgccctcagcagggagggcttgttagctcctctgggcctgctggctatcctaacactggccgtggcgactctgtacggactaagcctggcaacccccggcgagtag

SEQ ID NO: 17653 - DNA, 1110 bp, synthetic construct
  misc_feature 1..1110: note = Description of Artificial Sequence: Synthetic coding sequence
  source 1..1110: mol_type = other DNA
atgggtccaggagctcggcgacaaggtagaatagtacaaggaaggcccgagatgtgtttctgcccccctcccacacccctgcctccactaagaatcttgaccctaggcacccacacccccaccccgtgtagctcgcccgggtctgcggctggcacttaccccaccatggggagtcaggcgttgccgcccgggcctatgcagacgctcatatttttcgatatggaggctaccggtctgcctttcagccagccaaaagtgaccgaactgtgtctgctggcagttcatcgatgcgccctagagtcccctcccacttctcaaggtccaccaccgacagtgcctccgcctcccagagtagtcgacaagttatctctgtgcgtcgctccgggaaaagcctgtagccccgcagctagcgaaattactgggctgagcactgcggtcctggctgcgcacggcagacagtgctttgatgacaatctggctaatctgctgctcgctttccttcgccgccagcctcaaccttggtgcctagtcgcacataacggagatcgctatgacttccccctgttacaggccgaactcgcgatgttagggctcaccagtgctcttgacggcgcattctgtgtcgatagcattacggccctgaaggctcttgagagagcttcatccccttccgagcacggacccagaaaatcctacagcctgggatctatttacactcgcctgtacggacagtcaccacccgattcacataccgccgaaggagatgtattggcacttctaagtatttgccagtggcgcccccaggctcttctcaggtgggtggacgcgcatgctcgcccttttggcacaatccggcccatgtatggggtaaccgctagcgcacgcacaaagccacgtccttcagcagtgaccactaccgcccacctagctacaacgagaaacaccagccccagccttggcgaaagcaggggaaccaaagacctccctcccgtcaaggacccgggagcgctcagcagagaaggacttctggcaccgttaggcctcctagcaatcttgacactagcagttgctacgctttatggccttagcttggccactcccggtgaatag

SEQ ID NO: 17654 - DNA, 528 bp, synthetic construct
  misc_feature 1..528: note = Description of Artificial Sequence: Synthetic coding sequence
  source 1..528: mol_type = other DNA
atgctcgggttgacgagcgctctggatggagctttctgtgtggactcaatcaccgctcttaaagcgttagagagagcttccagcccaagcgagcacggcccacgtaaatcctatagcctcggaagtatctacacgcgactctacggccagagcccccctgattcacatactgctgagggagatgttctggcgctgctgagcatctgccagtggcgcccacaagccctattgcgctgggtggacgctcatgcccgcccatttgggaccatacggcctatgtacggggtgacggctagtgcaaggaccaagcccagaccctccgccgtgactacgactgctcacctggccacaaccaggaacacatctcccagccttggggagtccaggggtacaaaagacttgccacccgtgaaagacccaggcgccctgtctagggagggattgttggcgcctttgggcctgctggcaatactgaccttagcagtcgctaccctgtacggcctaagcttggcaactccgggtgagtag

SEQ ID NO: 17655 - DNA, 945 bp, synthetic construct
  misc_feature 1..945: note = Description of Artificial Sequence: Synthetic coding sequence
  source 1..945: mol_type = other DNA
atgggctctcaggccctcccgcccggtcctatgcaaacccttatcttttttgacatggaagcgacaggcctgccatttagtcagcccaaggtgactgagctctgtttattggccgtacatcgctgcgcactggagtctcccccgacctcacaaggcccgcctcccactgtgcccccgcctccccgggttgtggataagctgtctttatgtgtcgctcccggaaaggcttgtagcccagctgccagcgagatcaccggcttatccaccgccgtcctcgccgctcatggtcgccagtgcttcgacgataatctggccaacttgttactcgctttcctgcgtcggcagccacaaccttggtgtctggtggcccacaatggtgacaggtatgacttcccgctgctgcaggcagagctagccatgctgggactgacaagcgctctggacggggccttttgtgtcgacagtatcactgcattgaaggcccttgaacgtgccagttctccaagtgaacatggccccaggaaatcgtacagccttggatctatttacactcgcctatacggacagtctccacccgatagccacaccgccgagggtgacgtgttagccctgctgagtatttgtcaatggcggccgcaggcactcctcaggtgggtggacgcccatgccagacccttcggaaccatacgccctatgtatggtgtaaccgcctctgctcggacaaagccgcgcccaagtgcagttactacgacagcccatctcgccaccacgaggaacacgtcgccatcccttggagaatctcgaggcacaaaggacttgcctccggtgaaagaccccggggcactctcaagagaaggactgctcgctcccctaggccttttagccattctgacccttgccgtggcaaccctatatgggctgtctttagcgacaccgggcgagtag

SEQ ID NO: 17656 - DNA, 915 bp, synthetic construct
  misc_feature 1..915: note = Description of Artificial Sequence: Synthetic coding sequence
  source 1..915: mol_type = other DNA
atgcaaacactgatcttcttcgatatggaagccacggggctgcccttctctcagcccaaggttaccgagctgtgtctgctggcagtgcaccgatgtgccctggaatcccctcctacatctcaggggcctccgcccactgtgcctcctccccctcgggtggtggacaagcttagtttgtgcgtggcacctggtaaagcttgtagcccagctgcaagtgaaattacagggttgagcacagctgttctcgccgcccatggccgacagtgtttcgatgacaacttggctaatttactgctggcgtttctgaggaggcagccccaaccttggtgccttgtagcccacaacggtgataggtatgatttccctcttctccaggctgagttggctatgttgggcctcactagtgcattagatggtgccttctgtgttgattcgataaccgcactgaaagctttggagagagcctcgtccccaagcgagcacggcccgcgtaagagttattctctgggctctatatacacgcgtttgtacgggcagtctcctccagattcccacactgcagagggtgatgtgctcgctctactgtccatttgccagtggcgtcctcaggctttgctccgatgggtggatgcccatgccagaccctttggaacaatcaggccaatgtacggggtgacagcatctgcgcggacgaagcctagaccatccgccgttaccactactgcgcacctggcaaccacaagaaatacgtcacccagcttgggcgagtcaagaggtaccaaggacctgccacccgtgaaagatccaggggccctgtcccgagaaggcttgctcgccccgttggggctgctggcgatcctgactctggctgttgctactctgtacggactatccctggcaacaccaggagagtag

SEQ ID NO: 17657 - DNA, 528 bp, synthetic construct
  misc_feature 1..528: note = Description of Artificial Sequence: Synthetic coding sequence
  source 1..528: mol_type = other DNA
atgctcgggcttacttcagccttagatggcgcattctgtgtggactcaatcaccgcgctcaaggctctcgaaagagcatcatctccatcagaacacggaccaaggaagagttactccctaggctctatttataccaggctgtatgggcagtcacctcccgactctcataccgcggaaggtgacgttctggcgctcttaagcatttgtcagtggcgcccacaggccctactgagatgggtggacgcgcacgcacgcccattcggcaccattcgacccatgtacggagtgacagcgtctgccaggactaaaccgcggccgagcgctgtcactacaacagcccatctggccactacgcggaatacatcaccgagcctcggcgagagtcgcggaacaaaagacctcccgcccgtgaaggacccaggcgcgctgagtcgggagggcctgttggctcctcttggtttgctggctatacttaccttggcagtggccacgctgtacgggctcagcttagcgacccccggggaatag

SEQ ID NO: 17658 - DNA, 3513 bp, synthetic construct
  misc_feature 1..3513: note = Description of Artificial Sequence: Synthetic coding sequence
  source 1..3513: mol_type = other DNA
atgggcctggcatggggtctgggagtgctgtttttaatgcacgtttgtggaactaataggatccccgaatccggcggggacaacagcgtgtttgatatcttcgaattaacgggcgcagcgagaaaggggagtggaagacggctggtgaaagggcccgacccttcctctcccgcgttcagaatcgaagacgccaacctgatccccccagtgcctgacgacaaatttcaggacctcgttgatgctgtccgcgcggaaaaaggctttctcctgctcgctagtctgaggcagatgaaaaagacaaggggaacgctgctagcactggaaagaaaagaccactcaggccaggtattctccgtggtctcaaacgggaaggctgggacattggaccttagcctgacagtgcaggggaaacagcatgttgtttcagtcgaggaggctctgctagctacgggacagtggaagtcgatcactctgttcgtgcaggaagatagagcgcagctgtacatcgactgcgagaagatggaaaatgctgaacttgacgtgccaatccagagcgtgtttacacgggacctcgcgtctatcgctagattgcggattgctaaaggcggagttaacgataattttcagggagttttgcagaacgttagatttgtgttcggcacaacacccgaagatatccttaggaacaaaggttgctctagcagtaccagcgtgcttttaacactggataataacgtggtaaacgggtcttcccctgccattaggacgaattacataggccacaagacaaaagacctccaggccatttgtggcatctcttgtgacgagctctcgagcatggtcctggagttacgcgggttgcgtaccatcgtgacaaccttgcaagatagcataagaaaagtgactgaagaaaataaggaactcgcaaatgaactacgcagaccccctttatgctatcataacggagtccagtaccgcaataatgaagagtggaccgttgacagctgcacggagtgtcattgccagaactccgtcaccatatgcaagaaagtgagctgcccgatcatgccgtgctcaaatgctactgttcccgacggggaatgctgccctagatgttggccctccgacagcgcagatgacggctggtctccatggtccgagtggactagctgttcaacatcctgcggcaacggcatacagcagcgcggaagatcatgcgattctctgaataataggtgcgagggcagcagcgtccagacacgtacatgtcacattcaggagtgtgataaaagattcaagcaggacggtggatggtcacactggagcccgtggtcttcctgctccgtaacgtgcggagatggagtgatcacccgcattcgcctgtgtaacagcccctctccacagatgaacggaaagccttgtgagggggaagcacgggagactaaagcttgtaaaaaagacgcctgtcctattaacggggggtggggtccctggtccccctgggacatttgctccgttacctgcggcggcggcgtgcagaaacgctcaagactatgcaataacccaacgccccagtttggtgggaaagattgcgtgggtgacgtgacggaaaaccaaatctgtaataagcaggactgcccaatcgacggctgccttagcaatccctgcttcgcaggtgtgaagtgtacctcataccccgatgggagctggaaatgtggggcatgcccccctggatactcgggcaacgggatacaatgtaccgacgtcgacgaatgcaaagaagtgcctgacgcatgttttaatcacaacggagagcaccgttgcgaaaacaccgatccagggtataattgtttgccttgtcctccgcgcttcacgggatcacagccctttggacaaggcgtggaacatgctaccgctaacaaacaagtttgcaagccgcgaaacccgtgcaccgatggcacccacgactgcaataagaacgccaagtgcaactatcttggtcattactcagaccccatgtaccggtgcgaatgtaagccaggatatgccggtaatggcattatctgcggtgaagacacagacttggatggatggcctaatgaaaatctcgtctgtgtcgctaacgcgacgtaccactgtaagaaggataattgccctaacctacctaattccggccaggaggattatgataaggacggcatcggggacgcatgcgacgatgacgatgataatgataaaattcccgatgatagagacaattgccccttccactacaatcctgctcagtacgactatgaccgggacgatgtcggcgatcggtgtgataattgcccctataatcataatccagatcaggctgacacagataacaacggagaaggcgacgcctgcgccgcagatattgacggggacggtattctcaatgaaagagacaattgccagtacgtgtataatgtcgaccaacgcgataccgacatggacggcgtgggagaccagtgcgataactgccctctcgaacacaatcctgaccagctggattccgattcagatcgtatcggcgatacctgcgataacaatcaagacatagatgaagatgggcaccagaataatctggacaattgtccatatgtgcccaacgctaaccaggcagaccacgataaagacggcaaaggtgacgcttgcgaccacgatgatgacaatgacggaatccccgacgataaagacaactgtcgtttggtccccaatcccgatcagaaagactctgacggagatggaaggggcgatgcgtgtaaggacgattttgatcatgacagcgtgcccgatatcgacgacatttgtcctgagaacgtggatatcagtgaaacagatttccgccggtttcagatgattcccctcgacccaaaagggacatctcagaacgacccaaattgggtcgttaggcaccagggcaaggagcttgtgcagaccgttaactgtgaccccggactggcagtaggttacgacgaattcaacgccgtggatttttctggcacgttctttatcaataccgaacgcgatgatgactacgctggctttgtgtttggctaccagagcagtagccgattttacgtcgtgatgtggaagcaggtgactcagagctactgggacaccaatcctacaagggctcaaggctactcgggactttcagtgaaggtagttaattcaactacaggccctggcgaacacctaagaaatgcattgtggcacacaggcaatacaccaggtcaggtgagaactttgtggcatgacccccggcatattgggtggaaggattttaccgcctacagatggcggctgtcccaccgacccaagaccgggttcatcagagtggtgatgtatgagggaaagaagataatggcagattctggccccatctatgataaaacatatgccggtggcagactgggcctgttcgtgttctctcaggagatggtgttttttagcgacttgaagtacgagtgccgggatccctag

SEQ ID NO: 17659 - DNA, 285 bp, synthetic construct
  misc_feature 1..285: note = Description of Artificial Sequence: Synthetic coding sequence
  source 1..285: mol_type = other DNA
atgggactggcctggggcctgggtgtgctatttctcatgcacgtttgcggtacgaaccggatccctgaatcaggaggagacaattctgtgtttgatatttttgaacttactggcgccgctagaaagggaagcggccgcagattagtcaagggcccggacccctcttctcccgcctttaggatcgaggatgcaaatctgatcccacccgtccccgacgataaattccaggatctggtggacgcagtgcgagcagagaaaggcttcctactactcgcatctttgtag

SEQ ID NO: 17660 - DNA, 501 bp, synthetic construct
  misc_feature 1..501: note = Description of Artificial Sequence: Synthetic coding sequence
  source 1..501: mol_type = other DNA
atggccgccggcaatgttgtgttagtccctctcgtcaccgttgaaatggcctccagcgcccagatgctgatgagtgccaagaaatgcctaatgccggcttctacaaccatggaaagcacaggcgtacggaccagaacccccgctactacagcttgtcctgccccacacgccagtcctgctcacagcccgagcgcccgtgtctcgaatatgccaaggccaaccaatcgctgcgcttccccgatccctctgtgtctgtgtcacagagcaggctgctattgcgaggctatctccgaacagtggacacagaagcatttccaagcttgccagcgacgcgaggatagcttggagttagccaacaaaacaacactcactagctcatttagaaataccggtagcaggggccaaagcaccaagggacgtgcccacacacgcgatgattgcatgaagaagatctggcgtaactgttacatgttcggcactaagagtttctccggagactag

SEQ ID NO: 17661 - DNA, 3519 bp, synthetic construct
  misc_feature 1..3519: note = Description of Artificial Sequence: Synthetic coding sequence
  source 1..3519: mol_type = other DNA
atggtgtggcggctggtgctcctcgctctgtgggtttggccctctacacaagccggtcaccaggataaagacaccacgtttgatctattcagcatctccaatattaatcgaaaaaccattggtgcaaagcagttccgggggccggatccaggtgtccctgcctacaggttcgtacgcttcgactatatcccaccagtgaacgcagacgatttgtcaaagatcactaaaattatgagacagaaagaggggtttttcctcactgcccagctgaagcaggacggcaaaagcaggggcacgttattagcgcttgagggccccggcctcagccagcgacagtttgagattgtgtcaaatgggccagctgacaccctggatctgacgtactggattgatggcacacgccatgtggtgagtcttgaggacgtggggcttgccgacagccagtggaagaatgtgactgtacaggtggccggcgaaacctacagcctccacgtgggatgcgatctgatagattccttcgcactagacgagcctttctatgagcacttgcaggccgagaagagtcggatgtacgttgctaaaggctcagcccgcgagtctcacttcagagggttactgcagaatgtccaccttgtcttcgagaattctgtggaggatatcctgtccaaaaagggctgccagcagggacagggcgccgaaataaatgctatctccgaaaacacagaaacactcaggctgggtcctcatgtgacaacggaatatgtgggaccttcctcggagaggaggcctgaggtttgcgaacgttcctgcgaagagctgggcaatatggtgcaggagctctccgggcttcacgtgctcgtgaaccagttgtcagagaacctgaaacgagtcagcaatgataaccagtttctttgggagctcattgggggacctccgaaaacgcgcaacatgtctgcttgttggcaagatgggcggttcttcgcggaaaatgagacgtgggtggtagactcgtgcactacctgcacctgtaaaaaattcaagactatatgccaccaaattacgtgcccgcctgccacctgtgcaagcccatctttcgtggaaggcgagtgttgcccttcttgtctgcacagcgtcgacggtgaggagggctggagcccgtgggcggaatggacacagtgttccgtgacatgtggcagcggtacacagcagcgaggccgctcgtgtgatgttaccagcaacacatgtttgggtccttccatacagactcgggcctgctccttatccaaatgtgatacgcggattagacaggatggcggctggtcccattggagcccatggtccagctgtagcgtgacttgtggggtcggtaacatcacccgaataagactgtgcaactcccccgttccccagatgggcggaaagaactgcaaaggctctggtagggagactaaagcctgccagggcgccccatgccccatagatggcagatggagtccctggtctccatggagcgcctgtactgttacatgcgcaggaggtattcgagagaggacccgggtctgcaacagtcccgagccacaatatggcggaaaagcatgtgtgggagatgtacaggagcggcagatgtgtaataagcggagctgtccggtcgatgggtgtctgtccaacccttgttttcccggggctcagtgttcaagctttccagacgggtcttggtcatgtggctcatgtcctgtcggtttcctggggaacgggacccactgtgaagacctggatgaatgcgcactggtccctgacatttgcttctccacgtctaaagtgcctagatgcgtgaatacgcaacctggttttcattgcttaccttgtccgccaagataccgcggcaaccagcccgtgggcgtgggcctcgaggccgccaaaaccgaaaaacaggtttgtgagccagagaacccctgtaaagataagacacataactgccacaagcatgctgaatgcatatacttggggcattttagcgaccccatgtataagtgcgaatgccagactggctacgcgggtgatggtttaatctgtggcgaagactccgatctggacggctggcctaatctcaacctggtatgtgccaccaatgccacgtatcactgcataaaggataattgcccgcacctacccaactccggtcaggaggatttcgacaaggacggcatcggcgatgcctgcgacgatgatgacgacaacgacggtgtgaccgatgagaaagataactgtcagctcctttttaatcctagacaggcagactacgacaaggatgaggtaggtgacaggtgtgataattgcccctacgtccataaccctgcccagatagataccgacaacaacggcgaaggagatgcatgtagcgtggatatcgacggagatgatgtgttcaacgagagggacaactgcccctatgtctacaatactgatcaacgcgacacagacggtgatggcgtgggggatcactgcgacaattgcccccttgtccacaaccctgaccaaaccgacgtggataacgacttggtgggagatcagtgcgacaataacgaggacattgatgacgacgggcaccagaataaccaggacaattgtccctacatttccaacgccaatcaggctgatcatgatagagacggtcaaggagatgcctgcgatcctgatgatgacaacgacggcgtaccagacgaccgggataattgtcgcttagtatttaatccagatcaggaggatctggacggcgatgggcgaggagacatctgcaaggatgatttcgataacgacaatatcccggatatcgatgatgtgtgccccgagaataacgcaatctcagaaactgattttaggaacttccaaatggtgccactcgatccgaaaggcacgactcagatagatcctaattgggttatcagacatcagggcaaggaactcgttcagaccgctaatagcgacccaggcatcgccgtgggtttcgacgagtttggctcagtggacttcagtggcacattctacgtaaacaccgaccgcgatgatgactacgcaggtttcgtgttcgggtatcagagctcaagcaggttttatgtagtgatgtggaagcaggtgacccagacatattgggaagatcagcctacacgcgcatatggttactccggggtgtctctcaaggttgtgaactcgaccactggaaccggggagcaccttcgaaacgcactatggcacactggcaacacccccgggcaagtcaggaccttgtggcacgatcccagaaacatcgggtggaaagattataccgcgtatcgttggcacctgacacaccggcctaagaccggctatatccgagtgctagttcatgagggcaagcaggtgatggcagattctggtcccatttatgaccagacctacgccggggggcgcctgggcctgtttgtgttctcgcaggaaatggtgtatttctccgatcttaagtacgagtgtcgggatatatag

SEQ ID NO: 17662 - DNA, 1293 bp, synthetic construct
  misc_feature 1..1293: note = Description of Artificial Sequence: Synthetic coding sequence
  source 1..1293: mol_type = other DNA
gacgatgataatgatggggtcaccgatgagaaagataactgccagctcttgttcaatcctcgtcaggctgattacgacaaggacgaggtgggtgacaggtgcgacaactgtccttacgttcataacccagcgcaaattgacaccgataataacggtgagggggacgcttgctccgtggacatcgacggcgacgacgtgtttaacgaaagagataattgtccttacgtgtacaacaccgatcagagggatacggacggtgacggagtaggagaccactgcgataactgccctctggtgcacaaccccgatcagacggacgtcgacaacgacctagtgggcgaccaatgcgacaataacgaggatatcgacgacgacggacaccaaaataaccaagacaattgcccgtacataagtaatgcaaatcaggcggaccatgatagagatggtcagggtgacgcctgcgacccagacgatgacaacgacggagtgcccgatgaccgtgacaattgtcgcctcgtgttcaatccagatcaggaggacctcgatggcgatggaagaggggacatatgtaaagatgactttgataacgataatattccagatatcgatgatgtttgtccagaaaataacgccattagcgagaccgattttcgaaactttcagatggtgccccttgacccaaaaggcactactcagatcgacccgaattgggtcataaggcatcaaggaaaagaactcgtccagaccgcaaattcggatcctggaatcgcagtcgggttcgatgaatttggtagtgtggatttcagcggcacattttacgttaacacggatcgtgatgatgattatgccggctttgttttcggttatcagtcaagttctcgcttctatgttgtgatgtggaaacaggtaacacagacgtactgggaggaccaacccacccgggcatatggctactctggggtttctcttaaggtcgtgaacagcaccaccggcacaggggagcatcttcgtaacgctctgtggcatactgggaacacccctggccaagtgcggacactatggcatgatccaagaaacattgggtggaaagactacactgcttacagatggcatcttacccaccgaccgaagaccggctatatccgggtgttggttcacgaagggaagcaggtcatggccgattccggtcctatctacgaccagacctacgcaggtggccgcctgggactgtttgttttttcacaggaaatggtgtacttcagcgacctgaaatatgaatgtcgggtaatctag

SEQ ID NO: 17663 - DNA, 252 bp, synthetic construct
  misc_feature 1..252: note = Description of Artificial Sequence: Synthetic coding sequence
  source 1..252: mol_type = other DNA
atggtctggcggctggttcttctggcactatgggtgtggccgagcacccaagctggacaccaggacaaggatacgactttcgacttgttttcaatcagtaacataaataggaaaacaattggtgctaagcagtttcgagggcctgaccccggcgtaccagcttatcgttttgtcaggtttgactacatcccccctgtgaatgcagatgacctgagtaaaattacgaagattatgagacagaaggaggggtag

SEQ ID NO: 17664 - DNA, 1449 bp, synthetic construct
  misc_feature 1..1449: note = Description of Artificial Sequence: Synthetic coding sequence
  source 1..1449: mol_type = other DNA
atggcggcactgatgacaccagggaccggcgctcctccagctcccggggattttagtggcgaaggatcccagggtctgccggatccctcccctgagcccaagcagctgccagaactcattagaatgaagagagatggagggagactgtccgaggccgatattagaggttttgttgctgctgttgtcaacggctcggcacaaggcgcccaaattggggccatgcttatggcaatccggctccgcgggatggacctcgaggagacctccgtgctgacccaggctttagcccaaagcggacagcagcttgaatggccagaggcctggcgccaacagctcgtcgacaaacattctacagggggagtgggcgataaggtcagtctagtgttggctcctgccttggcagcatgcgggtgtaaggtcccaatgatcagcggcagaggattgggccacaccggaggtacgctggataaacttgagagcattcccggctttaatgtgattcagtctccggaacagatgcaagtgctgctcgaccaagcaggttgctgcatcgtcgggcagagcgagcagcttgttcctgctgatggcatcttgtatgcagctcgcgatgtgactgccacagtcgattctctccctttgataactgcttccatattgtctaagaaactcgtcgagggcctctctgcactggtagtcgacgtgaagttcggaggcgccgccgttttcccgaaccaggagcaggctagagaattggcgaagaccctggtcggggtgggagcctctttggggctgagagtcgccgctgctttgaccgccatggacaagccactcggccggtgcgtggggcacgcactagaggtcgaagaggccctgctctgtatggatggcgcgggcccgcccgatctccgcgacctggtgaccacactcggcggcgctctgctgtggctttcaggccacgccggcacacaggcccagggagctgcaagagtagccgccgccctggacgatggctccgcacttggcaggtttgagaggatgctggctgctcagggagtggatcccggattagcccgggctttgtgcagcggcagtccagcggaacgccggcagctgctcccgagggctagggagcaagaggaactgctcgcacctgccgatggtaccgtcgagcttgtcagagctctcccactggcgctcgtgctccatgagctgggagcaggtaggtcgcgagctggcgagccactgcgtctcggagtgggcgccgaactccttgttgacgtcggacaacgacttagaagggggaccccatggctgagagtacacagagacgggccagcactctccggccctcagtcacgggctcttcaagaagcactggtgttgagcgatagagccccctttgctgcaccctctcctttcgctgaacttgtcctgcctcctcagcagtag

SEQ ID NO: 17665 - DNA, 1449 bp, synthetic construct
  misc_feature 1..1449: note = Description of Artificial Sequence: Synthetic coding sequence
  source 1..1449: mol_type = other DNA
atggctgctttaatgactcctgggactggagctccccctgccccgggagacttctctggcgaaggttcccaaggcttgcccgatccctcccccgaaccaaaacagctacccgagctaattcgtatgaagcgggatggaggtcgcctgtctgaagccgatatcaggggcttcgttgccgcagtggtgaatggcagtgctcagggagcacagatcggggccatgcttatggcgattcgactaagaggcatggatcttgaagagacaagtgttttgacacaagctctggctcaaagcggccaacagctcgaatggccggaggcatggcgccaacaactggtcgacaaacatagcaccggcggagtaggcgacaaagtgtctctcgttctagctccggcccttgcagcctgcggctgtaaggtgccaatgatatccggccgcggtctgggccacacgggcggcacattagataagctggaatctattcccggattcaatgtgattcagtcccctgaacagatgcaggtattgctggatcaagcaggttgttgcatcgtgggtcagagcgagcagctggtgcccgcggatgggatactgtacgctgctcgggacgtcacagcaacggttgacagcctaccactgatcactgctagtatattgtctaagaaacttgtggagggcctgagtgccctagtagtggacgtcaagtttggaggagctgcagttttcccaaatcaagagcaagctagagagctcgcaaagacactggtcggggttggcgcatccctgggtctgcgcgtggctgctgcacttactgccatggacaaacccctcgggaggtgcgtggggcacgctttagaggtggaggaagcgttgctgtgtatggatggcgctggcccacctgatcttcgtgatctcgtgaccactctgggcggagctctcctgtggcttagtggtcacgccggtacacaggcccaaggggcagctcgggttgcagcagccctcgatgacggttcagcacttggtcgcttcgaaaggatgctggccgctcagggcgttgaccctgggctcgctagagccctatgttcgggctcccctgccgaacggaggcagttactgccccgggctcgcgagcaggaggaactcctggcgcccgccgatggaacagtggagcttgtacgcgccctcccgttggctctggtgcttcacgagctgggggctggtcggagcagagcaggagaacctctccggctcggtgtgggtgctgagctgctggtcgacgttggtcaacggcttaggcgggggacgccttggctgcgggttcatcgagacgggcctgccctctcaggccctcaaagtcgggctctacaggaggccctggtcctcagtgatcgtgccccgttcgccgctccaagcccctttgccgagctggtgctgccacctcagcagtag

SEQ ID NO: 17666 - DNA, 1449 bp, synthetic construct
  misc_feature 1..1449: note = Description of Artificial Sequence: Synthetic coding sequence
  source 1..1449: mol_type = other DNA
atggcggccttgatgacacctggcaccggagcaccgccggcaccaggagacttttcaggggaggggtctcagggcttaccagatccatcacccgagcccaagcagctaccagagttaatcagaatgaaaagagacgggggccgcctcagcgaggccgacataagggggttcgtcgccgccgtggtaaacggcagtgcccagggagctcaaataggtgcaatgctcatggcgattaggctgagaggcatggacctcgaggagaccagtgtgctcacacaggctttagcgcagagcgggcagcagctggagtggcccgaagcttggaggcagcaactggtggataaacacagtaccgggggcgtgggggacaaggtaagcctcgttttggcacctgccctggctgcatgcgggtgtaaggtacctatgatttccggtaggggattaggacatacaggaggtactctcgataaactcgaatccatccctggatttaatgtaattcagtctccagaacagatgcaggtgctgttggatcaggccgggtgctgtatcgtgggtcaatcggaacagttggtgccagccgatgggattctatatgcagcgcgggacgtcacagccacggttgattccctacctctgattaccgcctctattctttcaaagaagctggtcgagggattatccgctctcgtcgtagacgtaaagtttgggggggcagcagtgttccccaaccaggaacaagcccgggagctggcaaagactttagtcggcgtaggcgcaagtttagggctgcgggtggctgccgctctgaccgccatggacaagccattaggacgttgcgtgggccacgcgctggaggtcgaggaggcactgctgtgtatggatggggctgggcctccggatctgcgggacctggtaaccaccctaggcggagccctactgtggctatccggccacgccggcacccaggcacagggagccgcaagggtggctgcagccctggacgatggctccgccctcggccgcttcgagagaatgctggcagctcaaggagtggatccaggtctggcacgggctctctgctcgggatcacccgctgaaagaagacagcttctacctagggcccgggaacaggaggagttacttgccccggctgatggcacagttgagctcgtgcgagccctcccactcgcccttgtcctgcacgagttaggcgctgggcgatcacgggccggggaaccactccggcttggcgtgggagccgaactgctggtggatgtgggtcagcggctgagaagaggcactccatggctgcgcgtccaccgagatggccctgccttgtccggaccacagagtcgggccctccaggaagccctggttctgagcgatcgcgcgccatttgcagcaccttccccctttgccgagctggttctgcctcctcagcagtag

SEQ ID NO: 17667 - DNA, 1233 bp, synthetic construct
  misc_feature 1..1233: note = Description of Artificial Sequence: Synthetic coding sequence
  source 1..1233: mol_type = other DNA
atggaagctgaaaacgctggcagctatagcttgcagcaggcccaggctttttatacgtttccatttcagcagctgatggccgaggcacccaatatggccgtagtgaatgagcagcagatgcccgaagaagtgcccgccccagcacccgcacaggagccggtccaggaggcccctaagggcagaaagcggaagccacggaccactgaacccaagcaacctgtcgagccaaagaagccagtcgagtcgaagaaatccggaaagagtgctaagtccaaggagaaacaggaaaaaatcaccgatacctttaaggtcaaaagaaaggtggacagattcaacggtgtaagtgaggcggagttactgactaagacactgccagatatcctgaccttcaacctcgatattgtcattatagggattaacccaggccttatggctgcatacaaaggacaccattatcccggaccaggcaatcacttttggaaatgtttgtttatgtccggactgtccgaagtgcagcttaatcatatggatgatcacaccctccctggaaagtacggaattggctttactaacatggtggagagaacaactccaggttccaaggacctatcgtcgaaagaatttcgggaagggggtagaattctagtgcagaagcttcagaaataccagccgcgcatagcagtgttcaacggaaagtgcatttacgagatcttctctaaggaagtgtttggagtgaaagtgaaaaacttagagtttggtctgcagccccataagataccagacactgagacactatgttacgtgatgccatcatcttcggcccggtgtgcccagtttcccagagcgcaggataaagtacattattatattaagcttaaagacctacgcgaccagctgaaagggatcgagcggaacatggatgtccaagaagttcagtatacctttgaccttcagcttgcacaggaagacgcgaagaaaatggcagttaaggaagagaagtatgatcctggttatgaagctgcctatggcggtgcctacggtgaaaatccatgtagttcggaaccctgtggcttttcctctaacggcctgattgaatccgtagaacttcgcggcgagagcgctttttcaggcatccctaatgggcagtggatgacccagagcttcacggaccaaatacccagcttttctaatcattgcggcacacaagaacaggaagaagaatcccacgcgtag

SEQ ID NO: 17668 - DNA, 621 bp, synthetic construct
  misc_feature 1..621: note = Description of Artificial Sequence: Synthetic coding sequence
  source 1..621: mol_type = other DNA
atgattaccctgtatcagggcagcatggtcctcgatctgccaacatggtggaaaggcccccggcctgctgctaagatctcacccgggatctatgagattttctccaaggaagtgttcggggttaaggtaaaaaacctcgaatttggccttcaaccccacaagatccctgacacggaaaccttgtgctatgtgatgcccagcagttccgccagatgtgctcagttcccacgcgcgcaggataaagtccactattatattaaactgaaggacctccgtgaccagctcaaggggatcgagaggaatatggacgtgcaggaggttcagtataccttcgatttgcagctggctcaggaggatgcgaagaagatggccgtgaaggaggagaagtatgacccaggttatgaagcggcctacggaggggcctacggtgagaacccctgcagttctgagccgtgtggcttttcctcaaacggacttatcgagtccgttgaactcagaggtgaatccgcattttcggggataccaaacggtcagtggatgacccagagtttcacagaccaaattccctctttttcgaatcactgcggaacccaggagcaggaagaagagtcccatgcttag

SEQ ID NO: 17669 - DNA, 3294 bp, synthetic construct
  misc_feature 1..3294: note = Description of Artificial Sequence: Synthetic coding sequence
  source 1..3294: mol_type = other DNA
atgagctcttgcaggtccctgtgttgcggcgatatcagtcagtcggcagtgctattcctgtgtcagggcactctggccatgctggattggcagaacggttctatgggccgtagtggggaagccttgttgctggataccgcacatgttctctttacccttagctcccagataaaagagcctactctggagatgttcttaagcaggattctggccagctggacgaatagtgctattcaggtgctagaatcctcctcaccgagcctaacagactccctcaacggcaactcgtcaatcgttggtaggcttctcgaatatgtgtatacccactgggaacacccactcgatgccctgagacaccagacaaagatcatgttcaagaacctgctgcaaatgcacagactgacagtggagggcgcggactttgtccccgatcccttctttgttgagctgacggagtctttgttgaggctcgagtggcacataaaggggaagtacacctgcctaggttgtctcgtggagtgtattggtgttgagcacattctagccatcgataagactattccttcccagattcttgaagtgatgggggaccaatcactggtcccatacgccagcgatctgctggagaccatgttcagaaatcacaaaagccatttaaagagccaaacagccgaatcatcgtggatagatcagtggcacgaaacctgggtaagtccgctactcttcatcctttgcgaggggaatctcgatcaaaagagctacgtgattgattattatctgccaaagttgctctcatattcccctgagtcattgcagtatatggtcaagatattgcagactagcatagatgcgaagactgggcaggaacagagcttcccgagcctgggcagttgtaatagccgcggcgcattaggcgccctaatggcatgtctgcggattgccagagcccacggccatctccagtccgctactgatacatgggagaacctcgtttctgatgcccgtatcaagcaggggcttatacatcaacactgccaggtacgaatcgacacgctggggctcttgtgtgaaagcaatcgttcaacagaaattgtcagcatggaagaaatgcagtggattcagttcttcattacctataatttgaacagccaatctcctggagtacgacagcagatctgctctttactaaaaaagcttttctgccggattcaggagtcttctcaggtgctgtataaattggaacagtccaaaagcaaaagggagccagagaacgaactgaccaaacaacacccctccgtttctctccagcaatataaaaactttatgtcttcaatatgcaattcgttatttgaagctcttttccccgggagttcgtattccacacgcttcagcgccctaactatactgggtagcatcgccgaggtctttcacgtgcccgaaggccggatatatactgtgtaccagctgtcccatgatatcgatgtgggacggtttcaaactctcatggagtgcttcacatctaccttcgaggacgtgaaaatccttgccttcgatctgctcatgaaactgtctaagaccgcagtccatttccaagattcaggcaagcttcaggggctattccaggcggcactggaactttccactagtaccaagccgtatgactgcgtgaccgcatcctatctgctgaactttctgatttggcaagatgctcttcctagttcactgagcgcctacctaactcaacaggtcgcctgcgataacggcgatcgccccgctgcagtggtggagcgcaatacgttgatggtgatcaaatgcctgatggaaaatcttgaagaagaagtgtcccaagccgagaattcccttttacaggccgccgcagcatttcccatgtatggccgggtgcattgcattactggagcactacagaagctgtcccttaattctctgcagctcgtgtctgaatggcgcccagtggtggaaaaactgttgttgatgtcctacagactatccacggtggtaagtcctgtgatacagtcaagtagtccagaaggcctgatacccatggataccgatagtgaatccgcttccagattgcagatgatcttgaatgaaattcagccccgggacactaatgattatttcaatcaggctaagattctgaaagaacatgattcgttcgatatgaaggacctcaacgctagtgtcgtgaacatcgatacgtccactgagatcaagggaaaggaggtcaagacatgcgacgtgacggctcagatggttcttgtgtgttgttggcgttccatgaaagaggtggccctccttctcggaatgttgtgccagttattgccgatgcagcccgtcccagaatcgtctgatggactcctgaccgtcgagcaagtaaaggagataggcgattacttcaaacaacatctcctgcagtctagacaccgcggggcctttgagctcgcctatacaggatttgtcaaactcaccgaggtgctcaataggtgtccaaatgtgtcactgcagaagcttccagagcagtggctttggtctgttctggaagaaatcaagtgttcggacccttcctcgaagctctgtgccaccagacgaagtgcgggtatacctttctacatccaggcactgctcgcctctgaaccaaagaagggccgaatggatctgttgaagatcactatgaaggagctgatcagcctggccgggcctaccgacgacattcagagcaccgtgccccaggtgcacgctttgaatatactgcgagccttgttcagagacaccagactgggggagaacattataccttatgtggccgatggcgccaaagccgcaattctggggttcacttcccctgtgtgggctgtccggaacagctccacactgctcttcagcgcactgatcactaggattttcggagttaagagggccaaagatgaacatagtaagacgaatcggatgaccggacgggaatttttcagcaggtttccggaattatacccttttctgttaaagcaattggagaccgtcgccaacacagttgattccgacatgggagagcctaatcgccatccttcaatgtttttactccttctcgtgctcgaaagattatatgcttcccctatggacggcacaagttcagctctgtccatgggccctttcgtgccgtttatcatgcgcgtcctgctgtgctgccccgggtggtctgccgtcgcaagatcccagcttaccgccacttctacctcatgggtgcaggcaatcctcttaccccagccaccagaatag

SEQ ID NO: 17670 - DNA, 5643 bp, synthetic construct
  misc_feature 1..5643: note = Description of Artificial Sequence: Synthetic coding sequence
  source 1..5643: mol_type = other DNA
atgggggtgaagaaaaaaaaggaaatgcaggttgcggccttgaccatctgtcaccaggacctggaaacactaaagtcatttgccgatgtagaaggtaaaaatctcgcctctctgcttctacattgcgtgcaactgactgatggggtcagtcaaatccattatatcaaacagattgtgcctcttctcgagaaggcggataagaatggtatgtgcgatcccaccattcagagctgcctagatatcctggccggcatttatctaagcctgtcattgaagaatccactgaaaaaggtcttagcctcttctcttaacagcctgcccgacttttttctcccagaagctatgcacagatttacttccagactgcaggaagagttgaacaccacagatctgtactcgtacagaaaagtgactgataacatctcatcatgcatggaaaactttaacttaggcagggcctcagttaacaatctgctgaagaacgtcctccatttccttcagaagtcactaattgagatcctcgaagagaatcgcaaatgtgcaggcaaccacatcattcaaacgcagcttatgaatgatctgcttgtgggtataagggtgtcaatgatgctggttcaaaaagtccaggattttcagggaaatctctggaagacttccgactcccctatttggcagaacatgtgcggccttctctccatatttacgaaagtcctgagcgatgatgatcttcttcagacagtgcaaagtacatcaggcctggctatcatcctcttcatcaagactatgtttcatccttcagaaaagatcccccatttgatcagcagcgtgctgttgagaagcgtagactgcacctccgtgccagaatggttcatgtcgtcgtgtagaagcctgtgctgtggcgatatctctcagtcagcagtgcttttcctgtgtcagggtactctggctatgctggattggcagaacggctctatgggtcgttcaggcgaagccctgctcctggacacagcccacgtcctcttcaccctttcgtcccagatcaaagagcccacgcttgaaatgttcctctctcgcattcttgccagctggaccaattccgctatccaggtgctggaaagcagcagtccttcgttaacagactccctcaacgggaattcgtcgatcgtggggagactgcttgagtacgtctacacacattgggaacatcccttggacgccctgcggcatcagacaaaaatcatgttcaaaaacctgctgcaaatgcacaggctgacggtcgagggcgccgattttgtgcctgacccttttttcgtagaactaacggaatcgctgcttcggttggaatggcacattaaaggtaagtatacctgtcttggctgtcttgtggagtgcatcggggtcgagcacatcctggcgatagacaagactattccatcgcagatcctagaagtcatgggggaccaatctctagtcccgtacgctagcgacctgctggagactatgttccggaatcataaaagccatttgaaatctcaaaccgccgaatcgagttggatcgatcagtggcacgagacatgggtctcgcccctccttttcatactctgtgagggaaaccttgatcaaaaatcatacgtcatcgactattatctaccaaagctcttgtcctactcccccgaatcgctgcagtacatggtgaagatccttcagaccagcattgacgcaaagacaggacaggaacagagcttcccgtcccttggcagctgtaactcccggggggctttgggggccctgatggcctgcttacgaatagcacgcgctcacgggcatctgcagtcagccacggacacgtgggaaaatctcgtgtcggatgcacggatcaaacagggtttgatccaccagcactgccaagtgcggatcgacactctcggattactgtgtgagtccaaccgctcaactgaaattgtgtccatggaggagatgcagtggatacagtttttcattacatacaacctcaattcacagtctccgggggtgagacagcagatatgtagccttttgaagaagaaactcttctgcagaatacaggaatcttcgcaggtcttatataaactcgaacagagcaagtctaaacgcgaaccagagaatgagcttacaaagcaacacccatcagtgtctctgcagcagtacaaaaacttcatgtcatccatctgtaacagtcttttcgaggccctatttcccggttctagctacagcaccagattttctgctctgacaattctcgggtcaatcgcagaggtgttccacgtgccagaagggaggatctataccgtatatcaactttctcacgatattgatgtggggcgctttcagaccctcatggaatgtttcacctccacattcgaggatgtgaaaatcctcgcctttgatctcctgatgaagctttcaaagaccgccgtccacttccaggatagtggcaaactccagggactcttccaagccgctttggaattaagtactagtactaagccttatgactgtgtaaccgcatcttacctcctgaactttcttatatggcaggatgccctgccctcttctttgtccgcttatttgacccaacaggtggcgtgtgataatggagatagacccgctgctgtcgtggaacgtaacactttaatggtgattaagtgtcttatggagaatctggaagaagaggtgagccaagccgagaatagccttctgcaagccgccgctgccttcccaatgtacggaagagtgcattgtatcacaggggctctacagaagctgtccttgaactcactgcagcttgttagcgaatggaggcccgtggtcgagaaattgctccttatgagttatcggttgtctactgtggtgtcccctgtaatccaatcctcaagcccagaggggctgatcccaatggacacagacagtgagagcgcaagccggctgcagatgatactcaacgaaatccaaccccgggatacgaacgattattttaatcaggcgaagatcctgaaagaacatgattccttcgacatgaaagacttaaatgcttcagtcgtcaatatcgatacaagcactgagataaaaggcaaggaggttaaaacatgcgacgtgacagcacagatggtgcttgtttgctgctggaggtccatgaaagaggtcgctctgctactgggcatgctctgccagctgctacctatgcaacctgtacctgagtctagcgatggtctgctcaccgtggagcaggtgaaggaaattggcgactacttcaaacagcacctacttcagagccgccatcgcggcgcttttgaactcgcttacacggggttcgtgaagctgactgaagtgttgaacagatgccccaatgtctcccttcagaagttaccagaacagtggttgtggagtgtgcttgaagaaattaaatgtagcgacccctccagcaagctgtgcgctaccaggcggtccgccggaattccattctacatacaggcactgttggcctctgaacctaagaagggacgcatggatctactgaaaataacgatgaaggaacttattagcctggctggacctaccgacgacatccaaagtaccgtgccccaggttcacgccctcaacatccttcgcgctctcttccgggacacccgccttggcgagaatatcataccatacgtggccgacggcgcaaaggccgctatcctcggcttcacctccccagtgtgggcggtgaggaactccagcactctcctgttcagcgcgctcatcaccagaatttttggagtgaaaagagccaaagatgaacattctaagacaaacagatgtgggcactctccagtgtatcattcgcgtgaaatggccgccagagcccttgtgcctttcgtgatgatagatcacataccaaatacaattaggacactcttgtcgacattgccttcttgcacagatcagtgctttcgccagaatcacatccacgggactctgctccaagtctttcatttgctacaggcatactccgacagcaaacacgggacaaattccgatttccagcatgagttgacagatatcaccgtatgtacaaaagccaaattatggctggcaaaacggcagaacccctgcctcgtgaccagagctgtgtacattgacatcttgttcctactaacttgttgtctcaataggtctgcaaaagacaatcagcccgtactggagtccctcggtttctgggaggaggtcagagggataatctctgggtcagaactcatcacagggttcccatgggcgttcaaggtgcctgggttacctcagtatcttcagagtctgaccagactggccatagccgcggtctgggccgccgcagcgaagagcggcgaaagggaaacgaacgtgcctatctccttttcccagctactggaaagcgcatttcccgaggttaggtcactgacactggaagcactattagagaaatttcttgctgcggcctccggtctgggtgaaaagggagtcccacccctgctgtgtaacatgggtgaaaagttcctgctgcttgccatgaaggagaaccatcccgagtgcttttgtaagatccttaaaattcttcactgcatggatcctggggaatggctgccgcagactgagcattgcgtgcacctcactcccaaggaattcctaatctggactatggacatcgcatcaaatgaaagaagcgagatacagtcagtcgcccttcggttggccagcaaagtcattagccaccacatgcagacttgcgtggaaaatcgtgagcttatagctgccgagttgaaacaatgggtacagcttgtgattctgagttgtgaggaccacctgccaactgagtctcgactggctgtagtagaggtcctgacctcaacaaccccactgtttctcacaaatccgcatcctatcctcgaactccaggacaccttggctctgtggaagtgcgttcttacgctgctgcaatcggaggagcaggctgtccgggatgcggccaccgaaactgtgactaccgctatgtcacaggagaacacgtgtcaatccactgaattcgccttctgccaggtcgacgcatcaattgccctggccctcgcactcgccgtactgtgtgatctgctacaacaatgggatcaattggctccgggtctgcctatcctcttgggatggctgctgggggagtcagatgatctggtagcctgcgtcgagagcatgcatcaggtggaggaagattatctgttcgagaaagcagaagtcaatttctgggctgagacactcatatttgtaaaatacttatgtaaacatcttttctgtttgctgtcaaaatccggctggcgaccaccaagcccagaaatgttgtgccacctgcagagaatggtaagcgaacagtgtcatcttctgtcccaatttttccgggagctgcccccagccgctgaattcgtcaagactgtggaattcacaagacttagaatccaagaagagcggaccctagcttgcctacggttacttgctttcctcgagggaaaagagggagaagacacattagttctgagcgtttgggacagctacgccgagagccgccagctcacattgccccgtaccgaagccgcctgttag

SEQ ID NO: 17671 - DNA, 5862 bp, synthetic construct
  misc_feature 1..5862: note = Description of Artificial Sequence: Synthetic coding sequence
  source 1..5862: mol_type = other DNA
atgggggtcaaaaagaaaaaagagatgcaggtagcggcattgacaatctgccaccaggatctagaaaccttaaagtcattcgccgatgtggaggggaagaatctcgctagtctcttgctacactgcgtgcagcttacagacggagtttcccaaatccactatataaagcagatagttccactgctggagaaagccgacaagaatgggatgtgcgaccctaccatccaatcctgcttggacatccttgctggaatttatctgagtctgtccttgaaaaatcctttgaagaaggtgttagctagctcgctaaactccctgccggatttttttctgccagaagcaatgcacaggttcacaagtaggctgcaggaagagctgaacacaactgatctctactcatatcgaaaggtgactgacaatataagctcctgtatggaaaactttaacttgggccgggcctcagttaacaatctgctgaaaaacgttctgcatttccttcagaagtccctaatcgagattcttgaggagaatcgcaaatgcgccgggaaccatataattcagacacaactgatgaatgacctgctggtcggaatcagggtgtctatgatgttggtgcaaaaggtgcaggattttcagggcaacctgtggaagacctctgactctccaatatggcagaatatgtgtggcctgttatctatttttacaaaagtcctgtcagatgatgaccttctccagaccgttcagagtacatccggactggctatcattttgtttatcaaaaccatgttccaccctagtgagaagatcccacatttgatcagctctgtcttactgcgctccgttgattgtaccagcgttcccgaatggttcatgtctagctgccggagtctgtgttgtggcgatatatcccagagtgctgttctgtttttatgccaaggaaccttagctatgctggactggcaaaacggctcaatgggaaggagcggcgaggcattactgctcgataccgcacacgtactgtttactctaagctcacagattaaggagcctacgctggagatgtttctgagccggatccttgccagctggacaaattctgccatccaagtcctcgagtcttcctccccctcgctcactgactccctcaatggcaactcaagcatcgtgggccgcctgttagagtacgtatatacacattgggaacaccccctcgacgcgctccgccaccaaacgaaaattatgtttaagaatttactccagatgcacaggctgaccgtagagggggcggattttgtgccagacccgttttttgtcgaactcaccgaaagcctcctgcggctcgagtggcatatcaagggaaagtacacatgcctgggatgcctggtggagtgtatcggggttgagcacatcttggcaattgataaaacgattccctcacagatactagaagtcatgggcgatcagtctctcgtgccgtacgcatccgacttgttagagaccatgttccgtaatcataagtctcatctcaagtctcaaactgcagagtcctcttggatcgaccaatggcatgaaacgtgggtgtccccgttattattcatcctttgcgagggaaacctcgaccagaaaagctacgtgatagattactatcttcccaagctgctgagctatagtcccgagtctctgcagtatatggtgaagattctccagaccagtatcgacgctaaaacagggcaggagcagagcttccctagtctcggcagctgcaactcccggggcgcattaggggctctgatggcttgcctgagaatagccagagctcacggacatctacagtcggcaaccgatacttgggaaaacctggtgtctgacgctcgtattaagcaggggctgattcaccagcattgccaggtgcgaattgacacgctcggcctgctctgcgagagcaaccgctctaccgagatagtttctatggaggaaatgcagtggattcagttctttattacatataacctgaacagccagagtcctggcgtgcggcagcaaatttgcagtctactcaaaaagctcttttgtcgaattcaggagagcagccaggttctgtacaagcttgagcagagtaaatcgaagagggaaccagagaatgagctcaccaaacagcacccttctgtctcactgcagcagtacaaaaatttcatgtcttcgatttgtaattctctgtttgaggccctcttccctgggagcagctattccacccgctttagcgctctgaccatcttgggatccatcgccgaggtcttccacgtacccgagggaaggatttatactgtttaccagctgagccacgacatcgacgtggggagatttcagactctcatggagtgtttcacatcgaccttcgaggacgtgaagatactcgcctttgaccttttgatgaagctgtcaaaaactgcagtgcactttcaggattcaggaaagctgcagggtctgttccaggcggctctggagctgagcaccagtacaaaaccatatgactgtgtcacagctagttacctgctcaatttcttgatttggcaagatgcgttgcccagttccctcagtgcttacttaacccaacaagtagcttgcgacaacggggaccgccctgcagcagtcgtagagcggaatacactgatggtgatcaagtgtctgatggagaatctggaggaggaagtgtctcaggcagaaaattccctactgcaagcggccgccgccttccctatgtatggaagagtgcactgtattacaggcgccctgcagaagctatccctgaactcactccagcttgtctccgagtggaggccggtcgtcgaaaagctcctgctgatgtcctaccgactgagtacagttgtgtcccctgtgatccagagctctagtccagaaggcttaatcccaatggacacagacagtgagagtgcatctagactgcagatgattctcaatgagattcaacctcgagacaccaacgattattttaaccaggctaaaattctcaaggagcacgactcctttgacatgaaggacctgaacgcgtcagtcgtaaacattgacaccagcactgagatcaaagggaaagaggtcaaaacctgcgacgtgaccgctcagatggtgcttgtctgctgttggcgcagtatgaaggaggtggccctgttgctcgggatgctgtgtcagctgctgcctatgcagccagtacccgagtcttctgacggactactgactgtggagcaggtcaaagaaataggcgactacttcaagcagcatctcctgcagagcagacatagaggagccttcgaattggcctacacgggcttcgtcaagctcacagaggtcctgaacagatgcccaaatgtcagcctgcagaaattaccggagcagtggctatggtccgtcttagaagagatcaaatgcagcgaccctagctctaaactatgcgcgacccggcgctctgccggcatcccattctacatccaggccctcctcgcgagcgagcctaagaaaggaagaatggacctgcttaaaatcaccatgaaagagctgatttccctcgctggcccgaccgacgacattcagagtacagtgccgcaggttcacgctctgaacattctgagggcccttttccgggatacacgtctaggcgagaacatcatcccctacgtggccgatggcgccaaggccgcaatcctgggcttcacctcccctgtatgggccgtaagaaacagctctacgctgctgtttagtgctctgatcaccaggatcttcggggtgaaaagagccaaagacgaacactctaaaaccaatagaatgaccggcagggagttcttcagcaggttcccagaactatacccgtttctccttaaacaactggagacggttgccaatactgtggactctgatatgggggagccgaaccgtcacccctcaatgtttttactgctcctggtcctggagcgactttacgcaagtcctatggacggaacctcttctgcactttctatgggaccttttgtcccttttatcatgaggtgcggtcacagccccgtctaccactcacgagagatggcagctagagccttggtaccattcgtgatgattgatcacatccccaatacaatacgaacactcctgtcgaccctgcctagctgcacagatcagtgcttccgccagaaccatattcacggcacgctccttcaagtgttccacctgttgcaggcgtacagcgattccaaacatggtacgaattccgatttccagcacgagctcactgatattacagtgtgcacaaaagcgaagttgtggctcgccaagcggcagaatccatgcctcgtcactcgcgccgtgtacatcgacattctctttttactgacatgctgccttaatcgatcagctaaggacaaccagccggtcctggaatccctcggcttttgggaggaggtgcgtgggatcatctcgggctctgagctgattactggctttccctgggctttcaaagtccccggactcccccaataccttcaaagcttaacccggttggcgattgccgcagtatgggcagctgcagccaagtccggggaacgggagaccaacgtgccaatttcgttcagtcagctgctggaatcagccttccctgaggtgcggtccctgaccctagaagccctgctcgagaagttcctcgccgccgcttcagggctgggagaaaagggcgtcccaccacttctatgcaatatgggcgagaagtttctgttgctggccatgaaggaaaatcacccagagtgcttctgtaaaatccttaagatactccattgcatggaccccggcgagtggttgccacagacagagcattgtgtccacctcaccccaaaggagtttctgatctggacaatggacatcgcctccaatgagcgctccgagatccagtctgtggctctgcggttggcttcgaaagtgatttcccaccacatgcaaacatgtgtggaaaaccgggaactcattgccgccgagttaaaacagtgggttcagcttgtgattctatcatgcgaggaccacctcccaactgaaagtaggctggcagtggtcgaagttttgacatccaccactccgctctttctgaccaaccctcacccgatcttggagctgcaggacacactcgctctgtggaaatgtgtgttgaccctgctccagagtgaagaacaggctgtgagagacgcagcaacagagacagtcaccacagcgatgtcacaggaaaacacctgtcaatccacagagttcgctttctgtcaggttgatgccagcatcgctctggccttggccctggctgttctgtgcgatttgttgcagcagtgggaccaattagcaccggggttacccatcctgctgggatggctcctgggcgaaagcgatgacctggtggcctgtgtggagtctatgcaccaggtcgaggaggactacctgttcgagaaggccgaggttaacttctgggccgaaactctgatctttgtgaaatacctctgcaagcatctgttttgcctgctgagcaagagtgggtggaggccaccatccccagaaatgctttgtcacctgcagcgcatggtatccgagcagtgtcacctcctctcacagtttttccgtgaactccccccagcagctgaattcgtgaagaccgtggagtttacgcggttaaggattcaagaggagaggactctggcttgcttaagattgctggccttcctcgaggggaaagaaggtgaggacacgttagtgctctccgtttgggatagttacgcggagtcaaggcagctaacccttccccgcaccgaagcagcttgttag

SEQ ID NO: 17672 - DNA, 5862 bp, synthetic construct
  misc_feature 1..5862: note = Description of Artificial Sequence: Synthetic coding sequence
  source 1..5862: mol_type = other DNA
atgggtgtgaagaagaaaaaggagatgcaggtcgctgcccttacgatatgtcaccaggacttagagaccctgaagagtttcgccgacgtggagggcaaaaacctggcgtcactgcttttacactgtgtgcaactaacagatggggtttctcagatccactacattaaacagatcgtgccccttctggaaaaagccgataaaaacggcatgtgtgatcccaccatccagtcttgtttggacattctagcaggaatctacctatctctctccctcaagaaccctttaaaaaaagtgctcgccagtagcttgaattcacttcctgacttttttctgccagaggctatgcacaggttcacgtcccgcttgcaggaggagcttaacactactgacctttattcctatagaaaggtaaccgataacatctcttcttgtatggaaaatttcaacttaggtagggcctccgtcaacaacctgctcaaaaatgtcctgcattttctccagaagagtctgattgaaattttggaagaaaaccgtaaatgtgcaggtaatcacattattcagacacagctgatgaatgatctgttggtcggtattcgcgtttccatgatgctagtgcaaaaggttcaggatttccaggggaacctgtggaagacgagcgatagtcccatttggcagaacatgtgcggactgctctcaatcttcacaaaagtgctgtcagatgacgacctgctccaaactgtccaatcaactagcggccttgccataattttgttcattaagaccatgttccatcctagtgagaaaatcccgcatctcatctcatccgtgctgctccggagtgttgactgcacatcagtcccagagtggtttatgagctcatgcaggtccctatgctgcggagacatctcccagtctgcagtattgttcctgtgtcagggcactcttgctatgcttgactggcagaacgggtccatggggcgaagcggcgaggcactgcttctggacactgcccatgtgttattcaccctgagctcccagatcaaggagcccactctggagatgttcctgagcagaatcctggccagctggaccaattcagccattcaggtcctggaatcctctagcccgtccttaacagattcactgaacggcaacagttcgatcgttggcagattgcttgagtacgtatacacacactgggagcacccattggacgccctccggcatcagaccaaaatcatgtttaagaatctgttgcagatgcatcgtctgaccgtcgagggggcggactttgttccagacccctttttcgtagaactcaccgagtcactgcttaggctagagtggcatataaagggaaaatacacgtgcctgggatgtctggttgaatgcataggagtcgagcacatcctggcgatcgataaaaccatccctagccaaatcctggaggtgatgggtgaccagagcctagttccatacgcgtcagatctgctggaaaccatgttccgaaatcacaagagccatctaaagagtcaaactgccgagtcctcatggattgatcaatggcacgagacctgggtgagcccgctgctgtttattctctgcgagggcaacctggatcaaaaatcatacgttatagactattacttgccaaagttactctcttactcacccgagtcactacagtatatggtaaaaatacttcagactagtatcgatgctaagacaggccaggagcaatcctttccaagcctgggctcctgcaactcacggggtgcccttggcgcgctcatggcgtgcctgcggattgcccgcgctcacggacatctgcagtccgccacggacacctgggagaatctggtgtcagacgcgaggattaaacaggggctgatacatcaacattgtcaagtcaggatcgacacactaggactactgtgcgaatcgaaccggtctacggagatcgtctctatggaggaaatgcaatggatccagttttttatcacatataacctgaattctcagtcccccggtgtgcgacagcagatctgttcactgttgaaaaagctcttctgcaggatccaggagagctcacaggtcctctataagctggagcagtcaaaaagcaagagggagccagaaaatgagttgacaaaacagcacccctccgtgtccttgcagcaatataagaacttcatgtcttcaatctgtaattcgctatttgaggccctatttcctgggagcagctactcaacacgattcagtgccctcacgattctgggttccatcgcggaagtattccatgtgccagagggcaggatctatacggtgtaccagctctctcacgacatcgacgtcgggaggtttcagaccttaatggagtgcttcacctccacatttgaggacgttaagatcctggctttcgacctgctgatgaaactgagcaagacagcagtccacttccaggattctggtaaattgcagggcctgttccaggcggccctcgagctctccaccagcactaagccatatgactgcgtgactgcctcatatctcctgaacttcttgatttggcaagatgccctgcctagcagcctttccgcttatctcacacagcaggtcgcgtgtgataacggcgacaggcctgcggcagttgtggagagaaataccctgatggtcatcaaatgcctaatggagaacctggaggaagaagtcagccaagcagaaaacagtctgctccaagccgctgccgcctttcccatgtatggacgagtccattgtataactggggcactgcaaaagctttcactgaatagccttcagctggtgagtgagtggcgaccagtggtggagaagctgttattaatgagctaccggctatccaccgttgtatcccctgtcatccaatcctcttctccagaaggacttattccgatggataccgattccgaatcagccagcagactccagatgatattgaacgagatccagccccgcgataccaacgactactttaaccaggccaagatcctgaaagagcacgattccttcgatatgaaagacctcaacgctagcgtggtaaatatcgacaccagcacagagataaagggcaaagaagtgaaaacttgtgatgtgaccgcccagatggtgctggtttgttgttggcgctcaatgaaggaggtggcactattactaggcatgctgtgtcagttgttgccaatgcaacctgtaccagaaagctccgatggactgttaacagttgagcaagtgaaagagatcggagactattttaagcaacacctcctgcagtcaaggcacagaggcgcgtttgagttggcatacaccggattcgtcaaactgactgaggtccttaatcgctgtcctaacgtgtctcttcagaagttacccgaacagtggctatggagtgtactagaggagattaaatgcagcgatccatcaagcaagttatgtgccacacgcagatctgccggaattcctttctacatccaagcgcttctggcctccgaacctaaaaaggggagaatggacctgctgaaaatcacaatgaaagagctcatctcactcgcagggcctacagacgatatccagagcactgtgcctcaggtacacgcgctaaatatccttcgggcccttttcagggacacacggttgggtgagaacattatcccttacgtggctgatggcgccaaagctgctatcctcggcttcacttcgcccgtttgggcagtgcggaattcttccacattgctcttcagcgccctgattacccgaatctttggagtgaagcgggctaaagatgaacattccaagactaatcgcatgaccggcagagaattcttttctcgatttcctgagctgtacccatttctgctaaagcagctcgaaacagtcgctaacaccgttgactctgacatgggtgaacccaacagacacccctcgatgttcttgctactgctcgtgctcgagaggttgtacgccagtccaatggacgggacatcaagtgctctgtccatgggcccattcgtgccttttattatgagatgtgggcacagtccggtgtatcattcccgagagatggcagctcgggccctggtgccatttgttatgattgaccacattcccaacacaattcgcacactgctctctactcttcctagctgcaccgatcaatgcttcaggcagaatcacattcacggcacacttctccaggtattccatctgctgcaagcatacagcgactccaagcatgggacgaattccgactttcagcacgaactaacagatataacagtgtgtacaaaagctaaattatggctcgcaaagcgccagaacccttgcttagtgacaagggcagtctacatcgatatcctttttcttctgacctgctgtcttaaccgtagcgccaaggataaccagccagtgctcgaatcccttgggttttgggaggaggtgcgaggaatcatcagtgggagtgaactgattacaggatttccttgggcattcaaagtccctgggttaccacagtatctccagtcacttacacgactggctatagccgcggtgtgggcagcagctgccaagagtggtgaaagagagaccaacgtgccaatttctttctctcagcttctggagagcgcttttcccgaagtgaggtccctgactctggaggcactgctggaaaagttccttgcggctgcgagtggccttggagagaaaggggtccctcccctcttgtgcaacatgggcgagaagttcctcctgctagctatgaaggagaaccaccccgaatgtttttgcaagattctgaaaatcttgcattgtatggaccccggcgagtggctgccacagacagagcattgcgtgcatctgacccccaaggagtttctcatctggacaatggatattgccagcaacgagcgctcggaaattcagagcgtcgcactgcgtttggcctccaaggtgatctcccatcatatgcagacatgcgtcgagaatcgtgaactcatagctgctgagctgaagcagtgggtgcagttggtgattctgtcttgcgaggaccatttgcccacagaatctcgtctggccgtggtggaggtgctgacttctaccacccctctattcctgacgaatccacatcctattcttgaactccaggatactctggccctgtggaagtgtgttctcacactcctgcagtccgaggagcaggccgtccgtgacgctgccactgaaactgtgaccacggctatgtcacaggagaatacatgtcagagtacagagttcgccttttgccaggtggacgcgtccatcgcactagctttagcgttagcggttctgtgtgatctcctccagcagtgggatcagttggcccccggcctgcccatcctgctcgggtggctgctaggagaatctgacgatttagtagcctgtgtggaaagcatgcaccaagtggaggaagattatctatttgagaaagccgaagtgaacttctgggccgaaaccctgattttcgtcaaatacctgtgcaagcacctgttctgtcttcttagcaaaagtggatggaggcccccaagtcccgagatgctctgccatcttcagcgaatggtctcagaacagtgccacctgctgtcccaattcttccgtgagctccccccagccgccgaatttgtgaaaaccgttgagtttacccgtctgagaatccaagaggagagaacacttgcttgtttgagactcctagcctttctggaaggaaaggagggcgaagatacactggttctctccgtgtgggattcatacgcggaatcgcggcagctaaccctgcctaggaccgaagctgcttgctag

SEQ ID NO: 17673 - DNA, 4905 bp, synthetic construct
  misc_feature 1..4905: note = Description of Artificial Sequence: Synthetic coding sequence
  source 1..4905: mol_type = other DNA
atgagcagttgtagatctttgtgctgcggagacatcagccagagcgcagtgttattcctgtgccagggaacgctggcaatgttagactggcaaaacggcagcatgggcaggtccggtgaggctttgctgctcgatacggcacatgttctgttcaccctgtccagtcaaataaaggagcccaccttggagatgttcctgtctcggatactggcgagctggactaactctgccatacaggtcctggagagctcatcaccttcactgactgactctctcaacggaaactcaagcattgtcggtcgattactcgagtacgtttatactcactgggagcacccacttgacgctttaagacaccagactaaaataatgttcaaaaatctgctccaaatgcaccgcctaaccgtggagggagccgattttgtccctgatcctttttttgtagagctcacagagtctctgttgaggctagaatggcatatcaaaggtaagtatacctgcctagggtgcctagtggagtgcataggcgtggagcatatcctggctatagataaaacaatcccctcacagattctggaagtcatgggtgatcaaagtctcgtgccatacgcaagcgacttgttggaaactatgttcagaaaccacaaaagtcacttgaagtctcagaccgcagagtcatcctggatcgaccagtggcatgagacttgggtgagccctctcttgtttatactttgcgagggcaatctcgatcaaaaatcttatgtcattgactactatcttccaaagctcctgagctacagtcctgaaagccttcagtacatggtcaagatcctgcagacttctatcgatgcaaagacaggccaggagcaatccttccccagcctggggagctgcaactctcgaggggcacttggtgctctaatggcctgtctcagaatcgcccgcgcacatgggcatctgcagtcggctactgatacatgggagaacctggtatcggatgcaagaattaagcagggcctgatacaccagcattgccaagtccgcattgacacactgggtctgctctgcgaaagtaatagatccaccgagattgtatccatggaggaaatgcagtggatacagttttttattacatacaacctgaactcccagtctccgggggtgcggcaacagatttgctctctgctgaagaaattgttctgcaggatccaggagtcttcccaagtgctctacaaacttgagcagtcaaagagcaaacgtgagccagagaatgagctgacaaaacagcatccttcagtgagtctgcagcagtacaaaaactttatgagctccatttgtaattctctcttcgaagcactctttcctggttcatcttactccacgcggttcagcgcattaaccatcctgggatcgatagcggaagtcttccatgtgcccgaggggcgcatttatacagtctatcagctgtcccatgatattgatgtgggaaggttccagactctgatggagtgtttcactagcactttcgaagatgtgaagatcttggcctttgatctgttaatgaaactgtctaagacggcggttcacttccaggatagcggcaagttgcagggacttttccaggccgccttggagctgagtactagcaccaaaccgtatgactgcgtcacagcaagctatttattaaactttctgatctggcaggatgccctgcccagctccctatcggcctatctaacccagcaggtggcgtgcgataatggcgatcggcctgctgccgtggttgagcgcaacacgctcatggtcattaagtgccttatggagaatctggaggaggaggtgagccaggcagagaactctctgttacaagctgccgccgctttcccaatgtacgggagggtacactgcatcactggcgctcttcaaaaactgtccctgaatagcctgcagctggtgtctgaatggaggcctgttgtagagaagctgctactaatgtcctatagactaagcaccgtcgtctctccagtgatccagagttcgtcaccagagggcttgatcccaatggatactgattctgagtctgcatccagattacagatgatcctcaatgagattcaacctagagacacgaatgattacttcaaccaagccaagattctcaaggaacacgacagcttcgatatgaaagatctgaatgcctcagtggtcaacatcgatacttcaacagagatcaaaggaaaagaagtaaagacatgcgacgtgacagctcaaatggtgcttgtttgttgctggcgatctatgaaggaagtcgcgctcctattgggcatgctctgccaactccttccaatgcagccagtgcccgaatcatcggacgggctccttaccgtcgagcaggttaaggagattggtgactattttaagcagcacctactgcaaagccggcatcgcggggcttttgagctggcctatacaggcttcgtaaaactgacggaggttttgaaccggtgtcccaacgtgagtctgcaaaagctccctgagcagtggctgtggagcgtgttggaagagatcaaatgtagcgatccttcttctaaattatgtgctacccgcaggtctgccgggatccctttttacatccaggcccttctagcctccgagccgaagaagggcagaatggacctgctgaagatcactatgaaggagttaataagcttagccggtccgactgacgatattcagtcgaccgtccctcaggttcacgccctgaatatccttagggccttgttccgtgacactcgtctgggcgaaaatattattccctatgtcgccgatggggcaaaagcagcaatactgggatttacttcaccagtttgggcttcccagatgacgggacgggagtttttctcacgattcccagagctttatcccttccttctcaagcagctcgaaaccgtggctaatactgtggattccgatatgggtgagcctaatcgccacccctccatgtttctactcttattagtactcgagcgactctacgcatctcctatggatggtacatcctcggccctgagcatgggacctttcgtgcctttcatcatgagatgtgggcatagcccggtttaccactctcgcgagatggcggcccgcgccctcgttccctttgttatgatcgatcatattcctaatactatccgaacccttctgagcacgctaccttcctgcacagaccagtgcttccggcaaaatcatatccacggtactctgctccaggtattccatctactgcaggcctatagcgattccaagcatggcaccaatagcgactttcagcatgaactcaccgatatcaccgtgtgcacgaaggctaagctctggctggccaagcgccagaacccatgccttgtgaccagggccgtgtacatcgacatcttgttcctactgacttgttgccttaatcgtagcgcaaaggacaatcaaccagttcttgagtcgctcgggttttgggaagaagtccggggaatcatttccgggtccgaattgatcacaggcttcccttgggccttcaaggtacctggccttcctcaatacctgcaaagtctgaccaggctcgccattgctgccgtatgggctgcggccgccaaatccggtgagcgggagaccaacgttcccatttctttttcacagctgttagagtccgcttttcccgaggtccgctccctcactctggaggccctcctggagaagtttctggccgctgcaagtggccttggtgagaaaggagtgcctcctttattatgtaacatgggagagaagtttctcctactggccatgaaggagaaccacccagagtgcttttgcaagatattaaagatcctccactgcatggaccccggtgagtggctgccccagacggagcactgtgtgcacctaacaccaaaagagtttttaatctggactatggacattgcctcgaatgaacgctccgagatacagtccgtcgcattgcggctggcaagcaaagttatttcccaccatatgcaaacctgtgtggaaaatagagagcttatcgcagccgaactgaaacagtgggtccagttggtgatactgagctgtgaagaccacctccccacggaatctcggctcgcagttgttgaagtcctcactagcaccacccccctgtttctgacaaatcctcaccctattctggagctccaggacaccctcgcgctgtggaaatgcgtgttgaccctgctgcagtccgaggaacaagccgtgagggatgccgccaccgagactgtaacaactgccatgagtcaagagaatacctgtcagtcaaccgagttcgccttctgtcaggtcgacgctagcattgctttagcgctcgccctggccgtgctgtgcgacctgctgcaacagtgggatcagctggcacctgggctgcccatcctactgggatggctgcttggggaatccgatgacctggtggcatgtgtggaaagtatgcatcaggtggaagaagactacctcttcgagaaggctgaagtgaatttttgggcagaaacgctgatcttcgttaagtacctgtgtaagcacctgttttgcctcctgagtaagagcgggtggcgccccccctcgcccgaaatgctctgccatctgcagcggatggtgtccgagcaatgtcatctgctttcacagttctttcgggagctgccgcccgccgcagaattcgtgaagacggtcgagttcactaggctgcggatccaggaggaaagaacactggcatgcctccgcctgctggctttcttggaaggaaaggagggagaggacactcttgttctttctgtatgggactcttatgctgaaagccgccaattgactcttccccggacggaggcagcatgctag

SEQ ID NO: 17674 - DNA, 2685 bp, synthetic construct
  misc_feature 1..2685: note = Description of Artificial Sequence: Synthetic coding sequence
  source 1..2685: mol_type = other DNA
atgggtgtcaagaagaaaaaagaaatgcaggtagccgccctcacaatttgtcatcaggacctcgaaactctgaaaagctttgccgacgtcgagggcaagaacctcgcatccttgttgctgcactgtgtgcagctgaccgacggcgtttcccaaattcattacataaagcagattgtcccactccttgaaaaagcggataagaacggaatgtgtgatccaaccatccagtcttgcctggacatccttgccgggatttatctgtctctgtcactaaaaaacccccttaaaaaagtcctagcatcatccttaaatagtcttccagatttctttctgcccgaggctatgcaccgcttcacatccagactgcaggaggagttaaacacaaccgacctctactcctaccgaaaggtgaccgataacatatctagttgcatggaaaattttaatttggggcgggctagcgtaaataacctcctgaagaacgtgctccacttcctgcaaaagagcttgatcgagatcctcgaagagaaccggaagtgtgcaggaaatcatatcatccagacgcaactgatgaatgacctgctcgtggggatccgtgtgtccatgatgctcgtgcagaaagtacaggactttcaggggaatctgtggaaaacatccgactccccaatatggcagaatatgtgtgggctgttgtctatcttcacaaaggttctgagcgacgacgatctgctccagacagtacaaagtacttctgggctggcaattatactgttcattaaaactatgttccacccaagcgaaaaaattccacacttgatctcgagcgtgctgctgcgctccgtggattgcacttcggttcccgagtggttcatgagctcttgcaggtccctgtgctgcggcgatattagccagtccgcggtgctgttcctgtgccagggtacactggccatgcttgactggcagaacggttcaatgggccgctcaggagaggccctcctgctggacacagcccacgtgctgttcaccctatcttcccagatcaaagaaccaaccctcgagatgttcctgtccagaatacttgcctcatggaccaattccgcaatacaagttctggagtcatccagcccttctctcacagactcactcaacggaaatagttctatcgtgggccggctgttggagtacgtatatacccattgggaacatcctctcgacgccctcagacaccagaccaagataatgttcaaaaatctccttcagatgcacagattgacagtcgagggggccgacttcgtgcccgaccccttcttcgtcgagctcacagagtcactgttaagactggaatggcacatcaaaggtaagtacacttgtctcggctgcctggtcgagtgtattggggtagagcacattctggccatcgataagaccatcccgagccagatactggaggtgatgggagatcagagtctcgtgccatatgcaagcgacctgttagaaactatgtttagaaaccacaagtcccacctcaagagtcagactgccgagtccagctggatcgaccaatggcacgagacttgggtgagcccgctcctgttcattttatgcgagggaaaccttgaccagaagagttacgttattgactattacttacctaagctgctatcctattcacccgagtctctccagtacatggttaagatcctgcaaacgtccattgacgccaagaccggccaggagcagagcttccctagcctgggcagttgcaactctaggggcgctctgggcgcgctgatggcttgcctccggattgcccgagctcacggccatttgcagagcgcgacagatacttgggagaatctggtgtcagacgcaagaattaagcaggggctgattcatcagcattgtcaagtgcgtattgatactctgggtcttttgtgtgaaagcaacaggtctacagagatagtcagtatggaagagatgcaatggattcagttttttataacctacaatctgaacagtcagagtcctggtgtgcgccagcagatctgtagcctgctgaagaagctcttttgcagaattcaggagtcatctcaagtactgtataagttggagcaaagtaagagtaagcgcgagccagaaaacgaactaaccaaacagcatccaagcgtgagcctccagcagtataaaaacttcatgtcctcgatctgcaactccctgtttgaggcactgtttccagggagctcatattctacacgattcagcgctctgaccattctgggaagtattgccgaagtgtttcatgtaccagaagggcgaatctatactgtgtaccagcttagccatgatatcgacgttggaaggtttcaaaccctgatggagtgctttacctctacctttgaggacgtgaaaatcttagcttttgatctgctaatgaagctgtcaaaaaccgccgtgcactttcaggactccggaaagctacaaggactcttccaggccgccctggagctctccacaagtacgaaaccatatgattgtgttaccgcctcatacttgctgaactttctgatttggcaagacgctctgccatcctctctctccgcctatctgacacagcaggtcgcgtgcgataatggcgaccggccagccgccgtagtggaaagaaacacgttgatgggcctgtactag

SEQ ID NO: 17675 - DNA, 2268 bp, synthetic construct
  misc_feature 1..2268: note = Description of Artificial Sequence: Synthetic coding sequence
  source 1..2268: mol_type = other DNA
atgagcggtactaatctggacggcaacgatgaatttgatgagcaactccggatgcaggagctctatggcgacggaaaagacggggatacccagaccgacgcgggcggcgagcctgacagtctggggcagcagcctacagacacaccatacgaatgggacctcgacaagaaggcctggtttccaaagattactgaagatttcatcgcgacttaccaagccaactacggcttttctaatgatggcgcttcgtctagcaccgcgaacgtggaggacgtccacgcacgcacagcggaggagcccccacaggagaaagccccagagcccactgacgctaggaagaagggcgagaagcgcaaggccgaatccggctggtttcatgtcgaagaggatcggaacacaaatgtctacgtttcaggtttgccacctgacataaccgtggacgagttcattcagcttatgagtaaatttggaataataatgagagacccgcagacagaagagttcaaggtcaagctgtacaaggacaatcaggggaatctcaaaggagacggactatgttgctacctgaaaagggagtctgtggagctggccttgaaactcctggatgaggacgagatccgcggctacaagctgcacgttgaagtagccaaattccaattgaagggcgagtatgacgcttccaaaaagaagaaaaagtgtaaggactataagaaaaaactgagcatgcaacagaaacagttagattggcggccagagcggcgggctggtccaagcagaatgagacatgaaagggttgtgattattaaaaatatgttccacccgatggattttgaagatgacccattggtactgaatgaaatcagagaagaccttcgggtggagtgctctaagttcgggcagattagaaagctactcctttttgaccgccatccagacggagtggcttccgtgagtttcagggacccagaggaagcagactattgcattcaaacactggacggcagatggtttggggggaggcaaataactgcccaggcgtgggatggcactactgattatcaggtggaagagaccagtcgcgaaagggaggaaagactcaggggatgggaagcattcctgaacgcccctgaggccaaccggggactccggagatctgatagcgtaagtgcctccgaacgggcgggcccttctagagcccgacatttcagcgagcaccccagtactagtaagatgaatgcccaggagactgccaccggtatggcttttgaggaacctatcgatgagaagaaatttgaaaaaacagaggacgggggcgagtttgaagagggtgccagcgagaacaatgccaaggaatcctctccggagaaagaggccgaagagggttgtccagagaaagagtcagaggaagggtgcccgaagcggggatttgagggaagctgcagccagaaagagtcagaagagggcaaccccgtgagaggatctgaagaggactccccgaaaaaggagtcaaagaagaaaaccctcaaaaacgactgcgaggagaacggcttagccaaggagtccgaggacgaccttaataaggaatccgaagaagaggtcggtcctaccaaagagtctgaggaagacgactctgagaaggagtccgatgaagattgtagcgagaagcagtctgaagacggatctgagcgcgagtttgaggaaaatgggctggaaaaagacctcgacgaggaagggtccgagaaagagttgcacgaaaacgtgctagataaggaattggaggaaaacgacagtgagaacagcgagtttgaggacgacggctctgaaaaggttctggatgaagagggatccgaacgcgaatttgacgaagacagcgatgaaaaggaggaagaggaggatacttatgaaaaggtctttgacgacgagtctgatgaaaaagaagacgaagagtacgccgacgaaaagggtttagaggccgcagataagaaggcagaggagggcgacgctgatgaaaagttgtttgaagaatctgacgacaaggaggatgaagatgctgacggtaaagaggtcgaagacgcggatgaaaagttattcgaggacgacgacagcaacgagaagttattcgacgaagaggaggacagcagtgagaaactgtttgacgatagtgatgagagaggcaccctaggcgggtttggcagcgtggaagagggccccctaagtacagggtcttcattcatcctcagctctgacgatgatgacgacgacatttag

SEQ ID NO: 17676 - DNA, 432 bp, synthetic construct
  misc_feature 1..432: note = Description of Artificial Sequence: Synthetic coding sequence
  source 1..432: mol_type = other DNA
atgaccaaaatgtataagggattccaggcactcggagatgctgcagatattagattcgtttacacccctgctatggaatccgtctgtggttatttccacagatctcataaccgtagcgaagagtttctgatcgcaggcaaattgcaggacggactgctacatattaccacatgtagttttgtggctccctggaactctctgagcttggcccagcggagaggttttacgaagacctatactgtaggatgtgaagagtgcactgtgtttccatgtctgagcatcccatgcaagctgcaaagcgggactcactgcttgtggacagaccagctgttgcagggctctgagaagggatttcagagtagacacttagcatgtcttcccagggaacccgggttgtgcacgtggcagtccctcagatcacagattgcctag

SEQ ID NO: 17677 - DNA, 786 bp, synthetic construct
  misc_feature 1..786: note = Description of Artificial Sequence: Synthetic coding sequence
  source 1..786: mol_type = other DNA
atgccactgacctctggctcctcaacaccccctccctggagagtgtccgcagatacttcaacagggcctactacagccgctcggtctttcagcttgctggtgaggcacaggccaagagccctgtgccatacaaaccagagtctgggacgagggttggccacgactagaggacgcggctctgatgggaacgggccaacaggtaatggtgatcatcccaatttctccctgagcgagggccgagcatttggaagcctggctgctcagcctatcacttcctgtctgtctgtgcccgcgccgccattctctctcgggaaactgcaggacggcctgctgcacattactacctgctctttcgtcgccccttggaattcgctctctcttgctcagagacgtggattcaccaaaacttatacggtgggatgtgaagagtgcactgtaagtgcctggactttaacttctaatggcagatctttccccggacccttccccaaaagctgggcgtgcttccttctcccactcgccattctctgtccttgcggctgcagccctactctgagagccgttccagatctgtcatgctatttccccaaaccagagaccgctcccctgcaaattctggctgccccttttccttgtgtccaatacagagtcataacctgcccatctctcgtgccgcttattctcccctgcgattactctgttatccccctcccagtccccgaacccccaggtctcttcctcggctcccccgagtgttcccctagaacacagtcagcagtgccatag

SEQ ID NO: 17678 - DNA, 291 bp, synthetic construct
  misc_feature 1..291: note = Description of Artificial Sequence: Synthetic coding sequence
  source 1..291: mol_type = other DNA
atgcccgtatactcggcatggccagctgaaccaacaatggcaccatttgaacccttggcttcaggaattctgctcctgctgtggctgatcgccccctcccgggcttgcacttgtgtgccaccccacccccaaaccgctttttgcaactccgacctggtaattagagccaaattcgttgggactcccgaggtcaatcagactactttatatcaaaggtacgaaatcaaaatgaccaagatgtataaaggattccaggccttgggggacgccgccgatatcaggtttgtgtag

SEQ ID NO: 17679 - DNA, 498 bp, synthetic construct
  misc_feature 1..498: note = Description of Artificial Sequence: Synthetic coding sequence
  source 1..498: mol_type = other DNA
taaccacgcgctctgtgtcacaccaaccagagtctaggtcgaggcttggctactacccgtggacgaggtagcgacggtaacgggcctactggcaatggcgaccaccccaatttttcattatcagaaggacgggccttcggttcgctagctgcgcagccaataacatcatgtctttccgtccccgctcctccattctctcttggaaagctgcaggatggcctcctccacatcacgacctgcagctttgtggccccctggaacagtctgtctctggcccagcgaagagggtttaccaagacctataccgtcggatgtgaggagtgcacagtgttcccatgtctttccattccctgtaagttacaaagcggcacccattgcctgtggacagaccagctcctgcaaggatctgaaaagggctttcagagcaggcaccttgcttgtctccctagggagccggggctgtgcacatggcagagcctgagatctcagatcgcttag

SEQ ID NO: 17680 - DNA, 411 bp, synthetic construct
  misc_feature 1..411: note = Description of Artificial Sequence: Synthetic coding sequence
  source 1..411: mol_type = other DNA
atggcaccatttgagccgctggcatctgggatccttttgttgctttggctgatcgccccatctcgcgcctgcacctgtgtgccacctcacccccagaccgccttttgcaactcagatctggtcatccgcgcaaagtttgtgggcacccctgaggttaaccagaccacattgtaccagaggtacgagataaagatgacaaagatgtacaagggctttcaagccctgggtgatgcggcggatatccgcttcgtctatacccctgctatggagtctgtgtgcggatactttcatagatctcataatcggtccgaggagttcctgattgccggtgaagccccatccccccgcccagtcccccatcagcccgtgccaggagctagaccgtctaatcatgagggtgcaaggctctag

SEQ ID NO: 17681 - DNA, 663 bp, synthetic construct
  misc_feature 1..663: note = Description of Artificial Sequence: Synthetic coding sequence
  source 1..663: mol_type = other DNA
atgggagcagctgcccgtactcttcggctcgcgttgggcctgcttctgctggcgactctgctgaggcccgccgacgcttgctcttgtagccccgtgcaccctcagcaggcattttgtaacgcagatgttgtgataagggcaaaagccgtgagcgagaaagaagtggacagcggcaatgatatatacggtaatcccatcaagagaattcagtatgagatcaagcaaatcaaaatgttcaagggtccagaaaaagatatagagttcatctacactgctccaagttccgccgtttgcggggtttctctggatgtggggggcaagaaagagtatctgatcgccggcaaagctgaaggagacgggaaaatgcatattactttatgcgattttatcgtgccttgggacacacttagtactacccaaaagaagtcactcaaccataggtaccaaatggggtgcgaatgcaagatcaccaggtgcccgatgatcccttgttacatttctagtcctgacgagtgcctgtggatggactgggtaacagaaaaaaatatcaatggtcatcaggccaaattctttgcctgcattaagagatctgacggatcctgcgcctggtatagaggggccgccccaccgaagcaagaatttctcgatattgaggacccatag

SEQ ID NO: 17682 - DNA, 432 bp, synthetic construct
  misc_feature 1..432: note = Description of Artificial Sequence: Synthetic coding sequence
  source 1..432: mol_type = other DNA
atgttcaaggggccagaaaaagatattgagtttatttacacagcgccctcttccgcggtctgcggcgtgagccttgacgttggcggaaagaaagaatacctgattgcgggtaaggctgagggtgacggcaagatgcacatcaccctgtgtgactttatcgtcccttgggacacattgagcacgacgcagaagaagtcgcttaatcaccggtatcaaatgggctgcgagtgcaagatcaccagatgtccaatgattccctgttacatttcctctcctgacgagtgcctatggatggattgggtgacagagaaaaatatcaacggccatcaggcgaagttctttgcatgcatcaagagaagcgatggttcgtgcgcttggtaccggggcgccgccccacccaagcaggagttcttggatattgaagacccctag

SEQ ID NO: 17683 - DNA, 636 bp, synthetic construct
  misc_feature 1..636: note = Description of Artificial Sequence: Synthetic coding sequence
  source 1..636: mol_type = other DNA
atgacgccctggctggggctgattgttttattgggcagctggagcttaggggactggggcgctgaagcctgtacttgttccccctcccatccccaagatgcgttctgcaacagtgatatcgtgatccgagcgaaagtcgtgggcaaaaaacttgtgaaggaggggccctttggaactctggtttataccatcaaacagatgaagatgtatagagggtttaccaaaatgcctcatgtgcagtatatacacaccgaggcgtccgagtccctttgcggcttgaagctcgaagtgaacaaataccagtaccttctaacaggccgagtttacgacggtaaaatgtacacaggtctctgcaatttcgtcgaaagatgggaccagttaacactatcccaaagaaagggtctaaattataggtaccacctaggatgtaattgcaagataaagtcttgttattatctgccttgttttgtcacctcaaagaacgaatgcttgtggacagatatgctgagcaactttggctaccctggctatcagtccaagcactatgcctgcatcagacaaaaagggggttattgctcctggtatagagggtgggctcctcctgacaaatctattattaatgctaccgacccttag

SEQ ID NO: 17684 - DNA, 438 bp, synthetic construct
  misc_feature 1..438: note = Description of Artificial Sequence: Synthetic coding sequence
  source 1..438: mol_type = other DNA
atgaagatgtatcgcggattcacaaagatgccacatgtgcagtatatccacaccgaggcctctgagtccttgtgcggtcttaagctggaagtgaacaagtaccagtacctgctgaccggccgcgtctacgatgggaaaatgtataccggcctctgcaatttcgtggagcgttgggaccaactgaccctgagtcagaggaaagggctgaactatcgataccatcttgggtgtaactgcaagatcaagagctgctattacctgccgtgtttcgttacctcaaaaaatgagtgtttatggactgacatgctgagcaattttggatatccaggatatcaatctaagcactatgcttgtatccgccagaaaggcggctattgctcatggtataggggttgggctccaccagacaagagtatcattaacgccactgacccgtag

SEQ ID NO: 17685 - DNA, 675 bp, synthetic construct
  misc_feature 1..675: note = Description of Artificial Sequence: Synthetic coding sequence
  source 1..675: mol_type = other DNA
atgcctggatccccaaggccagcaccctcttgggtactactgcttagactgttggcccttctgcgcccacctggtttaggtgaggcatgttcatgcgcgcctgcacacccccaacagcatatctgccattcagcgttggtaattcgcgcgaaaatcagctctgaaaaggtggttcccgccagcgcagatccggcagatactgagaaaatgttgagatacgaaataaaacagattaagatgttcaagggatttgaaaaagtcaaggacgtacagtatatctacactcctttcgactccagcctctgtggggttaaactggaagcaaattcccaaaaacagtacttgcttaccggccaggtactgtccgatgggaaagtgtttatacatttgtgcaactacatcgagccctgggaggacctttctttagtgcagagagagtctctcaatcaccactaccatctgaactgtgggtgccagatcacgacgtgctatacggtcccttgcaccatcagtgcaccaaacgagtgcctatggactgattggctcttagaaagaaaactgtatggataccaggctcaacattatgtttgtatgaagcatgtggatggcacatgcagttggtaccgaggacacctgccattgcgcaaagagttcgtggacattgtgcagccttag

SEQ ID NO: 17686 - DNA, 1164 bp, synthetic construct
  misc_feature 1..1164: note = Description of Artificial Sequence: Synthetic coding sequence
  source 1..1164: mol_type = other DNA
atggtgcactgctcctgcgtgctgttccggaaatacgggaacttcattgacaaactcaggctgttcactcgaggtggaagtggtgggatggggtatccccggttggggggcgaagggggaaaaggaggcgacgtgtgggtggttgcacagaacaggatgaccctgaagcaacttaaggacaggtatcccagaaaacgattcgtcgcaggcgtgggagcaaatagtaaaatcagcgccctgaagggcagtaagggaaaggactgtgagatccctgttcccgttggcattagcgttaccgatgaaaacggcaaaataattggcgaattaaataaggagaacgatcggattctggtagcccagggtggactgggcggcaagttacttaccaattttctacctctgaaggggcaaaaacgcattattcatctggatttaaaactcattgcagacgttgggctcgtggggttcccgaacgcgggaaaatcttcactgctgtcctgcgtgtcacatgccaagccagcaatcgccgattacgccttcacaaccctgaaaccagaactgggtaagataatgtattctgatttcaaacagatctccgtcgctgatctcccgggtcttatagaaggcgcacacatgaataaagggatgggacacaagttcctgaaacacattgagcggactcgacagttgctgttcgttgtcgacattagtggatttcagctcagtagccacactcagtataggacagcctttgaaaccatcattctgctcacaaaggagttagaactgtataaagaggagttgcagacaaaacccgccttattggccgtgaataagatggatctgcctgacgcccaagataagttccatgaattgatgagtcaactacagaacccgaaggattttctgcatctgtttgagaaaaatatgataccagaaagaacagtggaattccagcacattattccaatatccgcagtgacaggcgaaggaatagaagaattaaagaactgcattcgcaaatcactcgatgaacaggccaatcaggaaaacgacgcacttcacaaaaaacaactgttgaatctgtggatctcagatactatgtcctctacagagcccccctcaaagcatgctgtgactacaagcaaaatggacataatatag

SEQ ID NO: 17687 - DNA, 375 bp, synthetic construct
  misc_feature 1..375: note = Description of Artificial Sequence: Synthetic coding sequence
  source 1..375: mol_type = other DNA
atggatcctgctagaccacttgggctgtccatcctcctgctctttctgaccgaggcggcgcttggggacgcagcccaggagcctacaggcaataacgctgagatatgtctcctgcccctggactacggtccctgccgagctctgctgctgaggtactactacgatcgctacacacagagctgtcgacaatttctgtacggcgggtgcgaaggaaatgccaacaatttttatacctgggaagcatgtgatgacgcttgctggcggatcgagaaagtgcccaaattgagctcaatgacttctctgaagaagaaaaaaaaaatgcccaagctgcgtttcgcttccaggatccggaagatcaggaagaaacagttctag

SEQ ID NO: 17688 - DNA, 1506 bp, synthetic construct
  misc_feature 1..1506: note = Description of Artificial Sequence: Synthetic coding sequence
  source 1..1506: mol_type = other DNA
atggcggctgctagcgttaccccgcccggatctctggagctcttacaacctggattctcgaaaacgcttctgggcaccaagttggaggccaagtatctgtgttcagcatgtcggaacgttctgaggagacccttccaggctcagtgcggtcaccggtattgctccttttgtctggccagtattctatccagtggcccccagaactgtgccgcctgtgtccacgaaggaatttatgaggagggaatctcgattctggagagcagctccgcgtttcccgacaacgcagctcgccgtgaggtggagtccttacctgctgtgtgcccaagtgacgggtgcacctggaagggcactttaaaagagtacgagtcctgtcatgagggcagatgtccattgatgctgaccgaatgtcctgcctgcaagggtttggtgagactcggggagaaggagagacatctagaacacgaatgtccggagagatccctttcgtgtaggcattgtagagcaccttgctgcggcgccgacgttaaagcgcaccacgaggtttgtccgaaatttcccttaacctgtgacgggtgtggcaagaaaaaaattccaagagaaaagtttcaagatcacgtcaagacttgcgggaaatgccgggtgccctgtagattccacgccatcggttgcctggaaaccgtcgaaggggagaaacagcaggaacatgaagtgcagtggctacgggagcatcttgcaatgttactctcctctgtgctcgaggccaagccgctgctgggagatcagtcccatgccggctcagagctgctgcagcgctgtgaatctttggagaagaaaaccgccacctttgaaaacattgtgtgtgtgctgaaccgtgaggtcgagagggtggcgatgactgcagaggcctgttcaaggcaacatcggcttgaccaggacaagatagaggccttgagctccaaggtgcagcagctggagcgcagcattggtttgaaggacttggccatggcagacctggaacagaaagtcctggagatggaggcctcaacatacgacggcgtgttcatctggaaaatttctgatttcgccagaaagagacaagaagccgtcgctgggcggatccctgccatttttagtcccgctttctacacatcccgatatgggtacaagatgtgcctccgcatctacctgaacggcgatggcactggcaggggcactcatttgtcactatttttcgtcgtgatgaaaggccctaatgatgctttactgagatggccgttcaaccaaaaagtgacacttatgctcctggaccagaacaatagggaacacgttatcgatgcctttaggcctgacgtgactagctcctcttttcagaggcccgttaatgatatgaacatagcgtcagggtgcccacttttttgtccagtgtccaaaatggaggccaaaaattcttacgtgcgcgacgatgccattttcatcaaggctattgtggatctgacggggctgtag

SEQ ID NO: 17689 - DNA, 1662 bp, synthetic construct
  misc_feature 1..1662: note = Description of Artificial Sequence: Synthetic coding sequence
  source 1..1662: mol_type = other DNA
atggctgctgcatccgtcactccgcccggctctcttgagctgctccagcccggattctccaaaaccctgctgggtacaaaacttgaagccaaatatctttgctcagcatgtaggaacgtgttacgtcggccattccaggcgcagtgcggtcataggtattgttcgttttgtttggcctccatcctgtcgagcggccctcagaactgcgccgcctgcgtgcacgagggaatttacgaggaagggattagtattctggaaagttcgagtgccttccccgacaatgcagccaggcgggaagtggaaagccttccagcggtttgcccctccgacggttgcacttggaagggaacactcaaggagtatgaggtcaaaatgccagcatgcggtatggtcaccgaggccccagcagtggggtcacgacctcgctcaccttcgtcgtatgacttggttttgcacgtgcccctaaccggggccgaagcttgcctgatgtctgtggaagaggagactgaattactattgcggtcctgtcatgaggggcgatgtccactaatgctcactgagtgcccagcctgcaagggacttgtacgtctaggtgaaaaagaacgacacttagaacatgaatgccccgagcgctctctctcctgcagacattgccgtgctccctgctgtggagctgacgtgaaggcccatcacgaagtgtgccctaagtttccgctgacctgcgacgggtgcgggaagaagaagattcctcgggaaaagtttcaggatcacgtcaagacctgcggaaagtgccgtgtaccctgtaggttccacgctattggatgcttggagaccgttgagggcgagaagcagcaggagcatgaagtgcagtggcttcgggaacacttagcaatgttactgagctctgtgctcgaggcgaagccactccttggcgatcagagtcatgcgggttccgaattgctccagcggtgcgagagtctggagaagaaaactgcaacttttgagaatattgtctgcgtacttaatcgtgaggtggagcgcgttgcaatgaccgcagaggcttgctctcgccagcacagactcgatcaggacaagattgaggcgttgagctccaaagtgcagcagctggagagatctatcgggcttaaggatctggccatggccgaccttgaacaaaaggtcctggaaatggaagctagtacctacgacggcgtttttatttggaaaatcagcgattttgctcgcaaacgccaggaggccgttgcaggccgcatcccagccatcttttctcccgcgttttacacgagcaggtacggctataaaatgtgtctgaggatctatctaaatggagacggaactggtagaggaacacatctcagtctctttttcgtggtgatgaagggacctaatgacgcactgctgaggtggccgtttaaccagaaggtcactttaatgctgctggaccagaacaaccgcgagcacgtaatagatgcctttaggccggacgtcacctctagctcctttcagaggccagtgaacgatatgaacatcgcaagcggctgtccgttattttgtccagtcagcaaaatggaagcgaaaaattcctacgtgcgggacgacgccatctttattaaggccatcgtcgatctgaccggtctctag

SEQ ID NO: 17690 - DNA, 1269 bp, synthetic construct
  misc_feature 1..1269: note = Description of Artificial Sequence: Synthetic coding sequence
  source 1..1269: mol_type = other DNA
atggcagctgcttctgtaactcccccagggtctcttgagctgctgcaacccggattctccaagaccctgttgggcacaaagctggaagcaaaatacctgtgttctgcttgccgaaatgttcttcggcgacccttccaggcccagtgtggccatcgttactgtagcttttgtctcgcctccatactttcctccggccctcaaaattgcgccgcatgtgtgcatgagggaatatatgaggagggcatttcgatcctggagtcatcaagcgctttccccgataacgcagcaaggagagaggtcgagagcttacctgccgtgtgtccctccgatggctgcacgtggaaaggaactctgaaggaatacgaggttaaaatgcccgcatgcggtatggtcacagaagcacctgccgtggggagcaggcctcgctccccctcttcttacgatctcgtgttacatgtgcctctcaccggggctgaagcctgtctgatgagcgttgaggaagagaccgagctgctattacggtcctgccatgaggggcggtgtccactgatgttaaccgaatgtcccgcctgcaaaggacttgtcaggctgggtgaaaaagaaaggcacctggaacacgaatgtccagaacgatcactgagttgcaggcattgcagagctccctgttgtggagccgacgttaaaaggttggaccaagacaaaattgaagctctgtccagcaaggtgcagcagttggagcgctcgatcggactcaaagacctggccatggcagatttggaacagaaggtgttagagatggaagcgagcacatacgatggagtcttcatctggaagatcagtgacttcgctaggaagagacaggaagcagtggctggacggattcctgccattttttcccccgccttttacacaagtagatatggctacaaaatgtgcctcagaatttatctgaatggggatggaacaggccggggcactcacctgagtcttttctttgtggtcatgaaggggcctaatgacgcacttttgcgctggccatttaatcagaaggtgactttgatgttgctcgatcaaaataatagggaacatgtgatagacgcgtttaggcccgatgtgaccagcagcagctttcagagacccgtcaatgacatgaatatcgcgtccggttgtccgcttttctgtcctgtgagtaagatggaagcaaaaaatagttacgtccgagatgacgccatcttcataaaagcgatcgtggatctgacaggcttatag

SEQ ID NO: 17691 - DNA, 366 bp, synthetic construct
  misc_feature 1..366: note = Description of Artificial Sequence: Synthetic coding sequence
  source 1..366: mol_type = other DNA
atggccgccgcgtccgtcacccctccaggttcactggaactgcttcagcccgggttctccaagaccttactgggcacaaagcttgaagccaagtacctctgttcagcttgtcgcaatgttctacgccgccccttccaggcccagtgcgggcacaggtactgctcgttctgcctggcatctatcctcagctccggaccacagaattgcgccgcgtgcgtgcatgaggggatttacgaggaaggtataagtatcctggagagctctagcgcgtttcctgataatgctgcgcgccgcgaagtggaatcattacctgctgtgtgcccaagtgatggatgcacctggaaggggacactcaaggagtactag

SEQ ID NO: 17692 - DNA, 519 bp, synthetic construct
  misc_feature 1..519: note = Description of Artificial Sequence: Synthetic coding sequence
  source 1..519: mol_type = other DNA
atggcggccgcatctgttacacccccaggcagcctggagctgctgcaacccggatttagtaaaaccctcctaggaacaaaactcgaagctaagtatctatgcagcgcttgtcggaatgtgctacgacggcccttccaggcacagtgcggccaccgatattgttcattttgcctggcctcaatcctgtcgagtggcccacagaattgcgccgcctgtgttcacgaagggatttatgaggaggggatatctattctcgagtcctccagcgcctttcccgataatgctgccaggagagaggtggagtcccttccggccgtgtgtccttccgacggctgcacttggaaggggaccctaaaggaatacgaaagctgtcatgagggcaggtgcccactgatgctaactgaatgtcctgcctgcaagggtctggttcgtcttggtgaaaaggagcgccatctggaacacgagtgtcctgagcgcagcttaagctgtaggcattgtcgtgcaccttgttgcgggtag

SEQ ID NO: 17693 - DNA, 582 bp, synthetic construct
  misc_feature 1..582: note = Description of Artificial Sequence: Synthetic coding sequence
  source 1..582: mol_type = other DNA
atggcggctgccagcgtaaccccaccaggatcccttgaattgctacagccaggattcagcaagacactgctggggaccaaacttgaggccaagtatctgtgctcggcttgtcgtaatgtgctccggagacccttccaggcccagtgcggtcaccgttactgctccttttgcttggccagcatcttaagtagcggccctcagaactgcgcggcctgcgtccatgaggggatatacgaagaaggaatcagcattttagagtcttcgtccgcttttccagataatgcagcccgtcgcgaggtggagagcctgcccgccgtgtgtccatcggacgggtgtacttggaaagggacacttaaagagtacgagtcctgtcacgaagggcgctgcccactgatgctgaccgaatgcccagcttgcaaaggactcgtgcggctgggtgagaaagagaggcacctggaacatgaatgccccgagagatctctgagttgcaggcactgccgggccccctgttgcggagctgacgttaaagcccatcacgaagtgtgtcccaaatttcccctcacctgtgacggctgcggttag

SEQ ID NO: 17694 - DNA, 1503 bp, synthetic construct
  misc_feature 1..1503: note = Description of Artificial Sequence: Synthetic coding sequence
  source 1..1503: mol_type = other DNA
gtggccggaagagccctcagttccggccgagccgcaactgtaggagccctttttgccggtgttaccgccctaatggctgccgcatccgtgacaccacctgggtcactggagctcttgcagccgggatttagcaagacgcttctcggcactaaactggaagctaagtatctgtgttcagcctgccgtaatgtattgagacgaccattccaggctcagtgcggccacaggtactgttccttctgtctagctagtattctctcaagcgggccccagaactgtgccgcatgcgtgcatgaaggtatttatgaagagggcatttcaattctggagagttcatctgctttccccgacaatgctgcgcgccgggaggtggaatccttgcctgctgtgtgtccatctgatggatgtacatggaaagggaccctcaaagaatatgagtcatgccatgaggggcgctgcccactgatgctcacggagtgccctgcatgcaagggtcttgtgcgactcggcgagaaggaacgccacctcgaacatgagtgtcctgaacgctcactgagctgtcgccactgcagagccccatgttgtggcgccgatgtgaaatttcaagaccacgtgaagacatgtggaaagtgcagggtaccctgcagattccacgcaataggatgcctggagactgttgagggggaaaagcagcaggagcatgaagtccaatggttacgggaacatttggcaatgttgctgagctctgtgcttgaagctaagccacttctgggtgatcaatctcacgctggctccgaactgctacagcgctgcgagtccctggagaagaagaccgccacattcgaaaacatcgtgtgcgtactgaacagggaggtagaacgcgtggcgatgaccgccgaggcttgcagcagacagcatagactcgatcaggacaagattgaagcgctttccagtaaggtgcagcagcttgagcgtagcattggactcaaggacctcgctatggctgacctcgaacaaaaagtcttggaaatggaggcttccacttacgatggagttttcatatggaagatcagcgacttcgcgcgcaagagacaagaagcagtagccggcagaatcccagctatctttagccctgcattttatactagccgatatggatataagatgtgcttgagaatctaccttaacggggacggaactggtagggggactcatttgagcttgttcttcgtggtgatgaaggggccaaatgatgcactgttacggtggccttttaaccagaaagttactctgatgctcctggatcagaacaatcgggagcacgttatcgatgcctttagaccagatgtgacttctagcagtttccagcgcccagtcaatgatatgaacattgccagtgggtgccctctattctgccctgtgtccaaaatggaggccaagaactcatacgtgcgagatgatgccatctttatcaaggccatcgtagatctaacaggtttatag

SEQ ID NO: 17695 - DNA, 1506 bp, synthetic construct
  misc_feature 1..1506: note = Description of Artificial Sequence: Synthetic coding sequence
  source 1..1506: mol_type = other DNA
atggcggccgcctctgtgaccccaccagggtccttggaactgttgcaacccggcttcagcaagacattgcttggaactaaattagaagcaaaatacctgtgtagcgcatgtcggaatgtgctgagaaggcccttccaagcacagtgcgggcatagatactgctcattctgtctcgcctcaattcttagctcaggtccccagaactgcgccgcatgtgtgcacgagggcatttatgaggaaggtatctccattctggagagctccagcgcattccctgacaacgctgcacggagagaggtggagagcctgcctgccgtgtgtccatcggacggttgcacgtggaagggcactcttaaggaatatgaatcttgccatgagggaaggtgtccccttatgctgacagaatgtccagcttgtaaaggccttgtgcgcctgggcgaaaaggagcggcacctggaacacgaatgtccggagcgaagcctatcttgtaggcactgccgtgcgccctgctgcggggctgatgtgaaagctcatcatgaagtgtgccccaagtttcctcttacttgcgacgggtgtggcaaaaaaaagatcccaagggaaaagttccaggaccacgtgaaaacatgtggtaagtgcagggtaccttgtcggtttcatgcaattggatgtctggagaccgttgagggggagaagcagcaggagcacgaagtgcagtggctgcgggagcacttagccatgctactctcatctgtcctggaagccaaacccctacttggcgatcaatcgcatgccggcagcgagctgctacagcggtgtgagtccttagagaagaaaacagccactttcgaaaacatcgtgtgtgtgctcaatagagaagtggagagagtagccatgacggccgaagcttgtagccggcagcaccgcttagatcaagacaaaattgaggccctgtcaagtaaggtgcagcaactggaacgtagtatcgggctaaaggacctggcaatggccgacctggagcagaaggtgttggagatggaggcatccacctacgatggagtctttatctggaagataagcgatttcgcgcgcaaaaggcaggaggcagttgctggtagaattcctgctattttcagtccggccttttatacctcccgatacggctataaaatgtgcctgcggatttatcttaacggcgatggtacgggcaggggaactcatctgtccctattcttcgtcgttatgaaagggcctaacgacgccctgctcaggtggcccttcaatcagaaagtgactctgatgctgctggaccagaacaatagagagcacgtcatcgatgcttttcgtccagacgtgacatcctctagttttcagcgaccggtgaatgacatgaatatcgcatctggctgtcctctcttttgtcccgtgagcaaaatggaggccaagaactcctatgtcagagacgacgccatttttatcaaggcgatcgttgaccttactggactgtag

SEQ ID NO: 17696 - DNA, 1632 bp, synthetic construct
  misc_feature 1..1632: note = Description of Artificial Sequence: Synthetic coding sequence
  source 1..1632: mol_type = other DNA
atggagagcagtaagaagatggactccccgggtgctctgcagactaatcctcccttgaaactgcacactgacagatccgcaggtaccccggtattcgttcccgagcaaggaggatacaaggaaaagttcgtaaagacagtggaagacaagtataaatgtgagaagtgccacttggtgctgtgcagtcccaaacagactgagtgtggtcataggttctgcgagtcatgtatggccgcacttttatcgtcctcatcaccaaaatgcaccgcctgtcaggaatcgatcgtaaaggacaaagtgttcaaagataattgttgcaaacgggaaatcctggccctgcagatctattgtagaaatgaatcccgcggatgcgccgagcagcttatgttaggccacctcttggtgcacttaaaaaacgactgtcatttcgaggagcttccctgtgtacgaccagactgcaaagaaaaagtgttgcgtaaggacctgagagatcatgtggagaaagcctgtaagtacagagaagccacatgttctcattgcaaatcacaggtccccatgatcgcccttcagaagcatgaagataccgattgcccctgtgttgtggtctcgtgccctcataaatgctctgtgcagaccctcctgcgcagtgagggtaccaatcaacagattaaggctcacgaggcttcttcagcagtgcagcacgtcaatctgttaaaggagtggtccaactcactggagaaaaaagtgtccctactccaaaacgagagtgtggaaaagaataagtcaattcagtctctacacaatcagatttgcagttttgaaatagagatagagcgtcagaaagagatgctaagaaacaacgaaagcaagatactgcacctgcagagagttatcgattcgcaggctgagaagcttaaggagctggacaaggagatccgcccattcagacagaactgggaggaggctgacagcatgaaaagcagcgtagaaagcttgcaaaatagagtcacagagctcgaatccgtcgacaagtccgcaggccaggtagcccgaaacactggcctgcttgagtcacagctctccaggcatgaccaaatgctctctgtgcatgatatcagattagcagatatggacctaaggttccaggtgttggaaaccgcctcttataatggcgtgctgatctggaaaattcgggactacaagcggcgcaaacaggaggccgtgatgggaaagacactgtctttgtatagccagccattctacacaggatattttggctacaaaatgtgcgctcgagtgtatctgaatggcgatggaatgggaaaaggcacccacctgtccttattctttgtgatcatgcggggcgaatatgacgctctgctgccttggccttttaaacaaaaggttaccttgatgttgatggaccagggcagctctaggcgacacctgggggatgcattcaagcccgacccaaacagctcctcttttaaaaagcctaccggggaaatgaatatagccagcggttgtccggtttttgtagcccagaccgtgcttgaaaacggaacctacatcaaagatgataccatctttatcaaagtcatcgttgatacttctgacctcccagatccatag

SEQ ID NO: 17697 - DNA, 1632 bp, synthetic construct
  misc_feature 1..1632: note = Description of Artificial Sequence: Synthetic coding sequence
  source 1..1632: mol_type = other DNA
atggagagctcgaaaaaaatggacagccccggggcgctgcagactaaccctccacttaaactgcatacggacaggagcgccgggactcccgtgtttgtgccagaacagggaggctacaaggaaaagtttgttaaaacggttgaggacaagtacaaatgtgaaaagtgtcacctcgtgctgtgcagccctaagcaaacggaatgcgggcaccgattctgtgagtcttgcatggctgcgctgctgtcctcgtcttcccccaagtgtacggcgtgtcaagaaagtattgtgaaggataaggtgtttaaggacaattgctgcaaacgggaaattctcgctttacagatatactgtcgtaacgagtcgcgggggtgcgcggaacagttgatgctggggcatctgctggtgcatctgaagaacgattgtcattttgaggagctgccttgtgttcggcctgactgcaaagagaaagtgcttaggaaggatctcagagaccacgtagagaaggcctgcaaataccgcgaagccacttgttcacactgcaagtcacaagttccaatgatcgccctgcagaagcacgaggacaccgactgcccttgcgtagtcgtgagttgcccccataagtgcagtgtgcagacactgctgcgatctgaagggaccaaccagcagatcaaggcccacgaagcctcatccgcggtccagcatgtgaacctgctgaaagagtggtctaatagcttagagaagaaggtatctcttttgcaaaacgagagtgtggagaagaataagtcaatccagagcctgcacaatcagatctgctcctttgagatcgaaatcgagagacagaaagagatgctgcgaaataatgagagtaagatcctgcatctccagcgcgtgatcgatagtcaggctgagaagcttaaagagctggataaggaaatacggccattccgccaaaattgggaagaagccgatagtatgaagagtagcgtcgaaagtctgcagaatcgggttaccgagctagaaagcgtggacaagagcgccgggcaggtcgctcggaatacgggcctactcgagtcccagctgtcaaggcacgaccagatgctgtccgttcacgacattcgtctggccgacatggatctgagatttcaggtgctggaaactgccagttacaacggagttctcatatggaagatcagggattacaagcgcaggaagcaagaggcagtgatgggcaaaacactatcattgtatagccagcctttctataccggatatttcgggtacaagatgtgcgcacgcgtatacctcaatggagatgggatgggcaagggcacccacctatccttgttctttgttatcatgcgaggcgaatatgatgcattgctgccctggcccttcaagcagaaagtgaccctcatgcttatggatcaaggtagctccagaagacacctcggagatgcatttaaaccagaccctaacagttcctcattcaaaaagccaaccggtgagatgaatatcgcatcgggttgccctgtcttcgtagctcagacggtactggaaaacggcacatatattaaagatgacactatcttcattaaggtgatcgtggacactagcgatcttcccgacccgtag

SEQ ID NO: 17698 - DNA, 1707 bp, synthetic construct
  misc_feature 1..1707: note = Description of Artificial Sequence: Synthetic coding sequence
  source 1..1707: mol_type = other DNA
atggaatccagcaagaagatggattcaccgggggcccttcagaccaatccccctctgaagctgcacactgaccgatctgcagggactcctgttttcgtgcctgagcagggcggctataaagagaagttcgtgaagactgtggaagacaagtataaatgcgagaagtgtcacctggtgctctgttctccgaagcagaccgaatgtggtcatcgcttttgcgaatcttgcatggcagccttactctcctcctcttcgcccaagtgcacggcttgtcaagaatctatcgttaaggataaagtctttaaagataactgttgcaagagagaaatcctggctctgcagatttattgtcgcaacgaaagcaggggctgtgctgagcaactgatgctgggccacctcctggtgcacctgaagaatgactgtcacttcgaagagctcccctgcgtcaggcccgactgtaaggaaaaggtgctgagaaaggacctgcgtgaccacgtggaaaaggcgtgtaagtatagggaggcaacctgctctcactgcaaatcccaggtgccaatgatagcgcttcagaaacacgaggacactgattgtccttgcgttgtcgtttcatgcccgcacaagtgtagcgtccagacacttctcagatcggagctttctgcccacctgagtgagtgtgtcaacgcacctagcacttgcagtttcaagcgctacggctgtgtgtttcagggcaccaatcagcagatcaaggcccatgaggcctcctccgccgtgcagcatgtcaatctactgaaggaatggtcaaactccctggagaaaaaggtctcactgctccaaaatgagtccgtggagaagaacaagagcattcagtcgcttcacaaccagatctgcagttttgagatagagatagagaggcaaaaggaaatgctgcgtaacaacgaatctaaaatcctccacctgcagcgtgttatagattctcaggctgaaaaacttaaggagttggacaaggagattcggccatttcgtcagaattgggaggaggccgatagcatgaaaagcagcgttgagagcctacagaatcgagtgacagagctggagtccgtggataagagcgcagggcaagtggcacggaacactggcttgttagaaagtcagctgagccggcatgaccagatgctgtctgtgcatgacattaggctggcggacatggaccttcgattccaggttctcgagacagcctcgtacaatggtgtcttgatttggaagatcagggattataagaggaggaagcaggaggctgttatgggcaagacccttagcctatacagccagcccttctacaccggttacttcggctacaagatgtgtgcccgcgtgtacctcaacggcgacggtatgggtaaaggtacccacttgagtctatttttcgtcattatgcggggagagtacgatgcattgttgccatggccatttaagcagaaagtcactctgatgctaatggatcagggctcctcaagaaggcatctgggggatgcttttaaaccagatccgaacagcagttcctttaagaagccgaccggggaaatgaatattgcatccgggtgtcccgtctttgtggcacagaccgtcctcgagaatgggacatatattaaagacgataccattttcattaaagtaattgttgatactagcgacctacctgatccttag

SEQ ID NO: 17699 - DNA, 1458 bp, synthetic construct
  misc_feature 1..1458: note = Description of Artificial Sequence: Synthetic coding sequence
  source 1..1458: mol_type = other DNA
atggaatcatccaagaagatggacagcccaggagcactccagacgaatccgccacttaaacttcatacagacaggagcgccggcactcctgtatttgttcccgagcagggcggctacaaagaaaaattcgtcaagacggtcgaagacaaatacaagtgcgagaagtgccacctggtgctttgttcaccaaaacagacagaatgcggccatcggttctgcgaatcttgcatggcagctctattatcttccagttcccccaagtgtaccgcttgccaggaatccattgtgaaggacaaggtattcaaggacaattgttgtaaacgggagatcctggctctgcagatctattgtagaaacgagagccgcggttgtgcggaacagttgatgctggggcacctcttggtgcacctgaagaatgactgccactttgaagagctcccatgtgtcaggcccgactgtaaagagaaagtcctccgcaaggacctgcgggaccatgtagagaaggcctgcaagtaccgcgaagcgacatgtagccactgcaagtcacaggtgcccatgatcgcacttcaggtcagtctgttgcagaatgagagcgtcgaaaaaaacaagtctatccagtcgctccataatcagatatgctcttttgagatagaaatcgagaggcagaaagagatgctgaggaacaacgaatctaaaattctgcatctccagcgtgtgattgatagccaagccgagaaattgaaggaactggataaagagattcgacccttccgccagaattgggaggaagcagatagtatgaagtcaagtgtggaaagcctgcagaatagggtgactgaactcgaatccgtcgataagtccgctggacaggtggccagaaatacagggttgctggagtcccagctgagccggcacgaccagatgctctcggttcatgacatccggctcgccgatatggatttgaggttccaggtgttagaaacagcaagttacaacggagtgcttatctggaagatccgggattacaagcgacgcaaacaggaggccgtgatgggaaagactcttagcctctacagtcaacccttctatactgggtactttggctacaaaatgtgtgcccgtgtttatcttaacggggacggcatgggcaagggcacacatctctccctgttttttgtgatcatgcggggggagtacgacgcactcctaccatggcccttcaaacaaaaagtgactctgatgctgatggatcagggctctagtcggaggcacctgggggacgcctttaaacccgatcctaattcatcttcctttaagaaaccaaccggcgaaatgaatatcgcttccggttgccccgtctttgttgcgcagacagttctggagaacgggacatatattaaggatgacaccatcttcatcaaggtgatagtggatacatccgaccttcccgacccatag

SEQ ID NO: 17700 - DNA, 1707 bp, synthetic construct
  misc_feature 1..1707: note = Description of Artificial Sequence: Synthetic coding sequence
  source 1..1707: mol_type = other DNA
atggagagtagcaaaaagatggactctcccggggctctgcagacaaatccccccttgaaactgcatacagatcgttcagccggaacccctgtgttcgttccagagcaagggggatataaggaaaagttcgttaaaaccgtagaagacaaatataaatgtgaaaaatgtcatctagttctctgttccccaaagcagacagaatgtggccatcgcttctgcgaaagttgcatggctgcattgctgagttcttccagtcctaagtgcaccgcctgtcaggaatccattgttaaagacaaggtctttaaggacaattgttgtaaaagagagattctggccttgcagatctactgcagaaacgagtcacgagggtgcgcagagcagctgatgctgggacacctactggtgcacttgaagaacgactgccactttgaggagttgccatgtgtgcgccctgactgtaaagaaaaagtgctgagaaaggacctgagagaccacgttgagaaagcatgcaaatacagggaggccacgtgcagccactgcaaatcccaagtgcccatgatcgcactccagaaacatgaggacaccgactgtccttgtgtggtggtctcttgccctcataaatgcagcgtacagaccctgctaagatcagagctttccgcgcatctatcagaatgtgtcaatgccccatcaacatgcagttttaaaagatatggctgcgtatttcagggtacaaaccagcaaatcaaggctcatgaggcaagcagtgccgtgcaacatgtcaacctgctcaaagagtggtccaactcgctcgagaagaaggtgagtctgctgcagaatgagtctgttgaaaagaacaaatctatacagtctcttcataatcagatctgttcgtttgagatcgaaatcgagcgccagaaagagatgctcagaaataacgagagcaagatcctgcacctccagagagtgatcgatagccaggcagaaaagcttaaggagctcgacaaggagatccggcccttcaggcagaattgggaagaagcagattcaatgaaatcgtctgtcgagagcttgcagaaccgggtaaccgaacttgaaagtgtggataaatctgctggacaagtggctcgaaacacaggtcttctggaatctcagctgtcaaggcacgatcaaatgctttctgtgcatgatataagactcgccgatatggatctgcgttttcaggttctggaaaccgctagctataatggcgtgcttatctggaaaatcagggactacaaaaggcggaagcaggaagccgtgatgggcaagaccttgtctttgtattctcagccgttctataccggttactttggttataagatgtgcgcgcgggtgtacttaaacggggatgggatgggcaaggggactcacctgtcgctcttctttgtgatcatgcggggggagtacgacgccctgctcccttggccctttaaacagaaggtaacattgatgctgatggaccagggatcctctagacgccatctcggtgatgctttcaagcctgatcccaacagtagcagctttaagaagccaacaggagaaatgaacatcgctagcggatgtcccgtattcgttgcccagacagtccttgagaacggaacatatattaaggacgacactatcttcattaaagtaattgtggatacgagtgatctccctgatccatag

SEQ ID NO: 17701 - DNA, 285 bp, synthetic construct
  misc_feature 1..285: note = Description of Artificial Sequence: Synthetic coding sequence
  source 1..285: mol_type = other DNA
atggagagctcaaaaaaaatggattcaccaggtgcattgcagacaaatccacccctaaaacttcacaccgacaggtctgctggaacaccagtgttcgtgccagaacaggggggatacaaggagaagttcgtaaaaacagtcgaagacaaatataaatgtgagaagtgtcacctggtgctttgttcacctaaacagactgagtgcggccacaggttctgcgaaagttgcatggctgcccttctgtcttcgtcttcacccaagtgcactgcttgccaggagtcttag

SEQ ID NO: 17702 - DNA, 939 bp, synthetic construct
  misc_feature 1..939: note = Description of Artificial Sequence: Synthetic coding sequence
  source 1..939: mol_type = other DNA
atggctgcgggacagaacggtcatgaggagtgggtgggtagcgcttacctgtttgtcgagagctccttagataaagttgtgctttccgacgcttacgcccatccccagcagaaagtggctgtgtatagagctctgcaggccgccctcgccgaaagcggaggatctcccgatgtgctacagatgctcaagatccatcgtagtgaccctcagttgattgtccagttacgcttctgcgggcgccagccatgtggaaggttcttaagggcctaccgagaaggcgccctccgagccgctttgcaaagaagcctggctgccgccttagctcagcactcggtccctctccaattggaattacgcgctggcgctgaacgccttgatgcccttctggctgacgaggaaagatgcctgtcatgcattcttgcacagcagcccgataggcttcgggatgaagaactcgccgagctggaggatgccctgagaaacctaaaatgcgggtccggagcccgcggaggagatggcgaggtggctagcgcccctctgcaacccccagtgccatctttgtctgaggtgaagccacctcccccccctcctccagctcagacgttcctgtttcaggggcagcctgtcgtaaatcggccactgagtttgaaggatcagcagacttttgccaggagtgtgggcctgaaatggaggaaggtgggaaggtctctacagcggggttgtcgggctttgcgggaccctgcactggacagcctcgcttacgaatacgagcgggagggactgtatgaacaggccttccagcttctacgtaggttcgttcaggccgaaggaagacgcgccacacttcagcgcctggtcgaagcacttgaggaaaacgagctcacttctctggccgaggatctactcggtctgaccgatcccaacggtggcctagcttag

SEQ ID NO: 17703 - DNA, 825 bp, synthetic construct
  misc_feature 1..825: note = Description of Artificial Sequence: Synthetic coding sequence
  source 1..825: mol_type = other DNA
atggccaccactgtaagtacccagagaggtcccgtgtatatcggtgagctccctcaggacttcctgcggatcactcctacacagcagcagcgccaggttcagcttgacgcacaggctgcacagcagctccagtacggcggcgctgtcgggactgtggggcgattaaatattaccgtggtccaggccaaattggccaaaaactatggaatgaccagaatggacccctattgccggctgcgtctggggtatgctgtatatgaaactcctacagctcataatggggccaaaaatccgcgttggaacaaagttatccactgcacggtgccacccggggtcgactcgttttaccttgagatcttcgacgagagagccttttccatggacgatcgtatagcttggacccatatcacaattcctgagagcttgagacaaggaaaggtggaagacaagtggtactcgctgtcgggacgccagggcgacgataaggaaggaatgatcaatcttgtcatgtcttacgccctgcttcccgcggccatggtgatgcccccacaacccgtggtcctcatgcctaccgtttatcaacaaggagtgggatatgttcccattactggaatgccggccgtttgtagtcccgggatggttcccgtggcacttcctcctgctgccgttaacgcgcagcctagatgttcggaggaggatctcaaggcaatccaggacatgttcccgaacatggatcaagaggtgattcgttcagtgttagaagcgcaaagaggcaataaggatgccgctattaattctctactacaaatgggcgaggaaccgtag

SEQ ID NO: 17704 - DNA, 1059 bp, synthetic construct
  misc_feature 1..1059: note = Description of Artificial Sequence: Synthetic coding sequence
  source 1..1059: mol_type = other DNA
cagctgtccccttcgcaggcccccgccggcgcacaggaagtggcacgcagggtaaccgtgggcagcgcctcccacggaggacgacggtccacgatggctactactgtgtcaacccagcgcggtccggtttacattggcgagctgccacaagattttttgcgtattactcccacacaacagcaaaggcaggtgcaactggacgcgcaggccgctcagcagttgcaatatggaggcgctgtaggcactgtggggcggcttaacattaccgtggtgcaggcaaaactcgctaaaaactatggaatgacccgaatggacccgtactgtaggctgcggcttggttacgccgtgtacgaaacgcccacagcccacaatggtgcaaagaacccccggtggaacaaggtgatccactgcaccgtgcctcccggcgtcgattccttctacctggagatctttgatgagagggccttttcaatggacgaccgaatcgcttggactcacataaccattccagaatccctcaggcagggaaaagtcgaagacaaatggtacagcctcagtggtcgtcagggggatgacaaagagggcatgatcaacttggttatgtcctacgcactgcttcccgccgccatggtaatgcctccacagcccgtggtgttgatgcccaccgtctaccagcagggggttggctacgtgcctatcacagggatgcctgcagtgtgttcgcccggcatggtgccagttgccttaccacctgccgcagtgaacgcccagccaaggtgcagtgaggaggacctcaaagcaattcaggatatgttccctaatatggaccaggaagtgattcgcagtgtgcttgaggcgcaaagggggaataaagacgcagccattcccagccatctggtactgggagggctgtctgctctgtcttgtccatgggatgtgcgactttcattctcctgtcggtcagggaagtgctcatgctgtcgggagcagctgctcttgcccggctgttggaggtggtggagtgcatttagatttcacagttggcactttgtgatgtag

SEQ ID NO: 17705 - DNA, 675 bp, synthetic construct
  misc_feature 1..675: note = Description of Artificial Sequence: Synthetic coding sequence
  source 1..675: mol_type = other DNA
atggccacgacggtctctacacagcgcggcccagcaaagctggctaagaattatggcatgaccaggatggacccatactgcaggcttcgtttgggatacgcggtgtatgaaactcccaccgcacacaacggggccaagaacccacgctggaataaagtcattcactgcaccgttccacccggagtcgactctttctaccttgaaatatttgatgagcgagccttcagcatggacgacagaatcgcctggacccacattaccatcccagagtctctgagacagggcaaagtggaggataaatggtactcactgtctggaaggcagggagatgacaaagagggtatgattaatctcgtcatgtcttatgcccttctcccagccgcaatggttatgcccccacagccagtcgtgcttatgccaaccgtttaccaacagggagtgggctatgtcccgattacgggaatgccagccgtttgcagccccggcatggtgcccgttgcacttcctccagcggccgtgaacgctcagccccgatgtagcgaagaagacctgaaggcaattcaggatatgttccccaacatggatcaagaagtcataaggagtgtgttagaggcccaacggggcaacaaagatgcggccatcaacagtctcctgcagatgggtgaagagccatag

SEQ ID NO: 17706 - DNA, 768 bp, synthetic construct
  misc_feature 1..768: note = Description of Artificial Sequence: Synthetic coding sequence
  source 1..768: mol_type = other DNA
atggcctcatcaacatcattgcctgcaccaggctctaggcctaagaagcccctggggaagatggccgactggtttagacagaccttactgaaaaagccgaagaaacggcccaattcgcccgaaagtactagctctgatgcttcccagccaaccagccaggatagtcctctcccaccatcgctttcaagcgtgaccagtccctccctccccccaacccacgccagcgactccggctcatctaggtggtctaaagactacgacgtgtgcgtgtgccattcagaggaggatctggttgccgcccaagacctggtgagctatttggagggctccacagcatcactgcgatgcttcctgcaactgagagatgcaactcctggtggggccatcgtgtccgaactttgtcaagcattgagttcttcccattgcagagtactgctcatcactcctggctttcttcaggacccgtggtgtaaataccaaatgcttcaggctcttacagaggctcctggagccgagggatgtacaattcctctactgtccgggttatcgagagcagcatatccacccgaactgcggtttatgtactacgtcgacggacggggccctgacggtggctttcgtcaagtgaaagaggccgtgatgagatccaaccaagttctcaagcacctgctgtatcatggcacccccgagataggggtgaaactggaaactgaaaatccatgtcgggcgtctgatagccacaaatgtgacaagcgataccgagaatag

SEQ ID NO: 17707 - DNA, 708 bp, synthetic construct
  misc_feature 1..708: note = Description of Artificial Sequence: Synthetic coding sequence
  source 1..708: mol_type = other DNA
atggccagctcaacaagcttacccgcacctggatcccgaccgaaaaagccactggggaagatggctgattggttccggcagacactgctgaagaagcccaagaaaagaccaaatagtccagagagcacatcctcagacgcttctcagcccacgagccaggatagtcctctgcccccttctctcagtagcgttacatcgcctagtctgccccccacgcacgcctctgatagcggcagtagccggtggtccaaagactatgatgtgtgcgtatgtcacagcgaagaagatctggtagctgcacaggacttagtctcatacttggaaggcagcactgccagcctgaggtgctttcttcagctgagagacgccacccccggaggggcaatcgtgagtgagctatgccaggccctgtcctctagccactgtagggtcctgctgatcaccccgggctttttgcaggacccctggtgcaaataccaaatgctacaggccctgacagaggcacccggagccgaaggctgtaccattccactgctgtctggcctgagccgcgctgcctacccccccgagcttcgattcatgtattatgtcgatggaaggggtccagatgggggtttccggcaggtgaaagaagcggtgatgaggtgtaaattgttacaggaaggcgaaggggagagggacagcgcaaccgtgtccgatttactgtag

SEQ ID NO: 17708 - DNA, 666 bp, synthetic construct
  misc_feature 1..666: note = Description of Artificial Sequence: Synthetic coding sequence
  source 1..666: mol_type = other DNA
atggcctcgagcaccagcctgcctgcaccagggtctaggccgaagaaaccccttggaaaaatggccgactggttccgacagacattgctgaagaagcctaaaaagcgtccgaattctcccgaaagcacctcaagcgatgcatcccagccaaccagccaggattctcctctgccacccagccttagtagtgtaacgagccctagtttgcctcccacacacgccagtgattcaggcagttcacggtggagcaaggattatgacgtgtgcgtgtgtcacagcgaagaagatctcgtggcagctcaggatctagtgtcataccttgagggaagcacagcttccctccgttgcttcttacagcttcgggatgccacccctgggggtgcgatcgtctccgagctttgtcaagcgctatctagctctcactgtcgcgtgctgctgattacccccgggtttctgcaggacccttggtgtaaataccaaatgctgcaggcattgacagaggcccctggcgccgaaggatgcaccatccctttgctgtcaggcctgtctcgcgcagcatatcctccggaactccgttttatgtactacgtagacggcagaggacccgatggaggctttcgacaagtcaaggaggccgtaatgagatatcttcagaccttgagctag

SEQ ID NO: 17709 - DNA, 666 bp, synthetic construct
  misc_feature 1..666: note = Description of Artificial Sequence: Synthetic coding sequence
  source 1..666: mol_type = other DNA
atggccagctccacctcacttcccgctcccggtagtagacctaaaaagcctctgggtaaaatggcagattggttcagacagactttgctgaaaaaacctaagaagagacctaatagtcccgaatctacctcaagcgatgccagccagcctacgtctcaggattctcctctgcccccttccctgtcaagcgtgacatctcccagcttgcccccgactcacgcctccgactcaggcagctccaggtggagcaaggactatgatgtgtgtgtgtgccactctgaggaggatctggttgccgcccaagacttggtctcttacctcgaggggtctaccgcatcactccgctgctttctgcaactacgcgatgcaacgcctggcggggcaatcgtgtctgaactgtgccaggctctgtcgtcatctcattgccgcgtcctcttaatcacaccgggctttctccaggatccttggtgcaagtatcaaatgcttcaagcattaactgaggccccgggagcagaggggtgtaccattcccttactcagcgggctgtctagagccgcgtatccgccagagctaagatttatgtactacgttgatggtcggggccctgatggaggcttcaggcaggtcaaggaggccgtgatgagatatttgcagactctcagttag

SEQ ID NO: 17710 - DNA, 666 bp, synthetic construct
  misc_feature 1..666: note = Description of Artificial Sequence: Synthetic coding sequence
  source 1..666: mol_type = other DNA
atggcttcttcgacctcgctccccgcacccggtagccgccccaaaaaaccccttggtaaaatggccgattggtttcggcaaacactgttgaagaaacccaagaagcgccctaactctcctgagtccacatctagtgacgcctcccagccaacatctcaggattcccccctgcctcccagtttgtcatctgtaaccagtccgtccctgccccccactcatgcctcagacagtggctccagccgctggtccaaggactatgacgtttgcgtgtgtcatagcgaggaggatttggtcgccgctcaggacctggtctcttacctggaggggtctacagcgagtctgcggtgtttcctgcagctaagagatgctacccctgggggggctatagtttctgagctgtgccaagccctgtctagttcgcactgtagggttttacttatcactccgggcttcctccaggatccctggtgcaaatatcagatgttgcaggccctcactgaagcacctggagccgaagggtgcaccatccctttgctgtccggactgtcaagagcggcctacccccccgaacttaggttcatgtactacgtggatggccgaggtccggacggcggcttccggcaggttaaagaagcagtcatgagatacctgcagacactctcctag

SEQ ID NO: 17711 - DNA, 2520 bp, synthetic construct
  misc_feature 1..2520: note = Description of Artificial Sequence: Synthetic coding sequence
  source 1..2520: mol_type = other DNA
atgatgtctgcatctcgcctggctgggacgctcatacccgccatggccttccttagctgtgtgaggcctgagtcgtgggaaccatgcgttgaggtagtgccaaatattacctaccagtgcatggagctgaatttctacaagatccctgataatctgcctttctcaacaaaaaatctcgaccttagcttcaatccgctcaggcacctgggaagttactctttttttagttttccggagctacaggtgctggacctgtctcgatgcgaaatacagactatcgaggacggggcttaccaatcattgtctcatctttcaacacttattctgaccgggaatcctatccaatctttagcgctgggcgccttctcgggactatcgagtctgcaaaagctcgtcgctgtggaaacgaatctggcttccctggagaacttccccattgggcaccttaagacgctcaaagaactcaatgtggcccataacttgattcaatcgttcaagcttcctgaatactttagcaaccttaccaatctggagcacctggatctgtcttcaaataagatccaaagcatttactgtaccgatctgagggtcctgcatcagatgcccctcctgaatctaagtctggaccttagtctgaatcccatgaatttcattcaacctggagcttttaaggaaatcaggctgcataagcttaccctgagaaataatttcgactctctaaacgtgatgaaaacctgtatccaagggctggcaggactcgaggtgcatcgactggtccttggcgagttccgaaatgaggggaaccttgagaaattcgacaagtctgcacttgagggcctgtgtaacctgaccattgaagagttccggctagcttatcttgactattaccttgatgacattatcgacttgtttaactgcctcaccaacgtcagctctttctctctggtgagtgtgactattgaaagggttaaagatttcagttacaactttgggtggcagcatttagagctggtgaattgtaagttcgggcaattcccaactctaaaactcaaatcgctgaagcggttaacattcacaagtaacaaaggcggaaatgcattttctgaggtggacctgccatcacttgagtttctggacctcagtagaaacggcctgtctttcaaagggtgttgcagccagtcagattttggcaccacgtcccttaagtatttagacctctctttcaacggagttatcacgatgtctagcaatttcctgggcttagagcagcttgaacatttagacttccaacatagtaatctaaagcagatgtctgaattcagcgtttttctttccctgagaaacctcatttatctcgatatctcacatacccatactagagtggcttttaatggtatttttaatggactgtcttcgctggaggtgctcaagatggccggaaactcatttcaagaaaacttcctgccagatatctttacagagctgagaaacctgacttttttagatctctcccagtgtcagctagagcagctctcacctactgctttcaatagtctatcctccctgcaggtcctcaacatgagtcataacaacttctttagcctggatacttttccatataagtgtctcaatagtcttcaagtactcgattactcactgaatcatattatgacgagcaaaaagcaggaactgcagcacttcccttcaagcttggcctttttaaatcttactcagaatgatttcgcttgcacgtgcgaacaccaatccttcctgcaatggatcaaggatcagaggcagcttctggttgaggtagagcgcatggaatgcgcgacaccatccgataaacagggaatgccggtactgagccttaacataacatgccagatgaacaaaactataattggtgtatccgtcctcagtgtgctggtagtgtcagtggtggctgttttagtttacaaattttacttccatctaatgttgctggctgggtgtatcaagtatggccgtggcgagaatatctacgatgccttcgtcatctattcttcccaggacgaggattgggtcaggaatgaactcgtgaagaatttggaagaaggtgttccacccttccagctttgcctacattacagagatttcattcctggcgtggccatcgctgctaatattattcacgaaggcttccataaatctcggaaagtcatcgtggtcgtgtcccagcattttatccagtcgagatggtgcatcttcgagtacgagattgcccagacatggcagtttctcagctcaagggcgggcatcatatttattgtactccagaaagttgagaaaacattactccgccaacaggtcgagctatacaggcttctgtcccggaacacctatttggaatgggaggactccgtgctgggaagacacatattctggagaaggcttcggaaggctctgttggatggcaagagttggaatcctgagggcaccgtgggcacaggctgtaactggcaagaagccacatccatatag

SEQ ID NO: 17712 - DNA, 2400 bp, synthetic construct
  misc_feature 1..2400: note = Description of Artificial Sequence: Synthetic coding sequence
  source 1..2400: mol_type = other DNA
atggaactgaacttctacaagatccctgataacctccccttcagcaccaagaaccttgatctgtcgttcaacccactgagacatttgggcagctactcattcttcagtttccccgaactccaggtgctggacttaagtagatgcgagatccagacgatagaggacggcgcttatcagtcactctcgcacctgtccaccctgattctgacaggtaatccaattcaatctctggcacttggcgcattttcaggcctgagctccctgcagaaacttgtggcggtggagacaaatctagcttccctggagaattttccgatcggccatctcaaaactctgaaagaattaaatgtcgcccacaacctgattcaatctttcaaactgccagagtacttttctaatttaaccaaccttgagcacctggacctgagttcaaataagatccagtccatatattgcactgatcttcgtgtgctgcaccagatgcccctgttaaacctgagcctagatctgtccttgaatcccatgaattttattcagccaggtgcgttcaaggagatccggctccacaagctcacactcagaaacaattttgattctctcaatgtgatgaaaacatgcatccaaggactggctggccttgaagtgcaccgcctcgtccttggcgaattcagaaacgagggaaacctggagaagttcgataagtcagctctggagggcctgtgcaatctgaccattgaggagttccgcctggcctacctcgactactaccttgacgatatcatagacctctttaattgtcttactaacgtaagctcttttagcctggtatctgttaccatcgagcgtgtgaaggatttcagctacaacttcggctggcagcacttagaactagtgaactgtaaatttggacagtttcctaccctgaagctgaaatccctcaagcggctcacattcacaagcaataagggtgggaacgccttttctgaggtggacctgccttctttagaattcctagacttatcaaggaacggcctgtcttttaaggggtgttgttctcaatcagatttcggaacaacatctctcaagtatctcgaccttagctttaatggggtcattacaatgtcctcaaactttctcggcctagaacaattggaacatctggatttccaacattcaaacttaaagcagatgtcagagttttccgtgttcctttctctgcgcaatctgatatacctggacatcagccatacccacacacgggtggcattcaacgggattttcaatggactgtcttcattagaggtgcttaaaatggctgggaacagcttccaggagaactttttgcctgacatctttaccgagctcaggaatctgacatttcttgacctgagccagtgccaattggaacagttgtcacctactgccttcaatagtttgtcttcactccaggtgctgaacatgtctcataataattttttttccttagatactttcccgtataaatgcttaaacagcctccaggttctggactactcactgaatcatataatgacctcgaaaaaacaggagctgcagcacttccctagctcgctggccttccttaacttgactcaaaacgattttgcttgtacatgtgagcaccaaagcttccttcaatggatcaaggatcaaaggcaacttctcgttgaggtagagcgcatggagtgtgcaacgccatcggataagcagggaatgccggtgttaagtctaaatattacttgccagatgaacaagacaattattggggtgtctgtactaagcgtcttagtggtctctgtcgtggccgtcctggtatacaaattctatttccacctgatgctgctcgcaggatgtatcaaatatggtcggggggagaatatctacgatgcttttgttatctatagtagccaggacgaagactgggttagaaatgaattggtcaagaacctggaagaaggtgtgcctccctttcagttgtgtctgcattatagggactttattcctggggtagcgattgccgccaatataatccacgagggatttcacaagtctaggaaagtgatagttgtggttagtcagcatttcatccagtcaaggtggtgcatcttcgagtacgagatcgcacagacttggcagtttctgagtagtcgggccgggattatcttcattgtcttgcagaaagtcgagaagaccttactccgccagcaggtagagctctatcgtcttctgtctaggaatacctacttggaatgggaagactccgtcttgggtaggcacatattttggcgtagactgaggaaagctctcctcgatgggaagtcttggaatccggaaggcactgtggggactgggtgcaactggcaggaagcgacttccatctag

SEQ ID NO: 17713 - DNA, 2577 bp, synthetic construct
  misc_feature 1..2577: note = Description of Artificial Sequence: Synthetic coding sequence
  source 1..2577: mol_type = other DNA
atgggcgaccaccttgacttacttcttggcgtcgtattgatggccggacccgtattcggaattccttcctgctctttcgatgggagaatcgcattttaccggttctgcaacctgacacaagtgcctcaggtactgaatacaaccgaacggttgctgttgtcctttaattacatccgcactgtcactgcctccagttttccgtttttggaacagctgcagctgctggagctcggctcccagtacacccctctgactatcgataaagaggcgtttcggaatctgcccaacttgcgaattcttgatctgggcagctccaagatctattttttacatcccgatgcgtttcaagggctttttcatctcttcgaactgcgactctacttttgcgggctgagtgatgcggttctgaaggacggttattttcgcaacctgaaggcactgactcgactggatctgtctaaaaaccaaattcggtctctatacctgcacccctcattcgggaaactgaacagcctgaaatctattgacttttccagcaatcaaattttcctggtgtgcgagcatgaactcgagccactccagggaaagacattgtctttcttcagtctggccgccaactcactctactccagggtaagtgtcgattggggaaagtgtatgaatccgtttcgcaatatggtgctggaaattttagacgtctccgggaatgggtggactgtcgatataaccggaaactttagtaatgccattagcaagtctcaagcgttcagtctgatccttgcgcaccacattatgggcgctgggtttggttttcataacattaaggatccagaccagaacacttttgctggtcttgctaggagctctgtaaggcacctcgacctttcacacgggtttgtcttcagcttgaatagtcgcgtctttgaaaccctgaaggacttaaaggtgctaaacctggcttataataaaataaacaagatcgcagatgaagctttctatggtcttgacaatcttcaggttttaaacctgagctataacctgctgggcgagctgtactcctccaatttctatgggctgcctaaggtggcctatatagatctgcagaagaatcacatcgcaataatccaggaccagacatttaaattcctggaaaagcttcaaacactggacctcagagataacgctctgaccactattcacttcatccctagtattcccgatatcttcctgtctggtaacaagcttgtgaccttgcctaagattaacctgactgccaacctgatacacctgtctgaaaatcgactggaaaatctggatatcctctatttcctgctgcgcgtcccccatctgcagatcttgattttgaaccaaaatagatttagttcctgctcaggggaccagaccccctccgagaatccatcccttgaacaactgtttctcggtgaaaacatgctgcaactggcatgggaaaccgagctttgttgggatgtttttgagggactgagccatcttcaggttttgtacctaaatcataattatctcaattcacttccccccggggtgttctcacacctaaccgcgctgaggggactgagtctgaacagtaaccggctgacagtattgtcgcacaacgatctcccagccaacttagaaatactagacatttcgaggaaccagctgctcgcgccaaaccccgacgtattcgtgtccctttctgtgcttgacatcactcacaacaaatttatctgcgaatgcgagcttagtacatttatcaactggctgaatcatactaacgtgacaatcgccgggccgcccgctgatatctactgtgtgtaccccgacagctttagtggcgtctctctgttctcgctatctaccgaaggatgcgacgaggaggaggtgctcaaatcccttaagttctccttatttatcgtctgcacagtcacactgaccctgtttttgatgaccatcctaacagtcaccaaattccggggattctgttttatttgttataaaacagctcagcgtctcgtttttaaagatcacccacaggggactgagcccgacatgtataagtatgatgcttacctctgcttttcgtcaaaggattttacctgggtccagaatgctctgctgaaacaccttgatactcaatatagcgaccaaaaccggttcaacctgtgctttgaggagagggacttcgtgcctggtgagaaccgcattgcaaacatacaggatgccatttggaacagcaggaagattgtgtgtttggtttccagacattttctcagggacggttggtgtctggaagcatttagctatgctcagggcagatgcctgagcgacctgaactctgccctaattatggtagtagtggggagtctgtcgcagtatcagttgatgaagcatcagtctattagaggatttgtccaaaagcagcaatacttacgctggccagaggactttcaggacgtgggatggttcctgcataagttgagccagcagatcttaaagaaagaaaaagaaaaaaaaaaagataacaatattcccttgcagacagtggctacgatcagttag

SEQ ID NO: 17714 - DNA, 2577 bp, synthetic construct
  misc_feature 1..2577: note = Description of Artificial Sequence: Synthetic coding sequence
  source 1..2577: mol_type = other DNA
atgggcgatcatctcgatctgctgttaggcgttgtcctgatggccggaccagttttcgggattccatcttgctcttttgatgggagaattgcattctatcgcttctgtaacctcactcaggtcccgcaggtgttaaacacaacagagcgcctactgctgtcctttaattacattagaacagttaccgcctcatcattccccttcttggagcaactgcagctgctagagttaggctctcagtacactcctctgacaatcgataaggaggccttcaggaacctccccaatttgaggatcctcgatcttggatcatcgaagatttatttccttcatcccgatgccttccaggggctatttcatctgtttgaactgcgactctatttctgcggcctgtctgacgccgtgctcaaggacggttacttcaggaacttgaaggctctgacccggctggatttgagcaagaaccaaatcagaagtctgtacctgcaccccagtttcggaaagctgaattccctcaagagcatcgacttcagctccaatcagattttcttagtttgtgagcacgagttggagccacttcagggaaagaccctgtccttttttagcctggcagcaaatagcctgtattctagagtgtccgttgactgggggaaatgtatgaatccatttaggaatatggttctggagattctcgatgtgtcgggaaatggttggacagtagatataactggaaatttttcaaatgccatctccaaatcccaggctttcagtctgatactcgcacatcatataatgggcgccggatttgggtttcataatattaaagaccccgaccaaaacacttttgccggactggctcgctcatccgtccggcatctggacctgagtcacggcttcgtttttagcctcaatagcagagtgttcgagacactcaaggacctgaaggtgctgaacctcgcctacaataaaataaacaagatcgccgatgaggcgttctatggcctggataaccttcaggtcctcaatcttagctataacctcttgggcgaactttactccagtaacttctacggcctgcctaaggttgcatatatcgatctgcagaagaaccacatcgccatcatacaggaccagacctttaagtttcttgagaagctgcagacactggacttgagagataatgcgctcactacaattcattttatcccatctatccccgacattttcctgtcaggtaacaaactggtgactctgcccaagatcaatctcactgcgaacctgattcacctttccgagaataggttagaaaatctcgatatcctgtatttcctcctcagggtcccacacctccagattctgattttgaaccagaaccggtttagtagctgctcaggcgaccagaccccatcagagaatccatctctcgaacaactgtttctcggggaaaatatgctgcagctggcctgggaaactgagctgtgctgggacgtgttcgaggggttgtcacatctgcaggtgctctatctgaatcataattatctgaatagcctgcctccaggcgtcttttcccatctgacagctctcagaggcttgtctctcaatagcaatagacttactgtactgtcccacaacgacctgccagccaatcttgaaattctggatatctcccggaaccagctgctggcgcccaaccctgatgtgtttgtgagcttatcagtcctggacatcacccacaacaaatttatatgcgaatgtgagttaagcacttttatcaattggctgaatcacactaatgtcactatagctggaccacctgctgacatatactgcgtgtatccagacagcttctctggagtgtccctcttttctctgagtaccgaaggctgcgatgaagaagaggtactgaagagcctcaagttttctctgttcatcgtatgcacagttaccctgacactttttctgatgaccatcctgacagtcacaaaatttcgggggttttgcttcatctgttataaaacggcgcagagactggtgtttaaggaccacccccaggggaccgagccagacatgtataaatacgatgcttacttgtgtttctcctccaaggacttcacatgggtccagaatgccctgttgaaacacctcgacacccagtactccgatcagaacaggttcaatttgtgttttgaggaaagggatttcgtacccggcgaaaaccgaatcgccaacattcaggatgcaatttggaactctaggaaaatagtgtgtctggtgagccggcacttccttcgagatgggtggtgtctggaggcattttcatacgcacaagggcgatgcctctctgacctcaattccgctctaatcatggtcgtggtaggttccctttcacagtaccagttgatgaaacaccagagtattcgcggcttcgtccagaaacaacagtatttgcgttggcccgaggacttccaggatgtcgggtggtttctccacaagttaagccaacagatcttgaagaaggagaaagaaaagaaaaaggacaacaacatccccctgcagactgttgctaccatctcgtag

SEQ ID NO: 17715 - DNA, 66 bp, synthetic construct
  misc_feature 1..66: note = Description of Artificial Sequence: Synthetic coding sequence
  source 1..66: mol_type = other DNA
atgggagaccatctggacctgctcttaggcgtggtgctgatggccggaccagtgttcggcatatag

SEQ ID NO: 17716 - DNA, 2577 bp, synthetic construct
  misc_feature 1..2577: note = Description of Artificial Sequence: Synthetic coding sequence
  source 1..2577: mol_type = other DNA
atgggcgaccacttggacctccttctgggagttgtactgatggctggccctgtatttggcataccaagctgttctttcgatgggcggatcgccttttatcgcttttgcaacctgacacaggtgccacaagtactcaatacaactgagaggctgctgctctcctttaattacattcgtacagtaacagccagttcgttccctttcttagagcagctgcagctgctggagctggggagccagtacacacccctgacgatagataaagaggctttcagaaatctgcccaacctacggatcttagaccttggaagcagtaaaatatacttcttgcatcccgacgcctttcaaggcttgttccacctgttcgagctgaggctctatttctgcggactgagtgatgctgtattgaaggacggatacttccgcaacctgaaagctttaacccggctcgatctgagcaaaaatcagatccggtccttgtacctacacccaagttttggaaaactgaattccctgaagtcgatagatttcagttcaaaccagattttcctcgtttgtgagcacgagctcgagcctctccaaggaaaaaccctgtctttttttagccttgcggctaactccctctatagccgggtgagcgtggactgggggaagtgtatgaaccccttcagaaacatggtgctagaaatcctcgatgtctccggaaacgggtggacagtggatatcacgggaaacttttctaatgccatttctaaatctcaggcatttagcctgattctagcacaccatatcatgggcgctggcttcggctttcacaatatcaaggaccccgaccagaatacttttgccgggttagctcggagctccgtgcggcacttggacttatcacacggatttgttttttctctaaacagcagggtttttgagaccctgaaggatcttaaagtgctgaatctggcctacaacaaaattaataagatagcagacgaggcattctatggccttgataatctgcaagttttaaacttgtcttacaatttgctgggggaactgtacagttctaatttctatggcctacctaaggttgcatacattgacctacagaagaatcacattgccataattcaagatcaaacatttaaattcctggagaaactgcagaccctggacctgcgcgacaatgccctgacgacgatccacttcatccctagcatacccgatattttcttatccggaaacaaattggttactctgccaaaaatcaaccttacagccaacctgatccacctgtctgagaacagactggagaacctggacatactttacttcctgctaagagtaccacatcttcagatcctgattctgaaccagaaccgattctcgtcctgctccggcgatcagaccccaagcgaaaacccctctctggagcagctctttctcggagagaacatgttgcaactcgcatgggagaccgaactgtgttgggatgtgtttgagggtctttctcatctgcaagtcttgtacctgaatcacaactatctgaattctttacctcctggcgtattctcgcatctgacagcactcagaggcctcagcctgaattctaacaggctgactgtgctcagtcacaacgatctcccggcaaacttagagatactggacatcagccggaaccagctgctcgcacccaatccagacgtgtttgtgagcctatcagttctggatatcactcataataagttcatttgcgagtgcgagctgagcaccttcattaattggctaaaccacactaatgtcacgatcgccgggccaccagcagatatatattgcgtgtatccggacagctttagcggtgtgagcctgttctctctgagtacagaggggtgtgatgaggaggaagtcttgaagagtctgaagttttccctctttatcgtttgcaccgttaccctgaccctctttttgatgactatcctgaccgttaccaagttcagagggttctgtttcatttgttataagacagcgcaacggctcgtgtttaaggaccatcctcagggaacagaacccgatatgtataagtatgatgcatatctttgcttttcttctaaggactttacctgggtccaaaatgcactccttaagcatcttgacactcagtacagtgaccaaaaccgcttcaacttatgtttcgaagagagagattttgtgcctggcgaaaatcgcattgcaaatatacaggacgctatttggaattcccgcaaaatagtatgtctagtatctcgacatttcttgcgagacggctggtgtctggaggcctttagctatgcccagggacggtgcctgtcagacctgaacagcgcgttgattatggtcgttgtggggtctctctcacaataccagctgatgaaacaccaaagtattcgaggattcgtccagaaacagcagtatctcagatggcctgaagacttccaggatgttggttggttcttacacaagctttctcagcaaatcttgaagaaggaaaaagagaaaaaaaaagataataacatccccttgcagaccgtcgccacaatctcctag

SEQ ID NO: 17717 - DNA, 4836 bp, synthetic construct
  misc_feature 1..4836: note = Description of Artificial Sequence: Synthetic coding sequence
  source 1..4836: mol_type = other DNA
caggtgagcccctcccatcctgtaaatgagaacatgcaggtcaataagatcaagaaaaatgaggacgccaagaagagattaagtgttgagaggatctaccagaagaagacccagctggaacatattctcctcaggccagatacctatatcggttcggtggaactggtgacccagcagatgtgggtgtacgacgaggacgtggggatcaattaccgggaagtcaccttcgtgccaggcctgtataagatttttgatgaaattctggtgaacgctgcggataacaaacaacgggatccaaaaatgtcttgcattagggtgactatcgatccggagaacaatctgattagcatttggaacaacggaaaaggcatcccagtcgtggaacacaaggtggagaaaatgtacgtccccgctttgatcttcggccagctgttaacatcctctaactacgatgatgatgaaaagaaagtcaccggcggaaggaacgggtatggggctaagctctgtaatatcttttctactaagtttacagtggaaacggctagccgcgagtataaaaagatgtttaagcagacatggatggataacatggggcgggccggagagatggagttgaagccattcaatggcgaggattacacctgcatcacctttcagcctgacctcagcaagttcaaaatgcaaagcctggacaaggatattgtggcccttatggttcgcagagcatatgacatagcaggctccaccaaggatgtcaaggtgtttctgaatggcaataagcttcccgtaaagggatttaggtcctatgtcgatatgtacttgaaggataagctggatgagacaggcaatagcctaaaagtcattcatgagcaggtgaatcatcggtgggaagtttgcctgacaatgagcgagaaaggcttccagcagatctcgttcgtcaactctatcgccacctccaaggggggacgccacgtggactacgtggcagatcagatcgtgactaagctagtggatgtcgttaaaaaaaaaaacaaaggtggtgtagctgtaaaagcacaccagcgactggaatgctccggaaccatctctgctcactgcaacctaaggctgcttggcttctcagactctctggccagtgcgtctagagtggccgagatcacagacatgcatcaccatattcagctgatcttcgtatttctgattgagatgggattctaccatgtcgggcaggctggcctggaactattggcgagtctcgacccgccctctagtgcatcgtgcgtttctcactgtactcagttgtttgtgtcgaatttcatctacctgtttttaatttttctcaggaggagcttcactttcgtgactcaggccggcgtgcagtgcactatctcgccaaccagtagctccgtgttagcgcagttcttcgagtctttcctgttcgtcgccatcggatgtggaattgttgagtctatattaaactgggtgaaatttaaagcccaggttcagctgaataaaaagtgctccgctgtgaagcacaaccggataaagggcattccaaagttggatgacgctaacgacgccggtgggcgcaactccaccgagtgcactttgatcctgacggagggtgacagtgctaaaaccttggccgtcagtggattgggagtggtcggtcgcgataaatatggcgtgtttcctctgcgcggtaagattctgaatgttcgcgaagcttctcataaacagattatggagaatgcagaaatcaataacatcatcaagatcgtcgggttgcagtataaaaagaactacgaggatgaggacagtctaaaaactttacggtatggaaagataatgatcatgaccgatcaagaccaggacgggtcccacattaaaggtctactgattaattttatacaccacaattggccatctttgctgaggcatagatttttagaagaatttatcacccctatcgtcaaagtgtccaagaacaagcaggagatggcattctactccttacccgagttcgaagaatggaaatcctctactcctaaccacaagaaatggaaggtcaagtattacaagggcctcggcacatcaacttccaaagaggctaaggagtactttgccgacatgaagaggcacagaatacaattcaagtattccggacccgaagacgatgccgcaatctctttagcctttagcaaaaaacagattgatgaccgcaaggaatggctaacaaatttcatggaggatagacgccaaagaaagctactggggctgccagaagattacctgtatggccagacaacgacttatctgacctacaatgactttattaataaggagctcatactgtttagcaattccgacaatgagagatcgattcctagcatggttgatgggttaaagcctgggcagagaaaggtgctgttcacctgttttaaacgcaacgacaagagagaagttaaggtggctcaactcgctggctctgtggccgaaatgagtagctatcaccacggggaaatgagtctcatgatgacaattattaatctggcacaaaactttgtaggctctaataatctcaatcttctccagccaatcggccagtttggaactcggctgcacggcgggaaggactcggcatcaccccgctatatttttacaatgctttccagcctggctaggctcctctttccacccaaagacgaccataccctgaaattcctatacgacgataatcagcgggtggaaccggaatggtacatccctatcatacctatggtcctgatcaacggagctgagggtatcggaacaggttggtcttgtaagatccccaattttgacgtgagagaaattgtcaataatatccggaggctgatggatggggaagagccgctgcccatgttgccaagttacaaaaacttcaagggaaccatcgaggagcttgccccaaatcagtacgtgatttccggcgaggtagcgatcctcaactcgacaaccatcgaaatcagcgaactgcctgtgcgtacgtggacccagacttacaaggaacaagttcttgagcccatgttgaacgggaccgaaaagacacccccactcattaccgattatagggagtatcatacagacacgactgtcaaatttgttgtaaaaatgacagaagagaaacttgcggaagccgagcgtgtcggtctgcacaaggtgtttaaattgcaaacttcgctgacttgtaactctatggtcctgtttgatcacgtgggatgtttgaaaaaatacgacacagtcctcgatatccttagggacttcttcgagctcaggctcaagtactatggactgcggaaggagtggctgctgggcatgctaggagcagagagcgcaaagctgaataatcaggcacgcttcattttagagaagatcgacgggaagattataattgaaaataaaccgaaaaaggagcttatcaaggtcctgattcaaagggggtatgactccgacccagtaaaagcttggaaggaggctcaacagaaagtcccggatgaggaggagaatgaggagagcgacaacgaaaaagagaccgagaagtctgactcagtgactgacagcggacctactttcaactacctcctggatatgcctttatggtatctgaccaaagaaaagaaggatgaactgtgtcgactgaggaacgagaaagagcaagaactggacaccctgaagagaaagagtccatccgacttgtggaaagaggacctcgccacctttatcgaagaactggaggctgttgaggccaaggaaaaacaggatgagcaggtggggctgcctgggaaaggtggaaaagcaaaaggtaagaaaactcaaatggccgaggtcctcccatctcctaggggtcagagagttattcccagaatcactatagaaatgaaggctgaggccgagaagaaaaacaagaaaaaaattaaaaatgaaaatacagagggttccccccaggaggacggcgtggaactggaaggactcaaacagagattagagaagaaacagaaacgggaacccgggactaagaccaaaaagcaaacaactcttgcattcaaaccgatcaaaaaggggaaaaaacgtaacccctggtccgactccgagtccgataggagctctgacgagtccaatttcgacgtgcccccgagagaaaccgagcccaggagagcagccaccaaaacaaagttcactatggacctcgacagtgacgaggacttttctgattttgatgagaaaacagatgacgaggattttgttccgtccgatgcaagccctccaaaaaccaagacatctcccaaactttccaataaagagctcaagccacagaagagtgtggtgagcgatttagaggctgacgacgtgaagggcagcgtgcctctgagctcctcaccgcccgccacccactttccagacgaaacagagattaccaatccagtgccaaaaaaaaacgtaacggtgaagaaaaccgccgctaagtctcagtcctccacctcaaccactggggctaagaagcgggccgcgcctaaaggaaccaaacgtgatcccgccttgaattccggcgtgtctcagaagcccgatcccgctaaaaccaaaaacaggcggaagcggaagcccagtaccagcgacgattcggattcaaatttcgaaaaaatcgtcagcaaggccgtaacatcgaagaagagcaaaggggaatctgatgattttcatatggattttgattctgccgtggccccacgagcaaagagcgtgagagctaaaaagccgatcaagtacctggaagagtcagacgaggatgacctgttctag

SEQ ID NO: 17718 - DNA, 4665 bp, synthetic construct
  misc_feature 1..4665: note = Description of Artificial Sequence: Synthetic coding sequence
  source 1..4665: mol_type = other DNA
caggttagtccatcacaccccgtgaacgagaatatgcaggtgaacaagatcaagaagaatgaggacgccaagaagagacttagtgtcgaaaggatataccagaaaaagacccagctcgaacacattctcctgcgtcctgacacgtatataggatccgtggaactggtgacccaacagatgtgggtatatgacgaggacgtcggcattaattatcgcgaagtcaccttcgttcctggtctctataagatttttgatgagatcctcgtgaatgctgccgataacaaacagcgtgatcccaagatgagctgcattagggtcactatagatcctgagaataatctgatctctatttggaacaatggtaaggggattcccgtggtcgaacataaggtcgagaagatgtatgtgccagccctcatcttcggccagttgttgacatcctcgaactacgatgacgacgaaaagaaagtgaccggggggcggaatgggtacggagccaaactgtgcaatattttcagcaccaagttcacagtggaaaccgcaagtcgggagtacaaaaagatgtttaagcaaacctggatggataacatggggcgggctggagaaatggagcttaaaccgttcaacggcgaagactatacatgcatcacattccagcccgacctgagcaaatttaaaatgcaaagtctggataaagatattgttgcacttatggtacgccgtgcatatgacatcgcaggcagcaccaaggacgttaaagtctttctaaacgggaacaagctgcctgtgaaggggttccggagctatgtggacatgtatctcaaggacaaactagatgagacaggcaatagcctgaaggtgatccacgagcaggtgaatcacaggtgggaggtgtgtctgacaatgtcggagaaaggttttcagcagatatctttcgtgaattccatagcgactagcaaaggcgggcggcatgttgattacgttgctgaccaaatagtgacaaagctggtggacgtcgtcaagaaaaagaataaagggggtgtcgctgtgaaagctcaccaggtgaagaaccacatgtggattttcgtaaatgcactgattgagaacccaacatttgactctcagacaaaagagaatatgaccctccaacctaaaagctttggctctacttgccagctctccgaaaagttcataaaagccgcccacctgtacagccgctttcttatcgacccattttttcctaacatgattcccaatatgaatctcttccaagccattggatgtggcatcgtcgaatcgattctgaattgggtaaaatttaaggcgcaggtgcaattgaacaagaagtgcagcgccgtgaagcacaataggatcaagggcattcctaaactggacgatgccaatgatgcagggggcagaaactccaccgagtgcacactcattttgaccgagggtgactccgctaagaccctggctgtttccgggctgggtgtggttggccgagacaaatacggcgtttttcctttacgggggaaaatcctgaatgtccgcgaggcttcgcacaagcagataatggagaatgctgaaataaacaacataatcaagatcgttggattgcagtacaagaaaaactacgaggatgaggactcactgaagactctccgatacggaaagataatgatcatgacagatcaggatcaagacgggtcgcatataaaagggcttctcattaatttcattcatcataattggccatcgcttctcagacatagattcctcgaagagtttataacgcctatcgtgaaggtatctaaaaacaagcaagaaatggctttttactcactaccagagttcgaggaatggaagagctcgactccgaatcataagaagtggaaagtgaagtattacaaggggctgggaactagcacgtccaaagaagccaaggagtacttcgcagatatgaagcggcacaggatccagtttaaatactcaggccccgaagatgacgccgcaatttccctggccttttcgaaaaagcaaatagatgatcgcaaagaatggctgaccaattttatggaagacaggcgccagcgcaagcttttaggcctgccagaggactacttgtatggacagacgaccacctatctcacgtacaacgattttattaacaaagagctcatcctgttttctaactccgataatgaacgttctattccgagcatggtggatggactgaagcctggccagcggaaggtactgttcacatgttttaagcggaacgataagcgagaggtgaaagtggcccagctggccggcagcgtagcagagatgagctcgtaccaccatggcgagatgtcactaatgatgacgatcatcaatttagcccagaatttcgtgggcagtaataacctcaacctattacagcctataggacagtttggaactaggctgcatggcggaaaagattcagccagtcctcgctacattttcaccatgctgagtagcctggctagactgctctttcccccaaaagatgatcacacactaaagtttctgtacgatgataaccagcgcgtggaacctgagtggtacatcccaatcattcccatggttctgatcaacggcgcagaggggatcggaacagggtggtcttgcaagattccaaatttcgacgtgcgcgagattgttaacaatattcggcgtttgatggacggtgaagagccattgccaatgttaccatcctacaaaaatttcaaaggaactattgaggaactggcacccaatcagtatgtgatttctggggaggtcgccattctcaacagcactactatagaaatcagcgaactccccgtgaggacatggactcagacttataaggaacaggtgcttgaacccatgctaaacggcacagagaagacacctcctctgatcacagactatcgggagtaccacacggacaccaccgtgaaatttgttgtgaaaatgacggaggagaaattggccgaagcagagagagtggggcttcacaaggtttttaagctgcaaactagcttaacatgcaactccatggtgttgtttgaccacgtgggctgcctgaagaagtatgacacagtcctagatatcctccgcgacttctttgaactgagactcaaatactacggattgcggaaagagtggttgctaggcatgctgggggctgaaagcgccaagctgaacaatcaggcccgctttatccttgagaagattgatgggaagatcattatcgaaaacaaaccaaagaaggaactgataaaagtgttgatccagagagggtacgattccgatccagttaaagcctggaaggaagcccagcagaaggtaccagatgaggaagagaacgaggagtcagataatgaaaaagagacagaaaagtccgatagcgtcaccgattccggaccgaccttcaactacttgctggatatgcctctgtggtatctgacaaaggagaagaaagacgaactatgccggttaagaaatgaaaaagaacaagagttggacaccctgaagaggaagagcccttccgatctttggaaggaagacctggccacattcatcgaggagctcgaggccgtggaggctaaagaaaaacaggatgaacaggtagggcttccggggaaaggaggtaaagcaaaggggaaaaagacgcaaatggcagaggttctgccttctcctagggggcagcgcgttatccctcgtattactattgagatgaaggctgaagccgagaaaaaaaacaaaaaaaaaataaaaaacgagaacactgaaggaagcccacaagaagacggcgtagagctcgaagggctgaaacagcgcctggagaaaaagcagaagcgagaaccgggaacgaaaacaaaaaaacagactacgcttgccttcaaaccaatcaagaaaggtaagaaaagaaatccttggtccgattcggagtcggaccgcagctcagacgagtccaatttcgacgtgcccccccgagagaccgagcccagaagggccgccaccaagacgaagtttacaatggacctcgattctgacgaggactttagcgatttcgacgaaaaaactgatgatgaagacttcgtgccatcggacgcatccccccctaagaccaaaacctcccccaaattatccaacaaggaacttaaaccccagaaaagcgtcgtttctgacctcgaggctgatgacgtgaaaggctccgtgccgttgagctcaagcccgcccgccacacatttccctgacgaaacggaaataactaatccagtccctaaaaaaaatgtcacggtgaagaagaccgccgcgaagtctcagagtagcacttccactaccggcgccaagaagcgcgccgccccaaaaggaaccaagagggatcctgcgctgaactccggggttagccagaagcctgacccggcaaagacgaaaaatcgcaggaagcgcaaaccgagtacatctgatgactccgattccaatttcgagaagattgtgtctaaagccgttacatcaaagaagagtaagggcgaatcagacgacttccatatggacttcgatagtgccgtggccccccgggctaagagtgtgagagctaaaaagccaatcaaatatcttgaggaatccgatgaggatgaccttttctag

SEQ ID NO: 17719 - DNA, 4707 bp, synthetic construct
  misc_feature 1..4707: note = Description of Artificial Sequence: Synthetic coding sequence
  source 1..4707: mol_type = other DNA
atggaggtgtcaccgctgcaaccggtcaatgaaaacatgcaagtgaacaagattaaaaagaacgaggacgctaagaagaggcttagcgtggagagaatctaccagaagaaaacacagctggaacatatcctgctcagaccagatacatacatagggagtgttgagctggtaacacaacagatgtgggtgtatgatgaggatgtcggcataaactacagggaagtgacattcgttccgggactgtataaaattttcgacgagatccttgtgaacgctgcggacaacaagcagagagatcctaagatgagttgcatcagagttactatcgaccctgagaacaatctgattagtatctggaacaatggaaaggggatccccgtggtcgagcacaaggtggagaaaatgtatgtcccagcactgatttttgggcagctcttgacctcttctaactatgatgacgacgagaagaaggtgaccggcgggaggaacggttatggagcgaaactctgcaacatcttcagcacaaagttcactgtcgaaacagcaagccgggaatacaaaaagatgttcaagcaggcaatcacttggatggacaatatgggccgggcaggagagatggagctgaaaccctttaatggcgaggattacacctgtatcacatttcagcctgacctgtccaaatttaaaatgcagtctctggacaaggacatcgtggctctaatggttaggcgagcctacgatatagccggcagtacaaaagacgtcaaggtattcctgaacgggaataagctgcccgtaaaaggctttcgctcctatgtggatatgtacctcaaagataagctagatgagactggtaatagcctgaaagtgatccacgagcaggtcaaccaccgatgggaagtctgtttgactatgagtgaaaagggctttcagcaaattagcttcgtaaactccatagcaacctcgaaagtcatcctgtttctcaattacatgatttacttgtacatctacgtgttcctgctgttcctcatttacaaagttgatctgaatatcggtttagcctattttaccggtggacgacacgtggactatgtggcggaccagatagtgaccaagttggtagacgtggtcaagaagaagaacaaaggtggagttgccgtaaaggcacatcaagttaaaaaccacatgtggattttcgtgaacgcactgattgagaaccctacgtttgactcccaaaccaaggaaaatatgacactgcagccaaagagcttcggctctacatgccagctgtcagagaagttcattaaagcagcaattggctgcggcattgttgagagtattttgaattgggtaaaattcaaggctcaggttcaactgaataaaaagtgcagcgcggtcaaacataataggataaagggaattcccaagctggacgatgctaacgacgccggcgggcggaactcaaccgagtgcactttgatcctaactgaaggagatagcgcgaaaacactggctgtatccggactgggcgttgttgggcgagataaatacggcgtatttcctttaagaggaaaaatcttaaatgtgcgcgaagcttctcataaacagatcatggaaaatgccgagatcaataatattattaagatagtaggacttcagtataaaaaaaactatgaagatgaagactcgctgaagactctgaggtatgggaaaattatgatcatgacagatcaggaccaagacggctcccatatcaagggcctcctgatcaacttcatacaccacaattggcccagcctcttgcggcacaggtttctggaggagtttatcactccaattgtgaaggtgtcaaaaaacaaacaggaaatggctttttactctctgcctgaatttgaagaatggaagtcctctactcctaaccataagaaatggaaagttaagtattacaaaggacttggcacttctacctctaaggaggcgaaggaatactttgctgatatgaagaggcataggatccagtttaaatattcaggtcctgaggacgatgctgcaatttctcttgctttttccaaaaaacagatagatgaccggaaagagtggttaacgaactttatggaagacaggcgtcagcggaagctgctgggcctgcccgaggattacttatacggccagactacgacatatctaacgtacaatgatttcattaacaaagaactgatcctgttctcgaattcggacaacgagcggtccatcccaagcatggtggatggactgaagcctgggcagaggaaggtgctcttcacctgctttaaacggaacgacaaacgagaggtgaaagtggcacaattagccggcagtgttgctgagatgagtagctaccatcacggggagatgagcctgatgatgaccataattaatcttgctcagaatttcgttggcagcaataacctcaatctgttacaacctattgggcaattcggaactcgcttgcatggtggaaaagattcggcctccccgcggtacattttcacaatgttgagctctctcgcaagactcttgttccctccaaaagatgaccacaccttgaagtttctctatgacgataaccagagagtggaacccgagtggtacattcccatcatcccaatggttctgatcaatggggcagaggggattggtacaggatggtcatgtaagattccaaacttcgatgttcgtgagatcgtaaataacatccgaagattgatggacggtgaggaaccactgcctatgctacccagctataagaattttaaagggacaatcgaagagcttgcgcccaatcagtatgttatcagtggtgaagttgctattttgaatagtacgaccatcgaaattagcgaactgcccgttcgaacctggacccaaacgtataaggaacaggtgctggaacccatgttaaacggtacagaaaagaccccccctctgatcacagattatagagaataccacacagacactaccgtcaagtttgtggtaaagatgacagaggaaaaactggccgaggcggaaagagtgggtctgcataaggtcttcaaattacagacgtctctgacctgcaatagcatggtcctgtttgaccatgtgggctgtcttaagaaatacgacaccgtcctggatattctccgcgactttttcgaattacgcttaaaatattacggcttgcggaaagaatggctcctaggcatgctcggagcagaatccgccaagctcaataatcaggctaggttcattttagagaagattgatggcaaaataatcatagaaaacaagcctaaaaaggaacttattaaagtactgatccagcggggctacgacagcgatccagtaaaggcctggaaggaggcccagcagaaagtccctgacgaagaggaaaatgaagagagtgataatgagaaggagaccgaaaagagcgactcagtcacggactctggtcccacgttcaattacctactcgacatgccactctggtatctgacaaaggagaaaaaggatgaactttgccgcctgcgcaatgaaaaggagcaagagctagataccctcaagcgcaagagcccatccgacctgtggaaagaggatctggcaacctttatcgaggagttggaggcggtagaggcaaaagaaaagcaagatgagcaagtaggattaccggggaagggcggcaaagctaaggggaagaaaacacagatggctgaggttttgccttcaccccgcggtcagagggtgattccccgtattaccatagagatgaaggccgaggccgagaagaagaataagaaaaaaatcaaaaatgagaacaccgaagggtcaccccaggaggacggagttgagctggagggcctgaaacaacgcctggagaaaaagcagaaaagggagcctggcactaagaccaaaaaacagacgactctcgctttcaaacctatcaagaaggggaaaaaacgcaacccctggtcagacagcgagtcagataggtctagcgatgagagtaactttgacgtccctccccgagagacagagccacgtcgagctgcaaccaagactaaatttaccatggatctggattctgacgaagatttctccgatttcgacgagaaaactgacgatgaggatttcgtgccatccgatgcctccccgcctaagacgaagacttcccccaaacagaattgcaataaagagctgaagccgcaaaaaagcgtggtctctgatcttgaagcggacgacgtgaaaggttcagttccactctcctcgtcacccccagcaactcacttccctgatgaaactgagattaccaatcccgtccccaagaaaaacgtaactgtaaagaagacagccgccaaaagccagagtagtacgtctactacaggcgccaaaaagcgcgcagcgcctaaaggaactaaacgggaccctgccctgaatagtggtgtgtcacagaagccggaccctgcaaaaaccaagaatcgtcgcaaacgcaagccttccaccagcgacgattcggattctaacttcgagaagatcgtctcaaaggccgtgacatcaaagaaatctaaaggggagtccgacgacttccacatggatttcgatagcgcagtcgccccccgcgccaagtcagtaagagccaaaaagcctattaaatacctggaggaatccgacgaagacgacctgttttag

SEQ ID NO: 17720 - DNA, 4596 bp, synthetic construct
  misc_feature 1..4596: note = Description of Artificial Sequence: Synthetic coding sequence
  source 1..4596: mol_type = other DNA
atggaagtgagcccgctgcagccggtgaacgaaaatatgcaagtcaacaaaattaagaaaaatgaggacgcaaagaaacggctctccgtagagagaatctatcaaaaaaaaacccaactcgaacatatcctgttgcggcccgacacctacattgggtccgtggagttagtgacacagcagatgtgggtgtacgatgaggatgtgggaattaactaccgcgaagtgaccttcgtgccaggactctacaagatcttcgacgaaatcctcgtcaatgcagctgataacaagcaaagagatccaaaaatgagctgtatccgcgtgactattgatcccgagaacaatctcatctccatttggaacaacggaaaaggaattccagtggtggagcataaagtagagaagatgtacgtcccggcgctgatttttggccagctcctgacaagcagcaattatgacgatgatgaaaagaaggtgaccggaggtaggaacggctacggagctaagctgtgtaacatcttttccaccaagtttaccgtagaaaccgccagccgggaatacaagaaaatgtttaaacagacgtggatggacaatatggggcgcgccggggaaatggaattgaagcctttcaatggcgaggactatacatgcatcacatttcagcctgatttatctaagttcaagatgcaatcactcgataaagatatcgttgccctgatggtcaggcgggcttacgatatagcaggcagtaccaaagacgttaaggttttcttgaatggaaataaattgccggtcaaggggttcagatcttacgtcgacatgtatctgaaggataaactggacgagactggcaatagtctcaaagtgatacacgaacaggtaaatcataggtgggaagtctgtctcaccatgagtgagaagggcttccagcagatctcgtttgtcaactccattgctacaagcaaaggcggccgacatgtcgactatgtggccgatcagattgttacaaagcttgtggatgtggtcaaaaagaaaaataaaggtggtgtggcagtcaaagctcaccaggtgaaaaaccatatgtggattttcgtcaatgcactaatcgagaatcctacgttcgattcccaaaccaaagaaaatatgactctgcagccaaaaagttttggctctacatgccagctgtcagaaaaatttatcaaagcagccatcgggtgtggtatagtggagtctatcctgaactgggtcaaattcaaggcacaggtgcagctgaacaaaaaatgcagcgccgtgaaacacaataggatcaaggggatcccaaagttggacgacgccaacgatgctgggggcaggaatagtacagagtgtacattaatacttaccgagggggatagtgctaaaacgctcgccgtatcaggcctgggagttgttggtcgcgacaagtacggggtattccctttgaggggtaagattctgaatgtgagggaagctagtcacaagcaaattatggaaaacgctgagattaacaacatcattaagatagtgggactgcagtataaaaaaaactatgaagacgaagactccctcaaaactcttaggtacggcaaaattatgataatgacagaccaagaccaggacggtagccacatcaaaggactcctcattaacttcatccatcacaattggccctcactgctaagacaccgcttcctagaggagttcatcacccctattgttaaagtgtccaagaacaagcaggaaatggctttctattccctgccagagtttgaagagtggaaaagcagcactcctaatcacaaaaagtggaaagttaagtattataaaggactcggcacgtcaaccagcaaggaagcaaaggaatactttgccgatatgaaacggcatcggatccaatttaaatactctggtcccgaggacgacgccgcaatcagtcttgctttttcaaagaagcagatcgatgacagaaaagagtggctgaccaacttcatggaggaccgtcgtcagagaaaattacttggactgccagaagattacctctatggccaaaccacgacctaccttacttacaacgattttatcaataaggaactgattctttttagcaattccgacaatgaacgctcaatcccctcgatggtcgacggcctgaaaccgggacagcggaaggttctgtttacatgctttaaaagaaatgataagagggaggtgaaggtggcacagctggcgggcagcgtggctgagatgtccagctatcaccatggggagatgagcctgatgatgactatcattaatctggcccagaacttcgtaggatccaataacctgaacctcctgcagcccatcggccaatttggtacaaggttacatggagggaaggattcagcctcaccacgttacatatttacgatgctgtcgagtttagccaggctgctcttcccccctaaggatgatcacacactgaaattcctgtatgatgataatcagcgagtcgagcctgaatggtatattcctatcatcccgatggtgctgattaatggcgcagaggggatcggaactggctggtcgtgcaaaattcctaacttcgacgtgcgtgagatcgtgaacaacatcaggcgcctgatggacggtgaagaacccctcccaatgctgccctcttataaaaactttaaaggaacgatcgaggaactggcccccaaccagtatgtcatctcgggcgaggttgccatcctgaattctacaacgatcgagatttctgagctgcctgtgcggacttggacacagacctataaagaacaggtcctcgagcccatgttgaatgggaccgagaagactccccctctcatcactgattatcgagaatatcacaccgataccactgtaaaattcgtcgtgaaaatgacagaggagaagttggcggaggcagagagggttggcttgcataaggttttcaaattacaaaccagtctcacctgtaactctatggttctgtttgaccatgtggggtgcctgaaaaaatacgataccgtcttggacattctcagggatttcttcgagctgcggttgaagtattacggactccgcaaagagtggctgcttggcatgctaggcgccgagtctgccaagctgaataaccaggcccgattcattctggagaagattgacggcaaaattataatcgaaaataaaccaaagaaagaactcattaaggtattgatccaaaggggttatgattcggatcccgtcaaggcatggaaagaggcgcaacagaaggttccggacgaagaagaaaatgaagagagcgacaatgaaaaggaaaccgaaaaaagtgattcggttaccgacagtgggccaaccttcaactacctgttagacatgcccctgtggtacctaaccaaggaaaagaaagacgaactgtgtcgtctgaggaatgagaaagagcaggagctcgacactttgaagaggaaatctccctccgacctgtggaaagaggatctagccactttcatcgaagagttggaagcagtcgaagcaaaggagaagcaggacgaacaagtggggctccccgggaagggaggcaaggctaagggtaagaaaacccaaatggccgaagtgctgccttcacccagaggccagcgcgtgatcccacgcattacaatcgaaatgaaggccgaagccgaaaagaagaataagaagaagatcaagaatgaaaacaccgagggctcaccccaggaagacggagtggagctcgaaggcctcaaacagagactggaaaaaaagcagaagcgggagccaggaaccaaaacgaagaagcaaaccactctggcctttaagcccattaagaagggcaagaagcgaaatccctggtccgactcagaatctgacagaagctccgacgagtccaactttgatgtgcccccccgggaaacggagccccggagggcggccactaagaccaaatttactatggacctagacagcgacgaagatttcagcgactttgacgagaagaccgatgacgaagacttcgtgccatctgatgccagcccccctaaaaccaaaaccagtccaaagctatctaacaaagaattgaagccccagaagtcagtggtgtccgacctggaggcagacgatgttaaaggttccgtgcccctctccagttctccccctgcaacccactttccagacgagaccgagatcacaaatccagttcccaagaagaatgtcactgtgaagaagacggcagccaagagtcagtccagcacatctactactggggcaaaaaaacgcgcggcgcccaaaggtaccaagcgggatccggcgttaaactcaggagtcagccagaagcccgatcccgctaagacaaaaaacagacggaagagaaagccatccaccagcgacgacagcgattctaacttcgaaaagatcgtaagcaaagctgtgaccagtaaaaaatctaaaggcgaaagcgacgattttcacatggactttgactcagctgtggctcctcgcgccaaatcggtgcgcgctaagaagccaattaaatacctggaggagagcgatgaggacgacctgttctag

SEQ ID NO: 17721 - DNA, 4881 bp, synthetic construct
  misc_feature 1..4881: note = Description of Artificial Sequence: Synthetic coding sequence
  source 1..4881: mol_type = other DNA
atggcgaagagcggagggtgcggcgcaggggcgggggtgggaggcgggaacggcgcactcacgtgggttacactgttcgatcagaacaacgccgctaagaaggaagagtctgaaaccgccaataagaacgacagcagtaagaagctgagcgtcgaacgggtgtatcaaaaaaaaacacagctggaacacattcttttgagaccagacacctacattggctctgttgagccgctgacacagttcatgtgggtttacgatgaagatgtcgggatgaactgtagggaagttaccttcgtaccaggactgtacaaaatcttcgacgagattttagtgaacgctgctgataacaagcagagggacaaaaatatgacatgcataaaggtttcaattgatcctgaatctaatatcattagcatttggaataacggaaaaggtatccccgtggttgagcataaagtagagaaagtttatgttcctgctctcatattcgggcagctgctgaccagttccaactacgatgacgacgagaagaaagttacgggagggcgaaacggctatggggctaagctgtgcaatattttctctacaaagtttaccgtggaaacagcctgcaaggagtacaaacactcctttaaacagacttggatgaataacatgatgaagacaagcgaggcaaagattaagcactttgacggggaagattacacatgtatcacttttcagcccgacttgtctaagttcaagatggaaaagctggacaaagatatagttgccctgatgaccaggagagcctatgaccttgccggatcctgcaggggagtgaaggtaatgtttaatggcaaaaagctgcccgtcaacggattccgctcttatgtggatctgtacgtcaaagacaagctggacgagactggggtggctctcaaggtgatccacgagctagcaaatgaaagatgggatgtgtgcttgacgctctccgaaaaaggctttcagcagatctctttcgtcaattctatcgccacaacaaagggcggtcggcacgtcgattacgtcgtggatcaggtggtggggaaattaatcgaggttgtaaagaagaagaacaaggctggcgtctcggtcaaaccgttccaggtgaaaaaccatatctgggtgttcatcaattgtctgatcgaaaacccgacgtttgattctcagactaaagagaatatgacactccagcctaagtcctttggcagcaagtgccagctatctgagaaattttttaaggcagcctcaaactgtggcatcgtcgagtcaattctcaattgggtgaagttcaaggctcagacacagctgaataaaaaatgctcctccgtgaaatactctaagatcaaaggaattcccaaactggacgatgcaaatgacgccggcggcaaacactctctggagtgtactctgattctgactgaaggagatagcgccaaaagtctggcagtaagcggtctgggagtcattgggcgtgataggtatggcgttttccccctgcgtggaaagattctaaacgtccgggaagcgtcacataagcaaataatggaaaacgcggagatcaataatatcattaaaatagtcggattgcaatacaagaaaagctacgatgatgccgagtcattgaaaacattgcgctatggtaagatcatgatcatgacggatcaggaccaggatggctcgcatattaagggcctgctgatcaatttcatccaccataactggccttccctgcttaagcatggattcctggaggaattcatcactcccatcgtgaaagccagcaagaataaacaagagttatcattttactccataccagagtttgacgagtggaaaaaacacatcgaaaaccagaaggcctggaagattaaatactataagggtctgggaacgagcaccgctaaagaagctaaggagtacttcgcagatatggaacgccatcgtatcctctttcgatacgctgggccagaggatgacgccgcaattactcttgccttcagtaagaagaaaatcgacgacagaaaggagtggctcactaacttcatggaggatcgtcgacagcgaagactgcacggactaccagagcagtttctgtacggcactgctacgaagcacctaacttacaatgatttcattaataaggagctgatcctcttctccaacagcgacaatgaacgcagcatcccgagtctggtggatggatttaagcctgggcaaaggaaggtgttgttcacatgcttcaaaaggaacgataagagagaagttaaggtggcccaattggctgggtcagttgctgaaatgagcgcctatcatcatggggagcaggcactcatgatgacaatcgttaatcttgcccaaaactttgtggggtcaaataacattaatttgctgcagccgattggccagttcggtaccagactgcacggcggcaaggacgccgcctcacctaggtatatctttacgatgctgtcgaccttggccagattgctcttcccagcggttgacgataacctgctcaaatttctgtatgatgacaatcaaagggtggaacctgagtggtacatacccattatccccatggtgttgatcaacggggcagaaggaatcggaaccggctgggcatgtaagctccctaattatgatgcccgggagatagtgaacaatgtcaggcggatgctagacggattagacccacaccccatgctgcccaactacaaaaatttcaaaggaaccatccaggaactcggacagaatcagtatgctgtgtctggcgaaatttttgtggtagacagaaatacagttgaaataactgagcttcctgtgaggacatggacacaggtgtacaaggagcaggtacttgagcccatgctgaatgggactgacaagactccagccctgattagcgactacaaagagtatcataccgataccaccgtgaaatttgtcgtcaagatgacagaggagaagctagctcaggctgaagctgcagggctgcataaggtgttcaagcttcagacgactttgacctgcaattctatggtgctgtttgatcatatgggctgcctgaaaaagtatgaaactgttcaggatatacttaaggaattcttcgatctgaggctcagctactatgggcttcgcaaagagtggctggtaggcatgctcggtgctgaaagcaccaaacttaacaatcaggctcggttcattcttgaaaagattcagggaaagataaccatcgaaaatcgatctaagaaagacctgatacagatgctagtgcagcgaggatacgagtccgaccctgtaaaggcctggaaagaggcccaggagaaggctgctgaggaagacgagactcaaaaccagcatgatgacagctcctctgactccggcactccatccggacccgacttcaattatatcctgaacatgagtctctggtcactgacgaaagagaaagttgaggaactgattaaacagagagatgcgaaggggagggaggtaaatgatctgaaaaggaagagccctagcgatctttggaaggaagacctggcagcattcgtcgaagaattggacaaggtcgaatcccaggagcgggaagacgtcctcgctggtatgtcaggaaaggctatcaaagggaaggtggggaagcccaaggttaaaaaactccagttagaggaaacgatgcctagcccatacggccgaagaataatcccagaaattaccgctatgaaggccgacgcttctaagaagttgctaaagaagaaaaagggtgatttggacaccgcagcagtgaaagttgagttcgacgaggaattttcgggggcacctgttgaaggagccggggaggaagctcttacaccctccgtgcctattaacaaaggacctaagcccaagcgcgagaaaaaagagcctggcacccgcgtacggaaaacacctacatcctctggtaaacccagcgctaagaaggtgaaaaagcggaacccctggtctgacgatgagtctaagagtgaatctgatctcgaggagactgagccagtggtcatcccgagggactccctgcttaggcgggccgcagccgagcgcccaaagtacacgtttgatttttccgaggaagaggacgatgacgccgatgatgacgacgatgacaacaacgatctcgaggaactcaaagtcaaggcgagccccattacaaacgacggtgaggacgagttcgtcccatctgacggactggacaaagacgaatacactttttccccaggcaaaagcaaggccactcccgagaagagtctgcatgacaaaaaatcacaagattttggcaacttgttctccttcccaagttactcacagaaatcagaggatgacagcgccaagttcgattcaaacgaagaggattctgcctctgtattttccccctcgttcggactaaagcagactgataaagttcctagcaagacagtggcggccaaaaagggaaagccttcctccgatacggtacctaaacctaaaagagctcctaaacagaagaaggtcgtggaggccgtgaacagcgatagtgatagcgaattcgggattcctaaaaaaacgacaacacccaaggggaaaggccggggcgccaaaaagcgcaaggcaagcggaagcgaaaacgagggtgactacaatccaggacgcaaaacctcaaagacgacctccaagaaaccgaagaagacatcattcgatcaggattctgacgtcgatatctttccttccgactttccaactgaaccaccttctctcccacgaaccgggcgggcgcgtaaagaagtgaaatactttgccgaatcagacgaggaagaagatgatgtggatttcgcgatgtttaattag

SEQ ID NO: 17722 - DNA, 3453 bp, synthetic construct
  misc_feature 1..3453: note = Description of Artificial Sequence: Synthetic coding sequence
  source 1..3453: mol_type = other DNA
atggcgaagtccggcggctgtggtgcaggggccggagtcggcggcggcaatggggccctgacgtgggtgaacaatgctgcaaagaaagaggagtctgagaccgccaacaagaacgattcttctaaaaaattgtccgtcgagagagtgtatcagaagaaaacccaactcgaacatatcctactgcgcccagacacgtacatcgggtctgttgagcccttgacccagtttatgtgggtgtatgatgaggacgtggggatgaactgtagagaagtaacattcgtgcccggtctgtataagatcttcgatgagattctggtaaatgcagccgataacaagcaacgggacaagaatatgacctgtatcaaagtctccatcgatcctgagtcaaacataatttctatttggaataatggtaagggcattcctgttgtggagcataaggtggagaaggtctacgttccggctctaatcttcggtcagctgctcacctctagcaactatgatgatgacgaaaagaaggtcacgggcggcagaaatggctatggtgccaagttgtgtaacattttctctaccaagtttaccgtggaaaccgcctgtaaagaatacaaacactcgtttaaacagacctggatgaataatatgatgaagacaagcgaggcgaaaatcaaacacttcgacggtgaagattatacttgcatcacatttcagcccgacctgtccaagtttaagatggagaagctagataaagatatcgtcgcactgatgacaaggcgtgcgtacgacctcgcagggtcctgcagaggcgtgaaagtgatgttcaacggaaaaaaactaccagtcaatgggtttcggtcttatgtggatctgtatgtgaaggataaactggatgagacgggagtggccctgaaggtgattcacgagctcgcgaacgagaggtgggacgtttgtctgactttaagcgaaaaaggttttcaacaaatcagtttcgtgaatagcatcgccaccacaaaaggtggaaggcacgtggattacgtggtggaccaggtggtcggtaaactgattgaggttgtgaaaaagaagaacaaagccggtgtctccgtcaaaccgtttcaggtgaaaaatcatatatgggtatttatcaattgtctgatcgaaaatccaacatttgacagtcagaccaaagagaacatgacgctccaacccaaaagcttcgggagtaagtgccagctgtcggagaagttctttaaagccgcaagcaattgcgggatagtggaatcaattctgaactgggttaagttcaaagcgcaaactcagctgaataagaaatgctcgagcgtcaagtactcaaagataaagggaatcccaaagctggatgacgctaatgatgctggaggaaagcacagcctagagtgcaccctgatcctgaccgagggggattccgccaaatccctggccgtgtctggcctgggcgtgatcgggagagatcggtacggcgtattccccctgcgaggtaagattctgaacgtcagagaggcgtctcacaagcagataatggagaacgctgagattaacaacatcataaaaattgtaggacttcaatacaagaaatcttacgacgacgcggagtcgctcaaaaccctgaggtatggcaaaattatgatcatgacggaccaagaccaagacggtagccatattaaagggctgctgatcaactttatccatcacaattggccttctttgctgaagcatggattccttgaggagtttatcacacctatcgttaaagcctctaaaaataagcaagagctgtctttctatagcatcccagagtttgatgaatggaaaaagcacatcgagaaccagaaagcatggaagatcaaatactacaagggtttaggcacctcaaccgctaaggaggctaaggagtactttgcggatatggagcgccataggatactgttccggtatgcaggtcccgaggacgatgccgctatcacgctggctttctctaaaaaaaagattgacgatcggaaggagtggctcactaatttcatggaggatcgtcgccagcgccggctgcacgggctccccgagcaattcctatatgggacagctactaagcacttgacttataatgattttattaacaaagaactgatcctgtttagcaactccgacaacgaacgtagcattcctagcctcgtggacggatttaagcccgggcagagaaaggttttattcacttgtttcaaacggaatgataagcgcgaggttaaagtcgcccaactcgccggaagcgtcgcggaaatgagcgcttatcatcacggcgagcaggccctgatgatgacaattgtgaatctcgcccagaacttcgtaggctctaataatatcaacctgctacagcccattggacagttcgggactcgtctgcatggaggcaaggatgccgcttcaccaagatacatcttcacaatgctgtccactttggcgcggttgctttttcccgcagtggacgacaatctgctcaagtttctctacgacgacaatcaacgggtggagccagaatggtacattccgattatccctatggtgctgatcaatggagcagaagggatcgggactggctgggcgtgcaagctgcctaattacgatgccagggaaattgtgaacaatgttagacggatgctggatgggctggacccacatccaatgctccccaattacaaaaatttcaaaggcacaattcaagagctgggccagaaccagtacgctgtgagcggggagatcttcgtcgtggataggaacaccgtggagatcaccgagctccctgtgcgaacttggacacaggtgtacaaagaacaggtgctcgagcccatgcttaacggtacggataagaccccggccctcatcagcgactacaaggaatatcacactgatacaacggtcaaattcgtagtcaaaatgacagaggaaaaattggcccaggcagaggctgccggactgcataaggtctttaaattacagactaccttgacctgcaattcaatggtgctgtttgatcatatgggctgcctaaaaaaatacgagactgtgcaggacatcctgaaggaattttttgacctccgtttatcttactacggcctgcggaaggaatggttggtggggatgctgggtgccgaaagcacgaagctcaataaccaggcaaggttcattctggagaaaatacagggcaagatcacaattgagaatcggtcaaaaaaagatcttatccagatgcttgtgcaaagaggttatgagagcgatcccgttaaggcctggaaagaggcccaggagaaggccgccgaagaggatgaaactcaaaatcagcatgatgacagtagtagcgactctggcacccccagcggcccagacttcaactacatcctgaacatgagcttgtggagtctgacctag

SEQ ID NO: 17723 - DNA, 4866 bp, synthetic construct
  misc_feature 1..4866: note = Description of Artificial Sequence: Synthetic coding sequence
  source 1..4866: mol_type = other DNA
atggctaaaagtgggggatgtggcgccggggccggagttggtggtggtaacggagcccttacctgggtgaacaatgcagccaagaaagaagagagtgaaacggccaacaagaacgattcgtctaaaaagctgtcagtggagcgcgtataccagaaaaagactcaactggagcacatcctattgcggcctgacacttatatcgggagtgtggagccattgacccaatttatgtgggtgtacgatgaggacgtggggatgaattgtcgcgaggtgacctttgtgcccgggctgtacaagattttcgacgagattctggtgaacgccgcggacaacaagcaacgggacaaaaatatgacttgcatcaaggttagcatcgaccctgagagtaacattatttctatttggaataacgggaaaggaatcccagtggttgaacataaggttgaaaaagtctacgtgcccgcactcatatttggacagctgttgacatcctcaaattacgatgatgatgaaaaaaaagttacagggggaaggaatgggtacggggctaagctgtgtaacattttctcgactaaatttacagtggagaccgcttgcaaagaatacaaacacagcttcaagcagacatggatgaacaacatgatgaaaaccagtgaagctaagatcaagcactttgatggagaggactatacatgtattacatttcaacctgacttgtcaaagttcaaaatggaaaaattggacaaagatatcgttgcactcatgactcggcgcgcctatgacctggcgggatcctgccggggcgtcaaagtgatgtttaatggaaaaaagcttccggtgaacgggttccgctcttacgtggatctttacgtgaaagacaaattagacgaaacaggagtagctcttaaggtgatccacgagctggccaatgaacggtgggatgtttgcctgacgctgtctgagaaaggttttcagcaaatttcttttgtgaattcgatcgccactaccaagggcggacgtcacgtggattatgtggttgaccaggtagtgggtaagctgatagaggtcgttaagaaaaaaaacaaagccggtgtttctgtcaaaccctttcaggtcaaaaaccatatctgggtgtttatcaattgtttgattgaaaaccctacttttgactctcaaactaaagagaacatgacactgcagcctaagtctttcggaagcaagtgccaattgtctgagaagtttttcaaggccgccagcaattgtggaatcgtggaaagcatattgaactgggttaaatttaaagcgcaaactcagctcaataagaaatgttcgtctgtgaaatacagcaagattaaaggaatcccgaagctcgacgacgccaatgatgccggcggaaagcacagcttagagtgtaccctcatcctgaccgaaggtgactccgctaaatccctagccgtgagcggcttgggagtcatcggaagagataggtatggagttttcccactaaggggtaagattctgaatgttcgggaggcctcccacaaacaaatcatggagaacgccgagatcaacaatatcattaagatcgtcggtttacaatacaagaagtcttacgacgatgctgagtccctgaaaaccttgcggtatggaaagatcatgattatgacagatcaggaccaggatgggtctcatatcaagggcctcctgattaattttatccatcacaactggcctagtcttctgaaacatggatttctggaggaatttataactccaattgtcaaggctagcaagaacaaacaggagctctctttttacagcatcccagaatttgatgagtggaaaaagcatattgagaatcagaaggcctggaaaataaagtattacaaggggttgggcaccagcaccgctaaagaagctaaagaatacttcgcagatatggagaggcatagaatcctgttccgttacgcgggaccagaagatgatgctgctattactttggccttcagcaaaaaaaaaatcgatgatcgcaaagagtggctaacaaatttcatggaagatcgccggcagcggaggctccatgggttaccggaacagttcctatacggaacagctactaagcatttgacctacaatgactttattaacaaggagctgatcctcttctcaaacagtgataacgagagatccatcccgtctctggttgatgggttcaagccaggacagaggaaggtgctcttcacatgtttcaagaggaatgataagcgtgaggtgaaggtagcgcagctcgccggtagcgtggccgagatgagcgcctaccaccacggggagcaggcattgatgatgaccatcgtcaatctcgcccagaatttcgtggggtccaataacattaatctcttacagcctattggccagttcggtaccaggctgcacggaggtaaagatgctgcttctccaaggtacatttttacgatgttaagcactctggccagactgcttttcccagcggtggatgataacttgctcaagtttctgtatgacgacaatcagcgggtggagccggagtggtacattcctatcattcccatggtccttatcaacggggcagaagggataggaacaggctgggcctgcaagctacctaactatgacgcaagagaaatcgtcaataacgtacgccgcatgttggacggcctcgatcctcatcctatgctccctaattacaagaactttaagggcactatccaggagttaggacagaaccagtacgcagtgagcggcgagatctttgtagtggaccggaacacagtagagatcacagagttgccggtcagaacatggacacaggtgtacaaagaacaggtgctagagcctatgctgaacggtactgataagacgcccgcactaatttcggattacaaagagtatcatacggacactaccgtcaagtttgtcgttaaaatgactgaggagaagcttgctcaagcagaggccgcggggctccacaaagtatttaaactgcagaccacactgacatgtaattcaatggtgctgttcgatcatatgggctgtctcaagaagtacgaaaccgtgcaggacatactaaaagagtttttcgacttacgcctcagctactatggtctgcgtaaggagtggttggtggggatgctgggtgcagaatctactaagctaaataaccaggctcggtttattctagaaaagatccagggaaaaatcactatcgagaaccgaagcaaaaaagacctgatccaaatgttagtgcagcggggatacgagtccgaccctgtgaaggcatggaaagaggcacaggaaaaagctgccgaggaggacgagacccagaaccaacacgacgacagtagctccgatagtggcaccccgtcaggtccagatttcaactatatcttaaatatgtctttatggagtttgacaaaggaaaaagttgaggagctgatcaagcaaagggacgccaaggggagggaggttaatgaccttaaaagaaagagccctagcgatctctggaaggaagacctggcagccttcgtcgaagagcttgacaaggtggaatcccaggaaagggaagatgtgctggctggtatgagcggcaaggcaattaagggaaaggtcggcaagcctaaagtgaagaagctccagcttgaagagacgatgccatctccctacggaagacgaatcattcccgagatcacagcgatgaaagcagacgcttccaaaaaactgctgaagaaaaagaaaggggatttagatacagctgccgtcaaggtggagtttgatgaagagtttagcggcgcaccagtggagggggccggggaagaagccctgactcccagtgttcccatcaacaagggcccaaagcctaagagagaaaaaaaggagccgggcaccagagtgaggaaaacaccgactagttctggcaagccatcagccaaaaaggtgaaaaaacgtaacccctggtctgacgatgaatctaaatcagagtctgatttggaagagaccgagccggtggtgatcccacgggacagtttgctgcggcgggccgccgctgagcgacccaagtataccttcgacttcagcgaggaggaagacgatgatgctgacgatgacgatgatgacaataatgacctcgaggagctcaaggtgaaagcgagcccaattaccaatgatggggaagacgagttcgttcctagcgacggcctggacaaagatgagtatactttttctccggggaagagcaaagcgacccccgagaagagcttgcatgataaaaagtcacaggacttcgggaacttgttcagctttccgtcctattcccagaagtcagaggacgacagcgccaagttcgatagcaatgaggaagattctgccagtgtattcagcccatcgttcgggctcaaacagacggacaaagtgccctcaaagaccgttgctgcaaaaaaggggaagccgagctccgataccgttccaaagccaaaacgtgcacctaaacagaaaaaagtcgtggaggccgtcaacagcgactcagatagtgaatttgggattcctaaaaaaacaactacacccaaaggaaagggtcgaggagcaaagaaacgaaaggcgagcggaagtgagaatgagggcgactataaccctggcagaaaaacatctaagaccacgtccaagaagcctaaaaagacgtccttcgaccaagattctgatgtggacattttcccgagcgactttcctactgagccaccttccctaccacgtaccggcagggctagaaaggaggtgaagtacttcgctgagtctgatgaggaagaagatgatgtggacttcgcaatgttcaattag

SEQ ID NO: 17724 - DNA, 174 bp, synthetic construct
  misc_feature 1..174: note = Description of Artificial Sequence: Synthetic coding sequence
  source 1..174: mol_type = other DNA
accttgtttgaccagaacaacgccgctaagaaggaagaatctgagactgctaacaagaacgattcttcaaaaaagttaagcgtggagcgtgtgtaccaaaaaaaaacacagctcgagcacatactactccgacctgacacctacattggttcggtcgaacccctcactcagtag

SEQ ID NO: 17725 - DNA, 1437 bp, synthetic construct
  misc_feature 1..1437: note = Description of Artificial Sequence: Synthetic coding sequence
  source 1..1437: mol_type = other DNA
atgtcgctctggagccttaccaaagaaaaggtggaggagctgattaagcagagagacgcaaagggaagggaagttaatgatctgaaacgtaagagtccaagcgacctctggaaggaagacctcgccgctttcgtcgaagaactagacaaggtggagagtcaagaaagagaggatgtcttagccggcatgtctgggaaggcaatcaaaggtaaagtcggcaagccaaaagtgaagaagctgcagctggaagagaccatgccctccccgtacgggaggagaattatcccagagatcaccgctatgaaggccgatgctagtaaaaagctgctcaaaaaaaaaaaaggcgatctcgatacagcggccgtgaaagtggagtttgatgaagagttttctggggcccccgtcgaaggcgctggagaggaggcccttacccccagtgtccctatcaataaaggccccaagccaaagcgggagaagaaggagcccggcactcgcgtcagaaaaacacctacatcatctggaaaacctagcgccaagaaggtgaaaaaacgcaacccgtggagcgacgacgaatccaaatccgaatctgacctcgaagagactgagcccgtggttatcccaagagattcgctgcttcgtagagccgcagccgagaggcccaaatatacgttcgacttctcagaggaagaggacgacgatgccgatgatgacgatgatgataacaacgacctggaagaactgaaagttaaggcgtcacctattaccaacgatggcgaggacgaattcgtcccgtccgatgggctggataaagatgagtatacttttagccccggcaaatccaaagccacacctgaaaagtctctgcatgacaagaaaagtcaagacttcggcaaccttttttcttttcctagttatagccagaagtccgaggacgacagcgctaaattcgactccaacgaagaagatagtgcatctgtcttctctccatcatttggccttaagcagacagataaagtaccttctaagacagtggcggctaagaaaggtaaaccatcctcggacacagtgcctaaaccgaagagggcacctaaacaaaaaaaggtcgtggaggctgtaaattcggacagtgactcagagtttggaataccaaagaaaaccactacaccaaaagggaagggacgtggcgccaagaaaaggaaggcttcagggagcgaaaacgaaggcgactacaacccaggacgtaaaacaagcaaaaccacctctaagaagccaaagaagacctccttcgatcaggattccgacgtcgatattttccctagcgacttcccgacagagcctcctagcttacccagaacagggagagctcgcaaagaagtgaaatatttcgcagagtctgatgaggaagaggatgacgtcgacttcgcaatgttcaattag

SEQ ID NO: 17726 - DNA, 1437 bp, synthetic construct
  misc_feature 1..1437: note = Description of Artificial Sequence: Synthetic coding sequence
  source 1..1437: mol_type = other DNA
atgagcctgtggagtctgacgaaagaaaaggttgaagagctcattaaacagagagacgcaaaaggtcgcgaagtaaatgacttgaagcggaagagtccttcagatttatggaaggaagatctcgccgctttcgtggaagagctggacaaagtggaatcacaggagcgtgaggatgtgttggctggaatgtctgggaaggccattaaaggaaaagtaggcaaacccaaagttaaaaaactacagctcgaggagacaatgccgtccccatacgggaggcggatcatccccgagattacagctatgaaagccgatgcctccaagaagttgctgaaaaagaagaagggtgaccttgataccgctgcggtcaaggttgaattcgacgaggagttcagtggagcccctgtcgagggagcaggcgaggaagccctcaccccatcagtgcccattaataagggcccaaagcctaagcgagagaaaaaagaacctggtacacgcgttaggaaaacgccaacaagttctggaaaaccttcagccaagaaggtcaagaagagaaacccctggagtgacgacgagtccaagtctgagagcgacttagaagagacggagccagttgttatcccacgggacagtctgctccgaagagccgctgccgagcggcccaagtatacattcgacttttccgaggaggaagacgatgacgctgacgatgacgacgacgacaataacgatctcgaagagcttaaagtaaaagcatcgcctatcacaaacgatggggaagatgagttcgtgccctctgatggactcgataaagatgagtacacctttagtcctggaaagagcaaggccacacccgaaaagtcattacacgacaagaaatcacaggattttgggaacttgttttctttcccaagttactctcagaaaagtgaggacgacagtgccaaattcgattcaaatgaggaggacagtgccagcgtttttagtccaagctttggtttaaaacagactgataaagtgccatctaaaacggtggcagccaagaaggggaaacctagctccgataccgtgcccaagcctaagagagccccaaagcagaagaaggtggttgaggcagtaaactccgattcggatagcgaattcggtatccctaaaaaaacaaccacacccaaaggcaaaggtagaggggccaagaagcggaaagcaagcgggtccgagaatgagggcgattataacccgggcaggaagacaagcaagactacttcaaagaaacccaagaagacgtcatttgaccaagatagcgatgtggatatattcccatcagacttcccaactgagccacctagtctgccaaggactggccgcgcgcggaaggaggttaaatatttcgcagagtccgacgaagaggaagacgatgtagatttcgcgatgtttaattag

SEQ ID NO: 17727 - DNA, 3006 bp, synthetic construct
  misc_feature 1..3006: note = Description of Artificial Sequence: Synthetic coding sequence
  source 1..3006: mol_type = other DNA
atgatcttcccagtggcccgttacgcactgaggtggcttcggagaccagaggaccgcgctttcagtcgcgccgccatggaaatggctttgcgcggcgtcaggaaagtgctttgcgtagcggagaagaacgacgcagccaagggaatcgctgacttactgtccaatggaagaatgcggagaagggagggcctgtccaaatttaacaagatttatgaatttgactaccatctatacggccagaacgtaactatggtcatgacttccgtgtcagggcatctgctggctcacgacttccagatgcaattcaggaagtggcagagctgcaatccactcgtcctgttcgaagccgagatcgaaaaatactgccctgagaactttgtggacatcaagaagacgcttgaaagagaaacacggcagtgccaagccctcgttatatggacagactgcgaccgtgagggagaaaacatcggtttcgaaattatacacgtgtgcaaggccgttaagccaaatctgcaggtcctacgagctagatttagcgaaattactccgcatgccgtgaggactgcgtgcgagaacctaacagaaccagaccagcgagtgagtgatgccgtggatgttcggcaggagctggacctgcggatcggcgccgcgttcactaggtttcaaacactgaggctccaacggatctttcccgaagtgctcgcagaacagctaattagttatgggtcctgccagtttcccaccctcgggttcgttgtggaaaggtttaaggctatccaggcattcgtgcccgagatcttccaccgaattaaggttacacacgatcataaggacggcatcgttgaattcaactggaaacgtcataggctttttaatcataccgcatgtctcgtactctaccagctgtgtgttgaggatccaatggccactgtggttgaggtccgctctaagccgaagtcaaagtggcggccccaggcgctggataccgtggagctcgagaaactcgccagccggaagctccgcatcaatgcgaaggaaactatgaggatcgcagagaagctctatactcaggggtacattagttacccaagaactgagacaaacatttttcctcgggatctgaatttaaccgtactggtcgaacagcagacccccgatccacggtggggcgcctttgctcagtccatcctcgagagggggggccctacacctcggaatggtaataagtcagaccaagctcacccaccaatacaccctaccaagtacactaataacttacaaggggacgagcagagactgtacgagttcatagtccgtcattttctcgcctgttgtagtcaggacgcacaaggacaggagaccacggtggagatagacattgctcaggaaaggtttgttgcgcatggcttaatgatccttgcacggaactaccttgatgtttatccatatgaccactggtccgataagattttgcctgtatatgagcagggctctcacttccagcccagcacagtagaaatggtggatggggaaacttctccccctaagctgctgacggaggcagacctcatcgccctgatggaaaagcatggaatcgggactgatgccacccatgctgaacacatcgaaacaattaaggcccgaatgtatgttggcctgacaccggacaagcgcttcctgccagggcaccttgggatgggtctggtcgagggttatgattctatgggatacgagatgagcaagcctgacctacgggccgagctagaggctgatttgaaactcatttgcgacggcaagaaggataaatttgtggtgctgagacaacaggtccagaagtataaacaggtcttcatcgaagccgtggcaaaggcaaaaaaactcgatgaggctttggcacagtactttgggaacgggaccgagctcgctcagcaggaagacatataccctgcgatgcctgagccgattagaaaatgcccccagtgtaacaaagatatggtgctgaaaaccaagaagaatgggggcttctacctatcatgtatggggttcccagaatgccgctccgctgtgtggctaccggactcagtgctggaagccagccgggactcaagtgtttgtccagtctgccagcctcacccagtttatagactgaaactcaagttcaaaaggggctctctgccacctactatgccactggagtttgtgtgctgtatcggcgggtgtgacgacacactccgcgagattcttgacctcaggttctctgggggccccccccgagcttcacaaccaagcgggcgtctccaagccaatcaaagcttaaaccgaatggacaattcacagcacccacagccagccgactctcggcagacgggcagctcgaaggctcttgcgcaaactctcccgcccccaactgccgccggagagtctaattcagtcacctgtaactgtggccaagaggcggtgctgctgacggtaagaaaagaaggccctaataggggcagacagtttttcaagtgcaatggggggagttgcaatttcttcctatgggccgattcacctaatcccggggcgggaggtcctccagcactcgcttacaggccattgggggcctctctcggctgtccacccggaccgggcatccacctgggcggcttcggcaatcctggcgacgggtccggatccggtacatcctgtctgtgctcgcagccgtctgtcacacgcactgtgcaaaaagacggccccaacaagggcaggcagttccacacttgtgcgaaaccacgggagcagcaatgcggattctttcagtgggtggacgaaaataccgctcctggaacatcaggcgcaccgtcttggacaggggatcgcggcagaactctggagtctgaggcgcgtagcaagaggccccgcgcctcatcttcagatatgggcagcactgccaaaaagccaaggaagtgtagtctgtgccaccaacccggtcacacacgccctttttgcccacagaatcggtag

SEQ ID NO: 17728 - DNA, 1170 bp, synthetic construct
  misc_feature 1..1170: note = Description of Artificial Sequence: Synthetic coding sequence
  source 1..1170: mol_type = other DNA
taaagtagggccgccatggagatggctcttcggggtgtccgaaaagtgttatgcgtggcagagaagaacgacgctgctaaaggcattgcggatctgttgtcaaacgggcgtatgcggaggagggaggggctaagcaagttcaataaaatctacgagtttgactatcacctttacggccaaaatgtgacgatggttatgacttctgtgtcaggccatctcctcgcacacgattttcagatgcagttcaggaagtggcagtcgtgcaacccgttggttttgttcgaggcagaaatcgagaagtattgtcccgagaacttcgtagacattaaaaagaccctcgaaagggagactcgccagtgtcaggctctcgtgatctggacagactgtgaccgagagggtgaaaatataggcttcgagattatccatgtctgtaaagctgtcaaaccaaaccttcaggtcctgagggccaggttcagcgagatcacccctcatgccgtgaggaccgcttgtgagaatctgaccgaaccagatcagagagtctcagatgctgttgacgtgcgtcaggagctggaccttaggattggagcggcctttaccagatttcagacccttcgcttacagagaatttttcctgaggtgctcgccgagcaacttatctcttatgggagctgtcagtttccaacactcggctttgttgtcgagagatttaaagcaatccaggctttcgtccctgagatctttcatcggattaaagtgactcacgatcacaaggacggcatcgtcgagttcaactggaagcggcatcgcttattcaatcacacagcctgcctggtgttgtatcaactgtgcgtcgaggatcccatggcaacagtggtggaggttcggtcaaagccaaagtccaagtggaggccacaggcactggacaccgtggagctcgaaaagttggccagtcgaaaactgagaatcaacgctaaggagacgatgcgaatagctgagaagctgtatacgcagggctacatctcctaccccaggaccgaaacaaacatcttccccagggaccttaacttgacagttttagtcgagcagcaaacccccgatcccagatggggcgcctttgcccagagcatcttggaaagaggaggtcctaccccgcgaaacggtaataagtag

SEQ ID NO: 17729 - DNA, 1596 bp, synthetic construct
  misc_feature 1..1596: note = Description of Artificial Sequence: Synthetic coding sequence
  source 1..1596: mol_type = other DNA
atgatccttgctcgcaattatctcgacgtatacccctacgaccactggagcgataaaatactcccagtttacgaacagggatctcactttcagcccagcacggtcgaaatggtggacggcgaaacatcaccaccaaaactactgacggaggccgaccttatagctctcatggagaaacacgggattggcacagacgcaacacacgccgagcatattgagaccatcaaagccaggatgtatgtaggcctgacgcctgacaaacggtttctacccgggcacctgggaatgggcttggtcgaaggttatgattcaatgggttatgagatgagcaaaccagacctgcgcgcagaattggaagctgaccttaagctcatatgcgacgggaaaaaagacaaattcgtggtcctgaggcagcaggtgcagaagtataagcaggtcttcatagaggcagtggccaaagccaagaagctcgatgaagctttagctcaatattttggcaacggcaccgagttggctcagcaggaggacatctatcctgccatgccggaaccgatccggaaatgcccgcagtgtaataaagacatggtactgaaaacgaaaaaaaacggggggttctatctgtcttgcatgggctttccagagtgccgctcagctgtgtggctgccagattcagtgctggaggcctcaagggattctagtgtctgccccgtttgccagccacacccggtctatcggttgaagcttaaattcaaaagaggtagcttacctcccaccatgcccttagagttcgtatgctgcattggagggtgcgatgatacattgcgcgaaatcctggaccttagattctctggggggccccccagggcttctcagccctccgggagactccaagccaatcagtccttgaaccgtatggataactcacaacacccccaacctgcagattcacgccagacggggtccagcaaagccctcgcgcagacattgcccccacctactgccgccggggagtctaatagtgtcacgtgcaattgtggtcaagaggctgtcttacttacggtgcgcaaagaaggccccaacagaggccggcaattctttaaatgcaatggaggctcctgcaatttctttttgtgggcagattcacccaatcccggcgccggcggcccccctgctttagcatatcggcctctcggcgcttcccttgggtgccctcctggtccagggatccatcttggtggattcggcaaccctggcgatggctccgggagtggtacctcttgtctgtgctcacagcctagtgtgacccggacggtgcaaaaagacggccccaacaaaggccgccaattccacacctgtgcaaagcctagggagcagcagtgtggcttctttcagtgggtggatgagaataccgctcccggtacaagtggagccccttcctggacgggagaccggggtagaacactcgagagtgaggcacgatcaaagcggccgcgcgcctcatcgagcgacatggggtccaccgctaagaaaccacgcaaatgtagcttatgccaccagcctggtcacaccaggcctttctgccctcaaaatagatag

SEQ ID NO: 17730 - DNA, 2721 bp, synthetic construct
  misc_feature 1..2721: note = Description of Artificial Sequence: Synthetic coding sequence
  source 1..2721: mol_type = other DNA
atgaatctaattataatctgcatggcccggcagtcctgtaacccccttgtgctgtttgaagcggagattgagaagtactgtccggagaatttcgtggatatcaagaagaccctggaacgtgaaacaagacaatgccaggctttggtcatttggactgattgcgacagagaaggcgagaatatcggtttcgagatcattcatgtgtgtaaggcagtcaagcccaacttacaagtactccgggctcgtttctctgagattacacctcacgctgtcagaacagcctgcgaaaacctcaccgagccagaccagcgtgttagcgatgcagtagacgttaggcaggagttagaccttcgtattggcgcagcgttcactaggtttcagacactccggctgcagaggatctttccagaagtgcttgctgaacagctgatctcctacggtagttgccaattccccacactcggatttgtggtcgaacggtttaaagcaatccaggctttcgttccagagatattccataggataaaggtcacccatgatcataaggatggtatagtggagtttaactggaagcgtcaccggctcttcaatcacaccgcttgcctggtactgtatcagctgtgcgtcgaggacccaatggccacagttgtggaggtaaggagtaagccgaaatccaagtggcgtccacaggcactggatactgtggaactcgagaagctggcctctcgcaaactcaggataaacgctaaggagaccatgcggatcgctgaaaaactatacacacagggatatattagttacccaagaacagagaccaatatattccctagggatctgaacctgactgttttggtcgaacagcaaaccccagacccccgctggggggcttttgcacagtctattttggaaagaggcgggccaactccgcgtaatggcaataagtccgaccaggcacacccacctattcatcccacgaaatatactaataacctgcaaggagacgagcagcgactgtatgagttcatcgttcgtcactttctggcttgttgttcccaggacgctcaggggcaggagacaaccgtcgagatagatatagcacaggaaagattcgtagcacacggtctgatgatcctcgcgagaaactacctagacgtgtacccctacgaccattggtcagacaagatcctccctgtatatgaacagggcagtcattttcagccttcaacagtggagatggtcgacggcgaaacgtctccacccaaattactgacagaggccgacttgattgcactaatggagaagcatggcatcggcaccgacgccacacatgctgagcatatagagacaattaaggcccggatgtacgtcggcctgacacccgataagcgtttcctgcccggccacctggggatgggtcttgtggaaggctatgactcgatgggttacgagatgagcaagccggatctccgagccgagcttgaggctgatctgaagctcatttgtgacggcaagaaggacaaatttgtcgtgttgcggcagcaggtacagaaatataagcaggtgttcatcgaagccgtggcaaaggcaaaaaagctcgatgaagccctggcccagtatttcggtaatgggactgagctggcacagcaggaggacatctaccccgcaatgccggagcccattaggaaatgtcctcagtgtaataaggatatggttctcaagaccaagaagaacggcggcttttacctgagttgtatgggcttcccagagtgcagaagcgccgtgtggttacccgatagtgtgctggaagcgtcacgagattccagcgtttgcccagtgtgccaaccacaccctgtgtacagactgaagctgaaatttaagcgtggatcactgccacctactatgccgctggaatttgtgtgttgcatcggaggctgtgacgatacattacgggaaattcttgatctgcggttctctggcgggccacctagagcatcccagcctagtggcagactccaagccaatcaatcccttaatcgtatggataatagccagcacccccagcccgctgacagtcgacagactggcagttccaaagccctggcacagactttgcccccccccacggccgccggcgaaagcaactccgtgacttgtaattgtgggcaagaagccgttttgctcacagtaaggaaggaaggtcctaaccgtggtagacagttcttcaaatgtaatggaggctcctgcaactttttcttgtgggcggacagcccaaaccctggtgcaggcggcccacctgccctggcttatcgacctctgggtgcctcattaggatgtccaccaggacccgggatccatctgggcggctttggtaatccaggcgacggctcggggtcagggacaagctgcctgtgtagccaaccaagcgttaccagaacagtgcagaaggacggaccaaacaaaggccgtcagtttcatacttgtgcgaagcctagagagcagcaatgtggattttttcaatgggtcgacgagaacaccgcgccaggtaccagcggcgccccctcttggacaggagaccggggcaggacacttgagtcggaagcgcgctccaaaagaccgagggcctcttcctctgacatgggcagtaccgccaagaaaccacggaaatgctctctatgccaccagccgggtcacacccgccctttctgtcctcagaatagatag

SEQ ID NO: 17731 - DNA, 2589 bp, synthetic construct
  misc_feature 1..2589: note = Description of Artificial Sequence: Synthetic coding sequence
  source 1..2589: mol_type = other DNA
atgaagactgtgcttatggtggccgaaaagccttcactcgcccagagcatcgcaaagattcttagtagaggatctctttcttcacacaaaggcttgaacggcgcctgctcagtgcatgagtataccgggactttcgccggccaacccgtaagattcaaaatgacctctgtctgtggccatgtaatgaccctggacttcctgggaaagtacaataagtgggataaggtggatccagcggagctcttttcacaggccccaaccgaaaagaaggaagccaatccgaagctcaacatggtaaagttcttgcaggtcgagggccggggctgtgactatatagtgctttggctggattgtgataaggagggggaaaatatttgcttcgaagtgcttgatgctgtgctgcccgtcatgaataaggcccacggaggcgagaagacagtgtttagggccaggttctcttctatcacagatacagacatctgcaatgcgatggcctgcttgggtgaacctgaccataacgaggcattaagtgtggacgcacgacaggagctggacttaaggattggctgcgcatttacgaggtttcagaccaaatacttccagggtaaatacggagatcttgacagtagtctcatctcctttggaccgtgtcagaccccaacccttggtttctgtgtggagaggcacgacaagatccagtctttcaagcctgaaacatactgggtgctccaggcgaaagtcaataccgataaggatcgcagcctcctgttggattgggatcgtgttagggtgttcgatagagagatagcacagatgttcttgaatatgacgaagctcgagaaggaggcccaggtggaggcaacaagccgaaaagaaaaagccaagcagagaccacttgccctgaataccgtcgagatgctgcgggttgcaagttcttctctgggaatggggccccagcatgccatgcagaccgccgagcgcctgtatacacagggctatatttcttatcctaggaccgagacgacacactaccctgagaactttgacctgaaggggagcctgcggcagcaggcaaatcacccttactgggcagatacagtaaagagactgcttgctgagggaatcaacaggccacggaaaggacatgatgccggcgatcatccgcccatcactcccatgaagagcgctaccgaggccgaattggggggggatgcttggagactttacgaatacatcacccgccatttcattgcaacggtctctcatgactgcaaatacctgcaatccaccattagctttcgtattggcccggaactgttcacttgctctgggaaaactgtgctgagccccgggttcactgaggtgatgccctggcagagtgtgccactagaagaaagcctcccaacatgccaacggggggatgctttcccggtcggcgaagtgaaaatgctggagaagcagaccaacccgccagactatcttacggaagcggaacttatcaccctgatggagaaacatggcattggaactgacgcatctatccccgtgcacattaataatatctgtcagaggaattacgtgacggtcgaatccggtcggcgcctaaaacctacaaatcttggcatagttctggtgcatggatactataagatcgacgcagagctcgttctacccacaatcagatctgcagtggaaaagcagttaaacctcattgcccagggaaaggctgattaccggcaggtgttgggccacacccttgacgtctttaaaaggaagttccactatttcgtggattctatcgctggtatggacgaattaatggaggtgagctttagccccctcgctgccacagggaaacctcttagccgatgcgggaagtgccacagatttatgaaatatatccaggcaaagcccagtcgcctgcattgttctcactgcgacgagacttatacgctcccccagaacgggacaattaaactgtacaaagagttaaggtgccctttggacgactttgagcttgtgctgtggtcatccggaagccgcggaaagtcatacccattgtgcccatactgttataaccatcccccctttcgcgacatgaagaaaggaatgggctgtaacgagtgtacacacccatcttgtcagcatagcttatctatgctgggcattggccagtgtgttgagtgcgagtctggcgtgcttgtgctggaccccacctcaggcccaaagtggaaggtcgcttgtaacaaatgtaatgtggtggcccactgttttgaaaacgcgcacagggtgcgtgtgtccgcggacacatgcagtgtctgtgaggcggctctactggacgtggacttcaataaggcaaaatcacccttgcctggcgacgagacacagcatatgggctgcgttttttgcgaccctgtattccaggagctggtggaattaaaacacgcagccagttgccaccccatgcaccgtggtggacctggaaggagacagggaagaggaagaggacgggcgcggaggccacctgggaagccaaatcctcggcgcccaaaagataaaatgagtgcactggccgcatactttgtgtag

SEQ ID NO: 17732 - DNA, 2589 bp, synthetic construct
  misc_feature 1..2589: note = Description of Artificial Sequence: Synthetic coding sequence
  source 1..2589: mol_type = other DNA
atgaaaactgtactgatggtggcagagaaaccttcgctcgcccagtcaatcgcaaagatcctgagtcgcggcagtctgagctcacataaaggccttaatggtgcatgttccgttcacgaatataccggcaccttcgccggccagccagtcagatttaaaatgacctccgtgtgcgggcacgtcatgaccttggactttctgggaaaatacaacaagtgggacaaagtggatcccgcggagcttttctcacaggcccctacggaaaagaaagaagctaatccaaagctgaacatggttaagttcctacaagtcgaagggcggggctgcgactatattgtgctctggctggattgcgataaagagggtgaaaacatctgcttcgaagtcctggacgcagtcttgccagttatgaataaggcccacggcggggagaagaccgtgtttcgcgctcgcttttcttcaatcaccgacacagacatctgcaacgcgatggcatgtcttggggagcctgatcataacgaagctctgtctgttgacgcaagacaggagctcgatctcagaatcggctgcgccttcacccggtttcagacaaagtattttcagggaaaatatggtgatctggactcatccctcatctccttcggcccttgccagactcctacactgggcttttgtgttgaaaggcatgataagatccaatcttttaagccggaaacttattgggtgctccaggccaaggtcaataccgataaggaccgcagtcttctcttagattgggatcgagtgagggtttttgaccgcgagattgcccagatgtttctgaacatgaccaagctcgagaaagaggcacaagtggaggcgacatcgaggaaggagaaagccaagcagcggcctctggccctgaatactgtggagatgcttagggtggcgagcagctcactcggaatgggaccacagcatgccatgcagaccgcggagagactgtacacgcagggttacattagttatcctcgaacggagaccacacactaccctgaaaacttcgacctgaagggatctctgagacaacaggctaaccacccctactgggcagacaccgtcaagcggcttctggccgaaggaatcaataggccgaggaaagggcacgacgcgggcgaccatccacctatcaccccaatgaaatccgctacagaggcggagctcggtggcgatgcatggcggctgtacgaatatattactaggcactttattgcaacagtatcacatgattgcaagtacttacaaagtactatcagcttccgtatcggaccagaattgtttacctgctcaggtaagactgtactgagcccaggcttcaccgaggttatgccttggcagtcagtgcctctggaagagtcactaccgacttgccagcggggggatgcgtttcccgtgggggaagtaaaaatgctggagaaacagaccaaccctcccgactatttgactgaggctgaactcatcacccttatggaaaaacatggaatcggcaccgacgcgtcaatcccagtgcacatcaataacatttgccagcggaactatgtcacagtggaaagtgggcgacggttgaagccaacaaacttagggatcgtgctcgtacacggctattacaagatcgatgccgaactggtgctgcccacaatcaggtccgccgtcgagaagcaactgaatttaatagcccagggcaaggctgactacaggcaggttctgggccatactctcgacgttttcaagcgcaagtttcactatttcgtggattctattgccggtatggacgaattaatggaggttagtttcagtcccttggcagccacaggaaagcccctctcgagatgtggcaaatgccacaggtttatgaagtatatccaggcaaagccatcgcgcctgcactgttcacactgcgatgaaacgtacacattaccccaaaacggcacaatcaagctgtataaagagcttcgctgccccctggatgacttcgagctcgtcttgtggtcatctgggtcccgcgggaaatcctatccactgtgtccctattgttacaatcacccacctttccgagacatgaagaaaggcatgggttgcaatgaatgtactcacccgtcctgtcagcacagcctcagcatgctggggattggccagtgtgttgagtgtgagtctggcgtcctagtcctggacccaaccagcggccctaagtggaaagtcgcatgcaacaagtgcaacgtggttgcccactgctttgagaatgcgcacagagtacgggtcagcgccgacacgtgtagcgtgtgcgaggctgctctgctggatgtggacttcaataaggctaagagtcctcttccgggggacgagacccagcatatgggatgtgtcttttgcgaccctgtgttccaggagttggtcgaactgaagcacgcagcctcgtgccaccccatgcatcggggaggccccggtcgccggcagggacgaggccggggcagagctagacgtcctcctggaaaacctaacccccgcaggcccaaagataagatgtctgctttagccgcttatttcgtttag

SEQ ID NO: 17733 - DNA, 849 bp, synthetic construct
  misc_feature 1..849: note = Description of Artificial Sequence: Synthetic coding sequence
  source 1..849: mol_type = other DNA
atgtttctgaacatgaccaagttagagaaagaagcacaggtggaagccacctctcggaaagagaaggcaaaacaaaggcctttggcattgaataccgtagagatgctgcgcgttgctagcagttcgttggggatgggacctcagcacgctatgcagactgccgagcgactatatacgcagggctacatctcatacccacggacggagactactcattatccagaaaactttgacctgaaaggctcattgcgccagcaggccaaccatccatattgggcagacaccgtcaaacgcctgctcgcagaaggtataaacagaccgcgcaaagggcacgatgcaggggaccacccacctataaccccaatgaagagcgcaacagaagccgaactcggcggcgatgcttggaggttgtacgaatacattacaaggcactttatagccaccgtgagccatgattgcaaataccttcagtcgactatcagctttcgcattggacccgagctgttcacctgctcaggcaagacagtcttgtctcctggcttcactgaggtcatgccatggcagtcagtgccgctcgaggaatcactaccaacatgtcaaaggggcgatgctttcccagttggggaggtgaagatgctggagaaacaaacaaacccccccgactatctcacagaagctgagctgatcactcttatggaaaaacacggtatcggcggatgtgcctgtccaggcccccgtgctggcagtgtttccagtacccaggcgagctctctgctgaccaagctgccccgccagccctgcgtgccgtctccggccccccttcacggtcttgtcagtggtaattggtag

SEQ ID NO: 17734 - DNA, 741 bp, synthetic construct
  misc_feature 1..741: note = Description of Artificial Sequence: Synthetic coding sequence
  source 1..741: mol_type = other DNA
atgaagacagtgttgatggttgccgagaagccttccctcgcccagtccatagctaaaattctgtccagaggctctcttagctcacacaaagggttaaatggtgcttgttcagttcacgagtataccggcaccttcgccggacagcccgtcaggttcaagatgacatcagtctgcggacatgtgatgaccctggattttttgggcaaatacaataagtgggacaaagtggacccagctgagcttttctcacaggcacccacagagaagaaagaggccaaccctaagttaaacatggttaagttcctgcaggtcgaggggaggggctgcgactacatagtcctgtggctagactgtgacaaagagggggaaaatatatgttttgaagtgcttgacgccgtgctgcccgttatgaacaaggctcatgggggagagaaaactgtcttcagggcccgatttagtagcatcacagataccgacatctgcaatgccatggcgtgcttgggagaaccggatcacaacgaggcattgtcggtggacgcacggcaggaactcgacctgagaatcgggtgcgccttcacccggttccagactaagtacttccagggaaaatacggtgatttggatagcagcctgatctcatttggtccatgtcaaacccctacactcggattctgcgtggagcgtcatgacaaaattcagagctttaaacctgagacatactgggtcctgcaggccaagtag

SEQ ID NO: 17735 - DNA, 366 bp, synthetic construct
  misc_feature 1..366: note = Description of Artificial Sequence: Synthetic coding sequence
  source 1..366: mol_type = other DNA
atgaagaccgtactaatggtggccgagaagccttcacttgctcagtccatcgctaagatcctgtctcgaggcagcttaagttctcataagggacttaacggtgcctgtagcgtacatgaatatactggtacatttgctggccagccagttcggttcaaaatgacgtcggtgtgtgggcatgtgatgacattagacttcctaggaaagtataacaagtgggataaagtcgaccccgccgagctctttagtcaagctccaacagagaaaaaggaggctaatcctaaactcaacatggtgaaatttttacaggtggagggcaggggttgtgattacatcgtcctgtggctagactgtgacaaggaatag

SEQ ID NO: 17736 - DNA, 66 bp, synthetic construct
  misc_feature 1..66: note = Description of Artificial Sequence: Synthetic coding sequence
  source 1..66: mol_type = other DNA
atgaagactgttctcatggtcgcggaaaaaccgagcctggcacagtctatcgctaagatcctgtag

SEQ ID NO: 17737 - DNA, 129 bp, synthetic construct
  misc_feature 1..129: note = Description of Artificial Sequence: Synthetic coding sequence
  source 1..129: mol_type = other DNA
atgaaaactgtccttatggttgcagagaagccatccctcgcacagtctattgctaaaattctgtcccggggaagtctgagttcccataagggactcaatggagcgtgtagcgtgcacgagtacacatag

SEQ ID NO: 17738 - DNA, 369 bp, synthetic construct
  misc_feature 1..369: note = Description of Artificial Sequence: Synthetic coding sequence
  source 1..369: mol_type = other DNA
atgaagaccgtactgatggtggctgaaaaaccctctctcgcgcagtctatagcgaaaatcctgtcgagagggagtctgtccagccacaagggcctgaacggcgcgtgctccgtacacgaatacactgggacatttgcagggcaaccagtacgatttaagatgacttccgtctgtggacatgttatgactcttgactttcttggcaaatacaacaaatgggataaggttgacccggccgaactctttagccaggcacctaccgaaaagaaagaggcaaaccccaaactgaacatggtaaagtttctacaggtggaaggacgcggatgcgattatatcgtgctgtggctcgattgtgataaagaaggctag

SEQ ID NO: 17739 - DNA, 144 bp, synthetic construct
  misc_feature 1..144: note = Description of Artificial Sequence: Synthetic coding sequence
  source 1..144: mol_type = other DNA
atgaagactgtcttaatggtggctgaaaaaccgagtcttgcccagagcatcgccaagatcctgagccgcggatcactgtccagccacaagggactaaacggtgcctgctccgtgcacgagtacactggaacttttgcgggttag

SEQ ID NO: 17740 - DNA, 399 bp, synthetic construct
  misc_feature 1..399: note = Description of Artificial Sequence: Synthetic coding sequence
  source 1..399: mol_type = other DNA
atgaagaccgtgttgatggttgccgagaaacccagcctggcccagagtatagctaagattctgtctcggggtagcctgtccagccacaaaggcctcaatggggcctgtagtgtccacgaatacaccggcactttcgcggggcaaccagtccgcttcaaaatgactagcgtgtgcggccacgtcatgacactggatttcctgggcaaatacaataagtgggataaggtcgaccccgccgagctgtttagccaggccccaactgaaaaaaaagaagctaatccaaagctgccccaggcatccgtgtgcactcaggctgctcctggcgtgcggccccatccgtgcccccccgcggcggcccgggtcgcggatagagtggtgccctgcggacccgtcacctag

SEQ ID NO: 17741 - DNA, 183 bp, synthetic construct
  misc_feature 1..183: note = Description of Artificial Sequence: Synthetic coding sequence
  source 1..183: mol_type = other DNA
atgaagacagtgctaatggtggctgagaagccttcactggctcagtcaattgcaaagattctgtcaaggggctcactgtccagccacaaaggactgaacggggcatgcagcgtccatgagtataccggaacctttgcggggcagccagtgagattcaaaatgaccagcgtttgtggccattag

SEQ ID NO: 17742 - DNA, 186 bp, synthetic construct
  misc_feature 1..186: note = Description of Artificial Sequence: Synthetic coding sequence
  source 1..186: mol_type = other DNA
atgaagactgttctaatggttgcagagaaaccttctctggcccagtccatcgcgaaaatcttaagccgggggtccctctcttcccacaaaggacttaacggcgcatgctccgtacacgagtacacaggcaccttcgcaggtcagccggtgcgattcaaaatgaccagtgtctgcggacacgtttag

SEQ ID NO: 17743 - DNA, 1578 bp, synthetic construct
  misc_feature 1..1578: note = Description of Artificial Sequence: Synthetic coding sequence
  source 1..1578: mol_type = other DNA
taactggattccagtctcattagtttcgggccgtgccagacccctactctgggcttctgcgttgaacggcacgataaaattcagagcttcaaaccggaaacctactgggtcctgcaggcgaaagtaaacacggataaagataggagcctgctgttggattgggatcgggtaagagtgttcgatcgtgagatagcacagatgttccttaatatgactaagctcgagaaagaagcacaagtcgaggcgacctcaagaaaagagaaagctaagcagcggcccctggccttaaacacggttgagatgctgagagtggcatcttcgtccttgggcatgggaccacagcacgccatgcagacagctgagaggctttacacacagggctatatctcttatccccggactgaaacaactcactatcccgaaaacttcgatctgaagggctcactacgccagcaggccaaccacccctactgggccgacactgtaaaaaggttgctggccgagggcatcaatcggcctcgcaagggccatgatgccggtgatcacccacctatcaccccgatgaagagcgctacagaagctgagcttgggggcgatgcatggagactgtatgaatatataacccgccacttcatcgccacagtgagtcacgactgtaagtacttacaaagtacaatttcctttcggatcggcccggagctttttacatgcagtggcaaaactgtcctttcccccgggtttactgaggtcatgccatggcagtccgttccgctcgaggaatccctcccaacatgccagagaggggacgcctttcctgtaggagaagtcaagatgctagaaaagcagactaatccgcccgactacttgaccgaggctgagttaattactctgatggaaaagcacggtatcggaacggatgcttccatccccgttcacattaacaacatttgccaaaggaattatgtgactgtggagtcgggtaggagattgaaaccgacaaatctgggaatagtgctggtccatgggtactataaaatcgacgcggaactggtcctcccgaccatcaggtctgcagtcgagaagcagttaaatttaattgcccaggggaaagctgattaccgtcaggtgctgggccacaccctggatgtcttcaaaaggaaatttcattactttgtggactctatcgctggcatggatgagttgatggaagtatcattcagcccactggctgccacaggcaaaccactcagtcgctgcggcaaatgtcaccgattcatgaaatacatacaagccaaaccaagccgtctacattgctcccactgcgacgagacttacactctcccacaaaatggtacaattaagctatataaggaactccgatgcccactggatgactttgaacttgtcttgtggagctccggctctcgtgggaaatcctaccctctctgcccttactgctacaaccatcctccattccgggacatgaagaaaggcgagtgttcccactcccttctctccacggggtcatgtagccttttcagcgtgcccacccctgccctgcaccaggctggactgtag

SEQ ID NO: 17744 - DNA, 951 bp, synthetic construct
  misc_feature 1..951: note = Description of Artificial Sequence: Synthetic coding sequence
  source 1..951: mol_type = other DNA
atgagtgccgaggtggagacttcggaaggggtggatgaatctgaaaaaaagaacagcggggcactggagaaggaaaaccagatgaggatggccgacctcagcgaactgctgaaggaagggaccaaggaggcccacgatagagcagagaatacacagttcgttaaggacttcctcaaaggaaacatcaagaaggagctatttaaactcgccaccactgccctgtactttacttactccgcgctggaggaggaaatggagcgaaataaagatcatcctgcatttgcccccctatatttcccgatggaattacatcggaaggaggccctaaccaaggacatggaatatttcttcggtgaaaattgggaagagcaggtgcaatgccctaaggcagcgcagaagtacgttgagcgcatccactacattgggcagaacgaaccggaactgctcgttgcccatgcctatacccgctacatgggggatctgagtggcggacaggtgctgaagaaggtcgcccagagggccctcaagttgccctccacaggagagggaacccagttttacctttttgaaaacgttgacaacgcgcaacaattcaagcagctgtaccgagccagaatgaacgcccttgacctgaacatgaagaccaaggagcgcattgtggaagaggccaacaaggcattcgaatacaacatgcaaatttttaacgagttagaccaggcaggctcaacgctggccagggagacattggaagatggcttccctgtacacgacggtaaaggagatatgagaaagtgtcccttctatgctgccgaacaagacaagggtgctctcgaggggagctcctgtcctttccgaacagccatggcggtgctgcggaagccctccctccagttcattctagcggccggagtagccctggccgccgggctgctcgcatggtactacatgtag

SEQ ID NO: 17745 - DNA, 1716 bp, synthetic construct
  misc_feature 1..1716: note = Description of Artificial Sequence: Synthetic coding sequence
  source 1..1716: mol_type = other DNA
atgaagtgccagccaagatcgggggctcgaagaattgaggaaagacttcattacctgattaccacctacctcaaattcggaaataacaataactacatgaacatggctgaagccaacaacgccttcttcgcagcgtccgaaaccttccacacgccgagtctaggcgacgaggagtttgagatcccacccatcacccctcctcctgagtcggaccctgccctgggaatgcccgatgtgctgctgcccttccaagccctgtctgatcccctgccgtcacaaggaagcgagttcacaccccaattccccccgcagagcctggacctgccgtcaataacaattagccgtaatctggtggagcaggatggtgtactgcactcctccggtttacacatggaccagtcacatacacaggtcagtcagtatcggcaggatcccagtctgattatgcgcagcatcgtgcacatgacagacgcagcccgaagtggcgtgatgcccccagcgcaactgaccaccataaaccagtcgcaattatcagctcaactgggcctcaacctggggggggccagcatgcctcataccagtcccagtccgcccgcatccaagagcgcgaccccttctccttcctctagtataaacgaagaagatgcggatgaggctaacagggcaatcggggaaaagagagctgcaccagatagcgggaagaaaccaaaaacccccaagaagaagaagaaaaaagatccgaatgaaccgcaaaagcctgtttccgcttacgcattgtttttccgcgatacgcaggcagcgataaagggtcagaaccccaatgcgaccttcggggaggttagtaaaattgtggccagcatgtgggactccctcggagaagagcagaaacaggtgtacaaacgaaagactgaggcagcgaaaaaggaatacctgaaagcactggcagcctatcgggcatcactagtgtccaaggccgcggcggagagcgctgaagctcagacaatccggtctgttcagcagacgctggccagtacaaatctgactagctccctgcttctcaacaccccattaagtcagcatggaacagtaagtgcctctccacagacgcttcagcagagcctgccacggagtatcgctcctaagccacttaccatgcgactcccaatgaatcagatcgtgacctccgtcacaattgcagctaatatgccttctaacatcggggctcctctcatttcctctatggggacgacgatggtcgggagcgcccctagcacccaagtatcaccttctgttcaaacccagcaacatcagatgcagcttcaacaacagcaacagcagcaacagcagcaaatgcaacaaatgcaacagcaacagttgcagcagcaccagatgcatcagcagattcagcagcagatgcaacaacagcatttccaacaccacatgcagcagcacctgcagcagcagcaacagcacctgcagcagcagatcaatcagcagcaactgcagcagcagctgcagcagcgtctgcagttgcaacagctacagcacatgcagcaccagtcgcagccttcaccgaggcagcactcgccagtggcatcacaaattaccagccccattcctgctatcggatctcctcaacccgcttcccagcagcatcagagccagattcagagtcagacccagacacaggtgctgtctcaggtttctatcttctag

SEQ ID NO: 17746 - DNA, 5817 bp, synthetic construct
  misc_feature 1..5817: note = Description of Artificial Sequence: Synthetic coding sequence
  source 1..5817: mol_type = other DNA
atgcagagctttagagaacagtcttcttaccacggaaaccagcagtcatatccccaagaggttcacggttccagtcggcttgaggaattctccccacgccaggcccagatgttccagaatttcggagggactggcggaagctccgggtcttctggctccggttccggcggaggaaggagaggtgccgcggccgctgctgctgccatggcttccgaaacgtcgggccatcaggggtaccaggggtttaggaaggaggctggggacttctattatatggccggaaacaaagaccccgtgaccaccggaactccccagccacctcagcgccgaccgagcggaccagtgcagtcctacggccccccccagggctcatcattcgggaatcagtatgggtcggaaggacacgttggtcagtttcaggcacagcactcaggactgggtggtgtgagtcactatcagcaggattacacggggcccttcagtccaggaagcgcacaataccaacagcaagcctcaagtcagcagcagcagcagcaagtgcagcagctccgacaacagctttaccagtctcaccagcccttgccccaggccacgggtcaacccgcaagcagctcaagtcacctccagcctatgcaaagaccaagtaccttgccttcgtctgcagctggctatcagctaagagttgggcagtttggtcagcactaccagtcctccgcgagtagctctagcagctccagtttcccttccccgcaacgattttcccagtcaggacagtcctacgacgggtcctataatgtgaacgcaggtagccagtatgaagggcacaatgtggggtctaacgcccaggcttacggcactcaaagcaattattcctatcagcctcagtctatgaaaaactttgagcaagctaaaattccccagggcacccagcaggggcagcagcagcagcagcctcagcaacagcagcacccatcacaacacgtaatgcagtacaccaacgccgccacaaaactccccttacaaagccaggttggacagtataatcagcctgaggtaccagtgaggtcaccaatgcaatttcatcaaaatttctcccccatctccaacccttccccggctgcttcagttgtacagtcaccttcttgctcatcaaccccatcccctctgatgcagaccggcgaaaatcttcagtgtgggcagggaagtgtccccatgggatccaggaacaggatcctgcagctgatgccacaattgtcccccacgccctccatgatgccttcaccaaatagtcatgcagcgggctttaaaggctttggactcgagggcgtaccagagaagagactaacagatcctgggttgagctcactcagcgccttaagtacccaggtagccaaccttcctaacactgtacagcacatgttactgagcgatgctctgacaccccagaaaaagacttcgaaacggccctctagctcaaaaaaggccgatagttgtacgaattctgagggcagttcacagcctgaggagcagctgaagtcccccatggccgaaagcttggatggaggatgctccagctcctcagaagaccagggtgagcgggtgagacaattgtcaggacaaagtacttccagcgataccacttataagggcggtgcgtccgaaaaggcaggctcaagtcctgcgcagggagctcaaaatgagccgcctaggctgaatgcaagccccgctgccagagaagaggccacttccccaggtgccaaagatatgcccttatcgtctgatgggaaccccaaggttaatgaaaaaacagtgggcgttatagtaagccgggaggctatgactggacgcgtggaaaagcctggcgggcaggataagggcagccaggaagacgaccccgcagcaacacagcgtccaccaagcaacggaggcgcaaaagagactagtcacgcgtccctgcctcaaccagagcccccgggcggcggaggatcaaaaggaaataagaacggtgacaacaattcgaatcacaatggcgaaggcaatggccagagtggccattctgctgctgggcctggatttacctcccggacggagccatcaaaatccccgggctccttgcgctattcgtataaagacagctttggtagtgctgtgcctcggaacgtctcaggtttccctcagtatcctacaggtcaggaaaaaggagatttcactgggcacggggagcggaaaggaagaaacgagaagttcccatctctgcttcaggaagtgctgcaggggtaccatcaccaccctgaccgccgctactcgcggagcacccaagaacatcagggtatggcaggcagcctggaaggcacaacgcgcccaaacgttctcgtatcacagacaaacgaacttgcctcccggggcctgctgaacaagtccattgggtcccttctggaaaacccacattggggtccctgggagagaaagtcgagcagcaccgctccagagatgaaacagatcaacctgacagattacccaattccaagaaagttcgagattgaacctcaaagctctgcccatgagccaggcgggtcactgtccgaaaggagaagcgtgatctgcgacatctctcccttgaggcagatagtgcgcgatcccggcgcccattctttgggacatatgagcgcggacacgcgaattggcagaaacgaccggctgaaccctactctgagccagtctgtgatactgccgggagggctggtttcaatggagactaaactaaaatcccagagcgggcagataaaggaggaggacttcgagcaaagtaaatctcaggcaagctttaataacaagaagagcggcgaccactgccaccctcctagcatcaaacacgaatcataccgtggcaacgcatccccaggtgccgcgacccatgactccttgtctgactatggaccacaggattcgagacccacacctatgcggagagtgcccgggcgcgtcgggggtagagaaggaatgcgcgggcgttcgccctcacagtaccacgattttgcagagaaactcaagatgtccccaggaaggtctcggggtcctgggggcgatccccaccatatgaacccccatatgacttttagcgaacgtgcaaataggtcgtcactgcacacccccttctcacctaacagcgaaactctggcctcagcataccacgccaacacacgtgctcatgcctacggtgatccaaacgcagggcttaatagccaacttcactataaacggcagatgtaccagcaacagcctgaagaatacaaggattggtcgtcaggtagcgcccagggagttatagccgcagcccagcaccggcaggagggccccaggaagagccccaggcaacagcagttccttgacagagtacgctctcccctcaagaacgataaggacggaatgatgtacggcccccccgtgggtacttatcatgacccaagcgcccaggaggcgggtcgatgcttgatgtcctccgatggcctgccgaataagggtatggagctgaagcacggctcccagaaattgcaagagagttgttgggacctgtctagacagacatctcccgctaaatcatcaggcccccctggaatgtcaagccaaaagcggtatggacccccccatgagactgatgggcatggccttgctgaggccacacagtcaagcaaaccaggctctgtgatgctccgactgcccgggcaggaggaccactcaagccagaaccccctgattatgcgcagacgggtgcgcagttttatcagccccatcccgtcgaaaagacaaagtcaagatgtaaaaaactccagcactgaagataaaggcagattgcttcatagttccaaagaaggtgccgacaaagccttcaacagttacgcccatctgtcacactcacaggatatcaagagtatccctaaaagagactcttcaaaggacctcccgagccccgattcccgcaattgtccggccgtaacactgacatcccctgccaagacaaagattttaccgcctaggaaagggagaggactgaaactggaggcgattgtccagaagatcacctcccccaatatccgtcgttctgcgagctccaatagcgccgaggctggcggagacactgtgacacttgacgacattttgagtctcaaatccgggcctccagagggtgggagcgttgcagttcaggacgcagacattgagaagcgaaagggtgaggtggctagtgatcttgtctcacctgctaaccaggaacttcatgtggagaagcccttgccccggtcatcagaggaatggcgagggtccgttgacgataaagtcaagacagagacacacgccgaaactgtcaccgccggcaaggaacccccaggcgctatgacgtccaccacctcccaaaagcctgggagcaatcagggtagaccagacggaagtttgggcggaactgctcccctgatatttccagacagtaaaaacgtcccgccagtggggatcctggctcctgaagcgaacccaaaagccgaggaaaaagagaacgacacagttaccatcagtcccaagcaagagggctttcctccaaagggctattttccttctggtaaaaagaagggaagacccataggaagcgtgaacaaacagaagaagcaacagcagccacccccccccccacctcagccacctcaaatccccgagggctccgccgacggagagccaaagccgaaaaagcagcgacagcgacgcgaacggcggaaaccaggcgcccagccacggaaaaggaaaaccaaacaggccgtgccaattgtcgaaccccaggagccggaaatcaaactgaaatatgcaacgcagccccttgataaaacagatgccaagaacaagagcttttacccatacatccacgtggtgaacaaatgtgaactgggggctgtctgcaccatcattaatgcggaggaagaagagcagacaaagctggtgcgcgggaggaagggccagcgttccttgacccccccccccagctcaacagagtccaaggccttgcctgccagtagctttatgctacagggtccagtggtcacggagtcatccgtcatggggcatcttgtttgttgcttgtgtggtaagtgggccagttataggaatatgggtgacctgtttggtcctttctatccccaggattacgcggccacactgcccaagaatcctcctccgaagcgcgccactgaaatgcagtccaaagtcaaagtacgtcacaagtcagcctctaatggcagcaagacagatacagaggaagaagaggagcagcagcaacagcaaaaggagcagagaagtctggccgctcacccacgatttaaacggcggcatcgatccgaggactgcgggggcgggcctagatcattgtcacgtggtttaccttgtaagaaagcagctacggagggctcatccgagaaaaccgttttggactccaagcccagcgtccccaccaccagtgagggagggccagaattggagttacagattcccgaactgcccctcgattccaatgaattctgggtccacgaaggctgtatactctgggccaacgggatatatctggtctgcgggagattgtatggccttcaggaggccctggagatagccagggagatgaaatgctctcactgccaggaagctggagctacactgggatgttacaacaaaggatgctcctttagatatcattatccatgcgcaatagatgctgactgtcttctgcatgaagaaaattttagtgtccggtgccctaagcacaaggtgaggctttggaggtag

SEQ ID NO: 17747 - DNA, 5883 bp, synthetic construct
  misc_feature 1..5883: note = Description of Artificial Sequence: Synthetic coding sequence
  source 1..5883: mol_type = other DNA
atgcagagctttcgggagcaaagctcgtatcacggcaaccagcaaagctacccacaggaggtccacggcagctcaaggcttgaggagttctccccccgccaggctcagatgttccagaacttcggcgggaccggtggctcctctggctcttctgggtctggatccggaggcgggcggcgtggggctgctgcagcagccgctgctatggccagcgaaaccagcgggcatcagggttaccagggattccgcaaggaggccggtgacttttactacatggcagggaacaaggatccagtgactacaggaacgccccagcctccgcagcgcaggccttccggacctgttcaaagctacggtccaccacaaggttccagctttggtaatcagtatgggagcgaagggcatgtgggccagtttcaagcacagcattcaggactcggaggcgtgtcccactaccagcaggattacaccgggccctttagtccaggttctgctcaataccagcaacaggccagctcccaacagcagcaacaacaggttcagcaactcagacagcagctgtatcagtcgcaccagccgctcccacaagctacggggcagccggcctcgagctcttctcacctgcagcctatgcaacggccaagcacacttcctagttccgctgccggatatcagctgcgggtggggcagttcggccagcattaccagtcctcagcaagcagctcatcttcctcttctttccctagcccacagcgatttagccagtcgggccagagctatgacgggtcttacaacgttaatgccggcagtcagtatgaagggcacaacgtggggagtaatgctcaggcttacgggactcagtctaactactcttatcagccccaaagcatgaagaatttcgagcaagcgaaaatccctcagggcacacagcagggacaacagcaacagcagccacagcaacaacagcacccaagccagcacgtcatgcagtatacgaatgccgctacaaagttgccccttcaatctcaggtgggacagtacaaccagcctgaggtgcctgttagaagtcctatgcaattccatcagaacttttcaccgatatccaatccctccccagctgcgagcgtggtccagagtccgtcctgctccagtacacctagccctttaatgcagacaggggagaatcttcaatgcggtcaaggctctgtgcctatggggtccagaaacaggatacttcagctgatgccccagctgagccctactccttccatgatgccctcaccaaattcccacgcggctgggttcaagggattcggtctggaaggagtcccagaaaaacgcctgaccgaccctggcctctctagtctctccgcactctctacacaggtggccaacttgcccaacaccgtgcagcacatgctgctcagcgacgcattgacaccccagaaaaagaccagcaagcggccctctagtagtaaaaaggccgattcctgcactaactccgagggatcaagccagcctgaagagcaactcaaatcccctatggcagagtctctcgacgggggttgttcgtcctctagcgaggaccaaggcgagcgagtgaggcaactttcaggacagtctacaagctcagacactacctacaagggcggcgctagtgaaaaagcggggagctccccggctcagggtgcccaaaacgagccacctaggctgaatgcaagtcctgctgcgcgggaggaggccacctctcccggtgctaaagatatgcccctgagttctgacgggaaccctaaagtaaatgaaaaaactgttggtgtcatcgtctccagagaggccatgactggcagggtggagaaaccaggtggtcaggataaagggagccaggaggacgaccctgctgctacccagcgtccgcctagtaatggaggggctaaagagaccagccatgcatcactccctcagccggaacctcccgggggcggtggctctaaggggaacaaaaacggcgacaataattccaaccataatggagaggggaacggccagtctggtcattctgcggctggacccgggttcacatccagaactgagccctctaaatcccccggctccctgcgctactcatacaaggacagcttcgggagcgccgttcccaggaacgtgtctgggtttccgcagtaccccactggacaggagaaaggcgatttcaccggacatggagaaaggaaagggcggaacgagaagtttcctagcctactgcaagaagttctgcagggatatcaccaccatcccgaccgccgctactcccgcagtacacaggagcatcaaggcatggctggctcgctggaaggaacgacccgacctaatgttctagtgtctcagacaaacgagctggcatccagaggtctattaaataaaagtattgggtccctgttggaaaatccacactggggcccctgggaacgcaaatccagcagcaccgctccggaaatgaagcaaattaacctcactgattatccgatcccccgtaagttcgagatcgaaccccagtcatctgctcacgaacccggaggtagtttgtccgaacggaggtcagtgatttgtgatatcagccctctgcggcaaattgtccgtgacccaggagctcattctctggggcacatgagcgccgatacccggatcggcaggaacgatcgcttaaatcctactctgtcacagagtgtaatcctcccaggcggtctggtgtctatggaaaccaagcttaagtcacaatctgggcagatcaaggaagaggattttgaacagtccaagagccaggcttcgtttaataataaaaaaagcggggaccattgccatcccccctctatcaagcatgaaagctacagaggtaatgctagtcccggggcagctacacatgacagcctgagtgattatggcccccaagattcgcgtccaactcctatgcggagggtgccgggaagagtgggtggtcgggaaggtatgaggggccgcagccctagccaataccatgacttcgcagagaaactcaaaatgagccctggacggtctcgcggaccaggaggggatccccaccatatgaatccccatatgacatttagtgaacgcgccaataggagctccttgcatactcccttcagcccgaatagcgagacactggctagtgcctaccatgccaacaccagagctcacgcttatggagaccctaacgccggcctcaattcacagctgcactacaagcgacagatgtaccagcagcagccagaggagtataaggattggagtagtgggagcgcgcaaggcgtgatcgccgccgctcagcatagacaagagggcccccgaaagagccctcggcagcagcagttcctcgatagagtccgcagcccattgaagaatgacaaagacggtatgatgtatggaccacccgttggcacgtaccatgaccccagcgcgcaagaggcaggccgctgtctcatgagttcagatgggctgccgaataaagggatggaacttaaacacggatcccagaagcttcaggaatcttgttgggatctgtcaaggcagactagccctgccaagtcatcgggcccacctggaatgtcttcacagaaacgctacgggcctcctcatgagacagacggccatggcttggcagaggcaactcagtctagcaaacctggctctgtcatgctccgcctgccgggacaggaggaccactcctctcagaatccattaattatgaggaggcgggtcaggtcatttatttcccccattccaagtaagcggcagtctcaggatgtgaaaaacagtagcaccgaagataaaggtcgactgctgcattcctccaaggagggagccgacaaggctttcaactcctatgctcatctttctcatagccaagatattaaatccatcccgaagagagactcaagtaaagatctcccttcacccgatagtcggaactgccccgcggtcacacttacttcgcccgccaaaaccaaaattcttccccctaggaaaggtcgtggcctcaaattggaagctatagtacagaagatcaccagccccaacatcagacgcagcgcttcttctaactctgccgaggcagggggggatacagttaccctcgacgatatcttaagtctcaaatccgggcctcccgagggggggagcgtagctgttcaggatgctgacatcgagaaacggaagggcgaagttgcatctgatttggtctcacctgccaaccaagagctgcacgtggagaagcccctaccaagaagttccgaagagtggagagggtctgtggatgacaaagtgaagacagagacacacgccgagactgtcacagccggcaaagaaccccccggggccatgactagtactacctcccagaagccaggatccaatcagggacgacctgatggttctctaggtggaacagccccacttatttttccagactccaagaatgtccctcctgtgggaatcctggcccctgaggctaaccctaaggccgaggagaaagaaaatgatacagttaccatttcaccaaaacaggaagggttcccccctaagggatacttccctagcggcaagaagaaaggtaggcctatcgggtcagtgaataagcagaaaaagcagcagcagcccccgcctcccccgcctcaacccccacagatcccagaaggctccgcggacggcgagccaaaaccgaagaagcagagacagcggcgggaacgcaggaaaccaggagcacagccgaggaaaagaaagactaagcaggccgtgcctatagtggaacctcaagagccagagattaagcttaaatatgcaacccagcctctggacaagaccgatgctaagaataagagtttttacccttatatccacgtcgtcaacaaatgcgagttgggtgccgtctgcactatcattaatgctgaagaagaggagcaaaccaagctagttagggggcgcaagggacagaggagtttaacccctcctccaagttcaaccgaatccaaggctctgcccgcttcctcatttatgctgcaaggccctgttgtaacagaatcctctgtgatgggtcaccttgtgtgctgtctctgtggaaaatgggcaagctaccgaaatatgggagacctctttggacctttttaccctcaagattacgcggccacccttcctaagaatccaccaccaaagcgagcaactgaaatgcagagcaaggtcaaggtgcgccataaatctgccagcaatggatccaaaaccgacaccgaggaggaggaagaacagcaacaacaacaaaaggaacagcgtagcctcgctgcccaccctcgattcaaaagaagacaccggagcgaagactgtgggggggggccacggtccctcagccgtggcctcccatgcaagaaggccgcaacagaaggctcatctgagaaaacggtgcttgactctaagcccagcgtacccaccaccagtgagggcgggccggaactggagctgcagatcccggagcttccgttagacagcaatgagttctgggttcacgaaggatgcattctgtgggccaacggaatctacttagtttgtggccggctgtatgggcttcaagaggccctggagatcgcgcgagagatgaagtgcagccactgtcaggaagccggagccaccctggggtgctacaacaaaggatgttcctttcgctaccactacccttgcgccatcgatgcggactgcctcctgcatgaggagaatttttcagtgagatgcccaaaacataagccccctctgccatgtcctctcccaccccttcaaaataaaaccgctaaggggtctctctctactgaacagagtgagcgaggatag

SEQ ID NO: 17748 - DNA, 540 bp, synthetic construct
  misc_feature 1..540: note = Description of Artificial Sequence: Synthetic coding sequence
  source 1..540: mol_type = other DNA
atgagtaccggcagcctctccgatgttgaagacctgcaggaagtggaaatgctggagtgcgatggcctcaagatggactctaacaaagagttcgtgacctccaatgagtctacagaggagtcctccaactgcgagaacggcagcccccaaaagggacgaggaggtctgggaaaaagaaggaaagctccgacaaagaagagtccactctctggcgtgtcacaggaggggaaacaagttcagcgcaacgcggccaatgctagagaacgggctaggatgcgcgtgctcagtaaagcattctcccggctgaaaacgacgctgccgtgggttcccccggataccaagctttctaaactcgataccctgcgcctggcctctagctatattgcccacttaagacagattctggcaaatgacaagtacgaaaatgggtatattcatcctgtgaatcttacgtggccttttatggtagccggcaagccagagtctgacctgaaggaagtggtgaccgccagtcgtctgtgtgggacgacagcctcctag

SEQ ID NO: 17749 - DNA, 540 bp, synthetic construct
  misc_feature 1..540: note = Description of Artificial Sequence: Synthetic coding sequence
  source 1..540: mol_type = other DNA
atgagcaccggatctctgtcagatgtcgaagatctccaggaggtggagatgctcgagtgcgatgggttaaagatggattcgaacaaggagtttgttacctctaatgagtccaccgaggagagttcaaattgcgaaaacggaagccctcagaaaggcagaggcggcctgggaaagaggcgaaaggctcctaccaaaaagtccccactgtcaggagtgtctcaagaggggaagcaagtgcagcggaacgcggcgaatgcaagggaaagggctcgcatgagggttctaagtaaagctttcagccgactcaagacaacactcccttgggttccccctgataccaagctgagcaaactggataccctacggctggcaagcagctacatagctcacctccggcagatcttggcaaacgacaaatacgaaaacgggtacatccatcctgtaaacctcacgtggcctttcatggttgccgggaaacccgaatccgacctgaaggaggttgtgaccgctagccgcctgtgtggcacaaccgcctcttag

SEQ ID NO: 17750 - DNA, 1965 bp, synthetic construct
  misc_feature 1..1965: note = Description of Artificial Sequence: Synthetic coding sequence
  source 1..1965: mol_type = other DNA
atgaatcagccacaacggatggctcccgtaggcactgataaggagctttcagaccttttagatttcagtatgatgttccccctgcctgtgacaaacggcaaaggacggccagcttccctcgccggcgcacaattcggcgggtcagggctggaagatagaccttcatccgggagctggggaagcggtgaccagtcctcaagcagttttgacccctctcgaacattttccgaaggcacgcacttcactgagtctcatagctctctgtccagctctacattcctggggccagggttgggagggaagagcggcgagcgcggcgcctatgcatcatttgggagagatgccggcgttggtggcctcacccaggcggggtttctgagcggcgaattagccctgaattctccgggtcctctgagtccatccggtatgaaaggaacatcccaatactacccctcatacagtgggtcgtctcgacgacgcgcagccgacgggtcattggacactcagccgaaaaaggtgagaaaggtgcctcctggactacctagctcggtgtatcctcccagttccggagaggactacgggcgagacgccaccgcgtacccaagcgcgaaaacgccctccagcacctaccctgcacctttctacgtagcagacggctctttgcatccttcggccgagctctggagcccacctggtcaggcgggcttcggcccgatgcttggtggcgggagttcccctttgcctttaccgcctggatccggtccagtcgggtctagcggatcgtcaagcacattcggaggccttcaccagcatgaaagaatgggataccaacttcacggcgccgaagttaatggcggcctaccctcagctagtagtttcagcagcgcccctggggcaacttatgggggcgtatccagccacacgccacccgtgtccggtgccgactctttacttggctctaggggaacaaccgcgggtagcagcggggacgcattgggcaaagccctggcatcgatatacagtccagaccacagtagtaacaacttttctagctccccatccacccccgtcgggtccccgcagggactggcagggaccagtcagtggcctagagcgggcgccccgggcgcactctccccttcctacgatggggggttgcatgggcttcagtccaagatcgaggaccatctggatgaggcaatccatgtgctgcgctcacatgcagtgggaacagctggggacatgcatacactgctgccgggacatggcgccctcgcgtcagggttcaccggccctatgtccctcggcgggcggcatgctggccttgtcggtggaagtcacccagaggatggcctggctggatccacgtctctgatgcacaatcacgccgctttaccctcacagcctggaacccttcctgacttatcccggccacctgattcttacagcggccttgggcgcgccggagcaaccgcagccgcctccgagatcaaacgggaagagaaggaggacgaagagaacacttccgcggctgatcacagcgaagaggaaaaaaaagaactgaaggcaccacgtgctcggacctcacccgacgaggatgaagatgatctactgccgccggaacagaaagcagagcgcgaaaaagagcggcgcgtcgccaacaacgcccgtgagaggttaagggtccgcgacattaacgaggcgttcaaggagctaggtagaatgtgccagctgcatctaaactccgagaagccacagaccaaattgcttattttacaccaagccgtgtctgtgatattgaaccttgagcagcaagtgcgtgagcgtaacctgaatcccaaggccgcatgtctgaaaagaagagaggaggagaaagtatcaggagtggtcggtgatcctcaaatggtcctttcggccccccatcccggacttagtgaagctcacaatcccgccgggcatatgtag

SEQ ID NO: 17751 - DNA, 1956 bp, synthetic construct
  misc_feature 1..1956: note = Description of Artificial Sequence: Synthetic coding sequence
  source 1..1956: mol_type = other DNA
atgaatcaaccccaacgaatggctcctgtgggcacagacaaagagctttcagacctcctagatttctcaatgatgttcccgttgccagtgacgaatggcaagggcaggcccgcctccctcgcaggtgcccagttcggcggctccgggctcgaagataggcccagtagcggctcctggggaagcggggatcagtccagctcatcctttgacccaagcaggaccttttccgaggggactcattttacagagtcgcattccagcctctcttcatctacctttctggggcccggattgggcggtaagtctggcgagcgaggtgcttacgcttctttcggacgcgatgccggcgtcggcggcctcacacaggcaggttttctcagtggggaactggctcttaacagccctggccccctgtcaccctccgggatgaagggaacaagccaatactaccctagttactccggatcatccaggcgccgtgcagccgatgggtctctggacacacaacccaaaaaagtccggaaggtgccaccaggattgccgtcctctgtctatccgccctccagtggggaggattatggacgggacgccacagcttatccatccgccaagacccctagctctacgtaccccgcccccttttatgttgcagatgggtccctgcacccttccgctgagctctggtctccacccgggcaagccgggttcggtccgatgctgggtggcggcagttcacccctgcccctgccaccaggtagcgggcctgtcgggtccagtggtagttccagtaccttcggcgggcttcaccagcatgagcgaatgggctatcagctgcacggcgccgaggtaaacggtgggcttccaagcgctagcagtttctcctctgcaccaggggctacttacggcggcgtttcatcgcacacacctcctgtaagcggagccgacagtttgttaggcagtagaggaaccaccgccggaagctccggagacgcgctcggaaaagcgcttgcttctatttactcaccagatcactccagcaataacttctcttctagtccaagcacccctgtcggcagtcctcagggattggccgggaccagccagtggccacgagctggagctcccggtgcactttccccgtcatatgacggcggtttgcacggtctgcagtcgaaaatcgaggaccatttagacgaggctattcatgttctgcgcagccatgccgtgggcacagccggcgacatgcatacccttttgcctgggcacggcgccttggctagcgggttcactggccctatgtctttaggagggcgccacgccggcctggtcggaggctcccaccccgaagatggcctggcaggatccacatctttaatgcacaatcacgccgccttaccgtcgcaacccggcacgctgccagacctgtctaggcccccagacagctattccggcttgggcagagcaggagccactgccgctgccagtgagatcaaacgggaagagaaggaagacgaggaaaacacaagtgcagccgatcactctgaagaggagaagaaagaattgaaggccccacgtgcccgcacttcttccactgatgaggttctttccctagaagagaaggacctgagagacagggagaggcgaatggctaacaatgctcgcgagcgcgtgcgggtccgagatatcaatgaagcatttcgcgaactcggccgcatgtgccagatgcatctgaaaagcgacaaggcacagactaaactcctcatcttgcagcaagccgtgcaggtgattctggggcttgaacagcaggtccgtgaaaggaatctgaaccctaaagcggcctgcctgaaaagaagggaagaagaaaaagtctccggagtggtgggagatccccagatggtcctgtctgcacctcaccccgggttgtccgaggcacataacccagcagggcatatgtag

SEQ ID NO: 17752 - DNA, 1977 bp, synthetic construct
  misc_feature 1..1977: note = Description of Artificial Sequence: Synthetic coding sequence
  source 1..1977: mol_type = other DNA
atgaaccaaccgcaacgcatggcaccggttggaaccgataaggaattaagtgatctgcttgacttttccatgatgtttcccttacccgtaactaacgggaaagggcggcctgcttccctggcgggtgctcaatttggtgggagcggcaagtccggggaacgtggcgcttatgcaagcttcggcagagatgccggtgtgggagggctaactcaggccggttttttgagcggtgaactggcgcttaattcgccggggcctctgtctccttcaggcatgaagggcactagccagtactatccctcatactctggcagctcaaggagaagggctgccgacggcagcttagacactcagcccaagaaggtacgcaaagtgcccccagggctcccgagtagtgtttatcccccaagcagtggggaagattacggccgcgacgccaccgcgtatccttcagcaaagacgccatcatcaacctaccccgctcccttctacgtggctgatggctccctgcaccctagcgcggaattatggagtccaccaggccaggccggcttcggccctatgctcggtggggggtcatcaccgctgcccttgccacccgggtctggtcccgttgggtcatcgggcagctccagcaccttcggcggactgcaccagcatgaacggatgggctaccagctgcatggtgcagaagtgaacggcgggcttccttctgcatcgtcattctcctccgctcctggtgctacgtacggcggtgtgtcctcacacaccccacctgtgagtggggcggactccctcttagggagcagagggaccacagctggaagttctggtgacgctctcggaaaggcgctcgcctcgatttattcccccgatcattctagtaacaatttctcatctagccccagtactcctgtgggatcccctcagggccttgcggggacaagccagtggccacgggctggcgcaccaggtgccctaagtccctcttacgatggtggtctgcatggcctccagtcaaagatcgaggaccacctggacgaggctattcatgtcctcagatcacacgccgtagggactgcaggggatatgcacactctgctgcccggccatggcgccctggctagtggatttactggacccatgtccctgggcggccgacacgccggactggttggaggatcgcaccccgaggatggcctggccggcagcacctccctcatgcacaatcacgcggctctgccctcacagccagggactctgcctgatctgagtaggcctccagattcctatagcggtctaggccgagctggcgctacggcagccgcgtctgaaatcaagcgagaggagaaggaagatgaggagaatacatctgctgcagatcattcagaagaggagaagaaagaacttaaggctccgcgggccagaacccgctgccagcccacccccagacactctccgccctcgccacatcaagacgcccatgtgcataggccgcatgcccaccggacacacactggccgaccatcagccggtcctacgttgttcccccagccccactgtctcccacttgctccttcaaggcgcccccctcactctcctgacgaggatgaggacgacctcctgcctcctgaacagaaagccgagcgagaaaaggagagacgggtcgctaataatgcacgggagagacttagagtgcgtgatataaatgaggcgttcaaagaactgggacggatgtgtcagctccatctgaatagcgagaaaccgcaaaccaagctcctgatcctccaccaagctgtaagtgttatcctaaatctggaacagcaagtccgcgagaggaacctcaatccaaaagctgcctgcctaaagagaagggaggaggaaaaggtgtctggggtcgttggtgacccccaaatggtattgagcgcaccacaccctggcttgagcgaagcgcataaccctgctgggcacatgtag

SEQ ID NO: 17753 - DNA, 1956 bp, synthetic construct
  misc_feature 1..1956: note = Description of Artificial Sequence: Synthetic coding sequence
  source 1..1956: mol_type = other DNA
atgaaccaacctcagagaatggctcccgtgggaactgataaggagctgtcagacctccttgatttctcaatgatgttccctctgccagtgacaaatgggaaaggacggcctgcgtctctcgccggtgcccagtttggaggatccggcctcgaggaccgcccgagctctggttcatggggctctggggatcaatcatcttcatccttcgatcccagcagaaccttctccgagggaacccacttcacagaaagccatagttccttgagctcatcaaccttcctgggtccagggctcggaggcaagtcaggcgagagaggggcgtacgccagcttcggccgggatgcaggtgtgggcgggctcactcaggctgggtttctgagcggcgaactggctcttaacagtcccggccctttgtccccatctggcatgaagggcacttctcagtattaccccagctacagcggcagttctaggcgacgagctgctgacggctcactcgacacccagcctaagaaggtgcgcaaagtcccacctgggctgccgagttctgtgtatccgccttcctctggcgaggactacggccgagacgcaaccgcttatcctagcgcaaagactccctccagcacatatcccgctccattttacgtggctgatggttcactccaccctagcgccgagctgtggtctcctccaggccaggctgggttcggccctatgctgggaggaggcagctctcccctgccactgcctccaggctcagggccagtaggcagctccggcagcagcagcacatttggaggcctgcaccagcatgagcggatgggataccagctgcatggagcagaagtgaatggaggtctaccgtccgccagttcatttagctctgctccgggggccacatacgggggcgtctcatctcatacacctcctgtgagcggcgcggacagcctgctcggttctagaggaacaacggccggcagcagcggggatgcactgggaaaggcactggcgagtatctactcccctgaccactcttcaaacaacttttcgtccagcccttcgactcccgtgggctcaccccagggcctcgctggtacatcccagtggccgcgggccggtgcacccggcgcgctgtctccgagctatgatggagggttgcacggccttcaaagtaaaatagaggaccatctcgatgaagctattcacgtcctgcgatctcacgccgtgggaacagctggcgatatgcacacactgctgccgggacacggcgccctggctagcggcttcaccggtcccatgtctcttggaggaaggcatgccggcctggtggggggaagtcaccccgaagatggcttagctggctctacctcgctgatgcataatcacgcagcactgccttcccagcctggtacgctcccggatttgtcgagaccccccgactcctacagcggactaggtcgggctggtgctacagccgctgcctctgagataaaacgtgaggaaaaggaggacgaggaaaatacctcagcagcggaccactccgaggaagaaaagaaggaacttaaggcccctcgcgcaaggacaagctctaccgacgaggtgttgtctcttgaagagaaggatctgcgggaccgagaacgcagaatggctaacaatgccagagagcgggtacgtgtcagagacataaatgaagccttccgtgaactgggacgaatgtgtcagatgcatctcaagtccgacaaagcacagacaaagctgctgattttgcagcaggccgtccaggtgatcctcgggttggagcagcaagttagggagagaaatcttaatccaaaagctgcgtgcctgaaacgcagagaagaggagaaagtgtctggtgtggttggggacccacagatggtgctgagtgctccgcacccagggctgtccgaagctcacaaccccgccggccacatgtag

SEQ ID NO: 17754 - DNA, 474 bp, synthetic construct
  misc_feature 1..474: note = Description of Artificial Sequence: Synthetic coding sequence
  source 1..474: mol_type = other DNA
atgggatatcagttacatggcgctgaggtgaatgggggactgccatccgctagcagtttctccagcgccccaggggccacctacggaggggtctcttcccacacaccaccagtgagcggggcggacagcctgctagggtcccgcgggactaccgcaggaagctccggggatgctctagggaaggctcttgcctctatctacagccctgaccactccagcaataacttctctagcagcccctctactccagttggctccccccagggcttggcaggcacctctcaatggcctagggctggtgcccccggcgcactgagcccttcatacgacggggggctacatggactggtcgggggttcccatccagaggacggcctcgccgggtcaacttctcttatgcataaccacgccgcactgccatcacagcctggtactctgccagatctatcgagaccccctgattcttatagttag

SEQ ID NO: 17755 - DNA, 2016 bp, synthetic construct
  misc_feature 1..2016: note = Description of Artificial Sequence: Synthetic coding sequence
  source 1..2016: mol_type = other DNA
atgcatcaccagcaaagaatggccgcacttggcaccgataaggaactgtcagacttactggacttcagcgcaatgttcagcccacctgtgtcatctggcaaaaacggacctacaagcctggcaagcggccattttactggttctaatgttgaagaccgcagctccagtggtagttggggcaatggcgggcatccttccccttctagaaattacggggacggaaccccctacgaccacatgacttctcgtgaccttgggagccacgacaacttgtcaccccccttcgtcaattctcggattcagagtaagactgagagagggtcttatagttcgtacggaagagagagcaaccttcagggctgccaccagcagagtctcttagggggtgacatggatatgggtaacccgggcacactgagccccactaaaccaggttctcagtattatcaatattccagcaataacccgcgacgacggccattgcactcatctgcaatggaagtccagacaaagaaggtcagaaaggtcccgccaggccttccaagcagtgtatacgccccttcagcgtcaactgctgattacaatagggattcacccggttacccctctagcaaaccggctaccagcactttcccatcaagtttttttatgcaagacggccatcacagcagcgacccctggagcagttcgtcaggcatgaatcagcccggctatgcggggatgctcgggaattcgagccatattccccagtcctcatcctattgctcactgcacccccacgagaggctgagctacccatcacactcctctgccgacatcaacagtagtttaccacccatgtctacatttcatcggtccgggactaaccactactcaacatcgagctgtacacctccggccaatggaaccgactcgatcatggccaaccgaggtagcggggctgccggatcatcacagaccggagatgcattgggaaaggctctggccagcatttactctccagatcacaccaataattccttctctagtaacccaagcacacctgttggcagcccaccttcactcagcgccggaacggctgtgtggagcagaaacggcggtcaggcgagctctagtcccaactatgagggacccttacatagcctgcagtcaagaatcgaagataggctggagcgcctggatgacgccatccatgtattgaggaatcacgccgtgggtccttccaccgctatgccgggcggtcacggggatatgcatggcattatcgggccatcacataacggcgcaatgggcgggctcgggtccgggtacggtaccggactgctcagcgctaatagacactctttgatggtagggacccatcgcgaggacggcgtggctcttagaggtagccactctctgctgcccaaccaggtccctgtcccccagttgcccgtccaatctgccacctcccccgacctgaatcctccccaagacccatatcggggcatgccacccgggctccagggccagtccgtctcatctggcagttctgagatcaaaagcgacgatgagggggatgaaaacctccaggatactaagagctccgaagacaaaaagctggacgacgacaaaaaggatattaaaagtatcactcggtcacggagtagcaacaacgacgacgaggacctaacccccgaacaaaaggcagagcgggagaaagagagaagaatggctaataacgctagagaaagattgcgagtccgggacataaacgaggcctttaaggagcttgggagaatggtacaactgcacctgaaatcagacaaacctcaaacgaagctgctcatcttgcaccaggccgtggcggtgatcctgagtttggaacagcaggtcagagagaggaatctcaatcctaaagctgcttgtctgaagcgccgcgaggaagaaaaggtgtcatccgagcccccgccgctttccctcgcaggcccccatccaggaatgggcgacgccagcaaccatatgggacagatgtag

SEQ ID NO: 17756 - DNA, 2004 bp, synthetic construct
  misc_feature 1..2004: note = Description of Artificial Sequence: Synthetic coding sequence
  source 1..2004: mol_type = other DNA
atgcatcaccagcagcggatggctgctctgggcactgacaaggagctaagcgacctgttggactttagtgccatgtttagtccccctgtgtcgtctggtaagaatggccccacctccctagcctctggtcacttcaccggatctaacgttgaagacagaagctcttcagggtcatgggggaacggaggccatccttcccctagcaggaactatggtgacgggacgccatacgatcacatgacatcccgggacctcggatcccatgacaatctgagcccgcccttcgtaaatagtcgcattcagagcaaaacggagcggggctcctacagttcgtatggccgagaatccaacttgcaggggtgccaccagcaatctcttctggggggcgatatggatatgggaaatcccgggacactgtcacctactaagcctggctcacagtattaccagtactcaagcaacaatcctcgccgccggcctctgcatagctccgctatggaggtccaaactaaaaaggtccgaaaggtgcccccagggctgcccagcagcgtctacgctccgtctgccagtacggccgactacaatagagatagccccggctatccgtcctctaagcccgctacttcgacgttcccaagctccttttttatgcaggatggtcaccactcatctgacccctggagcagctcttccggcatgaatcagcccggctacgcaggcatgttaggaaactcttcgcatatcccacaatcctccagctactgctcactgcacccccatgaaaggctgagctatccgtctcattcttcagctgatataaactccagcctgccccccatgtctacttttcatcggtctggaacaaaccattactctacatcatcatgtactccccctgctaacggcaccgacagcattatggctaacagagggtcgggggcagccggcagctcacagaccggcgatgcactggggaaggcattggcgtccatttattctccggaccacaccaacaactcttttagctccaacccttccaccccagtaggctcaccaccttcgctatcagcggggacggcggtttggtcaaggaacgggggacaggcttccagtagtccaaactacgaagggcccctccacagcctgcaatccaggatcgaagacaggctggagagattagacgatgccatccacgtgctgcgcaaccatgctgtgggccctagcacagccatgcctgggggacacggagatatgcacggcatcattggaccatcccataacggggctatgggcggcctgggcagcgggtacgggactggactcctaagtgcgaatcggcattctctcatggtagggacacaccgcgaggacggcgtggcattgcgcggctcccattctttactgccaaaccaggtgcccgttccacagctacccgttcaaagtgccaccagtcctgacctcaacccaccccaagacccttataggggcatgcctcccggcctgcagggacagtccgtgagttctggttcaagtgagattaaaagcgacgacgaaggcgatgaaaatcttcaggacactaaaagttctgaggacaagaaacttgatgacgacaaaaaggacattaagagcatcacgagcaacaacgatgatgaagacttaacccccgaacagaaagccgaaagggagaaggagcgccgtatggccaataatgcccgagagcggctgagggttcgcgatatcaatgaggcatttaaagagctgggccgcatggtgcagcttcatctcaagtctgacaagccccagacgaagcttctgattctacaccaggcagtggccgtgatcctttcattggagcaacaggttcgtgaacggaacctgaacccaaaagccgcctgcctcaaacgccgtgaagaggagaaggtgtcttccgagcctcctccattgagtctggccggccctcaccctggcatgggggacgcgagcaatcatatgggacagatgtag

SEQ ID NO: 17757 - DNA, 2322 bp, synthetic construct
  misc_feature 1..2322: note = Description of Artificial Sequence: Synthetic coding sequence
  source 1..2322: mol_type = other DNA
atgtttagcaaaagactggagaagattgcccaggtccctctgttatttccgttcatctttatcatcttaaccaattactcgaaaatggagggcgctgtggaaagccagccctctttcttcaagacctcccaggacattgtaacttgtacttgggtggagaactgctatagcagttttagccggaggccacttgaacagatgttttgcaaacaccagtcaaagaacattatctcttggaccggcatggtagctcacacctgtaaccccagtacactcggcggccagggactctgcgattttgccaagatgcatcatcagcagcggatggccgcattaggtaccgacaaggaactgtccgacctcctggattttagtgctatgttcagtcccccagtttctagcggtaagaatggccctacaagcctggcctcagggcactttaccgggtctaatgtggaggatcgttccagcagtggttcttgggggaatggcggccatcctagcccctccaggaactacggagatggcaccccctacgatcatatgacaagtcgcgatctcggctcccatgataatctgtctccgccattcgtaaacagtagaattcaatcgaagaccgaacgcgggagctacagcagttacggacgggaaagtaaccttcagggatgtcaccagcagtcacttctgggaggggatatggacatgggtaacccgggtacgctctctcctacaaaaccgggctctcaatactatcagtactcctctaacaatcctcgtagaaggcccttacattcctccgcaatggaagttcagaccaagaaggtgcgaaaggtaccacccggcctcccatcgagcgtgtatgcccccagcgcttcgaccgccgactacaatagggactcccccggctacccctccagtaaaccagcaacgagtacattcccttcttctttttttatgcaggacggccaccactcgagcgatccttggtcttctagttctggcatgaaccagccagggtatgctggcatgcttggcaacagcagtcacatcccacaatcctcatcttactgttcattgcatccacatgaaaggctgtcttaccctagccactccagcgcagatatcaactcttctcttccacctatgtctacttttcacaggtcggggacaaaccactattccacctcctcctgtacgcctcctgctaatgggaccgactccattatggccaatagaggctctggggcagcggggagctctcaaacaggggacgcactaggtaaagcactggcctccatctactcacccgaccataccaacaactctttcagctccaatccatcgacacctgttggaagtcctccgtctctgtccgcaggaactgcagtctggagccgcaacggtggccaggccagctcatctcctaattacgagggaccactgcattcgctgcagagtcggatagaagaccggctggagagattagatgacgctatccacgtcttacggaatcatgccgtgggccccagcacagcaatgccaggcggccacggtgacatgcacggaatcataggcccttcacataatggtgctatgggtggcctgggttccggttacggtaccgggctgctgtctgccaacaggcacagcttgatggtcgggacccacagggaggacggcgtggcactgaggggaagtcactcacttctgcctaaccaggttcctgttcctcagcttcccgtgcaatctgctacgtcccccgatcttaatcccccacaagacccatacaggggcatgcctccaggactccaggggcagagcgtctcgtcagggagctccgagatcaaaagtgatgacgaaggtgatgaaaatctccaggacaccaagtcttctgaagacaaaaaactcgatgacgataagaaagacatcaagtcgataactcggtctcgctcctccaacaacgatgatgaggatttgacccccgaacagaaagccgagcgagaaaaggagcgccgaatggccaataacgcccgagagcgccttagggttcgggatatcaatgaggccttcaaggaattaggccggatggtgcagcttcacctgaaatcagacaaaccccagaccaaactactcattctgcaccaagcagtggctgttatcctgtcattggaacagcaggtccgagagcgcaatctcaacccaaaggcggcttgcctaaagcgccgcgaggaagagaaggtttcctccgagcctcctccactttcactggccggcccacaccctggcatgggcgatgcctcaaatcacatggggcagatgtag

SEQ ID NO: 17758 - DNA, 1536 bp, synthetic construct
  misc_feature 1..1536: note = Description of Artificial Sequence: Synthetic coding sequence
  source 1..1536: mol_type = other DNA
atgtactgcgcctacaccatccctggcatgggaggaaatagcctaatgtactactataatggaaaggccgtctacgccccctccgcttctacagcagactataacagagattcaccggggtacccgtcctctaagccggctacttcaacttttcccagctcattcttcatgcaggatggacaccactcttctgatccgtggagttcatcgagcgggatgaatcagccggggtacgccgggatgctcgggaacagctcccatatcccccagagctcgagctactgcagtttgcatccacatgaaagattgtcttatcctagccacagttcagcagatattaatagtagccttcctccaatgagcacatttcaccggagcggcactaaccattatagtacttccagctgtaccccacctgccaacggcaccgattccatcatggctaatagagggagcggagccgcagggtccagccagacaggggacgcgctgggaaaagctctcgcttccatatactcccctgaccacactaataatagtttctcttcaaacccatccacaccagttggatccccaccaagcctatccgcaggaactgccgtttggtcaagaaatggggggcaggcgagtagctcacccaactacgagggtccactgcactccctgcaatctcgcattgaggatagactggaaaggctcgatgatgcgatccatgtcctgcgaaatcatgccgtggggccctccactgccatgccaggtggtcatggtgacatgcacgggatcataggacccagtcacaacggtgctatgggcggactgggaagtggttatggcaccggccttttatcagcgaacagacactctctcatggtcggcacacaccgagaagatggagttgctctacgaggttcgcactccctcctgcctaatcaggtaccagttccccagctacccgtacagagtgctactagccctgatttgaatccaccgcaggatccctatcgcggcatgcccccgggtctccagggacagtcagtatcaagtggaagttctgaaattaagtctgatgacgagggggacgagaatctgcaagacacgaaatcttctgaagacaaaaagctcgacgatgataaaaaggacataaagtcaattacaaggagtcgctcctcaaacaatgatgacgaagatctcacccctgagcaaaaggccgaaagggagaaagagaggcggatggccaataacgcaagggaaagacttcgagtgcgggatatcaatgaggccttcaaggagctgggccgcatggtccaactccacctgaaaagtgacaaaccacagacaaagcttcttattcttcaccaggccgtggccgttatcctgtctcttgaacagcaggtgcgggagaggaacctgaatccgaaggcagcatgccttaaaaggcgtgaggaagagaaggttagttccgaaccacccccactgtctctggccggcccacacccaggcatgggtgatgcttctaaccatatgggccaaatgtag

SEQ ID NO: 17759 - DNA, 1944 bp, synthetic construct
  misc_feature 1..1944: note = Description of Artificial Sequence: Synthetic coding sequence
  source 1..1944: mol_type = other DNA
atgttctccccacctgtctcttctgggaaaaacggacctacctctctcgcgtcaggccactttacaggatctaacgtggaggatcggtcctctagtggttcatgggggaacggcgggcacccatctccatcgcggaactacggcgacggcactccttacgaccacatgacgagcagggaccttggaagccatgataacctgagtcccccattcgtgaactcccgcatccagagcaagaccgaaagaggatcgtattcctcttacggtcgggagtctaatctgcaaggatgtcaccagcagtctctgctgggaggagatatggacatgggcaatcccggaactttgagccctaccaaacccggatctcagtactaccagtattcatctaacaatccccggagacgaccactccactcctccgccatggaggtccagaccaagaaggtccgaaaggttccacctggactgccctcaagtgtatatgccccctcagcctccaccgcagactacaaccgagattccccaggttacccaagcagcaaacctgccacttctacatttcccagtagcttctttatgcaagatggacaccacagctccgacccatggtcgtcctcgtccggtatgaaccagcccggctacgctggcatgctgggcaattcttctcatataccacagtccagtagctattgtagtctccaccctcacgagagactgtcctaccctagccacagctctgccgacattaacagcagcctgcccccaatgtccacttttcataggagcggcacaaaccattactccacctcatcttgcacacctcctgccaacggcacggatagcattatggccaataggggttctggcgccgcaggtagctctcaaactggtgacgctcttggcaaggccctcgctagcatatattctccagatcatacaaacaattcattctcctctaatccatccacccccgtggggagccctccatcactctctgccgggacggccgtgtggtcaagaaacggtggacaggcttcttcctcgccaaattacgaagggcccctccatagtctgcaatctcgaatagaggatagactagaacgtttggatgacgcgatccacgtccttcggaaccatgccgttggaccatccacagctatgcccggtggtcacggggacatgcacggcatcatcgggccgagtcacaatggagccatgggtggcctcggcagcgggtacggaactggactcttgagcgccaacagacatagtctgatggtgggtacccaccgtgaggacggcgtggctctcagaggcagtcacagccttctgcctaaccaggttcccgttcctcagctgcccgtgcaaagtgccacgtcccctgacctcaaccccccccaagacccctatcgcggtatgcccccgggactgcaaggccagtccgtgagttcaggtagctccgagattaaatccgatgacgagggagatgagaatctacaggacacgaaaagttctgaggataaaaagctagatgacgacaaaaaagacattaaatccatcacccggagtagatcgtctaataatgacgacgaagacctcacccctgagcagaaggcggagagggagaaggaaagacgaatggctaacaacgctagggagaggctccgggtccgggacatcaacgaagcgttcaaggagctggggcggatggtgcagctccatcttaaaagtgataaaccccaaaccaagctgttgatcctccaccaggccgtggcggtgatcctaagcctggagcagcaggtccgggagagaaatctgaaccctaaggctgcgtgtctcaaacgcagggaggaagagaaggtttcttccgagcctccacctttatccctcgctggccctcaccctggtatgggcgatgcatcaaatcacatggggcagatgtag

SEQ ID NO: 17760 - DNA, 1614 bp, synthetic construct
  misc_feature 1..1614: note = Description of Artificial Sequence: Synthetic coding sequence
  source 1..1614: mol_type = other DNA
atggatatgggcaaccccggtaccctgagcccaactaaaccaggtagtcagtattaccagtatagctccaataaccccagacgacgtccgttgcattctagtgctatggaagtccagacaaagaaggtacggaaagttcctcccggcctgccatctagcgtctacgccccgagtgcttctacagccgactacaacagagacagcccaggctatccaagctccaagcccgcaaccagcactttcccttcatcatttttcatgcaagacggccaccacagcagcgatccgtggtcctccagctcaggaatgaatcagccaggttacgcaggaatgctgggcaattcaagccatatcccccaaagcagcagctactgctcattacaccctcacgaacggctttcttacccctcccactcttccgccgacataaatagcagcctccctcccatgagcacttttcaccgttccggcacaaaccattactccacaagtagttgtacacctcctgcaaacggtaccgatagcattatggctaaccgcggctccggagctgccggaagctctcagactggggatgctctcggcaaagcgctcgccagtatatactcgccagaccacactaacaactcgttcagctcgaaccccagtacccccgtaggctccccgcctagcctcagtgccggcaccgctgtgtggtcccggaatgggggacaggcctcaagctcccctaactacgagggccccttgcactcgctccaatcacgcatagaggacagactggaacgcctggatgatgccatccatgtgcttaggaatcacgccgttggcccctccaccgctatgcccgggggccacggcgatatgcatggcatcattggaccaagccataacggcgccatgggcggcttgggatccggttatggcacaggattactgtccgcaaaccggcatagcctgatggtagggacacacagagaggacggtgttgctctgcgcggaagccattctctgctgcccaaccaggtacctgtgccacagctgccggttcagagcgctaccagccctgatcttaatcctcctcaggatccttaccgaggtatgcctccagggctacaagggcagtccgtgagctctggctccagtgaaattaagagtgacgatgaaggggacgagaaccttcaagataccaagtcctcagaggataagaaactcgatgatgacaagaaagacatcaaatccatcacctctaataatgatgacgaggacctgaccccggagcagaaggccgaacgcgaaaaagagagaagaatggccaataatgctcgagagaggctccgagtgcgggacatcaatgaagctttcaaagagctggggcgtatggttcagctacaccttaaaagcgacaagcctcagaccaagttgttaattctgcaccaggccgttgccgtgatcctgtcgctggagcaacaggttcgagagcggaaccttaatccaaaggcagcgtgtcttaagaggcgggaggaggagaaggtctcatctgagccgcctccgctgtctctcgcaggtccacacccaggaatgggggacgctagcaaccatatgggtcagatgtag

SEQ ID NO: 17761 - DNA, 1932 bp, synthetic construct
  misc_feature 1..1932: note = Description of Artificial Sequence: Synthetic coding sequence
  source 1..1932: mol_type = other DNA
atgttctccccacctgtgtcttccggcaaaaacggccccacgtctttagcttcagggcacttcactggttccaatgttgaagaccggagctctagcggcagctggggcaatggaggacacccatcaccgagccgtaattacggagacgggacaccctacgaccatatgacaagcagagacctgggctcgcacgataacctctcccccccattcgttaactcaagaatccagagtaagaccgagcggggatcttactcttcctatggacgggagagcaacctccaaggctgtcaccagcagtccttgctgggaggcgacatggacatgggcaacccaggcactctgagccccacaaaaccgggatcccagtattaccagtatagcagcaataatcctcggaggcgacctctccacagcagcgccatggaggtgcagaccaaaaaggttcgcaaggtaccacccggactgccttccagtgtttacgccccaagcgccagcactgccgactacaatcgggactcacctggatatccgagttctaagccagccaccagtacatttccgtcatcctttttcatgcaggatggccatcattcaagcgatccatggagctcatcctctgggatgaatcaaccagggtacgccggaatgcttggaaacagcagccacattccccagtcaagctcctattgtagccttcatccacatgaacgtctgtcataccccagccatagtagcgctgatatcaactcgtccttgccaccaatgtccacttttcaccgctcagggactaatcactacagcacaagctcgtgtacccccccagcaaatgggactgactcaattatggcaaaccggggatccggagccgcaggtagtagtcagaccggagatgccctcggcaaagcactcgcctctatttactcgcccgaccacaccaataactccttctcttctaacccctctactcccgtgggctcccctccctctctcagcgctggcactgctgtctggagccgcaatggaggacaggcttcctccagccctaactacgagggtccgttgcactcacttcagtcccggatcgaagaccggctagagcgtctggatgacgcaattcatgtactacgaaatcacgcagtaggcccttctacagcaatgccaggaggccacggagacatgcacgggattattggcccatcgcataacggtgcaatgggcggactgggaagcggctacgggacaggcctgttaagcgcaaacaggcatagccttatggtgggaacacatcgggaggatggggtcgcactgagaggttcacactctctcttgcccaaccaggtgcctgtgccccagctgcctgtacaaagcgccaccagccctgacctgaatcccccacaggatccctaccgtggaatgcctccaggcctccagggccagtccgtgtcgtctggcagttctgagattaaatcagacgatgagggcgatgaaaacttacaagacactaaatcaagcgaggacaaaaagctggatgacgataaaaaggatattaagtccattaccagtaataatgatgatgaagatcttactccagaacaaaaagcagagcgtgagaaagaaaggcggatggccaataatgccagggagaggctgcgggtgcgagacatcaacgaggcttttaaggagctgggacggatggtgcagcttcacttgaagagcgataagcctcaaactaagctcttgatactccatcaggccgtggctgttattctgtccctggaacagcaggtgagagaacggaacctgaaccctaaagcagcctgtcttaagagaagggaggaggagaaggtctccagcgagccaccgcctctgtctcttgctggaccccatccaggaatgggcgatgccagtaaccacatgggccaaatgtag

SEQ ID NO: 17762 - DNA, 1878 bp, synthetic construct
  misc_feature 1..1878: note = Description of Artificial Sequence: Synthetic coding sequence
  source 1..1878: mol_type = other DNA
atggaagaggattctcgggacgtcgaagacagatctagttccggttcatgggggaatggaggccatccatcccccagccgtaattatggcgacgggaccccctatgaccacatgaccagccgggacttaggctctcatgataacctgtccccaccatttgtcaattcgcgaattcagtccaaaacagagcgggggtcttacagctcttacgggcgggagagtaacctgcaagggtgccaccagcagagcctgcttggtggagacatggacatgggtaacccggggacgctgagtccgacaaaacctggctcacagtactatcagtactcctcaaataatccaaggaggagacctttgcacagcagtgctatggaggtgcagacaaagaaggtcagaaaggtgccgccagggctaccaagctcagtgtacgcaccatccgccagcacagccgactataatagagactcgcccggatacccctccagcaaacctgccacttctacatttccatcctcgttcttcatgcaggatggacaccatagctctgacccttggagtagtagctctgggatgaatcagcccgggtatgctggcatgttgggcaatagctctcatatccctcagagtagcagctattgttcgctccacccccacgagagactttcctaccctagccactccagcgctgacattaactctagccttcctcccatgtccacctttcataggagcggcaccaaccactatagtacttctagttgcaccccgcccgccaacggcactgactcaattatggcgaaccgaggcagcggggctgcgggatcctcccagaccggagacgctctcggcaaagctctggccagcatttactctcccgaccacactaataactccttctcctcaaatccaagcaccccagtgggcagtccaccctctctgagcgccggaaccgcggtctggtcacgcaatggtgggcaggcttcatcaagtcccaattacgaggggcccctgcacagcctgcagtctcgtatagaagatcgactggaacggctggacgacgcaatccatgtgcttcgaaaccacgctgtgggccctagtactgccatgcccggagggcatggggacatgcacggtataataggacccagccataatggtgccatgggaggcctgggaagcggttacggaaccggccttctctcagccaatagacactccctaatggtgggcacacaccgtgaggatggcgtagctctcagggggtcgcattcactgctacccaatcaggtcccagtaccgcaattgcctgtccagagtgccactagccccgatcttaaccctcctcaggacccataccggggtatgcccccgggattacagggacagagcgtatcgtcagggtccagcgaaatcaagtctgacgatgagggagacgagaatctgcaggatacaaagtcgtccgaggacaaaaagctggatgatgataagaaggacataaaaagcataacaagtaacaatgatgacgaagacctgactcctgagcagaaggctgagagagagaaagaaaggaggatggccaacaatgcgagggaacgactacgcgtgcgggatattaacgaggcattcaaggagctaggccgcatggtgcagttacacctgaaatcagacaagccccagactaagctgctgattcttcaccaggccgtcgcggtgatcctatccctggagcagcaggtgagggaaaggaatcttaatccaaaggctgcctgtctgaagagaagagaggaggaaaaagtctcctccgagccaccacctctcagccttgctggaccacaccccgggatgggcgatgcgagtaatcacatgggacagatgtag

SEQ ID NO: 17763 - DNA, 1803 bp, synthetic construct
  misc_feature 1..1803: note = Description of Artificial Sequence: Synthetic coding sequence
  source 1..1803: mol_type = other DNA
atgaaagatatcttcttccagttcattatagccagagtgcgcaagtgctactccctctcatgtctacacactctgccagtcgttcctactctgcggaagacagagagaggatcatactctagctacggacgcgagtcaaaccttcagggttgtcaccagtcgctccttggcggagacatggacatgggcaaccctgggacattgtctcctacaaaaccaggatcacagtactaccagtactctagcaacaacccgcggcgccgccctctgcacagttccgccatggaggtgcagaccaaaaaggtgagaaaagttccaccgggtcttccaagttccgtgtatgctccaagcgcttcaaccgccgactataaccgtgactctcccggctacccatcttccaagcctgccacttccacgtttccaagtagtttcttcatgcaggacggtcatcattcgagtgatccttggagttcttccagcggcatgaatcaacctgggtacgccggaatgctgggaaattcctcccatattcctcaatcttccagctattgtagtttacaccctcatgagagactgagctacccctctcattcttccgctgatatcaactcctccctcccgcctatgtccacttttcaccgcagcggaacaaaccactattcaacctccagttgcaccccgcccgccaatggcacggatagtattatggcaaatcggggatccggtgccgccggatctagccagaccggagacgctttgggcaaggccttggcctcaatatattctcctgaccacactaataattctttttcttcaaacccctcaactcctgtcgggagcccgccatctctgtctgccgggacggccgtatggagtagaaacggcggccaagcctcatcctctcctaattatgaaggccccttgcattcactacagtcgaggatcgaagacaggttagagaggctggacgacgcaatccatgtcctgcggaaccatgcagtgggcccatcgacagcaatgccgggcggacacggtgatatgcatggcataattggcccgtctcacaacggggccatgggtggactcggatctggctacggtacaggactcctcagcgctaacaggcatagcctaatggtggggacacaccgcgaagatggagtagccttgagaggtagtcacagtttactccccaaccaagtgcctgtccctcagttgccagtccaatctgcgacatcccccgatcttaaccccccacaggacccataccgagggatgccaccgggcctacagggccagtccgtctctagcggctccagcgaaattaagtccgacgacgaaggagacgagaacttgcaggatacaaagagctccgaggataaaaaattggacgacgacaaaaaggatattaagtcaatcacacggtcccgaagctctaataatgacgacgaagatttgacccctgagcagaaagcagagcgggagaaggagcgccgcatggccaataatgcccgggagaggctgagggtgagggacattaacgaagccttcaaggaattgggccgcatggtccagctacacctgaagagcgataaacctcagaccaaactgctcatcctgcaccaggccgtggccgtgattctgtctctcgaacagcaggtcagggagaggaatcttaatcctaaggcagcctgtctgaagcgacgggaagaagagaaggtgtcttctgagccccctcctctgtccttagcagggccccaccctggaatgggagacgcctccaatcatatgggccagatgtag

SEQ ID NO: 17764 - DNA, 1233 bp, synthetic construct
  misc_feature 1..1233: note = Description of Artificial Sequence: Synthetic coding sequence
  source 1..1233: mol_type = other DNA
atggccaaggacgctgggctcatcgaggctaacggtgagcttaaggtatttatagaccaaaatctgtctcctgggaaaggtgtggtgagtctggttgcagtgcatccctctacagtgaatccgctgggaaaacaactgctacctaagaccttcggccaatcaaatgtaaacatcgcccagcaagtcgtcatcggcaccccacagagacctgctgccagtaacaccctggtggtagggagccctcatacccccagcactcattttgcctcccaaaatcaaccctccgattccagcccatggagtgcaggcaaaagaaatcgaaaaggggaaaagaatggaaagggtctgaggcatttttcgatgaaagtttgtgagaaggtgcaacgcaaaggcactacgtcttacaacgaggtcgcagacgagcttgtggccgaattcagtgcggccgacaaccacattctccctaatgagtctgcctatgatcaaaaaaacatcaggcgacgagtgtacgatgctctgaacgtcctgatggcaatgaatatcatcagtaaggaaaagaaggaaattaagtggataggcctgcctacaaatagtgcccaggaatgccagaacctggaggtagaacgccagagaagactggaaagaatcaagcagaagcagagtcagctgcaggagctcatccttcagcagattgctttcaagaacctggtccagcgaaatagacatgccgaacaacaggcgtctcgccctccaccgcctaacagtgtgattcaccttccctttataattgtcaatacgagcaagaagaccgtgatcgattgctccataagcaatgacaagtttgaatatctcttcaatttcgacaataccttcgaaatccatgacgacatcgaggtgctcaagcgaatgggaatggcctgtgggctggaatccggctcatgtagcgctgaagatttgaaaatggcgcgtagcctggttcctaaggctctggagccatatgtgactgagatggcccaagggactgtcggtggagtttttattaccaccgcagggtctacaagtaacggcacccgcttttccgccagcgacctgaccaacggtgccgacgggatgctagccaccagttcgaacggcagccaatatagcggcagcagagtcgagacgccggtttcctatgtcggcgaggatgatgaggaagacgatgattttaatgaaaacgatgaagatgattag

SEQ ID NO: 17765 - DNA, 711 bp, synthetic construct
  misc_feature 1..711: note = Description of Artificial Sequence: Synthetic coding sequence
  source 1..711: mol_type = other DNA
atggccaaggatgccggcctgatcgaggccaatggggaactgaaagtcttcattgaccagaatttgtcccccggcaagggcgttgtcagcctggttgctgtgcacccttccaccgtgaacccactcgggaaacaacttcttcctaagacgtttggacagagcaacgttaacatcgcgcaacaagtcgtcatcgggacccctcagcggcctgcagcctccaatacccttgtcgtgggttctccccacacaccatcgacacacttcgcctcccaaaatcagcccagtgactccagtccatggtctgcgggcaagaggaaccggaagggcgaaaagaacggaaaaggacttcgccacttctccatgaaggtgtgtgagaaggttcagagaaagggaacgacctcctataatgaagttgctgatgagctagtggcggagttttccgccgcagacaaccacatcttgccaaacgagtccgcgtatgaccaaaaaaatatccgccggagagtgtatgatgccctgaacgtgctgatggctatgaacattattagcaaggagaagaaggagatcaaatggattggccttcccacgaactccgctcaggagtgccagaacctagaagtggagcgacaacggagactagagagaataaaacagaagcaatcacaactgcaggagctaatcctgcagcagattgcattcaaaaatctgtag

SEQ ID NO: 17766 - DNA, 480 bp, synthetic construct
  misc_feature 1..480: note = Description of Artificial Sequence: Synthetic coding sequence
  source 1..480: mol_type = other DNA
atggcgaaggacgctggcctaatcgaggctaacggagaactaaaggtgtttatagaccagaacctctcccctggcaagggggtggtgtccctggtggcagtgcacccatctactgttaaccccttggggaaacagctgttgcctaagacgttcgggcaatccaacgtgaacatagcccagcaggtagtcatcggcactccccagaggcccgctgctagcaatactttagtagttggctcgcctcacacccctagcacccacttcgcatcacaaaaccagcccagtgattcaagtccatggagcgcaggaaagcgcaataggaagggcgagaaaaacggtaaaggcttgaggcatttttccatgaaggtgtgtgagaaagtgcaaaggaaaggcaccacctcgtataacgaggtggctgatgaacttgtggccgagttctcggccgctgataaccacattcttccaaatgaaagcgtgtag

SEQ ID NO: 17767 - DNA, 936 bp, synthetic construct
  misc_feature 1..936: note = Description of Artificial Sequence: Synthetic coding sequence
  source 1..936: mol_type = other DNA
atgagcaccctgccatccaagtggaagcggaataggaagggtgaaaagaacggcaagggccttaggcacttctctatgaaagtctgcgagaaagtgcagcgaaaaggcacaacttcttacaatgaggtggccgacgaactagtggcagagttttctgctgctgacaaccatatcttgcctaatgaatctgcatatgatcagaagaatattagaaggcgcgtttacgacgccctgaacgttcttatggctatgaatattatcagcaaggagaagaaagagattaaatggattggactgcctaccaactcagcccaggagtgccagaatctcgaagttgaacggcagagaaggctggaaaggatcaaacagaagcagtcgcagctgcaggaacttatccttcagcaaatcgcgtttaagaacctggtccagagaaaccgtcacgcagaacagcaggcaagccgccctcctcctccgaatagcgtgatccacctgccttttatcatagtcaacacttcgaagaagaccgttatagattgctcaatctcaaacgataaatttgaatacttattcaactttgacaatactttcgagattcatgacgatattgaggtgctgaagcgtatggggatggcttgcggacttgagagcggctcttgcagcgcggaggacctgaaaatggcgaggagtttggttcccaaagcgctggaaccttatgtaacagagatggcacagggaaccgtgggtggggtgttcattactaccgccggctccacatcaaacggcacaagtgacctgaccaatggagcggacggaatgctggctaccagcagtaatggttctcaatacagcgggtcgcgcgtggagaccccagtctcttacgtgggggaggacgacgaggaggatgacgactttaatgagaatgatgaggacgactag

SEQ ID NO: 17768 - DNA, 1146 bp, synthetic construct
  misc_feature 1..1146: note = Description of Artificial Sequence: Synthetic coding sequence
  source 1..1146: mol_type = other DNA
atgagcactctgccgagtaagtggaagcggaacaggaaaggtgagaaaaatggtaaaggcctccggcatttctcgatgaaggtctgcgagaaggtccagaggaagggaaccacctcctataatgaagtcgcggatgaactagtggcagagttcagcgcagcggataatcatattctgccaaacgaatctgcatatgaccaaaagaatattcgtagacgggtttacgacgcgctgaatgtgctgatggccatgaatataattagtaaggaaaagaaggaaatcaagtggattggcctcccaacaaacagcgcccaagaatgccagaaccttgaagttgagcgccagagaaggttagaaagaataaagcagaagcagtctcagctccaggagctcatcctgcagcagatcgccttcaaaaatcttgttcaacgaaacaggcacgcagagcaacaggccagccgccctcccccacctaatagtgtcatccatctcccatttatcattgtgaacacctccaagaaaaccgtaatagactgcagcatatctaacgataagttcgagtacttgtttaacttcgataacacctttgagattcacgacgatatagaagtgcttaagcgtatggggatggcctgcggtttggaatccggatcttgttctgcagaagaccttaagatggcccgaagcttggtgcccaaggcccttgaaccctacgtgacagagaagacaggtctgtgtgattgtaccgccgggtgtcctgctccgtggaggtctgtggaaaacaccggccaagctaaggatatcaggaagctgcttcagccatcggtcctgtggaactgcgcaagcttttgctggttaccagttagactggtcctgtttctcttccacgaccattccttaatcttctttcccttcagtgagatggctcaaggtactgtggggggcgtctttattacaactgccgggtcaacaagtaatggcacaaggttttctgccagcgacctgactaatggcgccgatggaatgcttgcgacaagcagcaatggttctcaatattctggctctagggtcgagacgcccgtgagttacgtcggcgaggacgacgaggaagacgatgatttcaatgagaacgacgaagatgattag

SEQ ID NO: 17769 - DNA, 1161 bp, synthetic construct
  misc_feature 1..1161: note = Description of Artificial Sequence: Synthetic coding sequence
  source 1..1161: mol_type = other DNA
atgatcattagcaccccccaacgcttaacgagttctggctccgtgctcattgggtccccctatacccccgctcctgcaatggtgactcagacacatattgccgaggccacaggatgggtgcctggcgatagaaagagagccaggaagttcattgactcagatttcagcgaatctaagaggtcaaaaaaaggcgacaagaacgggaaagggctgagacactttagcatgaaggtgtgtgagaaggtgcagcgcaaaggcacaaccagttacaacgaggtcgcagacgaattggtgtcagagtttaccaactccaacaaccacctcgcagcagacagccaagcttacgaccagaagaatatccgccgccgcgtctacgacgccctcaatgtgctgatggctatgaacatcatttctaaagagaaaaaggaaatcaagtggattggtcttccaactaattcagcccaggagtgtcagaacctggaaatcgaaaagcagcggagaattgagcgaataaagcagaaaagagctcaattgcaggagttgttactgcagcagatcgccttcaagaatctggtccagagaaaccgccagaatgagcaacagaatcaagggccgcccgctctcaatagcactatccagctgccctttatcattatcaacacatcgaggaagaccgttatagactgttccatctcctcggacaagtttgagtatttattcaacttcgacaatacctttgagatccacgatgatattgaagtgttgaaaagaatgggtatgagctttgggctcgagtccgggaagtgctcgctggaagatcttaaactcgccaaaagtctggtgcctaaggccctggaggggtatatcaccgacatttctaccgggcccagttggctgaatcaagggctactcctgaacagcacccagagcgtgtcaaatctggatctaaccactggcgcgacacttccacagtcctccgttaatcaaggactttgtctggatgcagaggtggccctggccacaggccagttccttgctcctaactctcatcagagcagttccgccgcatcccattgcagcgaaagtagaggggagaccccttgctctttcaatgacgaggatgaagaggatgatgaggaagattccagcagtccagagtag

SEQ ID NO: 17770 - DNA, 1113 bp, synthetic construct
  misc_feature 1..1113: note = Description of Artificial Sequence: Synthetic coding sequence
  source 1..1113: mol_type = other DNA
atgatcatcagcacacctcagcgcctcacctcttctggatccgtgctgataggctcaccatacacccccgctccggctatggtcacccagactcacattgctgaagccacagggtgggtgccaggcaagaggtccaaaaaaggagacaaaaatggcaaaggcctgcggcacttctccatgaaggtctgtgaaaaggtgcagaggaagggtacgacctcctataacgaggtcgccgacgaactggtgtctgaattcacgaacagtaacaatcacctcgcagcagattcacaggcatatgatcagaagaatattagaagacgagtttacgatgcccttaatgtgttgatggctatgaacataatttctaaggagaaaaaagaaatcaaatggatcggcctgcccacgaacagtgcacaggaatgtcagaatctggaaattgagaagcagaggaggattgaaaggattaagcagaaacgcgcccaactccaggaacttcttctgcaacaaattgccttcaaaaacctcgtccagcgaaatcggcagaacgaacagcagaatcagggacctcccgctctgaacagtaccatccagcttccatttatcataataaacaccagccgtaaaaccgtgattgattgttccataagctcagacaaattcgagtatctatttaatttcgataacacattcgagatccacgacgatatcgaagtactgaagaggatgggtatgtctttcggactcgaatcagggaaatgttcacttgaggatctgaagctggctaagtctctggtgccgaaggccctggaaggttacattactgatatttctactggcccttcatggttaaaccagggtctactgttaaattcaactcaatccgttagcaacctggatcttacaaccggcgctaccctgccccagtcttccgtgaatcagggcctttgccttgacgccgaggtggctctggccacgggtcagtttctcgctccgaacagccaccagtctagcagcgcggctagccactgcagcgagagtcggggagaaaccccctgtagcttcaacgatgaggacgaggaggacgacgaagaagactcttcttctccggaatag

SEQ ID NO: 17771 - DNA, 1257 bp, synthetic construct
  misc_feature 1..1257: note = Description of Artificial Sequence: Synthetic coding sequence
  source 1..1257: mol_type = other DNA
atgcaaccagaaggaattatttttgaagcggaaaacaaaccctccccaggaacggagtcagccggtacatttattttggatctttctgccactagtcggaccattatctcaactccccagaggttaactagtagcggcagcgtgttgatcggatccccctacacaccggctccggccatggtaacccagacacatatcgcagaggcaaccggctgggtcccgggcgatagaaagcgcgcacgcaaattcattgattcagactttagcgagtctaaacgctccaagaaaggggacaagaacggaaaaggactccgccacttcagcatgaaggtctgtgaaaaagtgcaacggaagggtacaacatcctacaatgaggtggcggacgaactcgttagcgagtttactaactctaataaccacctggccgcggacagcgcatatgaccagaagaatattcggcgacgggtgtatgacgccctcaatgtgctcatggctatgaacatcatctccaaggaaaagaaggagattaaatggattggcttgcctacgaactccgctcaggagtgccagaatttagagatcgagaagcagaggagaattgagcggatcaagcagaagcgggcccagctgcaggagctgctgttgcaacaaatcgcattcaagaatttggtacagcggaatcgacaaaacgagcagcagaatcaggggccacccgcattgaacagtacaattcaactccctttcattatcattaacaccagccgcaagaccgtcatcgactgctcgatctctagcgataagttcgagtacctgttcaatttcgacaacacgttcgagattcatgacgacatagaggtgttgaaaaggatggggatgtctttcggcttggaatcaggcaagtgttccctggaggacctgaagctggctaagtctctggtgcctaaagctcttgaagggtatattaccgacattagcaccggcccctcatggttaaatcagggactcctactgaacagcacgcagtccgtgtctaatctcgatctcaccacaggcgccacattaccccagtctagcgtgaaccaaggactctgccttgacgctgaggtcgctttggcaaccggacagttccttgcaccaaactcccaccaatcctctagtgctgctagccattgtagtgagagtcgtggggagaccccctgtagcttcaacgacgaggatgaggaggatgacgaggaagacagcagctcacctgagtag

SEQ ID NO: 17772 - DNA, 1161 bp, synthetic construct
  misc_feature 1..1161: note = Description of Artificial Sequence: Synthetic coding sequence
  source 1..1161: mol_type = other DNA
atgattattagcaccccccagaggctcacctcctctggctctgtgcttattggatctccctatacaccagcgccagccatggtcactcagacccacattgccgaggctacgggctgggtccctggggatagaaaacgcgctagaaaattcatagatagcgatttctccgagtcaaagcgatctaaaaaaggcgataagaacgggaagggcctccggcatttctcgatgaaggtgtgtgagaaggtccagaggaaaggaaccacctcctacaacgaggtggccgacgaactcgtgtcagagtttacgaacagcaacaatcacctggcagccgattcacaggcctatgatcagaaaaacatccgccggagagtatacgacgcactgaatgttttgatggcaatgaatatcataagcaaagagaagaaggaaatcaaatggatcggcttgcctacaaactctgcccaggagtgtcagaacctcgagattgaaaaacaacggcggattgagcgaatcaagcagaagcgcgcacaacttcaggaacttctgctgcaacaaattgcttttaaaaacctcgtccagcgcaatagacaaaatgaacaacagaatcaggggcctcccgccctgaatagcaccatccagcttcccttcatcataatcaacacatcaagaaagaccgtgatcgactgcagtatcagttccgacaaatttgagtacctctttaatttcgacaatacctttgaaattcacgatgatatcgaggttctgaaaagaatggggatgtccttcggattggagtctggaaaatgttccctcgaggaccttaagttagctaagtcactggtgccgaaagccttagagggatatatcaccgatatctcgacaggtccttcatggcttaaccaagggctcctgctgaattctacacagtctgtaagcaacttggacctaaccactggcgcgaccctcccccaaagttctgtaaatcagggactatgtctggatgccgaggtggcgttagctacaggccagttcctcgcacctaacagtcatcagtcaagctcagcagcctcccactgctctgagtctaggggagagaccccctgctcgtttaatgatgaggatgaggaagatgatgaagaagattcatccagcccagagtag

SEQ ID NO: 17773 - DNA, 261 bp, synthetic construct
  misc_feature 1..261: note = Description of Artificial Sequence: Synthetic coding sequence
  source 1..261: mol_type = other DNA
atgaccgccaaaaacgtgggactgacatcaaccaatgcggaggtccgagggtttattgaccaaaatctgagtcccacaaaaggcaatataagctttgtggccttcccagtttccaatacgaatagccccaccaagatcttgcccaagactctcggccctatcaatgtaaacgtggggccccagatgataattagcactccacaaaggctcacctcttccggaagtgtcctgatcgggagcccttacactcccgccccctag

SEQ ID NO: 17774 - DNA, 141 bp, synthetic construct
  misc_feature 1..141: note = Description of Artificial Sequence: Synthetic coding sequence
  source 1..141: mol_type = other DNA
atgatcatatccacaccccagcggttgacatcctctggaagcgtcttgattggtagcccatacactcctgcgccagcgatggtgacacaaacccacatcgcggaggccaccggatgggtccccggcgataggaaaagatag

SEQ ID NO: 17775 - DNA, 1158 bp, synthetic construct
  misc_feature 1..1158: note = Description of Artificial Sequence: Synthetic coding sequence
  source 1..1158: mol_type = other DNA
atgatcatcagtacaccccagcgcctgaccagctccggatctgtgctgataggatcaccctatactccagctcctgcaatggtaacccaaacacacattgctgaagcgaccgggtgggtaccaggcgatagaaagcgcgcccgcaaattcatagactctgacttttccgaatcaaagaggtccaagaaaggggataagaacggcaaaggacttcgacacttcagcatgaaggtgtgtgaaaaagtgcaaagaaagggtaccaccagttacaatgaagtagcagatgagctggtaagtgagtttactaatagcaacaaccacttggccgccgacagtgcctacgatcaaaaaaatatcaggcgacgggtatatgatgccctgaatgtcttgatggccatgaatatcatttcgaaagagaaaaaggagatcaagtggatcggcctgcccaccaatagcgctcaagagtgtcaaaacctcgaaatagaaaaacagcgtcggattgaacggattaaacagaagagggcccaacttcaagagctactacttcagcagattgcatttaagaacttagttcaaagaaacagacagaacgaacagcagaaccagggaccaccagccctcaattccacaatccaactcccttttataattatcaatacctccaggaagacagtgatcgactgttccatctcaagcgataaattcgagtacctcttcaacttcgacaatactttcgagatacatgatgatatagaagttctgaagcgaatgggcatgtccttcgggcttgagagcggtaagtgctcactggaagacttgaaacttgcaaaatcattagtgcctaaggctctcgaggggtatatcactgatatttctaccggcccgagctggctgaaccagggcctgttgcttaactccacacagagcgtatctaatctggatcttaccactggtgccaccttaccccagtcatctgttaaccaggggctgtgcctcgatgcagaagtggcactcgccacaggccaatttctcgctcctaactcccatcaaagctcatctgctgcatcacactgtagcgagtctcggggcgaaaccccatgctcttttaacgacgaggatgaggaagacgacgaggaagacagttcgtcccccgagtag

SEQ ID NO: 17776 - DNA, 270 bp, synthetic construct
  misc_feature 1..270: note = Description of Artificial Sequence: Synthetic coding sequence
  source 1..270: mol_type = other DNA
atgattatttcaacccctcagcgactgacttctagcgggtcggttttaattgggtcaccatatactcctgcgcctgcaatggtgacacagactcacattgctgaggctaccggatgggtccccggcgaccggaaacgcgcccgcaagttcattgactcagatttttccgagagcaaacgatccaagaagggggacaagaacggcaaaggattgcgccatttcagcatgaaggtgtgcgaaaaagtgcagcggaagggcaccacctcatag

SEQ ID NO: 17777 - DNA, 1341 bp, synthetic construct
  misc_feature 1..1341: note = Description of Artificial Sequence: Synthetic coding sequence
  source 1..1341: mol_type = other DNA
atgaccgccaagaatgtcggcctgacttctacaaatgcggaggtgagaggcttcattgatcaaaatctgagtccaaccaaaggtaatattagttttgtggcctttcctgtgtccaacacaaacagtcccactaaaatactcccaaaaaccctgggccccatcaacgtgaatgtgggaccccaaatgataatctccaccccacaacggttaactagctctgggtccgtcttgataggttccccctacaccccagcacccgcgatggttactcagacgcacattgctgaggcaactgggtgggtcccaggtgacaggaaaagggcccggaagttcattgattccgattttagtgaaagtaaaagaagcaagaaaggcgacaagaacggaaaagggttgcgacatttcagcatgaaggtttgtgaaaaggtacaacgtaaagggactacctcatataatgaggtggcagacgaactggtcagcgagttcaccaatagcaacaaccacctggctgctgactcggcctacgaccaaaagaatatcagacggagggtttacgacgccttgaacgtgctgatggctatgaatatcattagcaaggaaaaaaaggagatcaaatggatcggcttacccaccaatagtgcccaagagtgtcagaacctagaaatcgaaaaacagagaagaatagagcggatcaaacagaaacgggcgcagctgcaggagttgcttttacagcagatagccttcaagaacctcgtccagcgcaacaggcagaacgagcagcagaatcaggggccccccgcactcaactccaccatacagctgccgttcataatcatcaatactagccgcaaaaccgtgatcgactgctctatttcgagcgataagttcgagtatctctttaatttcgataacaccttcgagatccatgatgatattgaagtgcttaaaaggatggggatgtccttcggactggagagcgggaaatgctccctcgaggatttgaaactggccaagagtctagtccccaaagctttagaagggtatataacggacatcagcacagggccctcctggctaaaccagggacttctactgaactctactcagtctgtatccaatttggatctcaccaccggggccaccctgccccagagcagtgtcaaccaggggctctgcctggatgccgaagtagcgctggccactgggcagtttctcgctcctaattcgcaccagagctcaagtgccgcaagccattgtagtgaaagccggggagagactccctgttctttcaatgatgaggacgaagaagacgacgaagaagatagcagtagccctgaatag

SEQ ID NO: 17778 - DNA, 84 bp, synthetic construct
  misc_feature 1..84: note = Description of Artificial Sequence: Synthetic coding sequence
  source 1..84: mol_type = other DNA
atgatcatcagcacaccccagcgccttacaagttccggctccgtgctgattggcagcccttacacccccgcccccgcaatgtag

SEQ ID NO: 17779 - DNA, 1050 bp, synthetic construct
  misc_feature 1..1050: note = Description of Artificial Sequence: Synthetic coding sequence
  source 1..1050: mol_type = other DNA
atgctcgatcccaagtgcgatcgcaagcgcgcacggaagtttattgattccgatttctcagagtcaaagcgcagtaagaagggtgataagaatggcaaggggctaagacacttctccatgaaggtgtgcgagaaagtccaacggaaaggcacaacgtcatacaacgaggtggcggatgagctggtgtccgagttcacgaactctaacaatcatcttgctgcagactctgcctacgaccaaaagaacattagacgcagagtgtacgatgctctgaatgtgctcatggccatgaatatcatcagtaaggaaaagaaagaaatcaagtggatcggattacccacgaacagcgctcaagaatgccagaacctggagattgagaaacagcggagaatcgaacgtattaagcagaagagggcccagctccaggagctgttgttgcagcagatagctttcaagaacctggttcagcggaacagacagaatgaacagcaaaatcaagggcctcctgcactgaattccaccattcagttgccattcatcatcatcaacacaagccgcaagaccgtaattgactgctcaatctcctctgataagtttgagtacctgttcaatttcgataatacgttcgagattcacgacgatattgaagtcttgaagaggatgggtatgagctttggactggaaagcgggaagtgcagtctcgaggatctgaaactggctaagagcctcgtcccgaaagccctcgagggctacataaccgacatttccaccggcccctcatggctcaatcagggcctgttgttaaactcgacacaatcagtgtcaaatctggacttgacaaccggtgccacgctgccccagagctccgtgaatcaaggactgtgtctggatgcagaggtcgcactggcaaccggacagttcctcgctccaaattctcaccagagcagttctgcggccagccattgctcggaatccaggggcgagacgccttgttctttcaacgacgaggatgaagaagatgacgaagaagactcctcttctcctgagtag

SEQ ID NO: 17780 - DNA, 663 bp, synthetic construct
  misc_feature 1..663: note = Description of Artificial Sequence: Synthetic coding sequence
  source 1..663: mol_type = other DNA
atgatcatttctacaccccagcggctgacttcatcagggtcagtgctaatcggatctccgtacactcctgctccagccatggtaactcagactcatattgcagaggccaccggatgggtgccaggagataggaaacgggctcggaagttcatcgactccgacttctcagaaagtaagcgctctaaaaagggggacaagaacggtaaaggcctgaggcacttttccatgaaggtatgtgaaaaggtgcagcgtaagggaacgacttcttataacgaggtggccgacgagttggtttcagagttcaccaattctaataatcacctggcagcagactcagcctacgaccagaagaatattcggaggagagtgtacgacgccttgaacgtcctgatggctatgaacatcattagcaaggaaaagaaagagatcaagtggatcggtttacccaccaattccgctcaggaatgccagaatctcgagatcgaaaaacaacgccggattgagagaataaagcaaaagcgagcgcagctgcaggaactgctgctgcagcagattgcattcaaaaacttggtgcagagaaacaggcagaacgagcagcagaatcagggccctcctgcactcaatagcacaattcagctgccgtttataatcatcaatacctag

SEQ ID NO: 17781 - DNA, 1161 bp, synthetic construct
  misc_feature 1..1161: note = Description of Artificial Sequence: Synthetic coding sequence
  source 1..1161: mol_type = other DNA
atgataatatcaacgccacagcggctgaccagttctgggagtgtgctcattggcagcccctacacccccgccccagcgatggtgactcagacccatatcgctgaggccaccggctgggtgcccggagatagaaagcgagcccgcaaatttatagatagcgacttttctgaaagcaaacgtagtaagaaaggagataagaacgggaagggccttcgacatttctccatgaaggtgtgtgaaaaagtacagcgcaagggcactacatcctacaacgaggttgctgacgagctggtaagcgaatttaccaattccaacaaccacctcgccgctgattcacaggcctacgatcaaaagaacattcgccggcgggtctacgatgccttgaatgtgcttatggccatgaatatcattagtaaagagaagaaggagatcaagtggatcgggcttcccactaattccgctcaggagtgtcagaatcttgaaatcgaaaagcagcgccggatcgaacgcatcaagcaaaagagagcccagctgcaagaattgttactccagcagatagcttttaaaaatctcgtgcagcgtaataggcagaatgagcagcagaaccaaggccctcctgcgcttaacagtacaattcagctgccttttattatcataaacacgtccaggaaaacagtgatcgactgctcaatcagcagtgataaatttgagtaccttttcaatttcgataatactttcgaaatacacgatgatattgaggttctcaagcggatgggtatgtccttcggtttggaatctggtaaatgttctctggaggacttgaagctggcaaagagtctcgttcccaaggcacttgagggctacatcacggacatctccaccggtccttcctggctgaatcaaggccttctattgaactccacccagagcgtttccaatcttgatttgacaaccggagctacactgccacaatcatcggtgaaccagggcctctgcctggacgccgaggtggcccttgctactgggcagtttctagctcccaactcacaccagtcgtcgtccgctgcttctcactgctctgagagccggggagagacgccttgcagttttaacgatgaagatgaagaagacgatgaggaagatagttcatcccctgagtag

SEQ ID NO: 17782 - DNA, 933 bp, synthetic construct
  misc_feature 1..933: note = Description of Artificial Sequence: Synthetic coding sequence
  source 1..933: mol_type = other DNA
atgaaagtatgtgaaaaagttcaacgcaagggcacaacaagctacaacgaggtggcagacgaactggtaagtgaattcactaactccaacaatcatttagcggctgactctgcatatgatcaaaagaatattaggcggcgcgtgtatgacgcgctcaacgtcctaatggcaatgaatattatcagtaaagagaagaaagagattaaatggatcggtctgcccaccaattccgctcaggaatgtcagaacctggagatcgagaagcagcgtagaatcgaaagaataaaacagaagcgcgcacaactgcaagagcttctattacagcagatcgcctttaaaaatttggtgcagagaaatagacaaaacgaacagcaaaatcaagggccacccgctcttaacagcacaatccagcttccattcataatcatcaacacgtcccgaaagaccgtcatcgactgctccatttccagtgacaaatttgaatatctctttaacttcgacaacacttttgagatccacgatgacatcgaggtgttaaaacggatggggatgagcttcggcctggagagcggaaaatgcagtctagaagacctcaagttggccaaaagcctggttcctaaggccttagagggctacatcaccgatatttcaacaggccccagctggctgaatcaaggcctgcttctgaactcaacacaaagtgtttctaatcttgatctcactacaggtgcaacattaccccagagttctgttaaccagggcctctgcctggacgctgaggtggctctggccaccggtcagttcctggctccaaacagccaccaatctagcagtgctgctagccactgcagcgaaagcaggggcgaaactccttgcagctttaacgatgaagacgaggaagacgatgaggaagatagcagtagcccggagtag

SEQ ID NO: 17783 - DNA, 1335 bp, synthetic construct
  misc_feature 1..1335: note = Description of Artificial Sequence: Synthetic coding sequence
  source 1..1335: mol_type = other DNA
atgcccagaagcggagcccccaaggagcgtccagccgagcccctcaccccacccccttcgtacgggcaccagccacagacaggaagtggagaaagttctggtgcatccggcgataaagaccacctctacagcaccgtgtgcaagccgagaagtccaaaacctgccgctccagcagcccctcccttctcaagctctagtggcgtcctgggtacgggattatgtgagcttgatcgccttttacaggaattaaatgccactcaattcaacattaccgatgagattatgtctcagttcccaagttccaaggtagccagtggggaacagaaagaggatcagtccgaggataaaaagcggccctccctgccatcttccccttctcctggactccccaaggccagcgccacatccgctactttggaactggatcggcttatggctagcctatctgactttcgggtccagaaccacctcccggcctccggtccaacccaaccacccgtggtgtcctcaacgaacgaaggctctccgagtccccctgagcctactggtaagggtagcctggacacaatgttaggactcctgcagagcgatctgagcaggcgtggggtcccgacacaggcaaaaggtctgtgcggctcctgtaacaagcctatagccggacaggttgtaacagcactgggtcgggcttggcaccctgagcactttgtatgtggaggatgttctactgcgctgggggggtcttccttttttgaaaaagatggtgctccattctgcccggagtgttatttcgagcgattctccccccgctgtgggttttgtaaccaacccatcagacataagatggtcaccgcacttggcacccattggcacccagagcacttttgttgtgtctcctgcggcgagccctttggtgacgaagggttccatgagcgcgaagggagaccctactgtcgaagagatttcttacagctcttcgcaccccgctgccagggctgccaggggcccatcctggataattacattagcgccttatccgccctctggcatcccgattgtttcgtgtgcagagagtgttttgctcccttcagcggcgggtccttctttgagcatgagggccgcccgctttgcgagaaccattttcatgcacgacgcggctcattgtgcgcgacctgcggtttacccgtcaccggacgctgcgtctccgctctggggcgtcgcttccaccccgaccactttacttgcaccttctgtctacggcctctaaccaagggctcctttcaagagcgagcaggcaagccctattgtcagccatgtttcctcaaactttttggctag

SEQ ID NO: 17784 - DNA, 1335 bp, synthetic construct
  misc_feature 1..1335: note = Description of Artificial Sequence: Synthetic coding sequence
  source 1..1335: mol_type = other DNA
atgcccagatcgggcgctccaaaggaacggcccgctgaaccacttactcctcccccctcttatggccaccagcctcagaccggaagtggggagtcaagtggggcctcgggtgataaggatcacctctactctacagtgtgcaagccccggtcgcccaaacccgcagcaccagcagcgccaccctttagttccagtagcggcgtgctgggcactggcctctgcgagctagaccgcctgttacaggagttaaacgcgacacaattcaacatcacagatgagatcatgagtcagttcccatcttctaaagtcgcctccggagagcagaaagaggaccagagtgaggacaagaagcggccttctctgccctcatccccttctcccggcctcccaaaggcctctgcaacctctgccacccttgaactggaccgactgatggccagtctgagtgattttagagtgcaaaaccatctgcccgcctcaggcccaacccagccccccgtggtgtcaagcaccaatgaaggatctccatctcccccagagcccaccggaaaaggatctctggatacaatgctgggtctgctgcagtctgatctcagtagaagaggggtgcctactcaggctaagggtctctgcggaagctgtaacaagccaatcgcaggtcaggtggtgacggcccttggcagggcctggcatcccgagcattttgtctgcggaggatgttccaccgcactgggcgggagctctttcttcgaaaaggatggagccccattttgccccgagtgctactttgaaagattttcccctagatgcgggttttgtaaccagccaatccgacacaaaatggtcactgcattaggcacccattggcatcctgaacacttctgctgcgtgtcatgtggggagccttttggggacgaaggcttccacgagcgggaaggacgaccgtactgcagacgtgattttttgcaattgtttgcaccgagatgccagggctgccaaggtcccatccttgacaactacatcagtgcactttcagctttatggcacccagattgctttgtgtgtcgcgagtgctttgcaccattttccggtggttctttcttcgaacatgagggccggcccctctgtgaaaaccactttcacgcgagacggggctctctgtgcgccacatgtggcctgccagtaaccgggcggtgtgtgtcagccctgggtcggcgatttcaccccgaccacttcacttgcaccttctgcttgcgacccttgaccaaagggtccttccaggagagagcaggcaagccatactgtcagccctgttttctgaaactctttggatag

SEQ ID NO: 17785 - DNA, 1386 bp, synthetic construct
  misc_feature 1..1386: note = Description of Artificial Sequence: Synthetic coding sequence
  source 1..1386: mol_type = other DNA
atggaagacctggacgcattactgagcgacctggaaactacaaccagccatatgccccggtctggggcccccaaggagcgaccagccgagccattaacacccccaccctcatacgggcatcagccccaaactggctccggcgagagctcaggagcttccggggacaaggatcacctgtattctactgtctgtaaacctagatcccccaaaccagcagcccccgccgccccccctttttcgtctagctcaggggtgctgggcacggggctgtgtgaactcgacaggctgctccaggaactcaacgctactcagtttaacatcacagacgagataatgtcacagttcccttccagcaaagtggcgagtggtgaacagaaagaagaccagtctgaggacaagaagagaccctccctcccatcttccccatctcctgggttgccaaaggccagcgccacctctgcgactcttgagctggaccggttgatggcaagcctcagcgacttccgcgttcagaatcatctgccagcttccggtccgacccagcctcctgttgtttcatccacgaacgagggctctccctccccccccgaacccacaggtaagggaagcttagacaccatgctcgggttactccagagcgatctgtctagacgaggcgtgccgacccaggccaaggggctttgcggctcgtgcaacaaacctatcgctggccaggtagtcacagccctgggacgggcgtggcaccctgagcacttcgtgtgcggagggtgctcaactgctcttggaggctccagcttctttgagaaggacggtgctcctttttgcccagaatgttatttcgaacgatttagcccaaggtgtgggttttgtaatcagcccattaggcacaagatggtcaccgcgctgggcacccactggcaccccgagcatttttgctgcgtgtcatgcggggaacctttcggggacgaggggttccacgagcgtgagggaaggccttattgcaggagagacttcctgcagcttttcgcccctagatgccaggggtgccaagggcccatactcgataattatatttctgcgctgagcgctctctggcatcctgactgctttgtgtgccgggagtgtttcgcccctttttccggcggctcttttttcgaacatgagggtcgtcccctttgtgagaaccatttccacgcgcgacgcgggtcactgtgtgccacctgtgggcttcccgtgactggccgttgtgtctcagcactgggcaggagatttcaccctgaccatttcacgtgcaccttctgtctgcgtcccctgaccaagggaagttttcaagaaagagccggtaagccctattgccagccctgctttcttaaactttttgggtag

SEQ ID NO: 17786 - DNA, 783 bp, synthetic construct
  misc_feature 1..783: note = Description of Artificial Sequence: Synthetic coding sequence
  source 1..783: mol_type = other DNA
atggtgtggcctgccttatgggaactgtaccgcgagctgggactctttcagggacccgcactgggcctaagaaatcacctgggaagaaagctgagacgaagaaaaaagaagaaagcaaaaagaacgaccaactggaaaatcattacagaccgcccagggttccacgacgagagtgccatctatcctgtgggatattgcagcacacgcatctacgcctcgatgaaatgccccgaccagaagtgtctgtatacatgccagataaaagacgggggcgtacaaccacagtttgaaatcgtccccgaggacgatccgcaaaacgcaattgtctccagctccgcagacgcgtgccatgccgagctcttgcgaaccataagcactacaatggggaaactcatgccgaatctgttgcctgcgggagcggacttttttggcttctcacaccctgcaatccacaacctcattcagtcatgccctggcgcacgaaagtgcatcaattatcaatgggtgaaattcgacgtatgcaagcctggagacgggcaattgcctgagggactccccgagaatgatgccgctatgagcttcgaagcctttcagcggcaaatctttgatgaagaccagaatgaccctctcctaccaggcagtctggacttgcccgagctccagccagccgccttcgtttccagctatcaaccaatgtacctcactcacgagcctctcgttgatacccatttgcaacacctcaagagcccctcccagggctctcctattcaatcaagcgactag

SEQ ID NO: 17787 - DNA, 1236 bp, synthetic construct
  misc_feature 1..1236: note = Description of Artificial Sequence: Synthetic coding sequence
  source 1..1236: mol_type = other DNA
atgtccctcctcgacgggcttgcaagttctcctagagctcccctgcagtcctccaaagcacggatgaagaagctccctaaaaagagtcagaacgagaagtacagattaaagtatctccgactgcggaaagcagccaaggccactgtttttgaaaacgcggccatctgtgacgaaattgcacgccttgaggaaaaattcctgaaagctaaggaggagcgtaggtacctgctaaagaagctgctgcagctacaggcactaactgaaggggaagtgcaggccgctgctccctcccatagctcaagtctgcctctaacgtacggggtcgcttcttcagtcggcactatccagggggcgggacctatcagcggacccagtacgggggcggaggagcctttcggtaaaaagacaaagaaggaaaaaaaggaaaaagggaaggaaaataataaattagaggtgctcaagaagacgtgcaagaaaaagaaaatggcggggggggctcggaagctggtgcaacctatagccttagatccaagtggccgacccgtgttccctatcgggctgggaggattgactgtgtacagcctcggagagatcatcaccgatcgacccggcttccatgacgaaagcgctatctacccggtaggatattgctccacgcgcatctatgcttctatgaagtgccccgatcagaagtgcctctatacatgccagatcaaggatggaggtgttcaaccccagttcgaaatcgtccctgaagacgatccccagaacgccatcgtgtcttctagcgctgacgcttgtcacgctgaattgctccggacaatcagtaccactatgggaaaactcatgccgaacctccttcctgctggggccgactttttcgggttttcccaccctgccatccacaacctgatccaatcctgtcccggcgcacgtaagtgtattaattaccagtgggtaaaatttgacgtttgtaaaccaggagacgggcagcttcccgagggactcccagagaatgatgccgcaatgagcttcgaggctttccagaggcagatctttgacgaggatcaaaacgaccccctcttgcctgggtccctggacctgcccgaactgcagccggccgcctttgtgagctcttaccaacctatgtatctaacgcatgaaccactggttgacacccacctccaacatctgaagtccccatcgcagggatctcccatccagtcttcagattag

SEQ ID NO: 17788 - DNA, 1281 bp, synthetic construct
  misc_feature 1..1281: note = Description of Artificial Sequence: Synthetic coding sequence
  source 1..1281: mol_type = other DNA
atggaggccgctgttgccgcaccacggcctcggctgttactgctcgttctcgcggctgccgccgccgcggccgcagcccttctccctggcgcaactgccctgcaatgtttttgtcatctatgtacaaaggacaattttacgtgcgtgaccgatgggctgtgtttcgtatctgtgactgagactaccgataaagttatccataatagtatgtgcatcgccgaaattgacctgattcctagggacagaccattcgtctgcgcaccatcgtccaagactggaagtgttaccaccacgtactgctgcaaccaggatcactgcaataaaatcgagttacctactactggcctgccactactggttcagcgaacaatcgcccgcaccatcgttcttcaagagagcattgggaaggggcggtttggggaagtgtggaggggtaaatggaggggcgaagaggtagctgttaaaatcttctcatctcgagaggagagaagttggtttcgggaagccgaaatttaccaaaccgtgatgttgagacatgaaaacatcctgggatttattgcagcagacaacaaagataacggaacatggacacagctgtggttggtttccgattatcatgagcacggttccctcttcgactacttgaataggtatacagtaaccgttgaaggcatgattaaattggctctttctactgccagcgggcttgcccacctacacatggagatcgtgggcacccagggcaagccagccatagcacatagggacttgaaatcaaagaatattctggtcaagaagaatggaacctgttgtattgctgatcttgggctggctgtcaggcatgattcagccaccgatacaatagatattgcgcccaatcaccgggtgggaaccaaaagatatatggcccctgaggttctagatgattcgatcaatatgaaacactttgagtcattcaagcgtgccgacatttacgcgatgggtctagtcttctgggaaattgctcggcggtgttcgatcggcgggattcacgaggactaccagctcccttattatgacctcgtaccatctgatccaagcgtggaggaaatgcgcaaggtcgtctgcgaacaaaaattgcgcccaaatatccccaaccggtggcagagttgcgaggccctgcgggtgatggccaagatcatgagagaatgctggtacgctaatggcgctgctcgtttgaccgccctgcggatcaaaaagaccttgtcacaattatcgcagcaggaggggattaaaatgtag

SEQ ID NO: 17789 - DNA, 1512 bp, synthetic construct
  misc_feature 1..1512: note = Description of Artificial Sequence: Synthetic coding sequence
  source 1..1512: mol_type = other DNA
atggaggccgcagtcgccgcgccaaggcctaggttgctcctgctcgtgctggccgcggctgcagccgccgctgctgctttgcttcccggtgccaccgcactgcagtgtttctgccacctgtgcacaaaggacaattttacctgcgtgactgacggcctttgctttgtgagcgtgacagaaactacagataaagtgatccataacagcatgtgcatagccgagatcgacctgatcccgcgcgatcgcccattcgtctgtgccccgtcctcaaaaaccggatcggtgaccaccacatattgctgcaaccaagaccattgtaataagattgagttaccaactaccgtcaagtcttctcccggcctcggcccagtcgagcttgctgccgttatcgcggggcccgtgtgctttgtgtgtatcagccttatgctgatggtctacatttgtcacaatcgtactgtgatccaccacagggtgcccaatgaggaagaccccagcctggacagaccattcatctccgagggcaccacccttaaggacctcatatacgacatgaccacttccggttccggatccgggctgcccttgctggtccagagaactatagcccgaacgatcgtcctgcaggagtccataggaaagggacgctttggtgaggtgtggcgtggaaaatggcgaggcgaagaggtggccgtcaagattttctcttcccgcgaggagcgcagttggttcagagaggcagagatttatcagacagtgatgcttaggcacgagaacatcttgggcttcatagctgcagacaacaaagataatgggacctggactcagctgtggctcgtgagcgattatcacgaacacggaagtctctttgactatttaaataggtacactgtgactgtagagggaatgattaagcttgcactctccactgccagcggcctcgcgcacctacacatggagatagtgggcacgcaaggaaaacccgcaatagctcacagagatctgaaatcaaaaaacattctcgtcaaaaagaacgggacatgctgcatcgcagatctgggcttggcagtgcgtcacgactctgctacagataccatcgacatcgcccccaatcacagggtgggcacaaagcgctacatggcaccagaggtgcttgatgacagtattaacatgaaacacttcgagtcattcaaacgcgcagatatctatgccatgggcttggtgttttgggagatcgccagaaggtgctcaattggaggcattcatgaggactaccagctgccatattacgatcttgtgccctccgatcccagcgttgaggaaatgcggaaagttgtgtgtgaacaaaagctccggcctaatataccaaacagatggcagtcatgtgaagccctccgagtgatggccaaaatcatgcgcgaatgttggtatgccaatggtgcggcacggttgacagccttgaggatcaaaaagacattgtctcagctcagccaacaggaggggatcaagatgtag

SEQ ID NO: 17790 - DNA, 1398 bp, synthetic construct
  misc_feature 1..1398: note = Description of Artificial Sequence: Synthetic coding sequence
  source 1..1398: mol_type = other DNA
atggaggccgccgtcgcagcccccaggccacgtctgctgctcctggtgctggccgcagctgccgccgcagctgcagcgctgctaccaggggcaaccgctctgcagtgcttttgccatctctgcacaaaggacaacttcacctgcgtaactgacggtttgtgttttgtatctgtgaccgaaactacggacaaggtgattcataactcaatgtgcatcgctgagatcgacctcatccccagggataggcccttcgtctgcgccccctctagcaagactggatctgtgactaccacgtactgctgtaatcaggatcattgtaataagatagaactcccgactacggtgaaaagctccccgggtctgggcccagtggagttagccgccgtcattgcaggccccgtgtgttttgtgtgcatatctctgatgctgatggtttacatctgtcataaccggacggtcattcaccacagagtacctaacgaagaggacccttctcttgatcgaccctttatatcagagggcacaaccctgaaagacctgatttatgacatgactacaagcggatcaggctccggactgccattattggtccaaagaacgatcgccagaacaatcgtcctccaagagtccatcggaaagggaaggtttggagaagtgtggagaggcaaatggcgcggagaggaagtggccgtgaaaatattctcatctagggaggagcggagctggttcagggaggccgaaatttatcagaccgtcatgctgcgccatgagaacatcctagggttcatcgccgctgacaacaaggacaatgggacatggacccagctgtggttggtgagtgattatcatgagcacggaagcctattcgattatttaaatcggtatacagtcacggttgagggcatgattaagctagcactgtcaacagcctcggggctggcacacttacatatggaaatcgttggcactcagggcaagcctgctattgcaccaaaccaccgagtgggaaccaagcggtatatggcgcccgaggtcttggacgatagcattaatatgaagcacttcgaatcctttaaacgtgccgatatctatgcaatggggctggtgttttgggagatcgcaaggaggtgcagtatcgggggtatccatgaggactaccagcttccttattacgacttggtcccttctgatccaagtgtagaggagatgaggaaggtggtgtgcgagcagaagctgcgtcctaacatccctaatagatggcaaagctgcgaagcactgagagtcatggcaaagattatgcgcgaatgctggtacgccaatggtgccgcgcggctgacggcgctgaggatcaagaagacgctgagccaactgtcacagcaagagggtatcaaaatgtag

SEQ ID NO: 17791 - DNA, 216 bp, synthetic construct
  misc_feature 1..216: note = Description of Artificial Sequence: Synthetic coding sequence
  source 1..216: mol_type = other DNA
atggaagccgctgtggctgcgcctcggccacgcctactgctcgcaagtacttcattgcaatgcttttgccacttatgcactaaggataactttacatgtgtgacggacggactttgtttcgtttcagtgacagagacgacagacaaggtcatacacaattctatgtgtatcgctgaaatagacttaatcccgcgggatagaccatttgtctgctag

SEQ ID NO: 17792 - DNA, 1305 bp, synthetic construct
  misc_feature 1..1305: note = Description of Artificial Sequence: Synthetic coding sequence
  source 1..1305: mol_type = other DNA
atgtgcatagctgagatcgatcttataccaagagatagacccttcgtctgcgctccaagttcaaaaaccggttctgtaacaacgacttattgttgtaatcaggaccattgcaataaaatcgagctgccgacaactgttaagagtagtcctgggttaggtcctgttgagcttgccgccgtcattgccggcccagtgtgcttcgtttgcatttccctgatgctcatggtatatatatgccacaacagaactgtgatccaccaccgtgtgccgaacgaggaggatcccagtcttgatagaccttttattagcgaaggcacgacactaaaggatctgatctacgatatgacaacctcgggctcaggtagtgggctcccattgcttgttcagcggaccatcgcaagaactatcgtcctccaggaaagcatcggtaaaggccgcttcggcgaagtttggagggggaaatggagaggcgaggaggttgctgtgaaaatcttttcctcaagggaagagcgcagttggtttagggaagcagagatttaccagactgtcatgttgaggcacgaaaatatcctggggtttattgccgccgataacaaagataatggcacatggacacaactctggttagtgtccgactaccacgagcacggcagcttgttcgattatctcaaccgctacactgttacagtcgaaggaatgataaagctcgccttatctaccgcgtcagggttagcccatctccatatggagatcgtcgggacacagggaaagccagctattgctcacagagacttgaagagtaagaatattttggtgaagaaaaatggtacttgttgtatcgctgacttgggtctggctgttcggcatgattccgcaaccgacactatagacatagctccgaaccaccgagtgggcaccaaaaggtatatggcccctgaggtgttggatgactctattaacatgaagcactttgagtcattcaaaagagccgacatctatgcgatgggccttgtgttctgggaaattgcgcgaaggtgctcaatcgggggcatccacgaggattatcagctgccctattacgacctggtcccaagcgacccctctgtggaagagatgcgcaaggtagtgtgtgagcagaaactgcgcccaaatatacccaaccgctggcagagctgtgaagcactgcgcgttatggctaaaattatgcgggaatgctggtacgcgaatggagccgcacggctaacggccctgcgaatcaaaaagacattgtcacagttatcccagcaggaaggtatcaagatgtag

SEQ ID NO: 17793 - DNA, 411 bp, synthetic construct
  misc_feature 1..411: note = Description of Artificial Sequence: Synthetic coding sequence
  source 1..411: mol_type = other DNA
atgaaagatagtaaccggtgctgctgcggccaattcacaaatcagcacataccccccctgcccagtgctacaccgtcgaagaacgaggaggagagtaaacaagttgaaacacaaccagagaaatggagtgttgcaaagcacactcagtcttatcccactgacagctatggtgtcttggaattccagggaggaggatactctaacaaggccatggtgaggaaggcgttccgccacggagcaactcgtataactgccttcatcgggggccagtctccttctcccaaactgcagatacctggcctgctccatggatgtgggtcaatttttcttgacatatcactgaaaaatcaggagatctacctgtgcacttggctcctggccatgcggctggggaactggacaccactttag

SEQ ID NO: 17794 - DNA, 4878 bp, synthetic construct
  misc_feature 1..4878: note = Description of Artificial Sequence: Synthetic coding sequence
  source 1..4878: mol_type = other DNA
atgggacagaagtcatggattgaaaaaaccttctgcaagagggaatgcatattcgtgataccaagcatgaaagacagcaacaggtgctgctgtggccaattcaccaaccagcatatcccgccactgccttcagcgaccccatccaagaatgaggaagagtctaaacaggtggaaacacagcccgagaaatggtctgtcgccaaacatactcagagttaccctaccgattcgtatggagtcctggaatttcagggtgggggttactccaataaagccatgtatattcgcgtgtcatatgacactaagcctgattcacttctccaccttatggtgaaagattggcaactcgaattgccgaaactcctcatctccgtgcacggcggactgcagaatttcgaaatgcagcccaaattgaaacaggtattcggcaaggggctaattaaggctgcaatgacgacaggcgcctggatcttcacagggggggttagtaccggcgtaatctcacacgtcggggacgcccttaaggaccatagcagcaaatctagggggagggtctgcgcaatcggaattgcaccctggggcattgttgaaaacaaagaagatttagtgggcaaggatgtcaccagggtgtaccagactatgtcaaatccgctgtctaaactttcggtgcttaacaattcccacacacacttcatactggccgataacggcactctcggtaagtatggcgccgaggtaaaactgagaaggcttctcgaaaagcacataagcctccagaagatcaatacacgcctggggcagggagtgcccctggtcgggctggtcgtggaaggcggcccaaacgtggtgagcatcgttctggaatacctgcaggaagaaccccctatccccgtcgtaatatgcgacggctcagggcgtgcatctgatatcctttcttttgcacataagtactgcgaggagggtgggatcattaatgaaagcctgcgcgagcaacttcttgtaactattcagaaaacatttaattataataaggcccagtcccaccaattattcgctataatcatggagtgcatgaaaaagaaggagctggtcactgtcttccggatgggcagtgaggggcaacaggatattgaaatggcaattttgacggcgctgctgaagggcacaaatgtctccgcccctgaccagctcagtcttgccttagcctggaacagagtggacattgcccggtcacagatcttcgtcttcggaccccattggcctcctcttggatcactggcacctcccaccgatagtaaggccacggagaaggagaaaaagccgccaatggccacgacgaagggtggacgcgggaagggcaaaggcaagaaaaagggcaaagttaaggaagaggtcgaagaggaaactgacccccgtaaaatcgaactgctcaactgggtcaatgcccttgagcaggcaatgctcgacgccctggttctcgaccgtgtcgatttcgtcaagctactgatagaaaacggcgtgaatatgcagcactttctgacaattcctagactcgaggaactgtataatacaaggctgggcccacccaacacactgcacttgcttgtacgagatgtcaaaaaaagcaacctgcctcccgattaccacatttctttgatcgatatcgggctcgtgctggagtacctaatgggcggagcctaccggtgtaactacacaaggaaaaattttcggaccctgtataacaatctatttggacctaaaaggccaaaggccctgaagctgctggggatggaagacgacgagccaccagcgaagggcaaaaaaaaaaaaaaaaaaaagaaggaagaggagattgatatcgatgttgatgatccggctgtaagccggtttcaatacccttttcacgagctgatggtgtgggcagtgttgatgaagagacagaaaatggctgtgttcctgtggcagcggggcgaagaatctatggcgaaggccctggtggcctgcaaactgtataaagcaatggcacatgagagttcagagtcggacctggtggacgacatctctcaagacctcgataacaatagcaaagacttcggtcaactggcattagagctgttggatcagagctacaaacacgatgagcagatagccatgaagctcctgacgtacgagctgaaaaactggtctaacagtacgtgcctaaagcttgcggtggcagccaagcatagggacttcattgctcacacctgttctcagatgctcttaacagacatgtggatgggccgtttacgaatgcgtaagaaccccggactcaaagttatcatgggtattttgctccctcctactatcctcttcctagaattcagaacatacgacgacttctcctaccaaacgtcaaaggaaaacgaagatggaaaagaaaaggaggaggaaaataccgacgcaaacgctgacgcaggatcgcgcaaaggagacgaggagaacgagcacaaaaagcagaggtccattccaatcggcactaagatttgtgaattctataacgcccccatcgtgaagttctggttttatacaatcagttacctgggatatttactgcttttcaactatgtcatcctggtgaggatggatggctggccatcactccaggaatggatcgtgatcagttacatagtgtctttggcgctcgaaaaaatccgggaaatactcatgtccgaacctggaaagctgtcccaaaaaattaaagtttggctccaggaatattggaatatcacagatcttgtggcaattagtactttcatgattggcgctatcctgcgtctgcagaatcagccgtacatgggatatggtagggtgatttactgcgtcgacattatattttggtacataagggttctggatatctttggagtgaataaatatctcggtccttatgtgatgatgattgggaaaatgatgatagatatgctctacttcgtggtcattatgctggtcgtcctgatgagctttggcgtggcccgacaagcgatcctgcatcctgaagaaaagccatcttggaaactcgcaagaaatatcttctacatgccctattggatgatctatggcgaggtgttcgcggaccagatcgacctctacgcaatggagatcaacccgccctgtggcgaaaacctctatgatgaggagggcaaacgcctgccgccctgcattcctggggcatggctaactcctgccctcatggcctgctaccttttggtggcgaatattctgctcgtaaacctactgattgccgttttcaataatacattcttcgaagtaaagtctattagcaatcaggtgtggaaatttcagaggtaccagcttataatgactttccatgatagaccggtgctcccgccgccaatgatcatcctgtcacacatttacataatcattatgaggctgtcaggcagatgcagaaaaaagagagaaggggatcaggaggagagagataggggactgaagctgtttctgagcgacgaggagcttaagcgcctccacgagtttgaagaacaatgcgtgcaagaacacttcagggagaaagaagatgaacagcagtcttctagcgatgaacgcatccgcgtcaccagtgaaagggttgagaatatgtcgatgcggttggaggagataaacgaaagggagacatttatgaaaacctcgcttcagactgtagacctgaggctggcacagctggaggagttgagcaatcgcatggtcaatgcgctggagaacctcgcaggaattgaccggagcgatttaatccaggctaggagcagagcctcttctgaatgcgaggctacgtatcttctgcggcagagcagcattaatagcgcagatgggtatagcctgtacaggtatcatttcaacggtgaagagctgctcttcgaggacacctctctctccacttcaccaggcacgggcgttaggaaaaaaacatgtagcttcaggatcaaggaagaaaaggacgtaaagacacacttggtgccggagtgccagaattctctgcacctgtccctcggtacatcaaccagcgcaactcctgatggttcacacctggcagtggatgacctgaaaaatgctgaggaatcgaagctcgggcccgacatcggaattagcaaagaagacgatgaaaggcagacagacagcaagaaggaagagaccatcagcccgagcttgaacaaaaccgatgtgattcacgggcaggacaaatcggacgttcaaaacacacaactgaccgtggagacgaccaacatcgaaggcacaatcagctatcctctagaggagacaaaaatcactaggtactttccggacgaaacaataaacgcctgcaagacgatgaaatccagatcttttgtctactcaagggggagaaagcttgtaggcggggtgaatcaggatgttgagtactccagtatcacagaccagcaactcacaacagagtggcagtgtcaggtgcagaagattactagatcccattcaaccgacatcccttacatcgtaagtgaagctgctgtccaggctgagcataaggagcaattcgctgatatgcaggacgagcaccacgtagcagaggctatccccagaattcctcgactttccttgaccatcactgaccgtaatggaatggagaacctcctgtccgtcaaaccagaccaaactcttgggttcccgtcactgcggtctaagagcctccatgggcaccccagaaacgtaaaatccatccaagggaagttggacagatctgggcatgcaagcagtgtgtccagcctggtgatcgtgagtggaatgaccgccgaggagaagaaagtcaagaaggagaaagcctccaccgaaaccgaatgttag

SEQ ID NO: 17795 - DNA, 4812 bp, synthetic construct
  misc_feature 1..4812: note = Description of Artificial Sequence: Synthetic coding sequence
  source 1..4812: mol_type = other DNA
atcaagactagcaaacgctgctgctgcgggcaattcaccaatcagcatatcccgcctctcccctccgccactccatcaaagaacgaagaggaaagcaaacaggtcgagactcagccagagaagtggtccgtggctaagcatactcagtcttatccgacagatagctacggggtacttgagttccagggtggaggctactcaaataaagctatgtacattcgggtcagctacgataccaagccagactctctgttacatctgatggtaaaggactggcagctagaacttcccaagctcctcatctccgtgcacggaggcctccagaacttcgaaatgcagcccaagctcaagcaggtgttcggcaaaggactcattaaggccgctatgacaacaggggcatggatctttaccgggggtgtgtccacaggcgtgatctctcacgtgggcgatgctctgaaagatcattccagtaagagccgcggcagagtgtgcgctatcggtatcgcaccctggggcatcgtggagaataaagaagatcttgttggcaaggacgtgacccgggtgtaccagacaatgtctaatcccctcagcaagttgtccgtgctgaataattcccacacccatttcatcttggccgataacggcaccctgggtaagtacggagctgaggtgaaactgcggaggcttctggaaaaacatatttccctccaaaagattaatacgaggctgggtcagggagtgcccttggtaggactggtagttgagggcggcccgaacgtagtatcgatagtcctggagtatctccaggaagagcctccaattcccgtggttatatgtgatggatccggccgtgcttctgacatcctctctttcgcccataagtactgcgaggaagggggaattatcaacgagagcctgcgggaacagctgctcgtgactattcagaaaacattcaattataacaaagcccagagccaccagctattcgcgatcatcatggaatgcatgaagaaaaaagaactggtgacagtgtttcggatgggctccgaaggccagcaggatattgagatggctatattgactgctctactgaaagggacaaacgtctccgcccccgaccaactctctctggcactggcatggaaccgcgtcgacatcgccagaagccagatctttgtgttcggcccccactggcctccactcggatcacttgcccctcctacagatagcaaggcgaccgaaaaggaaaagaagccaccaatggcaactactaaagggggtcggggtaagggcaagggcaaaaaaaaaggcaaggtcaaagaggaggtggaggaggaaacagatcccaggaaaatagagctgctgaattgggtgaacgcgcttgaacaggccatgctagatgcattggtactggacagagtggacttcgtaaagctgctgatcgaaaacggggtgaatatgcaacattttttaaccatccccaggctggaggagctgtacaacacgcggttaggtccgccgaacacactccatctcttggttagagatgtgaagaagagtaatctgccccccgattaccacatatcgcttattgatattggccttgtgcttgagtacctaatgggcggcgcatatcgctgtaattacacgcgcaagaactttcgaacgctctacaacaacttgttcgggcccaaaagacccaaggctttgaagctgttaggcatggaggatgatgagcctcccgccaaaggcaagaaaaaaaaaaagaagaagaaagaagaagagattgatattgacgttgatgaccccgcggtttcccgtttccagtatccgttccatgaattaatggtttgggcggtcttaatgaaaaggcagaaaatggcggtttttctctggcagaggggcgaggaatctatggccaaagcactcgtggcctgtaagctctacaaggccatggctcatgaaagttccgaaagcgatctggtcgatgatatcagtcaggatttggacaacaattccaaagatttcggtcagttggcactcgaactcctggaccagagctacaagcacgatgagcagattgcaatgaaacttctgacctatgagttaaagaattggagcaactcaacatgtctgaagttagctgtagccgctaaacatagagatttcattgcccacacttgtagccaaatgctcctaaccgacatgtggatgggcagacttcggatgaggaaaaatcccgggctcaaagtgattatgggtattttgttaccacccaccatcctattcttggaattccgcacctacgacgacttcagctaccagacttccaaggagaacgaagacgggaaggagaaggaggaagagaatactgacgcgaacgcagacgcaggtagtcgcaaaggcgacgaggagaacgagcacaagaaacagagatccatacccataggaaccaagatctgtgaattctacaacgccccgatagttaaattctggttctacaccatctcatacctgggctatctgctcttgttcaactatgtgattctggtgaggatggacgggtggcctagcctgcaagagtggatcgtgatcagctacatcgtcagcttggccctggagaaaatccgcgagattctcatgtctgagccgggtaaattgagtcagaaaattaaagtctggctgcaggaatattggaacatcaccgacctcgtggcaatcagtacatttatgattggtgccatcctgcgactgcagaatcagccgtacatgggctacgggagggtaatctattgtgtcgacataattttctggtatataagagtgttggatattttcggcgtgaacaagtatctggggccttacgttatgatgattggcaagatgatgatcgatatgctttactttgtggtcatcatgcttgtggtgcttatgtccttcggggtggccagacaggcaatcctgcaccccgaagagaagcccagttggaagctggcccgcaatattttttacatgccctattggatgatctatggagaggtttttgccgaccaaatagacttatatgcaatggagatcaatcctccttgtggagaaaatctatatgatgaggagggcaaaaggctccccccttgtattcccggcgcttggctcacccctgccctcatggcctgctatctactggtggccaacattcttttagtgaacctcctcattgccgttttcaacaataccttcttcgaggttaaaagcatatccaatcaggtctggaaatttcaaagatatcagctaatcatgacgttccacgaccgcccagtcctgccgcctcctatgatcatcctgtcccacatctacattatcattatgcgtctctctggtcggtgccgcaagaagagagagggcgaccaagaggaacgcgaccggggacttaaattgttcctgagcgacgaggagttaaagagacttcatgagtttgaggagcaatgtgtccaggagcacttccgcgaaaaggaggatgaacaacagtcctcatcagatgagagaatcagagtcaccagtgaaagagtggagaacatgtctatgagattggaggaaatcaacgagcgggaaacatttatgaaaacctctttacagacagtggacctgagacttgctcagctggaagaactgagcaataggatggttaacgccctcgagaacctggccgggatcgatcgctctgacctcatccaggcgcgatctcgcgcctcaagcgagtgcgaggccacatatctccttcgccagagcagcataaattccgctgacgggtattccttgtaccggtatcacttcaacggggaagaacttctgtttgaagatacttccctttcgacatccccgggcacgggcgtaaggaagaaaacatgctcttttcgaattaaagaagagaaggacgtgaagacccatcttgtgccagaatgtcagaattcccttcatctttccctcggaacaagtacttccgcgactccagatgggtcacacctcgctgtggatgatctgaagaatgccgaagaatcaaaactgggtcctgacattgggatctccaaagaggacgatgaacgccagacagactctaagaaggaagagaccattagcccaagccttaacaagaccgacgtcatccacggacaggacaaaagcgatgtacaaaatacccagctcaccgtggaaaccacgaacatcgagggcacaattagctacccattggaggagactaaaatcacaagatacttcccggacgagaccatcaatgcgtgcaagacaatgaaatctcggagctttgtttactctagagggaggaagttagtaggcggcgtaaaccaggacgtcgaatacagttcaataacagaccagcagctgaccactgagtggcagtgtcaggtgcagaaaatcacccgatcccactctaccgacatcccctacattgtgtctgaagctgccgtgcaagcggaacataaggagcagtttgccgatatgcaggacgaacaccatgtagcggaagcaatacctcgcatcccccgtctctctctgaccattactgatagaaatggaatggagaaccttctgtctgttaagcccgaccagactttgggattcccatctctgcgatcgaagtcactgcacggacacccccgtaatgtgaaatccattcagggaaaacttgatcgctccggccatgcgtcctccgtgagctcacttgtcattgtgtcaggaatgaccgccgaggagaaaaaagttaaaaaagagaaagcctcgacggagacagaatgttag

SEQ ID NO: 17796 - DNA, 4812 bp, synthetic construct
  misc_feature 1..4812: note = Description of Artificial Sequence: Synthetic coding sequence
  source 1..4812: mol_type = other DNA
atgaaggacagcaatagatgctgctgcggacagttcaccaatcagcacattcctcccctcccatctgctacacccagtaagaacgaggaggagagtaagcaagtggaaacccagccggagaagtggagcgttgccaaacacacacagagctaccccactgacagctacggagttctagagttccagggtggtgggtactcaaacaaggctatgtacattcgtgtgtcttatgacaccaagccagatagcctgctgcatctcatggtcaaagactggcagctagaattgccgaaactgctgatcagcgtgcacgggggtctacaaaactttgaaatgcaacctaagcttaaacaggtatttggcaagggactgatcaaggctgccatgacaacgggagcttggatcttcaccggtggtgtgtccacaggagtgatctcgcatgttggcgatgccttgaaagatcattcctcgaaaagccgcggaagagtgtgcgccattgggatcgccccatggggcattgtggagaataaagaggatctggtgggaaaggatgtgacaagagtatatcagacaatgagcaatcccctaagcaagctctccgttctgaataactcccatacacactttatcctggcagataatggaactcttgggaaatacggagcagaagtgaaactgagaagattgctcgagaagcacatcagtctgcaaaagattaataccagactcggtcagggagtcccactggtgggactggtggtggaaggagggcctaatgttgtctcaatcgtgcttgaatacctgcaggaagagccacccatccccgtcgttatttgtgacggcagcgggcgggctagtgacattcttagtttcgcacacaaatactgcgaggaaggggggatcatcaacgagtccctacgcgagcagctcctcgttaccattcaaaagacattcaattacaacaaggcccagtcccaccagctttttgcaatcattatggagtgcatgaagaaaaaggagcttgtgacggtcttcagaatgggctccgagggacagcaggacattgagatggctattcttacagcgcttctgaagggcactaatgtttctgcacctgaccagctttccctggctctcgcctggaatcgggtagacatagcgcgcagccaaatttttgtattcggaccacactggcccccattgggatctctggcaccaccgactgacagtaaggccacagagaaagaaaagaaaccacctatggcgacaacaaaaggcggcagaggaaaagggaaggggaagaagaaaggtaaagttaaggaagaagtggaagaagaaactgacccccgcaaaatcgagctgctgaactgggtgaatgctctggaacaggcaatgcttgatgcgcttgttttagatcgagtcgacttcgtgaagctgttgattgagaacggcgtgaacatgcagcactttttgacaatcccacgcctggaagaactatataacacccggctcggcccacccaacacattgcatctgctggtaagagacgtcaaaaaatcgaacttgcctccagattatcacatttctttgatcgatatcggcctagttttggagtacctgatgggcggcgcttaccggtgtaactacacccgcaagaacttccggacactgtacaataatctgttcggacccaaaaggccaaaggctctgaagctgctgggaatggaggatgatgaacctcctgccaaaggaaagaaaaagaagaagaagaaaaaagaagaggagattgatattgatgtcgacgacccagctgtatcgcgtttccaatatccattccacgaattgatggtctgggccgtgctcatgaaacgtcagaagatggccgtgtttctgtggcagaggggggaggagagtatggccaaagcacttgtggcttgcaaactttataaagctatggcacatgaatcatctgagagcgatcttgttgatgacattagtcaagacctcgacaataattcaaaggactttggtcagctagccctggaacttctggaccagtcttataaacacgatgaacagatcgctatgaaactcttgacctacgagctgaagaattggtccaacagtacctgtctcaagctggccgtcgccgcaaagcatcgggacttcattgcacatacgtgctcccagatgctgctgacagatatgtggatgggccgtctccggatgcgaaagaacccagggctgaaggtaattatggggatccttctgccccctactatcctcttcctcgagttcaggacatacgatgacttcagttatcagacttctaaggaaaacgaggacggcaaggaaaaggaggaagagaacacagatgcaaacgcagatgcaggttcccggaaaggagacgaagaaaatgagcacaaaaaacaacgtagtatccccatcggaacgaagatttgcgagttctataacgctccgatagtcaagttctggttttatactatcagttacctaggttatctgttactttttaactatgtcattctggtgaggatggatggctggccgtcactgcaagagtggatcgtgatctcatatatcgtctccttagctcttgagaagataagagagatactgatgtctgaaccagggaaactatcccagaaaatcaaggtgtggctccaggaatactggaacatcaccgatctcgtagccatctcaactttcatgattggtgcgattctgagactgcagaatcaaccctacatgggctatggcagggtgatctactgtgtggatatcatcttttggtacataagggtcctggatatcttcggagttaataagtatctgggaccatacgtgatgatgatagggaagatgatgatagatatgttatacttcgtggtgattatgctggtagtgcttatgtctttcggggtggcccgccaggccatccttcatccggaggagaaaccaagctggaaactcgctaggaacattttttacatgccctactggatgatctatggcgaagtattcgctgatcagattgacttatatgcaatggagattaacccaccctgcggagaaaacctgtacgatgaagaagggaagcggctgcctccttgcattcccggagcctggctcacgcccgcgctcatggcctgctaccttttggtggcaaacatccttctcgtgaatctcttaattgccgtgtttaataatacgttttttgaagtgaaatccatttccaatcaggtttggaagttccagcgctaccaactgattatgactttccacgatcgtcccgttttgccccctccaatgattatcttatcccacatctacataattatcatgagactttcagggcgctgcagaaagaagagagagggagatcaggaggagcgcgaccggggactgaagttattcttgtccgatgaagaactcaaacggctgcatgagtttgaagagcaatgcgttcaagagcatttccgggagaaagaggacgagcagcagagtagcagcgacgaaaggattcgtgtaacgagcgagagagttgaaaacatgtcaatgcgcctggaagaaattaatgagcgggaaacgttcatgaagactagtctccagactgtcgacctgcgccttgcgcagctggaggagctgagcaatagaatggtgaatgctttggagaatctcgctggcattgatcgctctgatctgatccaggcccgctcccgtgcttccagtgaatgtgaggctacctacttgttaagacagtcttccattaattctgcagacggatattccttgtacaggtaccatttcaatggagaagagctgctgttcgaggacacctctctgagcactagccccgggactggggtacggaagaagacatgcagttttaggataaaagaggaaaaggacgtcaagacccatcttgtccctgagtgccagaacagccttcatctctctcttggtacaagcactagcgccaccccggacggcagccacctcgccgttgatgatctaaagaacgctgaggaatctaaattagggccagacattggcatctctaaagaggacgatgagcgccagacagactctaagaaggaggaaactatatcaccaagtctcaacaaaacagacgtgattcatggtcaggataagtccgacgtgcagaacacacagctgacggtggaaactacgaatattgagggaacaatttcttatcctctggaggagaccaaaatcacccggtactttccagacgaaaccatcaacgcctgtaaaaccatgaaaagcaggtcttttgtgtactccagaggcagaaagctggtcggaggggtgaatcaggacgtcgagtattcttctattacagaccaacagcttaccacagagtggcagtgtcaggtgcagaagattacccggtcccacagtaccgacattccttacattgtgagtgaggccgctgtccaggctgaacacaaggagcagtttgcagacatgcaagatgagcatcacgtcgccgaagccatcccaaggattccccgcttgagccttacaatcactgaccgcaacggaatggagaacttgcttagcgtaaagcctgatcagaccctcggttttcctagcttgaggtcaaagtcactgcatggacatccaaggaacgtgaaaagcatccagggaaagctggaccggtcagggcacgcttcctccgtgtcttctctcgtaatagtctcgggcatgacagcagaggaaaagaaggtgaagaaggagaaggcaagcacagagactgagtgttag

SEQ ID NO: 17797 - DNA, 4929 bp, synthetic construct
  misc_feature 1..4929: note = Description of Artificial Sequence: Synthetic coding sequence
  source 1..4929: mol_type = other DNA
atgagcagcttcaagcggggctcattgaagagctcaaccagcggttcccagaaaggccagaagtcttggattgagaaaaccttttgcaagagggaatgtatctttgtgatccccagtatgaaggactctaataggtgctgctgcggacagtttaccaaccagcacatccccccactgcccagcgcaaccccttcgaagaatgaagaagagtccaagcaggtcgagacccagcctgagaaatggtcggtcgctaaacacactcaaagctatcctacagattcttacggagttttagagtttcaaggcggcggctattccaacaaggctatgtatattcgcgtgtcttatgatacaaagccagatagcctgctccatttgatggtgaaggattggcagttagagctgcctaagctgctgattagtgtccatggaggtctgcagaattttgaaatgcagcctaaactgaagcaagtgtttgggaaggggctgattaaggctgcaatgactacgggagcctggatattcacggggggggtctccactggtgtgataagccacgttggagatgcattgaaggaccatagtagcaaatcacggggccgggtgtgtgctattggcatagcaccctggggcattgtggagaacaaggaagacctcgtgggcaaggacgtgactagggtctatcagaccatgtctaatccgcttagtaaactgtctgtattgaacaattctcacacccatttcatcctcgccgacaatgggaccctgggcaagtatggcgccgaagtcaaattgaggcggctgctcgaaaagcatattagcctgcagaaaatcaatactcggctgggccagggtgtgcctttagtgggtctggtggtggagggcggtcctaatgtcgtgtcaattgtgctggagtacttgcaggaggaaccgccaattccagtcgtcatttgtgacggctctggtcgggcctccgacatcctgtccttcgcacacaaatactgcgaggaaggtggcatcattaacgagagcctgagggagcaattactggtgacaattcaaaagactttcaactacaacaaggcacagtctcaccaactcttcgccattatcatggagtgtatgaaaaagaaagagctcgtaacagtgtttcggatgggctccgaagggcagcaagacatagagatggccatcctcactgccttgcttaaaggcactaatgtttccgctcctgaccagttgagcctggcactcgcttggaatagggtagatatcgccaggtcacagatctttgtgttcgggcctcactggccccccttgggctctctcgctcccccaaccgactccaaggcaacagaaaaggagaagaaaccaccaatggcgacaacaaagggtggtcggggcaaaggtaagggcaagaagaaaggaaaggtgaaagaagaagtcgaagaagagacggatccacgtaagattgaactgctcaactgggtgaatgccctggagcaggccatgttggatgcactggtcctggacagagtggattttgttaagctgctcattgagaacggcgtcaacatgcagcacttcctgacgatcccgagactggaggaactgtacaatacgagactgggcccaccgaacaccttgcacctgctcgtgagagacgtgaaaaaaagcaacctgccgcccgattaccatatttctctcatcgacataggtctggttttggagtatcttatgggcggggcctataggtgtaactacactaggaagaattttaggacgctatacaataatttattcggaccaaaacgtcccaaggccctgaagctgctcggaatggaggacgatgaaccacctgccaagggcaagaaaaaaaagaagaagaagaaggaagaggagattgacatcgacgtggatgatccagccgtatcccgatttcagtacccttttcatgaactaatggtgtgggctgtgcttatgaagagacaaaaaatggccgttttcttgtggcagaggggagaggaaagtatggcaaaggcgttagtagcttgcaaactatataaagccatggctcacgaatctagcgagtcggacctcgtggacgatattagtcaggacctggacaataactccaaagatttcgggcaactcgccctagaactgttggaccagagctataaacatgatgagcagatcgctatgaagctgcttacttatgaattaaagaactggagcaactccacctgtctgaagttagcagtggctgccaaacacagagacttcattgcccatacatgttcccagatgctgttaaccgatatgtggatggggaggctcaggatgagaaagaatcccggattaaaggtgattatgggcattctgttgccgcccaccattctcttccttgagtttagaacgtacgacgatttttcttaccagacttccaaggagaatgaagatgggaaagagaaagaagaagaaaacaccgatgccaacgccgacgccggttctcgcaaaggtgatgaagaaaatgaacataagaaacagcgctcgattccaatcggcaccaaaatctgtgaattctacaatgcacccatcgtaaagttctggttttataccataagctacttgggatatctgctgttattcaactatgtcatcttggttaggatggatggatggccttctctccaggagtggatagttatttcctacattgttagcctggccctagagaagattcgcgaaattttgatgtccgagcccggtaaactgtctcaaaaaatcaaggtttggctccaggaatattggaatatcactgatctggttgccataagcaccttcatgatcggggccattctgcggctgcaaaaccagccttacatggggtacgggcgcgtcatctattgcgtcgatattattttttggtacatccgggtgctcgacatatttggggtgaataagtatctcgggccttatgtgatgatgattggaaagatgatgattgacatgctctactttgtagttatcatgctggtcgtgttgatgagcttcggggtcgcacggcaggctattctgcatccggaagaaaaaccgtcatggaagttagccagaaatatcttttacatgccctactggatgatctacggagaagttttcgccgaccagattgatttatacgctatggagatcaacccaccctgcggggagaatttgtatgacgaggaagggaagcgcctgccgccatgcatccccggggcttggttaaccccagccctgatggcttgttacctgttagtggccaatatcctgctcgtgaacttgctcatcgctgtttttaacaacaccttttttgaagtaaagtcaatctcgaatcaagtgtggaagtttcagcgttatcagttgatcatgacatttcacgatcgcccagtccttcctcccccgatgataatccttagccacatctacattatcatcatgcgcctgtccggccggtgtcggaagaaaagagaaggggaccaagaagagcgggatagggggctgaaactattcctgtctgatgaagagttaaaacgactgcatgagtttgaggagcaatgtgtgcaagaacacttcagggaaaaagaggacgaacagcagtccagctcagatgagaggatccgggttacatccgagcgcgtggaaaatatgtctatgaggctcgaggaaatcaacgagagagagacgttcatgaagacctctctccaaacagtcgacctccgattggcccagctggaagagctgtctaatcgtatggtcaacgccctcgaaaatctggcgggaatcgatcgcagcgacctgatccaggcacgttcacgcgcctcgagcgagtgcgaagccacatatctgttacgccagtcaagcattaattcggcggacggctattcactgtacaggtaccacttcaacggtgaagaactgctgtttgaagacacatccctttccacaagtccaggcactggggtgaggaaaaagacttgcagcttccggatcaaggaggaaaaggatgtaaaaacccacctggtgccagagtgccagaactctctgcacttatcactcgggacatcaacttctgctacccccgacggttcgcacctggcagtggatgatctgaaaaacgccgaggagagcaaactgggacccgacattggaatctccaaggaagatgacgagcggcagactgattcgaagaaggaagaaacgatttcaccaagcctgaacaagacggatgtcatacatggccaggataagtcagacgtccagaatactcaactcacggtcgaaaccaccaatatagagggcaccatctcttaccccctggaggagactaagatcacccggtatttccctgacgagacaatcaatgcttgtaagactatgaaaagtcggtcctttgtgtacagtaggggtcggaaactggtaggcggagtaaaccaggacgtcgaatattcctccatcacagaccaacagcttacaacggagtggcaatgccaggttcaaaaaatcacccgctcacactctacggatattccctatatagttagtgaggctgcggtccaagctgagcacaaggaacagttcgcggacatgcaggatgaacatcatgtcgccgaggccattcctcgtattcccagactgagcctcaccatcaccgacaggaatgggatggagaacttgctgtcagtgaagccagatcagacacttggttttcccagcctccgctccaaaagcctgcatggacatcctcgaaatgtaaagagtatacagggcaagctggaccggagcggccacgcttcttctgtctcctctctcgtgatagtgtctggaatgaccgccgaagaaaagaaggtgaaaaaggagaaggcgagtaccgaaacagaatgttag

SEQ ID NO: 17798 - DNA, 4173 bp, synthetic construct
  misc_feature 1..4173: note = Description of Artificial Sequence: Synthetic coding sequence
  source 1..4173: mol_type = other DNA
atgaaagacagcaataggtgttgttgtggacagtttactaatcagcatattccaccactgcctagtgccacgccatctaaaaacgaagaagagagcaagcaggtagaaacccagcctgagaagtggtcagtcgcaaaacatacacagtcatatcccacagactcttacggggtcctggaatttcagggtggcggttactcaaacaaagctatgtacattcgagtcagttatgacacaaagccggattcactgctgcacctcatggtgaaagattggcagctggaactgccgaagctacttatcagtgtacacgggggactgcagaattttgaaatgcagccaaagctaaagcaggttttcggaaaggggttaatcaaggcagctatgactacaggggcgtggatttttactggcggcgtctctaccggtgttattagccacgttggcgatgctctgaaagatcacagctctaagtctcgtgggagggtgtgtgctatcgggatcgcgccctgggggatcgtcgaaaataaagaggacctggtgggaaaagatgtgacacgggtttatcaaactatgtccaatcctctcagcaagctgagcgtgctcaacaacagccacacacatttcatcctggctgataacgggaccctcggcaaatacggcgcggaagtaaaactgaggcggctcctcgagaagcacatcagtttacaaaagattaatacccggctaggccaaggcgtgcctctcgtcggtctggtggtagagggcgggccaaatgtggtctctattgtgctcgagtatctgcaggaagagccccccataccagtggttatttgcgacggctcggggagagcatccgacatactgtcgttcgcccataagtactgcgaggagggagggatcatcaatgagtcacttcgcgagcagcttcttgtgacaatccagaaaacgttcaactataataaagctcagtcacaccagctgtttgctatcattatggaatgcatgaagaagaaagaactggtgacagtatttcggatggggagtgaggggcagcaggacatcgagatggcgatactgactgccctgcttaaaggcaccaacgtgtctgcaccagatcaactgtcactcgcactagcttggaaccgggtcgatatcgccagaagtcaaatctttgtgtttggaccccactggccgcccctgggatctttggcaccccctacggattccaaggctacagagaaggagaagaagccgccgatggctacaaccaagggcggccgggggaaaggaaaagggaagaaaaagggcaaagtgaaagaggaagtcgaagaggagacagatcccagaaaaatagagttgctgaactgggtcaatgccttagaacaagcaatgttggatgctctcgtgcttgacagagttgacttcgtaaaactgctgattgagaacggtgttaacatgcagcacttcctgacgatcccccgccttgaagaactgtataatacccggctgggacccccaaatacgctgcacctcctcgtgcgggacgtgaagaagagcaaccttccccccgactatcatatcagcctcattgatatcgggctggtactggagtatttaatgggcggcgcctatagatgcaactacactcgcaagaactttaggaccctgtacaataatctcttcgggccaaaacgacccaaagcattgaaactgctggggatggaggacgacgaacctcccgctaagggcaagaaaaaaaaaaagaagaagaaagaggaggaaattgatatcgacgttgatgatcccgccgtgtctcgctttcagtacccattccatgagctcatggtctgggccgtgctcatgaagaggcagaaaatggctgtcttcctttggcaacgtggtgaggagtccatggcgaaggctctggtggcctgtaagctctacaaggccatggcccatgagagcagcgaatccgacctggttgatgacatcagccaggacctggacaacaacagcaaggattttggtcagctggccctggaactactggatcagtcctataaacatgacgagcagatagcaatgaagctgcttacatacgagcttaagaactggtccaactctacgtgtctaaagctagctgttgccgctaagcacagggattttatcgcccacacctgctctcagatgctattgaccgacatgtggatgggccgtctgcgcatgagaaaaaatcctgggttaaaggtgattatgggcatcctcctgccccctaccattttatttctggagtttagaacgtatgacgacttttcatatcagacatccaaagaaaacgaggacggtaaggagaaggaagaagagaacaccgacgccaatgccgatgccggctcccgaaagggagatgaagagaatgaacataagaaacagagatctatcccaattggaactaagatatgcgaattttacaatgcccctattgtgaaattctggttttatacgatatcttaccttggctatcttctcctcttcaattacgtgatcttggttagaatggatgggtggccctctctccaggagtggattgtgatttcatatattgttagtctagcactggagaagataagagagattctgatgtctgaacctggcaagctcagccagaaaattaaagtgtggttgcaggagtattggaacattactgacctagtcgcgatctcgacttttatgattggagccatccttcgcctccagaaccagccgtatatgggttacgggcgcgtgatttattgtgtggatatcatcttctggtatatacgggtgctggacatctttggcgtgaacaaataccttgggccttatgtgatgatgattggaaagatgatgattgacatgctgtattttgtcgtaattatgttagtggttctgatgtcgttcggagtagcccgtcaggctatcttacacccagaagagaaacccagctggaagctggctagaaacattttctatatgccatattggatgatctacggtgaagtgttcgctgaccagatcgatttgtacgccatggaaatcaaccccccatgcggcgaaaatctgtacgatgaggaggggaagaggcttcctccttgtattcccggagcttggctcacccccgcattaatggcttgctacctccttgttgcaaatatccttcttgtcaacctgctcattgctgtcttcaacaacactttctttgaggtcaagtcaataagtaaccaggtttggaaatttcagaggtaccagctcattatgacatttcacgatagacctgtcctgcctcctcctatgataatactgagccacatttacattatcatcatgagactaagtggccgatgtcggaaaaagcgtgagggtgatcaggaggaacgcgaccgcggtctgaaactcttcttatcagacgaggaattgaaacgcctgcacgagtttgaggagcaatgcgtgcaagagcactttcgggagaaagaggacgagcagcagtcatcttcggacgaaagaatccgggtaacgtccgaacgggtcgagaatatgtccatgcgtctggaagagatcaatgagagagagaccttcatgaaaacaagtcttcagaccgtagacctgcgcttagcccagctcgaagaattgtctaaccgtatggttaatgctctcgaaaacctggccggaatcgatcgcagcgacctgatacaagcacgtagccgggcatcctctgagtgtgaagctacctatctgctgaggcagtccagtattaattccgccgatggctactctttataccgctaccacttcaacggagaggagttgctatttgaggacacctccctgtccaccagccctgggaccggggtccggaaaaaaacctgttcctttagaatcaaggaagagaaagatgtgaagacgcacctcgtccctgagtgtcagaatagtttgcatttgagtcttggcacctctacgtcagcaacaccagatgggtcacaccttgcagtcgacgatctgaagaacgctgaggaaagcaagctggggcctgacattggaatatcaaaggaggacgacgaacgtcagaccgatagcaagaaagaggaaacgatctcgcctagtctcaataaaaccgatgtcatccacgggcaatag

SEQ ID NO: 17799 - DNA, 4584 bp, synthetic construct
  misc_feature 1..4584: note = Description of Artificial Sequence: Synthetic coding sequence
  source 1..4584: mol_type = other DNA
atgtatatccgtgtgtcttatgacactaagcccgattctcttctgcacctgatggtgaaggactggcagctcgagctgcctaaattattaatctctgtccacggtgggctacaaaactttgagatgcaacctaaattaaagcaggtttttggaaaaggtctgattaaggcagcaatgacaacaggagcttggatctttactggcggcgtttctactggagttatttctcacgtcggcgacgccctgaaggaccactcttccaagagcagaggtagagtgtgcgctataggcatcgcaccttggggcattgtggagaataaagaagaccttgtggggaaagacgtgacccgagtctatcagactatgagtaatcccctctcaaaactcagcgttttaaacaacagccacacccattttatactcgctgacaatggcaccctgggcaaatacggcgccgaggtcaaattgaggcggctgctggaaaagcacatctctttgcagaagattaacactaggctcgggcagggtgtcccgttggtgggcctcgtcgttgagggcggacctaacgttgtctccattgtgcttgaatatctgcaggaggagcctcctattccagtggtgatctgtgacggctcagggagagcttctgatatcctctcttttgcccataagattatcaacgagtccttacgggagcaactcctcgtcactatccagaaaacttttaattacaacaaggcgcaaagccatcagttgttcgccattattatggaatgtatgaagaagaaggagttagtgaccgtatttcgaatgggctccgagggccagcaggacattgagatggctatccttactgccctgctgaaaggcaccaacgtgagcgcgcctgatcagctatccctcgcactcgcctggaatagagtggatatagcacgctcccagatctttgtgttcggtccccattggcccccactgggaagcttggcaccacccacagattcaaaagccaccgaaaaagagaaaaagccaccaatggcaactacaaaaggtgggcgtggaaaaggaaagggcaaaaaaaaaggcaaagtgaaggaagaggtagaggaagagacagatcctcggaagattgagctactgaattgggtcaacgccctggagcaggccatgctcgacgcgctcgtgctcgatagagtcgattttgtaaaactgcttattgaaaacggagtgaatatgcagcatttcttgaccatccctcggcttgaggaactgtataacacccggctgggtcctcccaacacgctccatctgctggtgagggatgtcaagaaatccaacctcccccctgattatcacatttccctgatcgacatcggactggtactagagtatctgatgggaggagcttatcggtgtaactacactcgcaagaactttcgtaccctctataataatcttttcggccccaagcgacctaaagccctcaaactcctgggcatggaggacgacgagccaccggcgaagggcaaaaagaaaaagaaaaagaagaaggaggaggagattgatatagacgttgacgatcctgccgtctccaggttccagtatcctttccacgagcttatggtgtgggctgttttgatgaagcggcagaaaatggctgtcttcctgtggcaaaggggtgaagagtcaatggccaaagctctggttgcttgcaaactgtacaaagcgatggcgcacgaaagctctgagagcgacctggttgacgatatctcacaggatctggataacaattctaaagacttcggtcagctggcactggaacttctagatcagtcctataaacatgatgagcaaatcgctatgaagctgcttacatacgaactgaagaactggagcaactcaacatgccttaaacttgcggtcgcggcaaagcacagagattttatcgcccatacatgctcccagatgctgctaactgacatgtggatgggccgactgcggatgcgaaagaatcctgggcttaaagtaatcatgggtatactgctgccccctaccattttgttcttagaatttcgaacatacgatgacttctcttaccagacctctaaagaaaatgaggatggtaaggagaaagaagaggaaaatactgacgcaaatgccgacgccggatcacggaaaggggatgaagaaaatgaacataagaagcagcggtcaattccaatcgggactaagatctgcgagttttacaatgccccaattgtcaagttttggttctacaccatcagctacctgggctacttgctcttgtttaattacgtcatacttgtgcggatggacgggtggccgagcctgcaggagtggatcgtgatttcatacatcgtgtctctcgccctggaaaagataagagagatcctgatgagtgagcccggaaaattgagccagaagatcaaagtctggctgcaggaatactggaatatcacagaccttgtggcaataagtaccttcatgatcggtgcaattctccgcctgcagaatcaaccgtacatggggtatggacgggttatctattgtgtcgacattatcttttggtacattagagtactggatatctttggagttaataagtatctgggcccttacgtgatgatgatcggaaagatgatgatcgacatgctgtattttgtggtcataatgcttgtggtcctgatgtccttcggagtggcgcgccaagccatactgcaccctgaggaaaaaccttcgtggaaattggccaggaacatattctatatgccctattggatgatctacggggaggtgtttgctgaccaaatcgacctctatgcaatggaaatcaaccctccttgtggcgaaaacctatacgatgaggagggtaaaagactgcccccctgcattccaggcgcctggctaacacctgccctgatggcctgctaccttttggtcgcaaacattctgcttgtcaacctgctcatcgccgtcttcaataatacgttctttgaggttaagtccattagtaatcaggtgtggaagtttcagcggtaccagctaatcatgacctttcacgacagacctgttctgcccccccctatgattatcctgtcccacatctatattattataatgagactgtccggaaggtgccgcaaaaagcgagaaggggaccaggaagagcgagatcgtggcctaaagctgttcctgtcagacgaagaacttaagaggctgcacgagttcgaggagcaatgcgtccaggaacatttccgcgaaaaagaagatgagcagcagagttcatccgacgagagaatccgcgtgacatcagagagggtcgaaaacatgagtatgcggttagaagaaatcaatgaacgggaaacgttcatgaaaacttcactacagacggtagaccttagactcgcacaactggaagaactgtccaatcgaatggttaatgccctggaaaatcttgctggtatagaccgcagtgacctgatacaggctcgatcccgagcatcttctgaatgtgaagccacctacctcttgaggcagtcatctattaactcagcagatgggtattctttgtacaggtaccactttaacggagaggaattactgttcgaagatacaagcctatcaacctctcccgggactggtgtgagaaagaagacatgttctttccggattaaagaggagaaggacgtcaaaacccacctggtacccgagtgccagaactcactccatctatccctggggacaagcactagtgccacccccgacgggagccacctggccgtggatgacctcaaaaatgctgaggagtctaaactcgggccagacattggaatatccaaggaggacgacgaacgccagacagatagcaagaaggaggagaccatctctcctagtctcaacaaaactgacgtgatccacggccaggataagtctgatgttcaaaatacccagctgactgtggagactacaaacatcgagggtaccatttcctatcctctcgaagagactaaaatcactcgctacttccctgatgaaacaattaatgcctgcaaaacaatgaagtctcgatctttcgtgtactctcgggggaggaaactcgtcgggggcgtgaaccaggacgtggagtactcttccatcaccgaccaacaacttaccaccgagtggcaatgccaggtccagaagattacccgctcccacagtacagatatcccatacattgtctctgaggccgccgtgcaggccgaacacaaagagcagtttgccgacatgcaggatgaacaccatgttgctgaggccatcccccggatccccaggttgtcccttaccattacggacaggaacggcatggaaaatctgctgtcagttaagcccgatcagaccctggggtttccctctcttcggagtaaaagcctgcacggacacccacgcaacgtcaagagcattcaagggaaacttgatcgctctggtcacgccagcagtgtgtcatctctggtgatcgtgagcggaatgaccgccgaagaaaaaaaagtgaagaaggagaaggcttcaacagagacagaatgctag

SEQ ID NO: 17800 - DNA, 1479 bp, synthetic construct
  misc_feature 1..1479: note = Description of Artificial Sequence: Synthetic coding sequence
  source 1..1479: mol_type = other DNA
atggccctgaactccggtagcccaccagccatcggtccctactacgaaaaccatggctaccagccagagaacccttatccggcacagcccaccgtggtgccaactgtgtacgaagtgcatccggcacagtattatcctagtccagtccctcagtacgccccaagggtgctgacccaggcctcaaatcccgtcgtctgcacacaacccaagtctcctagcgggactgtgtgcacatctaaaacaaaaaaagcactctgtatcactctcaccctgggaaccttcttggtgggggccgccttggcggcgggcctgctgtggaagtttatgggatctaagtgttcaaattctggcatcgaatgcgactcatccggaacatgtattaacccttccaattggtgtgacggggtgtcacactgtcctggaggtgaggatgagaaccgatgtgtaagattgtatggacctaactttatcctgcaagtgtactctagtcaaaggaaaagctggcatcctgtatgtcaggacgattggaacgaaaactacggcagagccgcttgtagggatatggggtataagaataatttttactctagccagggcatcgtggatgattctggcagcacatcatttatgaagttaaatacctcggccggcaacgtcgacatctacaagaaactgtatcacagcgacgcctgcagcagcaaggccgtggtgagtctgcggtgtatcgcttgcggggtcaatcttaactcgtctaggcaatcccgcatcgtggggggagaatcagcgctgccaggagcttggccttggcaggtcagcctccacgtccagaacgttcacgtgtgtggaggaagtatcatcactcccgaatggatcgtgaccgccgcccattgcgtagagaaacccctcaataatccttggcattggactgctttcgcaggcatcctccggcaaagttttatgttttatggcgctggataccaggtggaaaaagtaattagccatcctaactacgactcaaaaacaaagaataacgacatcgccctcatgaaattacagaaacctctcacctttaatgatctcgtgaagcctgtatgtctgcctaacccagggatgatgctgcagcccgaacagttatgttggatctctggctggggagccacagaggagaaagggaaaacctcggaagttctgaacgccgcgaaggtccttttgatcgagacccagcgctgcaattcgaggtacgtgtacgataatctcattacacccgccatgatatgtgctggcttcctccaaggaaacgtggatagctgccagggggactcagggggccctctagtcacttcaaagaataacatttggtggctcatcggagatacaagctgggggtcaggatgcgcgaaggcctacaggcccggcgtgtatggtaacgtaatggtcttcactgactggatctatagacaaatgcgcgcagacggctag

SEQ ID NO: 17801 - DNA, 1590 bp, synthetic construct
  misc_feature 1..1590: note = Description of Artificial Sequence: Synthetic coding sequence
  source 1..1590: mol_type = other DNA
atgcccccggcccccccagggggcgagagtggctgcgaggagaggggggccgctgggcatatcgagcactccaggtacctgtcactgctggacgccgtcgacaacagtaagatggcactgaattcaggctctccacccgccattggaccatattatgagaatcacggctaccagccagagaatccctatccagctcagcctacagtcgttcctaccgtctacgaggtacatcccgcacagtactaccccagccccgtcccgcagtatgcgcctcgggttctgacgcaagcatccaacccggtggtctgtactcaacccaaatctcccagcggcactgtatgcacgagcaagacaaagaaagccctttgtatcacactgaccctgggtaccttcctggtgggggcagcacttgccgcgggactgctgtggaagtttatgggcagcaagtgctcaaatagtgggatagagtgcgattcttctggaacatgtatcaatccgagcaattggtgcgacggggtttctcactgccctggtggagaggacgaaaaccgatgtgtgaggctgtacggaccaaattttatattgcaggtttatagttctcagcggaagtcctggcatccggtgtgccaggacgactggaatgaaaattatggaagagcagcctgtcgtgatatgggatataaaaataatttttattctagccagggaatcgtggacgattctggctcaacgtcctttatgaaactaaatacctcagctggcaacgtggacatatacaagaaactgtatcatagtgatgcttgtagctctaaagcagtggtgtccctcaggtgtatagcgtgtggagttaacctgaattcttctaggcaatctagaatcgtcggtggggaatcggcgttgcctggcgcttggccttggcaggtctctctgcatgtacagaatgtgcatgtgtgtggaggctccatcataacccctgagtggattgttactgcagcccattgcgtggagaaacccctgaataacccgtggcattggactgcttttgcggggattctgcggcagagctttatgttttacggtgccggttaccaagttgaaaaagtgatatctcaccccaattacgactcgaagacaaagaacaatgatatcgcactgatgaaacttcaaaaacccctcaccttcaacgaccttgtaaaacccgtatgcctcccgaatcctgggatgatgctccagcctgagcagctctgctggatttccgggtggggtgcaaccgaagaaaagggcaaaacatctgaggtcctgaacgctgccaaggtgctgctgattgagacacagagatgcaactctagatatgtctacgataatttaatcacacccgctatgatttgtgcaggttttctgcagggaaacgtggattcctgccagggagattcgggcggccctttggttacctctaaaaacaacatctggtggctcattggcgacaccagctggggatccggctgcgctaaagcctatcgccccggtgtgtacggaaatgtgatggtatttacagattggatttacagacagatgcgggctgatggatag

SEQ ID NO: 17802 - DNA, 1470 bp, synthetic construct
  misc_feature 1..1470: note = Description of Artificial Sequence: Synthetic coding sequence
  source 1..1470: mol_type = other DNA
atggcccttaattctgggagcccccccgctatcggaccctactacgagaatcacggctaccaacccgaaaacccctaccccgcccaaccaacagttgtgccaacagtgtatgaggtgcaccctgcacagtattacccaagccccgtgcctcaatacgcgccgagggtcctgactcaggcttccaatcccgtcgtgtgcacccaaccaaagagcccatctggaacagtgtgcacctccaagaccaaaaaagccttatgcatcacactcaccctcggcacgtttctggttggggccgcattggccgccggcctgctctggaagtttatgggttctaagtgtagcaatagtggaattgaatgcgattcttccggcacatgtattaatccgtctaattggtgcgacggtgtgtctcattgccccgggggggaggatgagaatagatgcgtcaggctgtatggccccaactttattctgcaggtgtacagtagtcagagaaagagctggcacccagtgtgtcaggacgattggaatgagaactacggcagggccgcatgccgggatatgggatataaaaacaatttttattcttcccagggcatcgttgacgatagtggatcaacaagttttatgaaactgaatacttccgccggcaacgttgacatctataagaaattatatcattcagacgcttgttccagtaaagctgtggtgtcattgagatgtatcgcatgtggagttaatctaaactcaagccggcagtctagaatcgtggggggcgaatcagcgctgcccggagcctggccctggcaggtgtccctgcacgtgcagaacgtgcacgtgtgcgggggcagcatcatcacacccgagtggattgtgacggctgcccattgtgttgaaaaaccgcttaacaatccctggcactggactgcctttgccggtatcctgagacagtcttttatgttctacggggccggttaccaggtggagaaggtgattagtcatcccaactacgactccaaaacaaaaaataatgatatcgctctgatgaagctacagaaacctctgaccttcaacgatctggtgaaacctgtttgtctgccgaacccaggcatgatgctgcaaccagaacagctctgctggattagtggctggggcgctactgaggaaaaaggcaagacgagcgaagtactcaatgctgccaaggtgcttctgattgagactcagcgatgcaactctagatatgtgtatgacaatctcatcacgcctgcgatgatttgtgctggtttcctgcaaggaaatgtggatagctgccagggggacagcgggggccctctcgtgaccagtaagaacaacatctggtggctgatcggggatactagttggggctcagggtgtgcaaaagcctacaggccaggagtctacggaaacgtgatggtgtttaccgattggatctataggcagatgagatag

SEQ ID NO: 17803 - DNA, 240 bp, synthetic construct
  misc_feature 1..240: note = Description of Artificial Sequence: Synthetic coding sequence
  source 1..240: mol_type = other DNA
atggccctcaattctggctctcctcccgcgattggcccttactatgagaaccacgggtaccagcccgagaatccttatcccgcccagcccaccgtggtcccgacagtgtacgaggtccaccccgcacaatactatccctctccagtgccacaatacgcacccagagtccttacacaagccagcaaccccgtagtgtgtacccagcctaagtctccgtccgggaccgtctgtactagctag

SEQ ID NO: 17804 - DNA, 1479 bp, synthetic construct
  misc_feature 1..1479: note = Description of Artificial Sequence: Synthetic coding sequence
  source 1..1479: mol_type = other DNA
atggctttaaacagtggtagcccccctgccatcggcccatattacgagaaccacggttatcagcccgagaacccctaccccgctcagccaactgtagtgcccactgtgtatgaggtccaccccgcccagtattacccctctcctgttccgcagtatgccccgcgggtcctgacccaggcttctaatcctgtagtctgcacgcagccgaagtctccctccggcactgtatgtacctccaagacgaaaaaggcattgtgcataaccctcaccctcggcacctttctggtgggcgccgctctggctgccgggctgctgtggaaatttatgggatcaaagtgttcaaattctggcatcgagtgcgacagtagcggtacttgtataaaccccagcaactggtgcgatggcgttagccattgccccggcggcgaggatgagaatcgatgcgttcgtttgtacgggcctaatttcattttgcaggtctatagctcccaacggaagagctggcaccccgtgtgccaggatgattggaacgagaactacgggagggccgcgtgtcgcgatatgggatacaagaacaatttttattcctcccaaggcatcgttgatgattctggttctacctcctttatgaaactcaataccagtgctggcaatgtggacatctacaagaagctgtatcattctgatgcgtgtagctctaaagcagtggtctcgctcagatgtattgcttgcggcgtaaatttaaatagttctcgtcagagccggatcgtaggtggagagagcgcgctgccgggcgcatggccatggcaggtcagtctgcacgtgcagaacgtacacgtgtgcggcggcagcataattaccccagagtggatagtgactgccgctcactgtgttgaaaaaccactgaataacccctggcactggacggcctttgccggaatcctgagacagagcttcatgttttatggcgccggttaccaggtggagaaggtgatcagccatcccaattatgatagcaaaaccaagaacaatgatatcgccttgatgaagctccaaaagcccctgacattcaacgatcttgtgaaacctgtgtgcctccccaaccctggcatgatgctgcagccagaacaattgtgctggatttcaggttggggtgccactgaagagaagggtaaaacgtctgaagttctgaacgcagcgaaagtgctgcttatcgaaacccagagatgtaacagcaggtatgtttatgacaacctgatcacaccagctatgatatgcgccggattcctgcagggaaatgttgattcctgtcaaggagatagcggtggcccattagtgaccagcaaaaacaatatctggtggcttatcggcgacacgtcatggggcagcggttgcgctaaagcataccgccctggcgtctatggcaacgttatggtgttcactgattggatctatagacagatgcgtgccgacgggtag

SEQ ID NO: 17805 - DNA, 717 bp, synthetic construct
  misc_feature 1..717: note = Description of Artificial Sequence: Synthetic coding sequence
  source 1..717: mol_type = other DNA
atgtacgcccctggaggcgcagggttgcccggagggagacgccggcgatcacccggcggatccgccctgccaaagcagcccgaaaggtccctggcctcagcactacctggcgctctgtcaatcaccgcactgtgtacagctttggcggaaccggcctggctgcatatccatgggggtacttgctcgagacaggagttgggtgtgagcgacgtgctgggttatgtgcatcctgacctgctgaaagacttctgcatgaacccgcaaaccgtcctgctcctgcgagtgatcgcagccttctgtttcctgggaattttgtgcagcctgtccgcattcctgctggatgtcttcggtcccaaacacccagccctcaagattacccgtaggtacgccttcgcacacatcttaactgtcctgcagtgcgcaaccgttattggcttctcttattgggcaagcgaacttatcttagctcaacagcaacaacataagaaataccatgggtctcaggtctatgttacgtttgccgtgtcattctatctggtggctggcgctgggggagcctctatattggccactgctgcgaatctgttaagacactacccaacagaagaagaagagcaggcgctggagcttttgagtgagatggaggaaaacgaaccttatccggccgagtacgaggtgatcaaccaatttcagccaccgccagcttatacaccatag

SEQ ID NO: 17806 - DNA, 717 bp, synthetic construct
  misc_feature 1..717: note = Description of Artificial Sequence: Synthetic coding sequence
  source 1..717: mol_type = other DNA
atgtatgcccctggaggtgccggtctgccaggcggtcgacggcgacgaagtcctgggggctcggcactccccaagcaaccggagaggtccctggccagcgccctcccgggggcactcagtatcacagcactgtgtaccgcactagcggaaccagcctggctacatatccatggcggtacatgttctaggcaggaactgggagttagtgatgttctgggctacgtccatccagacttgctgaaagacttctgcatgaaccctcaaaccgtactccttctgcgggtaatcgctgccttttgctttcttggcatactgtgtagcctgagtgcctttctgttggacgtttttggacctaagcatccggcactcaagatcacacgtcgttatgcctttgctcacattttgactgtcctgcagtgcgcaacagtcataggcttttcatattgggcttctgagctgatcctcgctcagcagcagcaacataaaaagtatcacggaagccaagtgtatgtcacatttgctgtgtccttctatcttgtggccggggctggtggagcctctatcctcgcaactgccgccaatctgctgcggcattaccccaccgaggaggaagaacaagccctcgagttactgagcgaaatggaggagaatgaaccctatccagcagaatatgaggtcattaaccagttccagccgccacccgcctacaccccttag

SEQ ID NO: 17807 - DNA, 3075 bp, synthetic construct
  misc_feature 1..3075: note = Description of Artificial Sequence: Synthetic coding sequence
  source 1..3075: mol_type = other DNA
atgtgtgccaggatggcgggcaggacaacagccgcaccccggggaccttatggcccgtggctttgccttctggtcgccttggcacttgacgttgtcagggtagactgcggccaggcaccgttagatccggtgtatttgccggctgctctggaattattagatgcacctgagcattttcgcgtccaacaggttggccattacccacccgctaacagctccctttccagtcggtctgaaacttttctccttttgcaaccttggcctcgtgcgcagcctctacttcgagccagttacccaccttttgcgacccaacaagttgtgcctcccagggtcaccgaaccccaccaacgccccgtaccttgggacgttcgtgcagtgtccgttgaagctgccgtgacccctgccgagccctatgcccgggttctgttccacttgaagggacaagactggccccctggcagcgggtcactcccatgcgcgaggctccatgccacacacccagcaggaactgcacaccaggcctgccgcttccagccatcgctcggagcctgtgtcgtggagctggagcttccctctcattggttctctcaggctagcacgactcgggccgagctggcatacacgttggaacccgctgccgagggaccggggggctgcgggtccggcgaagagaacgacccgggcgagcaggcactgcctgtgggaggagttgagttacgccccgccgacccgccccagtaccaggaggtgccactggatgaggctgtgactctcagagtcccagatatgccagtacgccctggccagcttttctcagccaccctcttgttgaggcataatttcactgcctcacttctcactctgaggataaaagttaagaaaggtttgcacgttacggcagccaggccagcccagccaaccttgtggactgctaagcttgatcggttcaaggggtcccgccaccataccactctgatcacctgccaccgcgctggactgaccgagccagactcctctagcccgcttgaactgagcgagtttctgtgggtagattttgttgttgaaaatagcaccgggggtggagtggctgtgactcggcctgtgacctggcagctggaataccccggccaagccccagaggcggagaaggacaagatggtgtgggaaatcctcgtcagcgaacgagatatcagagcactcatacccctggctaaggcagaagaactggtcaataccgcccctcttacaggcgttccacagcacgtgcctgtgcgcttggtcaccgttgacggtggtggcgccctagtcgaggtgactgagcacgtgggctgtgagtccgcgaatacacaggttttgcaggtcagtgaagcatgcgatgcagtctttgtagcaggcaaggagagcaggggtgcccgaggggtccgagttgacttttggtggcgcagactcagggcaagcctgaggctgaccgtttgggcccctcttttaccactacgtatcgagctgaccgatacaacactagagcaagtcagaggttggagggtccctggccccgcagagggaccggcagaaccggccgctgaagcgtccgacgaagcggagcggcgcgctaggggttgtcacttgcaatatcagagagctggagtccgtttcctcgccccattcgccgctcacccactggatggcggtcgccggctcacacacctgctgggacccgattggttgctggatgtgtcccatcttgtcgcccctcacgccagagtcctcgacagtagagtcgcaagcttggagggaggccgggttgtcgtgggtagggagcccggcgttacctccatcgaggtgcgctctcccctgagtgactctattctaggtgagcaggccctggccgtgacggacgacaaggtcagtgtgttagaactccgggtacagccagtcatgggcattagcttaacactgagtcgcggaacagctcacccaggagaggtgacggccacttgctgggcacaaagcgctttacctgcacctaagcaggaggtggctctcagcctgtggctgtcctttagtgaccacacggtagccccggcggaactgtacgaccggcgagacttgggcctttcggtgtccgctgaagagcccggggctatcctccctgcggaggaacagggggcgcaattgggcgtggttgtctcaggtgcgggtgccgaagggctgcccctacacgtggctctccatcctcctgaaccttgccgcaggggtcggcacagagtgcctctcgccagcgggaccgcttggttgggtctgcccccggcaagcaccccagcccccgctctcccatcaagcccggcttggagtcctccagccactgaggccaccatgggcggcaaacgacaggttgcaggttcagtgggtgggaacacaggggtgcgtggcaagttcgagagggcagaggaagaagccagaaaagaagagactgaagccagggaagaggaggaagaggaagaggaggagatggttcctgcgcctcagcacgtcaccgaactggagcttggcatgtatgccctgttgggagtgttctgcgtcgcaatattcatctttttagtaaatggcgttgtatttgtcttgagataccagcgcaaggagcctcccgattccgcaacggaccctacctctccccagccacacaattgggtgtggttgggtaccgaccaagaagaactcagtcggcagcttgatcgacagagtccggggccccccaaaggggagggaagttgtccttgtgaatcggggggcgggggggaggcaccgactctagctccaggccctccaggcggaactacgagctcctcctccaccctagcccggaaggaggccggagggagacgtaagagagtggagtttgtcactttcgcgcctgcgccgcctgcccaatcaccagaagagccagttggagcccctgcggttcagtcgatcctggtggctggtgaagaggatatccgctgggtgtgtgaagacatggggttaaaggaccctgaggaactgcgcaattacatggagcgaatccgcgggtcgagttag

SEQ ID NO: 17808 - DNA, 3072 bp, synthetic construct
  misc_feature 1..3072: note = Description of Artificial Sequence: Synthetic coding sequence
  source 1..3072: mol_type = other DNA
atgtgcgccaggatggccggtagaacaaccgccgcaccacgggggccctacgggccatggctgtgtctgctggttgccctggccctggacgtggtgcgtgtggactgcggccaggctccgctggaccctgtctacctgcctgccgcgcttgagcttttggatgcgccggagcactttcgtgtgcaacaggtgggacattatcctcctgctaactccagtctgagcagcaggtctgagacatttcttctgctgcaaccctggcccagggcccagcccttgctacgggcgagctacccaccattcgctactcagcaggtggtgcccccccgcgtgactgagccacatcaaaggcccgtgccatgggacgtgcgagctgtgtctgtcgaagcggcagtaaccccggccgagccttacgctagggtgctctttcatttgaagggacaggattggccccccggttcagggagccttccttgcgctcggttacatgcaacacaccctgccggaacagcacatcaggcatgtcgctttcagccatccctaggcgcctgcgttgtggagctggaactccccagccactggttctctcaagcctccacaactagggcagagctcgcttacactctcgaaccggctgccgaaggccctggcggttgcggatcaggtgaggaaaacgaccccggtgagcaagctttgcccgtcgggggcgtcgaactgcgtccagccgacccaccccagtatcaggaagtgccattggacgaggctgtcactttacgggtgcctgatatgcctgtgcgccctggccagttattctccgccacattgctcttacgtcataacttcacagctagtctcctgacattgaggatcaaagtaaagaaaggtctgcatgtcacagcggctagaccggctcaaccaaccttgtggaccgctaaactggatagatttaaggggtccagacaccataccacactgattacgtgccaccgcgccggcctgaccgagccggatagttctccactggagctgagtgaattcctgtgggtggatttcgttgtcgagaactctactggcggtggggtcgctgtaacgcgcccggtgacctggcaattagaataccccggtcaggctccagaggctgaaaaggacaagatggtctgggaaatccttgtctccgagcgtgacatcagggcactcattcccttagctaaggccgaggaactcgtaaacacagcgcccctcacaggggtccctcagcacgtacctgtgcgccttgttaccgtcgatggaggcggagctctcgtggaagtcactgagcatgtggggtgtgaaagcgcgaacacccaagttctccaggtatccgaagcctgtgatgcagtgtttgtcgccggaaaagagtctagaggcgcccgaggcgttagggtggacttctggtggcgtaggctccgtgcttccttgcgccttacagtgtgggcaccactgcttccgctacgcattgagctaacagacaccacactggaacaggtgcgcgggtggagagtgcctggcccggccgaggggccggcagaacccgccgccgaggcgtccgatgaggccgaacgccgagccaggggatgtcacctgcaatatcagagagcgggcgtgagattccttgctccatttgctgcccatcctctggacggaggtaggcgtttgacccatctccttgggccagactggctgctggacgtctcccacctggttgcaccacatgcgcgggttctcgacagccgcgtcgcgtctttagagggcggccgtgtcgtggttggtcgtgagccaggcgttacctctattgaagtgagatcccccctgagtgactccatcctcggcgagcaggccttggctgtgactgacgataaggtgagcgttttggagcttagggtccaacccgtcatgggcatctcattgactttgagcagaggcacagcccaccccggcgaagtgaccgcaacatgctgggctcagagcgccttgccagccccgaagcaagaggtagcgctgagtctgtggctcagtttctccgatcacaccgtggcgccagccgaattgtacgatagacgggatttgggactcagcgtctccgcagaggaacccggggcaatcctgcccgcggaagaacagggtgcccaactgggcgtggtggtatccggggccggtgcggaaggtcttcctctccacgtcgcgttgcaccctcctgagccctgtcggcgaggccgtcatcgggtccccttggcatccggtacggcctggctgggtcttccacctgcttctacgccggctccagcactgccctcgagccccgcttggagcccacccgcgaccgaggcaacaatgggcggcaagagacaggtcgccggaagtgttggcggaaatactggcgtgcgcggtaagtttgaacgcgctgaggaagaggcccgtaaagaggagacagaggcccgagaagaagaagaagaggaggaagaggagatggttcccgcaccacagcatgtcactgagctagaactgggaatgtatgcattgttgggggtcttttgtgtggccattttcattttcctggtgaacggtgttgtgtttgtcttaagataccaaaggaaggagccacctgacagcgcgacggatccaacgtctccacaaccacataactgggtatggctgggcaccgatcaggaggagctgtcaagacagcttgatcgtcagtcccccggcccaccaaaaggtgaagggagctgcccttgcgaaagtggggggggaggggaggcaccgactctcgcccccggaccacccggcggaactacctcatcatcctctaccctggctcggaaagaggcaggagggcgcaggaagcgcgtcgagtttgttacttttgctcctgctccccccgcccagagccctgaggaaccagttggagctcccgcagtgcagtccattttagtcgccggagaggaggacatcagatgggtttgtgaagatatggggctgaaggatcctgaggagttgcgtaattatatggaaaggatccgggggtctagctag

SEQ ID NO: 17809 - DNA, 1026 bp, synthetic construct
  misc_feature 1..1026: note = Description of Artificial Sequence: Synthetic coding sequence
  source 1..1026: mol_type = other DNA
atgctgccggaacagctctacttccttcagtctcctcccgaggaggagcccgagtatcacccagacgcatctgcccaggaattgaatgtgcgagagtctgatgtgcgggtctgcgatgaatcgtcatgtaagtacggcggtgtctgtaaggaggatggagacggcctgaagtgcgcatgtcagttccagtgccatactaactacattccggtatgtggtagtaacggcgatacataccagaatgagtgctttttgaggcgcgccgcttgtaagcatcagaaagagattaccgttattgccagagggccctgttattcagataacggatccggtagcggtgagggtgaagaagaagggtctggtgcagaggttcaccgcaaacactctaagtgcggcccctgtaagtataaggccgaatgcgacgaggacgcggagaacgttggttgtgtgtgcaacatcgactgctccgggtattccttcaatccagtgtgtgcgtccgacggcagcagctataacaacccatgcttcgtgcgtgaagcatcctgtatcaagcaagagcagatcgacatccgtcacctgggacattgcactgataccgatgatacatctctgttgggtaaaaaagatgacgggctgcagtatcgacctgatgtgaaggacgcgagcgatcagagggaggacgtgtacatcggcaatcatatgccttgcccagagaacctgaacggttactgcatccatgggaaatgcgagtttatctattccacccagaaggcgtcatgtagatgcgaaagtggatacacaggacagcattgtgaaaagaccgacttctcaattctgtatgtcgtgccttcccgccagaagctgactcacgtgctgattgcggccattatcggcgcagttcagatcgcaataattgtggcaattgttatgtgcatcacccgtaagtgtcccaagaacaaccgaggcagacgccagaaacagaacttaggacactttacctccgataccagctctaggatggtttag

SEQ ID NO: 17810 - DNA, 1143 bp, synthetic construct
  misc_feature 1..1143: note = Description of Artificial Sequence: Synthetic coding sequence
  source 1..1143: mol_type = other DNA
atgggggctgccgcggctgaggcacccctgcgccttcctgccgctccgcccctggcattttgctgctacaccagcgtccttcttttgttcgcattctcattaccgggatctagagcctctaatcaaccccctggagggggaggagggtccggtggcgattgcccaggcggtaaaggaaagagtatcaactgttcagaactgaatgtaagagagtctgacgtgcgtgtgtgtgacgaatcaagttgtaagtatggcggcgtgtgcaaggaggacggcgacggcctgaaatgcgcgtgtcagtttcagtgtcataccaattatattcctgtgtgcggatctaacggagacacttatcagaacgagtgcttcttgagaagggctgcttgcaaacatcagaaagagattacagttatcgcgcggggcccttgctactcagataacgggagtggcagtggcgagggggaagaggagggaagcggcgctgaggtgcaccgcaaacacagcaagtgtggaccatgcaaatacaaagctgaatgcgatgaggatgcagaaaatgttggatgcgtctgcaacattgactgtagcgggtattcattcaatcccgtctgcgcaagcgacggctcatcatacaataatccatgttttgtgagagaagcatcctgtataaaacaggaacagatagacattaggcacttgggccattgtacagatactgatgatacttccctgctggggaagaaggacgacgggctgcaataccgtcccgacgtgaaggacgctagcgatcaacgggaggatgtgtatatcggcaatcacatgccttgccccgagaacttaaatggatactgtatccacggaaaatgcgaatttatatactcaacccagaaggctagctgccggtgcgagagtgggtacaccggccaacattgtgaaaaaacagactttagcatcctgtacgtcgtgccatcacggcaaaagctgacgcatgtgctaatagccgccattatcggcgctgtgcagatagcaattattgtagccatagtcatgtgtatcactagaaagtgccccaagaacaacaggggccgacgacagaagcagaacctggggcactttacctcagatacttcttctagaatggtgtag

SEQ ID NO: 17811 - DNA, 393 bp, synthetic construct
  misc_feature 1..393: note = Description of Artificial Sequence: Synthetic coding sequence
  source 1..393: mol_type = other DNA
atgcaagaacggacgggcgcggctacagcccggagggagtctctgcctcaggccaacaacccggaacagctgtgtaagcagcggtgtattaacgaggccagctggactatgaaaagggtcctctcttgtgtgccagagccaacggttgtcatggcagctagggctctgtgcatgttgggactggtgctggccttgctatcctctagctcggcggaggagtacgtgggactttcggcaaaccagtgcgcagtgcctgctaaagacagggtggactgcggctacccacatgttacaccgaaggagtgtaacaatcgcgggtgttgttttgatagtcgaattccaggagtgccctggtgttttaaacccctgcaggaagctgagtgcacattctag

SEQ ID NO: 17812 - DNA, 285 bp, synthetic construct
  misc_feature 1..285: note = Description of Artificial Sequence: Synthetic coding sequence
  source 1..285: mol_type = other DNA
atgaagcgtgtgctctcctgcgtccccgagccaacggtggtaatggcggccagagcactgtgcatgctcggtctcgtgctcgctctcttgtcaagttcctctgctgaagagtacgttggtctctcagccaaccagtgtgctgttccagcaaaagaccgggtggactgcggttatccccacgtgaccccaaaagagtgtaacaaccggggttgttgtttcgattcccgtatcccaggggtgccttggtgtttcaagccactccaggaggccgagtgcactttttag

SEQ ID NO: 17813 - DNA, 1497 bp, synthetic construct
  misc_feature 1..1497: note = Description of Artificial Sequence: Synthetic coding sequence
  source 1..1497: mol_type = other DNA
atggcactgccaaccctccccagttattggtgctcccagcagcgcctgaatcaacagctggcccggcagcgggagcaggaggcaaggttaaggcagcagtgggaacagaatagtcgttatttcaggatgtctgatatctgctcctcaaaacaggccgagtggtcatcaaagacatcctaccagcgttcaatgcacgcctaccagcgcgaaaagatgaaggaagagaagcgcaggtccctggaggcacgtagggaaaagctcaggcaattaatgcaggaggaacaggatctgctggccagggagttggaggagctccgccttagcatgaacttgcaagagcgaagaatccgcgagcagcacggcaagcttaagagcgcaaaagaagagcagaggaaactgattgcggagcagttactgtacgagcactggaagaaaaataaccccaagctgcgagagatggagctagacttacatcagaagcacgttgttaattcctgggaaatgcagaaagaggagaagaagcagcaggaagcaactgcagagcaggagaacaagcggtatgaaaatgagtacgagcgcgctcgaagggaagcactcgaaagaatgaaagccgaagaggagagacggcagctggaggacaaacttcaggccgaggccctgctccagcagatggaagaactgaagctgaaagaagtggaagcgaccaaactaaaaaaagaacaggagaatctgttaaagcagcggtgggagttggagcgccttgaggaagaaaggaaacagatggaagcttttcggcagaaagccgagctggggcgctttctgcgacaccagtataatgcccagttgtcacggaggacccagcagattcaggaggagctagaggccgataggcgcatcttacaagctctgttagagaaagaggacgaatcccagaggttgcacttagcaaggagagaacaggtcatggccgacgtggcatggatgaagcaggccatcgaagagcagctacaactggaaagggctcgagaagccgagcttcagatgttgctgcgtgaggaggctaaagagatgtgggagaagagggaagcggaatgggcgcgcgagcgcagtgctcgcgaccgcctgatgtctgaagtactcacaggcagacagcaacagatccaagagaaaatcgagcagaacagacgcgcccaggaggagtctctgaagcatcgggagcaactcattaggaatttggaagaagtcagagaactagcgagacgcgaaaaggaagaatctgaaaaattaaaaagcgccagaaagcaagagctcgaagcccaagtggctgagcgaaggttacaggcgtgggaggctgatcagcaggaggaagaggaagaagaagaggcacggcgcgtggaacagctgtccgacgccctgttacagcaagaggcggagaccatggctgaacaaggatatagaccaaaaccctacggccatccaaaaattgcctggaattag

SEQ ID NO: 17814 - DNA, 1497 bp, synthetic construct
  misc_feature 1..1497: note = Description of Artificial Sequence: Synthetic coding sequence
  source 1..1497: mol_type = other DNA
atggcactgcccactctgccttcctactggtgctcccagcagcgactcaaccagcagctcgctagacaacgggaacaggaggcacgcctgcggcagcagtgggagcagaactcacgctattttagaatgtcggatatatgttcatccaaacaagccgagtggtcctctaagacttcctaccagcgctctatgcacgcatatcaaagagagaaaatgaaggaagaaaaaaggcgttctcttgaagccagaagagagaaactccgccagctcatgcaggaggaacaggacctgttggctagggagctggaggaactcaggctgagtatgaatctccaggaaaggagaatccgcgagcaacacggcaaattgaaatccgctaaagaggaacaaaggaaactgattgccgaacaactgctgtacgagcactggaaaaagaacaaccctaagctgcgggaaatggaactggatctgcatcagaagcacgtggtgaatagttgggagatgcaaaaggaggagaaaaagcagcaggaagcaacagccgagcaggagaacaagcgctacgagaacgagtacgaacgggcaagaagggaagctttagaacggatgaaggcggaagaggagcggcgacagcttgaggataaactgcaagcggaggcgttgctgcagcaaatggaggagctcaaattaaaggaagtggaagctactaagctcaaaaaagaacaagagaatctccttaaacagaggtgggagttggaacggctggaagaggagcgcaagcaaatggaagccttccggcagaaggcagagctgggcaggttcctcagacaccagtacaacgctcagctgtccagacggacacagcaaatccaggaggaactggaagctgatagacgcatcctacaggccctgctggaaaaagaggatgagtctcagaggctgcacctggctcgcagggagcaggtcatggccgacgtggcatggatgaagcaagccattgaagaacaactccagcttgaacgggcccgtgaggcggaactccagatgcttctgagggaagaggccaaagagatgtgggaaaagcgggaggctgagtgggccagagaaagatccgctcgagaccgactcatgagcgaggtcctgacaggacgacagcagcagattcaggagaagatcgaacagaacaggcgtgcacaggaagagagtctaaaacatcgcgagcaactgattagaaacctggaagaagttcgggagttggccagacgcgagaaagaagagtccgaaaaattgaagtctgccagaaagcaggagctggaggcacaggtggctgaacggcgtctgcaggcctgggaggctgaccagcaagaagaggaagaggaagaagaagcacgtagagtagagcagctgtccgatgcactcctgcagcaggaggccgaaacaatggccgagcagggctataggcctaaaccatacgggcacccaaaaatagcttggaattag

SEQ ID NO: 17815 - DNA, 525 bp, synthetic construct
  misc_feature 1..525: note = Description of Artificial Sequence: Synthetic coding sequence
  source 1..525: mol_type = other DNA
atggcactgcctacactgccctcctattggtgttctcaacagcggttgaaccagcaacttgctaggcagcgtgaacaggaggcacgactgaggcaacaatgggaacagaattcccggtattttaggatgtctgacatatgcagctcaaagcaagcagaatggtcatccaaaaccagctatcagcgcagcatgcacgcataccagcgggaaaagatgaaggaggagaagcggcgatccctcgaggcgagaagagagaagttgagacagttgatgcaagaggagcaggacctccttgctcgtgagttggaggaactgcggctttcaatgaacctccaggagagaaggatacgagagcagcatggaaagctgaaaagcgccaaagaagagcagagaaagctgatcgcagagcagctgctctatgaacactggaaaaaaaacaatcccaaactccgcgaaatggagctggacctccaccaaaaacatgtcgtgaattcgtgggagatgcaaaaagaggagaaaaaatag

SEQ ID NO: 17816 - DNA, 663 bp, synthetic construct
  misc_feature 1..663: note = Description of Artificial Sequence: Synthetic coding sequence
  source 1..663: mol_type = other DNA
atggcactcccaacgcttcctagctattggtgttcccaacaacgccttaatcagcagctcgcacggcagcgagaacaggaagcccggctcagacaacagtgggaacagaactcgaggtactttagaatgagtgatatctgcagttccaagcaggcagaatggagctccaaaacgtcataccaacgatcaatgcacgcttatcagcgcgagaagatgaaagaggagaaaaggaggtcgctcgaagcccgcagagaaaagcttcgacaactgatgcaggaggaacaggatttacttgcaagagaactggaggagctcaggctatctatgaatctccaggagagaaggatacgggagcagcacggaaagctgaagagcgccaaggaagaacagcggaaattgatcgcggagcagctcctgtatgagcactggaaaaaaaataacccgaagttacgcgaaatggaactggatctgcaccaaaagcacgtggtgaattcatgggagatgcagaaggaagaaaaaaagcagcaagaggctacagcagagcaggagaacaagaggtacgagaacgagtacgagcgcgcccgccgcgaagctctggaacgcatgaaggccgaggaggagagaagactgtcacggaccgatggccacaagagaaatccatag

SEQ ID NO: 17817 - DNA, 1497 bp, synthetic construct
  misc_feature 1..1497: note = Description of Artificial Sequence: Synthetic coding sequence
  source 1..1497: mol_type = other DNA
atggcactcccaacattaccttcctattggtgcagccaacaacgattaaaccaacaactggccagacagagggaacaggaagctagattgcggcagcaatgggagcagaacagcagatacttccgtatgtcagacatctgctccagcaagcaggcagaatggagttcaaaaacctcataccagcgcagcatgcacgcctatcaaagggaaaagatgaaagaagaaaaacggagaagcctggaagctaggcgagaaaaactaaggcaactgatgcaagaggagcaggacctattagctcgggagttggaagagctgcgtctgagtatgaacctgcaggaaagacgcatcagagaacaacacggaaagctcaagtctgcaaaggaagagcagcggaagctcatagccgaacaattattatatgaacattggaagaaaaacaaccccaaactcagagagatggaactggatctccaccagaaacatgtagtgaactcttgggagatgcagaaagaggagaaaaagcagcaggaggctaccgctgaacaggagaataaaagatatgaaaacgagtacgagagggccaggcgagaagcattagaacgcatgaaggccgaggaagagcgaagacagttggaagacaagttgcaggccgaggcactgttgcagcagatggaagagcttaagctgaaagaagtggaagccacaaagctcaagaaggagcaggagaatctattgaagcagaggtgggaactcgagcgtcttgaagaggagcgtaaacagatggaagcctttcggcagaaggctgagctggggagattccttcgccatcaatacaatgctcagctatcacggcggactcagcaaattcaagaagaattggaggcagaccgtcgcatcctgcaagctttgttggaaaaagaggacgaaagccaaaggctgcacctcgctagaagagagcaggtgatggccgatgtggcctggatgaagcaagccatagaagagcagttacaactagagcgggcaagggaagctgagttgcagatgttactccgtgaagaagccaaggagatgtgggagaagcgcgaagctgagtgggcacgggagcggagcgcccgcgataggttgatgagcgaggtgctgactggacggcaacagcaaattcaggagaaaatcgagcaaaaccgccgtgcccaggaagaaagtctcaagcaccgggaacagctgattaggaatctggaagaggtgcgggaactcgcacgacgcgagaaagaagaatccgagaagctcaaatctgccagaaagcaggaactcgaagctcaggttgcggagagacggcttcaggcttgggaagcggaccagcaggaagaagaggaggaagaggaagccaggcgcgttgagcagctgtcagacgcactacttcaacaggaagcagaaacaatggcggaacaaggatacagacctaagccatacggacacccaaagatcgcatggaattag

SEQ ID NO: 17818 - DNA, 3090 bp, synthetic construct
  misc_feature 1..3090: note = Description of Artificial Sequence: Synthetic coding sequence
  source 1..3090: mol_type = other DNA
atgcagactaatgaaggagaggtcagtgaggagagctcttccaaggtggaacaggaggacttcgtcatggaagggcacggcaagaccccgcctcccggcgaggagagtaagcaggagaaggaacaggagagagaagagcagctgatggaggataagaaacggaaaaaagaagataaaaagaaaaaagaggctactcagaaagttacggagcagaaaactaaagttcccgaggtcactaagccaagtcttagtcaacctaccgccgcaagccccatcggttcctccccctctccccccgtgaatggcgggaacaacgccaagagggtagctgttcctaatggtcagcctccttccgcggcccgatacatgcccagagaggtacccccccgctttcgctgccagcaggaccacaaagtgctgctgaagcggggtcagcctccacctccatcctgcatgctgcttggggggggcgctggacctccaccttgtaccgcccccggcgctaaccctaataacgcacaagtcactggagcgctgctgcagagtgagtctggtacggctcccgtctggtccaaatctaccccccccgcaccagacaacgggacttccgcctggggagagccgaacgaatcaagtcccggctggggggaaatggacgacacaggagcctctactaccggctggggtaataccccggccaatgcgcccaacgcaatgaaacccaattccaaatccatgcaggatgggtggggggagtccgacggaccagtcacaggcgccagacatccaagttgggaagaggaagaagacgggggagtgtggaacactacgggttctcaaggaagcgcctcatcacataactcagctagctgggggcagggcgggaagaagcagatgaagtgttccctcaaaggcggtaacaacgattcctggatgaacccgctggctaagcagttttctaatatgggcctgctcagccagaccgaggacaatccatccagcaagatggatctcagcgtgggctcattgtcagacaagaagtttgacgtcgataagagggcaatgaacctgggagattttaacgatataatgcgaaaggatcggtccgggtttcgcccccctaactccaaggatatgggcactacggacagcggtccgtatttcgagaaaggcgggagtcatggcctgttcggtaatagcacagcccagtctcgaggcctgcatacacccgtccaacctctcaattcgtctccctccctgcgggcccaggtgccgccgcagtttatctcaccccaagtcagcgccagtatgctgaagcaattccctaattctggattgtctcccggtttgtttaatgtggggccgcagctttctccgcagcagattgctatgctgtcccaactgccccaaatccctcagtttcagctggcatgccagctgttgttacagcagcagcagcagcaacagctgctgcaaaaccagaggaaaatctcccaggctgtgagacaacagcaagaacagcaactcgcaagaatggtctccgctctgcagcagcaacagcaacagcagcaaagacagccaggaatgaaacactcaccttcacatccagtgggtcctaaacctcacctggataacatggtccctaatgcactgaacgtgggactgcctgatctacagaccaaggggccaattcccggatatgggtctggattctcctcaggtggcatggattatggcatggtcggtggaaaagaggccggcaccgagtcccgctttaagcagtggacttcaatgatggaaggcctcccttctgtggcaactcaagaggctaacatgcataagaacggggctattgtggctcctggaaaaacgagggggggttcaccgtataaccagtttgatattatccctggagacactcttgggggacacactggcccagctggtgattcttggctgccagccaaaagcccccccaccaataaaatcggctcaaagtcatcaaacgcctcctggccccctgagttccagcctggagttccttggaagggcatccagaatattgaccccgaaagcgacccatacgtgacccctggctcagtgctcggcggcactgccacgtcccctattgtcgacaccgatcaccagctactgagagacaacactaccggctctaactcatccctgaatacgtccctgccatctccaggagcctggccttattcggcaagcgacaacagctttaccaacgttcactctacgtctgctaaatttcccgattacaagtctacctggtcgccggatccaatcggccataatcccactcacctttcaaataagatgtggaagaatcatataagcagtcgcaacactacacctttgccccgccctccaccaggattgactaatcccaagccctctagcccttggtctagcactgctcccaggagcgtgcgcggttggggcacccaagattcccgattggcctccgctagtacgtggtccgacggcggaagcgtcagaccctcgtactggttggtattgcacaatttgacaccacagatcgacggctccacactgcgtaccatctgtatgcagcacggccctctgctgacattccacttgaatttgacacagggaacggccctcatccgatattcaactaagcaggaagcagctaaagcacaaacagccttgcatatgtgcgtattaggaaacaccacaattcttgctgaatttgccaccgatgatgaggtctcccgttttctggcacaagcccagccgccgacacccgccgctacaccatccgcccctgccgccggatggcagtcactcgagaccggacagaaccaatctgaccctgtagggccagccctaaatttatttggcggatctaccggcctgggccagtggagctcctccgctgggggcagcagtggagcggatctggcaggggcctccctgtgggggcctcccaattattcttcctccctgtggggcgtccccactgtcgaagacccacacaggatgggatcgcctgctcccctcttaccaggagatttgctgggtggaggcagcgattctatatag

SEQ ID NO: 17819 - DNA, 5172 bp, synthetic construct
  misc_feature 1..5172: note = Description of Artificial Sequence: Synthetic coding sequence
  source 1..5172: mol_type = other DNA
atgcgagagaaagagcaggaaagggaagagcagttaatggaggacaagaaaagaaaaaaagaggacaagaaaaaaaaagaggcaacacagaaggtgacagagcaaaagacaaaggtgcccgaggtcaccaagccaagcttgtcccagcccaccgctgcttctccaattggcagctctccatccccacctgttaatgggggcaataacgccaaaagggtcgccgtcccaaacggtcagcctcctagtgctgctcggtatatgccccgcgaggtacctccgcggtttcggtgtcagcaagaccacaaagtgctgttaaagcgcggacagccgccacctccgtcatgtatgctgttgggtggcggagccggaccccctccctgtacagcccccggagctaatcctaacaacgcccaagtaaccggagcattacttcaatctgaatcaggcactgcaccagactctacgcttggtggcgctgccgcttcgaattatgccaattctacatgggggagcggcgcctccagcaataatgggacctcaccaaatcctattcatatatgggataaagtgattgtcgatgggagcgacatggaagaatggccatgcattgcatctaaagatacagaatcctcatccgaaaacaccacggacaacaattccgctagtaacccaggatcagagaagagtacgctgccgggttcaacgacctccaacaagggcaagggatcgcaatgccaaagtgcctcttctggaaacgagtgcaacttgggcgtatggaaatcagatcctaaagccaaaagtgtccaatctagtaactccaccaccgagaataacaatggcttgggcaactggaggaacgtcagtggccaggacaggattggtccaggctcagggttcagcaattttaatccaaattcaaatcctagtgcttggcccgcattggtgcaggaaggaacttcccgcaagggagccctagagaccgataacagcaactcttccgcgcaggtaagcactgtgggccagacctctcgggagcaacagagcaaaatggagaacgcgggcgtcaacttcgtggtaagcggacgggaacaagcccagatccataataccgatggcccaaagaatgggaacaccaactcccttaacctgagctcccctaatcccatggagaacaaaggcatgccattcggcatgggcttagggaacacatcgaggtcgacggatgcaccaagccaatctactggagaccgcaagactggaagcgtggggtcttggggagcggctcgaggaccgagcgggacagacacagtttctggccagtccaacagcggcaataatggcaacaacggaaaagagagggaggactcatggaagggagcatccgtgcagaaatcaacgggctctaagaacgattcctgggataacaacaatcgctctactggaggctcgtggaactttggccctcaggacagcaacgacaataagtggggcgaaggcaataagatgacttccggggtttcccagggcgagtggaagcagccaactggaagcgacgagctgaaaatcggcgagtggtccggaccgaatcagccaaattcctccacaggggcctgggataatcagaaaggccaccctttgcccgaaaaccaaggcaatgctcaggccccgtgctggggaagaagcagctcatctaccggctccgaagtgggcggccagtcaaccggcagcaaccacaaggcagggtctagcgacagccataactcgggccggagatcttatagaccgacccatcccgattgccaggccgttctgcagaccctcctttcacgaacagacctggacccccgggttctgtcaaatactggctggggccagacccaaatcaagcaggatactgtttgggatatagaagaagttccacgtccagagggcaagtctgataagggtacagaaggctgggaaagtgccgcaactcaaaccaaaaattctgggggctggggtgatgccccgtcccagtcgaatcagatgaaatcgggctggggcgaattatccgcttcgacagaatggaaagacccaaagaatactggaggttggaatgattacaagaataacaatagctccaactggggaggcggccggcctgatgaaaagaccccatccagctggaacgaaaatccatctaaagatcaagggtggggcggcggcagacagcccaaccagggctggagtagtggaaaaaacggctggggagaagaggtggaccagaccaaaaatagtaactgggagtcctcggcctccaagcctgtgtcaggctggggagaggggggccagaacgagatcggaacatggggaaacggtggcaatgcatccctcgccagcaaaggcggctgggaggactgcaaacggagccctgcttggaacgagaccggtaggcagcctaattcctggaacaagcagcatcagcagcaacagccccctcagcaacctccaccaccgcagccggaggcttcaggatcctggggcgggccacctccaccgccccccggtaacgtacggcctagtaatagctcctggtcctctggcccccagcctgccacccctaaggacgaagagccgtctggttgggaagagccttccccgcaatctattagccgaaagatggatattgatgacggaacatccgcctggggtgatccaaattcttataattataaaaatgttaatctctgggacaagaatagccaagggggaccagccccgcgagagccaaatctgcccacacccatgacatccaagtctgccagcgattccaagtccatgcaggatggttggggcgagagcgacgggccagtgaccggagcgcgacatcctagctgggaggaagaagaggatggcggtgtatggaataccaccggctcccaaggcagtgccagttcccataacagcgcaagctggggccagggcggcaagaagcagatgaaatgtagcctgaagggcggcaacaatgattcttggatgaaccctctggctaaacagttctccaatatgggccttttaagccaaactgaggataacccttcgtctaaaatggacctgagtgtgggatctctttccgataaaaaatttgatgtcgataagcgagctatgaacctaggcgatttcaatgatattatgcggaaggacaggagcggctttaggcctccaaattcaaaggacatgggcaccaccgatagtggaccttatttcgagaagggcggttcacacggactctttggcaacagtaccgcgcagtcacggggacttcacactccggtgcaaccactgaattcgtccccaagcctccgtgctcaggtacccccacaatttataagcccccaggtgtcagcctctatgctcaagcagtttccaaattctggtctcagtcctggactttttaacgtgggcccacagttgtcaccccaacaaattgcaatgctgtcccagctcccccagatccctcagttccagctcgcctgccagctgttgctgcagcagcagcaacagcagcagcttctgcaaaatcagcgcaagatttcccaggccgtcagacagcagcaggagcagcagctggctcgtatggtctccgctctacaacagcaacagcagcagcaacaacgacagccaggtatgaaacacagcccatctcatccggttggccctaaacctcacctggataacatggtgccgaacgcgctcaatgttgggctgcctgatttgcagacaaagggtcctattccaggctatggctcaggtttctcctctggaggaatggactacggcatggtgggcgggaaagaggccgggaccgagtctcgatttaaacagtggaccagcatgatggagggcctgcccagcgtggccacgcaggaggccaacatgcacaagaatggggctatagtggccccgggcaaaactaggggaggatctccttataaccaatttgatatcatccctggggatactcttggcgggcacacggggccagctggcgacagttggttgcccgctaaatccccgcctacaaacaaaattggatccaaaagttctaatgcttcctggccacctgagttccagcctggcgtgccgtggaaaggaatccagaatatagaccctgaaagcgacccctatgtgactccaggtagcgtactcggaggcaccgctacatccccaattgtagacacagatcatcaactccttcgggacaatacgactggctcaaatagttctctgaatactagcctcccgtcacccggggcttggccgtactccgcctccgataattcattcacaaatgtgcacagtacatccgctaagtttccagactataagagcacctggtcgccggacccaattggacacaaccccacccatctgagcaataagatgtggaaaaatcacatctctagccggaataccacccccctgccacgcccgcctcccgggttgacaaatcccaaaccatcgagcccttggagtagcaccgccccccgttcagtgagaggttggggaactcaggattcacgcctggcaagcgcctcaacttggagtgacggggggtccgtgcgccctagctactggcttgtgttgcataatctaacaccccagatcgatgggtctactctgcgcacaatctgcatgcagcacgggcctctgttaactttccatctgaacctgacacaggggactgccctgatcaggtattcaaccaaacaggaggcagccaaagcacagaccgcccttcatatgtgtgtcctgggaaacacgactattctggctgaatttgccactgatgatgaggtaagtagatttttggcacaggcgcagccgcccacccctgccgcaacgccttctgccccagccgcgggctggcagtccctggagacgggccagaatcagagcgacccggtcggccctgccctgaatctattcggcggatccaccggcctgggccagtggtcctcctcagcgggtggctcctctggcgctgatttggcaggcgctagcctgtggggccctcccaattattctagctcgctttggggagtgccaactgtcgaggacccccaccgtatgggcagcccagctccgttgctgccgggagatctgctcgggggcggttccgactctatatag

SEQ ID NO: 17820 - DNA, 5172 bp, synthetic construct
  misc_feature 1..5172: note = Description of Artificial Sequence: Synthetic coding sequence
  source 1..5172: mol_type = other DNA
atgagggagaaagagcaggaaagagaggaacaactgatggaggataaaaaaagaaaaaaagaagacaagaagaaaaaagaggccactcagaagcattcaaatcaaaagactgctatgcctgaggtgaccaagcccagcctgagtcagcctactgccgctagtcccatcggctcttcaccgtccccgccggtcaatggaggaaacaacgctaagcgggttgccgtgcctaacggccaaccccccagcgctgcacggtacatgccaagggaggtgcccccccgctttcgatgccagcaggaccacaaggtgctgttgaaacggggtcagccaccccctccatcctgtatgcttctcggaggaggggccggcccacccccctgcactgcccccggcgctaaccctaacaatgcccaagtcacgggcgccttactccagtctgaaagcggcactgcaccagattctacactggggggtgccgccgcgagcaactacgccaattccacctggggctctggagcctcatctaataacggcactagccctaaccccatccatatctgggacaaggtcatcgtggatgggagcgatatggaggagtggccctgtattgcaagtaaggacaccgagtcaagcagtgaaaacactacggataacaattctgcctccaatcccggttcagagaagtctacactgccgggatctactactagtaataaaggaaaaggctcccagtgtcagtctgcaagctctggcaacgaatgtaatctgggagtgtggaagtctgaccctaaagctaaatccgtacaatctagcaactccacaaccgaaaacaacaacggtctgggcaactggcggaacgtgtccgggcaggaccggatagggcccgggtcaggcttctcaaatttcaacccgaatagcaatccctctgcatggccagcactcgtgcaggagggcacgtcccgtaagggcgccctagaaacagataactctaattcctcagctcaggtgtctacagttgggcagacgtctcgcgagcagcagtctaagatggagaacgcgggagtgaactttgtggtgtcagggagagaacaggcccagattcacaataccgacggaccgaaaaacggcaacaccaactccctcaatctctctagtccgaatccaatggagaataaagggatgcctttcggaatgggccttggaaacacctctagatcgacggatgcgcctagtcaaagcacaggggatcgtaaaacaggttctgtgggaagctggggtgcggctagaggaccctccggaactgacactgtgtcaggacaaagcaattccggcaacaacggcaacaacggcaaagagagggaagattcttggaaaggcgcttcagttcagaagtccacgggctctaaaaatgacagctgggataacaacaaccgatctacgggtggctcttggaactttggaccacaagactctaacgataataaatggggcgaaggaaacaagatgacctctggggtgagtcaaggcgagtggaaacagcctacaggatccgacgagctaaaaataggagagtggtcggggcctaatcagccgaattccagcaccggtgcctgggataaccagaaagggcacccactaccagaaaaccagggtaatgctcaggctccatgctggggccgctccagtagctccacagggtcagaggtgggcgggcagtctacaggcagtaatcacaaagctggttcttcagattcccataactccggacgcagaagctaccgaccaactcaccctgactgccaggcagttcttcagacactcttgagccgtaccgatctggatccacgtgtgctcagcaacaccggttggggacagacacaaattaagcaagataccgtgtgggacatcgaagaagttcctaggccggagggcaaatctgataagggtaccgagggctgggaaagtgctgccacacagacaaaaaacagcggcggctggggagacgcaccatcccagtctaaccagatgaaatcaggctggggcgagctgtctgcctccaccgaatggaaggatcccaagaacactggtgggtggaatgattacaagaacaataactcatcgaattgggggggggggcggcctgatgagaaaacccccagcagttggaacgaaaatccctctaaggatcaaggctggggcggcggaagacagcctaaccaagggtggagttccgggaagaacgggtggggtgaagaggttgaccaaacaaagaattctaactgggaaagttcagcatcaaagcccgtttccggatggggggagggagggcagaatgaaattggaacgtggggaaatggcgggaacgctagtctggcctcaaagggcgggtgggaggactgcaaacggtcacccgcctggaacgagactggacggcagcccaatagttggaataaacaacatcagcaacagcagcctccccagcagcctccacctcctcagcccgaagcctccggaagctggggcggcccaccacctcccccacctggcaatgtaaggccatccaattcaagctggtcctctggacctcagcctgctactccaaaggatgaggaaccttctggctgggaagaaccatcccctcaaagcatctcaagaaaaatggacatcgacgacggaaccagcgcgtggggcgaccccaattcgtacaactacaaaaatgtcaacctctgggataaaaattcccagggcggtccagcccccagggaaccgaaccttcctacgccaatgacgtccaagagtgccagcgattcaaaatccatgcaggatggctggggggagagtgatggacctgtaaccggggctaggcacccatcgtgggaagaggaagaggatgggggggtttggaatacaaccggttcccaggggtctgcctctagccataatagcgccagttggggacagggaggaaagaagcaaatgaaatgttccttgaaagggggaaataatgactcctggatgaatccgctcgcaaagcagttcagcaacatggggttgctgtctcaaaccgaggacaaccccagttccaaaatggacctttctgttggatccctgagcgacaagaaattcgatgttgacaaaagggccatgaacctgggagattttaacgacatcatgcggaaggacagatctggatttagaccaccgaacagtaaagatatgggcactacagactcggggccttattttgagaaagggggctctcatgggttattcggcaactccaccgcacagtccagaggtctgcacacccctgtgcaacccttaaacagctcacctagtctgcgggctcaggtgccgcctcaattcatcagcccccaggtatcggccagtatgctgaaacagttccccaactctggtctaagcccaggcctgtttaacgtgggaccgcaattgagccctcagcaaattgccatgctcagtcagctcccccagattccccaattccagctagcttgtcagcttctcctgcagcagcagcagcagcagcagcttctccagaaccagaggaagatcagccaggccgtaagacagcaacaggagcagcagctggctcggatggtgtctgcactgcaacagcagcagcagcagcagcagcggcaaccggggatgaagcactcccctagtcaccccgtggggccgaaaccccacctggataacatggttccaaacgcactcaacgtgggtttacctgatctgcagactaagggcccaatccccgggtatggcagtggcttctcctcaggggggatggattacggtatggtcggcggcaaggaggcagggactgaaagtcgttttaaacaatggacttcaatgatggagggactgccttccgttgccacacaggaggctaatatgcacaagaacggggctattgtggcccctggaaaaacacgtggcgggtcgccttataatcagttcgacatcattccaggcgatacacttgggggccacacgggccccgcaggagactcttggctcccggccaaatctcccccaaccaacaaaataggttccaagagtagcaatgctagttggcctcccgagtttcagccaggagtcccgtggaaaggaatccagaacattgaccccgaatccgatccatacgtgacgcccggaagtgtcctgggagggactgccacttcacccattgttgacactgatcaccagcttctgcgggataacacaactgggagtaactcatcactaaatacttctctgccaagtcccggcgcgtggccgtactccgcctctgacaacagttttaccaacgtacacagcacttcagccaagttcccagactacaaatctacatggtcgcccgatccgatcgggcacaacccgactcatctgagcaataagatgtggaagaaccacatctcgtccagaaacactacccctcttcctcggccaccacccggactgaccaaccccaaaccatcgagcccatggtcttccaccgccccacgctctgtgaggggatggggcactcaggattctcgtctagcctccgcctctacttggagcgacggcggctcggtacgaccttcctactggctggtgcttcacaatctcactccacagatcgatggatctacactgcgcactatctgcatgcagcatggcccacttctgacctttcacttgaatctgacccaggggactgcactgatccgttactccacaaagcaggaagctgcaaaagcgcagaccgccctgcatatgtgtgtcctgggcaatacaacaattctggcagaattcgcgacagacgacgaagtctcaaggttcctggcccaggcccagcccccaacaccggctgcaaccccctccgcaccagcagccgggtggcagtctttggagacagggcagaaccagagcgaccccgtggggcctgccttgaatctgttcggcggttccactggcctgggtcagtggagcagctcagccggaggttcctccggggctgacctagcaggtgcttccctttgggggccaccgaactactcgtctagcctctggggagtgccaactgtggaagatcctcaccgaatgggcagtccggcccctttactgcccggggacctgttaggcggcggaagcgatagtatttag

SEQ ID NO: 17821 - DNA, 3090 bp, synthetic construct
  misc_feature 1..3090: note = Description of Artificial Sequence: Synthetic coding sequence
  source 1..3090: mol_type = other DNA
atgcagaccaatgagggcgaggtatctgaagagtctagtagcaaagtggaacaggaggacttcgtgatggaggggcacggaaagacaccccccccaggcgaggagagcaaacaggagaaggaacaggagagagaggagcagttgatggaggacaagaaacggaaaaaggaggataagaagaagaaagaagccactcaaaaggtcaccgaacagaagacgaaggtgcctgaagtgacgaagccatctctgtcgcagccaactgcagcaagcccgatcggttctagtcctagcccgccagtcaatggggggaacaacgcgaagagggtggctgttcctaatgggcagccaccaagtgctgcccgttacatgcccagagaagtgccgcctcggtttagatgtcagcaggaccataaggtccttctgaagcgcggccagcctcctcctcccagttgcatgttactcggtggtggagcaggtccccccccctgcacggcgccgggtgcaaacccaaacaacgctcaggtgacaggcgctcttttgcagagcgaatcaggaacagcaccggtctggagcaaaagcaccccacctgcccctgacaacggtacctccgcttggggcgagcccaacgagtcttccccgggatggggggagatggacgacactggcgccagcactacagggtggggcaataccccagccaatgcacccaacgccatgaaacccaacagcaaaagcatgcaggatggctggggagaatctgacggtccagttacgggggcccggcatccttcttgggaggaagaggaagatggtggagtctggaatactaccgggtctcagggttctgcatcatctcataacagtgccagctgggggcagggtggaaaaaagcagatgaagtgctctttaaaaggcgggaacaacgactcatggatgaacccgctcgccaagcagttctctaacatgggcctgctttcccaaaccgaggataatccatcctcaaagatggatctctcagtcgggagcctctcggataaaaaattcgacgtggacaagcgagcaatgaaccttggcgattttaatgacatcatgcgtaaagataggtcaggctttaggccacctaactcaaaggatatgggaactactgactccggtccgtactttgagaagggaggatcgcacgggctgttcggcaatagcacagcccaatctaggggtctccacactcccgtgcaaccgctcaatagtagccccagcctgagggctcaagtgccaccgcaatttatcagtcctcaggtaagcgcatccatgctgaagcagtttcctaattcgggtctgtcaccaggattgtttaatgtgggcccccagctctcacctcagcagatcgcgatgctgtcccagctccctcagatcccacaattccagttggcctgccaactgttgctgcagcagcagcagcagcagcagctgttgcagaaccaaaggaagataagccaggctgtgcgccagcagcaggaacaacagctggcgcgtatggtgtctgcactgcagcagcagcagcagcagcagcagcgccagcccgggatgaagcatagccccagccaccctgtgggacccaaacctcacctcgacaatatggttccaaacgcactaaacgtgggcctcccagatttgcaaaccaagggacccattccagggtatggctcaggcttctccagcggcggtatggattacggcatggtaggtgggaaagaggctggaactgagagtaggtttaagcagtggactagcatgatggaaggactgccaagcgtcgctacccaggaggcaaatatgcacaaaaatggtgctatcgttgccccgggcaaaacacgggggggtagcccctacaaccagttcgatataatacccggtgatacacttgggggtcacacaggcccagcaggagattcctggctcccggcgaagtcccctcctaccaataagataggttccaaaagttctaatgctagctggccaccagagttccagcctggagtcccatggaagggtattcagaacatagaccctgagtccgatccatacgtgacacctgggtcagtgctgggtggaacggccacttcccctatagtcgacacggaccaccagctcctgcgggataacaccaccggctccaattcgtcactgaacaccagccttccctccccaggagcctggccctacagcgcaagtgataactcttttacgaacgtgcatagcacatccgcaaagttccctgactacaagtccacatggagccctgatcctatcggtcataatccgacccatctgtctaacaagatgtggaagaatcatatctctagcaggaatactactcccttgccccggccaccacccggacttaccaatccaaagccaagctcaccgtggagcagcaccgcaccgcgctcagtgcggggatggggcactcaggatagtcgactagcaagcgcctctacctggagtgatggcgggagtgtaagaccatcatactggctagtgctgcataacctcacaccgcagatagatggttcgacgctccgaaccatatgtatgcagcacggcccattactcaccttccacctcaaccttacccagggcaccgcgttgatccgatacagtacaaaacaagaggctgccaaggcacagactgccctgcacatgtgcgttcttggcaatactacgatcctggccgagttcgctacagatgacgaagtttctagatttctagcccaggcacagccacctacccctgcagccacccctagcgcccctgccgccgggtggcaatctctcgagactgggcagaaccaatcagatcctgtgggccccgcactcaacctgtttggaggctcaacaggactgggccagtggtctagcagcgctggcggttcatccggagctgacctggctggcgcctcgctgtggggaccccccaattattctagtagtctgtggggcgtgcctactgttgaagacccgcaccgtatggggtcacccgctccactgttgcccggcgacctgctaggcggcggcagcgactctatttag

SEQ ID NO: 17822 - DNA, 114 bp, synthetic construct
  misc_feature 1..114: note = Description of Artificial Sequence: Synthetic coding sequence
  source 1..114: mol_type = other DNA
atgcagacaaacgagggggaggtctctgaggagtcatcatccaaggtggagcaagaggatttcgttatggagggtcacggaaagactcctccaccgggcgaagagtctaagtag

SEQ ID NO: 17823 - DNA, 5502 bp, synthetic construct
  misc_feature 1..5502: note = Description of Artificial Sequence: Synthetic coding sequence
  source 1..5502: mol_type = other DNA
atgagagagaaggagcaagagcgagaggagcagctcatggaggataaaaaacgcaaaaaagaagacaagaaaaaaaaggaagcaactcagaaagtgactgagcagaaaactaaggttcccgaagtcaccaaacccagtctgagccaaccgacagccgcatcaccaatcggatcatctccgagtccgccagtgaatggcgggaacaacgccaaaagggtggccgtgcctaacgggcagcccccttcggccgcgaggtacatgccaagagaggtgcccccccgcttccggtgccaacaggatcataaagtgctcttgaagcgcgggcagccgcccccgcccagctgtatgttactgggggggggggccggtccgcctccttgtacggctcctggggctaatcccaataatgcacaggtgaccggtgccctgttgcaaagcgaatcaggaactgcccccgatagtacactgggaggagctgccgcgagcaattatgccaacagtacctggggcagtggagcttcgtccaacaatggcactagtccgaaccccatacacatttgggataaagtgatcgtggatggttctgatatggaggagtggccttgtatcgcgtcgaaggataccgagtcctccagtgagaacacaaccgataataattctgccagtaaccctggaagtgagaagtcaacactgccggggtccaccacctctaataagggaaaagggtctcagtgtcaatcagccagctcaggaaatgaatgcaaccttggcgtttggaagagcgaccccaaagccaagtccgtgcagagcagcaactccactacagagaacaataacgggttgggtaattggcggaatgtgtctgggcaggacagaattggccctggcagcggcttctccaatttcaaccctaattccaacccttcagcctggccagctctcgtgcaagagggcacgagcagaaaaggggctcttgagacagacaactcaaatagttccgctcaagtcagtaccgtggggcagacctctcgggagcagcagtcgaagatggagaatgcgggagtgaatttcgtggtgtcaggccgcgaacaggcacagatccacaataccgacgggcctaagaacggaaacaccaactccctgaacctcagttctcctaacccaatggagaacaagggcatgccctttggaatggggttgggtaacacatccagaagcaccgacgcaccatctcagtctacaggcgaccgaaagacaggctccgtaggaagctggggcgcggcgagagggccctccggaaccgataccgtgtccggacaatccaactccggcaataacgggaataacgggaaggagcgcgaagactcttggaagggcgcatctgtacaaaagtccacggggtccaaaaacgattcctgggacaacaacaaccgctctactggtggttcatggaattttggccctcaggacagtaatgacaacaaatggggggagggcaacaagatgacctcaggcgtgtcccagggtgaatggaaacagccgactggttctgatgaattgaagatcggggaatggagtggacctaatcaaccgaatagtagtactggagcatgggataaccagaagggccaccccctgccagaaaatcaaggcaacgcccaagcgccctgctggggcaggagcagtagctcaactggcagtgaggtaggggggcagtctaccggctctaaccacaaagccggctcctctgatagccacaactctgggaggagatcttatagacccactcaccccgactgccaggccgtcttacagactttgctgagccgcacggacctggatcctagagtcctgtctaacacaggctgggggcagactcaaataaagcaggacaccgtttgggacatcgaagaggtgcctcgccctgagggaaaaagcgataagggaactgagggttgggagtccgcggcaacccagactaaaaactcgggcggctggggtgacgccccatcccagtccaatcagatgaagtcaggctggggcgaattgtctgcctccactgagtggaaggatcccaaaaataccggcggatggaacgattacaaaaataataactcatctaattgggggggcggccggcctgatgaaaaaacgccttcctcatggaatgaaaatccgagcaaagaccagggttggggggggggccggcagccgaaccagggctggtctagcggtaagaacggctggggcgaagaagtagatcagacaaagaattcaaattgggagagctcagcctcaaaaccagtaagcgggtggggcgaaggcgggcagaacgagattggcacctggggaaacggcggcaacgctagcctcgcttctaaaggcgggtgggaggattgtaagaggagcccagcttggaacgaaactgggcgccagccaaacagttggaataaacagcaccagcagcagcagccacctcagcagcccccacccccacagccagaagcctccggatcttggggtggccctccacctccccctccaggtaacgttcgaccatctaactcttcttggtcctcaggcccacagcccgccaccccaaaagacgaggagccgagcggatgggaggaaccttcaccccagtcaatatcaagaaaaatggacatcgatgacggaacttcagcctggggcgatccaaattcctacaactacaaaaatgtaaacctgtgggacaaaaattcccaggggggcccagccccacgcgagcccaatctcccaacacctatgacgtcaaaatctgcatccgtctggtcgaagtctaccccacctgcaccagataatggaacctccgcctggggcgaacctaatgagtcatcacccggatggggcgagatggatgatacaggggcatcgaccacaggatgggggaatactcccgcgaacgctcctaacgccatgaagccaaatagtaagtccatgcaggacgggtggggggagagcgatggtcctgtgaccggggctcgccacccttcctgggaggaagaggaagatggcggcgtgtggaacaccaccgggagtcagggcagcgctagctcccataactctgcctcttggggtcaagggggcaaaaaacagatgaagtgtagcctgaaggggggcaataacgacagttggatgaaccctctggcgaaacagttcagcaacatgggattattatcccaaacagaggacaatccctctagcaaaatggatttgtcagtaggctccctgtctgataagaagttcgacgtcgataagagagccatgaatctgggagacttcaacgatatcatgcgcaaagacaggtctgggtttcgcccgccaaactcaaaggacatggggaccactgatagcgggccgtactttgagaaactgaccctgccattctcgaatcaggacgggtgtttgggtgatgaagccccctgttccccattcagccctagcccatcttacaaattgagccccagcgggagcaccctgcccaacgtgtccctgggcgcaatcggaacaggtctcaatcctcagaactttgccgctagacaaggtggctcccacggcctatttggaaattccaccgcccagtctcgcggcttacataccccagtgcagcctctgaactccagcccctctctcagggcacaggtccccccacagttcatttcgccacaggtctcagcctcaatgcttaaacagttccctaattccgggttgagccctggtctcttcaacgtaggccctcaactgtcgccacagcagatcgccatgctcagccagttgccccagattccacagtttcagctggcctgtcaactcctgctgcagcagcagcagcagcagcagctactgcaaaaccagcgaaagatttcccaggctgtgcggcagcagcaggagcaacagttggctcgcatggtttctgccctccagcagcaacagcagcaacagcaacggcaacctggcatgaaacacagcccttcgcaccccgtcggacctaagccccatctcgacaatatggtgccaaacgcgctgaacgtgggcctcccagatctgcagacgaaaggacccatcccaggctacggaagtggctttagctctggggggatggattacgggatggttggcggaaaagaagcaggaactgaaagccgattcaaacagtggacatcgatgatggaagggcttccctctgtggctacccaggaagccaacatgcacaaaaacggagctatcgtagcccctggaaaaacccgcgggggctccccctataatcagtttgatattattcccggagacaccttgggcggccatactggtcccgctggtgactcatggctcccagctaaaagcccaccgaccaacaaaattggcagcaaaagtagcaacgctagctggcctccggaattccaaccgggcgttccctggaagggaatccagaacatagaccctgaatccgacccatacgttacccctggctccgtgctcggcgggaccgccacttctccaattgtggacaccgaccatcagctgctgagagataacactactgggtcaaactcctctctaaatacatctttacctagtccgggcgcctggccttactccgcctctgacaattctttcacaaacgtccatagcaccagcgcaaaattccctgattacaagtcaacatggtcacctgatcccatcggccacaatccgacacacctttcaaataaaatgtggaaaaaccacatttcttcacggaatacgacccctttgcctagaccaccacccggtttgacaaacccaaagcccagtagtccgtggtcaagtactgccccacgctccgtgagaggatggggtactcaagattcaaggttagcgagcgctagcacctggagcgatggaggatctgtgcggccaagctattggcttgttctccataaccttacccctcagatcgatgggtcaaccctgaggaccatctgcatgcagcacggccctttactcaccttccacctgaacctcacacaggggaccgctctaatccgctacagcactaaacaggaggccgccaaggcccagacggccctccacatgtgcgtcctgggtaatacaactatcctggccgagtttgcaacggacgatgaggtgtcaagatttcttgcgcaagctcagcccccaacccccgcggcaaccccctcagctcctgccgctggatggcagagcctggaaacaggtcagaatcaatccgaccctgtgggtcctgccttgaacttgtttggcggctcgaccgggctgggccagtggtcttcaagtgctggaggcagcagcggcgcggatctggccggagcctcactgtggggcccccctaactacagctcttctttatggggggttcccaccgttgaagatccgcacaggatgggaagccctgcaccactccttccaggggatttgctcggcggtggctcggactcgatctag

SEQ ID NO: 17824 - DNA, 3153 bp, synthetic construct
  misc_feature 1..3153: note = Description of Artificial Sequence: Synthetic coding sequence
  source 1..3153: mol_type = other DNA
atggaagtcgcagtcgagaaggccgttgcagccgccgccgccgcgtctgctgcggctagcggaggtccaagtgcagcaccatctggggagaacgaggccgaatcccggcaaggaccagactccgagcgaggtggagaggcggccagactgaatctattagacacgtgcgccgtatgtcaccagaacatccagtccagggcccccaagttactgccctgtttacactcattctgtcagagatgtctcccggccccacagcggtacttgatgttgcctgcccctatgctcggatcagctgaaacacccccccccgtgcccgcacctgggagccctgtatctggtagtagcccattcgcaactcaagtgggagtgatcaggtgcccagtttgctcgcaggaatgtgctgagcgccacattattgacaactttttcgtaaaagacactacagaggtgccctcctccacggtggaaaagagtaatcaggtgtgtacgtcgtgtgaggataacgccgaagccaatggcttctgcgtggagtgtgtagagtggctgtgtaagacttgcattcgcgctcatcagcgggtgaaattcactaaagatcacacagtgcgccagaaagaggaagtgagccctgaggccgttggtgtaacaagtcaacggcctgtgttctgtccattccacaaaaaggagcaactgaagctgtactgcgagacatgcgataagctgacttgtagagactgccagctgttggaacataaggaacatagataccaattcatcgaagaggcctttcaaaaccaaaaggtcattatcgatacgctcatcacaaagcttatggagaagactaagtacattaaatttaccggcaaccagatccaaaacaggattattgaagtcaaccagaatcagaagcaggtcgaacaggacataaaagttgcaatttttaccttgatggtggaaattaataaaaagggtaaggccctgttacaccagctagagagtctggccaaggaccatcgaatgaagctgatgcagcagcagcaggaggtggcggggctcagtaaacagctggaacacgtaatgcacttttctaaatgggctgtcagcagcggaagcagcacagctctgctgtactccaaaagactgatcacgtaccgcctgaggcaccttctgagagcaaggtgcgatgccagccctgtaaccaacaacaccatccaatttcactgtgatccatcattttgggctcagaatattataaatcttggaagtttagtcatcgaggataaagagtcccagcctcaaatgcccaagcagaacccagttgttgagcagaacagccagccgccatcaggactgtccagtaatcagctgagtaaattcccgacacagatttctctggctcagctccgcctgcagcacatgcagcagcaagtcatggcacagcgccagcaggtgcagagacgccctgctcctgtgggactgcccaatcccaggatgcaggggcctattcaacaaccatctatttcccatcaacagccccctccccggctgatcaattttcaaaatcattctccgaagccgaacggaccagtgctgcctccgcaccctcaacagctgcgctaccctccaaaccaaaatatccccagacaggcaattaagcctaacccactgcagatggcgtttctggcacaacaggctatcaagcaatggcagatctcttcaggccagggaaccccttcaacaaccaatagtacttcttccacccccagttctcccactattacatccgcagctgggtacgatggaaaagcctttggaagtcccatgatcgatcttagcagcccagttggaggttcctacaatcttcctagcttgcccgacatcgactgttcatccactatcatgttagacaatatagtccggaaggataccaacattgaccacggccaaccccgacccccatcaaatcggacagtgcagtcacctaactcttctgtgcctagccctgggttggctggaccagtgactatgacttccgtacatccaccgatcaggtccccttctgcctctagtgtggggagccgtggatcgagcggaagcagcagcaagcctgccggggccgactcaactcacaaagtccctgtagtgatgctcgagccaattcggattaagcaagaaaattcaggcccccctgaaaattatgatttcccagtcgtaatagtgaagcaagagtcagatgaggagtctagaccccaaaacgctaactaccctagatccattcttacttcactgctactcaatagttcccagtcgtccacctcagaagaaacggttttgaggtctgacgccccagattctaccggagaccagccaggacttcatcaggacaacagttccaatggaaagagtgaatggctcgatccaagccagaagtccccacttcacgtgggtgagaccagaaaggaagacgatccgaatgaggattggtgtgccgtgtgtcagaacggtggcgaattactgtgctgcgagaaatgtccaaaagtgttccacctcagctgtcatgtgcctaccctcactaattttccctccggtgagtggatctgcaccttttgccgggatctgagtaaacccgaagtggaatacgactgcgacgcaccaagccataatagcgagaagaaaaagactgaaggtcttgtaaagctgactcctatagacaagcgcaaatgtgaacgcttgctgctgttcctctactgtcacgagatgtccctggccttccaggatcctgtgccacttactgtacccgactattataaaataattaagaaccctatggatttgtcaacaattaagaaacgacttcaggaagactattccatgtactctaaaccggaggattttgtggcagacttccgactgatttttcaaaattgcgctgagttcaacgagccagatagtgaagtagccaatgcaggaatcaaactcgaaaactactttgaggaattgctcaagaacctttacccagagaagcgattccccaaaccagagttcagaaacgaatcagaagataataaattttccgacgattcagacgatgacttcgtgcagccacgaaagaagaggctcaaaagcatcgaggaacggcaactacttaagtag

SEQ ID NO: 17825 - DNA, 1650 bp, synthetic construct
  misc_feature 1..1650: note = Description of Artificial Sequence: Synthetic coding sequence
  source 1..1650: mol_type = other DNA
atggaaggaccacgatccgctgcctgcagggcgaggcccgcaacgtcaccgggggcagtcgatcttacagctccgccacctcccccacttttacggattctgaattctagggccgctccagcaacccgaaccttcgctgatctctgtagaagtctactgcagcccgagtctcgggtactctgcagactccagcccgtaaattgctatccccccgcggcttccactaagctctgccctgtgggagtgattcggtgtccagtctgtagtcaggaatgtgcggagcgacatattatagacaactttttcgtgaaggatacaactgaggtgccaagctccaccgtggaaaagagcaaccaggtgtgtaccagttgtgaggacaacgctgaggccaacggcttctgtgtcgaatgcgtggagtggctgtgcaagacatgtatccgtgcccatcaacgcgtgaagttcaccaaagatcacactgtgcggcagaaggaggaggtttctccagaagctgtgggcgtgactagccaacggcctgttttttgccccttccacaaaaaggaacagctcaagctgtactgcgaaacatgtgacaaactaacatgccgggactgccagctcctggaacataaagagcataggtatcagtttattgaagaagccttccagaatcagaaagtgattatcgatactctcataaccaagctgatggagaagacaaagtacattaagttcacaggtaatcagattcagaataggatcattgaagtgaaccaaaaccagaaacaggtggaacaagacatcaaagtggccatctttacactgatggtggaaatcaacaaaaaaggcaaggcactcttacaccagctggaatcgctggcaaaagatcatcggatgaaacttatgcagcagcagcaggaagtggcgggactgagcaagcagctggaacatgtgatgcatttctctaagtgggccgtaagcagtgggtcctccaccgccctactctattctaaaaggttgatcacctacaggctcaggcacctgcttcgcgcgaggtgcgatgctagtcccgtaaccaataacacaatccagtttcattgcgacccaagtttctgggcacagaacatcatcaacctcgggagcctggtaatcgaagataaggagtcacagccccagatgccgaagcagaaccccgtggtagaacagaatagccaacctccctctggcctaagcagtaaccagctgagcaaattccctactcagatcagtctggcccagctcaggctgcagcacatgcagcagcagcagccaccacctcggctgattaattttcaaaatcatagcccgaaacccaacggaccagtcttgccaccccacccccagcagctccgatacccgcctaaccaaaacattccaagacaggcaataaagccgaacccgttgcagatggccttcctggcgcaacaggctattaagcagtggcagatttcctccggtcagggaacccccagtacaacccagaacataaacaccgccgcctgcacagtcttcgacgtccgggtactacatcacatcccctattgggctctgaacatcagctcctctgaaagggatagtttcttatggttttcatctgtgtacaatctggagtag

SEQ ID NO: 17826 - DNA, 3051 bp, synthetic construct
  misc_feature 1..3051: note = Description of Artificial Sequence: Synthetic coding sequence
  source 1..3051: mol_type = other DNA
atggaggtcgccgtggaaaaagctgtggccgccgccgcggccgcctcagccgctgcctcaggaggaccatcagccgccccgtcaggcgaaaacgaagctgaatcacgccaggggcccgacagcgaacggggaggagaggctgcccgtctcaacctactggacacctgcgccgtgtgccatcagaacattcagtcaagagccccaaaactgttaccctgtctacactcgttctgccagcggtgtcttcccgcgcctcagaggtacttgatgctcccagctccaatgctcgggtccgcagaaacccccccaccagtgcctgcacctgggagtcctgtcagcggctcctcaccgttcgccactcaggtgggcgtgattagatgtccagtatgtagccaggaatgcgcagagcggcacattatcgacaatttcttcgtgaaggataccaccgaggttccgagttcaacagtagagaaaagtaatcaagtgtgtacttcgtgcgaggacaacgcggaagccaatggcttctgcgttgagtgtgtcgagtggctgtgcaaaacatgtatccgagcgcatcagcgagttaaattcacaaaagatcacactgtacgccagaaggaggaggtcagccctgaagctgtgggagttacatcccagcgaccagtcttctgccctttccacaagaaagagcaactgaagctgtactgcgaaacgtgtgataaactgacctgtagagactgccagttgctggaacacaaggagcacaggtatcagttcatagaagaggcgtttcagaatcagaaggtgatcatagacacccttataacgaaactaatggagaagactaaatacatcaagttcaccggcaatcagattcaaaaccgtatcatcgaagtcaatcagaaccaaaagcaggtcgagcaggacataaaggtcgccatctttacgctgatggtggaaatcaacaaaaagggtaaagctcttttgcatcagctggaatctctggctaaggatcaccggatgaagcttatgcaacaacagcaggaagtggcaggactttccaaacagctcgaacatgtgatgcactttagcaaatgggctgtgagcagcggttcaagtactgctctcctgtattccaaacggttgattacgtacagactgaggcacctgctgcgggctcgctgtgacgcttcaccggttactaacaatacaatccagttccactgtgatcccagtttctgggcccaaaacattataaatctgggaagtcttgttatcgaggacaaggaatcacagccacagatgcccaagcaaaaccctgttgtcgaacaaaatagccagcctccctcaggcctgagttccaaccagctgtccaaattccccacacaaatctctctggcacagctgcgattgcagcacatgcagcagcagcaaccgcccccccgccttatcaactttcaaaaccactcccccaaacccaacggccctgtcctacccccacatccacaacagcttaggtacccacccaaccagaacatcccccgacaggccatcaagccaaatcccctccagatggcctttctagctcaacaggccatcaagcaatggcagatctcctccggccagggaacaccctccacaacaaactccacctcgagcaccccctccagtcccaccataacatcagctgcagggtatgatggaaaggccttcggatcccctatgattgacctcagttctcctgttgggggttcatacaacctgccaagtctgccagatatagattgcagttccactataatgctcgataacattgttaggaaagatactaacattgatcacggtcagccaagaccaccttcgaatcgcaccgttcaaagcccaaattcttccgtgccgagccctggtctggcgggacccgttacaatgacatctgtgcatcctcccatcagatctcctagcgcttcgtctgtgggttcccgcggttcaagcggatctagctccaagccagcgggggccgactcaacccataaagtgcccgttgtcatgcttgagcctattaggatcaaacaggaaaactcaggcccccccgagaactatgattttcctgtcgtgattgtaaagcaggagagcgatgaagagtcacggccccaaaacgctaactatcctcgcagtatactgacgagcttgctgctgaactcgtcacagtcctcaactagcgaggaaacagtcctgagaagcgacgccccagactcaacaggggatcagcctgggctgcaccaggataatagcagtaatgggaaatctgaatggctcgatcctagccagaaatctccccttcatgttggggaaacccggaaggaggacgaccctaacgaggattggtgtgcagtgtgccagaatggcggtgaactgctgtgttgtgagaaatgtccgaaggtgttccacttatcgtgccacgtgcctactctgacgaattttccatctggagaatggatctgtactttttgtagagatctgtcaaaaccggaggtcgagtacgattgtgatgccccttcccacaacagcgaaaagaagaaaacggaaggtctcgtaaaactgaccccgattgacaagaggaaatgtgaacgtttactattattcttgtactgccacgagatgtccctggcgtttcaggaccctgtaccattgaccgtgccagactattataagattataaaaaaccccatggatctgtcaactattaagaaacggctccaggaggactattctatgtatagcaagccagaggatttcgtggcagacttccgcttgatttttcagaactgtgcagaatttaatgagccagacagcgaagttgccaacgccggtatcaagctggagaactactttgaggagctccttaagaacctttacccagagaagcgctttcctaaacccgagtttcgtaacgaaagcgaggacaataaattcagcgatgattcagacgatgattttgtccaaccgcggaaaaagcggctgaaatcaatcgaagagcggcaattacttaaatag

SEQ ID NO: 17827 - DNA, 2886 bp, synthetic construct
  misc_feature 1..2886: note = Description of Artificial Sequence: Synthetic coding sequence
  source 1..2886: mol_type = other DNA
atgctaccagcccccatgctggggagtgccgagacccccccaccagtgcctgcccctggctctccagtctcgggctctagtcccttcgccacccaggtgggcgtgatcagatgcccagtgtgcagccaagagtgtgccgaacgccacatcatcgataatttcttcgtgaaagatacaaccgaagtcccatctagtaccgtcgagaagagtaatcaggtatgcacctcctgcgaagataacgccgaagcaaatgggttctgcgtggagtgtgtggaatggctctgtaagacctgtataagggcgcaccaacgagtgaagttcactaaagaccataccgtcagacagaaagaagaggttagtccagaagcagtgggagtgacgagccagagacctgtgttttgccccttccacaagaaagagcaactaaaactgtattgtgagacctgtgacaaattaacctgccgagactgtcaactgctagaacataaagaacatcgctatcaatttatagaggaggcgttccagaaccagaaagtgattatcgacaccttgattacgaagttgatggaaaagaccaagtacattaaatttactgggaaccagattcagaatcggattattgaggtcaaccaaaaccagaagcaggttgagcaggatatcaaagtggcaatctttactctcatggtcgaaataaacaaaaagggcaaggcgttactgcatcaactagagagccttgcaaaagaccaccgaatgaagctgatgcaacagcagcaggaggtggctggccttagtaagcagttagaacatgtgatgcacttcagcaagtgggcggtcagctctggttctagtacagccctgctgtattcaaagcgtttaatcacgtacagacttaggcacctactgagggcccgatgcgatgcctctccagttaccaacaacactatccagtttcactgtgaccctagcttctgggcccagaatatcatcaatcttggatccctagtgattgaggacaaggagtcacaaccccaaatgccaaagcagaaccctgtggtggagcagaattcacagccaccttccggccttagctccaaccaattgtcaaaatttccaacccagatttcgcttgcccaattgaggctacagcatatgcagcaacaggttatggctcaacgccagcaggtccaacggcgaccagctcccgtgggactgcccaatccgaggatgcagggaccaatccaacaaccttccatatcacatcagcagcctccaccgcggttgatcaatttccaaaatcattcaccaaaacctaatggacctgtgttgccccctcacccacagcagcttcgatacccccctaaccagaatatcccacggcaggcgataaaacccaatcccctgcagatggccttcctggcacagcaagccatcaaacagtggcagatctcttccgggcaggggactccttctactaccaactctactagctcgacacccagttctcccaccatcaccagtgccgctggatacgatgggaaggcttttggctctccaatgattgatctgtcttcacctgtgggtggttcttacaatctcccatccctgcccgacatcgattgttcttcaaccattatgttggacaatattgtgcgtaaggacactaatatcgatcacggccagcctaggcctccctccaacaggacagttcagagtccaaactcttcagtgccctcccccggtctggctggcccagtcaccatgactagcgtgcatccacccatccggagcccgagcgcttcatccgttgggtcccgtggatcgagcgggtcatcctcgaaacctgccggggccgactctacgcacaaggtgcctgtggtaatgctggagcccattcgaataaaacaggaaaatagcggacctccggaaaattacgatttccccgttgtcatcgtgaaacaggagtctgacgaggagtccagaccccagaacgctaattatccccgctcgatccttacctcacttctcctgaactctagccaaagtagtaccagcgaggaaacagtgctgcggagcgatgcacccgattctacaggggatcagcccggattgcaccaggataactcgagcaatggtaaatccgaatggcttgacccatcccagaagtcacctctccacgtaggagagactcgtaaggaggatgacccaaacgaggactggtgcgctgtctgccagaatggtggtgagttgctgtgctgcgagaagtgtccgaaggttttccatcttagctgccatgtgcccaccctgactaattttccctcaggtgaatggatctgcactttttgcagagacctgagcaaacccgaagttgaatatgattgcgatgccccatcgcacaactccgaaaaaaagaagaccgaggggcttgtaaagctgacacccatcgataagcgcaagtgtgaacgtctgcttttattcctatactgccacgaaatgagccttgcatttcaggaccctgtgccattgacagtgccggactattacaaaatcattaaaaaccccatggatcttagcaccattaagaagcgattgcaggaagactactctatgtactcgaaacctgaggactttgtggcagacttcaggctaatctttcagaactgcgccgaattcaacgagccagactccgaagttgctaacgcgggcatcaagctcgagaattattttgaagagttgttgaaaaatctttatcccgaaaagcggtttcctaagccagaattccgtaatgaatcggaagacaataagttttctgacgacagcgacgacgattttgtgcagcctaggaagaaacgtttgaagagtatcgaagagaggcagctcctgaaatag

SEQ ID NO: 17828 - DNA, 1692 bp, synthetic construct
  misc_feature 1..1692: note = Description of Artificial Sequence: Synthetic coding sequence
  source 1..1692: mol_type = other DNA
atgggcctccaggcatgcctgctgggactcttcgcgctgattctgagtggcaagtgttcctattcaccggaacccgatcagcggcggacattaccgccaggctgggtgtcactcggaagagctgatccagaagaagaactctcactgacgtttgcgcttcgacaacagaacgttgagaggctttccgaactcgtccaagcagtttccgacccaagcagtcctcagtatgggaaatacctgaccctagaaaacgtggccgacctggtgcggccaagcccactgacactgcataccgtgcagaagtggctcctagccgctggtgcgcagaaatgtcattcagtgataacccaggattttctgacatgctggctgtccatccgccaggctgagcttctgctgccgggtgccgaattccatcactatgtcggcgggcccacggagactcatgtggttagatctcctcatccttaccaactgccccaggctctggcccctcacgtcgattttgtagggggcctgcacaggtttccccctaccagctccctcaggcagagacccgagcctcaagtcaccgggactgtgggactgcacctgggggtcactccttctgtaatcaggaaacgttacaacttaacctcacaagacgtggggtcaggaacaagcaacaatagtcaggcttgcgcccaatttctcgagcaatacttccacgatagcgacctagcccagtttatgagattgttcggcgggaactttgcgcatcaagcttcggtggcacgggttgttggtcagcagggtcgtggtagggccggcattgaggcctccctggacgtgcaatacctcatgagcgcaggcgcaaatatcagcacgtgggtatattcaagccccggacgacatgaaggacaggagccatttctccaatggctaatgctattgagcaacgagtccgccctgccccacgtccacaccgtcagttatggggacgatgaggactcactgagttccgcatatatacagagagtaaatactgagctcatgaaagcagcggccaggggccttactctgctctttgcgagcggagattcgggcgccggttgttggtccgttagcggacggcatcagttccgtccaactttcccagctagcagcccttatgtcacaacagtcggtgggacctctttccaggagccctttcttatcaccaacgaaattgtggattacatttctggcggaggcttttcaaatgtctttccacgcccatcttaccaggaagaagctgtgactaaatttctgagcagctcccctcacctcccaccttcaagttactttaatgcaagtggaagagcttaccctgatgtggccgccctctccgacggttattgggtggttagtaaccgggtgcctattccatgggtcagcgggacatccgccagcacccctgttttcgggggaattctgtccttgatcaatgagcaccggatactttcagggcgtcctccgctcggcttcctcaaccctaggctgtaccagcagcatggggctggtctcttcgacgtgacgagaggctgtcatgagtcctgtctcgatgaggaggttgagggtcaaggcttctgttcaggaccaggatgggatccagtcactggttgggggactcccaacttccctgcccttttgaaaacactgctcaacccttag
